United States Patent Application Publication US 2007/0067865 A1 - sequence listing, part 58

SEQ ID NO: 374562 - DNA, 334 bp, Zea mays
gggaaacagaatgtatgaaaaaaaatgaccaataacagagttctttttttgtgttttccaccaggaccttcacttcagtaattccagatgaaaatcggaacttaaccaacttatacatgatgagaggagtcactaattcacactaccttatcacgcagcaggttaaaagcaggcatcatccgtgctggagggcagccttgtcttggcccttttggcatccgggccagatgcagccatggggctcgcctccaattggcactcgctgtacgatgagcgcggaggagtaccctgcggctgttcaccgggggctgccgccttgccattgttattacag

SEQ ID NO: 374563 - DNA, 183 bp, Zea mays
acatgcaaatatgcaattgagtcattatttagttgcaagatcccacatttgtctatacataacatgcggagtgttcttaagcatatactgatggtttaaagacacactagtggtagtgtcctctgcgtctactacatatgcagatgccctatccacacatgagagatcctagttttacagaga

SEQ ID NO: 374564 - DNA, 229 bp, Zea mays
ggggaaattcccaaaaaacccccaaagccgggaatccagttttaaaaaacccccaaaaaaacagggttgaaaattttgtttttttaacagggttggaaacccgggaaccaaaccttaaacgggaaaaccaaaaaagcttaaaaggggcttcaccagctagggtcatgcataggggggggccacaaaaagatttgcttacaggaacttattaacaaaccccccggggggg

SEQ ID NO: 374565 - DNA, 357 bp, Zea mays
gatggcatcgcaacaatccaaaggttaatttcactcaaatattacaatgtcgctattcagaacgctgatgctaaaaccacggacaatagataaggcatccgtcaagaatacaatgaagttaagtagagttataatccaaaaaactaacacatatgttccatgtgctatgaatttttgtgcatagggatatcaaatttactatggctcttatcttcttgcttaaattttagatcacttacacaatcatctgatgtgctgttgttgatgtaatctatctcgtgctctgaccgaccaaaatcatggtcacgtctttggttgtacgtgacttcgttaacgattgacttattgcaagatgat

SEQ ID NO: 374566 - DNA, 109 bp, Zea mays
gttcactacccatgtcttgtttcaggggctgtatcagagactgtacattattctaacgggcctctggtatttccattgcaatataaacgtctatatattcccatataag

SEQ ID NO: 374567 - DNA, 448 bp, Zea mays
ggcagagagtagttcttagttcagaagtggaataatattctgttacaagttattcctctcaactcctctctcatctacttaagcctcacgcaatacttccatgaagttgatccacgtcggcccagtcaccatcttgttgctgcgcctgggcctggtcgaccgccgcggcccatcgggtccaccatctggtcccgactgctcccgctccttgctttgttcctccagtacctcgcctgtgtcactgacattcccccctggtaagctggctgtttgcccccaaacaggcgcatatggaaattgttgtcgtagatcttgaatatcttcccacgtcgcgagttctggtgacatatgagaccattggaccaggacctgtgcacatgcttgcagccctttcatcactgtgcggtgttgcagaatcttgaatggcacactaaaatgaaattggtca

SEQ ID NO: 374568 - DNA, 270 bp, Zea mays
ggggccccggaaaatggttgcccgatgttttcgggagggaaccccaaacttcttaaaaaacaacaaaacaaaccccggacccgggggggcacaaaaacaaaagggggttccaagtgttctaaaaattcgggcccacaaagcagcaaaaaaaatcccggaaaggaaaaccccaagtttatcctacccacaaaacaaaatcctgggcgaaaaaaatttttgcgtaaaacacttggggtaaaaaaggaaaatttatttttttgaaccccccca

SEQ ID NO: 374569 - DNA, 240 bp, Zea mays
aagggctactacgaattaagcagctcaaactaataaggggaaatcaactgcaagcactactagttcatcatgcatcattgggaaatcataaccataatacgagaaacgaagcaactcgttacatgcatgaggaagatagtagtaatactaagactgtcaacgaaaaccatcatcgcgagctcagatctttcttccacacgcagccctcactagttcagtcagcaccaaggggcaccttgc

SEQ ID NO: 374570 - DNA, 258 bp, Zea mays
atgaaagatctatatgcccccaacatgtagaatacaagacaacaagtacttcaagaaaatgggaaggaagtgcttttgccttctgaaaggaaactatcacgtatgccggatggctggctgacatcacaaaacttgagacattgttaaaactatatatgtggatggggtcggactctggccattgatgtctcacggcagttcctcgtgatgccaatgagttgaagagctttaaacagcaagggcggagaaactaaaatg

SEQ ID NO: 374571 - DNA, 404 bp, Zea mays
atacaatagctgtatacagacagcctagcaggcattatctatgtatgttgtacaacgcatatcagcagataagcctttagctttttgtgtttgtctttctagacaacgacgacacagatttcgcccttcggcccaagcagctccgagcctccgacctgtttgtttcctttcttcctttcaggattatataatccagcttatatattatgggagtgtttgtttatgattataatttggtcagattatagaatccaacatattttaaactaacacttagttaaaaatatgttagattatataatctaaccagattataatcccaaacaaacaccccctatataagcatccaatgacctgcttataagttatcagaatctaagtatctaaattatataatccaccta

SEQ ID NO: 374572 - DNA, 430 bp, Zea mays
ggagccggaaccggcctgcgcgtccacgccatgtacggggtcaccgtcgtcgcggacttcagcgtcgccgactgcgccgacgcctcctacgacctcgtcgtcctccccggcggcgtccccggcgcggacaacctgggcggctgcgcggcgctggagagcatcgtgaggcgccacgcgctcgggggcgggctctgcgccgccatctgcgccgcgccgccgctggcgctggcgcgctggggcctgctcgacggcgtcaaggcaacggctcacccggggttcgtggacaagttcccggcagaggtggccgccgtggacgcgaacgtggtggtcgacggcagggtcgtgacgggggcgtggccccgcggcggccatggagttcgctctcgctctcgtggaccagctctacggcaagggcaaggtcgacgagatc

SEQ ID NO: 374573 - DNA, 267 bp, Zea mays
ggggatccaaagaattcaacactaatggaatggccataatgaccccaaaaccacattgctcgggcgcttatgttggaatttgcaacaatgaggtcatttttatttacctcttgctccaatatagcaagaaccattggcttttccagcatgggtccctacgttgggcaatgcattttaaagttccttttttccaaaagagggtccattagaggtacctccccttttccaaaagagggtccataagggtcacttgttttgatggggttg

SEQ ID NO: 374574 - DNA, 386 bp, Zea mays
gcttccatcggccggaatgccgttttgttagtattgattgaactaaagaaagaaccaagtaaccaacgcaatacaacggcaaagctacgagcagctcctacacggctacactcacctggtcacagcataggtatagctctcaagagtcagaaccctctcttcttcttcttcttctttacaccattccgtcatatgctcggctgcttccctagagctccgtcgccatgcatatatttcgcgacgagccggagactcctacagggccaggctacgtccgaccgttctgtctactaccacccttccaccttttgagacgtttcagctccaccaccacgacgctgatgttgtcagtgctgccccgcgacatggcgaactccaccagcacc

SEQ ID NO: 374575 - DNA, 245 bp, Zea mays
ggggggacctggccctttggtaccttttgggaaaccctttggcccttcttggaaaaaaggagggtttcaagaaccataatttaaccctggttggatattcacgggcttttttacccccttttttaaaaaaccctttattgttcccgggccaaaacttggggctggggccaatttccggttcttcgggcccgcttttaattcttggccatgccggccctggccccctccaagaaccccaatttttt

SEQ ID NO: 374576 - DNA, 333 bp, Zea mays
ggctaaattgaaacttcattcactaatttaccttacatcacataattaacattttaaacctaacaatagcaccccaacgcgactattccaaagtcatgaaaacaatcacatcgtattcatcgaactaattcaataatactagacgcatccattgatcaattcaataattaagctaacagaaatatgaattggtttacccactaaatttgatgcgctatccgcgaacacggcaaggattccagttcggcccttgcgtcgagcacttggtaaatatcacgctgctagcttcgtcttcagccaacttttaggatttattgatgacgtacgaaacga

SEQ ID NO: 374577 - DNA, 271 bp, Zea mays
caacaaaaacaggaactgctccgacggaaattttattccattgccattacccgttggaaccggggtgcaagaaacgaagtgggattgccagatgcccacggccgtttccgccggtggggaaaacaggcagattcgtatgtccctttaatacgaagggcccgagcaaacattttttttcactccacccagttattttttcgttaacgtacgtacccaggtcgcctatatattttttacacccgttgcctgaaaacggggcacgagccatggc

SEQ ID NO: 374578 - DNA, 373 bp, Zea mays
ggggcacaataaatcccaggattgaattccaccagaaacacggaacatccacaggcagaatacacacacaccgtctgatcccgtcaacattgacagagagaaataaaaaactagggcgacatattatgctctgacaaagctagaatagcacgatagcattccaggctcaatccagttccagctttttttttttttccctcgcatagaaagctagtagtttcacttgtcgccgtgtcgaatccgtcggtcggccccttttacttttagaagcaggcgtccaggaggcagcagcagcagagggcagccaagctgttcaaaatcacaaatggggcgtgaaccattgttaagataaaaaaaggtccaaccaaagaaa

SEQ ID NO: 374579 - DNA, 295 bp, Zea mays
gtcttcttaaatatgtccgtccatgatgaacaaacatatgaacatgaataattacacatccttgtagtgattacccccaaatggaaaacaaaggataccccacactacaaatgtgcacgctggtcatcgagacgacgacggttcaaagaataacaaattaatgtccttgcatgccaagggtttgtctgattcgacttggtaactttaaactccgtgcgggtacactgaagtatcacggcaacttaattaaagtgaccagcactaagcaagcaagggagcgaggagggagcgcttt

SEQ ID NO: 374580 - DNA, 149 bp, Zea mays
aaaggggatggttgtaaccttatatgattttcatctcgtgcaaaatatattggtacaggcaaaataacattttgctgatttcctccgatcttgctcatgaggtgtcctgacatactaaaatgtggtctgccagcatcaaaggaacctga

SEQ ID NO: 374581 - DNA, 269 bp, Zea mays
aaagttcggaaagaaattcttaattggggattttttttcgggggagacaaaaatttgttcctcggtctgcctgattaaaaaccttacacctaattacagggccccctttgtaaggaaaagagtacagtccggcaatgtccaaataaaggttaaattttacaaccaaataaagttcatagtaccaaattcaatttggcgcaacaactaaacacttttggctaatcaatgtccaaatttgcaacaacaaattcaatctcagtatcctaaag

SEQ ID NO: 374582 - DNA, 315 bp, Zea mays
tcttttttttttttttttttttttttcgaccaaacagtgggtgcgtttactagtattgcacaaataaattattgagcgtaatacatgtaccggtccattaattggaggtccatacctatgacgtttgctcaaatcggacatacataatgtcagcaccaaagctatcggaagcaccaaaaagatcggttagatttcctatgaagaatgaagcgcttggggttcttccacagcttagcgctttgtactgcctggacgagcggggccaaaatagttggtaaccagacccataacagcaaacatgaaggccatagaaag

SEQ ID NO: 374583 - DNA, 331 bp, Zea mays
acacctgaacatgtattagggggtcgcttttgatgaatatatcacctgaaactattattttacatttctggcctgtttactgattcgcttaacgaaacagaaaaaccaacagaagtaccgaagacagcaaacagctgagagatctcgaatagcagctaccaagtgatactgaagacgagttaaatgcaacgtattggtttgaacctcctgcgtgcatgattccaaaaccaccctgggcatactggtgccatgactccgatgctttcctggagatggtgctgttcgaatcgtcgaagccgacggtccagaggaagtagccgagcaactgaga

SEQ ID NO: 374584 - DNA, 313 bp, Zea mays
tcttttttatttttttttttttagtactttcaaaagagaggacagattcattagatatagagacaggtacaattgtcatgaattagattattcacttgacatgaatgaagctagaaatagctaaggcagcaaatatctgatgatgagagcaacactgtggggcatttgccttcaacacgatttcatgctagctgctatgctaggcacgatctcgtcttctgtttctagctccatcactcgtcttctgtttgtagcaaactcagccctgagatgttcagtgtagagcgtcagcgacttgtggaattctgcaaag

SEQ ID NO: 374585 - DNA, 234 bp, Zea mays
aagacccacattttttatgggttttttttaccgccacaaactggtttatttttttcacaaaaatcaaaacgcacacttcatctacatgaaaccggaaaacgaaaaaaaaagaagaagaaaaacagggagagcaaaaccttcctgcaagagcaactttcccaagcaagcccctactatactaggactaactaatagcttgagacaagaagaacgatggagctgccaccttttggg

SEQ ID NO: 374586 - DNA, 214 bp, Zea mays
aaattagtggtcttttttatttgattttgtgtcagaaaaaaagggatgcatttaatttattaactttacaagaatgaatcacaaaatttcagctgcctaaaaagcattttggttatagtatcacaactaaaacaaagcctataccatcacaaaaaaccagatcttcacgggggggcttccagcagttaacaatgtacttgccatgttaacattt

SEQ ID NO: 374587 - DNA, 176 bp, Zea mays
aaaaaatgacctgtatactatttttagcaggtgtactggttcttatactcatatttacttggcgaacagcccaaacttcaatgcaaaatggtgtgggagaatttaattttgagtatgggttaactacggtcatacgagatggggcaaagaggggcttataggggggcaggaaggat

SEQ ID NO: 374588 - DNA, 280 bp, Zea mays
ctacccaaaccggtaataataaataggggtcatggaaccacatccatgatcatcatcattgcttgcaccattagcagcagcagcagcaatggattgcataacaccaccagatacatgattacatgtccttccacacaaggccgtagttccaggtgtcctgtctaatgccaccacctggtacaggatgacatttcaccaatggatcacggggccgggggctgaataacggatgctttctcggaaaccggacaaggaacctccaactgctgctgcggggctc

SEQ ID NO: 374589 - DNA, 404 bp, Zea mays
ggagggaaaacagcaaacactatgtaaaaaaaccaaacaggacttccagtcgcaacaaacaaccgttattcatatgtgctattgcaatattaggcttgccaagcctaagccccaactgtcactggcgttttgttctctccagacctccagatcgccagttgcaggtttccccaggctgccacattgccacactacgctttaattctgtaaatgtcatcctctgatcagagcacaccaaacagggcatacatacccaacccagcatcagttttgctaaatcttaggcccgactctgagtctctgtctcgtgttttgtttgtacttacttccaggtttgctagtccatcaggccaccagattgctcttccattttccagcggatgatcacaagttggctccttaca

SEQ ID NO: 374590 - DNA, 347 bp, Zea mays
ttcctttcttttttttattttctttgtttttttttttttttgggggtccaaagtatattatgatttaaaggaggagcattcattgaaagaaagttcattcaacgctgtcgccccattggcaccagcctaaactaaattgaccactgcacaatagaccaatataaatttacaagactagaattatttaaccactttcatcttagcatacaaaggagaattatactccgatcaaactatcactcgtctagttcccaaggaaggggcccactttggaattcaaagacctcgacaaaaacttcatgcaaataggaggtttcacattggctagagaaagaacagcctggggc

SEQ ID NO: 374591 - DNA, 400 bp, Zea mays
acaaataaaaagatagggggttctgtattacattaaagctttcttctaacatgtttaaatatggccgagctataaatatgtcgtggttgctaactctttaacatttcacagaactattagaccatatactgatagtctgacaactatatatatacacctagggccggttcttgagaacctgggggaccagggcgatcgcctgggccgacactgacagacaagttgaattcagttctctaactagctgaatacttaagatcttgtttcattgtatccctatcctggctgttgctgaactagctatttatctggatcgattcctctcacttgaaaaggcgaaagatgacttgggccctttatttgatgagagatccttttttgaaaactcatttgtatttac

SEQ ID NO: 374592 - DNA, 510 bp, Zea mays
agcaaagaattttatttcatatataggacccaactatccttgtaatcttaacaaagtgaaggcctcgagcatactcagatttgtaagctgagccaaagcttcaataacatgtgtcaatgaaccatttggtttgcaacagaaactggagcgcctaaagctttcatttttttctccaaaagaaaagagatgtggaaaagaccaattcaaagcaacaaaatctgtaaatcaagccagaatcttgcagtagctcatccctgaattggcaagtagcaagcatcctgcaattatcaagaataaacagaaagatcccacaccactaaatgtagctcattcatctgccatataatctgaaattcaaatgttcaagtagagagttgtcttagtaaggccaacccaacaaagatagtaccaatcatagaacttgtggagatattttaagagaagagccatattttgaactaccaaatttaagatacccagaggcctctgaatgcttatatgtaattatgt

SEQ ID NO: 374593 - DNA, 126 bp, Zea mays
agttactggcaccaaaccaagggaacaagcaccttgtctcccttttttttatttgtacattgaattattacatccacaaaaccacgacacagcaccaactcatcaacaagcgtagaccatcattca

SEQ ID NO: 374594 - DNA, 303 bp, Zea mays
aaaaaggggacccacgggttgaaaaccaaaaaaatgggcccccccccaaaataaaaaaggggggggtgggtcaaccccccattgggaggggggttggaaaaattaaaaccccccaagggcaaaaccccccccttttttccggggttggccccaggttttaaaagccccccaattaggtggtgccccaggggcattcccccagggggggccaaaagtcccccccccaaatgggaaaagggaatccttcccaaaaatttggggcaggggggggatatgccaaaaaaaaaaccccccaaaagcccc

SEQ ID NO: 374595 - DNA, 397 bp, Zea mays
aaccaaacttcacgttaaaaagtctacacttttaatgacaaagataaagaatattttttctcgaatatgcagaagagctacacatcattatattaagaagaagaataaaaaaggtctaaagaaaacctcatacaactacacaccatacctgaatacgtatgaaggggtctaataaaacctcagacaacaccacacgacccaacaagacctgatcagattccatagaaaagaaaactagacccttgaccaactggacccaaaggaaatcgctcattggactgttggagcgccaggatgttagacacacaacgggctccagcaaaagtccaaaggttaatctcatccttgaccggacagaagacctcagttatgttaggattaataccactgaaaacac

SEQ ID NO: 374596 - DNA, 276 bp, Zea mays
gaaatagatgaaaatataacctcagaaatagccaatgatgaaaactcaatactgactgatttccttatagacgacctcttgcacgatggtgttctaaatggcactaccaccgattacaaaaggaaggattatgccttgactacaagtaatccctagagatccatgaaagatacaaccttcaaaattgaaccataacggcttcatcttctttgtccataactattttccagcactggaacagcagggccatatattctaaaacaacggtcactaaat

SEQ ID NO: 374597 - DNA, 457 bp, Zea mays
gcaggaatccaaatgttacttcgtttcctcctacttggcttttaataagttggtcaaaattatatctccacgacaccatatttgactgggagatcatgcctagatctcatcgatctcgtcgtagtagtcctcctctggtgctacttgctctccaccttcaacgagctcctgcttagaatcttcgacctgcggtcctttgggttcctcgatcacttgttcgtctactagcaaccatacaaactacagtgcataggaaaaacttaacgtcacaccaaacaatagaacaatttcataatattattctacgagtcacaatgaatccgtaggttcaagaatcactgaaatcgaagttatggttgataggtatggttttctgaagttttaggtgactaaacagtttaaaagtatagtctatgctaattaacacaaatcgtatgataactaatccactttaatc

SEQ ID NO: 374598 - DNA, 401 bp, Zea mays
gaccagatatttatatctgtataagcgatcgaggggaaacgaaggaaacacatgccatgaaggaacacaagaatgagaggaaacgcatgcatgcagaatggcagcacacacagtagtagtactagcttgctacactgccacgtgactggacgatgtctggatgtgtgtgtcgtccccctgccgcctgccggggcctatctatctcctgggtgcttgggtgcatgcattgccttttggtccgaggagctagctatagctagcgcctgcaggtcctccaatgtgcagcggcggcgcacggccgacgaccgcgcttccggtggtggccctgctgagcctcgccaggaggccgcgtttcggcaccgggaacgggctgtaggtcacgtcgtcgctcgaccccacca

SEQ ID NO: 374599 - DNA, 393 bp, Zea mays
aaataacttgggcagcggcatttcaatgggtatacatatagggctgttcccagcattatattgtaccttctgcttctgttgaagacgcgctgtccagactgaggacgcatcgatggccgatgggcgcgtgtgtgtgtgtaagccaccatgtgtgtgtgagacataaatcatgtacatctggaaatagggccgcttgatcatcatcatcaggcagcgcgcgtctccgtcagctcgaaccgaattcctcgttccagttctccagctcgtcccatttgctcttctgcaagcttggcctgatcaccgtcatcgcgttcttgaagtcctcgtacctcaaaggtcgcagctgatttgctttgatagtaagaatattttgtggaccgagctctcttattg

SEQ ID NO: 374600 - DNA, 314 bp, Zea mays
aaaagaaagggctggatcatgatccaacatactaagatacttgtttttacatttacacatgattgcacattagtcatggcctgattgtcccttacacaaatttacaaatgttattttcatcaacaattatttgtaccagatactgcatcacataaattcacatttcatatgaaacccaaagggaactaccttataaataaaatttatattactaatgcctgaataattttaactaaaaattctacacgatattcgtataaaccaattagcaattcgtaagattaagatttatgtgactttaccaaaagtccaac

SEQ ID NO: 374601 - DNA, 506 bp, Zea mays
tcgcgcggactcttgggattttcacaagggatttccattttctcaagggaaattagttcattttcccttgggaaaatatgaacattttgggaaaatggagttcccatgcaactccattttctcaaggtattttcattttccctttggaaaataggaataccttaggaaaattgagttgctagtttgagaacttcattttcccaagggatgttgaactaatttcccttgggaaaatagaaaaccttttggaaaatggggttcccaagggctagtttggcagtttaaaaactggaggtaattggaggggattttagccactctaatcctctccggttttgtggctcccaaactagccgtaagagtggcatttccccccgcccctaggagagtacattcatgtgtcttgtaatgtaacttatcaatgtgttccttctctaatacaaatatgcacggtcctcacatatatttgaggaaagaagaaaacatcgaccaaactttgtgaacta

SEQ ID NO: 374602 - DNA, 195 bp, Zea mays
ggaagctacttttacaatactggacctcttagaagtctgttctccatactgccgctctcgatgcttaatgtgctcgtcctcgtgggggaaaccgttttggtttattttgatcagtcacaaaccgtttctggttcatgggaaaaacaatgccagcttattcgagctcctgggtccaggtcagttcttgcaaagaat

SEQ ID NO: 374603 - DNA, 406 bp, Zea mays
cgatcgataatactgcagttattattaaatagaaaatgaagatgatttcaaaaacaaaacaaaacaagcactacaacatcctattgtacaagtctacttcccagtcagcccagagtctacacgacggagcataaaccagagtactacgaaaccacacatacgttaccaaaggaacaaaggcaccggccagccttcactctctccggcccggttgctattacggctattttgctaccactggccctggggcccgacccgacggatacaacgcggcagctccatgcagctcagctgcggcgaccccacctctgctgcgctcgtgcatgcgagcccgtggggaactgggagcaggctcactgcgctcggaacaggtggtaggggaagaagccgttcttgtccgtgagag

SEQ ID NO: 374604 - DNA, 341 bp, Zea mays
gggaagaaacataaataagggaattttgcccccccctaaatgtaatcaccatcacaaaggcttggacttggccctaacgcaacctggaacacagaacacgtttaacagggaatcgttgttttttatgaagcaatggtccaacagaccggggccccaaggaaactttgggaagccccagggaaactgttgacaaatcctgttttttacagggtcgaaaacaagggtttttcctttccgcccgttttaaaatgctcgttttccttgccactacttccttttcccgccgccaccgagggacaaaagctccaggctgggggggaggggcttgtcgggggcgcctt

SEQ ID NO: 374605 - DNA, 216 bp, Zea mays
catgcaccaaatcaagagcccttatcccgaaagatcctttggtccccttccagctctgtacacgcccaatccgaatcccaccccaggaacaggaaatgtgccagcttagcaaaaacaaacgctgtagatggcgacggcacgactgcaccgactagccgccagccgaacgtcagtcagtcagctaatcgctgagctcgagcaggcggcggcggcggc

SEQ ID NO: 374606 - DNA, 230 bp, Zea mays
cacccggaaaggtcatggaaattcataattttggggaatattacaaaatttacagtttttttttgaacactacaaaatttacaggtgcccggccgaatcaaaactcaaatgagccctacgaagtccgaacaggggtttttcaggaatccaggtttttgctgccccggaaaacatgactttcaaaatgaaaacctagccaaaagcattgaaggtttactggctggggattt

SEQ ID NO: 374607 - DNA, 404 bp, Zea mays
aaaaataataacggctaaataatgtggtacagatctacataatgggactccaacaagattacctacatcaaaggaattattggagaagttacaaattagctgtgtggcttgaactactgaaccataccaaaaaagttcagagaagcgctacgttacgcgatcaacaacatagtgttacaggtagcccggctcagccaaccacatataataacacactaataaagacattttacagcgagatgcgatcatctcatgtcatctcaatgctgtgttgtaatgggtaagaaagaatcggaagtctgggtggtacacttggcgatggcgaagccagtcatctgctgtctgcatcaacgaagctacgagctgatgctcctcaggcctaattgacgaccaaatagagctgt

SEQ ID NO: 374608 - DNA, 185 bp, Zea mays
catcacgggttaataaattggatgtgataaattggtctgtcaaacaccgaatgcacagcaatttttgcaagacttcaattgactaacggtggggaaagggagacaggctttttatccatgtcctgcacaacataggcaaaacatagcttccaaaccaacaaatattctcccccgtgtaatggatt

SEQ ID NO: 374609 - DNA, 196 bp, Zea mays
ggggtagaaaaagctttattttggaacatagagagtttgttttttcaacagaccgaatgaaacagggcgatggcattcaccagttcatgagacatcaccgtgaaactgcatacgaatcaacaaatgtaggcttattttgccgggagccaaaaaatggggccttcctgaggagcttaagcccgtgatggtttttatg

SEQ ID NO: 374610 - DNA, 158 bp, Zea mays
ggggccaaacccaaaccggtttttttgggggtttaaaaaaacccggggcccattaagggcttaaagttccatttcatgggaacaggggctttgctttactgggggggtcaaccccggataaaaaccttttagttgaacccagccccccccaaaaaggt

SEQ ID NO: 374611 - DNA, 253 bp, Zea mays
  unsure (1)..(253): unsure at all n locations
ggaccaaatacagggccatgattttacccaaaagtttcagggaaacttgaatttccacacttgaaatttttacaaacttttttaaaatatttttgggggggggggnggggtttttatgggcaaaattataaaattccaatgttttggttggaaaaaggaaattcttttagaccagggaaaactcttcccccgaaaaaaaggggtcaaaagatttcaaacaaatcaattttgtgccttttttaagggggagggg

SEQ ID NO: 374612 - DNA, 269 bp, Zea mays
agatgggctcccaaatatcttttaataggctaaaataccatgttatgctcaaataccacagattgtcttgagactaagaaaatactatgttatcaaacatgcccttagtgtttgcacataatgtctccggatataactataatcagacaaaaaaagattgtattgtatgacacatcctggacggatacaagtatgtccaatcttataaatgcatgccttgtttgattttctggggaatgtactcatccgataaaaaggaaatggaattt

SEQ ID NO: 374613 - DNA, 314 bp, Zea mays
aaaccaaattatgggttacattaaggggggggggggcctggagtttaattattggacaaaaaacctggaaggccctcctacaaattgccctaccaaaaaacggaggggggcccaggaatccaacgaaaaagcaggggcttttgggggggggggtaaacccaaagcctgttccaaaaattcaacagcagtttttggtggtgaaaacccttgacgggggttgtccccgcgggctgaagggccccgggccggggttggggaacattttcaccacgtcccttatggggggcctgcccgccggaagttttggggggcaa

SEQ ID NO: 374614 - DNA, 288 bp, Zea mays
ggggggaacgaaaaccccccgggtggaatggacttttccttcctggccaggattggggccaaaacgaactagcccccaggggggttttgaagcaaccatgaaaacttgaaactttacaggccacaaaaagggggggcccgggcccccgggtttaacccccacccaaagggggtacaacttccacgtaaaaaacggggaccccagaggacccttgttcacccggggcccacggggggagggggggttttccccctgccccccccaaaaaattttcgggggccccggggg

SEQ ID NO: 374615 - DNA, 285 bp, Zea mays
  unsure (1)..(285): unsure at all n locations
ttnnnttttttttttttttttttttttttttttttttggttttttttttttttttttttttttttttttccaagaacagaaggaaacttacattggtttcctttcactgatctaaaaacctgttccttgtcaacccaaatgctttgaacattgcccaaattgctaaaagagaagcaactgccaccctacagttagaaaatacctaagggcctaaagaactaacgacctcctggcttaattttcctggggggttaaaaaaaacgggaaggggggtttgaaaaaggg

SEQ ID NO: 374616 - DNA, 222 bp, Zea mays
ccccacaaaggacttttaggaaaaaaaggggacttttttttgcatggggaatggattgtttcccccgtttaaatcctttaaaaaaaaacttacccttaacatttttttacaaagatggcatgaagggaccaaccaataaagctttacccgtaaaactgattttgtttccataaagaggggtttttgggggggaaccgaaaccgttgccccttgtttggcccc

SEQ ID NO: 374617 - DNA, 347 bp, Zea mays
gcaatgcatgccgctcaaactctaccgaacaaaatgatctacaaatgaaatcttgtctccaaattggaggagaaatatgctagcagacccattctttaaacaagatttttcaaaattttcaaaagccattaatcgatcgaactaaagacaactttacaaaatggctgctacgttgatgatcgtacttcagaatcacgtagggctcggatcatctcaaaaatacttgtgtggaacagagtcgaagtcatcgtagtcaaatcttccacgatcccttcccgtcttcaacaaatatgaagggtcgcatgacatgttctcatcaattgaagccaacttcttggacaatgccg

SEQ ID NO: 374618 - DNA, 272 bp, Zea mays
gagccagtggatccttttttatttttttctgggggggacaaacgtttttttcaatccatccattaaatcaaatttgggagggggcaaattcggttaccataattaaatccgacttgaaaccacgaaatcgacgaccccttttaaatttagcattttaaggaacatttggggagtgccggaattaatcacagttttttttcatccacatcgggaagtctccgatcgggaaatgatttgtttccttccgggcctaattttttcggatttttggg

SEQ ID NO: 374619 - DNA, 237 bp, Zea mays
ggggaaaaagggatggcaacccacggggaccaaaaaagaaattgggtattttcaaaggaaaaaccccaaagggaaaaattaaaaaagacccacacacacggggagactaaatttcccggggcaaatgggggaaaaaaaaaaacccaaggcccctaaaaaaaaaaaaactacgatcttaaccccccaagggccaaaaaaatggggggggaacaaccacctttaaaggggggggggggg

SEQ ID NO: 374620 - DNA, 336 bp, Zea mays
aggggggaaactcccacctaatggcttttttgacaagcgtttctacaattgtaaacgaagaactggatggtacagctgattaaattacaaagggatacggtagtggcatgcttagaagttaggagctcaggaacgtgcagattaccgcgtggcagtgttgttcagaactagctcccacaacactctgcacctgactgtgggaaagttgccaaacactgatctgtactaccattgcaaattgaaacctaccaggttgaagaacaaaatccatgacaacgtcagtcaagaacattgcattgaatctgccggttcttctccaccagggacagatccttt

SEQ ID NO: 374621 - DNA, 433 bp, Zea mays
aaagtgttcattctagtgtctactgtctactttcttgaaggatggcctttctttgcggtaatcaaatatatcccatccaaagttctttggtaagtttctgaaaccttaaccaaatggaatggtattttgcacttgttttaggtgcaaatcaaggttcactataggttgtatgaaactaagagttgctgcttcactatttcagcctagctatattctcaattcagacattaacattattttaattgtctttaccagatactagaatatgtattcatactgcctggatcctacacatgggaataaggttaacattattttaatagcaatatctgtcatatagaaaaaagttgaaaatacaaatatggaaaaaggggtgagcagtactacacatgggaaattgtaatactcattaaagattcacagttggtcatta

SEQ ID NO: 374622 - DNA, 447 bp, Zea mays
ttttgtcctcgttactttctaggccttacatgcgatgaactttcagcgatttatgtgtgcccaggtacgtttaactagtgaacacatctattatataaagtagattgaagctgcatgcacatatgtttggtttgaatatttcgtgaccttagaagtgaattgccgttttcaacctgcaacatgaggatacaattttgttttacaattgtagacactaatgtccttcatcttctgtttaggggattcctgaacaaatggaggttcctgcaccgcctccgagttcccaaccagtcgaccctgttcaggcggtacaaccagctcaagctggaccaaatgctaaccctctcgacctctttccccaatctcttccgaatgattccgctaatgccaacacaggaaatcttgatgttttgcgtaataactcacagttccaaaacctacttggtt

SEQ ID NO: 374623 - DNA, 215 bp, Zea mays
tgaacacgtggacaatcataatgctgctgttgctgtgtcctatcatgccgtgcacggccattggattaagatgtatttcgagggacttgaggattacgctcacggacacgtttgactgggcacctacgactgctacggtacggctatacccatgcctgacctgatcaatctgatccaccaggccggcgacgtcagtgacaccacttgttgacacc

SEQ ID NO: 374624 - DNA, 451 bp, Zea mays
  unsure (1)..(451): unsure at all n locations
cctggcgtgtcgctctctgccgctagccaccccaagctccgggccttcctacgccatgtcgggctaccggacctgcagcgcgccgacctcgctggtccacgcctcgacgcccgcttcgccgaggcgcgcgccgacgccaccgcgcgtgttcgggacgcgctcttcttccagcttgccgccgacggctggcgggagcaggtggtcactctctgtgtcaacctcccgaatgggcacgtnccgtgttccatcgcgctgtgccggtacccgccatggcgccctcagactacgccgaggagctcatgctgggggccgtggcttcagtctcagccttaggttcctctagcgacctccaccgctgcgcaggcataatttctgaccgcttcaaatcgagcggctgcgtgatcttgagaagaagaacacgggatggtgaactttcttgtcaaatcatagc

SEQ ID NO: 374625 - DNA, 279 bp, Zea mays
tcgcgatctagtacgtgcttttgctttcgcacgcaccggggggatttgtgcatatgccaatcggagggctataacatgaacagaccacctccagcaggaggcacattccagtatcaggatcacaagaacattacaagaataggaaccctgtatgatgtttcgacaggacatagactagccctaaaacatctcaagagtctgaaaacgccaactaggtatatttctaagtgcaggaatatttcaaagacaacaaggtttacacctgagtatacacacata

SEQ ID NO: 374626 - DNA, 460 bp, Zea mays
  unsure (1)..(460): unsure at all n locations
tccacgcgtccgcaggtccaaaaacgtggtatgcattcatgtacagagtaaccttgccacggtacactgtccagaaaggcgtgaacccaacccacacggtagcagcgccagccaactgcccgaaacttgtgtatgttaacctgccaagtttttctgtggaagcatttcacgcagcagcttgaaagatgcgcaggcgaaccatagagctacggcagccctggcaccaaatccccgttcgtcttttgcaccgttggaacaaaacctgggtttcgtgacagtagtatcgtaaataacatgacaactggaactgctgtcggtccgattaaaaatgcgacggcatcttgcatctgaaaagtcaccacgatctcaaagctgtttggcaaatctgacagaatgcgcatattaaactagcttgtctaaggatttggatttgaattcctacncatagtagacgaggcaa

SEQ ID NO: 374627 - DNA, 444 bp, Zea mays
  unsure (1)..(444): unsure at all n locations
ctccgattgcctcctcacgccttgcgcttctcccccggcgagggtacgtgctcttgcccagatccgccccgcctccccgcgccccgccacgcgcgccgatcggcaagctgcgtaggcttcgctaccgctggtgcgcgagcgagcgtcgcagccgtcgatccgcgcgtccgccatggatgacttccagggcctgctggcccgcgacttcggcctccgcccgcaggggaaggccgcgcccatgtcggccgcccgctcttcgagtcctcacggatccgcctggaccaaacncagacccgcgtgggggtccgccgctccctccgcgcccttctacgacgagctttttggggtccggcccgccgacgtcgcccaaggcaacgccgtcgctcgataacatctaaactcgttcaggagcccggtttcaccgggcgtcggctagccgagcac

SEQ ID NO: 374628 - DNA, 218 bp, Zea mays
agagactgaaaacacagtttcagagttcatgttaaatccattccgaaaaaattgcatcttggctacagaaactgtgccagcaaatgtgtggcttgccaaaatgttcaaactagactaaacttactaaactaactggactgcacttattgaattcagactgactgaacccatgttgcctaagaaattgagattgataccaagggccctaactaaactga

SEQ ID NO: 374629 - DNA, 364 bp, Zea mays
tctgcgcgtcctttcagttggccgccatgtgaaagtgagaacggaaatatcgtggtctttgacagtataaatgattattatgatgctcttttttagctagagttaaaaaaacttgtggacacattgtcgccagtatggtctgaaaaacatccatgggtggtcatggctctgggcatcgacataactatctggtgcgtgcaacgactttcatgctttgtcgtgccccctggctaaagaatgatggcggaggtgaaacatctgaaggactgggaaccccgtgctgtttgcgggatatttatgatatatgactatacttattgcttcacttggacagtgaaaaatcaggcccgaaccaatggaattt

SEQ ID NO: 374630 - DNA, 238 bp, Zea mays
aaaaacacaaaacttattcaggattggccatagttggggggggaacgcacacacaaaaaaacgggtccattataaaaccaaccctgccccgacttaggacccgaacgggagatccttggccaccccccatagggggggggggccccagacgacgcaggcccatggggggttaaaacgccccaggatttacggccccccagggaaccgggccacaggggggggggggcccccctttggg

SEQ ID NO: 374631 - DNA, 294 bp, Zea mays
gggaaccggaagacaacaatttcacaaaagttacaggggcaagggtaaaccaaactgccaagaacaagccggaacaagggaaaaacccagggggcccctctggccaacaaaaaaaacaaccccggggggttgctgtacttggggggcacaaacgggatcggggggaccacggcggggggggacctcccgggaacgaccacccccaagtgcggcccaaccttgggcattccccactttacgaagcccatagcgatgttttttttcaggcacgggctgaaccccccggggggcacc

SEQ ID NO: 374632 - DNA, 265 bp, Zea mays
gggcgggcaatattaaaaggttggcacataagggataggggaattcaaatatcaatactaatccaaggccccaatcagatcctattaatcggcgctcgacacccaacattatttggatcgacttacagtttacatgcaagaggggggggaagtcaaagttgttgagcccataaaacactcgttaaataccccgggccggagcaattccggcctctaaaactcaacctcgacacataacagttttcatccggaaaaaaactggaaa

SEQ ID NO: 374633 - DNA, 396 bp, Zea mays
ttttttttttttttttttttttttttttttttttttttttttttttttttttttttaccgggcctttcaaagggtccattattttggagaacaccatttgcaataacaaccccactgaagggaattcacatttgagaaactttacaactggcattttgaagtttaagatcaaagcaacttgttgtccaaaccagttggacaagggggcataaacaggaaaaccaaaaaaaattttttccccatgtgtacaaaaaagctgccaatacctcagtataaaaataagggtatttgcaatggaagcaaccatttccctgggtccctgaataagagcaaagcaaacatgaaactcaaatcagatgaatcctcatttttcaaaagagtaaagaacatgtccct

SEQ ID NO: 374634 - DNA, 77 bp, Zea mays
ggtatatctatgaggtttatattgatttgggcgtaccagagtgtcccagcatcatacattattatcccaaggtggca

SEQ ID NO: 374635 - DNA, 218 bp, Zea mays
ttgtctcaaggcttaagaggaccagaacactgagggacttatagaagtggtttttgttcacaaaaagtatatatctttgactgcccgaactgcttatgggtgcccacttcacttagagggtaggattcctcacggccatggcatgaataaaggtggaaagattcaacagcaaccttgctctgaacttgctgccgccttagtgttcggaatgacgaacg

SEQ ID NO: 374636 - DNA, 456 bp, Zea mays
gtgacatctgacaccctcgcaaatctgccgaacgacacccttgcgcacatcattgagctggtgctgaagagcagcgaggacagaggctggtgcgagatgaagtctctggtcctgaagctgttcaaggagagcagcaatggcagcgccaatggttcttcagcagactcgtcctgtatcacgaccttgtacgaatgtttccagaactgcctggattccctcctggtgctacctcgcgaagctaccggtgcagacgagcttgcggtcgaagaagaatcgtcgtcaggcagcaaagagcaaggcgttcagaaagatcagaaaggatcggtctagaggtggacaaccttctctagctagctgagatcctgtcggaccgcgacgcggtcgacgagctggcggccatctgggcgaggcagacggagctggccgcggagctgcaccctaggaaccggtgatgca

SEQ ID NO: 374637 - DNA, 289 bp, Zea mays
gagacaaatacaaactaaaaaacaggacataaaaaggggtacaagcaaaaccatcggaacaaacgtgaaatataccatcggtaagcattatgcttctaggtgtggatgccagcgccatttgggtcgtacccattaaccaagctgttcagtggattattcacaggtccagatgggtacagcttcagttgcgggactttactcataggacatgcttttgttgacggattgctgcgttgaagcaaaggatctagctggccaaatgccgcggatatcagccctaagaaaagcg

SEQ ID NO: 374638 - DNA, 448 bp, Zea mays
cccacgcgtccgactgcctgtctgcctggctcgagctcctcggcgtcgccctcacccccatctggaggccggcaccccgccgccatcctggctcaccccacgacgcaaatctatgtgccgcccctgccgtcccatatcgccacctctcctcccctcccctacccggtcaccacccatacctcagccacctcggcggttgtgctaggggcgacggcggtggaggctgcggtcgcagctgtgttagtggaggagatgtggtggcggtagctagacagcctcgtgagcgctgcgtggcttgggctcgcgtccatgttccttgccattgccagcctagagcacttactccgcccgctggcccacacgctcaagcacgctccgtcccgggggatccgcctgcacctatttctcagccgtggcggtgagcgcagcgccgcccccagcttagatc

SEQ ID NO: 374639 - DNA, 272 bp, Zea mays
ggggggaacaacctcgaaaacaaatgtaaaaacaaacagactgccccacaaatagaacagggacggggcaattttgttacggggcaattttttgacaaaactttatttcggggccggggaattacaaaaaatcacttcagggccaaggggggaacaaaacctaacacgacctttattatgacattgcagctagaccacccaaagcccaaaacagtaatacaaatgtaaacgaacgtttacttttttttggggtcaccagttttggttttttt

SEQ ID NO: 374640 - DNA, 235 bp, Zea mays
aagaagaataagaaaaacctgttttggtgtttatgggtctgctgcatcatcaggcttaccctaggaacccgggttccatccttccaaaacaaaaaccttagaactaaacgggggggggcggcccccaaccaaaagaaacctcccggagaagggctgcttaactagagccccaattcttttttttttgggggctgctgcattgcttaagtcaaaaaaatcttattttggttttttc

SEQ ID NO: 374641 - DNA, 233 bp, Zea mays
tttacgcgtccgcccacgcgtccgctcacgcgtacgaggacgcgtggacggacgcgtgggcggacgcgtaggcggacgcgtggaacgtcaggaaacttccgtactggcactagcagtcgtttctgttaggtttcctgacggtcgtgttagagctaattgtaatccttgtaataaatggtgttattccaaaatcacccattcatactaaaaggttggtttctttaaaacaccag

SEQ ID NO: 374642 - DNA, 357 bp, Zea mays
attgaactactatacgtggctgcaaatttgatattacttctccagtttcattaggattctatggaagctctgtggaaggcatgcaattgctacagacaggtgtataacacgcaccgcaaatgtgactttatcgtgtcccttcgtaacgttaacatacaagcatggtgatggttacaaacaagcacagcttactggaacgcacgctgacaaaacctatgcttctaagggtagtcaagcacacctcgatggcattcttgataccaaggaacgaacaacaaacacacatatgactctcagttgaaagctcccgaaactgcgtagatgaagtccaagaaccccgtccccttgaggaggccc

SEQ ID NO: 374643 - DNA, 456 bp, Zea mays
tggacgcgtgggcggacgcgtgggcgctcgcctccccgccactcccctcccgtccctatggcggccgttaccacagccactgccgccgcgtcctcctcctccttcctccaccgccgaagccccgcctgcctgcgcgccacgctccgcgccgcgccgcggcactgccgcaactccagctccaggctcgcctgccgcgcagccgaggtgtccggggccgagtcgtcctcggccgcggcggagggcgcgggaggaggcgggggcgcgtcgtgggtgcccgtggtgccgctcgccgcgctgccgcgcggagagcgccgcgtgatcgtgcaggacggggaggagatcctgctgctctggtacaagaaccaggtcttcgccatcgagaaccggtcgccagcggagggcgcctacaccgagggcctccttaacgccaagctcacgcaggacgggtgcattgtt

SEQ ID NO: 374644 - DNA, 274 bp, Zea mays
ttttacgcgtacgcccacgcgtccgatggcgagcgtccgccctttgctcttggcttaaattttcatgatgctcatggtgcgttattgctttggaggtagggggggggttctacaagatggaatgattgggcagcgcaaacccagaaagaaacaacaggacagggtctggttaaaaacctatcatagaaccggaaggttctttttgggcagactccggcctgaactacccaatttttcatgggaccggtggttatatgtaatgggttaacccaaa

SEQ ID NO: 374645 - DNA, 475 bp, Zea mays
agaaggtgttccaaatccgattcacaaaggagattgctacacctgatttccaaaggagccctaacttgtagtgtgatttaggggcgatcttggccctaggcgtgagatctcaccagctccggcactggtgccttgcacagctccatggcaagaacacaggggtcttgaaactggaacaggccccaaagtcacagtccacgctcgcctcttcggtcccattggagaatcatgttaacctccatgacgctactggcgcctgccaagcgttcgacgaaattccccacaaggacaccctggactatgcccttctcgacgacatggcagggtttcgtccaccaggcgctagaccacttcttggatgcgcaccgccgccagggcaggtgtgctggcggtggggcactgttaggcatcatcaaaatctgtgggtcagtgccagacagagtactggggaagcagctgcatgccctgtgcgtca

SEQ ID NO: 374646 - DNA, 487 bp, Zea mays
cgcaacatgatgtgaatcatgatcgtcgggagtggcttgagcgacgggccgcccggctcgctgcagactgcagccagctcctcccgcgctgcatcactggacaggagaacctccaagaaaagaagccaccgtttctgaccgtcgaagtagtctgagatcatttcactgctgcttggatgtgctgtccccgtcggcgctttgttattagttgtctgtgagttattacagactttggcatcatcctgctactgtagccccgttccatccacccatcaaagtgatgaaagctaaatttcgatttgatgggttgaaaaacaggtccagtcattactacgaagttttccttttgaaaaagaagtattctaaattccacacgtccagtccaagtgttcttcatcgtcatctacacacacggtatttccttcacattgtgcttccattccaagcagcctcgaatggcaaccagcaagaaaggcctgatggctat

SEQ ID NO: 374647 - DNA, 264 bp, Zea mays
tccacgcgtccgcccacgcgtccggcaactctctccctctccgttcttggtggtccgagacccttggccgtacgctctgcctcactcctccgtctcttgcttcccttgccgccggcggcgcgcggcgccgggcgcggatcggcggcggatgcatggtggaggctcacacgcatcagttgaagctgaagccaacaactgtggctaaacagttcacgggctcatgaatgtctggatgagcatcagaaaatggaccacataaacaat

SEQ ID NO: 374648 - DNA, 438 bp, Zea mays
cggacgcgtgggttctggttagcttgccagccagcgattttgtattttctgttcctgaatttctaatcttctgcatccacaggatcttgtttggaaattttgtgcatggagggacttaatggctcggatgcatgatgaaagcttacgatatgttctgccagaccaagctatagctgcccttgccgttagtcttccaaagggcccaacagaggtgtttgctgtcatagcagaaactgacctaagcatttcaagtatgtacccttccttgtcatcaccgtcacctcttgttgtggctcatgtcaaagaactctgttatctgctggatgacatcactaccagcatggacagcatctttaaaagtttactagagaagtataaagatccaagtggattatgtcgactatcaggttataattataaccttataacacacctaag

SEQ ID NO: 374649 - DNA, 312 bp, Zea mays
accttaaaattggtcagagcactacatcatacattttagaccctgtacagaagcagaaacaataaaacctaatataaaaaaaagacggtgtacactagttccattgtcatagctaacacaaacctcatctcgtccacccacctacacaatgaactctattgccttcaacaaactaggtccaaacctcgtcacgttgagcacgacgtcctgctcggtcatgtagacctccccgaccttctcccatccgccgctccttacggcctccgggtctctcaccaccgcatggttcctgccgtacttctccagcagcgt

SEQ ID NO: 374650 - DNA, 483 bp, Zea mays
  unsure (1)..(483): unsure at all n locations
actcctcctcttcccccccaaggccccaaccatcccactctctctatacaacagccacccccgcgcccttccgcccttgtcgagtccaaatccaggttatagatcctctcgcgccgccgctcgcagccgctcgccgcccggtacatctcccccgcgcctctccctgctcctggatttcaccgatctggcatgctttactgtcccgtcatacggtggcagcgggagccgcccccttcctgcctccacagctcatgccatgcatggccgatccattccctcagatcgggattgccgcagacatgccgttgcttccccgttagctactcccttgtcacaccccctcgcttcgttctgcgtagtttcggggtttgacaccgcttgtctatcccgttcctatagcttttagggtttcgagctcaaactccgcgccggcatctcagttgctgcaagtggcggcngcangctagaggcagcaactgcata

SEQ ID NO: 374651 - DNA, 237 bp, Zea mays
aaactgaaatcatttgtttttttttttttcattaggcccgaatcaatctgagagattccatttgggaatataaaaaaaacccagcgctggacattagcgacaaggactgactgactgaccgaccgatcgaccacgtgctttaagaggggagagtactacagactggagacagacacacactgcatccatcaagttctaattaaaacggggtaagcaaaacgcccacgagctttaggc

SEQ ID NO: 374652 - DNA, 290 bp, Zea mays
gttgagagacggccggggactcactcgacagcgaggatgtctagctccagggcgccaacgatcctaataacgacactggacacagtagatacatgtgcatggacgacgccatgaaccaccgtggtgcacgcaggggcatcacccatggggactcactggcgcttatcttaggaaagaagccgcttgcggtctctggaagacataatccgtcggagatggcatggaccgcggaaggctttggcgctgggtgcggtgctagcggcagatacacttgccttgtgaaagccggt

SEQ ID NO: 374653 - DNA, 473 bp, Zea mays
  unsure (1)..(473): unsure at all n locations
tccacgcgtccgaaaaattttcagccgccagcaacctttcttcctcccacgcacagcagccagcgcgcagggagcttccctgtccatggcgtctcctccccttcctcgagcaagctccagcgtgcgcggggggcagcaacctcgacggtcggcctctctcccctgctgtcgctcgccctacagggatggagagcagccgtgcgctccctgcaggcaagcagaacctccagccgagcgcgctccctgtccttctcctgggcgtgtcccctgctccacggccagcaggaagccagcgcccctctgcagctccttctcccagggcgctcgacgctcctgcagcaaggccagcccccatggcgcccttcctcctcggctcaatggtgtggccgagcagcaacctcttctctctggttcctgtgcgtgcgcaggggcagaaactccatggccgncgagctccattcctccaagcagca

SEQ ID NO: 374654 - DNA, 493 bp, Zea mays
tctacgcgttcggctcggagcgcgagtttacccctagcaaatcgaggcggcgctcgtgcccgtgcctcccgcgtcgaaccctagtgcaactaccagatccggagatcccgcgcggacgcgggcgggacaccaagcttctgactcaactcaatccccgcacctgccaatgccaccccctcggcgctgatccgatcccgtcgacgccgacactcgcgggcccgccccatggattccgcccggagctggctccagaagctgcagccgcgggacaaggacagagagcggggcgccaagacgccggcgccggcgtcgaccaacggaggcgccggcaactccgcgaggatggccgacgcggcggggggagagggttctgtctagcgccaccaagcacaaggtggtggttgtgaagcattacatctagaactactacaagtcgcagatgaagtcgctacatgagcgcaaggagaggcgttggatgtcggagaggaaacta

SEQ ID NO: 374655 - DNA, 531 bp, Zea mays
cccacgcgtccgaaaaaaaccaagtcttcagccatctcgacggctcgtcggctcgaccacttcgcctcccccaccccgccggaaccctaaccccagccgcgagagctccacccgccgcgccgtgccgatgggacggtcgttgtgaattgaagtagcttggaagagcagtgttatgcacagcgatgggagacaatgtcctaaaactcagggtgggcttgtcagggtaaactgcattatggattctggcaacagttcatgctctagaacacgaagtgggcttctaagattaaagggctttctggattccagtggtgtttcgagttctagaactcgaagtggccttctaaggataaagagctttgtggattccagtgatggtttatgtccgaggtcacaaagtgaccatgtaagatgtagccctcctattgtcgaggctataataaatgacgaagcagtcttgaggagtctcctgatggattgatgaacaaagagatacctgttaggactcaaaatgagtttgtagacagaact

SEQ ID NO: 374656 - DNA, 221 bp, Zea mays
ccaagggcgctattattgtataaatgggcggcaaaacgtacatggaatggaaggcaacaacattggtcctgccctgacctgtgcatccatccatcaagaacaggggggacgaacaaccaccatggatgattaatcagatgaggaacaggacgcaagaaatcgtggggggggcagggcacgggcactgtgtgggacggacggagaccgcgccaacggatcgg

SEQ ID NO: 374657 - DNA, 297 bp, Zea mays
ccctcgcgtccgcacgcagcagatcagagagtctgcaggtacgctagcgatctagctgccgctgtgctgcgtacagtacgtagtaccatggcgaagaaagtggccactctgctggccctcaacctcctcttcttcgccttcgccgacgcatgcggctgcaggtgcggcggatcctgccctagtccaggcggcggtggcggtggcggtggaggatctggcggtggcggtggtggaagcggtggtaggcgattattcgcgggggtggttcctgcggtggcagtgctgggcgcagctcca

SEQ ID NO: 374658 - DNA, 290 bp, Zea mays
gggaacccccagtttgattcccctacaaataaatgaataatggaaaagccctgatgaccggatgggatgtctgttcatggaaacaacaaatttgggcaaccagactatacgcttcaaggtacaacacacaagggggaagaaggggattaagaaagaaagaaaatcaaaagttagcagcagtttcaagggccgcacccccatggatttgagcctgcatgacatggaggcggcctccgtgggcgggttttcccggccaacccggtttcaattttgttgggggtccgaaaccc

SEQ ID NO: 374659 - DNA, 334 bp, Zea mays
ccctctcgtccgcctagatcgggcggtgccaactggggggcctcaccggcacccgttcttggaaaacagtacgctacttacttgaaagtgcattttgcgagaggatccagacgcatgaggatggctctgaagaagttgctgcacctcttgtgtgacggcaagaaggatgaaccaaagaaagcctgtgcctcctggtcgtgcgcgaatgtgactgcatacaagactgatttggatccctgtccaagtgggagcgacactgcaagcgtgcactaccatgatgctgcagcctcatgtacggcttgctcgtggacaaggactgagcagggaactgata

SEQ ID NO: 374660 - DNA, 537 bp, Zea mays
ttcttcgcgtgcgcccacgcgtccgtccacgcgtccgctttgccacctatgctgtcagcaaacatttttcaaagaaccttctaaagaggtgtatcctgcttacctgtcatatgtcattgttgagctgatcggcaattggagtcgtgtgataagcttaactgaccacgtgtttgtcgcgatcttcaaaaatcaacaaggtagttagctcgactacattttatttgcagcatggtctagccaaaggtgtgataaccatcgttctaaaacaaaagaaaatgttgcattaaaccgtgtgaatttccttccagtgagaagccttcgcatgctgcattagatcaagcaagcgaccgactggccaattggccatgctccacctgcggccactcagtttgttggggaggaattaatcaccagccatgttgggcggcatgcattggagcagaacatccagacgaagcggatggatacatgatcgatcatgagttggtgcagacacaggccagaggccatattacaattcatacattccatgataag

SEQ ID NO: 374661 - DNA, 388 bp, Zea mays
ggcaccatgatctcacatgggccaccgccttatatatattgtattaccccccacaccatatgccctatgtacaaaacacccaaggatcggagaagctagccaagaaagtagcaaatcaaggagtagtgtcagggcagcacggcacttacaacttcttgccttctttgctctcgagtctcgatcgatctctagctcgccatggtctcaggatctcctcctcctcctcctaaatccatgcatgccagttgtggacggccggccttgatcatcgcttgacggccaagaccgtagatcccatgaagatcatagtcgcggcgaaggaattctcttgaaatattggattggatcatttgtttgatttgtctaagtttctgccctatgaggtggt

SEQ ID NO: 374662 - DNA, 294 bp, Zea mays
  unsure (1)..(294): unsure at all n locations
tcnnnnnttttttcatttttttttttattttattttttgggtttttttttttattttgttgggaacaccaaccataccaaaatgttttttcaagcaaaagtaacttttctagttacagggcctccgggttaagagtctgccagagaaaccggaaataaattcccacccaaaatttctggtccaattttctaacagaggctcactttgttgcaggacaggggggggggaggaaatgtaaaaattaaagctttgctttaactcannctccctggagtttctccagggaaaaaccac

SEQ ID NO: 374663 - DNA, 408 bp, Zea mays
gcccagtatatcaatcatgatatttttagtcatcagggcaaaagaataaaatggcatatacaatgctaaattaactacacaaatcacaagctacctgtttctgtgcaagatagatgtgtagtgacattatgaatttcccctcatctttaaatacaaatgtttggaacataaggacctgaatgctagaattaatcaaaatagttcatgatatcttttacaagcaacaataactggttttctcctgacatgtctcctaaactttcaaacagaattccatccatcctagcttggactccacttagggaggtcatgtcctggagcactcccttaactgccctgtcaactccaagcaacgaacctccaatgccggataagatctccggtaatgatggagagggctttgaaact

SEQ ID NO: 374664 - DNA, 321 bp, Zea mays
gggggacataatacatttgaaaggagctacatcataacttgtatgtcatctttaacatctatgacaacattggttaaccgtacaattttttatatgctactatattataggttatggtcgcttcggtccgggtctttctgggtccgccactaaatcatacaaagctatacctggtattacactacccgaactctctcgtatgcagtagtagaacaccagaatggtaagacccaatggaaaaaaaagaagcaaaataataagaaatgggtgcagcacttattgaggtcggtaatagctgccctggtgcggagggtaagcccc

SEQ ID NO: 374665 - DNA, 378 bp, Zea mays
gctgcgaggactgacggtggcggcccggcgctggtcttggccttggacttcttggcggacggcgagggggaggaagagccgtcgccatcgctgccagaggaggaggaggaggagccatatcctgacggcgactaggaagaggatgatgatgaccactatgctgtgacgtgaagcttcatgccggtgtagcagaaaccatagctgcagatgaagtactagtccttggcgtccttgagctggaaggcttaagtggggcccttgctgtaactgttcaacgcattggacttaaggcatatgaagaacccaacctctgacatctacacgagctcagagcgcccgaactgtgactctaagatgagccagactcccttgtataac

SEQ ID NO: 374666 - DNA, 421 bp, Zea mays
attgcttcagtcacgccgtggtcgcccaaggacaccaactcctggaagctatcttggtatggaagcagcatttttagttctgtagatgccaaatcattttacaacattcttttgaagcctttcagtatattttggtctgttttcctttttacttttgccatgacatgtcttatcgcttattgcttggtgactcatccggaaccttttctttttgcttttactgtacataaaaacatatcctgtatcactcactgctatgcagttatcctactgtttgataccattggcagaccttttgtattactcactaatgcagttatcatacaccttgatatcattgtcaggccatcggtatgagcgcagggagcgtgggaggttccatagaggctatggtggtgggcgtgatgagtattacggcaat

SEQ ID NO: 374667 - DNA, 330 bp, Zea mays
ccgccgtgcccacctcgcggtccggctggccttgcctcctcctcctcgcttctctcagcctcaggccaacacgcagcccagggccgacgtcgccactgaggtgaggtggaaggagcgtagggcctccgcgcttggctcgctgcagcgagccgcgggcaggcgcaactgcacacgggaggacgcctgcgtggcgtgggaggaggagttcgagagcgtctccaccctcgcggcgatgtcagagcgagagggcgccgcgttccacccatgggagctcgccttctgcgtcatcagcatgaggatattaacaaaggcccaaagaacaaaccatca

SEQ ID NO: 374668 - DNA, 216 bp, Zea mays
ttcttttttttttttttttttttttttttttgggatgaagggagatgcattttttttttcgaatacaagattacaagggattcactgactagcagaaggggcggggtattacagatgcttgcagcaggagtaacagcatcactctctctgtcaagaaggtcgcgctcaccggggatctggacgaggaggagaacatggatgtgtagtacgggttga

SEQ ID NO: 374669 - DNA, 253 bp, Zea mays
gtgtggtgttttttgtctttttttttgtgtgtttttttttaattttcgggaattacaaaaagcagggggttttacctaaaccctaacttaagtccaattttttggggtatgcccgcccccctgtttttttatccatcccgggaacgttgcccaaaggggggaattaacccccggggtttaaaaaaaaacaaaacccgcacacgaacaaaatttcagcccctctctgggtggggcgctaataggcaaaccccca

SEQ ID NO: 374670 - DNA, 381 bp, Zea mays
accagagttaagtcgacttagatatacacaaggatgatgatgatatctgattgaagtcttcgatcgaacacatgggtctcgcttctttactaattgacctccttagatttctcctcctcgattgcacacaagagcccacaatattaacatcaaggagttaacgtcaggtgagaaacaagcatgaacaatggtctgacagcaacgacactcaccaataatttaatccgactcgaaggttactagcacaactacgatttccaattccgctactacgtcgagcaccttgcgggcgtcacaccgagctatcacctaccttgacacctaattgctctgcaggggctgctgccaaatcgacggagaggtcgcgaaggtgggaatccg

SEQ ID NO: 374671 - DNA, 571 bp, Zea mays
  unsure (1)..(571): unsure at all n locations
gtccttcctcccagctcgtgggcgtcgtcgttttgtgcacttgaccacctgagatctccggccatgaccctacggtggtgacacgccctcgctgttttctagtccctgctcgcccttgtgtttggcccaaccagacctcgccacccctgctcctgtacatggcgtccgccgtggggtttgctgggtgccgttgtcttgcagttcggccgtgcccctgcatcttccccaagcccctgctcctctttcacgattagcctgacctccgatctccagcacctctgcgttgtctctgtgtctcgaccggccgctcggccctagcatctgctcgcttgccatcacttcatccccagctcgccccgaggtctctcctcccggtgtttcttcaagcgcgtgctccctgctcgcctcatcttcatcgacaacgcctggccgtcgttgccccagaccggagcccgagtccaggatcctcctgcggctgcttcatctcggacatggacacagagcctgtacgcncggactcctgacctcgacgcgccgttcgacctgggcgctggtcccctcgtcagagtca

SEQ ID NO: 374672 - DNA, 181 bp, Zea mays
ttctttttttttttttgttttttaaattcttttttattgggggttttttttaagtttggtgaacatatacggacgcacagacatgttattaattgtcaaaccaagccaagagctgataacacatgattacaccacaacagatttccatatattgacaaagaaaattttaagcgttgcacca

SEQ ID NO: 374673 - DNA, 555 bp, Zea mays
tttacatatatcttatatgaatgaatagaaacaaatttatgacaaagctgcttggacattcgacaatagtagattttttgtgaaatatgcatccaagaaatcaaatgctggggaataggtctaatggtatcatgacttcccgaggttacaacaacatagctgagaagtataagatagcaactgggctgcgtcattcaaaagtgcaattcaagaacaagtgggatttacttaaaggcttgtatgagttctggttacaactgcataaagatactggacttgggtggaatgcaacacatcttggttttttccgctatttactgccttgatttatatatgagcaccaacatatcttcttggacttttatgcacctgatgttgcatgcactagaagtgaagattgtatcaaagagaactggggataggagtaggatagcactttctacattttgttctctgtttttttatttgaaatcggattatggcaaatgaaaaaaaagttgagaaggattttggctggcttcctggatctcctgagcctataagcgtttcctatgt

SEQ ID NO: 374674 - DNA, 245 bp, Zea mays
cacaaactgaaataactgacttgctctgttcgggaagatagaacttaaccttttgtcaaccgctaaaccaccacatggcagttcacaatttaacgctcacgcacaaggtcgggaatgttcggtttttaaaggctaatttttagtcccctattttattttaggtcataaatgaccaagtgcgaaaaataaaagttttattttccgcatgtagcaatttatagattaaaatggggtactaaaaatta

SEQ ID NO: 374675 - DNA, 383 bp, Zea mays
gtgcaggcaaagcaaacaaggggacattatattctcatttgatccatgtgaaggcaatacgtctaattcaactacaaggtaccaggaatatagataacatgtgaatggaaatatcagagcacttgactgagtttgttcgtgacgtaaataacctcaagattagctaatgaatcgttattgatgttcgcaagcatgcacagcataactaattcggcacttgtctaattctgacgatctgttcaaaatgaactgtacaagcttttggtttcacggtacacagcggacctagatatacactcgtcagatctcgtattctccagaaacaattcccaggtatgctacatcaggagtacatgcggcactttccaggtccggcacacact

SEQ ID NO: 374676 - DNA, 362 bp, Zea mays
ggggaaaccagaccctaagttatataagttttgattagctggaacgcttccaagtccattcctggacaaacgaacacacccttacacagaagggaacgcaaatgggcttattccaaagctcaggttcgcatgcactggtactaccgcaactatcaggacccaggttccataccatatgtattcagaacctgggggctgcaattctaagatgcaaaggtctattgcatcggctctcctttacagttatgcacagttaagccaaccaccctgggggacccggtcaaaagtagcagaaaagaatagagttgaacctaccaccatctgggtgacaagcctctgtttctcgaagagcattccagatt

SEQ ID NO: 374677 - DNA, 294 bp, Zea mays
attccccaaactttggggcccgattatcacaatttttgggggtttttaaaaacgttttacataaaatacagcatggcggggaaaccttttatttggccttgggcctaaattttagaagattcccggttggggggaaaacattttatacgtccttgggcctaaacattaaaaggggggggtccccactgggaatggtggcaaaggaaccggcaaattggcatcaagttttgggctgatgggatgccattaaacggggggtggagtttccgagaccccgggggagcctaaagccct

SEQ ID NO: 374678 - DNA, 318 bp, Zea mays
ggcaacaagccctttactttttacgggggagaaatttgattcaccccccccaccctttacccaaaaaaaatgggccgtttggggccgggcctttttttcccggtaaccccaagggttaaattaccttattaagggcccagctgggaccgaacactccgggggggggggggggccccccccctaaaaagggaaatctgggggggatccccttggaaaaaagccctgggggggccccccttgggccaaggggggggggaaaaaaccaactgtgggggaacccgggggggccgacccctggtccccaaatggggggggggg

SEQ ID NO: 374679 - DNA, 279 bp, Zea mays
gggggacatggtaaacttttttaaaaaaactacacacacaatacacagttgtttacacattttacaaagcaataaactgatgaatagctttactatttacatgaattttacgctgttggttgcgatgttttggcagatccaagcagtaaactggacagaacctcaaaggacaaatttttgttggtcaacttttcggtggtcttggactttgggacaggagacagaacctcatatgacaaattttcgttggcgtgggactcttggacaggagacagaacc

SEQ ID NO: 374680 - DNA, 142 bp, Zea mays
aaaaaaacgctgaattcctctatcctggcttgggtttgtcctttcgtttcatccagggcttatacaccacaccaggggataatccttggttacaaaacttttttatccttccacgggtcgctctctggcctgacctcaaagg

SEQ ID NO: 374681 - DNA, 348 bp, Zea mays
tcttttttttttttttttaattaggcttactgggttattattgttgcgaacgaaatatttacttaaggctaaacgccatagcaggttaattctcagaaacttgagcctaaaaaagagtctagaaatgtgtctggggatcagctgactgctgccccaagttggcacatactaggaacaaaagaagccgccattccacggatatagctgggaatgacttcttttgttaccgcgcaatggagccaccgcaacaccctgcagcgaaaactatatgtgttaaaagaaaacactgctgccatacaatgaaatggaacaggaaacatcgttttcatgatcgtagagccacccacc

SEQ ID NO: 374682 - DNA, 312 bp, Zea mays
ggtacaacaaaccaatgctccagagttaaaacttacacgcacaaccgcaacttgggtgcggggggggttccacacacaaatcgttagttgtgaagacagagaccggtttccaattacttaaaaagatacattacgcccacatcaactttggacctttcagtgataataccaagctcgctttggttcggaatcagtcgccgaatagagttaagggcagcaggccctgcaccaacgtggctttgacccgggcttggtttcgcttaagcttcctttttttacttgggagcgacaaatcgatacccggtttggggt

SEQ ID NO: 374683 - DNA, 442 bp, Zea mays
gtgatcaaagttctagcttaaataaaagtcttgcagtttaacctcagacaaatataagtcttaacagttctgtcatctggtacatgcgagattcacatcttgatcccagatacatacaagtcctcagattcttcggtctccggaacaaaataatgaacataaattatagacagacagccacagggaacacacggagccaagagataatttaccagcaaaccaaatgccattggttgttctagggaggcagaattttgccagcacgcggcagattattatagcagtacataaataatcattgatcgagagagatagaaatgatgaaaggaaagtcgcttggctgtccactatcagatggtatggtagaaataaacctgatgagttgagacagggaaaggaaaggattaacatctcaacaagaagcaacggtaataacagaaaa

SEQ ID NO: 374684 - DNA, 424 bp, Zea mays
cgacgataattcttgtgcttgtttgctctctgaaatagcatgttcatttgcatcctttgcaaattgctccagaaggatagcagcttcctcctcggcagcaatacgggactcaagcacctcctgcaactccgaatccactgaatcgtagtcaagctcagcatcacgcagcgccgtcaacagcccatccttctccttctcgagggcagcgagggagtcgctgatactctctgccctctcaaagtcctcagcctcgcaggccacctccagctccctctccaaatccttgtgcctggatgccacggaggtcgcctcctccgccaccttcctccgccggccagccagaagcctcctcttggcagccacagcagcagccctctgctggatggagtcgagcttgcccgagatttgagatctgaggagacct

SEQ ID NO: 374685 - DNA, 312 bp, Zea mays
cccaatgggggagaacaatacaagggcatgcatgcaaccctgggaaataagagagcccaaaagctaagcagaaacaatgcctactagatgatgcggccccgacagagaccttgggatctaacaggatgatgtaaccaacagcctactattattactacggctaaggctagctaccgaaggggttcccgttacggccaccgacaaggggagggattgggtccaaaataaaaaactggtggggggggggcctccacctccatgggatctaaacattattgcttccgggggtccttccatcctttggttttttcc

SEQ ID NO: 374686 - DNA, 394 bp, Zea mays
  unsure (1)..(394): unsure at all n locations
gaattcaataatagaagggcatagtataagtcgcatgaagctcaccaagacaagcatttcataaaagttcaaccaggcaaagccatcataagacactaagtacgcagcgcaggtagccgaaactctcgcggactttgccgtattatccagttttccactaactttcgtgtgatttcttggttgctccttttcgttaccaaggctcacaagttctgctgactttgctttattgccatctgcttttccactaacccttgtgtgtgttttgccttgctccttttctttattgagcagcaatgttgtttcatcaaaccctaaggaggaatagtgttcaagcttggctctacgcttcttatgatccattaacttcgngttgacttgttctactacattc

SEQ ID NO: 374687 - DNA, 215 bp, Zea mays
aagatcaaaatggctaacatacaagataatccagtatcgagtgaaaacgtgttggcattcgactatccatccttatggaccaaccggattcttttttggcagtcttgtcgcagcgtgaacttaacagtgaacagcaaaggagccgagaaaaccacattaccgtgagacggctgcttacaaagcaaatcaggaggatttaagacggcccaatttgt

SEQ ID NO: 374688 - DNA, 328 bp, Zea mays
gggaaagcaaaaaatattaaaaggggggcaaacaatactttttacaattggaaattaggtagcacgaataaaaaaactacaataaaccgggaactgattatagttgtactacttgactaaaatgggctttaatacatctaggggcccacacatgatcccttcaatgtcagcacaaacgatacctttcctcccatcgatcttttctccttttttcgttggccattttggctcttctgtcttggagagcacacacgagtaatttgattctcattttctttttgagggagatctacagagatctgttttttctctgggcttccgatccctc

SEQ ID NO: 374689 - DNA, 448 bp, Zea mays
aaagcgaatagttgactccttcgtactgataattgtatatagtctaattttatttaaatcatcagcaactcaactcacgtagcaacgcgctgagtattatatctctagctagtacaaatacaaagtgagcacggaaagagactaacctcccaaactaggtcgggcgctcaaattaacactaagatcgaaagcaacacaatgaggatgtctttcgaacgaaattactgattgcctgttatgttgcatttgctttacaatgtcccttagtgatccagtacatgccgaaacaaagaacaaggtgaggacaagagtttcaaagcagtgctgttcactgaaatagtggccatttcgtgtcacccgttgcataagaaatgatgttctttttcagtggtgatatgtactgggcaccgtggaacgcagcagctctcactacattaaggggccccaa

SEQ ID NO: 374690 - DNA, 276 bp, Zea mays
acccaaccatttcaggccatggcagttttcatctgaattacctagtaaaataacaacattattgccacagatttgccaaattatcctttggctaaccaagaagagagcaagaacagggttttgagaccctagaccaacatgttacattttagaggggggggactccaacatcagcaaagcaatcagggggggggtaacaacaaatacaatagtttttttcacgatgtttgaaattgcaagacaaaatgcacattaccagggttaaacatgcctgaa

SEQ ID NO: 374691 - DNA, 388 bp, Zea mays
acacaacaacctaataaattgcacccaagagaagaattacacgagttgattacacaaagaatattacatattctatattctgaatgcaaactgtaaacaattacacacaagttgtaaatcaaccaaacaaaaaatcatcacacccacaacatgcctaaaacacgtgcagaataggaatacctccaatgctgggagctgggtcaaacatatttttaagcaacaagaattttgtaggtgtagatatggtcacattctaagtggtaacaaaaagcacatgtgccccgggaattgatccaacaacaacaattgttggtgataaaagagaagcagctcctagaggcccaatacctgaagtggcgggtacaaccactccagcatcaccaatacc

SEQ ID NO: 374692 - DNA, 403 bp, Zea mays
  unsure (1)..(403): unsure at all n locations
gccatggttctgtcctccagcggcgcggcccccggtggcacacaggtgaggcggcgagcaggcggcctaggtgcgcggtcgcactccggtgcgcggtgggcgcggccccgtgcggctatgggtgctgcccggcggccatggcgcgcggcctcggcggcactggtgctgccccagcggccaacgacgcgcggacccggcggctcgcggcgcggccagcacgggtccccggcagcgggtgcgcccccctgcgcggttccgggcagcgtccatggccctggcctcaacggcccgggcgcgagcactggcggcgcgcgcagacccgncgagtgcagccatggattcggtcaggtacgtccacggcgcggggtgctttgcgcggctccgcgacggcgcgcaggcggct

SEQ ID NO: 374693 - DNA, 313 bp, Zea mays
  unsure (1)..(313): unsure at all n locations
gacacgctacacgacagtacttactgtccatattaacatttcaagattatctactcttgaaatgtcaccatattgattagcatatgtacgaggtacacactagagcaagagatcatcccagatcaacgctatactgttcctagtgctctgctcaaagtccaccgtggcctaagcctagatgattaccgccttttgctcctcctccttgtcgncgacgtcgtccaccgcggcgtcggcggccaccacccggttttgcccctcgtcgccgtatgcccagccacacactgcgaagtacagcacgttggcggcgcat

SEQ ID NO: 374694 - DNA, 388 bp, Zea mays
acaacgcaaatttatatatattaccacgggtacaacgtgcatctccgttaaagcatacacaggacagaggaaacatagtagtggaatctccaagcacaaagctacgtctagctcgtagatcagagaaaaaaaaggtagctatggcaataaacacaagaactgaacacaatatatggtggtgctgagaagctccagacttcaatcaccatgtaaagcatttgacggggcctgactttattagtagtacctacgccggtattcgatcacaggatcgagatggatcgtgcatcggttgatatctagggtcaccgaagcatttcggtgacaggtgtgttgctgtcgagatcagctgcaaaactacactgggaagacctcacctgttacttga

SEQ ID NO: 374695 - DNA, 400 bp, Zea mays
ggggcgaactggggcctttttataccctccacgcgcgccaagacaaccatgtgcagccaacaataatgtggcggtatttacaattcggttattcagattcaggctcgatcaaagggctctcactactacccactcggtaacaacctctgatgaaaacgttggcgcgtggcgtggcgattgtactgtccggccggccggcctgcctgccttccgatcgtgccttgtgtcttgtcaggaagccaagaattataatttgtcctcgatcgatcgcactcgcagcgaacggccaatgatggcttgccggccgcccgcccgcccgccgaaactgatcggtactggatggagaagcaaccatatggcgcgcgcgcgtggtggcaaatggcaatcggcatgcatgcat

SEQ ID NO: 374696 - DNA, 220 bp, Zea mays
gggggccaagaaaaatctatcccatttgatttggaaaagaaaaccccccgtttaacaaatttcaagggggaacccattcatgggggtggcgggacacttttttcccggcaacgtaaacccagggttaaataacctgggcccaataaaaaattaataacaatttatcgccctccccttgcttagcttaactttggaggatggcggggcggaaatagggccc

SEQ ID NO: 374697 - DNA, 450 bp, Zea mays
agtacttacgtagtaagatatatatatccctctaatttcggtgtgacgcacgcaagtggcctggctttagaggcgtagctacacggtattctatgggccagcccacaggaccaccaatcctaccacgcacacagccagcaggccgacttgcaggcctggagcaagtgcaaggatcaatgctaaaaaaatcctaagcagacaaccggaagttcacgtcgttgtggctcctcctcctgcccacgcttgatcggctgaatgctgatcgccttgacccgtgacgccaccggtccagcacagcatcaagaaggctgaaggcaagaagcacaggcaggccgcaccagcgcacctagccacctgccggtgccgtgtcatcgtctgccgagcacccgaggcggccgagcgttcgtctccatggtatatgcttcttcaactccggcagtaaatcaaggg

SEQ ID NO: 374698 - DNA, 298 bp, Zea mays
gggccaaaaaaaacaggacccccgaccggaaaaagggaaaccctaaaggaaagttcaaaacaaacccaccacaagcaaacccgacccggcgcctgaaaaaacacaaggccgggggggggggaaaaccctttacatttacataaggggcagggggggccccatcgcccccggggaaaaccaacttcccaatggggggggcgggggagggtacacaaaaacaggggaccccctggcggggccatgggatttttttccaagaccccccccagggtttaagggccccgggggggcccccggc

SEQ ID NO: 374699 - DNA, 297 bp, Zea mays
aaaaaagaagatgtatacagctgtgtgtataggagtattattataataattctaaacgacggtaccaatgccgtgagaagctatctttagagtaacagaagcaaggcaggtaaacaggctgtaatgtcgattggcattgtactatactcctaattaacttgcgttgagatttgtgaactgacattgtaaacaaagatgtagtgctgattggcatttggcaacacgtacacggtccaaggagttatcgggcttcaccacaaattttggcaaagggaagggagtttcattctgaacatg

SEQ ID NO: 374700 - DNA, 363 bp, Zea mays
  unsure (1)..(363): unsure at all n locations
tttntttttatttttttttttttttttccatttttttggttcttttgcttttttttttgttttttttttttttttttttttttttttttaaagccaaggaacccgcccataaaaagaaagaaagaataatctgccgctaaaaaatgatttcccaaccaacagggtttaaagcctttatcatcccacccaaatgaagccaaaaatttttaaaaaaaggggggggggcccccttcgggggcgagggcgggggcatggcccccgcttcaaaattttatgggggggggggtacccggcctttgttttccgggtttcgccaacgctttgccatagaagggggggttttttttggaaggcccccccaaa

SEQ ID NO: 374701 - DNA, 244 bp, Zea mays
gccatcatgtttggaaacccaagggaggacaaaaccacaacggcccctgtaaacctgcgcaaacactggccaagggataaacggccaacaaacaccctttagctacattccgggggatataacacgggggcacgaaacttaaatgacttatggggggggcgaacaccaaacttacctgcataaggtaaaaacaaccaccctgggggccaaaacggaaactctagaataggggttgtaaaacttt

SEQ ID NO: 374702 - DNA, 100 bp, Zea mays
ggggggtacactgcctttgcttcacaatccttgtcagactgtaaaatcatattaccaaagcattcttcataagcctattatgcaatggcccacgcgtccg

SEQ ID NO: 374703 - DNA, 442 bp, Zea mays
ctggttctatttccaaattcaaagattcaaactagtttaacttcctgttttgaatttttattctttcaaatttctaattcagtcctaatgtgaatataacacctaattttggcactaaatatttatttttctctctattgtttaattatagaaggaatatttaacttagttagaatttccttcctaaattttagtattcacctttctccctttgaattttgaattcaagttgggtttaaatcttcagattccaattattgtgcacctcttacacaaagaacaccagcatgctatgcatttatatatttatttatttgttgcttaaccaaattaatgtttatcaattggttatgaattggaaaggcccttataaattctcaaaggtttcaaaaattcttgaaatactattattgatgcttttagttctttatttaattattat

SEQ ID NO: 374704 - DNA, 399 bp, Zea mays
gctagggctttttggtagcggtagttggcggggagcttggcggcccagacgcagtccgccgaggcggcgccgcggaaggcgctgttgaggcgggccacctggcagatctccggcgggtcgaggtagaggagtaccgccgccacgcagctctccggcatgtcgccgagggacgtctccccccactctccatccgcgcccaggatgcttgaccccgtccccatctatgacccaatcaccgtctcgggaacggatcgaattggggatgagaagcccgaggccttcagaaccactttctcctgagccaaaagatacgaaccttcgaagaagcccaaaagcagttcaccgccgggatggcaccgaccgagaatttgtgagaggcagccttctcacgcgaatagc

SEQ ID NO: 374705 - DNA, 176 bp, Zea mays
aggtggccgataccacatttttttttgagccgggaaacaacacaccttgggggagggggggcagatgaaaccatgcaaatgtcccacttggtttttacgatacaaggacccgggcaacttgcctcaaaaacccccaaacagagagttgtaaaacaggtcccgggcggacccgtggg

SEQ ID NO: 374706 - DNA, 342 bp, Zea mays
aatagaagcagagatgatttacgtagaagcggaaatgatttacataatttcagtacatttgcggtgagtgtcacgaaaattcgccaaagtccacgcatgacaacgcgaatacctgaaccatcagccacgcttgtttctcagtgccatctgcaagcggttcaaactggcagaattttccgtctacagcatcggaaacagaatgcaagccgaatgggctcagaaagatggtgatcccggccgcgcccagacgaacggtcactgcgggaccgggacgcccagccgaatgggctccaccggtgagtgcgtctctctcccgaggtgcttccacgagaccaccacgcc

SEQ ID NO: 374707 - DNA, 381 bp, Zea mays
  unsure (1)..(381): unsure at all n locations
cggggatccgtatctattgcatttctataaaaaataatttgagagtacaaagtcgattttattggttataccaaacaaatggttatcactatcactggcacaaatgatggctttattaaccatttggcaaacatatcgaagagcagcttttttaacagcaccgccgaacatctggcttctcagctctattcttctagatcacttccaaggaagcacccacaattatcctggaaaatggcttcttggtggggcagcacccacaattatgtcagggttcatggttaaaatttgcttgtggggnngggggggcaagaacttgttttctttgaacttcatgtctcctggaaaggcattttgcatgcaagaccattaggcatgaac

SEQ ID NO: 374708 - DNA, 349 bp, Zea mays
gctgccgcgggcgtgggagctggcccggccacctccgtgcggcggcggtggtacgcgcgcgcgggcgccgcggtggacgcagcggcgcgcggcgcatacatcgttggacgggacctggacacggtgagctgtatggtgcggcgcgcgcacgacgagctggagcacggtcgcgacgtggcgcgcatcgcggtgcagggccgcggcgagcgcccgctgctgcaggaggtgacgagggaggaggcggagtgcgaggaggacctcaggacgcagctggaggagctagaggagcatgtctgcctctgcctcatcaccatcaaccggagcaggaggatggtggcgcacgagatga

SEQ ID NO: 374709 - DNA, 320 bp, Zea mays
ggaacgggcaaagacgagtctttgtttttctttttgcatcttgaacgataaacaaagaagggtttttttcctcgtcttcatagatggatgctactcatcattccatgcccaggtccccttcgtagtcgccgtcgccgttcgtaagggtcacttcacgtattagttggccccatagcggtcgtaggggcggaagccgggggcgagcgcggccccccaggccttgtcgaccccggggaccctggcgccgcactcgtgcgcgtcccagccttcgagcgcgtgcacgatgcccgccgggcgccacgcgctaataacccttcggg

SEQ ID NO: 374710 - DNA, 185 bp, Zea mays
agccgccgcgttctgcgggtaccggcggctgcaggagcagctggtcacggacctgctcgacatcggcgagctcgcgggcggcggcgtccgcgccaaggaggcggaggtgtgcccgcccgagtacgacaactacgtgccctgctactacaacatcacggacgccgtcgacgtctcggatctggggg

SEQ ID NO: 374711 - DNA, 297 bp, Zea mays
ggggaactgtaagggccatttccatttttatgatcttaggcagttcaactggctaaccatgctaccaatatttttatacgtgaaacaaaaagaaggttgttttgaacagagggcaaaaaaggaaaagggtcaaaatctttatttgaaactccaactcctgaacaagaatggaaagaacccaaactttgatgggctgggcacctggggggggcacctgtacttggggcttggggccaccgacctttttgtggcgccaggctaatcctccagggcctcgtctgaactgatgctaccggg

SEQ ID NO: 374712 - DNA, 215 bp, Zea mays
cccactcgtccgcccacgcgtccgcccacgcgtccgggcgatacaaggcatgagttggagatggagagagcgagggatgaagaagatgacgaattggaagagcagagagcgaggcatggggatgctggcgaatcaggggagcagacaacaaggcctggtgaggatggcgaactggaggagctgaggataaggcatgaggaggaagtggaggagga

SEQ ID NO: 374713 - DNA, 221 bp, Zea mays
ggaacaaactcaggggcaatattttggcagtgggaccgaagagatacaggaacatatgactgtcccgatggactattgcacatgtggttaaagggaaacagaattcaaacgcgtcagattgcccttttatttggacctaaaacgataaacacatgtgattgatctttagcccttacagattcgaatagactgctaaaattgaacaattgatgtcataggaa

SEQ ID NO: 374714 - DNA, 405 bp, Zea mays
tgttcatttcttttcagctttaatagtaaataactgatcattaggtgcaattttctattcaagcaaccatgttacatgatcagttggtatttatggcacatcaattttgttagttgcgatgctagcattctgaactgtgtcatcatggtttgcttttagaactattacatagataataattgatttggagaacacttcaattcctgtaacaaacacgcaagttacgctagcatgtcatgtcatgtgcttattaattcaaaaacaataattgtgtgcatgaacaatagatctgtacggattgtttcaatcgtcaaatcatgaagcatccgctgccgtgatggaaatgcattgcattattcatttccgattctttgacatcatacattctatacgtgtatccttact

SEQ ID NO: 374715 - DNA, 114 bp, Zea mays
cccatcgtccggctatgttgaacagggcttatggttaaatttaatactagagttttaatcaccatgaattgttaaaccacgcgatttacccaccatgcaaacggatttctttta

SEQ ID NO: 374716 - DNA, 230 bp, Zea mays
tttttatttttttttttttttttttttaaccaacaggggtttttttaaatcaagacgcggaaacagaacacagaatacagcatcatagaaaagccccaagtgggaggcgagcatgcatgaaataaaagaaagccatttgcatggagggaaaattccgcggcttaccaagtcaaggagattaaaacccacgtattgaattaaaagaaaaacccttttcatcataaccggac

SEQ ID NO: 374717 - DNA, 180 bp, Zea mays
actatcacaaaacgacagggaacggccagcatataacaccaggaaccaaatataaaagaatcaccaattgccgagaagctcgacggacaactatgcatgcaaaacactctctacacggcgggacctgcttttcttacatccaaggtgagctaaaacctcatgccataccataacagaatc

SEQ ID NO: 374718 - DNA, 295 bp, Zea mays
tttttaataattttttttacagacacatatctaggggggtttaaaaagataatcttaagttctcacatggactcctagagtgaggaccctgtatattttgaggctatagcatatacggattggtatttagcacctaaaggccccattaatatgagggcactggtcgaccagggccggcgccccgttcatattttcaccctacaccccttagtgtaacaagctgggaatcctattgtagaaccgcacaagccgcatatatatacaaatccaccctttgcatatatcttattaagct

SEQ ID NO: 374719 - DNA, 251 bp, Zea mays
ctgggcaaattgggtattttcgatatatgtccggagggtattctctacaagggctggcgtaggcccaaatttgcttgaaaaccaatccataatagtccccgtagaaaaaaatggggaaaaacaatgaacgatgcactcattcatatggagatgctgttaggcaccccggggcacgggacccccggcggcaagctgggccccagcagctcgtacggaagcaccccggggccgaaccggtttttcctgcgctg

SEQ ID NO: 374720 - DNA, 454 bp, Zea mays
  unsure (1)..(454): unsure at all n locations
gaccgcgctgttctcctccaggtgtgcgccggccagcagcgctgccagcttggcgacgtcggccgtcgctggcgaggagccgccggtcgcgaagacgacgtggccgatgcggtgctcgttggtcagcgccgggcgggggctgccccccgacgtcggcgccgctccagtcttcacgacggtcaccgtgcgcgtcgcctcctcctcctcggggcctcggatcgcggccagcgcccgccacatcagcgcggagaccagctcaaacgggcccacaacctcgcgccgatggtaacccttgatcgcgctgagctggagtccctgcagctgctgctcggtgacgtggaaggagaaggacaccatgtatgnggtggtcgggaccacccagtgatcgccgacgggggccgcggtggccttgaccgacggcgggaccgtcacgctggtaggtggggccgacggc

SEQ ID NO: 374721 - DNA, 206 bp, Zea mays
aaggggcaaccgtaaagtattgggatataaaaacacattaaaattgcccgaccatgaggctcacacaggacaggaccggacgggaggacttccattatggtgggacagcttacgtatgcctcccttaaccgttacttaaacaacaggaagtagggcattgcaaacgaacaaagttgaaacgttctttcagaacggtgtactaacac

SEQ ID NO: 374722 - DNA, 170 bp, Zea mays
ccgggacccagtgcagcgcggggtagctccggtgaggccgcgagtacggcagcgcagaagaggaggaggtccccagactccttacccgccggctcctgaagctggggctggggaggggaaggcgaagggaggagagaggcgaggagggacttgacggctgcggatgcgcc

SEQ ID NO: 374723 - DNA, 278 bp, Zea mays
ggtgaaaaaaaacataccccttaataaaacatggtagggtgggattccaaaccctacatagatccattggggcacccttttgcacgcccaaaacaaaaaagggggtttaaaaaactggtgcagcaggacagcattttttaacgtcatttatttccaatttttgacataaaaggggggggggtaacagccacgctacaaactaaccagcctttgggggggcgaacttaaaagggggtcgggggcccgcccgtttgtttacttaaggggggcccctaaaa

SEQ ID NO: 374724 - DNA, 273 bp, Zea mays
ggggggaacctggcaaaacccgccttatgtaaaccccaaacagggtgggaaacaaaaacttacataaacttatttaaatcctttcattccacccccccaaaagggggtccccgaaaacgatctaccctggttacaaaaaaaattgggtgggggtattaaatagggcctctgcccccattaaatttttttaaaagggcaacgggggcctatttatatatatttgaaactaaacaaggggccggggggggggtccctgggaaattttttcctttt

SEQ ID NO: 374725 - DNA, 238 bp, Zea mays
tcgcgatctttttttaggcccggtgtcagatctcgccggggggatgggctccgcccactcgtccgtctccaccgccggcggcgaagacgaagaagacgacgaggatccgtccgcggcagccgtttccttcgtgggcgcacaggcgctagcgcccgctctgtcgccgtcgccggtccgtgtgcccccggcctccgcgtccaaagtgctggagcaggagcccgaggtgctgccgtgcctc

SEQ ID NO: 374726 - DNA, 156 bp, Zea mays
aatggtcgccccacgttggatgatttctttcaaaaaaaagggctttggaaaacttaagggcacactggagaaaaaaaaaaaaaaatttatttaaagagcttatgggttaaaaacaagccttggcctaaaaattgggagggaacacaaaggcgatgg

SEQ ID NO: 374727 - DNA, 200 bp, Zea mays
agcacaagaatggccatgttcctgggtttatctgtcttggactctttaacttatacatggaatgacactgaaaagtgtcattaatacaagacgctacaactgaatgacaataggcgaggacgtcagatcaatgatctttggacagatgctggaaatgcagtctttttttcggagccggcctaatggagtcggggtaacca

SEQ ID NO: 374728 - DNA, 157 bp, Zea mays
ctggcccccttaaaaacaaaaatttacttgcttcaggggcatccagcattagggtttaggaaaacggccaaggggccccaattcaagcatggccgaagccccaatggcccaacaccagcctaggggctcaacatcgacaaattttttacgagaaaga

SEQ ID NO: 374729 - DNA, 375 bp, Zea mays
gggaagagtattttacttccccaccaagcaccgaaaaaatacaaatgagttacaactcaacattcgccttctatttggaaccttttcctttcaacaaattaaaggggtatgataacagcaagatgggctattggtctttttttgacaaaccacagtaacttgggtgttaaactacgataccttttgaacatcggcaattgctgcttgaagaggtgtgcttgaagacgataccaccgtaacttgcatttgaaataagccgcacttatagacaaattaccatattgctggacgaccttcactcctaatgcaatgaacccacacctaggagcatcaggataacccttcatatagatgacgacagggtgctccttgaca

SEQ ID NO: 374730 - DNA, 233 bp, Zea mays
ctaagcccacgcagggaccccacatgccataatgcttcccttttgcccaaacggtatacagtaaactgcataacttcatctaagttgaccaaaggcatttgttgataaaaaaaaactaggcccgcccaaggattttctttatgaaaaacaccgacccttaaacagttttaaatttatttacccaaccccagtcccagaaaatatcctagggcctttgaaattttaatttaagc

SEQ ID NO: 374731 - DNA, 410 bp, Zea mays
gacagtaacaggtgaattcccaaagagaaatcgagctaaacgagtttgcagaacctttctttacaacagcaagacctgaaactgctatgtacagtattgcttctcgctaattaagtgaactgttacattaggactaacacaacattacttctccctaacttcctgacaacaacaacaaccgagacaaccaaagagactgcagctcccttcgtgagctagctgtggaacctttctttacagcagcaacagatctgaaactgctatgtacatcaagtgaactgtaatattaggactacacatcattacttctccctagcttcctgaaagcccaaaaaaacaaacaaactgtaagacaatgtcagcgcaaacagatcttagacaaatcgtgctcctgttatatcgacatgaca

SEQ ID NO: 374732 - DNA, 343 bp, Zea mays
atcacaaattcacataagtccaaatatataagttcgcaaattcacatgagtccaaatacataagttcacaaattcacacaggttcacatccatagttcacaagttcagacacacaagttcaaacatacaagttcaaacattagctccatcgctctcgatcaggacatcggattgttgttcgtagctccaccactggaattgagacatctgcccgcaaagtcaacgtgagggggaggagtcacttgatgagagccggaatccagctatagcctttgtttgtgcagcaacaacgaccattggtgttcctacctctctctgaaaacaatatcacacagaatgaaag

SEQ ID NO: 374733 - DNA, 143 bp, Zea mays
ataaacagttcatttgtttttgttgcgcacaccctataataggcatgtatctttgcaagaaaccatatccggatataaataggatgggacaactcacaactgaaggtctatgaaggacgattattgaagaggtggaccggccg

SEQ ID NO: 374734 - DNA, 308 bp, Zea mays
cccaaaaaaaaagggggcttgtcgtttgcaaccatcgcacaagggttataaaaacaaaacaagggggcgcgggcctaaatacatagcccttagtagtatcaaacaagggggggcctcctatattaattattaaaatactactcccccgaccaccggggggaggcggatacccccgtcttttttcgtctcggcgggggattgacatgcccatgacgatatacatgcccatccatccggtattatgggtgggtccttcaggcatccgagctttggggggcccgaccacagatccgagggggatcgatcag

SEQ ID NO: 374735 - DNA, 566 bp, Zea mays
gacgagaggaggaccccatttctattattgtcataacagaaatacaaagtggttcagatagtttccacactaccaacgcaaaataacaggaagaacccgcaaacagaagcgctgacgagccaatccgcttcggatgactcagaacagccgggtcccctaccaggcaacatgccaaccgacgagtttagagttttacatcacacaagtaccagaccatacgacataacagacggcagcaaaatagagcgagttcctgacaaagctaacaccaggcgagcagtcacgtcatgactcaacgcccgtgtggctgcagcatcccttccatctcatcgcccgacccgaggatccgatttcctctagcacttgcagcacgcaccagcatcttggcgccctcttgcagaaggtcctggagctctttcttgctaagccctgcccaagaagacacaagagcacccgcatggcatatgatctcattaggagaatttacaagcacatgatcaaaacacattttatttctggctttccagatagcccaacaaattgctgaaatcagaataacatgaaca

SEQ ID NO: 374736 - DNA, 258 bp, Zea mays
cccaggaccggtttttttagggggtttgcaatcccaaaaaaaaattttacaacgggtccttttagcacatcacatgaaaccccttcgcaggggcgtttttctccagctaaaaggggggatgttctgggaaaaaactggatgccaaaatccaacttttttacaaataatggccctgaggggagaaaatgaccctcattttacccatcctgaaaaccacctcctggctggaaagctgtagggcctgacctttttttgcaa

SEQ ID NO: 374737 - DNA, 275 bp, Zea mays
ggggaagcacaatttttttttattcatcgggatacaggggggacaggggacttgactccacaaaaacacgtacaggagggggccattagggccaggagatggggccaaacaacacacacccccgtacaggaatcaggggggggaaaaaaaattacatttcttacacctgcgggcccagggagtattgtcacccaagaacactttcacccccccaagaacggaccttgcccaaaaaaacaaagcattgggggcaaagggcatgcatgcatgccggc

SEQ ID NO: 374738 - DNA, 272 bp, Zea mays
aacagggcacattcggttttttttttacatccgaaataatctaggagggcacttttagcaatcagtttaagtatatacccccaaaaaaattaagggttaaatgggatgcttttaaacaaacaaggggagccatactcgtccttacatgggggccttatttcttcaccaaaaagctctccttgagaatctcagcagccaatattaggagctccaccatttccatgcctgcaaaaaagagggggtctactttcccagactttgatttaggggaa

SEQ ID NO: 374739 - DNA, 210 bp, Zea mays
gggggagggggaaaattttgggggcgggatcttttaaagggatttgtaaaggacaaaaaaaatttttttaggggaaaaaatttaaaggatgttcctggggaaaaccctagttttaactaactatgagggggccaacccattttattttacaaacccaataaaaataggggcacggaaaaatatgatagactaactttttcctcacaaaaa

SEQ ID NO: 374740 - DNA, 514 bp, Zea mays
cccacgcgtccgcccacgcgtccgcgcccgcccgcccgcagccactgcattcctgcctgccattatttcttcctcctcctcgctgtccatccgaccgtcggtctactctgcccgcccgcctgccatcattttcgccccgcccaagctgggagcaggcaggcagggagcgcggtaagcagcatgctgggagcgagcgccagcaggggcaggaagccggcgccgccatcagtgaagctgggggcggcgaacgaggcgccggctaccgtggccgcagccagcggcggcggcaaggtttcagcggaagatggtgtgggaaggtgcgccccgccgatagtctggcacaaacgcgggggggagcgggcgaccacgagccgtctcccggcgtaaagccggtgcccaccatccgggtcaaggccaagcacgccggcgtcacgcacgagatctacgtcagcgccgaggcctccttcggggagctgaagagctggtggccgccaagacggtgctgcacccggac

SEQ ID NO: 374741 - DNA, 234 bp, Zea mays
ccgaaccccccccaataaatttaatttacttggcgagcaagattcgacacaccaccaggtcgattttcacaaaaccatagtttcatctacgaaaaatttcttaaggttggaacagtttcaggcgcccatttcaatttgaaatagggggctggaaaactacactaaaccgggccaaaaacatggggtaaatcctaatttttccgggaaccgggggggacttgaaattagcaacaa

SEQ ID NO: 374742 - DNA, 455 bp, Zea mays
gattggcttttttttgtttgatccagggagcggacacaatcagcctctggtgcaggtaactcctgaatttactgtctgcagtttcgaaacggacttactcaaaatttatttgcagtaggacttattgatgttggtttctttacattctgcatggataaatcacaagatcagcttgagcattgtttccaaaggtcatttaaatatttatcttggatggaaatttccacacgagaattgtagtattctttgaccaagtgactagtgactatactagggagaagcctgcaggtttcctgattttttgagctaattcaactctgttggggtcccaagtctttggcagaacttgacttaatttaactttttagacagtagactgcctttctaaatggatatacatgtgcccttgcttatttaacagccttttgaaacttgaatgctaggcaatgtgaacc

SEQ ID NO: 374743 - DNA, 202 bp, Zea mays
ggtgtcaaacattggatttcttttattaagaggcgccattggtattgccaccatgtaagggcatagttaaatttcagccagaaaaccaaaaattttccaacaaaaaaaaaaggggaaggggcagggaacaaaacacaacctgctgttttcacgctatacaagggcgatagatttgaagccgccttcattaatttggggggca

SEQ ID NO: 374744 - DNA, 542 bp, Zea mays
  unsure (1)..(542): unsure at all n locations
gtgcaaacgtccagcccccatgacattttgtgagccaactattagtggtttcttgtgtgagcccttggtcgcgttgtctgctcattcacctcttattcaattgcttattctaaaaatgtgaggttggttaatctttttttattctccttttggagttccctatgtttctactaatagaaacagttcagaccttgctcatacaatcctcgggactgctgttgcttaatctttgtccttcctagagaaagtaaacaagacgatacaactgaataaaattgggctgaatatttttgctaggttggccaaacaaactaaaacactcagatttgctttcagatttgtctgcaaggctacatcactgccaatctttaaaatgaaactccaccactgtctttgtcgtcataaacctaattgttgcatgaaggccccaaacatattatatccaaggacatgctngctttctaatttttaagcactngatggtctttcccacataacgctttccagaatatgcactcttcattctacatatatgtgccagt

SEQ ID NO: 374745 - DNA, 454 bp, Zea mays
ctttctctcgtttacacatgcattgtctcctcggaggccctctaacctgtctgacgtgcatatacacacgtgcctacttctgacacgaacgcactacgctccagtcctatggcctggcagcaagctgccccagtacgctgctaggatggagacgactcgagaggcctagtcatcgcctgctgcttggtcgacggcgacagaggacttgtaggaaactgtagtagacgatcctgaatgaggagatagtgaattaacaagaccatacctagagtagcagaccacagccgctgacgcaaacatgctttggagcgacattcctgctccctctgtagtatccactgctgtacaggtgcccgcagggtcaattgggggtccagcatcgtgtgacgcaacccaggaccatgctgtagctgcattgcagattctaaaggtgatcgaatccagtgctcaagct

SEQ ID NO: 374746 - DNA, 374 bp, Zea mays
ttttctagaaccctcatctgcccataagacgtggatcagtttgcgactgacaacgaggctatctacgtcccaacaggacctcgctggattatgcagctcgcacatccctgaccctgtacacctaccatgatgctactgagggtgggataatgaaccattaagctcgccgcctgacttgaggacaagcatatactgcgaagataattgaactgattcaagcgcaaactcaggagagaacaaatactacatgttatgcttacaatcccacatctgtagccagtgctgttgctgataaacggaactgaccgattccatatcctgaaacggaaaagagtcgactcttgctaaggcaggaccctaacattcgaacaatt

SEQ ID NO: 374747 - DNA, 262 bp, Zea mays
tttttttttttttttttttttttttttttttttttttttttttttatgcaaggattagggcattaaacaaccaaagtagcacaaaacatagacattgcagttcagaagcatggaacaatccatagaagaccggaccatgctcccaaaccatccggctacaaaacttaatacagcaagggtacaaacaaaagtatcacagtttgatgattttgagaaatgggacttgtcgctgcaccgcaacaccttacgccttgagcttgcc

SEQ ID NO: 374748 - DNA, 362 bp, Zea mays
gccacttcgatatgtcactatcccaccagaggttgctgtctggaagaatcctgctggagatcgccccagaggactcgtatagagggacaccttgtctgacttgactaagtcactggacagagtgtggctgggcgccatggccaccatggacgcatactttgaatacatggctggggtttcttcagacgagcggcgaccattatcatgtgctcaacgtgctcgagactgatgctcacttactaagttcaagatacacaaggtgagtactctataccctgcgttgcgaaccacgggaagcatgccatgcttccggaagacgctgaccggaacaactatctccctgtaggcggagtcgtgttgca

SEQ ID NO: 374749 - DNA, 292 bp, Zea mays
aaccatgggcaaaacagtttccgggctaaaaaaaaacaatactagtttggtgttacaggcagcaggctggccatgcatgaattatgaccgatgcaacgcttaaggttcctttacaacacgcatgcatttagctttccacagaaaacaactgggggggggggcagcaggttttcttatgcaccaacgttttaggggaacttgggggtggggagcccctttttgttgaccgggtcggcgagaggggtcaaacaggttttggaacgggccaaccccggtgacaagcccctggata

SEQ ID NO: 374750 - DNA, 233 bp, Zea mays
cctgctgttgtatacctatgtgtgtgaccgtgtcgctgtttgcatctgcgtagttgattgataacgttcatatggcggccgagcatatgaatttcaaaggtttgccaagcgtgtggttactggttagactttgtgcttcctcatccggttgtgagaggaattgaagcacatttgaatttgtaagtccattttttgctacttcgcttatgtttactagcttcaatctatttctt

SEQ ID NO: 374751 - DNA, 382 bp, Zea mays
cgtgcgggccagccggagctgctggcaccaagggcgacgatactgcctgggtgaaggtagaccttgttactccccatccaagctccgatgatagtgtcgatgcgtatctgcttccaagttacaacgcgtacacatgccctggttctcacggatctgacccaggccctcgaatatagctggggtacagtaaagtgccagatagccaactattgaggaggctactgtgaactccggtaaaggcgcgctggattatacctgatcaactcaagactgtacttctattacgcgctgttcaccggcagactctcgagtcctaatctcatcgcagcatcgaacgcgcattgcttctgcgaacccaaaggctgcagtctacccacgccta

SEQ ID NO: 374752 - DNA, 285 bp, Zea mays
agagaagaatgaaatatgcatttcacctccgggtctcatcatattacaactctacatcagcatgcttaagcacatgcctgtggacacaaaccattaccctgtttactatacgcatcatccattagtatccccctcccactttcaatatttacaaagaggggtatagaatagtcttgtctcaaaacaagagcaggcacagcaccacaaacacacaggggaagaaccagatctggtgcagggacctctcgatttccatctgatgccgcctcagcctggggttcacgt

SEQ ID NO: 374753 - DNA, 365 bp, Zea mays
ctgtacaatcaactccaacgcgaacacagaaggtccaagggttcgactttccaagacattcaacactttccagggaaaaaaacaactaaggtcagattggtacatacagtactactagtttcaaaacaatcgattttaagaaaacattggaataatccgcacagaacatttttaaaacatcaacagggggggcggtcgtgaccataccacgcacgagtaaatattttacctgctgataaagcaaacttttgttttcgttgaattgtgattgctaaggatatactgtaatgacctccacatcctgcatgctggaattccgtacggagtattggaatgtccatccgtggcatgccccggcatgcacc

SEQ ID NO: 374754 - DNA, 460 bp, Zea mays
agctgctcgagggcttaacgcccttgacagagaggccaatctagttctaaatcctcaatattttgacaactgaatgatttttatagagttttagggccatgcctcagtctttcaactaatagccaaaagatggtttaaaccgttacttacagcatcaaggacaactgaatgaacttggtgaagaattctcaatttctctctttatagctagtactgtgtaccaaccaatcatttgattccagggtgggcgatggaccaataccaggatcttcttcatatggtgatgatgaagttggggcttgtggagcaactggtgatggtgatattatgatgcgcttccttccatggtaatgaaaacataatttctgttgaaaatgacatttgaaaaaggatggctgagtgtgatgtctagcttgtcaattggaaccggattagttgctccaatctacgatttaatttg

SEQ ID NO: 374755 - DNA, 183 bp, Zea mays
aggcagcaatggcgttttgacatttaggaattagcactacgaattcagtagagaagggtacacacttacaccagacaacacaggagtagccagcacgcataacaatggacaggcttaccgcaaataatctgatatttgccggacacaattcataatccacaacattgaagaaatacataagct

SEQ ID NO: 374756 - DNA, 374 bp, Zea mays
  unsure (1)..(374): unsure at all n locations
gtcatggctcctggattcactagtcctgcaactgctgtcccgagccttcctctttttttttgtgcttgggcctctcctcaggagccactctctctcagtctattcatgagcctgtccagataacctgacgcagcgaccacgcttgacaaggagagagataggcaaggcacaacatgagccgcgcccgaccagccgggagcgcgcgcaggcgaaggatggaacaatacgacggactatttcctcccggctacagtaacgactgctcatccctactactggtgcccaacgccaacggcactgcacaggatgagagaccggtagctaggcacaggaagcgtctagcaccgaggcgccgccgcngccgtggacaactg

SEQ ID NO: 374757 - DNA, 362 bp, Zea mays
aagggagtgttatgaaaattccacgggggaagcacacacattatgttctcggatgagttcctatgttggtacgtgggaaatatacttttctatacatgcttggggctcctagcttatgttaggatcattttccaaatgcccccaacacaatatctgctgtatgcaggaagtaacaaacaatacaagggacgtcaaagctatcctgctggccgctgctataacacaccacactttctaatttctaaacagactggagcctcaccgccgcgcgcatctattggtatcttgctatggcttcaagcctttttagtattttctttgtatctggtctcaatgacgatgatggattacagcaagccgtt

SEQ ID NO: 374758 - DNA, 429 bp, Zea mays
gtctttggtcctggattcactcgtcctgcaactgcggtcccgatccttcctctttttttttgtgcttgggcctctcctcaggagccaccctctcttagtctatccatgggcctgtccagattacctgacgcagcgatgacgcttgacaaggacagagataggggatggacaacatgtgccgcgcccgaccagccggagagcgcgcgcaggcgaacgatggcacaataccacgggctatttcctcccggctacactgactactgctcatccctgctactggtgcctaacgccaaaggcactgcacaggatgagagaccacgagcgaggcacaggaagcttctagcaccgaggcgccgccgcggccgaggacaactggaccgaggaggtgaccacaagacgcggcagctgagcgaccagcagtggagatgc

SEQ ID NO: 374759 - DNA, 100 bp, Zea mays
gtgcagagaataattttattggagaattgcaaaagatactagaacagaggaatgagcacacaattccatattccgtagatgaatacaactagtattccag

SEQ ID NO: 374760 - DNA, 366 bp, Zea mays
atagcatcccaggctttccattcatcacttaacttatccttgggctcaacgacatctcctttaacatagccctcgagtctctttgccttcaataatcgcaatgctcttctagaccatgccaaataatttttcaccccttctaacttaatctcatttggcattaggtctatcttctgaactgattctatatgagcaacattggctttaattgatgatggagcctcatccctttttgctgacagtaattcgaccaatttaccaagaacctgctcaattccttgattttcccccataatatatatgtaataataactaggaaactacttgggcagctgcgtcaagatctgggtcacaacgtctagaagc

SEQ ID NO: 374761 - DNA, 405 bp, Zea mays
gagagcgaataaagtctctaaatatattattgcttcagcaccatattctcccaggcaacacaaataatataacgatgggaaggaaacaatgacaaaaatctagaaaaattattagggacactataactagacaactctagacattcagacgtcttgcaagaatctcgttctgacgatcttcataatattgttgttgcttgtagttcatgttgctcaggtccaaatcaataattctatcctcttctaactgtctttggaacgcaaatttttctttctccaatttgagcctttcttcctgtagagcaaaggctttgttgcacctctcctctttcttcaattctttctgaatgtcagattctttcttctttgcaattagatagtctactgcttccatggtcgaacgtt

SEQ ID NO: 374762 - DNA, 390 bp, Zea mays
ctgcccacgattcaaggtgagcttaaaattgcacaagttctaatcatcaaacttgaattacctttagggccattacatttggtgaccataagggaacacagactagaattttctttaacaaccggtataagcttacataataaaatcgatggccaccctactttacaaaaagaagctgaacggccaacgcaaaatcaggcccacggtagatcaccatacctcatgatctgccagttataccaagtataacactgtttttttgagataatacaacacaacttatctccctccccaaatacacaatttgtggcacatgtacaaaggggaaacacgaaagaattacaatgctaactggcctatctatgctctgaacaaatctgaactgtatgc

SEQ ID NO: 374763 - DNA, 199 bp, Zea mays
aaaaaaaaggaaatactgttgtagtgaaccgtgtgaatacagaatggagaacaaggtacacaagtcatgcaataagtcagccttcctgtggatagatgaagcgactagtttcttatgaggttcaatgacccacatgttggaactgtcgttcatcagattaagatacaccaggggaaacacctgttagattaaccactga

SEQ ID NO: 374764 - DNA, 269 bp, Zea mays
gggacgaaaaatcctatatagcatttttcatcaaaaaatgaaatgggttcagtttaacaaagcgattttagatcctgaactaccccttcggggggggtaacttacacaacgatggggctgttttacaggaatcagaaactcccgataaaattttttcggccctacagcatttagggttcctcaacacctacatagcctggttttttgggcggcaaaaaaaattttggaaaaaattgggcaccccaaatttatcctcaaactgccttttt

SEQ ID NO: 374765 - DNA, 157 bp, Zea mays
aaaacaaaaatccttggatttagctttataaaagggccccagggggaagttgacatttgttggattgcataaaaagaactttacaaatgggccctgttttgcaaacccttaaaaaagggccagggtataaattttgtggccttctaaattttaggcc

SEQ ID NO: 374766 - DNA, 321 bp, Zea mays
agaaaaaacaacatttttgttttggaaggttagggacacattggcctccccatcggccagggacataatatatatggcgggtacccaaaaaccaaccgtttgagacccagggcccgctcagttacctcctagctaccctgggggagggatcgtttactttgggggaatacccgggggccccttaaaacctttttggaggataaaccaccgggcgggccttcacacgctttctataaaaaagggaagggccccgttttaccggattattcaacttcccaacggggtcaaaaagacttgttttatgcaaaaaatgggatgatg

SEQ ID NO: 374767 - DNA, 253 bp, Zea mays
gccaaggacagggcggcgtggggcccgagaacgaacaggacccgcggcgggcctgctggccggaaggcgtcggctcagagccacaagggggcgtcggcggcggcggacaacggctcggacagcgacgcgccgcccgaggaggccaagaagcagcctgccgctgacaagaaaggtggtggtggcggcggtgtcgccaagaagcgcaacgccgtcaacttcctcaaccggatgaagcaaggtggctcggcgccgt

SEQ ID NO: 374768 - DNA, 110 bp, Zea mays
ggggggggaacttatcaccaaccgttggggtggcaatctaagggttgaaatcacttgaaatctgaagtttgcgccagtaatatttacatatttccattctttaccacggt

SEQ ID NO: 374769 - DNA, 166 bp, Zea mays
aggtaacataaacctttgctgcggcctcatgtcgagaaacgaagtccattagaccacgcagccacggtcaagatggctggccgttgccgtgcatttgaaaatgataatcgacttaagatccgctaataatggattaagaaatgggcccagtaatcattccggccca

SEQ ID NO: 374770 - DNA, 315 bp, Zea mays
atagggggaaacccctctcccttgggacccgacagccggcagggtttacacacgtagacaccaaaacgcttttggtccgtttttttttagccccaaggggatcagcaccaattacacattcacaaaggccacacaaaccaccttcttcccccgttttttgacgtaggggatcagcacacgggacgaccgtacgagcgacagggggggggggacgctacaacgttttcctttgcccgacgaacctccgggcgacgccaaaaatgagagccttggtcaggagcccctggtcaagggggcaagaggccaaagcgaccg

SEQ ID NO: 374771 - DNA, 348 bp, Zea mays
atattatatatacacacacacttcgttcacaactttttgtttttttttgccccattttgcatatagcaatattcaacggcacaattacaatcccagtttccaatccagtgactaattctaatccaatttttagcgatcgcggaaaaaaaagatgtgggggaagttcagaagccccagaaggaggccgcctcggggtccattatgtggtgccgcgtcgaggagatctcggcggggttcacgttcacctccgaggtgacgccggtgtcctgcgacgcgccgccgctcagccgctccccctcgcccagcttgctgtaccacccgccggcctcctgcaggagctggagcacc

SEQ ID NO: 374772 - DNA, 261 bp, Zea mays
attcagaactgttgtcggatgccagtcataaggaaataacaatattacaagcataggctattgaacaccctcaacaaatgttctacacacccatgttcgtgacagctttgccacaataccaactcctcattacccatttgcaaggacaaccaaccattggtcaaactaacacatggtcatatatctagggaaatctgaaattatcttcacataaacatataaacacatgattgcagaagagctagcacacccagcatacat

SEQ ID NO: 374773 - DNA, 85 bp, Zea mays
attcgtcttgtatcatacttaatcgtaggaataaataacctcatttacaactcagtttcgcaaatttgcgctacccacgcgtccg

SEQ ID NO: 374774 - DNA, 438 bp, Zea mays
gccggccctttttattttttttttttgcatagcaatgacttcactgtacaactaaaattcttcgcataaaatgccgatagcgcctaccggcaaggcactaaaattactaagcaaataaattcaacttaccaacatcaaacgtgactcactactcgcgagaatgccgataaatcctggctcgagcttttgtcgcgcacgtggtgaatatcacattgttggctttgtcttcacttgactcttagaatttcttgatgacgcacggatcgacgacgaccttcaattgaagtctggagcgagctgtgaggtgggggtcgagccgtagatgacgtgtttgacaactcgacggcaaacgacgagatcaacgacacgattgtgaattaaagccgagcgagccgagagggcacgctggcgagcaggaaaccgcgcgagcacaagaca

SEQ ID NO: 374775 - DNA, 364 bp, Zea mays
acttccattggccggaatgccattttgttagtattgaactaaagaaccaagtaaccaacgcaatacagcggtcacaacacaagtgcagctctcaaagagtcagagccctctctctgttttttttttacagcattccgtcatacgctcggctgcttccctttgcctctctggctctgtcgacacgcttatatttcgcgacgagccggaggctcctacagactacgtcctaccattctgtctaccacccttccacttcagacgtttcagctccaccaccacgacgctgatgttgtcggtgctgccccgcgccatggcgaactccaccagcaccgcggcggcatcgctggccgagctcccgtggacg

SEQ ID NO: 374776 - DNA, 392 bp, Zea mays
ggagctaaacatcatctaagcattattttattattttagacactgactagagacgttgtggccaacagatgtaaaaaaaacctgtaataagttacgtcatgaatatatctgtaaataatatttttcagaagggctaaattgaataaaaaagcactaccgagctcgccccctgccttttcttctccggttcaccccctcgtgtgctttcactctcactcacactctgtttctctctctcggggagacgactgggcgaccgccggcgccgacctacgccaggtgcccaagccttcgacgggaccatcgccgacgacgagcactcacgaggtatgcgcacttcctgtcttcccgtccagatgtgcgaaaccgagcacacaaaccctaacttaaac

SEQ ID NO: 374777 - DNA, 398 bp, Zea mays
gaaacgaagactgaaggtgtggggtggtttatgaactggacatggcgaagtactttattcatatttttgcacgacaatggcactgcaaatgcagttgctccttgctcagctaggtaatgcagttgatgaactcgacggctgtggctaccgcgccggcggtgatggcgtccttgacgaccttgcctctgtcgctgctgctggcgccggagaacagggcgccggacaaggcgcccccgatcatcgcgttcttccagtcactgcgggcacggaccctttacacgccgtacaccatgcccacataaactccagcaacagtgcctgcgtgccagacaaataagcgtctggattagcaaacaaacgaagaagggaaaaggagccagcatttgcgtctgcagcga

SEQ ID NO: 374778 - DNA, 223 bp, Zea mays
atcatacacttctctttttcttccggataatatcggcgcctaacagtactttttagggagaaggggggtgggatggaattggaaggcacgctaacgaccatgttactgtactaggatgacgcgttgggctcgggcttgagcgagtggccgacacccagggcgaccacagtgtgctgggagtcgcagatcgccatcgcgagcgagaccggcatcatgcacagcg

SEQ ID NO: 374779 - DNA, 419 bp, Zea mays
gaggactgttgaggtgtcctgaatccaaacatttacttaatacttatatagttatatggagtcttcagacatatcgatcatgttgtctctttagtttttaccttaattacaatgtcatcagactgagccccagagcgccatgaaggtgaatcaattcctgcagcgtatatataactgctattcaatgctaagaaaatacaggtgaagcatgattcgtaggtacacagaagcaatattgaaggaacaccaaaactatgtcaacagggcagaaccagtgctggaggctctcacatagtgacgggataaaccgaggtaagcccttcccaccaaatgtgaaactatgtaacaaggtgatggaaataactaggacgaagacaacattctaattgtttacaataaaaactaatatttgcatacca

SEQ ID NO: 374780 - DNA, 324 bp, Zea mays
aatagaagggattgagaaggattaaaccttataaggttttgtttgagtactttattattgacctcaatccacatatattgaggtggattatggtgtaacttaaactaaattatacatcaatctatctcaacacatggatttatgtcaatactagagtatagtgctaatttcataatcctattttttaaagaatttttatttttgcaaagaaaaataaactaattttttatgagaaaatgaaaatcgtttagaaaaatagggttgttaaactagtcaaaatcctcaatttttctcaaaacgagccagctctttaacaagctacta

SEQ ID NO: 374781 - DNA, 217 bp, Zea mays
agggggtcaatatgtacaagatcatttccccccgggcctttttgaaaaatggaattgcaacgaaaaatgggggaaactggaccgaggaacgccccgggattgtgatttttgggcaacgcaacgcaccagcggttcaagaagaaacatgatgggaatggttggatccctggaatctggggcaggttcaaaattcaaaaaaaggcggccgggcgggcgg

SEQ ID NO: 374782 - DNA, 372 bp, Zea mays
gcgttttctgaggtcaattactgaacaactgaggggcggtgtgcattgctggtcaagggttcggtcaaagacttccattcgtcgtcactcatgtgatgatcgagtcaaattgccatatggtacgttaattgatcacgtgatgcggaggtccagagtttagtcgatcactacataccattaagcgtgggcatcttcacatggtgatactaacgcatgcacctgaagattggatgatctgatcaagctcccatcatgtgagatgctcgccaagcggacgtgatctaacaaacactaacatactgctatccaaggcaatcctcgattcatatgacacctccttttattctacacactctgatcacttatatgctg

SEQ ID NO: 374783 - DNA, 129 bp, Zea mays
ttttcgcctgaatacaaacattacccaagggagcacaccttaaaaacaagggcgtctttattacctccaaaaccagcgcaccatgtcatttcacactacataataggacacccaaaacgctgactaaca

SEQ ID NO: 374784 - DNA, 361 bp, Zea mays
ggagtaattgagcggtcctgttattcatgtctcttctacagatatgttactgctgctaaatgcatgagtgaagtttatgcaatctcagtacgtgccatggaaaaaaatcaaggatcaactgcattgatttttaagaactagctgcataactaattaggacactttgtagctgggctgtgacgatgcttagtaaaaactaaaaaaaaacagtgttcagatactaagtaaagatgttcagtcacctgtactttcatgtagaatctggggttctcccttacaagctccccgttcccttccatgagacactgaagggctcttgcggcttgcctgagtacccgactcatggtcgcccactgaggcc

SEQ ID NO: 374785 - DNA, 311 bp, Zea mays
caggaaaggttcggagcagtatatctcactatcacactttctatttcaaactcggtacattctacagggcaaaacagtctatcgcacggccatataagttcaaaccagttgacgtgtcaaaacaccaaagttactggcagaagatggcatctgatgaggtcattttacaacatagatccgcatcaaccacaataaaaaatgcttcttaaagggcaggggagctatcagatcatttcagatgacatctttacacgatcctattgaataaaacatgaaattgtccctcaaggatcggtaaacttttctgcctt

SEQ ID NO: 374786 - DNA, 257 bp, Zea mays
gaagatgcaggttcttatttgatctcactgaaccaagacgttaggccataaactatggccaaatgccggggctgagtccatgccacccagtccataaagcattaaagggtccacttatacatacacgcacgcatttactgaattacataggcaaatccatctactgaattacatgggcgattatgataatagagaaaaccgcgtccagttaacctatgggaagaaaatctacagaaaatcatgcttttcaaaattgc

SEQ ID NO: 374787 - DNA, 175 bp, Zea mays
ccaggaacaccatcctttattatttatcaggttttatataacattaaaagcccgcggggtttgcaaatccagacataacaaaggctttctttttccataccaattttacaacacccccacaatacttttttttttggggcacatagaaaatgacaatgtcgcccggttaaaaagg

SEQ ID NO: 374788 - DNA, 346 bp, Zea mays
agcaactaattaacacatacacagttctaaggttccaaaatacatggttccagtagcaactaaaaaaaggtaacacagagaaatacactcatggtttcggcacattattcatggttccaacatcacagaataagtttccttttgctccttgtaatgggggagggtgtgcctccttcctttctagctaaaggtgagcatctggtgggagccatccccaccttgctcctcctaataggtccaggactacacggggatgctggaacaattgaagttgacgtttgtgcccgcccatttatggatgtcgctgcagcaagctgtccaaggtactttgtagtcaaataagttg

SEQ ID NO: 374789 - DNA, 540 bp, Zea mays
cgctttccgcgccgaaatgcgaccgccgcatcaccggcgcctccgcttgctcatcctcctcgtagccgcctgcctcccgccgccagccgcgtgccggcatatctacccgcccccgccgccgctggggcggcggcatcagcagcagaacggcagcgctcctggcgctgctcctgctatacctctgcgctgccatcgcggtgcgccggttccgctcccgcggcgcgtcgctggcgctggcgcgggagccggcggcgtcccgcgccgtggccttcctccgtcgccacaggctccaccaccaccgtccggccttcacctacgagcagctgtgcgccgacaccgggggcttcgacccggcgcgcaagctcggggacggcggcttcggaacggtgttcctcgcgcacctggcgcccgacggccgccccgacgatgcaaagcgcctacacttaccgccgccgccgtcgtaagagcttccctccgcctgcgacgccatcaccaagtgcttctgcaacgagctgaggcccctggacgtgggcagggagc

SEQ ID NO: 374790 - DNA, 496 bp, Zea mays
tctagacgcgctcgcccagatcgagcgtcgtcgctcagctcgcccagccctccccatccttctctagccatggtgctgctcccagtcttctgctcgcccctgccctcagccttggcgtctggccgccactgccccagctttccatggcggcattttctgcttcctggtggccgacgccctccctaaactgagcaccgccgtcaactgcgccttggcgctaatcctccccaacctcttctttgccggtggtcgtctccagccccttccatggcacctagttttattcccatggcgagctcgcccaagcaatcacctccatcacagctcgccgtgcctgcgcagccccgacaacgactccctcttctgcgtcgcgccattgacccgctcgatggaatgccgcagcgagctctacccgatctgcaacgcctgcgcgccgtcgacgaaatccccgcaaccgtgttggtccgcaacaacacgtcgtcgatctgcaatccct

SEQ ID NO: 374791 - DNA, 549 bp, Zea mays
cgtttcggcctcacgccaccacggggggagcgggagcccgcgttctgtgccctccgcgccgctgcagtccctccccctgtccaggcggagagatcaggttgccggagcggagggggggattggaattggagcgccagcaccaccacagatggggggtctgctcaaggaagagggcccggcggtggatgtctccgtggagggtaccctggtctggctgcgccgccccaacggctcctggtggcccagcatcgtcatctcgccgcaagacgtccccgaaggctgcgccccgccgccgcgctgccccgccacgcccatcatgctcctcggccgtcgccccgacggaccaaccttcgtcgactggtgtaacctggccaggtgcaagcgcgtcaagcccttccgctgcggggagctcgacttcgagcagcgcatcaccaacgccctcacactcgccgccagcggcaacaggtccagctggagctacaacaagggcaggtacgcccgcatggagggcgccattctccaggccctcgacatagagaaggatagcgc

SEQ ID NO: 374792 - DNA, 223 bp, Zea mays
cctatgcgtccgcccacgcgtccgaatcgatctgtacgccttacccaccggccggtcgggcacctccaccaacctgctcgctccgtccgtcgccgtcgccgacccggcaccatctccgccctccaaaaccctactacccctgtagcctgcagccccgtgcccgccatggctaccaacggcagctacgtgagggttcgggacacggagagcagcctggagaagg

SEQ ID NO: 374793 - DNA, 374 bp, Zea mays
tttttttttttttttttttttttttttttttttttgttttttttttttttttttgggtttttttttttttttttttttttttttttttttttttttttaaaaccaaaccccaacaaaggatgggcccccaaggggggctttacaaaaacaaatttaaatggggggggggcaaaaaactggggggccctggaaaagacaaaacgtaaattttgggggagggaatggggatgggcccggcccaaaaaaggaaaagttgggccattgttaaaaaaaaaaaaattgggggaaccaacgggttaaaaaatggggaaagggtttttaaatgggtttgggcccacaaaattttgggttgcggcaaataaattttttgggcc

SEQ ID NO: 374794 - DNA, 230 bp, Zea mays
tgccttcatggttaaggaccatagaggagaggtgtactttaagcactatccaccttcactaaaagatgagggctggaggctgaagcctagctagcccgatgctgcgcgcaggcggcggcagcgagaattgacgtgcgacgacgagcttgatctcgctagctagagagcgaggatgtctagccggaggcccgcgtcgcgtggcaacattttccagggcgagatcaaccagc

SEQ ID NO: 374795 - DNA, 176 bp, Zea mays
gcgtactcctctacgcacgagcgcaacaccaggggcccactttttcgaagcggaggcctaccgagcacacctgcggaggagacgtcaggagggggcaagggcggaaaggggctcgggaagggggaggcagaatggacgcgcaaggagcagcccgaccactacccactagagagcga

SEQ ID NO: 374796 - DNA, 230 bp, Zea mays
gggcccgcggcgcggaatccggggggcgacccacgcgcgctaagaaggtgaggcggcagcctaggcacggcggcagtttaggaagcatgagctgaactaccccactcaagaaatggaatcggctgcacatggccatagccctgagatggggcgcacctgcactgggagaacaaagtgccaggtgtacacgggtcataagagcaggcacggcacatgcacccagaaggatc

SEQ ID NO: 374797 - DNA, 207 bp, Zea mays
aattgcacaaacgcaagaagctcaacaagacaagaaactgaggcaagaccaagaagaagaggaggaagaagaaaaaggcctagaacaagatgggaggcgaaggcagcacaagcccagcgcctgggggagccgcctgcgcggtctgcggtggcgccgcggtgtccttctttcttttcttccttctttctcctttggtttctttttttt

SEQ ID NO: 374798 - DNA, 285 bp, Zea mays
ggaccaaaaaacccctaaacctttccaaggacgacggggggggaaaccaaccgttccgttcccccgaaatatttggtagcaaaagcagtattttagggggggggggggggagtaggtggtgacccaccggccccgagtagtaaaaaaaactaggggcccaaaccaattagttagctttactggacaaaggaacggaaaaagggtgttggccctccaattggccgggatgactttcctggcaacaagcgttttgccggactttttgcggatgcggatggaaaaggg

SEQ ID NO: 374799 - DNA, 232 bp, Zea mays
ggaaactaaactccatagacacaaattttattcccactaacatcaagggggtcctttccctccccatttaccagttaaaaaactacgggaacaaaaaaaaaatccgaaattgaaaacaacagacgcgggtttacaaaataaatatttgtctccgggaaaaaaaggcagtaaaaggggggcaaaaaagctgtttaagggaatcccagcagggagaaccaccccccagggttta

SEQ ID NO: 374800 - DNA, 244 bp, Zea mays
aacaacattgccccccctccattaggggattggccctttttcccagggggggaaggggttgtttccccgaaaacccaaaggggtgaaaaagggaatccccttaaagcccctttaaaagaaaaaggctaaaaagggccatttgcccaaaaacctaagggggatgggcccccaaaaatggttaaaacggggctttttgcgggggggggacccccccccttaaagaaacccccaaaggagggggggg

SEQ ID NO: 374801 - DNA, 114 bp, Zea mays
ggtacttgctggtattgccatgtggttgctcagtcagtctgatgctgcagttaatgggacggccgacccggaaccaggatcggctgcctccagtctagtttcgaggtcggcttc

SEQ ID NO: 374802 - DNA, 197 bp, Zea mays
atctcgccttctcggggctgcccgtgcacctgtcgtggcgggtgatgttcgcggcggacgtggaacccaccagctacatagctgccggggtgtttaccactccgtagtccaccaacctcctcctaatccaacgatgcaacgtatcccatattgtctcctctatagctatcttctacctcattgatgtctcttttaat

SEQ ID NO: 374803 - DNA, 202 bp, Zea mays
ctgacgcgtgggcctgcagcaagccttgttccatgataccaccgtggggctctgcgttggggtccatttggcgtgtgccgcacgtccttcagttcttgttgcgagaaacaggttgctgggccaccgcttccagtcctcggctcgccggctgaccgttgtgcggctcggacaccactcctatgttcttgtgtctagttcccat

SEQ ID NO: 374804 - DNA, 120 bp, Zea mays
tctctcttccggcgactgggcagtgagctaccgccttcgccctacgccaggtgctgaggtcttcgacgatctcgagctcacacatgggaagctgttcaggatgggattcaaccgccacat

SEQ ID NO: 374805 - DNA, 197 bp, Zea mays
acgcgcgctacgcgtacgggaaaaatggtgcgagacagaaaagaaacggctgcaggagacatattgcacctggcactgatagattgagatggcagctctttgactggaactagcgaactgagccgatttttgtagacccaaatgcgttctaaagaaggtgaaaagcatggttgattaccttactttggtggaacttt

SEQ ID NO: 374806 - DNA, 128 bp, Zea mays
gtgcgcttcaatcgtggctacgctgatggggaattgatccgatatggctcgtggctgtgtagatgcggaacacattgtttatagtgcgcttcaattatgggtcaagtcaactactgatggaactgatt

SEQ ID NO: 374807 - DNA, 432 bp, Zea mays
cgacatagcttatggcatttatttactgaacctcgagagacattttcgcgtccaaaattgttccatcaaaaagttgctcctaacgcaggagacaagagagttttttactccctcacctcccgcaactcagttgacagcagctgaccaatccttagttacaagaaagaaagaaagaaagaaaaagaacgagagccttagcatacctgccgagcagaggctcaatggaataatcgaatgggggtctatatatacaggggggtttggggggtggctaggtgcctgggcttcaactacggaggccttgcttatctgattctgaggagctaataaatcggggggaaagaatgggggaggaggaagagcctgcacacgccttggatgggtcacatctcgcgcagcaggttgctgatcttgcggagctctgtcagggca

SEQ ID NO: 374808 - DNA, 297 bp, Zea mays
acatcgcagccatggcggtctctatgattcttcactttagatcatctctactagcctctgaaatcaatacgttatgtcttcagaggttattgaattttccaaacaacgttgatgtgcataagtttactgatgaaagctaaatctccacagtcttactgttcttgttgtgatttacatttttctcattctttctttcatatatggtcttgctttttcttctcttttcttcttcttttttattttctcctctcttttatttctcctattctcttcttcttctattcacttttttttatc

SEQ ID NO: 374809 - DNA, 157 bp, Zea mays
ggtagagggagtcccagcagcggagactgttggggggttgtttaagacacgccctagatgaccaccccggcccaagaagcctgttgttgccgcggttagcgcacggaggagccgtacccatagtgcagggacctgccgtggagatcctgaccccaag

SEQ ID NO: 374810 - DNA, 152 bp, Zea mays
gtcccgagacccttggccgtacgctctgcctgactcctccgtctattgcttcccttgccgccggcggagcgcggcaccgggcgcggacgatgcatggaggacttttttagaatgactccttggctagctcggcgcgttaggcatgacatgga

SEQ ID NO: 374811 - DNA, 265 bp, Zea mays
ccgtcaccaccaccaaccttggtagcaggcgccgtccggtcatcaccaccaccttggtagccgccgccgaagcgcgccgcggccgcgggcgctcgagatggctaaccgtacggaccccctagggatgagcatccaagggacgaacccacaaaacctggcggagatgatcgcgcgaccactggtcccgcgagcacgcccacctggacgagatagccgtgcagctctagttggacgccctccttgcctaccatgaggatgaggacct

SEQ ID NO: 374812 - DNA, 421 bp, Zea mays
atatcaacttcgaatgctgcgtctgttccatgaggaaacacatgccatttgacaattgacatcaaacaatgtaaaacctaggcggccgataatgatacacagcttattgtgtgtcccagtcccaaatattttgccgctcagtggatgctgacgaacagagtttggtcatgggtttatttgctagcgacagataatttgaacaaatggattgctgaatgctactgctatagattggcaggaagacatggccgtgactcctgctgcttgatgctgtccgcaacgtgcgcgataacaccagcgccagcattgtgaagccactcgttcttgacctgcatagatgccacgaatttggatggctcttctttaatacagaagaagtttggatcaaactagagagaaaaatacatcactccagaagaac

SEQ ID NO: 374813 - DNA, 301 bp, Zea mays
gtggggagaaaaacccccctttttccccccgggggggggggggggcccccggggccaaaattcccccgggggggggggggggggaaaacacccacccccaggggggggggggaagaggccccacgcggcccggggggcaaaacatgataaacacaaatgggggatgcttagacgtagatacatatggaggatggccaacattagtcccaaagcaattagtccagactgaattgtagaaaatgtaaacaattatctaacattaagtctgaaagcaatgaaacgagactgaatattacaaaaa

SEQ ID NO: 374814 - DNA, 110 bp, Zea mays
agcacccatgcccatactacacgaaccgggatatttttcgagagcggcgggacgttcgccgaacactagagactggaccgtcactgggctccgccgtcgctcttagaacg

SEQ ID NO: 374815 - DNA, 325 bp, Zea mays
gagtcttcgaacagggtatttaatgactttataatctgtttagtccatataatcaaacatgtagagactaaagtttagccttaagactaaagtttagtctaggactaattgaaaccaaacatggcctaaattatggcgaatctcggctacaattaatggctctcttctacgtaatcatcctcctcctcactagactgctcaccctcacttgcagcccccgcccccgcgtgattgttgtcatggtactgcggctggctggtaatgggagcgtggagcgtgacggtgcctgtcgccatgtctgatccggtaacagctatggtgattg

SEQ ID NO: 374816 - DNA, 319 bp, Zea mays
catgcgcaacaaattcagtatttatatgatcaggctgatgaagctacgaataatgtggcgcgtgggaacaaggagctataccaggcaatccagcgcaacagcagcagtagaacctttctcctactcttcttctttgttcttactttctcgattctttttcttgactggtacaacaactgaatcagtctataaagacgtcgaattgttctgctcatgcgaaatgatcaaattatgaaagctgtctatttaaagtgctgatcttttacgtaatcttttacgtcaaaaaaaaaaaaaaaaaaaaaaaaaaaaaataaaaagg

SEQ ID NO: 374817 - DNA, 466 bp, Zea mays
gctcagcgcttttcagggctcggcggccacggtggtcaaggcgctgccgtccacgctcgacgccttgctcccgccgccgccaccccctggcgccggcgacggcgacggcgacggcgacgacggcgggcacacgacgctgcacaggtccatgagcgcgcccgacatccagctccagccgcccatccggaagggccgctccggggaggcgcccatcatggaggaggacggcgagggcgacgcccccggggacgacgcggggcggcgacgggaggacgacgacccgcagctccagcctcctcctcccccaccgccgccggcgaacaatcccccgccctcgcgctccccgccgcctgtccctgctgcgaaggccaacctcgagcgggcgacggcagagggggattcgtggaaggactacctgttcggctcccccgacgccatgcccggcccgccgcccacgctggaccct

SEQ ID NO: 374818 - DNA, 420 bp, Zea mays
ctccaaactctaggtacagattatcacaattatagtagtattttagaaacgttttacataaaatacagcatgacggagaaacatctcatatgtccttgagcctaaatatcagaagattacagcatgacggagaaacatctcatacgtccttgcgcctaaacatcaaaagatgaggctaccaactaggaatgatgtcaaaggaacagtcaaattgtcatcaagttctgtgctgatgggatgcgattcaacgagtgctgcagctacagagaccacgaggaagcctaaagccatgtaccatgtttcctcaataaaaccgaaagtgtggaagtaatgcatatacccaactgaggccagaaaaccagccaccgccatcgctatgcttccagcatatgatttgttgggattgtatggaagcttttc

SEQ ID NO: 374819 - DNA, 533 bp, Zea mays
  unsure (1)..(533): unsure at all n locations
ccttctcgtccgatttggtacagcagctctcctcttggtccttggagttcacacaagcagaacccaattcgtaatacaggcaacaggccgagtgccagaaatggaggcaggccattcatttacaatgacaatctttatcgcataggcaaagatcgtggtggtggatctggctataccgtccaagtattcaaagttcaagtcctaacagcagatcattacaaggaagttgcagtcccatttgtgcttgacaaacccctcaaggaccgaaacgcatggaatggtgcaaggtcccatcactttgatgtccagcagcttccatcaagtcaacattggattggggtaatggatggtgacagagtgctctcaggtgactcaattcaccgtctgactataggctgtatgttttatggtgctgcttgcattttggtccttctacttggtgggcttattggtgcaatcaagtgcaccttaccacttagatggtatttaccacatactgagaaacngagtgacaactttgatatggagaagca

SEQ ID NO: 374820 - DNA, 283 bp, Zea mays
tgttgttagcgggctactgcggagggaggcaccctacgctgcatattgggctggcgacggggggagcgctaacagcgacagtcgaatgcggatacagggacagagggaaaagatggcgcttacgcataccaaactgggcagccccatactggacgagaaggatgctcagatgctgagggcgggaccggacgcacccggacagacctctaaaacttgcaaaacgacgctggggaagaacagcacaatgataatgaccattacattaaatgtggaaactggggag

SEQ ID NO: 374821 - DNA, 289 bp, Zea mays
gcctccatcaaacatggcgactgattacatcgaaatcaaacgaagggccacagcccacagagtatacaaaagtaaaatgcgtggatcaggatcaagttccgcagggaccagcaacagcaggccagcagcacaacgattcttgttgctccgtcgtgactcgtggcactgggcctactccttttcggccttcgccccgaacacaacttcggcaccgtgccggagcacctcggcgtcgcggcagaccctggccgtcgcctttgcgggcagggtcaccaccacgtcccgcgcc

SEQ ID NO: 374822 - DNA, 267 bp, Zea mays
aagggaaaaaaaaccccggccttgggcttaacccttttacccgggcccggaaaaaaaaagggcctggtaacccaacccggggaaacggtaccaccccccccccgggaaaaaaaaccggggaaaacccggggccgggaaaacaccccattttagggggttttttgggaaaaaaagggggggggtcttttaaaggcccccccaaagccttgcaagcccaaattttttgaaaccgggggggttcccccggccccgcccaaggacccccgg

SEQ ID NO: 374823 - DNA, 258 bp, Zea mays
cctttgttatcgtccgggcattccatcaaattgggggggggtttctgaaattggacgagggcacaccaaccttaaatgtggctgaatcaaaatctgctggtgaaatgctgaagttgatcgcttgcataatagtctgaaagaccttgatgaataacaagagttccaatttgatgcttgccggaagaatcagcgaactgctgacattcttaaaaggcaaggggcacaattggtggaacttgagaatctttataggtaggg

SEQ ID NO: 374824 - DNA, 187 bp, Zea mays
  unsure (1)..(187): unsure at all n locations
agactttatgctagcattnncaagaactctctcgcgctctctttaaaactcacgggcggttttttacccaaccncgcccccacgcggaacctgttttactactctctgtttggtggtttctgaggccaagtgcccgtgtactggtatcgtaaaaaccgagagggacatctgcatcgtttcatctgcc

SEQ ID NO: 374825 - DNA, 399 bp, Zea mays
ttataacaaaagcataggcatagcaaagcatgcttcaaatggtagcaaatgatgataactatataatataactattcatctaagttcagtcttttagggcctatatctttaccagccttaaccttatagtttccaggaagaacattcttgagctgatcctttttaaaagaatagaatagagcatgttctggtatttctgtgagtctgttcttaactgccgggagcctgttctagtatttccgaccaagtccatttcgaccactgtcattataactgttgggagtctgttctggtatttctctgcttgcataatgtgtgtttgcctcaaagttatttgtttcggtgaaaagtgtgtgattggtgggtgataatgtggctgctaccggcattttagttttt

SEQ ID NO: 374826 - DNA, 205 bp, Zea mays
attgatgtaatatatagttttatagatttgcgctcagcagcttattattcaaatgaatatcatcatcatactagcaatgcatgcttaacaagaacttgttaatggggaaaagaggaggaatggatggaaacacacaaactcagagtgagtgagtgagcgagagagagagagagagagagttcttgaaaatgctagcataagttct

SEQ ID NO: 374827 - DNA, 200 bp, Zea mays
  unsure (1)..(200): unsure at all n locations
agacttatgctagcattnncaagaactctctcgcgctctctttatagctcactcacgcactctgagacngngngnnnccatccattcctcctcttttccccattaacaagttcttgttaagcatgcattgctagtatgatgatgatattcatttgaataataagctgctgagcgcaaatctataaaactatatattacat

SEQ ID NO: 374828 - DNA, 440 bp, Zea mays
  unsure (1)..(440): unsure at all n locations
cacccgacttacttaacccccnnnnaaaaaagccaagaaccgggggatttgaaacccnaaacccccattataaaannnccaaagggaaaagccgaatccggcccaaatctggacagaattaacgtccagaactggtggacatttctaaatgttgaatctgattgggatgataataccaaagttgtagaggactttataagattttcataaagtcctattttactatttttggatgcatattttgtgagttatgagctaatcaaatagctgttgttctgctgtccaaattcagcaagtatgagatgatttcttagagtttcttttgtgtggataactagatgtggttagttcttgtctagattaatgaaatcttatagttgcatatggnggtttcttttctttcttaatgcttgtcttacactttagcattttgagaaaga

SEQ ID NO: 374829 - DNA, 396 bp, Zea mays
atgggcataagttatcaataaaatccgattttatgtaaaataaacgtaggccttgtcatacaaaacttccacaacatagacactgccacacaggtaaacaaaatctgcgcttgctgacaggagttgcgggtgcttcacaacattgacagggtcgatcaaagcctactcccctttccagagctcagcaaactcatcaggctccagcgtgttctccatctcgtgcatcttcctcctcaccttggccttcaccttcttggcatatttgcctgccttctgcctcttctctagtgcacggatctcaaatctcgttctcaatgccttaaagatgatgttggtgacttggtgccacattcagctcaaatcttgttcttggatagttccaacactcgattcacc

SEQ ID NO: 374830 - DNA, 293 bp, Zea mays
ccacagatgaagagaaagtttttttttttaaagggttgataaaaagccgggggaaaaccccgtgcccccatttttagcccccccccattttttctttttcaggggggggggaaaaacccccgagtaggaaaatgttcatgcagggacccacaccccacacattggtcaccaaacacgcgtacgaagtaccatgcccccccattattagtaactacccatgatttacataggcgggcaatcaaacccccgggactttgttcgccctccatgcatgctccttttgggcctggggg

SEQ ID NO: 374831 - DNA, 437 bp, Zea mays
tacccggcccaacgtttaaccccaacaaaaggaccaccaaaccccgggccaattaaaatccacggggcggttggacccacccgagcaaaaaaaaccatccgcgacgcagcgacgcaggtttgttctctgatctctctggttcttcttttagcagcagggacgcacaacacaagaaaaggtccggttcaagaggctcttctgttgggtttttttagaatcctcaagagaagcgtgttcttgggttaggatttttttctcacctcataacacctctcctaggaggaacagagatccagagaaccttttttctcttctggatccttgccgccttttggcgttcgaaagggggttgttttgcaataccctctctccgtttatcttttctttcctggcacaaacccacctcgtttctctacttttattgaggaacagagctg

SEQ ID NO: 374832 - DNA, 332 bp, Zea mays
ggaccgggcccttagggcccttatttttcttttaaattaaaggcaccccagccttctggggttcggggggaaaaaaacttactggcaaggttgtttccttttggttccttaaaatggaaggcccaatggtttggtaaatggccaccttcttagggatttaccggagcttgggattaaggcttttatttaaatggaggtcttacccaataaggtttttaccccttccaaggcaaatggtcttggttggcccaaggccaaaacctggttttggtggttccgggggctttggatccaggttttccaccccgaggggggcccagggaaccccctta

SEQ ID NO: 374833 - DNA, 495 bp, Zea mays
cccctagctctgcggggacccgctgccgccctgcgacagctttttctttcccccagcaccatcgtccgggcttagccctggccccgcgacgggccccgccaagaagcggaagctctccggcgccgcaatcgcgggcatcgtcgtgggcgccgtggtggtggtgctcctcctcctcatcgccgtcgtgctctgcgcggtgtccaaacgtcggagcgccggcgcccgtgaggggcccaaggccgcgacgtccgcggcggcgggttcgggagcggccaggggccagcccccgccggcgtccggcgagggcggcggcatgacgtcttcgtccaaggaggacctcggaggcggcgcgtccgggtctgccgcggccgtcgcagccgcggcggcgggcggcgccgcggtggagcagagccggctggtgttcgtggtgaagggcgccgggtacagcttcgacctggaggacctgctgcgcgcgtcggcggaggtgctgggcaa

SEQ ID NO: 374834 - DNA, 268 bp, Zea mays
gggaacccaagattatgcccctgtagtaatgggaagttcccaaaaacagcacttgggaacccgtacccaaaatacaacttagggcattatgttatgacccgacatttttaaaaacttcgcaacaacaaaaacttttttagtttttttctttttggacacgtacaaaagacacgagcaagcgtgacttgggtgcggttttagacttttgttgtctttggagagtttttgggcgttttcagcgggagttcctgggccttgcttgtcttgg

SEQ ID NO: 374835 - DNA, 476 bp, Zea mays
aaaggaaagcgctcccctggggggggcttaacgtaacccatggctaccatcaccaacccggacccgtcaagcgctgcgtcgtcccgtgcaaagaccgcgcattccgtgcgtgccgtgtccacgcgcgcgcgcgcggtggcgttaagttgtcgagcgccagaggagcgccactagtcgtcgatcgatttgacccaggcgaggaggcgtaggcgcgtaggggagtgagtctagctagctactggtgttgggtccattattcgctagcttccgacgatggaggtgaagaaggaggccacgaaggcgacgctgcccgcggggttcaggttccggccgacggacgaggagctgatcgtgcactacctgcggcggcgcgcgctggcctcgccgctgccggccgccgtcgacatcccggacgtccgcatcctggcgcacgacccgtccgacctgctgcccccaagtgagtgagtgagcgagtg

SEQ ID NO: 374836 - DNA, 435 bp, Zea mays
cccatgctttcgcccacgcgtccgcaaagaacatgtgaaaatttcaaggcttgcaaaattaagtctaaaatctattgtaggcagtccaaattaagagtatttcttactagtaatttatttgaattcaacaagccttttccaatacaagaatcatctttgaaaaaaggatcagtcctgaaggactgaaaccatcatgaccaggtgggaactgctaatctcctaatctggtttttcttcattgaagccacatgctgcacattcttcaagatgagccttaggtacatatatcactccaggaatagcagcactgaaaccattccctttaagatggaggaaccattgactgcctgactaaaagataatagattaaactcaacataagtaatgttacctcctgtgtgaactatcaacttgtggagtgagtagcgagtggca

SEQ ID NO: 374837 - DNA, 377 bp, Zea mays
ttttttttttttttttttttttttttttttttttttttttttaaaatcttgaccaataagaatatttgcattacgaagctaaagcagtcaatgaatactacaaatatactcagatttgggcatcactttcaacttcactgggaaggaatacttaatacatgattctcatcacatataggagaaaatgtgtaccgttaaattcagagtttcagacatgaaagtagaccagtcccatgattacaaatagggaatcaactcaaccgcatattttcctttcctcggagtcacaatttccccaatctagagaagaaatgaacaagcaacataaataaatgaagcagatggcattatgtatttaagtacacaatgggcttcag

SEQ ID NO: 374838 - DNA, 324 bp, Zea mays
  unsure (1)..(324): unsure at all n locations
agcagnggatttcaaaatctgattggtgggattgatagttctccctaatatcaatgctatgcaaaattttgaacttgttttgttgggtattatctgcgaaaacatcaaattgaactcttgtggcggctagggttcttggagtcgcccctggtcggncgcggaccgtccgcccggtggacgcggaccgtccgggcctctggcgcggacagtccggccccctagcgcggaccgtccggaccctggcagagcattaccattcaattcctttttataagtggtatttggtagcaattatttatctatggatgcctgtcaccttgttgc

SEQ ID NO: 374839 - DNA, 246 bp, Zea mays
ggccaagaaaaaaagataatttggggctaccaccggggccaggcagccataaaaaaaggggtgcaccacggttttttgaataacccaaaaaaaaagggggagtgcccccccttaaagccgggatcccaaaaccctggtccccctccttaaactttttaaaacaggggggctttttaagctaagggtaccccccaaaaggaactctgtttgaagggcttccttgcccctgggaaaaaactttgcccg

SEQ ID NO: 374840 - DNA, 376 bp, Zea mays
ctcttcccaagagtgcagctacgttttcattatattgtagatgggcaacaactttatggtctggggagtggggagcggtagaacaaactagtgatgcatggtccaggcttttgcctgctcaaaccgagcaaaccagtacacggacaggacttctccagcagccatggaacacacacacggcacctctactgctccacagcatgcgctaactcctctgactttgacagggttaaaatattgacatccttcggcttcaaacagacaaaaccccaatttgaatccagacaccaaatgtgcaaggagaatcacgtaagatttccagacaaccaccatgcgcaaagcttaggcagcccatcctcaaagctcttgtcacact

SEQ ID NO: 374841 - DNA, 487 bp, Zea mays
  unsure (1)..(487): unsure at all n locations
agcctggcacggtaattgcattctctatctttggggataattttaaacaagntgggcgctacttcctgcgntgntttctcttgttaattctatcgctacttaccacgtcaaaactagatcaggcactgtaccttttcttgctgttttgctgtcccttgccaagttgccatgacatactcgaatgcataaattttcaggaaagtgttggactctgttccatacttcttcccaaaagcatttcccaactttaatattaaattcttgtagttaggactgacctgatgcagtggtgagagctgtcccactgagtcaataggtcgcgagttcgaagcagtctctctgcatttttggggggagtcttgtgttggttaatccattccaaggccccatttatgtggaagctgttgtcgtttggatcgtttggggtttgccatgggaagtcggagctgctggctgctttgcagttatgcttggcacgatgactcat

SEQ ID NO: 374842 - DNA, 441 bp, Zea mays
cacaaattaattcaaatgtgatttcaaaaatgaattcaaatggttttggttctcttcaaccttgagtttttcgttcatgcgcagggatgaacgtcatcgagggagttttgaccgtgcaggggagggatagtgggtttggcgtcgagcagggatcgacgcaatcctcgtgctgcgttcaacggagctccggcggggttccacagatggcgaacggcgtacggatgcggtcagttcggcgacgagcttcacgacggcgagctgtgcacggcgcagacagggcttgatggcgggtaagtggcgttgctgcgggtgtcagggtgctgcgcggatgcggtgggcacgagctctggtaacagcgtggttcgatgagcgagcacgtgagataggtgacggagagagtgagcttgacagggagcagcaaagggctcaacggcttttata

SEQ ID NO: 374843 - DNA, 446 bp, Zea mays
  unsure (1)..(446): unsure at all n locations
ccctgaccttcttccactgcagccggcggcatttgacaccctctcgggcttccttctctcgnnctctctcctccccattgctttctctcccatgcgcagcagccgtcgagagcttccacaccgcgccagccgtgcgcgccaacccagcaggaagtccggccgagccccgacgtgccccaagccgccagagcccgatgcgctacgcccaagacccgtccgcacgccaggaacgccgcccagaaccgccagcgcctaggactctgcacccgcgcccctgcactcaagccaacccgaccccgactgccgcgacagcgaccaggcgctcggccgaccacgccacaaccgaagaccccgcggccgagcaaccgaaccgcccgacgcccgaagaccgaccgcgcagcgcgcgccctggaaccgcgcaagacgccgaccgttcttcgtcttgc

SEQ ID NO: 374844 - DNA, 410 bp, Zea mays
aagcaggtgtgacaggcagggttccagttacaaattgtaatagaatacaaaataaattcagaacgaagttggcacattcccagcttttagtgcctattccacttgaaatgctaccaagcaaaaaaattggcagcatgcaaatccacatcaggagcctatgcagtgacctcagctgcgacattcttagcatcttcctcctctttggctctgtttgcctgctgttttttctgagcccttatcattgcacgccttgcacgggggcgcatctcgcgtacttgccgtggcggcatcacaaaaggttccagagggcggtcatggagtggatgttcgtttccagaaaatatcctcagcttgcgatccctatcatcacgcagtctgttgcggggaagcatgcgcaacacagctttgcg

SEQ ID NO: 374845 - DNA, 199 bp, Zea mays
agcatagccagcctccccagccggacccccagccccaccccggagcgcccaatccaacccaccgacatggccccaccgccaccagcagacacagaccaccccaacaaaccactagcaggccagcgaccaagcactgaagacgggcagccaccgcccggccatgcacccaaccgacacgcgctcgcacaaatgccgcccc

SEQ ID NO: 374846 - DNA, 371 bp, Zea mays
ggggagagaaacacttcaatttcttgcatttgatccatgtatgatgggtcatacaatgaatacaatcagctcagccttttttgcattgcttatgaagggaaaaaacaactttgtacatcatcctgctccaattgctacaaaaatgtgggggtgcgttcttgtccaatgggtgaaatcagttgtaggttagaattctcccccaaattgttggttccttctcggagcatctactatgactacgagtcctgggaatggatatctccggtatggcggtatgtgtcctcaacttggatacgtgatgtaattccttgcagtttaccttgtgtcagattttgaaaacccgggtgtacatccagatccaggtatcctgc

SEQ ID NO: 374847 - DNA, 517 bp, Zea mays
  unsure (1)..(517): unsure at all n locations
cactgcgtccggcttccctctcccatacgaccgggcccacttatggccacgcctgtcctccttccctcccgcgcagcccatgccgcctccgccaccacctgcgcctnccagcacctcaaagccaccacctccaaggagcctccgccccgcgctcgcccgaagcacggcgagggaggggctccccgccccgcccccgttcccagctccgacccccgtcccaagtccctcgtcctctcccacatcgcggcgggccgaatggacgaggccgcggatgccttcgcgggcgtcagcagccccggcgcgttcctgcacaacgtcatgatccgcggcttcgcggacgcgggcctgccgctcgacgcgctcgcggcgtaccgcgccatgctcgccgccggcgctcggcccgaccgcttcaccttcccccgcgtcatcaagtgctgcacgcgcgccggcgcgctgggcgagggccgcgccgcgcacgcggtcgtgatcaagctgggcctaggcgccgacatgtaca

SEQ ID NO: 374848 - DNA, 510 bp, Zea mays
  unsure (1)..(510): unsure at all n locations
atatacacaaatccaaagctgatttagaagtgtggcagcctttcttacttttactagattttgtgcatgttttcttcttttgtttcgttcatgtttttctagcggtctgcaacatggattgtgtgggagctttggatggttacagttcttttttgggaggaaggacaacggtagcaggtttagtaggccttcttatctgacaatagaaatatagttaataaataaatttgagataaatgcgcttaaaaggaaggctcagaaggcggcgaacccagcgagcggtgtggcaaggctcacaagcgcgagagcaggctacactgcagtggttgcaatcctgctattgtcctcatcgtgtgttcttttcctgaccaagtaaaacataacagcaattcattnttaccatgaaggaaattctttgcaggtaacattgtattttactgtaactttttccttgatgtttcccttcttgatagtggaaattggtctgtatccgattagaaatagagaaca

SEQ ID NO: 374849 - DNA, 316 bp, Zea mays
agtcttgaaaatagccgatggttattcgaatttcttcggcgtttgcttatgttacattctccaacaaattatggaccaccatgaaatgaagacctcctttctgttatggtcccaaaagggtaatcccttcaatacaggcgctgaagctagagcgataccacacgtattatacactaggcacctggtccatccatgccccagggtgggctgccaccgtgcctagaacaggacgctctggctggctagcaactgatcatgcagagggccacactgcaggccttgttggacatgaaactccatgctgtaggccggcgcc

SEQ ID NO: 374850 - DNA, 363 bp, Zea mays
cttccgccactccttgccccccgcccgccactaacacgaccgggcctctttcagacccgctgtctgttttctaatgcccacagaacggtagctctctcaaaggtgaactgaggacagaccgcaggtagaggtggccaggacagacggggatgaccactcctagagggtgagcacgatacaaccgaggctgagcgacatgtgttcctgctgccggctacacgagaggcggcactgatcactgccgagatttccactggacagaagaaagaggcggcacaacgcccggtgccaagcatagatgatgcagaagacatacatggacactctggcaacagtggaccacatataccacacggagcagac

SEQ ID NO: 374851 - DNA, 244 bp, Zea mays
ggggggaaatcagaccacaaagttcgcattgccatgggtcccaaaccaacctcaagaggaaaccctaaaccaggtctaagcaaccagggagactataaataccaagtgccatccggttcttagatgcacaacacaacgctttttttacttacaacaaaagtataagcccacgaatcagaacatcggggtcccgcccattccagcaaaagcgcacacggggatgtcccagctgggccctgctggc

SEQ ID NO: 374852 - DNA, 220 bp, Zea mays
aattagggggaacatatggatcacgagttaattaccccaaataataaaaacagattatccaggggaacatactctggacttcacaaagtccaaatactgccatttgaagtggtttagcatttttgcgcccgacacaattgggcgtgtttggccaactaaacaaaaaacgactcctgagaaaaacaatcccagagcaaagatctacctacccccgccgggg

SEQ ID NO: 374853 - DNA, 119 bp, Zea mays
aggtaaccataccatacgggcttttaggcatcaggaaggacaaatcatgattccacggttccaccatacgtacgcctgttaggaggagctcaagacaacccgcactaacttttttttac

SEQ ID NO: 374854 - DNA, 406 bp, Zea mays
gtgagcgttttcagatcgccggggcttctgacgccaaccgcggcctgcacggcggcggccacctggtcgtggcgcgcccccgcgtgctgagctgcctcgacgcagtgggaggccagcagctcggtggccgacgccatggctgtcgccatcttggtagtggtagcctgggcgttggagctcgtggccgacgcgacggcggcgacggcggcagcgacccgggccacggacaccatggcgtgcacgtgggccttctcggcgcgctgcttctccttgctgctctgcttcgcccggcgtgtttccctgtggtggacctggaaccacttgccgatcgactggtgggtggtggccgctgctcgtggaagaccttcttgcggctctgttctgctgatgacacggtagaggaacg

SEQ ID NO: 374855 - DNA, 392 bp, Zea mays
ggcgatccaaaagaggctgctttagaaccttaacagattaccatcacaagagtaacttaagagttaagctagctttgcagaaatgcgtctattagtttacaacaataataagttcactcgatgaagtaactaactagaatgttaaggtgataggtgaggtttgatccatgtcagcgattggtgaggtttgatccatgtcagcgattggtgaggtttgatccatgtcagcgattggtgaggtttgatccatgtcggctatcttcaggtatgtcaggcatacgacatattcattttacctgctgcagttcatacaacagcacaactattctgagcccctgccatgtgcctggaggaggttctcccaaacagagcaaagatatcacatttagatg

SEQ ID NO: 374856 - DNA, 309 bp, Zea mays
aaacaggccttaagggggcctatattcttatggactgtaattggttcctgacgtcgtaactcaaccgtatgagagttacagttatgagaacttactctaaaactggccttttgtcgcttgtcaagaaaggtttaattctttatcccaaagaataatcgttgaaaagtttggggcaacttatggcaatattatacagatttgaacctttgatccaggccaacatgtacattctagcaaattagcgcactacttggtaccgggaacattcacacgtatacagggcttttaaaatgttcccatacgtgcatg

SEQ ID NO: 374857 - DNA, 337 bp, Zea mays
acatgaagatctcaaaatttatttgcaattagcctcgaataagtcttgctcctttttttatctcaccatggcccatgggcaagcaacaagcagtgtacaataagacctattgattaactcacttcctcccatcctggatactacaatttttttgccaattgccatgtaatatattattattactgactgacctagtactctagtagctggctaattcagcaaacaaaaaggaaaaacaaaagaggcaacaggagagagagagagagaagagaggatcgagggcggtttgtaaagagcaagaacgatgccgaaaccaaatggcagaagaaacaatata

SEQ ID NO: 374858 - DNA, 402 bp, Zea mays
cgaagggataataatgtattaaatcaagattacatggcattacatgagaaccagtgcacttggcctaaaccttgacgagttccattcacaggaagttgaagttcagaaacaaagtaacggagcaaactggactactggagagcagaacaaggccgaaacaacaggaatggccagatgatgttataatattaggccagttcggaagtgagtcaaagttagtacctctatatatttctacattcacaggaagttcagagataaatctgctagcacatgtagcatttgctgagatttaagacttcattcgctagacaaagaggtagcaacctggaacagatatgattccttgcttgcggagcttaagtcaagaggtttgccaacacaagattacaagcagatggt

SEQ ID NO: 374859 - DNA, 274 bp, Zea mays
aacaaccaatttatgatattctccacacataagccttactgggcaggttgtttcttacacacccatacgaattaaaagataatacccatttctggttttttccacacataagcctcacagggctggttcattcttacacatgctgtacagaaggatgggacatgtatatgcattctaaatctgcaaacaaatttttttttggaaggtgggaactacttcctaattggaaaattatgaaaaaaaaaggggcatgactttttggctttttccagat

SEQ ID NO: 374860 - DNA, 272 bp, Zea mays
aaccaaggggacatccattgtttcggaattccaccaccactgagttttggaacgaccgggtttctgtctaattgttcggatagaaacaaaaacaccatcgccgcatttcaaacaagggggaaagggaaaaaggggagagaggccaaaaaaaaaaaacccccccggtgaaaaaaaaaaaaccgggggggggggggaccaaaaaaaggggggggggggggggcccccccccccccccaaaaaaaagggggggggggtttttttggggggggggg

SEQ ID NO: 374861 - DNA, 503 bp, Zea mays
aggaatttccttctctctcttgccggccgtgtgtggaaatccctgcggccggcctccccagcaccctaaccctagccatcaagcgcccctaaccctagccgtcgccctcaaacccctcacagccatccagtgaaccgcactgcgggtactgcagcactgttcatccgcgtgaacagtaccgcacgacgcccaaacgccggggtcctggtcctagaccccaaacctaccactcgtactacctccgtaaccctatatccatatcagatagactgtttaaatgaggtgtctaattatttatgatatgtatcacatccttatatgaagggacctttacttaaattataagaactgcccttggatcaaggatttaagtattaaaaaaaggtcgacctgcatggggacgcagatttaagtagctgatatcgactacacaaagtagccacatttcaccattgaagtatctaaacttaaattaccggttcacctattctagtaaaaagaac

SEQ ID NO: 374862 - DNA, 106 bp, Zea mays
gttgataatcttttgtgggctctttgctttaagtggttgttttcaatcagaccacatgtgtggaaatacttaagcagtgatgggactatcacatttagtatgctca

SEQ ID NO: 374863 - DNA, 105 bp, Zea mays
accaccaggtctagtcgtgatcgtcgggtagcgttcagctagcagcccatggaagtatggaacgagtgacgccacccgatcaagacagggaagctccaaaggagc

SEQ ID NO: 374864 - DNA, 343 bp, Zea mays
acttgttcaagccgtcggacacgggaccacgctcagctcccaagccttctccctccactccgacgaaatccatggagccccagcacgcgagcaccccttccatccctgttccagttctcgtccatgacctccctgcgtgcttgccgtgggagctggctgtcgcgcccctcagctctcggccatggtggtcatgtgcctcccttgctccagctccagcttgtcggctccctccttgcttctctctccctcagatttgtctgcgccgccgttctccctccgcgcagccgtcgatttctctgcgcggcgctcctgctccctggctcgcccctttgtgcgccgagct

SEQ ID NO: 374865 - DNA, 359 bp, Zea mays
cggtctcgtgggcggacgcgtgggcgcgggacggggggggccacgcctggcctgacgcgggaagccggccggaaccatccaactccgccgcgtcgtcgtcgccttcgtctcgcgtgctcaccaagagaacaaaacgcgagcagccaagaattcaacgtccacgatccctacccgtggcgttggtcgtgaattggcgccgtctccccctgccagccggattccctgctttgttctcaggcaacattttgttcactagtgtggtagctttgttgattggagtgcgcaatgggaggctgtgcgggaaaggtacgtcttgatgacgaagaaaagcttgattttaaaggtggaaatgttcatat

SEQ ID NO: 374866 - DNA, 347 bp, Zea mays
tgtatcgctagccacaagagcgggaaaaactagggctataccattgggattggaggaccccatagggacgaggaggtatcagcgaatgttggttcgcatgccagctttttccccttctattgtacgcaatgtgaaagggtcgcaaccaaaaggttgtttccccctcgatcagggcgtgaggtggagtcgggctcagtcctctgaccaagttcgacatgagataaacctaacattctccccctgttctcatacttactcgcttatgcttagaacttactctctccatcccataaaataagacgtatatttttttggcaaagtctttacggtgaaactttgaccattaa

SEQ ID NO: 374867 - DNA, 100 bp, Zea mays
cccatgcgtccggaccgtggtcaccgtggccctgatccggcgaaccctgatgtgctatgcagtgaggcggcaagggagaaaatgaatgcatatggggagg

SEQ ID NO: 374868 - DNA, 429 bp, Zea mays
gttccgctggttattgatgtgtgattagttggctcattcaggagcatccttacccgccaggcgagccgcgtgagccttgctcgctccaatcgatttcgtcgtcgtccgctcgtcgctagctccttcttggtcgctccttcgcccctgctacaatcgatttcgtcgtcttcagcgaggagctggggagtgattgaacgaagcgaagccagcgctccctccattgtcgccccgcggatcgatcgaagtcagcaaccagatcagaaagagcaaaagaggcgcccgagtctctacggcggaaagccatggacggcgccgccaactggcgtcccacgcagggagccgaccctgccaccgtcgctgctgtcggcggcgtcgaccctaacgcggctgtcctcaccggcagcgactggcgcacccagcttcagcccg

SEQ ID NO: 374869 - DNA, 296 bp, Zea mays
ggctcgactcaaaccctagcccgggtactcttccatcccgacctatgtatcgtgagcgctcctcacggcgccctcgcgacgacgatgtgcaccaccggtctcgcgaacgggacgacgaccgacaccgccgtcgcagtcgccaggacaccgactgtcaccacaggtacgagggcggagacgaggatcgccgccgccgccaccgccaccgcgacaaggacggtagcggaggcggcgaggatgaccgccgtgaccgcaaccatcatgacaacgacgaatgccgtagccacagctaccgc

SEQ ID NO: 374870 - DNA, 360 bp, Zea mays
agaaggcgctgctgagtgttaggatggagtggagtggaaggaacgtgctttccccacagcccacttcagagtggcttgggagaggctccgatgggcttatcggcttgacagatgccagagcccttgggccaccgcgcaagagcttggctgatgcatggaaggaaaatattaaacgtactgctgatatagcaggtcatctttgacgtcctaatagccgcaatgttcttgagggcccaactacaatcaggtcatgtgatggcacgcatgccccaactgcaaagggggtcagaatccatgaatggcctgcgatctggatccactttaaccagttttgactgggtcaaaagtcttggttcttct

SEQ ID NO: 374871 - DNA, 291 bp, Zea mays
ttcgttccgcacaccttatcgttttatttactgtcgccgcaaggtctattccgacatcaaacaagagtgctgaaagcaacaaaagatgagcatcgatgtcgaaggacaacgcacaccactccatctccggacgaccaattcttacgtacgtaggaggcacacgcaccggggcataaatagggctaatgaaccaggtgagggaccacaacgctggcaggtcgcgttcagactctgggctcggctaattgcagatgcacgcatgattctgcccgtcatgaaccccatcaacag

SEQ ID NO: 374872 - DNA, 257 bp, Zea mays
acaatatacagaggggtatcgattaccagcatatcagattatcagttgctcatgagatgaagaacacagtggacattgtcagaaacagcaacgggtaagagctagcaaagagcatttggcgggtcggccgttgcactggagggaggagccgtgcctgtcgttgcaggcgtcacgggcggggaagtctgctgctcgttcgacggcaacgggtcctctgaactgccgtgctgcgatgggcccagcggcacggtcgtgct

SEQ ID NO: 374873 - DNA, 330 bp, Zea mays
gccggagactggggcgtgtgtggtgtttatagatgattacgttccatgagcaggagaagcggtgcaggatttatgtggcaaccacactaaacgacgtgtgcacaaccaattgaagtgttgacacaactgtagctgccagtagatgtgaggaaaatgagaagataaacatgtatttagctgtagagatgaccacaggcataaaggatgacatgcatccgcagtccaatatcaagatgcctcagaagatgacttattgggtgagcgtatggttgcagatgaacttttgcaagggcatgggcttagttgggtttctgatcttgactgctggga

SEQ ID NO: 374874 - DNA, 522 bp, Zea mays
tcctgcgatgccgctcaggtgggcttattttccagccgccctctctgcccagcagcagagcacaccatcctctcaactcggatccccaagccctcgcctccagctcttgccacggcatccatcccctgctcggacctccacccggccgcgtcctcgccggtggccagcgccgctgcatcgcccttcctagcgtcggccttggcaccgcttccccgagcgccccagtcgagctcgcccatcctctgctctagccctttctccacgccgtcgctgagctcgcccctcccctcagccatggacacgacgacctgcagcccttcttggtggccaagcccatcttcctgctcgcgccccctcttttccacctctgcgcgtatcagctcgtccaacccccatggcaaatgttctttccctccctgcagcagcaccttggtgggttgtcgagcagcacgtcgcgcttgcgcagcctcggtcacgacgttgttcaccccgctaaccatggtgtcatacctcacgtgtcat

SEQ ID NO: 374875 - DNA, 300 bp, Zea mays
aatagcaatagaaaccgatatgtattaaagacaaatgatgtgaacatcatcgtctagttgtactctactacacattgattgatcgaatgggccttttttgggatccgcgcacctcgcctcgcttgcccacgcgacgcctatcgatcgaccagacgaccacaaacaactaacagaactacagaagcacacatgcatggtttctgttcaactcactctcaacatacagctcttgccgggctgcgtgccggcggccggccccggggttcgatcagtggccgcccgcgctgacggcccggaact

SEQ ID NO: 374876 - DNA, 317 bp, Zea mays
gcggcacaacaaaaacttaatcatcaaacaacatgtttgctatccccaggcaaacacgaccaaaccacaaaccctggccacagaacatcatatttttaccacaaagaaactggacaccaccacacagcgcattgacgagaatcaatgagaccaatacatttagccaattcactcatcaaatcagcttactacatcacagttcgatttggtattagcaagaacgacgacgaccgtcgattcacccaaatcacagaacacctgatggctgatgcgctggagctttcctttccccataatcctaggattattctcctcat

SEQ ID NO: 374877 - DNA, 493 bp, Zea mays
cacgatgagtagctcctgcccggttatcgttttccccatgctatgttcctcgcgctgatgacccccagctccacgccgatgctcgcccagaacactctctgtcctcgtcatctacagtactcgggttctatcgacgtcttcgatctcttgctctggtctcccttcctcaacgcttgcgaggaattcggtaaaatgggcgaaccaatgagcgtcgttaatttttttggtttccgagtcaaattactagttgtgctgatggatgtttttgcgtgtgagattggagaagggagatccccaaaattttatggatgaagaagaaaatgaagtcgaagagtgacgcttgcaagatgcttgacgaaaggcgtgaaccgtagattgatcactgttcctcaattgccgagttaaattttattgaggtgagtgattcgctgctcctgcataatagatcgaagcatggattggtttagtatattaggtgtgataattttattgc

SEQ ID NO: 374878 - DNA, 279 bp, Zea mays
gcaatgggacctgtcatttatagaataaaagacgcattcgagaagaatgcttaagcgaggtacaaggtttttagagtttacatgtgcgcaccagcgactaataaaacctttggcaagagcagagaaacggtggcgccatatagaaagatcattgacaaccctagctaggagcacacgtacacggggttcctcattttggaagatgagattgttcctattctgccacagcctctagagaatagtgccaaggatattctaaagatggcgtcatgagggatg

SEQ ID NO: 374879 - DNA, 320 bp, Zea mays
gtgacccgcaaacacgggcgggttacactgagaaggaccttctgttcttttacccaggaaaaaggatggcgatggagaaaggctggacggcgagagacgctgctggtgctttcatgatggacttggagctggaggccgaggaaaccgacgactcggcgccgtcgataccgtcaccgcagacgccgctggagcccatggagtacctctcccggacgtggagcgtgtcggcgtcggagatgtccaagattctcctcggtggaggcaagaagagcagcgttgcggcagcgagccggcttccggaggtgaccataccggagcag

SEQ ID NO: 374880 - DNA, 492 bp, Zea mays
  unsure (1)..(492): unsure at all n locations
ggtgacctgcaaagacacgcgaggttcgcttagctggagcagttgttctgtgaaccaggaattaggatggcgatggagaaaggctggaaggcgagagacgctgctggtgctttcatgatggacttggagctggtggccgaggaaaccgacgacgcggtgccgtcgataccgccaccgcagacgccgctggagcccatggagtacctctcccggtcgtggagcgtgtcggcgtcggagatttccaagattctcctcggtggaggcaagaagagcagcgttgcggcggcgagccggcttccggaggtgaccataccggagcagtctgcgctcgccaccacgtgctccgtcgttcctctaccgtgtcatcagcagaacagagccgcaagaaggtcttccacgagcagcgggcaccaccaccagtcgatcggcaagtgttccaggtccaccacagggaaacacgccnggcgaagcaaagcaacaaggagaaagcac

SEQ ID NO: 374881 - DNA, 300 bp, Zea mays
agcaaaaaaaaattcacttaataattctattacagttccatggtacaactgtgtttacaacttccgtgaactgtcagtggttcactagttcaaaacccgtgtttacaactctacaaacaacatagcagcgttgtgagagcccaggaacaaaaatatgtcaaaatgccaacaggcaaaggcagcacttgtcaccaggccacacaccaaagtttgtcagataacatacattcatatcagttaaagatcaaagctcatccatcgtctgaactggaggtggagtcacattaggagctggtgagg

SEQ ID NO: 374882 - DNA, 191 bp, Zea mays
ggggggaacaaaaaataaaccttttgaaacacaaggaacacacactggcgttaatgggactaaaaaaacaaaaacggggggttttaatgaggacccatcgtttcgggaatgaaaaaccctttaaaataaattaactcccacatgggaggggactttgttaggggctgcctggatattttaaggggtttgac

SEQ ID NO: 374883 - DNA, 472 bp, Zea mays
cgcccacgcgtccggcagggagaggtttgttttaaaggacattattttagttccacgaggaaaaaagatgaccacacccaccccatcagagcacatgctaggcattctgcaacgttaacacttcattaggttatgacttgacccgtttagtcttatgccaaatgctggtatgggattttcaatttgggtttgggatgcttatggatgatatttacttatacaatctcggtttctggtggtgtgttctgcaccaccatcccatcacatgaaaccgacgtcaacaggcaacagtgccctcacttgcatattggctagttatttagttaagaataagtggaaaactggaatattcaaagatcataagagaaatcatgcatctcttctgaaatcgtccacctcttcaagttccaggtctttcaatgcttgtccatttccatggtataaataaaccgtgtacataactttttttttt

SEQ ID NO: 374884 - DNA, 341 bp, Zea mays
aacactatgggtacaacaatacacatatgtggacaccgaaatacacaaatatacagaccaatcttaagagctgttaatgcaacatcagaccatgcatatagagtatttcagtgattctaatgcatccttactagtgtgaatacctaactgatccaaggcatgatgaatgaaaggggtgaaaacaaaggcacatatgtagcttaatttggacatagtgaagacataaaagctgagtttgttggtactgactggaaatatcaacatattttacttgacgacattccgatcaatcatgatgggactcattgacaattactgtgtacttggatgatactgatgct

SEQ ID NO: 374885 - DNA, 420 bp, Zea mays
ctggttcctaaatccgagggagctttacttggaggatttgccctgtctgtatcaaatacacatacatgagggagctttggccagccttgaacgtataggaattgtttgcctccgggagctacggcaggttccagtcggtttcagatatctcaagtccctaaaaacaaaactttttcgtaatatgcatcctgattttgaaagcagcattctaaaggaaatgtagatcatatcccatacatatacatggcatcgtcataagtatggttcgtttgtgtgtctacgggtaaccttatgtgcctccaccgaaaatagggcgggttgcattggcgaaaggttcatgatggctgttttgagcttgggcaattactgtgaagatgaaatgcaacggtagaatccaaactttcgagcagaaagcagcgc

SEQ ID NO: 374886 - DNA, 387 bp, Zea mays
actaccaattgttaaattaaaggtgatgtgtggttatacaaaagataattcacatccattttcttgcattttcgccccacaagccaacaagccacaagggcagtcgccacgcaagcgccggcgcggagatgacctgcgaaccttgaagttgcgctggccatgttgaacgatctgtcaacctgatgactctggagcttgcttgccacgtgagagatcagatgtgctatgatcgtgaactgtactagaatgaatgctcttttgcagttaaaggtaacagcgcgacatacagtgcactatatcaaatttcgtcggataaactagcgatctgggaaactgcatcctcgaggcgagacaagtgtgcagcaaacctatccttcagatcagcaa

SEQ ID NO: 374887 - DNA, 330 bp, Zea mays
  unsure (1)..(330): unsure at all n locations
ttntnttgtggttttttttnttnttttccttttttttcctttttnttttattttttttttttttgggggcaaaaaaaccccttttttcccggtgcaaccattgccccaattcaacattccgcccgttaaacatttgaggtttgtttaattaacttgacctggcccccaatgcccttccccctttttttccctttacttaaattcccaaagcccccccaaatcaaagtttttttttttttggaaacaaaagcccttgcccccttttaaaccgtttaaacatttccccgcctggggcatttaatctttccctctttttttttggacattttt

SEQ ID NO: 374888 - DNA, 339 bp, Zea mays
caaataaaaacagagggtttgttcccagttaaatttgctttaaaccgttttggttaagcaggcccaaaaaaaaaatcccaaggggaagctttgttttacagattttcaaggtctccaaaagctgcatcgcccaatacactcctgtggaggcctgagctagctgcttcatccaattcattattaaggggggtgttttttaacttttggagctaataagtggcagggtttttttttgccgccacttaagggttactgtcaggataaactttgattcttatgagcttgcctttgatgggtcgatattcccatttggggggggggtatttttttttaaacttt

SEQ ID NO: 374889 - DNA, 328 bp, Zea mays
ccccaaaacataatccgcattttgtaacttagtttttcgcatcaaacaacacatcgcatattttcctatcaaaaaaaaattctcgaattcttttccactccattttcttctctacacgctttcattcatacaaatatatttttatgcacatggctgaatcgcaggtaaaacaaaagcaacctggccggatcggggagtcgcatgtgctgtccaccggctagcatttcgtcgcataggcagagcacgagcacgacatcgacggagggcgcggacttcgacgaccacgtgcaggggctgcgcaaatcgacggcgagtggaccgacctggc

SEQ ID NO: 374890 - DNA, 153 bp, Zea mays
gctccggggatttaatgagaactatataatggagggtaaaatatcctcgatggcaaaacgactgaccaacattttgctaaaaaacctcttccttcacaataccattgaaacgccctacctgtttttcatttaggtcaagccaaaaagggaaaa

SEQ ID NO: 374891 - DNA, 310 bp, Zea mays
  unsure (1)..(310): unsure at all n locations
aggcgggagagaagcagccggtttaaaaaaaagggcgcgccttatccaccaancaacggagngaaaaacncaaaaggacagaagcgctgaaaaactaaagacctcgaagaagaagccgctgccagcaggaggaaggccaccacgaaacctaacggcaaaaagaacccttaagaacataacaacgggcacgagtggcacaagcaaacacgtcgaaaccctagccacgaaagaaacaaggtgctatctccccaccaatacccggcataagaagccaagaagcggaccccacgccagagaagggaggggacaa

SEQ ID NO: 374892 - DNA, 376 bp, Zea mays
agcacgaattcatagatcaaatcaagcaatctgccaggcgttaaaaatccttgcggccgaacacattacagaaaacaaaacgaatgattcagcagacctatggtcatggaagccaaggatgaattccgttcatagggggctgatcacatgacggccttttttgttggaaaataggaatggttacatgattctcacactacattgctgccaaactgatttagccaccgccagtccgccaccaatatgatttctgcattacagggcagttcagtccataggattgtagctatgtctctgaaagggattccttgatgagcttctccgggagcgccttagggagccccattacactatcaattggcccaacaatggcttc

SEQ ID NO: 374893 - DNA, 411 bp, Zea mays
caataacaatccatcttaaatcaatataagacatttattacgatgtaattgtctcaaaacacttctttattaaagacggatctccaacaacccgtcttaccttactcatcaccatatgataaaaggcgcttctataaaattcactgatatctgtcttaaaatgtgtgtctcaaaaaagcatatctctagtagtgttccaagaaggggactctgtccatatatgaatcacaaggatagaaggtaaaggaaaactagagccaaaataggagggcctcttcataataaaaaagaagacttcatcgagctcctaaaggctgtccagccagacaggagtagagcttgagcactcctagaatgtaagatgttgggggggctactttgccaaagatccacaaaatccctcatcttcag

SEQ ID NO: 374894 - DNA, 543 bp, Zea mays
gtgagccaggttgaagcaacgacccgcatccgggcagtctccgagctgcgctgctcttctctcgctctcgatcgtcccactcctttcttcccaccgaggggagagacaaccccctggctcctgcctgctcgacggacccaaagcatcgcctcctcttcctacccctctcctcaatcggctcgtccggtcgtcgcttagcgccctccacccgccagccaccccactgcgacgccgcgttctccccttcttccgacgtcgctgtctctctctcagcccagctccaggggcgaggctgtgaaagaagagggaggaaagggagaaaaaaagaccctcttttcttccgtcggcaggcctcgtgaccatggatccgccgcccgccgggctctcgacgctgccgaggtctgctggagatccgtagccagcccacgtgtagacggttatggtgctagtaccggtgccaacgctgtgtttcttggcgggcgttgctgctcctcctccgcttgaggaatgctgctgcatccggcaggagggatggtcggaggc

SEQ ID NO: 374895 - DNA, 378 bp, Zea mays
acgaaagctagcagcctctcaataataattaatctcaagggcggcttgagttatacattcagcaaaaagaaaagagagagagagccctactgttctgtcatggccaagatgaaaccaaggaaccaatcattactggttggggccgccgactcgccggcctaattttgaatgatcaacacttgctaaataacaaagggcaattctttatattttcaaagttcccattcgacagaaatgcttgttacaggatatttacagcgtgaaggcggcaagcccctcccttccacgttacggagagcggaaagggccgtgcccaccttacggatgcaacgttcgttcgagcggggcattgtgattagcagcacacccaacacacac

SEQ ID NO: 374896 - DNA, 57 bp, Zea mays
accaagaaaaccgttttggaattgagacaccacgaactaatatttatgtccacaaac

SEQ ID NO: 374897 - DNA, 331 bp, Zea mays
aaaaaaaaacgggacgggggtccattacttttaaaaatagctggggcctggagcttctttcattggttcaaagcattaccacataagcgggaaaccccgaaacagtcctcataagccccccttattagggcgggcccacccaaaccataagcgcggggccgatcaagaaagaccccccccctggggaagccatataaaagcctggttaagcccaggagacccccaaaaggtttttactgaaaaaaaggcccccttaggcaaaagggttttcccacttgggggggttcacccccccccaggggaagtcagggggcgccccttccaaaggggc

SEQ ID NO: 374898 - DNA, 316 bp, Zea mays
actaaggattaaaactcgctcgatacatatgaattgggggagaaccgaacatagccttcctggtaccaatttttttcatcaaagtatctatgaaaaaagaattctccaacatttgatcggaatagagtaattcactagggtgggtagctagttaaccagggctaatggtaggtaacttgctacgctggcatcgtctggctgcggggtcacacgagatggccttgccagctacaaagcttccatcattagatggtttggcgaaaaaatggaggcaatttcgcgcctggtgctaaattcagatttcagagacggactc

SEQ ID NO: 374899 - DNA, 497 bp, Zea mays
gtccgccttcatcttctttgtggctgccgccccagcatttaccccgcgcgcagctcgttccagctcctgctccttcaggctggccacgcgcccatccctctgcttgttcttcaggccgccgcccagccgtcctttccctggtcacccatggtgcgccccactccctgattgctccagctcgctcggaccatgccccctgttcctccgggccggtcgagttcttcctagccatggagctccctcgtgtgcgtgccccatctctctgctcgccctctccggcacctgctgcttgctcctgtgcttctctctctctctccatggacgcgcacgcgttccatcgtcccctgccgtgaccccgcagtggagctcccctgcagcgcatccctgcttccctcaagtgccgaccgccatcgttccctgcctgtgacctccggccggattggtcatggttgcttcctttagctcactggcatgctgccaggactgacgtgcgccat

SEQ ID NO: 374900 - DNA, 375 bp, Zea mays
aaccagcaaaatctttacatgctaattaccaaatggtgaacaaaactgtcactctgtcagcctctgattcctcctcccccgccacagaaaatgagggaaataggaaagggggaaaagagtagattagagcacacatgcgggctctcgctgtagctatcaacaccgatcagagtgagcattcgcttgctcgatgtccgtgtcgccaagcaagcgcgacttctcgtctccgccagccttgtcgtcgctgtcctcggccacgaggccgccggtgagctgcctcgagcgcttggcctcgcacgcccagtccgtgcgcccgatgaccagcagcatgcgcaccatgcaggtggcctgcgccgccaggagccccaaccacag

SEQ ID NO: 374901 - DNA, 304 bp, Zea mays
cacgggaggccaattcaaaagaaggaccgggccattggcaaaaaacccctaaaaagaaaaggggggccccaaaccccgaaaagagggggggggttaggaaaaaaacgaaggggggaaaaaaaaaacagggggtaaacaccccttttgggggggaaaacaaaagaatgggggacctgcgcacaactaaaatccaagcccctttgggaaaacaaaagggcgctataatggggggaaattggggaaacgaaaaaccaaggggtaccacctgggaatttcgggtttcccggggggtattttttgggaa

SEQ ID NO: 374902 - DNA, 407 bp, Zea mays
gtattatggccaatacgttaccagtaatattgcagaacgtgtactccgagtaatagagtgcttacattctcctctgtataagctcccaacccttcggtgagaacttaaaatttgataagggcgtagggcagccaccttcgtggcgtaataccctggttaattagcattgtatagacctatatctacaattaacctgatctgaagagctttagaattcatcatatagttacattagccaataaacaaagcctggtgtttgcatcatagcccacgattgcgactcatggtcatgcttgaagcagaactgcaaccatagtgaaccctctcttctgctagattttcctgatgacgcatgcccaacattcgaagcaacccaggcatccaatcaagcataacttaagtgtgaa

SEQ ID NO: 374903 - DNA, 463 bp, Zea mays
ctgacgcgtgggcggacgcgtgggcggacgcgggggcttagcgcccctgtctgcccctgcccctgcccctgcctgcgctcacacgctgcgatgcctgccctcgcccctgcgaatctcgcctacctcgcccctgcccccgccaatctcgccgccaccgttatctcaacccctgcaccgcctcctatccagcagcaagcgccgccgccgcctcgccgcgcgggagcgggagctgaactcgactgacgatgtacctgccatcgttgtcgtgtcagtccatggaccccgccgccgtcgtgcgcagcaagtaccatcgccgtccacaccaagtcgtgcccccgctcccgtaaccacagtcgtgccctcgccccgaccccggatcttgtgattgtcgctgtgccctcgccctagctcatcatccccctttgcctccctcccagcgctgtgctctcgtctcgtgactacc

SEQ ID NO: 374904 - DNA, 471 bp, Zea mays
atgaaaaatacagaatagcataccctgtcaagcgtctgccaaactacacgagtttctaaataattagaatcagtgactagagaatttaatactccattgatctgcataagatcaaaacgggtcaaaaaggaaaaatagaaggcaactaacatatctcctaaagtaataaaatacagcaaaagttgagttttcaccataactatagtatggtaatgcttgttccagaacagaatgcacggaacattctcaacaaagtcttcttgcagcgaaaccaagcatgtggaaaaccaggttcattagaagccaacataagactttcaaatgatacttcgggtccggtcaacaaatccctagcaggcagcagcaatccaaccatgtcgaaggtttgagatctaagcaatccagaagcaaccattctggagtcattgtaaaaccatccgttctggtgaagataacatccatatcaaaccc

SEQ ID NO: 374905 - DNA, 557 bp, Zea mays
tgccacgcgtccgctaatattggtgaggagcgggggtatttttttagttattcatatttacaactctgaattaacaaggaaactctctgtccacgaattctgtttcctgtctttcttaacacttgtttgaatttttcttgttcagcctggaccccgagacggggtaatccaatgtttcataaaaagggacaaatcaaagctaacgtaccggctctacttgtcccttagctctggtaagtgtcaacctattgtcttcacttcagaataacaaagtcaatagtcttttgtttgtttgttgaaactcatgtctgtcccatcagttttcaattttgtccttgaaggagaaccattggggtcattttcagtacattgaaaaatatcgttccactattttttttgtcttttctgaacctgataattcaggaggcgactagaaaccagcactacttgccattacaactttatttaagtgggaaaactgtgatgtaaaagaagacatcatgtacaggatgaagcatctatgtaaatgggtgaataattgtccaaaaacatgaata

SEQ ID NO: 374906 - DNA, 439 bp, Zea mays
attctccattttatttttgaaaactgtcgataaatgtacccgtatccgctgcatagcttctgaccaacacaacaacccctcctcctcctactacctcgatcaacaagacgttgctgctgccgccgccgccgccgccgatctacaatgcgaggcgagcatgtcgcacacggtctccctcctgatgtcatcgaagatgagggtctctatcctggcgccgacctccctggcctccagcctcggctcccgccactgccgcgcggaccgcgccaggtccagctccaccatcgcggggatcctggagatgtcacccgcgatcttctcccacgacgagatctgctcctcgacggacctgccggtccgggccgtctcctcctcgccctcgtccacctccatctcgcggaacttgtcgtgcaggctgtggctgtggctgtagtagctg

SEQ ID NO: 374907 - DNA, 461 bp, Zea mays
  unsure (1)..(461): unsure at all n locations
gcctcgtcgtcacatgcgcacaagaaagaaccggcgccttctttgaccctggcccctccttttctccagcgcgcagccaagacgtcgccgcgcccgcttccatgaccctcgtccccacctcgcgatgagcgacattgcgccgtggtggcgcctgccttttcgttcttgaccgcccgtcgagctgctacgagaaagggagggaggccgggcgatggccgccgcgaggaggctctcggagctgctgcaggagcagcaggagccgttcctcgtcgaggccgccagggcgaggcggccccgacgcgtccgtggcgcgagcggggcggcggcggaggaagcgggaggaggaggtnnggctgggctggctgccccaccgcggcgtgccggcggctgctcaggctctgcagccacgggttcaagaagaggagcgccggcgccctcaggtcggtgctgaccaaggtgct

SEQ ID NO: 374908 - DNA, 560 bp, Zea mays
  unsure (1)..(560): unsure at all n locations
tacgacgcgtgcgaccacgcgtgcgcccacgcgtccgtccacgcgtccgtccacgcgttcgctcgacctcccaagatggcatcgcctccacccccgcagtcgtagctgccgctgcattcgaatcgcagccgccacggatctagtggcccgacgtggaaggcagaactccctgaccttttctctccaccctaagcttctgcacgcgcgcaccgcccctcaccgtcggcctcttctcctcttcatccgccacaggatctcgcctcgccgaggccatgtaccgtgccgccggggaccacatccgctccctcaaggtgaatagacaaaaattcgggtgagacaaattttcctggtgttgtacgaggagagggcagccagcggccaccgggagttcgggtcctaggagccaccgacttcagtcgcctgctcaaggacggcgagggcggtgcctacctgacaagcccgcgcggcggcatggtagttgccatcaagaaactcaatcccaatgacatnaggttcgaatgctncattccttagacaatgccaacgtcctgaaattttac

SEQ ID NO: 374909 - DNA, 231 bp, Zea mays
aagaaaagaagaaatggaccttaattggtcaacagggatttgggggccaagggacaattaaaaccggggcctttaattggtagagggaacaatttatttaaaagggccgattaaaattggcgacccagggaaacctttaacagggcaagctttggatttcgatgatgctttttttattcaaaagggtggtagaaggcaagggggtggcttaagaaccccttcatttggttt

SEQ ID NO: 374910 - DNA, 387 bp, Zea mays
attccctcctaaacaaaaataataaatagttttttattcccgttctatggtggcaaaacgaagtgaagtattacgagagtaaaattaggatacgacggcgtcaggttgccgcaaccgttcaggttcgttccgttacatgatggagctcgctctgatcctaattccttcctgatgcccaccggagccagcgtcctcctcttgatcccagcgatctcggtaggcctcgtccagcgccaagatgctcgcaagtaccttatcgaacatctcgcacttccacggctccactggaggctcgccgacctggtccgagagccagttcatgtgctccgaccactgagctgccagtgcgtgcgtgtggagcttcggtctcccggccttctccattag

SEQ ID NO: 374911 - DNA, 433 bp, Zea mays
ggtgccgcgaggacggcgaggtggcggaggagggggtttattccgacgtggtctgcatttgccactgtacggagcccagggtgcccggtattcgaggtgcatgccatctactagtttccctcttttgtttctcatgcaagacaatggagtttcgaggtgcccggcatccaatgcttgtgtcacaggaattgacaattggagcgggaagcagattcacagccacaattatcgcacccctgaaccgtttcgggatcagaacgttgtcgttgtagggttctcgaccagtggaatcgacattgcttcagagatctcacgtctcgccaaggaagtgcacgtagcagacaggtactccaaggacaggctgggaaagatggcgctgtaccaaaatgtctggattcacgcagaggtggactgcatccaggatgacggcaaa

SEQ ID NO: 374912 - DNA, 460 bp, Zea mays
agcacttccagatttctatattttttagaaaagggaatattattaatattccagcttctgtatcagttgatacatttgactgtcaaattcacaaacatgaggttccacattggaacgaaatcttacattctacaaaggtttcataaatttaagctctcaaactatgctctcaatctatgaaaaaaagaccatccattatttgaaaagatctctatcattgttggttcaagcacacgacaggcccattttacttgaggtctgtcctcctccttctacaacagtgtccagaaccttgtccaatgtgtccctctgaaagtgacctgcaagggagtggaaacttgggcattatcaaaaaccacatcattacgacttaaccatatagcccaacagagggcacatgctccaacccaaatcaggctcttaagtctagaatttaaaccttttagccaagtgccaaaca

SEQ ID NO: 374913 - DNA, 536 bp, Zea mays
  unsure (1)..(536): unsure at all n locations
ctacgcgtccgcccacgcgtccgcccacgcgtgcgctttatcccaagtttatcatagtgtcccangattctcacttttggtccggacttatggcggtaaaacaggactttatgagaatgggtcattttgtgttaggggatggtacacagattcagttctgggaagataaatggttggggtctgtccctttgaaagaccaatttccagatctgtacaacattgtgagaaagaaaaaggcaacagtagctaatgttcttcaacataatcaacttaatgtggcttttcgtcggtcacttaatgtaaataatctagttgctttgaataaggtagtagctagagtatttactattagtctatctgatcgaagagacacgtttgtttgggatcttctccagcaaggtcagtttacggtcagctctatgtatagggctttagtcgccccgacattgtttcgagaaaccaccccatctgggatttaaagctacctttgaagattaaaatttttatgtggtacttagttaaaggcatagttctaa

SEQ ID NO: 374914 - DNA, 312 bp, Zea mays
ctgattaaaactcactatagactatgttattaaacttgctcttacacagacgcatcttgcgcacattcatatcatgatcaggacggggcacacgccgcacacctggtcatcaaggtttgttggaaaagaaaaaccggtcattaaagtcccaaaccatgacataggcacattcattcagggcctgtcgttcattatcaacactcgaacagttgtatgcaggtgcacaaacaaggaacatgtgctgacgcgcccgtacccgtacacattcttcagtgaagaagacacatctcgaggcccccacccacgcgcccg

SEQ ID NO: 374915 - DNA, 288 bp, Zea mays
  unsure (1)..(288): unsure at all n locations
accggcccggaagacccgggccgacccacgcagagcggccctcgttgacagccagncggnacaagaagnagcggaggcgggaggtgcgtcgacggtacacgcccgtgagacgcgcacggaacaggaaaccggccaacggcgacgcagagagatcagcggaggcgggcccccacgaggcggagcccgacggggaggcgtgaaggcgacagaaccacgagaaccgctcgaggaccgacgcgccgaaccggcgaacgaaagaggcacacaacagctacgacggcaagaagc

SEQ ID NO: 374916 - DNA, 204 bp, Zea mays
actactacctgcaagaagaggttcattgagagcgtggtgcgatcttactacaaagaagcctttgatgctcatttcatgctaggaacatacacaatccttaggatgaaagcactcagatcgatacttgggctatgcaaaggagacgatctacccagggcaggtatggatcgcatgcgcttgctggcaggcctacctgagactgtc

SEQ ID NO: 374917 - DNA, 318 bp, Zea mays
accttcctcgcgaacgaacagcgacagcaaaggccaagggcgaggccgagacgccgaccgccgaagcgcccgaggaagagaccgcggcggagaccccgccgccggacgaggcgcccgaggaggaggcccccgccgaggccgaggctgaggctgaggctgaggctgctgccgaggaggcccccgaggagcacgccgaggacgaccgcgaagctgctgcccctgaaggggcccacgagccggacgccgaggctgaggatgaggccaaagaggacaccgagaaaggccgagagcgcggacgtgcgcacgcaacggccgagg

SEQ ID NO: 374918 - DNA, 244 bp, Zea mays
ccctgtttctacgaggaaccctcagggctccagccctgggctggatgatgagcaatgttctgtcgagcaacgaaaagccgatccaggctcagtacatgctccacgcatacgccatccctgagatcgtgacgccagctatcatagtgagccgatgcgagtgaaccaaaagacaaggcgcacggatggaccgcgcgggcttgctgacaggcctacctgagcctgtccaatcgagggaggagcccct

SEQ ID NO: 374919 - DNA, 396 bp, Zea mays
tgcgaacgccctcctcacgaccccgcctacaaggcccccgcgggggggcccataccgagcccgagtccctagggcgcggcacgcacactacacgcgggcgggggcgcgggcgcgggcgcgggcgggggcgcgggcgcgggcgcgggcgggagcaggcggcacggcgacgcaggacgccgggacaaccccggcggcggcggcgcaagggaccctcctcccgaccacctgggagaccgaggccacgtgcgccgccgcgatgaccctcgaggcgcggtacggtgcctacgagctccccaacccgcgctcctcgcaggcggcagcggcgggcgacgccgacgagctccccgcgcgggggctggacggcgccgacaagaacaaggggggcgcgagcggccc

SEQ ID NO: 374920 - DNA, 342 bp, Zea mays
ccgcctccccatctgatctaatcagagatccttggtggggcctacatctcggttatcttcctggacggcgagagaagggaaggccgagccgccgaggcgaggcagagcatccagcaatccgccacgctcgtcgctcgcccggtcgccccctccacccactgccgcttcaactctctcgctccctgccttctccaaaccctaaccgccgacggcgatgctctcgacggcttcggtgccctccacctcgttcgccgccgctttcctctcctcccgcgctcgccgtcggcgccgcgccccctggctgcggtccgtcgccgcagccgccgcgtccggggtggggga

SEQ ID NO: 374921 - DNA, 498 bp, Zea mays
cggacgcgtgggtgcacttccctgatgctctctgttgatggagtcttgccgccatgtccccagtggagcactccaactgagtgggaagcactggtctcacttggaagagttggaccttactgacagtgatttgaatgatgaaggatcgaaagctcttgccagatgtagcgaactttcgagcctaaaaataggcatttgctcgaagataagtgatgaaggtcttagccacattggaaggtcttgcccaaaactccgcgagattgatttgacaggtgtggaggcattagcgatgatggaattattcaaattgtcagggcatgccgatgctagagtgtatcaacctatcatactgcacagaaataacagaccgttcactgagttcactctcaaaatgcgcatagctgaatactctggagatccgtggctgccccagagtttcatcgattgggctctcagaaatagcgatggggtgcaggctgctctccaagcttgatatta

SEQ ID NO: 374922 - DNA, 364 bp, Zea mays
cctcaaacctggggagattgaactgaaacaaccattttaatttgtccaaacggttttacacaactaaattttatttttggggaactggccactgtatattacataactatgcttgcacttggaataccttttattcatgtcctatgaagtatggataaacagggggttttgttcacaagtggggacataaaaagtttgacaaaaagaatttagttgacgcacgggatgctgtttttgacctgttgttcatcgatggaaatgtccaaagttttattaacaatttaaaatatcctgtttaagaaagctggggcagtaacttttggttttggaagggatcacttgaacttacctaattttttgaaaa

SEQ ID NO: 374923 - DNA, 361 bp, Zea mays
  unsure (1)..(361): unsure at all n locations
gatgcggcgaggaggcagcgagcgccggagcccgcaccccgcagccaaacgccgacaggccggggaaggggaacggcggaagagaagcggagcaccagcgaaccgcatacgctcggggctctacgacgagcagccctcggcgcagcgacatcgccggcggcggacctccgacaggctcagcgcgctcaccatagaagcagtgagagatgatcacccacccgagaccaagaanggccatacggcgccaaatgggctatggctggaaaaggcgccatcgcgaaagataaggacctccataacgtggaaacaggtgagcttcagaaagacctatcgtccggtataccacgtgatgcaagaggag

SEQ ID NO: 374924 - DNA, 204 bp, Zea mays
gggacaaacccccatctgtattgggttattgggacaaaaaaaatgggccaaaagacgggtttgaaaagtttaaaaagggggggatggaaaaaaacccccttcttcgttacaactttggggccccaggggggggcgaagggagcccggccctttggggcgggggccgataaaattaccgggccccttgggggaaaaagggcctaa

SEQ ID NO: 374925 - DNA, 359 bp, Zea mays
  unsure (1)..(359): unsure at all n locations
gaccggtccttaatacctgggcctacccttgcgaacgccttcgttctcggccatggaaaccgacgagcacgagcggangcattcgagcggaggctcgttctgtcccccacctgcgacgactgcagtcagcacacaacatggccgataagcgcacgcccngacgatcgacagccagaggggcagagaagaagcgccaccgggcgtctcaccggacgaagaccggcaaagccgctgaggcaagcaagcaggacgccgagacggcgcccccggcagacaatgcgaccaagagagaggaaccgacgaagaagctcgaccaggagagcatgctccaggaggccaacaagaagcacgcggcagcg

SEQ ID NO: 374926 - DNA, 397 bp, Zea mays
  unsure (1)..(397): unsure at all n locations
ttcttcgcgtccggatgtngactgtgatggggaccgtgagtgcttacgagagttcatgcccttttacgaacgcgtagatgagagtgagcggatgaaggagcgatctcgtgggcgagcccgtgggacaggctatgcaacagacgcatcagacaacgatgcagagagcgagcatgatcgcgagcacggtccagggagccggacaatagatgcgacgatagctgctccgaaggcagaagggacatcacaaggtacaaagatagctgcagggataattgcagatcgaatgccacagtcagtggacgagacgcagtttgaaacgcatggagaagctcttggagaaaacatggctcaggaccagccaaaagaacatggtccaaaggggcatcgtagcacgggg

SEQ ID NO: 374927 - DNA, 307 bp, Zea mays
  unsure (1)..(307): unsure at all n locations
ccctcgtgtccggcggccagcgccgncgccgcctacgagaagggcctagagctcgaccccagcttcgagggcctcaaagcggggctccaggacgccaagaaagccggcgccgcccctccgcgccgagggtcgaccggccccgacgccaccggacagatgccccagggcccccagctgcagagcaagaacaggcgcgacccgtgcacgcgcgcctaccttaacgaggccgagtctatgcatatgatgcacgaagggcagaggatccccactagcagcagcatgcttttcttctgctggcggacgacgc

SEQ ID NO: 374928 - DNA, 277 bp, Zea mays
gggccaccacactggttaaggcaaaacatttaagaaagaccaccctaccccggttgaaaggggaaaaaaaaacgggcgggggggactaaaacaagaattcccccctgaacccaaagcagttgaagggggggccggcataaaaaataccctacgaggggtttttaagattttcccccaaaacaaccgaacattaaaaaaaggggcgcttatatttaaaaaaccaggctggggaaaaaaacagggggggctcggaaccggaacggggacaaaaatttgg

SEQ ID NO: 374929 - DNA, 427 bp, Zea mays
tgctgctgccgtcgcctccgccagaccgccgccgcgacactagacaccagcgccgcggctgatggagcaagggagaagaaggaaagcggcacccgccgcacatacgccgcgcggcggagccatggccgagctgcggcacgccacggcggcggcggcggcgacgcgcgccactggctccccttccaagcgcgacgccgaggccgcgtcctcgcccttggtcgcgtccccccgcgtcggcggcggcagggacgggctccgccctcaccagaggtggccgctcccgccccccgtccgcgccctcctcgcgtgcgaggaccccaggtcccccaccgtctccgcctcctaccggatcctggtcgcggccatcgcctgcttcgccctcgctgcgctcttctccgcgcctttcctctgggcacgcctcaacgct

SEQ ID NO: 374930 - DNA, 483 bp, Zea mays
cgtcgtgccttctttgctcctcaaatccatggcaccgcgtttctcccaacttggactgcgccactctccgatttccggtggccggcgtcttcctctgcgccgtcagcttgccggactcgcgccatcctccaccgccctagattttttcctgaagcactacgcccctggtcgagcttgcccatggcgtcttccccctggcgcccctgtgctcgcgcccctgtggccgcggctctccctctggttgcagggacgcgcaagccccatccccaatggtgctcggccgcccagctccctgctccttccactcgcccggcctctagttccctgcgcgcgctcctctgctcgccggttctccttgccccagaaccatcagtcctctatccggcttcaaccccaccgtcggtctctagactctagttcgccatggcgctgaatttcttcctcgtgtcatccctgctcctcgcgcgttgggcaccgggagac

SEQ ID NO: 374931 - DNA, 471 bp, Zea mays
  unsure (1)..(471): unsure at all n locations
gcttgctcacggacagagcgacacacggaggaacaaccgngttgtggagatcctcttgaccagcatcaagcaaggtgtctggcatggagctgaacgacactctgggctatcagcaggcaaggctgccggctgtgaaaacgatggactagagcaacaactacttgcacgacccaatgccataccagctgacataaaacctcacctatatgaacctggcgaaaaacaacttctctggcaatatatcgaactcgatatccaacgaggacccgcttgagtacctgaaatcggagaactgagtggaagcctcagaccactcggagaactgtacggcatactgaaccggcgagctcgaacgcaagctcgacatgaggattgagataacggggcagagatcgaggaagaccctcatgagaaagagaagctatgagacgagccattgagcagcacatcatttgctcaccaattagcgga

SEQ ID NO: 374932 - DNA, 420 bp, Zea mays
catcctggcaaacagaatgtacatggtatgtcggcagaaaggctttgatttacaaccagtccttttgtttccggaatactaaattggcgctacatttaccgctgcactttgtgtgaacactgaaaagaatgttatattcgacatccagcttttttctaatgcattgcagcgttgtttctaatgcacagaaattggcagccaagacacaggtaacccgtagcccggcttcggtgaatctcgtgaggaacaatgttggaatcaagtaaaagaatgtataagcaccgttataacacagaaagtaagatgatgcccccaatcaatcttcatggtcgtcttttccttcagaatcagatcgaaccatcatctccaacatttcttgtcttgatttgtctcacaagcatccgttttattaaaacccac

SEQ ID NO: 374933 - DNA, 449 bp, Zea mays
  unsure (1)..(449): unsure at all n locations
atcgggggcagggttgtttagctttctgcccgccttctccacgggactncagaagttgccttcgattcggccggggccgaggaagcggggatggggctcggagaggcggcggggcggctcctggcggccgtggactgggagcaccangactacatgccaacgaggaggtccctagcgatataccgtcgtcaaagtgtccgcaaggctaccctccaggttaacgtcggagcagactggcggctacgacggcaagtgggagggggcgcagtnacagggcaccccagtgctgaacctcgacaagggaggcaggcggccgatcagatcaccgacggatgccggcagggaagccccccctgcgacacgcgctagtgggagtgatgcatcatgtggacgaaccacaccagtgacggcagatgcagaagcagaagcagaagcgcatgcgctgaagc

SEQ ID NO: 374934 - DNA, 287 bp, Zea mays
gggaggaaaagcctacccttgggttaaaaaaaaatgcctggtacgtttaacaaaccatttaaaaacccaaaaggggttacggggtttttaagggaaaccaaaaaaaaggggggggcccgtggccaattaaccgggttgggcccaaaaaaggctttccccaattcatttttaaaacaaggtgggggggggacccccccttaggccccccaaggggcccctggggggggcccaaaccttcaggggggggggaacttttttgggcgcttggaaaaaggggcaaggggggg

SEQ ID NO: 374935 - DNA, 477 bp, Zea mays
aatacccatcctcagcgaatgaaaactaacattattacttactgaggccgacatgtcagtgctgctacttctcttatctgtgctcccagccagtatataccagcatcttaaagtccataactttggggacctttaaaaaacaaaccacagtaaatgtttagtacagcaagctagtgtagggtgcaggaacgtgtccccttctaccttcaacaaaacgccaggtgaagctatacattcgaagcctttttgtttggacactcaagcacactgtaggatcccctaacctggctgcagttgctttactgatagtcaaacaaaaatatatgctgcttttcatgtttcggttttgttcgtggcatgatttccgtacaggaatttgtaatagaccttcctaacattgatcttatcgtgcagttgaagggcccactgaagccacttctatctatataccgataatgaatcatgtgagatattcag

SEQ ID NO: 374936 - DNA, 562 bp, Zea mays
ctccgtccgcgctcctattcccaccgctcctccggctggcgtctcttctaccacaaagccgttgcccgcgggcgctgttcgcggcggcgacgggtctctcatctcctctaccctctctcgcgcgcaacggcctaaaaaaaccctagcgactcggtcggtgctcgacttggatcgtgccggggggcaggggcagctctcttctctcgtcgtcgtccaggacattgttgacaacttgatactggattttcttccttctcgaacctgtagacggctctgctttatttgattagagcttatatggtctgaatgctacaactgaaactttgcacctaaaacctgaggccaagttcactactttattatatccttccatacacagaaagtggagagacatggatcgtgatgacatagctggcttcgtcagtggaggttgctatgagtcctgaatttctaacccagtatatataacagagttatgatatccagaaggcagacaattgtttcttttcgttttcttgtgggcttgcactgatgtttcataatgggatgggataaactactc

SEQ ID NO: 374937 - DNA, 289 bp, Zea mays
  unsure (1)..(289): unsure at all n locations
acctccgttccaaaccgnaaannagnggaaaaagggggagggataaaatgaagagaacgaccccttcaccacacgagaaggcgggaaggaaaaccaacactaacagaaggaccggacgagaagaggactcaaaggagcaaagagacgggaaaagagaataagaaggggcggaccacgaaaaagaacacagcctccacattcagaagcagaggccaccgagaccaaacaaggaggaagcccgaaaggaacacgcaaacccaggagaagcaaagggcctttggccgagggc

SEQ ID NO: 374938 - DNA, 216 bp, Zea mays
  unsure (1)..(216): unsure at all n locations
agcctcgttcgcaccgcagaggnaggggaccaaggggggggcaagcatcagggagacgcccgcccccaacccacggaangaaggacgcaagaaagcacaggcgcagcaacagggangcaagaacggacccggaaccaaagagccggaggaaacgggccgaggggcgcaacgagccaggcacaggagcgggaggaggcacgacgcggaggacagaac

SEQ ID NO: 374939 - DNA, 467 bp, Zea mays
  unsure (1)..(467): unsure at all n locations
aacgcacactcgtgggccggcattctctccgccgctcgccctctccgcgtccggcggcccgcgtcgcctccactcccaattagcttatcgtgttcgacgcgagcgaactcgctcagatcagagtgttccctgatccggtcccaatcttttattggattttgtgttttggtaggggatctagggtttgtcgtcgaattccgcctcgaattttagggtttgcttcggatcgattccgttccgtgggattcttgcttgcagcactccatggctgcggcgcggcacgggggttataggagcttcgacgtggccaggaggcgggagttcgacctggagcgttctaggaggagcaaggagtaccgctactcgagccgccaccgcgactcggatcgccaccgtgatggcagcaggtgccgtgaagtgcccaacgggtacatncgncaccgctcgccgtatgcgccaccgaagag

SEQ ID NO: 374940 - DNA, 231 bp, Zea mays
cacagggagggtttaactcatgcacacccctgcgttgctcacggcgcgggctcacctaccaggggaaggacatgaccacggcctgcttgagatgccaaccgctcgtacactactggcttaacccggagatctacgacactggcgggatgcgccgccgcgcgttgctggatggctcgcgctcccggactatccggatggcggaccatgccgagggcagggccaagcacagct

SEQ ID NO: 374941 - DNA, 429 bp, Zea mays
  unsure (1)..(429): unsure at all n locations
cctgttttcgcgtccgnccacgcgtccgcccacgcgnccgttcatccgattcctcctccccctgcttcccggctcgcctgcctccgctgcctgtgcgcctcttttcatgcgcgaggagggaccgtggggaccaccaccaccagcaccaccacctccatccgtgcgcctctcgctctcgctggtggtgctcctactcctcctcctgctcccggggcgggcggcctccttttccacctcctgctggtgccagggccgggagggcgtcgcggaggtggcgcgcatggggctcgccggggacgggtcggcggacaccgcccacctgaggatgtgctccctactcccttgtccgtcctatgtcaccttccgctttgcctttacgccccatccatctggttgacttcgccgtggggaacgagaggctagcttctc

SEQ ID NO: 374942 - DNA, 389 bp, Zea mays
gccgggccggaacacccgggccgacccacgcgaccgcccttgttaccgagacgaaggggaggaggccaagggggcggtacagacacgaaacagccccgcaggccgaccgcaccaaactgcgacggaggagccgcaagcggcgcgagaacacgagcagcagggccacaagcgccagagacaagggcggcaggcggcacagctgcacggacgagacagaggcacggcggacaagcgccacgagctcgacggacacaaggagagccagggtcaccaccgccagagagggccgcagggggagcacctcgaccgaacaggaaccaacgcgacgcggagcctacggagcggagggcatccagaaaggggaagaagaccaaggctcccgagccaga

SEQ ID NO: 374943 - DNA, 365 bp, Zea mays
cccggccggaccggaacggacgggccgacccacgccacgcgtctgtactccagccagcaccaagggcgccacgggaaggcacgatacaaaggagcaaaaccacacgcccccaggggacgacattgaggacgcaggcagcgccagcgcgccgcggaccgcggagggaccgaggacccgcaaagcagcaccgcgcggcggtccaccgactgacgccgacagggcgggggccggagggggcagcggaccgaccgcgcgcgggccagacgggacgacggaagaggacgagcggtcacacgaagccgagccggcccacgacgaaacaaaagaacacccgaacgcacggaggaagggaaccatggggagga

SEQ ID NO: 374944 - DNA, 290 bp, Zea mays
cctgagtagaggcgcaccggcaggcgcggacgggccagggtaaaggcacgagacaaaaccaacaccaacaaaaaccggcgaggaaggagcggcaccgcatgcccaaggcgccatgagggcgtgcaccacgcaccacacagaccaagccggtgcccaggacagaaacgccagcggagagcctgacggccgcgcacgtggcaggcaggcagagggccagccgcgcggagacaagaccagaggggatagagatgacggtcaacacagccaacaaagaaacacagggacggaga

SEQ ID NO: 374945 - DNA, 289 bp, Zea mays
  unsure (1)..(289): unsure at all n locations
ggccggggccggaacgcacgtgacgggccaggccaccggtccttattccggcgcaangcgcaaccaaacgaggcaggcattaaaagagaccgcgccgccgccaccaaagccgaaggcggacgcaccaggacaccggcaagcgccggcccagccgcagaacagacacgcagcaggaccacaccgagagccaggacagcccgcggacacgcgcgacacaacgccggaacaaagcacccgcacgcgcgcacccaggccaggcggaagggggcgccagccggcgccggcaccg

SEQ ID NO: 374946 - DNA, 330 bp, Zea mays
  unsure (1)..(330): unsure at all n locations
actgtcttatttganccaggcgacgaagagaacggnacagtcattgaggtaaaggcttctttagatggcgaagaaaacgatatctgcaaggatcggcgagctaagaaattggaaaagaataaactatgtgaagcagcagatgctaccagcaagacatcaagtcaaggtagcacaaagaatccagtggacaccaaccatcaggatgaagttgaattgcttgctacagaggagctagaagaatatgatgatcaagaaaacaagccatccatgatgttacaggaagaaactgacgaggcatgcaatagtcagtcatcgggtataggaaacaag

SEQ ID NO: 374947 - DNA, 433 bp, Zea mays
gagaagagagggagtacattagaacattaaccggtgccaggtaaaagactatcaacattcaacatcaattcacaggcctactgtatttacataagcgctccttgagcagtcagaatcttcacaccaacctagctatcgctagaaagaaaaaaaatgtaaatcttggccaggcctgagttgattgccaaactgctgcgcttagcgacagatcaactcaagaaaaagcttaaataggaacattgaccatcctctggtatcctttgttttgaggacactttatttttgtatcaggccctctcctgaaatgtcagagagcgggaaaacgctgctggattggcctgcagggattctggcatcttagtcgcactatttttcagatccttggactggaaagacttgaatatgattctgtcatcaggcttgataccaagag

SEQ ID NO: 374948 - DNA, 408 bp, Zea mays
gagccgggccggaatacccgtgacgtcccacgcgaccgcatcgctaccgcggacgcgagggcggcaccacgacctggggaacgccgaatgccctccgcacaaggcgccgactgatcccggtgaccgcggggccgagatcggcgcgccatggccgcgcccggaggcctggaccaggactgtgcacaggacgccgccattaagctcttcggccgcagcatcccggttgtccactcctccgtcttcgccgccaccgacgcggccgaatccgaggttagcaccaaattagcaaatgatgttagaagcaaagatggcatgccatgccttccaaacatgtctctgattgtcaaaacaaatcccttgccttcccagagcaatatgaagaatggtttacaggcgatcagcagtcag

SEQ ID NO: 374949 - DNA, 128 bp, Zea mays
catagccgccgacgccgagtcgaatttttgtgaggagacgggaccgtataactgcaccgagactagggagagaacaggttacgatcgactgagcacggcgtacgcagcgacagggggcgatgaagggg

SEQ ID NO: 374950 - DNA, 230 bp, Zea mays
  unsure (1)..(230): unsure at all n locations
ttaagtaacccaanccaccnggacannacctccgggcgggttttaatggaaaggaccgcgccagtccccccgcagcaggacggtaggagggaaagagggaggcgcaaggcgcccggaacaagagcagaacgggaaaggggtggagacaaaaaaagaggccggggggaggcgggggggaaggaaaacaagggcgacggaaaagaaagatgagacgagcaggggatcggcgg

SEQ ID NO: 374951 - DNA, 352 bp, Zea mays
ggaccaaatgccaactccacgctggagaaaaacaatcaaggggggcagcatattatcttacaggggttttagcttttttatccgactgaaaacactaagttctgagacattatatggcagcttttttatcgaacctagatgtccaccctgtttacaaactacaggagacagttagacaccagtcctttggggctttgggaatacttggggagttggggttgaggaaaaaagaatttccgggagcttgaagctacagaagtccataaaaaggcagaccacacagcagagcacttaaaaaaggtttacctgccagcaacaagcacaggagggaagcacaaatttaatttaaaaa

SEQ ID NO: 374952 - DNA, 404 bp, Zea mays
gcacgagataaggataatcgcccgaggcaatctgatcgcggggacgcggatcgtccggacccgtccgccacttttggtgttcaacacatgatcttttttaaaaaaaaagaggtatagagtggactgcggagtttttaaaacatgaaaaagactacagtttttagcaagaccatggcattcaaaaccataaaatttgttgcatccaaacagggtctaaaagggttaaaaaaaaactgaacaagcattgtttcgcataatgcttcaccaagaagccagagaaaatagtcgaactgcagatatgcgaatttgctcataattatagccgttgctatcattggtgtcaccgctgaatgcttctgtttggactttcatgtgacttctaagtacacaggtgtggtcacatg

SEQ ID NO: 374953 - DNA, 305 bp, Zea mays
  unsure (1)..(305): unsure at all n locations
gcccagccccaggcgcgggggttnttcttaacatgcgctcggtcgagtccgcaccggaccttatcagctgcttgcctactgccgaagacaaagaaaaaaacaagaacagcctcgccagatgctactactgccgaccggccacccacccatagatcgcccattgggtcacaaagaacaggaagcacaaactactgcaactacataccggactcaccgctacatgggctacagtgggcagcatcaccgactgccaacgagcatgttactcaagctagaccttacctgagtgaggacatggagctgga

SEQ ID NO: 374954 - DNA, 399 bp, Zea mays
  unsure (1)..(399): unsure at all n locations
cgggccggaacgaccggggccgacccacgcgcccgtcctaatgccgggaagggagcnccgaggcggccggccgcggcgcagaggacggacgggcagagccaacggcacgggccctaggggcgcgaacgccccaacgtggggcgacgcgggcggcgagcagaggcgccggacgcaagctgggaacccgacagagaggcggacagccagaatccggcacacgggagccgcgcgccactggcccgacaaccaagcgcgatgaccaagggtgcgaaagaacggaaccacacgcacgagggtgaaccacgaacgcggcgcggtcatgagtaggggaaaaccaacctggcacacgacggaccaaacccaggggacgagcccgacgggagggagaacaaaccaaca

SEQ ID NO: 374955 - DNA, 199 bp, Zea mays
  unsure (1)..(199): unsure at all n locations
natagtttattgccatgccaggngagctaacgggatgccagtaattgtagcctccaacattgctgacagtaaagagagaatctcgcagcgaacctctgccgggcaaaagaatggacgagtgtcgcctagatatactgtgtaaaacaaccaacatacgtgattctctgagagctggcaagacgtcagcacaactggcgtc

SEQ ID NO: 374956 - DNA, 379 bp, Zea mays
  unsure (1)..(379): unsure at all n locations
cggaccggaacagccgggccgacccacgcgattgtctcgcgaccgcccacccgngcgggcagaaggggcaagaccaagccaagcacgcgccagctccgcccggagacacaggccgagctacccacgaccgccgcaccacacaggcgcccacaccaccacaggagcgcggcccagaagagctcaccggtgcacgacggctgccctgcagaacccccatggacgccaccgaaccaaacggtgggcaggggttacctacccagggccgcccccaaccccatggacgacctcgacaagcccacaccccaacaaccccgcaagcacggaacggcatggaggctggacacaggacgcaggacaccaacctcaccggccagaccca

SEQ ID NO: 374957 - DNA, 323 bp, Zea mays
aaacacacactagaggtttgtttttttaaataacttgggcaggggcatttaaatgggtatacatatagggctgttcccagcattatattgtaccttttgcttttgttgaagacccgctgtccaaactggggacccatcgatggccgatgggcgcgtgtgtgtgtgtaagccaccatgtgtgggggagacataaatcatgtccatttggaaatagggccgcttgatcataatcatcaggcagggcgcgtttccgtcaggtcgaaccgaattcctcgttccagttttccagcttggcccatttgcttttttgcaagcttggcctg

SEQ ID NO: 374958 - DNA, 387 bp, Zea mays
  unsure (1)..(387): unsure at all n locations
ggcagaaggggcaggaccaaaacaagcgcgcggccgagcccgcggaggaacgggcgaccagcagcagagcgccggcgacaaacggcgcggacaccgacaaccggagccccaggctgcggaggctgccgggcccaacaccccaagaccgcaccagccgacgagaagaacccgggcgagcagcgcccgcaggtgaactacgaaaggcacaagcccatgtgcaagagccaccgngaccagcgaccacccaaaatacaggcccaaccggggagcccagggccggggcagcaacgacagcaggaccaacacaacagagaacagagccaaggacgcgctcgccaagcacagcgccgagaggtgcaacctgaggccagcgcgggggctggacga

SEQ ID NO: 374959 - DNA, 392 bp, Zea mays
ctacttacttgtacaccaaccggagcggaggccgacacgggaaccatgatagcagagaggggcgaccggcgccaaagagcgacaatcgcgcgggcaacacacacgaacgcaaccggagacgcagggggagcgacacgggggcacacggggtgcacatcacacgccgcgacaggagggagcacgccggcacccaagatctcacagcgaacagcagcgacaaacggaggcagacacttccgaggaaacagagcaccatccgacgagaaccctccggagcgatgaaaaggctgcggagcaaaacacagacggcggaacaacccagatcgcaacagcacgccatgagccgcgggcgacgcgaaatgaacagacacatgcgaacatccctgacaaca

SEQ ID NO: 374960 - DNA, 363 bp, Zea mays
  unsure (1)..(363): unsure at all n locations
attattacgcacgggcgaggcnccngccgacggggccgtttatggacgagccgcccacctcccacggcggcggaggcggcacgggcaaggaggagagccaccacatgggcctgaggaagcggatgcccagcttgtccggcaagacccagcccaaatactccgcgtaggccgacgagaggagcggccgacgctccaagtcggcgccctccgtcggcgccgccttcgccgaggggggcggctgccagaggcagaggaggcaacggggcgccagctggcgccagagcaagaagcccggaatcgcgggcgaccttcagatgaacgaggaggaggacgccgcgcaaggccgacagagcaggggcacct

SEQ ID NO: 374961 - DNA, 375 bp, Zea mays
  unsure (1)..(375): unsure at all n locations
acttctacagcccaccnggagcaccgcacaggggggggtcagaaagggaagccgcacataacccgccgcaagacaagggaaacagcggcgccaggcgcccaacggagcacccccaaacggacagcgcccaccaacaaacaacggagaggagagagccacgaaccgagagaggggcccagaggcaaatggacctgatgagcccactgagaggcacccaaaacacgaccgcagcagcacggcccgaagccccaggaagccagaaaggggaacagaaaaaaaaaaaaaaagggcggccgggcaagaggaaccaagcccacggacgcgagcatgcgacgccatagcgcggcgaaagagacaccgaaaaacaaaacaccg

SEQ ID NO: 374962 - DNA, 436 bp, Zea mays
  unsure (1)..(436): unsure at all n locations
acactacctaaccaaaccctactcgcccccacccgcgccactgtcatggactcgatcgacgcggatttagcgcgcacgcaggaggagcggcgcaagatggaggaggcgctggcggccggcgcgcccatggccgtgtcctccgtcaccttcgacactgacctctacggtggcgggggcgccgaccccaaccgcttcgcgggctacgacacctccatcccggcctccgaggatgacgccgcggaggacgacacggagttggccaaccccgcaccgcgccgactcgcggnctacacgggccacgccatcgccgncgccgacctcccgcggtcagccgacgacgacgacgggctgcccaagaagtcccagcgcatcatcgaccgcgaggacgactaccgncggcggcggctaaccagatcatctcgccggagcgccatga

SEQ ID NO: 374963 - DNA, 325 bp, Zea mays
acttttccaagcacagacccaccggagggacagcgcgcgtgagcgagagagaccgagagaccgcccgcgcggcagcgacgaccggcgaagacgaaggggaagggggacgcaacccacctggcgacgaagacggggccggagggcggcgacgcggcggcggcacagcaggctcggaacgacgcggacccgcgggagcggggcgaccacgcgcggaagcgcgccaaccacgcacgcggcctcggaggcgggcaagaggtcggaacccccaacccgaaagggctgggcctacacggcgcagggcgagagctgccgcccccccaagccc

SEQ ID NO: 374964 - DNA, 318 bp, Zea mays
caaccagaacagctattcttcgggtattgttcatgagtggcttccaagttcctccaccactgatcaacctttaaagcaaattaccgagaacgaatcccttttatactctgctatgtttgagccagaccaatgcaattcctgcacacacgtattttcctttttatacagctttcctgcttgctttgcgatcactacagcaaacattcaaagaaacaaaacaaaagcatacaagaaatcagacgagcacaaaatgaagaagaaaatccaatcttgtgtgtagttgtgttgaacttgaactcacgtgcaaaccaaatgcgg

SEQ ID NO: 374965 - DNA, 421 bp, Zea mays
  unsure (1)..(421): unsure at all n locations
ggaccggccggaaatccgggcgacccacgcgtacttctcgcgaccggcgccaagccgcgacccgcgcagacaaaccacggngcgccccccctcgccggcggcgcggaggcggagcagtgagcacagccggcgcggagggagcaagacaccaggaaaggacgcgcctcccgcgccgccgccggcgccggggtcacccgccaacgagcggaagctgagcccgggggtgcggctcctcagcgcgaacccggccacggaaggctgcagccgcgggctgctcaaccagcgggcgcagaaccagcagcgcccgcgccgggcgcgccggcgccggcgggaaagcgacggcgcggcgcccgacggcagcagacgcacagcgcggcagggccaggaacagcaaaccaaccacctacacgacgcgggcgga

SEQ ID NO: 374966 - DNA, 336 bp, Zea mays
gggggacaaaaaaaaagtatttcctaattacaatcacctctcactttggctagttactataggtatactgatgttgcggttctgaaggtactagatgccggggtggccggcacgtactccggttgttagtcgcgattaatgaaggcgacgagcttggccatttcggcgagcgcctgtggcgagccgtgtttggtgaggaagtagacttggccctcgccgggggtttcgtacagttcggcctccccgggccagcctttgtttccggagggcggtgaagtacgcgcgctgccaggggtttaggcggtccttccccgacacggggaccaggacccggga

SEQ ID NO: 374967 - DNA, 320 bp, Zea mays
acttctcgcgaccggggaggaacccgaacgagcacgcctacgtggacccgcaccgactgccggcccccacgcggcagcgcaacggcgcctcccggggcccggtcaccgagtcggggaaggaccgcctgaaccccaggcagcgcgcgtactacgccgcgcgccggaacagcggcaggcccggggaggccgagctgaacgagacccccggcgagggccacggctactaccgcaccaaactcggcccgccacaggcgcacgccgagagggccaagctcgacggctacattaaacgcgacaagcaaccggagtacgcgccggcc

SEQ ID NO: 374968 - DNA, 367 bp, Zea mays
  unsure (1)..(367): unsure at all n locations
caaggccgcaaannaactaagggacagctttagtagtggactcagcaaggtccaactcaagctaatctgaagagtgactaatgtgacaactctggtggagtcaggtttccagacaatgttgatcagtgaagaattcccagaattccataaccttctgaccttgttattggaaaaatgtgatcttactgacaacttccagatgtaggcaaactttcttcagcattcacctgatttggagaagctcactgtgggccgttgcaagttatcaaaagatcccaagaaaaagaaaggaaaagccagattgagcagggggtgcctgaaccactttaacagccggtgcaagaacctgaagcttactgaaattatc

SEQ ID NO: 374969 - DNA, 373 bp, Zea mays
tctttttttttttttttttttttttttttttttttttttgggggtttttttttttttttttttgttttttttttggaaacaaaccgggccggaaagctgcctatttttttgaaaaagggggacgcccaaaataggcaaccaccaacctctggaggggggctccaccaaaaacaacggctacagaaaaaactaccctccccctataaacaacaacaaccctttaggaacaggggcccacagccgttttgccaaccggggcccccaaaaaaaggcccccccacacaacaaagacaaaatttaaggaaggggcaaataaccccccgccacaaagccccaaagggcacgccctttaaaaccaaaaaccttttggggg

SEQ ID NO: 374970 - DNA, 174 bp, Zea mays
  unsure (1)..(174): unsure at all n locations
ngctatttattccggcccggcccccnacnnaagggggagctttctggggcctcagaccggggcacctccccatcgngagcttgcgggcaccgctatcatgcagcccctcctagatgccgcggcacgggacagagcccacagaacaggactgcacccgacgaccatggaggccca

SEQ ID NO: 374971 - DNA, 301 bp, Zea mays
ggcactcggcgaggcagggggcgattttgatgtcaccttccgtcgtctccatacccttgcattgccggcgcgggtcacatgcagcctcttgtatcatgcctggtggcttgagagaggcacataacatggactgcgccccggtgccggtggggctcactgggtgagggctacccggggcagcgacctacgtcgataccggacaccagcatgacgaggtacccagcagccgtccatgccgcatccctctgatcatgacatgcgggcacagctaggacactgccagagagaatggcgatttctt

SEQ ID NO: 374972 - DNA, 489 bp, Zea mays
gaccggccggaattcccttttcgtccacgcgaacttttaatagggcgcgggacgacccccccgggggggtttctttgaaagaagccgacctttacataaaaccattcttacatccaggctcctggccacctataccgaaaagtctgcactggatagctcatatcagagcaaggcacgaagccgtaacaaccaaaattatggagagaatgctccttgccagtagctatcgtcacataggatagctcgagcatgtggcagaaacattgtgcgctcggctctagtctctagctcctcatggcccaaataaaaatctccatcgagatgatagcttcgggagtaacctaatgaaggaaaacatcaatagtctgcagaacctctactaaaaatcagctcaagggaaaccgaagacctgcccttatgaatctcatatagacaacaacttcgtctacttctgacgcagggacggtgctatcttctccagccctcaca

SEQ ID NO: 374973 - DNA, 439 bp, Zea mays
cacgtcagcctcttcatccactgccacacacacctcaccggcgtctttcgacggcggtctcctactccgcctcctccaaaaccctccttctgcgcacccgcgagaggaaatcctcgccccgccccccgttgccccgggggcgcaccacttctttagtgaccctgccgtcgccgccgtggggcctctcttcgccgcatcggcgcagacgcaaggaggggacttcgggtggtcctccacctcgaccacgcacgtacagcagcaaccccgattctcggatccccgattcgctccaggggaacccttcgctgctcttggcggtagagggttcggatctggggatgcggctagggcggagaggcctcggtcgggggcgccgcctccagggtttggcaagccgtcgcatccacttcctgctgcccgtgatgcgcggagtgcatct

SEQ ID NO: 374974 - DNA, 441 bp, Zea mays
acctattctttttttttttttttttttttttttttttttttttgttttttttttttttttacgcaggaaagctacgtttcattatattaatagaagaggaaaaaggcctgaaaacaaacaggaaaacacacgaacccccacagcaacccacaccactcaacgcacacagactcacccccatacgcacacctgacacaccctgcactccaacacctttgaaggatcttcctctaacccggatcaaaaagagaacgcaagtaaagagaacccaagttcttggcccctgccaaaatccaaagatgtagtttttttttaaacccagactccaaagagatcagataggaccgtgctccatcaaaaaaacacctgtttttatgcttccaaaggcttcaagccccaagaatgacaattctattaaaaccctttccttttcttttatga

SEQ ID NO: 374975 - DNA, 182 bp, Zea mays
accttctttttttttttttttttctaatgagaccgcgtcactgagctgaagtttgcacaaagtaacaaagacaggcaacaataaaaaaagaaagactatcccgtatcacgttcctaaacacaatgctggcagtgagtggagttccccagatatctcaactaaacgggagctacagattgact

SEQ ID NO: 374976 - DNA, 317 bp, Zea mays
ttttctttttttttgtttttgtttggatcacgcgagaacttatgcctagaagctgaacaggtaaactggctgcctaaggccatttcaattccatgaccgtagacttatcagcaaaaaaaaaggtctaacagtggatcaaccactaagatacatggcttgggcgaagtgttcttgcgcggaacatgcaaaactatgcctttctcctcaacatattgagactggtgacgccgaattgaccacctggacctgaaccgaactcagaagcaatcttctcttgctgaggaaacgctgactgctacacttcgggtcgggagggg

SEQ ID NO: 374977 - DNA, 356 bp, Zea mays
attccaatgggttctacgctgtttataccgacaaattaaattacaccttccacaggatataccaacctttaaaacaataacgaaaaggctctttccaaagaagaccaagaaaaaaaaccagcttattacaccaatgtacagcaatgtgaatggcaaagccccaggtgcctataggatctcgtttacgtcacgtctgtgcccggctcttcctggatagaaccgagcccatcagagggaacagcgatttcttcctctgcatcttttggtttggaacgaggccctcgtagctactactccccgacgcctgcaccttggattcctgctccttgaggtatggactcttctgttcgacaaat

SEQ ID NO: 374978 - DNA, 310 bp, Zea mays
acctacgctttttttcggttttttttttggggccgggcggcatcaattccatatggaagcggacaagcaggctcatacattacattcgacgaagtgggaaccctatacagcaatggttcgatggaggagagcacgcacgcaacgcaacgcaccgcagaaccagggatgagggataggatcttaaccggtttacttcctgaagggggcctcggtgctgcccttgaatgcgatctggacgaaggtgagcacgatgaacaggcccaggtgccacgtcactagccacagccagaactgggaggggactggcggg

SEQ ID NO: 374979 - DNA, 334 bp, Zea mays
agatcgggtggtagtggagttccatgaacacaaagttttttagacaaattaaaaaaacagccagtcgtatcctctccggcctattattattgtgcttggtgttccacacatcaggcacctagcaggtctaggctctaggggctagagttttgcgtaaagcagccgctccagctccttcatatttgcagcttccatgcacatgagcacgcggacgccgccgccgcctgttggcccgtcgctcgttaggtacactaagcctccacggacggagtccggccgcgacataaccggtggctttccccatccgaaatccacgtcgtacattggcttgccc

SEQ ID NO: 374980 - DNA, 359 bp, Zea mays
ttttcttttttttttttttttttttgttttttttttttttgggggcataaaagatccatttttgatactagtagtacttacacaggtttacatagaaaaagggccatataacagaaatggggggttttacatggaagattaccgggaacttgatagtgccatcccataacaggctaatggaagcagaaatggcactagcatataaatcgagcatgtttgatactgaaaaagtgtttctacggaagaacagaaagggagcaaaagagagcacctcaagctcacaagagcgagggtgcctattccactaccaaaatagcctgttagcgcatcccacaagtgtggaaaaaccgaacgagagt

SEQ ID NO: 374981 - DNA, 386 bp, Zea mays
gcatcacaatggaacttttttgatcttatgtgtcctgagtttgccaaagaaaccataaatgtaaaatttgctttgggtacagacgaaatgaattcatttagtgaaaaaaagaagtgtacatagcacctggcccgtgactttaacgatgtacaacattccgtcatggttgtgtcacaaaagaaagtacattatgttgactatgggatgagtattgccatgagtatttcaacttaagagttcttttgttaccatccatgattctcccggtggcgccacactatcagggcaaaagactaaaggaaagaatggttgtgtagtatgcgtcgatgaaactgcttccttgtaccttaaatcatccaagaatttggtgttcatgggacacaaac

SEQ ID NO: 374982 - DNA, 362 bp, Zea mays
atcgcgaccttgtttctgtgtctctggcggccctcaccttgctggacccgcagcccgctgcgggcagtaccatggcgtccgctgaagccccactgctccacatcgcggccgaggttttgccgctattagcttcggcggcagtcctcttcctcgccgccgcaatcacctacggccatctgacggtgatgggtcgccacgtcgccgccgtccccgtggccggcgcgggcaacgcgcggcgctcggtctcggggcttctcatcttcgtgctatgcgtctccgccggcacgctcgagctcatcgtgttcgggacgaacgccgccagtggtggtgcggcggatcacggtgcgcatgctcgcgcgctc

SEQ ID NO: 374983 - DNA, 206 bp, Zea mays
cccacaagccgatgacctgagaaattcagtcacctttcgacgcggttaaaggcccaacaggcgccatagctactgtttgtttttgccaagcaaacccccaaaccactttttatcacatacgactgaagcaagtcactggtaagagcatggctccaccaagagcagatgatctgacccagggttagcaccagtctttgggctttggc

SEQ ID NO: 374984 - DNA, 383 bp, Zea mays
ttcatcaaacacatgagtgtacacaacttttctagcatccatttcatgcctaagtctatctttaacttgcctcttagtcttcagttgagattggagcgcttgcacctttgctaaaattgtgcttgtcttggaggcaggctaaatgccaacatcatgaagaaatttacttgagctcgacaagacatgggaaacaacttgtgtaaaagactttgcaagttgtctatctttaactggtgttgccaccattgctttcatatcatcctagcatcaagattaaaacttagtatagtgtaacataatagagagaatatatagataaataaatacaacatcaaaatcatgaaaataaatgttgtgcttgaaactacataccactctagacg

SEQ ID NO: 374985 - DNA, 314 bp, Zea mays
  unsure (1)..(314): unsure at all n locations
ttgncttcaacattatttgattcttaagcatggggattttttaggagatcttgaagaaaactttctcatctatccaagtttaaaaggttgaaaatgaaagacaccttggatcaagaatcttataaaagacaggcacgagatgctcatccatttgtgaatggtggaagcgctgcaaatggaattgcagaaaatggcaaggatcatgaaatagcagattatcagagttattcatatagtggcagtattgatgtgccggaagatgaggatatattatctgcggatattgtataatgattgctcaataatgaaggcga

SEQ ID NO: 374986 - DNA, 451 bp, Zea mays
cgtttctcaaaagagacttaaggaggtaaacattgttttcaatataattgcttgaaatcatgtttagctttggtatgcttttggcagtcagattaacatgtgtttcagaacctgaacttgtattatgcttctgtatgatttcagtgagaaacaccctttctgtaatgtcaatttcttttcttttttttggcaatttaattagctcctttttggggagaaatttaattagctcgtttgcttgcaatgcctggaaggaaacttttttttttcatctttgattgtagtttgaattctgaagagtgcatgcctactagttatgttttcatctgttgctgtattaataagttctaccactagcttatgtgttactgataattatctcgcagcattataccgcatgccaatcttaagaatcgtaataacattatttgtatcatcttatggttttacc

SEQ ID NO: 374987 - DNA, 248 bp, Zea mays
ccttttcgtccgcccacgcgtccggccactatctatctccatttgacgaaataacgccgctggtttcaattggtggttggttcgttttcgtccacagactatccgaagactagtgtgtgggtccaggacgacgaagagtggtgcccattgttgtccgttagctagccagcagcgtcgccatcgacttgttgatataaataatcaactgatagtgactccgatcaaaataaagtgcattcaaatacaaa

SEQ ID NO: 374988 - DNA, 328 bp, Zea mays
aacgtacgttacatacagatggcaagagtccagagcgcatgtatgaaacacgggtattacaaatagcgtgttttgttggggttatggttacaacaggggtgcggcgagttgagccgatcacatggtcgttttagcattgaagaaaaatacagcttctcaccaagtatgaaatattaagtgcgagatccatcagggcgtggagcccctgacctgtcaatctgacctgcaattaccctttcagaacggggagatgctttaagtacaacaacccctcgaacgatatatctggctgctggtgctaaaatctggggtaccagaacatgccctt

SEQ ID NO: 374989 - DNA, 461 bp, Zea mays
cgagtttgaggcgctaatatacagaggaatgatggagagcgagctctgctccgccgctagcctgtcaacatcacacatgctctaatggaagatccatgaacggtcccagaagaaaatctacatttaaattaacacctaaccctctatatggcgtgatccaatgatagcactaataatctccttaatttttccctgacagtgacgcactccccgaacggatgatataaggaatatcattaacattaagacataaataatgtcctacaattttggacagatccttcaactatcaatgtactggtgctcatattgaggcgtactttacgagtacgacccgacggtaacaggtcaacaatatcagaggacccaggcgccggtggggaggcggcgggtgtatgtgcagacggagaccggctgcgagctaggtatggacctggacccgcgggacaacccgcacaccg

SEQ ID NO: 374990 - DNA, 403 bp, Zea mays
catgttaatgaagagagagtttcatgaggctgaaactctatatacgctgttttctatacaaatgttgataatgtgataaaaccctctattgagaatgacttcctatagtcgccgccttgtcgctagaccgccaccatagttactcgagacttgagagctcctgttttgagaatttgcaatcttttgggctcgttaattgatgtgtgttagaaggcctaccacttgataccaagctcaatcaggattgttctaaattgttgcttgataccaatctgaagattttaccttgtctttcagaaggccttacacatctatcagcgatcaagtgccctctgcttatgtttattcccagcgacgagctggaacagcattatcagagggaaaacctgatgaagatagagca

SEQ ID NO: 374991 - DNA, 332 bp, Zea mays
ttttgagcagctgccagtcggaattaaaggtgactacccgtgccaggttgttgtggtagtagctgttgtccaacaagtccctggtccggcgcagcttgccgtggaagggcgggaacgcagccgccacggcgcgcggttcctcgtcgcgcacgttgttgggcaccacggggtcggctccgggcccctccgcgccgcacttggccgacagcaggtcccggtacgccggcacgatctgggccggcggagccgacaggcgggcgcgtaacgaggagcagtggtcgactccgacggcgtgcgcgcccgacaggatcactagcttcttcatcgtgaag

SEQ ID NO: 374992 - DNA, 456 bp, Zea mays
gtgtgtacgttagcctgttgcagagttcgcttgtggatgtggagatggggtggcttgggtttgggttccgccaaggtgatggtttggtggatacaagagccagatggcacgatgaagttatcaacccttaagcccttaattcattggtgcttctttttctagatggttatctatcgttgctgttatgaatttctgcaggttgtctgtttttagcactgtacaaatttctggatgatagaacccaggaatcaagactataagagtgagtggtggtggccggccagcgctttcatgatgataatcgtgcaggcgccatcaaaagaaaaccaggaggaaccgaaacagaggaaccgaaacagagtagtctaagcgcaggggacaatgactgtgttaccctgcttatcccctaattgcctaatacctgggctctaagactatcttcagtagtttacccat

SEQ ID NO: 374993 - DNA, 212 bp, Zea mays
gtcccagataacataaaatacatgcctgaccattagagcattacaacaatatttcgtagtcctttacatagctttttttattataataaaaaacacaaacccgatttttattgatgggacatcatcgatcacctctggctttggcttatgatatttcggtagagttgttatacatcacaacttcactatattttaggtaaattctttatccc

SEQ ID NO: 374994 - DNA, 194 bp, Zea mays
gatacaaccatcatgcctgctcgtgttattcacataattcatcagcagttcaagatcgtggtagacatcctgtctaatgatgagaccttatcgatttgtcatcagatggtatttatttaccagacacacaactcataaacacaaaagtggttgtacaagagcttggttgccacttgacaggaaagagaagaaaa

SEQ ID NO: 374995 - DNA, 234 bp, Zea mays
tttactcgtgcgttgttagtgactaaatggctatattgcggcacgatcgatattatcacccaacatgttcatgtttgtaggaagcatgaaaagatgatcactactgacgaacgagcgattgtcaaagactatcaggttgcgacggactctagaacaattgtgtggactgacaaccgggcttagagcattgtcaacgaccagacataccgtaccacaccatcgtgcgtaggctag

SEQ ID NO: 374996 - DNA, 236 bp, Zea mays
acttgcttgcctcttactcccatccttgggtgatgcctcaaattaatatgtctcaacgacaactaggaggagagcaagacgagaggcatggaggaacggaaccatgatttgaggatccttcactgcggtttcgccggaggcgacccgctggtttcgccgacgccaccgccgagaccagactccaagtcgccgactttcattctgcggctgctgctgctgctgcgccggcgggggcg

SEQ ID NO: 374997 - DNA, 291 bp, Zea mays
cacacttgacacgtcagtctacagcagcagcaacagcgacaggttgttacactaatagctactaataagcttatagtcgagctgttttattgcattgcaccagcacgtgtactgatgaatgatgatacacctatagggttcttcaattcatcagttgggttgattctttcttcgtcaaggcctcaagggtggcggagatgtcattttcacaataaatcaactgaaagaacgtgcatgcaggggtgcgacgcgttggttctccttgacccgacgccggccaacccggagaca

SEQ ID NO: 374998 - DNA, 462 bp, Zea mays
gcctttctcgccgcatcacgcgatgtcgccgtcggctgccaacacagtggatcgtccgccgctgaagatgagagaggtatcacggtgcgtcgcgcctgcacctcggcccactcgtcgccgtcgactgcctacacaggggagcccccgctgccgaagaggagggaggtcttgcggcacgggactcggcgacggcgcccccctaacacaccgaccgggaggtctgcctcactgctgccacactcatcgccaggtgccagccttggacaatattgcttacgggagctattatggttgcatgtagttgggtgcttatccaatatattgtaattactgctgaggtttcttttgtaatatatgcatggtggtacatacttctctacacctaccctaaggtttggacatgttttttagcaatttaatttttgttttacattttcgtttgagatgattgattagaagtcg

SEQ ID NO: 374999 - DNA, 457 bp, Zea mays
tttataaagtgatatggggccaacccaatcttgatcagcagaaagcctaagatgtgctttgcttgctttaacaaatatgagatctgaatgtgtcctgaaacttgcacccaaaacagaccttatattagatgtggtttcacctggtgtacagttgctttcgaagagcatgtttggctatgctctgttatttcagtcgtgcattagtagtgttcaggatctggtgcctttgcttctgaatcctgattgcttctgttaacttgggaaacttggttgacatgtcccatctgtcagatgctcatcagggtatgtgttgtactttacgatccactgaggaagcaactctttcgattacaggtcacagatatatccgacaagatggtgaagatctgctgcatcggtgctggctatgtcggaggcccaaccatggctgtcattgccctcaagtgcccagacattg

SEQ ID NO: 375000 - DNA, 455 bp, Zea mays
tttttgtcctttcttcctctgttagttcacgcgcaggcgcgcttcgccgagctcgcccctgcacgtcctgctcgccggggatgcccctgcaccagccgcccctcccttgcttctctagatcgccgtggagttttacgcgcgcagctccctcagctccgtccttagcgctcggcgtcctgcgctctactccgtgcgcgcgttcctgtgcttgcccagccgtcgagcttccttgcgcgcgcgtgctacctccctgctctactcgcctgctttcaacccagccgaacggctcctttagcgcgcgctctgcctctcccaagcaccctgctcgcatgaccgcgcctgcttcctccagccggctgcgtgcccagccgttcctcctcctgcttcggcgcccagccagaactcccctgtgtgcctcagtcgccccagctccctttgcttcccttgctcggatt

SEQ ID NO: 375001 - DNA, 461 bp, Zea mays
gttgtctcctctccccgctcagctccgctccgctcccggagacacgcaagcttcccgttcccgggaacacgcactaaagatgcctccagccttcgccgccgcaccttcctcctcgatatgtggcgttcgcatcccaactgtgcgccgtttcgaagcgcaaagcacggtttccacgcccagatttctgcgtaatcgggtggcagcaaaaacacggtctacatcagcttggtccttgaaggctggcttgtgggattctctcagatctgggtaaagtacattgtctgcacttgcaaacacttcatttctatgatttatttaggttttatgttatctatacctcgacatgcatctactggtgtaaataaacctctctttgttacaaattcttgccttggcagaaaaggctaaaactgtttattcccatgttgtcgggataaagtaagaaaagttgaacaggtagg

SEQ ID NO: 375002 - DNA, 138 bp, Zea mays
atgaaacaaaacactctcagtggaggtttcacacagtttccaagatcttggaaacgagttaacatggtttcatccccatgaaactccatgaaactcttcctttttaaatgatatgatatgtcatcaaaatagctgatg

SEQ ID NO: 375003 - DNA, 171 bp, Zea mays
gtgttttaaaacacaagttgtacccaaaagcaaaagtaaatctgggaaaaaaaagaggtgagtttatcagataaaactgggtgcaaaaaggtgttaagaacttatgccgactacagcagtaacctcaagctgcctgctgtcaggatgtcacaaaactgagttctaatgatc

SEQ ID NO: 375004 - DNA, 290 bp, Zea mays
gtcataaccgccgagatagccacgatcatccggggggggtgtgtagaccaaaacccccggtgtcacccagcggaggaagaactatccaagggcatagcggacacccatcccaacgagatgggcaccaggatgcaggccgacaactaggaccgcaccgtcaacaggacaagacaggctgaactagaagttgcaacgaaagatggaataagacactacagggaactggtatgggagaatgacctgaacagtaagcggaacagcggcaataacatgcacaggcctgtgaagaa

SEQ ID NO: 375005 - DNA, 255 bp, Zea mays
aaaaaggaacccaacaccttcatttgccagggggttggaaaaattaatgggggggcataaaaaaattttttacgggggggtacgggtttacaaaccggaaattttcaagggggggggaagcttcccaaaatgaaggggagcccgggaaaaaaagggggttaaaaatccgggaaaaaaagctcccgggtttcttttttttaaaaaaaaaaagggagggccgccccggggggaacccaaaaaaaaaaacccccgggg

SEQ ID NO: 375006 - DNA, 384 bp, Zea mays
gcggccgcccttttttttttttttttaatagaaaatagatttcctaatggaacatgatttgctaaatcaacaatccgcccacggctcatatgttacagtatggtgcactctcatgaatgaatgacagaaatgtgtggaaagaacccccaaaagaatgtcaaaatttgcataaaacaatgtcctctgcattacatgatctcgcatcagctgagaaactctccccctacatgtaagatcagtaacatcagttgcaaccctaccttggagctgctaacaccaccgcagtccgaaggtcatgaacagtgacagaccaaaatttcgcagaatttttccagcccgagttaccattggcaatgttccacggggcatgaacatgatctctgg

SEQ ID NO: 375007 - DNA, 297 bp, Zea mays
ttcctttttttttttttttttttttttttttttttggggggttttttttttttttttttttttgggagcggaaaaaaaattccacttttttggttggatgaaggaaccctcaaagagagggggtgatgccggggggaaaaacaaaaatttggcccaacaaaacaatgccctggaaggaccaaaaaaaaggggggaatttaaaaaaaattaacccagggggaaaccgattccccgggtccattgacatgccggccccaggaacctatgcaattgaatccggccaagggcatttacccc

SEQ ID NO: 375008 - DNA, 128 bp, Zea mays
gaagcaaaacattattcattattaagtgcataaaggagttggaaatctgtgctaaggttactcctgcggttgtggccggttgatgagttcagcggcgccactggggaagggtgataaagaaggaaagg

SEQ ID NO: 375009 - DNA, 179 bp, Zea mays
atataaggccaatttttaataaacttgccacactgcgaacctcttcagggagggacagaacgaacaatagattttactaaaaggaacgaattggaaaaaaaaaaagaaggaattgtttaccggaaggaatctttattgccaaccccagaaccaattgagcacaagcacaagcttttacg

SEQ ID NO: 375010 - DNA, 266 bp, Zea mays
aaggccccaaaaatttagcattttgccaaaggccaataagataaaatttggaatcctttggctggcccaaaaaaggtttcagcagataactagtttaactcaatttcaacgaaggaaatttcacagggtccacaacaatccgggaaacaggggcttttaaagggcttgttggcccactgtggagcaccattttgggcccatttccataaatcataaggttaaaccatttttgggaccaccgaaaggaaggcaaaacaaaggggttc

SEQ ID NO: 375011 - DNA, 279 bp, Zea mays
ggacataacaccattgattcattttactgcattattttggttcgcaatcatagtcatccatacaccgttacacattaacactgaagtttcaaattattaggagatcatggttgctctgattcgttcgcatgctttatgtacatacacattgactgatcataacgatgttcatgttcgacgactccctcattaaccgctaatcctgtcaatcgaaacgccaccgctgaagacatccgtcagcgccgtcgacgactgcagcgacgccttgaggagcatcac

SEQ ID NO: 375012 - DNA, 262 bp, Zea mays
tcctttttttttttttttttttaggtacaccccagggggggttatttatgtagcatccgatacagatacaaggaaaaagaaaaagaaaaggagttcctgtggttacagagtcaccagctagctgtgaggttagcatccaccagcagcaatgcctaagccaacaacgaccggtactttttggacattccagacccagctacttattccaaagaattgggatttcaattaaccgctacaaaattctttttagtggcagaggccc

SEQ ID NO: 375013 - DNA, 110 bp, Zea mays
gaagaaggaagggccccgttaattatttgggaggggggaaattaaactgccttttgaaagggattttgtccctccccgaagaggagaaacttatttgggttaggggggaa

SEQ ID NO: 375014 - DNA, 296 bp, Zea mays
ggttgggccatcaaaccccaaaacacttgcagggattagggcattaaaacaaccaaaatagcccaaaacataggccctggagttctgaagcgtaaaacaatccattgaaaaccggaacatgctcccaaaaaatcctggtacaaaactggggacagcaggggaacaaacaaagggttcacaggttgatgattttgacaaaggggactttggttgcaccggaagaccttacgccttgggcttaccaaagaacctttggttttcataggcaggctggaagcgaccgggcccaaatttgg

SEQ ID NO: 375015 - DNA, 279 bp, Zea mays
tcgcgatctatatgtaagtggttaaactgaaatacaggggggtgttagcttgaatgagaaaaaaccaactattttggttctttctcctctttcatcagccacttgatcatcctatagattcaaatgaaaggaccagtaacaaaggtataaagtaataaacaaaaaagagagaggccataacataattatccaaccccaccaacctgtccaaccatgagagagacgatatatgggcacctcgggggatcagatgctggttcccttggacctgtaccacct

SEQ ID NO: 375016 - DNA, 219 bp, Zea mays
cttggggtgtttttttttacagggggggtgacattttaccatttttcaaaaaaccacgtttgttggttgttttacacaaaatcactagactacactggtacattcttttgccctgcagaggtaagctgccagagaaactttttttactgtcagcaatgttggaggcaacggcccacgcgtccgcccacacattcgcccacgcgtacggggacccgtggg

SEQ ID NO: 375017 - DNA, 170 bp, Zea mays
gtacaaaattggcaggatcaataccatagggtagagcactgccaagaaatcccggggggtgagtttggatccatgacaaaaaaaacgctcttggtccattattactgctattagccgaagggtcttacaggcgggcttgctacttagaacaacggtggccctccagaagg

SEQ ID NO: 375018 - DNA, 208 bp, Zea mays
gggggaactttaaacataagctgtttcatgacaacaacgagtacatcagagtctacacacctttacgagacaaacaccagaacagatcacaatctcagcctacaggtaaactacacttatagggacaacagatggatacatagattcttgcttccacaaggcaggagcagggaccagggacgacgataaacctacgatccttcagcct

SEQ ID NO: 375019 - DNA, 294 bp, Zea mays
agtataaaaatgaactaggtataattgtaaactagcgggcatcaactattcgagaacagaggtagtacaaaactatccgcctagaccacaaaattagttcctcttatacagcaacaggccgtctgagtgacgatgagtgtctatacgccagcagcctcggcaccgttttcctcttgaagactacgtagagggccaggagaacggacacgataaggaggtacaaccagaggtgagcttcgtggacatggaacggcttggcggcgttgtcgttgtcgcagcggcagccccggtcgt

SEQ ID NO: 375020 - DNA, 312 bp, Zea mays
atgtacactctcatatatgtacatcaaaattggttcgatgatcaggagatcctctaaaacacggatgctaatcgcaggcattagagttgtatgatctatctacagagtgagagggttcagaagagaaactctgctctggatcagggtcctgaacaaaggggcaactccactctgaagatcaacaatgtccaactccaacgcctgcaattgctcctccttgcacacaaatttcttcttctcaaatgccttggacacaagagaccacttgctagcgctgggcaacgcgatcttcttcgagaggagatgtgatgc

SEQ ID NO: 375021 - DNA, 213 bp, Zea mays
ttttcctctttttttttttttttttttttttttgggggtttttttttttttttttttgggaaacaacctatcaggggttatttaagcaaatatctgtagcgatatcaaatcacagctggccaaataaggggaagggtctccaaaatggcccaggggcaaagacagaacacaggcgatgccaagtacactcaccaccattaggtaacggccgaa

SEQ ID NO: 375022 - DNA, 245 bp, Zea mays
acatcacaaaatgtacttggaatatgtgattttgacatgagattcacatttgtggttgctggatgggcgggatctgcacatgacacaaggatcctccaccacgccttagcaaactttgattcgtttcctgtccctcctaaaggtaactagtacttattaattcttgctatgtgctaaaaccacaatgctaatatattgtttatttcccagataaatactatcttgtcgactctggttatccaaat

SEQ ID NO: 375023 - DNA, 278 bp, Zea mays
ggcccacaagccaagagccccatgttataaaaaatactagagaataatcacccttccaaaccagaacattttcatttaaaatagcaagtcaagttaatctgcaaaagtaaccgccagatgaaaccctcctgggccagctggatatcagccaggattaccatcactgggtactttgagacagaaatgcgcctccacaggcttgtggtcggagctccggacacaggcgagggattcggacgagcttaacactgcatccaggcctgaaaaccggcccacct

SEQ ID NO: 375024 - DNA, 222 bp, Zea mays
tttttatatttttttttttttttttttttttttagtggggagttttttcacgacattggttttaggaacttatagaccatttctcacaagtcgaacatgccaaatgggtgcaggtgatcggattaaaaacacagagaatcaatgccaactacacaagggggaatcctatttatgtaacatgggaacctaaatccaatgggtgacctgcgacctacgggtccc

SEQ ID NO: 375025 - DNA, 220 bp, Zea mays
ttctttttttttttttttcttttttttttgggcccaggggggtttttatatccatttggatttcttcctctgctgctttttattagccgctggatagtacaaaattgcatattccaacgactaataaaaagaaacggagggagtattatattaccatcaatatgatagaaacggagggggtattatattaccatcaatctgaccgaaacaggtacattga

SEQ ID NO: 375026 - DNA, 81 bp, Zea mays
gcgaaagggtgaattttagacaaaagggtgctgacatgggcacagcatcacacaatttaagcagatatcaacgcaacagat

SEQ ID NO: 375027 - DNA, 367 bp, Zea mays
gaactataaacagaaactttgtataattaggatcagtcagggtcagtgttgttcgacagtgctattcgagccacaactcagaagcaacccgcttccacgagcttgcaagaaccgcaagttgaggaatgcaacgctcaccacggccagcacaaatgaactcatctgaaagtcaatcgctgccacttttagctcttgcaggtcacatttagtccacagagccaaggtgagagaatcagaaaatcaccgtctgccccctactccgccgctgcaaaaactgagatcctgcgtcagaccgaattgggcgaaggggaaccagcagcagtgcccgagcgctgccttcgttggatcggtggagagcagcgaacgc

SEQ ID NO: 375028 - DNA, 300 bp, Zea mays
tttcaattattttttttttttttttttttaatttgagagggaaactattcataattacgaaacatggtttcaacgtatgacatatatttgactcagtaaggacaaaaccacttaatagcttctagggagtcagtgacttccgtcagctagctgaccaatccactctgcctccacaaaccaacaggtgacaacggagccagaatacgcatttaccacgacattgcaggaagattgccatcccagtggtatcgcatagccccggagctgttttggactttgtcactaaccaccaattaggca

SEQ ID NO: 375029 - DNA, 221 bp, Zea mays
ttttattatttttttttcctatgatcaccttgaggtgtaatatttaaaaggtattggatttcacaccatatcatcaaacaaagcgctggcctacagaagtttacatcctgaaacaacttagacatgtgctcagcggagaatgtttcccaggctaaaaaggaaagagcttggtagctacaaacttgctgtagctttgcataagtggggcacatggcactggc

SEQ ID NO: 375030 - DNA, 229 bp, Zea mays
ttttctgttttttttttttttttttttttccagggagttccacacgggattttccttcaaaaaaagaaggcactgctctccccccacaatggcaaggctcctgccttaccactagcaccagcagtcgaacaaaagggcacattgcacactcaacctgcatctttctccgttccaagaaagaccacatgtgtgacgggtacacagctactaacaccacagcaaaagaatg

SEQ ID NO: 375031 - DNA, 201 bp, Zea mays
aaaaaaaaacaatatttccggtgtaaactgtccaaggttctgggccttctggctacaatcaagcacctcgaacaggaaccgagctgttggctatacacaacatttgacgcagaacacagaccaaacaactagtacaaacagagctacaactacaaatctatgtagggtggcccgagcccaacaatggctgtgcaacggacc

SEQ ID NO: 375032 - DNA, 222 bp, Zea mays
ttgtctttttttctttttttttttttttttgggtgggtttttaaaagcaccgggggaacccacttttattaagaaccattcaaggtaacgaccaacacagcggggtttacttggatcccaattacccaacacacccacagggacagaccctggaattccgacacttcgggagaaaaaaggcttcggggctttaagcaaaccgaaacggggaacacaagagga

SEQ ID NO: 375033 - DNA, 283 bp, Zea mays
gactacattcttcttggacttagagcagattttatatgtattgtacgtgactacaataacctttagcttacagtttttaaagggttggaagagaccttgaggctatcgacaatgtcagtcacagagcctatacccacggccactgaaatcatcaaacagaccatgctcaaagcctgcagaaggtaccacttggtccccctggtgatcttgtcctgggcaatgtgcatgcttatgggggaagtaaaccgtgagcggccagaagctgaatgcgccgaggagcccc

SEQ ID NO: 375034 - DNA, 252 bp, Zea mays
aaacaaaaagaattcatctttttttgaggcacagaccccccctgaaattccggggttttcacaaaaaacacctggggggaatggtttgtttggtaacaaaaaaagccttaaacacatgcatttggtggggggcaaaagtttgggcccattgaaaaaaacaaaggggtccgaaaaaaaatttttttttttttcccaagggggcttccaaggggggaaaccgaataatttttttccccaggggaaaccaacaaa

SEQ ID NO: 375035 - DNA, 357 bp, Zea mays
ttttctcttttttttttttttttttttttttttttttttttttttttttttttttttttttttttacccccagtccaacgcaacaatcattatggtttattggtcaaaaaaagggttcagcatcatcgccattatcgggggactaaaaaaaattgccagacccaggacattggtttttttttacggggggctcccgggggtaagagtagtaaggctcccagtaaaacgcgcctccggggggtccggggggccccaaagattgaatgggcgaacaggagcagcaatcctgaaacaaaaaatacaacagggcaactaggggggggtttgcgcccagtccacaaaaaaactggggatttg

SEQ ID NO: 375036 - DNA, 227 bp, Zea mays
gggggctcaacaagactcttcttggataatgaccgggggatttatgatacaaatacaatcgggacgaccctaacagccggggtaaattagtcggggagactctgaacccaccaaaaagggtcgaccagttccgggtaccccctcgtatgcagggggccattcactggcttgacaggagtattattaaaatctccctctctctctttttttttcacaagaattactta

SEQ ID NO: 375037 - DNA, 132 bp, Zea mays
ggcacaggaatgatcaggacatatcattaatacaacccagaaccttggggtggaatccccgtttttaatacatacaaaggccacgaactgcctaactccagacacaaccaagaaatgaatatggaacggggg

SEQ ID NO: 375038 - DNA, 166 bp, Zea mays
ggggacctgaaaaaaaaaacccaaaccttcgggagggaaggtcccctgaagtacaacagcaaacccagagaccacatccggatcttgggggtcccaagggctaaaaataatacaagggcctcaaactgaaaattccaaggttcttcccaaaacaagggaacccaaa

SEQ ID NO: 375039 - DNA, 362 bp, Zea mays
gcggccgtccttttttttttttttttcatgtcaagtttttttgttggtttacaaattccaaacactagacaataacatgtacatgctcatcaacgtaaagttttctcgttttcaacatacagtaatggatgaatgatggtgtctataactagcaacaactaagtttatctaaacattttaggtaacaacaaaattcattcatggatgaattcatctatttcagttgaccattggagcacccgatccatctataaaaggcactagcctccttccccgagagatatcagacacaagctcttctcctctgttgcattgtcaacgggtcctcctccctctttttctgtgcacatagaaagtaggcc

SEQ ID NO: 375040 - DNA, 346 bp, Zea mays
aaattggcacaaggcactccaaagataaccattccaaagttcatacaagagtttctcatgtcaaccttcactacaatgtctcaaaaccagatacaaagaagccaaaaatgtaagcaccatctgcagccatcagcttgtaaacaccaccagcaaccacgatacaatgtagattagaccttgggagcaatttcgcctttgacccataacaaacgaacctttggaatcttgaagttcatgaaaatttctctattgacctcacacttcagcacatattgttgcttgcgccttttcctcatatgaaagttcttcaattgattctagaagatccagacaccgcttgatagaa

SEQ ID NO: 375041 - DNA, 387 bp, Zea mays
gataagcggccattcactaacgcatggtaacaatcttctgagattgcagttgatgagcacgagcctaccaagtgttcagttgctgtataaattaaagaatagaaatgggcccattaaacaatatggccttctgaagtgagacacgaaaggaacatcgccgaacaaaaataatacgataattcacatacctaagattacaagtgaaacttttatctttacaatggctgggtgggtgcagagacacaaaactatcacacaggcggcatgtcgcatttcctcgttatcgtgtcttctttaggattgctgatgttcgcatctcagcatcctccttggcaaagctccaccaaaggtacgacagggggatagccacagcgaggcagatagcac

SEQ ID NO: 375042 - DNA, 325 bp, Zea mays
tttttttttttttttttttttttttttttttttttgttggttttattaaatttgtgttttttttttttttttttttttttttttttggggaaaacgaaccactttttttatacaaaagccccccgcaaagagctaaatggaacacaggggtataataatggggcggaaccattggcccataacgcatttaggaaaacgccggttccataccatacccccatttttaactggcccccggattcacgcttccttattttcaggtcaattgggaggggggtccaaatccaggggcacccccgggaaaaaagagtttgggggggggcgc

SEQ ID NO: 375043 - DNA, 285 bp, Zea mays
cccctcaacaggcggtttaaattcaagaggcggttcttactatgaatgcaatgcccaaccggtctcaaccagagctcgcagtacctgggatggaacatattgaacttagcgcatttgaaccgaaggaaaaaaagaaggccctgcaaagagattgactggtgcttaaaaacaccatgcccgggcacatttacatatctttgaaaaaacaaacgcctacctccatccttacctagctgcaattagtgtccagggagaagggctggaaactggaccaaactggctggc

SEQ ID NO: 375044 - DNA, 109 bp, Zea mays
ggcttaaagtctttacaaatatgtaccaatgtaggaacaaggggagaaaagtcatgcccaaaatatcatttctggcaataaattacagaaaagaaacgctatgccagaa

SEQ ID NO: 375045 - DNA, 407 bp, Zea mays
accatcaacagctcaatacctccttgtggcgagatcttacgcactcggcataatctacaaactacaattggttaaatacatatggtggtctaaaggcccctgaatcagtgcaagggttagtttctagtactagtattttaataaatgagcctggtgctaattcgagtgtataaccagcctctttgcaaccagccgaatgccagcattttgctggtaatcgtataactccagtgaaaagaatgcgtccaccttgctccctttaacgaacagagagtccaattccgtggtgcccacattgccgaaagcaagtttctgaatgttaccactaggctctctctggcatatatcagttgagaaggccaccgattcgctgttggaaataggggggatgttcaggcggatagttg

SEQ ID NO: 375046 - DNA, 247 bp, Zea mays
cacaacaaaaaagggactatttttacttggttttgcccgaagttccatagttaacaaacaatgggggaagttttgctagaaaaactagaatgaaagggggggggggccttttttattagagaaggggcaaagattaggggccttgaaattttggaaaaagaaaaggcctcaattggggcaccattggggggagggggggccgaaactttgggggggctacctccaagccctgggggggggaaaattt

SEQ ID NO: 375047 - DNA, 432 bp, Zea mays
tcgcgatttagttctagagcggccgcccttttttttttttttttacacgaacccagttgtataatacccacggtattgctgcctacttattccgatacaacagctgtattctcactgtgcaaaaatagaataatcacaaggacagatattaacagcatttttttttgccagccaatgctgcttacaagccggcatgttgggtcgctggcttctgaacaagatctgccacggggttgcgagattgatttggaaccggcagcagctgaatctacatcctgcagcagtttacactaaggcaaaaattccaagcatcgcttcctgatggttcttcgtcattagctttgcgtttgacggtgaatttgctgtatccaatcaacgtaactacttgttccagccatctggtcctaacaaggttagatagaagcagatagc

SEQ ID NO: 375048 - DNA, 494 bp, Zea mays
ctcgaatagcgcgggagaactgtgcgtcatttcatttaaggaagaaaagaggtacaagggtcaagagtgacctaaaacacaaacaccaacacacacacgcctccccttaaatacaaccgtcgcgccacatcaatgaagaaggcgaccacaacctacagagctaactaagctccagtaggcaccgacccaaaaacaagttcctggagcttggaagctccagccaaacaccaaagcccaccctccacattaacagcttttagcacttcctcaacacatggtcttgaattgtcaaagacacacctgttgcggtgtttccaaatctcccaagccaccaacgtaattagagaattgaggcctctacgaagccccttaggaacagcagcaacagttctcttccaccaacctgagaatcgagacactgagggctgaggagccaactgcagcagccccaaatgttgaaggatcagggcccaaatttggcgagcaaacacaca

SEQ ID NO: 375049 - DNA, 397 bp, Zea mays
  unsure (1)..(397): unsure at all n locations
gcagagaaggtggggtactttcaattgaagtcacttgcttcacatgacctgatgaacacgatacagtactcaaccgcttttatagatcatagcagtagtgatgattcacagtttctctccctccctcccaagaacagaggacagggaacccaaatctgcccagattcctcccgttcccccggccgcggacaactgaaaattttgttctttcgcaggaacaaaacaaaggaaaaaaattcgacggaaaaagggaggcgnttctctctctctcttttttcactctctgctccgaggcgccggaaaaccgctaaaacacctggagccggccctcagacggatcgacgaacgcgggggaaatagaaatcttctggaggggaaaagggaaaactttttggag

SEQ ID NO: 375050 - DNA, 292 bp, Zea mays
cttcccctggtttttttttttttttttttttttttaaaagggtccaatttaacccaaattttttgggtccccctcaatttaacggcaaacacaaggggccattttagaccccaaggggggcccaaaaaacccaggcgggggggttttgaaaattccttttggccggccaaagggttttggctttccaaatctacaaaaaagttttggggctttaagaaaacggaaagggggaaaacagctcctgggagggggggggaaacttgggaaaaccctaacagtttgccggtttttt

SEQ ID NO: 375051 - DNA, 327 bp, Zea mays
aatacaaaaacccagcacaggtttttaaacaaaaaacaaatttagactccaataacataaatcctaataatcatgtaactaaagctaatataactttaatcctcgatcgggtttgggaggaaccttgcccccatcatgtggatatacatattaaggggggcccttggttacgatgggtgcttaaaatcaaacaaagggggcttttatttttggttatgaactttttaaattttgcaatttaataaaattgtttaggaagggcctaataaaatgtcggggttttaaacttaaagctttggacttaatccgggagcccatttttttttt

SEQ ID NO: 375052 - DNA, 59 bp, Zea mays
agaaagggacagaatcgttctattggattttggaacccgggcttgcgggggcccggggg

SEQ ID NO: 375053 - DNA, 433 bp, Zea mays
ttggtcaaactaacacgggggcatatttctagggaaatctgttattttcgccacaaaaacatataaacacatgattgcagaagagctagcacaccccgcatacatgtggttgtgggcatcgaaatgtcaaccaaaacaaaaagtgttcttctggcttctattggaagctggactgactactaggtcactgctaaggagaaagaacatggatcttgaattgttcacatgtgaaaattgcatccgacaaagggaggagaaaactgtccacttgttcttgcggtgcagcttcgtacgaagatgttggcagataattggagtcacgccaccccgcacctttgatcgactccttgcgatgcgatgaatgaggcttcaattggcaaatccttggaaatagaggtcatcataaccatgacttggtgcatatgaaaatacc

SEQ ID NO: 375054 - DNA, 418 bp, Zea mays
ggtggttctttaacaataaattaatttcctttatccaagggagatttgtttcttgtatagcatgctcccttatcgttcaaaacctgctcatcagaatatatcatgtatccgtgcaccaatcaatttaactcctccaggtggagactgttcgtccccccttgttgcataaaaaaagaatatatcatgtattctctgtccatccatcctgtgttacgtggagagcagccagcatttggtttgtttctgcatgaggtccccgcggatcggcctgcctgtctgcctagccattttagctgttgattcatagatagaccacggacacccctgccttgtccatcttggtagcttgtggatgaaagagcagtgctaaaacaattccccaactggcccgagaagaaagcagatgccttgagagaag

SEQ ID NO: 375055 - DNA, 389 bp, Zea mays
ttgtttcaaaaaactatcggttgaatcactaaaaagtcaatacatttctacatgcttacgactacaacgtcacctgtatatagcgtttcggctaacaaattaataattgagttcatggattttattaatggttgcttacaataatgaataaagctagggccacagatagcaaaaggagtcactcaacaccaccacatgataaacaggacccatgcccgtcataattaacccctcaacaccatgttccaactagcactgatgcaaaagcatctgcgagaaggggggataagaaccaacataacttgtaagggatcattgtgcaaacaagatggtcactgtcagcagcatcggcatctgcatcgtcacatcagctgcaccattgccatatc

SEQ ID NO: 375056 - DNA, 331 bp, Zea mays
gaaccggcagctacttgaggcgacagcgcggccctgcctcctgcgcgccacgggtcgtggcccgtccgtcccccaccacgtgcacgcgcctgccccgccggactcggacaagcggaggtggtgcctggcacgggcccgccccggcgagcctaccgaaccgaccgaccggcaggctagggccgtggcgtggcgtggttccttgcgcgcgcgcgcgcgcacgtacgtacgacgccggccagacacggacgcttctcgtccttggcttcttcttattcttcttctagtagtaactccacgggcgtgccgggacagctgtcgttcgacacgtcgt

SEQ ID NO: 375057 - DNA, 229 bp, Zea mays
cttccccggtttttttttttttttttttttttttttttttttcccccgggaggggcccccaaaaggctttactttcatttaaggggaaaaacggttttgggcccggcattggggggaaaaattttttttaacccccccggggggaacccatcccgttttttaaaatttccggcccctattataattaaaccgggttttgattaaaggttaacccaacatttttaatttt

SEQ ID NO: 375058 - DNA, 205 bp, Zea mays
gcggccttcctttttttttttttatgataaataatgtagttctttgtgcatctgggatagattgtggacacagatcaaacacattcagtatttatacatccttaacacatcttaccgaagggttaatgccttggctaatcacttattacagcccatagaagattaatacggtcctaatatggcccaaaccctaatacttgaaaga

SEQ ID NO: 375059 - DNA, 322 bp, Zea mays
ggacaaaccatttctcattgaaataaaatagtcaatatacatggtagcactacttaaaataatcaccacttcatacatgtacaaatatttctttttttggtagcagtcaatctttttgggtagcagtcttcaaattctgtagaaatcttgcagctctaaaactgaaaagaaatagaatcaagtgtggattcattgtgcagctctgaaactgaaatctagcagctctgaaactgaaacctggcagctctgaaacttcatcctaggtactcaaactaatgaacaaccagaaagcatttcagaaaaatatatgtgccgaccgaga

SEQ ID NO: 375060 - DNA, 333 bp, Zea mays
agaaggcaggtaacatatgacactaatttaaaggtgatgttgtgacaatcaactcataaagaagaacaaaaaaataaagaggatcttccaatcttgtccatattggaaaaaatcaaacagatgtcactattagcttttaactaaataagtttggaccaaaaacctatcaaaatatgactcactatacataaataagccaatccatataccattgtcttgcatgtcagagagtaaatggcagtgcattttaaaaggaactttggcactgagaaggatacaccaaacctgcataagaaaaaacactccgaactccaagtaattggttacagaaat

SEQ ID NO: 375061 - DNA, 320 bp, Zea mays
gattaatgattttacatagatataacactgaaaacgagaccagcagaagaagctagttttattgcagcagttaatgatgccaaccctggtacacccccagaaaggggatcaacagaaaggggcttattttgctgatgactaacaactggagcaaaaagaccaacagaaggaccggttgatattaaaaatgtaattacttttacagcagcgctccggttttctagtacttgcagcaactaatgtcacataaaaactggcaaatgccaatcaaacacacaaagaaacgggaatcaaggtgtgcttacaattcttcctccggt

SEQ ID NO: 375062 - DNA, 212 bp, Zea mays
ggtagggaaaaaaaaagctggccatgtatataaacatttttcagatacaatcacttcgggcgacgctgggtgaaaaaaagactgcgattgttgcaactacaggatagctcctaaacccgtttacagggcccccatcactcaaaatttaggggcatccacatgccgaagaaatgctttgagctgaccatgaaccgttcgacaaaaaaccctgc

SEQ ID NO: 375063 - DNA, 201 bp, Zea mays
ggtcggacaaaacagggatattacgggaatcacatttgatacacaaatattggaaatggaggggaagacttttacaaagtgcacttgacataccaaaactcaagttttacaaggtagaaagagatgtttttattacaaggcctgatagcacccagagggcataacttattacaataattggaagggagaagcctttccata

SEQ ID NO: 375064 - DNA, 229 bp, Zea mays
aagaatgtccgatgcgtggggtgtgaatgcacaatacaggtacacggacacttttacaaatggaaaacggacctatcgccaatcaggggaaagtaggtccccatgaatacatatgatataccctaaatgggtaaatctaggaagactgacatcacagacgggaaaaatcatgtcaccaaccaaagagggcattcaacggataaggttgccggtgaatctccaaaacttt

SEQ ID NO: 375065 - DNA, 180 bp, Zea mays
acacacggcatcatgacgatcgctgtttttgttcaggagcagggaatcaaaatggggtacagcggcagggaccgtatctatacatatttgcagagcgaggagaaattatttggaactcccacatacaacaaaaaacgtacggggaacgcctaaaactattggggaaggggcacccaaaga

SEQ ID NO: 375066 - DNA, 148 bp, Zea mays
gaaacagaacttgcggctcaatgcccataccaggtttgtaattataataatcacaagttacattttaaacctttactgcagctatcatggcattgcctcactgaagacatataatgtcactaacagtagctactacagctctgtacta

SEQ ID NO: 375067 - DNA, 116 bp, Zea mays
gggggtaaaaaacatgcagatggggttctaatcacttacaatccatgaggaataggacaatctgaacaaggcttaaactggttccaaaaccaaacactaccttacgcaaataaaca

SEQ ID NO: 375068 - DNA, 298 bp, Zea mays
gaaagaaccaagtaatcaagagcgatacacaatctagctagctgtacatacatacgagcgaaccatttcgcagtactattttacataacagatgatatacatactagtagtatggatgtgttttttctgcagttacgtccggtggcttggggctagaccctaccagtcagtcactaccgaaaacgtatatttttaccagagcgttctgatatatatttaccgagtgtaaagtcttggacacttggtaaaaaaatatttacagaggatcccgccggtagctagtagtataaactcacac

SEQ ID NO: 375069 - DNA, 283 bp, Zea mays
gaaagaaccaagttatcaagatcgatacacaatttatcttagttgacatggcggcaaaccgattaatataataacattcctgggcgtagttttgatctttagcacttaaaacccagcttaaatgtccaaacgggctatatgtgtttggggggcttgcacttgcacgggtgcccccggacagaatgtaccggcataaattttttgctcaacggcacttgatgaccaaaaaaacgagtttccttccaaaaagctactttaacatatttccccccatttttaaaga

SEQ ID NO: 375070 - DNA, 289 bp, Zea mays
gcggccttcctttttttttttttttttttttttttttcttgggcgggttttggaaaaaaacaaggggcaatcccttagcacaacccaacgcaggattaatcgtgtggcaagcaccaaattttaagagtttgctccatccaacagggactaatcgaaaacggttgacccatttttaacgcccaaaggggtggcccatttttcacttctaagcggagttcagttcagtcccaaaaactgtgactttgaccaccaccatagccgccgccgccgttgccaccgccaccatagg

SEQ ID NO: 375071 - DNA, 429 bp, Zea mays
  unsure (1)..(429): unsure at all n locations
aaaaggaacacatcatatgaattgatatcgtcatagaatattacacatcatagccaaaatatcatatgaatttgttgaacacaaatatttcatccatcaaataatcatataactccaaatcatatataggcaaatcctttaacttaaaattcaaagcaaatcttataacttcaacccaaagtattaaacactaaacataattaaaaataatcctataacttcaaatctagagctactataaatatctactatagctaccacaaggctgcaggtcctatagtagtcaaccaaacttaagatggaggcacttgtcttcaattgaagctttatagttgacaaaaaaggttgntattttcttccatcaacctcttcatactatcaattgaagaattacgtaggccgaaacacaatggagctcaatagcacatt

SEQ ID NO: 375072 - DNA, 314 bp, Zea mays
  unsure (1)..(314): unsure at all n locations
tnntttttttttttcncccacncctttttttttttgtttttttttttttttttttttttttttttttttttaaaacttcacaactatttttaccttggcattttatccagaaagggatttggaacaaaatcttttctaccgaaacatggatttttccccgaaaactttatgctcagggatctaaccccgggacttcctcaaaactggccctttatttggttttttgacccttttggcccaaaaaaccttttttctcaattcaatgccccgggcctggtttttttggccccggggtttcctaaaagagaaaaatg

SEQ ID NO: 375073 - DNA, 350 bp, Zea mays
ctatgaatagaatatatcattgtatttacataggcaaatcgctttttacagtcaatcgatcatgaagagagagatcaccccgcattatttcaataaatactgtcaaagaatgaatcaaatagatctaattacatctaataataataaaaatgattctatgacaaagaatgaatgttaaacagccaaaaatagcgctgactcatgaaaactttagccagcaaagtcctgccttccgccagtctgttggtgctaatgcctagagttttggtcaagtttctccaattaagttaggaacttgaaaacttctgcaattgcacgatcatgacactgatatcatcagtagagcccct

SEQ ID NO: 375074 - DNA, 74 bp, Zea mays
gtgagaattctgtcatgtatattccaacaaagacttcaacaatgtaatatcttgaattgccgcccacgcgtccg

SEQ ID NO: 375075 - DNA, 331 bp, Zea mays
gctatcacacaaacatcacattcacatcggtaaatcaagcagagtgctgtttaacattctggtggcagaaggttttcccattcatggcaacattctggtagtacattctttttacagttactggttaatcactcagctacttacatcaacatgcttcagagtgtacacaccacaaccaacaacaaaaaaatcctagtcaaaggtaagctccacctccatggctccatgcagttaagtcaccactgcatacgctggctggatcagtcaggccctggtctgcattgcatttgcatccgctgcatcagctcggctcatcagtcatcaggaactg

SEQ ID NO: 375076 - DNA, 158 bp, Zea mays
aaaaagaaactaaaaaagcaatgccggatcaattggaacgcgttatgggtaaacacccttacctttttaggtggccccttaattcccccaacgaaagaacttccacccttactggtgggctggggatggaataccctttcctgcaaggtgggttttac

SEQ ID NO: 375077 - DNA, 197 bp, Zea mays
agggaaaaggattaccaactggcaaacataagttttttacaaacataagtttaggacaaggtttttacacaagttttacaattaccactaagagaagatcatcagccagggggggcagctggagttgggcggtgacgggctgggcgaaccatgagggttgttggatgcccccccatattggacaggagtatgaaact

SEQ ID NO: 375078 - DNA, 154 bp, Zea mays
aaagaaacctgaagtttaatcctcagcttctgggaagaaattttacaccaaaatcatcaaaaaaaaagaacttttagaaggcacagaactaggaccttcgatatgcatccaaaacccggacgcacgctggtgggctctttgggagccggaagag

SEQ ID NO: 375079 - DNA, 353 bp, Zea mays
gaggggaaaagcatcaccatgttcaagtgttcaactggtcaccagaaaaacaatgtttcgctttatctgaagagaattgcgtacagcacacagcgtgattatttttgacccgtacaagttagctaccagacaacacttttttcggctgagtatgacagattctcagctggctgtttttgtaaccggctaaatgatgatcgataataaatacgggcaggttcttcgttccttcaatcttttggtttgtcttgtctgcagcgttactcaaaaatgggcagatcaaacggcttattctttggcaggccttcagtgtctcttgacgatgacgacagggagagcgcagaaaacgcctt

SEQ ID NO: 375080 - DNA, 382 bp, Zea mays
acggcaataaataaaaaaaataaaatcctttaaacggctgcggtaattctccgccaacatcatgatgcccacgaggccacgaattgctaacttgctctacaggctacaagttccctgcttacgacggcaatgccatttaacatccagtacagtcaagagagcaccctaaactacattattcgttgttgttatattacaaaagcaatggccttctcaggacggtgccacaaatgaatgggtcacgagctgcagctacatcaacatcccgccgctccatcagcatgttaccaaactctccccgaaaaagcctaacaggctgcaccgagcacattcattggacacactgtgttatgtgccgaggtactgcatcaagtcgtcgtcg

SEQ ID NO: 375081 - DNA, 230 bp, Zea mays
ggaaaaaaagttttacgcaatttacaacggttacattgaaaagaaacccctacagaaaaggggaacattttcaacttggggaaggccaatcccaagacaaccaagggcacccaagaactttaaccccatatcggtaagacggcagcctaaaactaaagagccccccggtcacaactagggcaggggtaaaaaacctccaacccgaaaaacacccaggaaaaaaacaaagg

SEQ ID NO: 375082 - DNA, 296 bp, Zea mays
ggattagcaaagaagctttaccgacctgacacacgatgtgaaaccattgaacagtgagaaagacacaaacaaattcaggtggagccgcacatgagatcagactttacttgtcaacatgtctaaataaattaacagacaagggcttagctgccataagtctttaacacccaataaatatgggtaggtaacacaaaacttggtgtatcacattaataatttaaaatcaattgtacaccatctccattctgtggatatgtctgacccaaaaataaaaaatgggaaaattacatcgatgg

SEQ ID NO: 375083 - DNA, 284 bp, Zea mays
agaaggagggtacttatgcgcgcgcgccagcccgcggtataatacgcgagacagcatgcatatatacatagtacatccgcgctcatgttaaggcggaggcggcgtacagtatacagctagccgtagaggcatgtccactgccgcttgcccatggcaataggtatgtgtacgtacgtggtactcgctacgtcttcacttgaacgccgtgtccagggacgcctcggcgagcacgtcgagcggcgggaacagcgagaagccgccgtgccggccgtgaaacagcccca

SEQ ID NO: 375084 - DNA, 265 bp, Zea mays
aataaccacacagttttgggcctttaccttcagttgggtgtcgaaggaacagcggtacatgtgttaacgccacaccagctgggattagagaacagatagggttcgttcaactctacaacatacaactggaacacatcttcaacggtatgtcgtcaaccactctatagacctcgagttggcaaaatggcaaatatcgacagcgttcttggatgcagatggaccaaacggtcgtctctcttccactgccccctacccctaacaatac

SEQ ID NO: 375085 - DNA, 258 bp, Zea mays
tttttttttttttttttttttttttttttttttttgggtggtttttttttttttttttttttgtcccactcggtttttacgaaacaagtacacgggcaactttggcttagaaaccaccaaacaaagggtattaaaacaggtaccgcgggggggcgaggtcaaaaaaacaacaaacctaaccgcagacggggtaaaaaaaaacggagggaacaggcctggtaaatggaaacaaaggggggtaaaaaacacccttctggg

SEQ ID NO: 375086 - DNA, 298 bp, Zea mays
ccagctcaatcacaacattagcaagtaaaaaagttacatgttcctggagtacatgggacagactttcctacataagacagacttgttgacagaaagatataaacatcctaaggaataagcacagctaaaggtaaatacgagtgcacatgagaacactcatattttgaccggcgcctcacacagcttccaaagaaactggactacatcagttacacctccaaaacccaaaacccagtgctgtggatgagtcaaaaagaaaagagagtaaagttacaccttatcaccagcacaacacacc

SEQ ID NO: 375087 - DNA, 179 bp, Zea mays
ttatattattttttttttttttttttttttttgtgggttttttttttttttttttgaagggaaccacagatttatttcactttcaccgaaccatatatagcacgcaacgttcccaggtagcaaaatacagaaaaccggcctgacgacgacgtacatttggatggaagggaagccacaaa

SEQ ID NO: 375088 - DNA, 301 bp, Zea mays
gctacttcttctttgtcatgctcgtcagggtggtgcaggagaagataccccgtagcaccaccttcaggatgccccgggataggctgctgtcccctgcgtccatctctgagagccaggtgttggacttcctatccaggcattccatcactgtgcccctgatgtcatcgacctcatcaggcttcccagtggatccatagtccccacccgccactagggcgacaaccaacatcaagcatcagaagctctacttcaacggcatcaagctcacaagtcctgatctctgccacttgggagagtcatt

SEQ ID NO: 375089 - DNA, 144 bp, Zea mays
ggaaacaatattttttattcatcccatatatacagataattggatctatcatttaaggctgatcgttatgggccacccccacgctacaaagaaaggttacaacaatttttttcgctccattcagggcagagaactcgtttatgc

SEQ ID NO: 375090 - DNA, 231 bp, Zea mays
cgatacaggagagaagaagcagcagcagcaaactatgggcggctgctcctagatgactagcagatgtggatgtggtgccggccatgacagcatggaccgataatgtcaagtaaacgggccgcccgtcgacttgtctgagctggatggattaggattagcacagactaatccctcccgcctgccacgtcatagggccccacctcaattattattgctgcaagcacccactgc

SEQ ID NO: 375091 - DNA, 291 bp, Zea mays
gaccggggaaaccaacaacggggtaattttagggaccgtcttagccgtttggctttttacaagggggacaatcatacagacatactaagggccaggagggctcaaggtaaagatgcccattggagagttttttggccaccaaaaaccaaagaggggttgggcgccataaccctttatggaaaacgcatttaccatatatacatgtacaatccttgacgcccaacggaccaaaaaaaaaactgggggccggtcaagttttgggcggaccaccagctagcaggagttttttgg

SEQ ID NO: 375092 - DNA, 345 bp, Zea mays
aattaaagccgaacttcgggcgggggggatttacacaaacaaggcgcagattcagtggatatgattctgaattcaagaaactgggaagatcccactgtacacacaaccctggtgtgattctgaattcaagaaactgggaagatcccactgtacacacaaccctcgtgccaaagtattccgaggtgtttggttaaagaaataaaaaaaaggaaaatattggtcctcccatctatgcgacatctcttggcttcgatgtgccctagtcgcagggtacctccatctgtaattattcacctgcttggaatctggcctctgaatgcagcagctaaagagctaacagcttga

SEQ ID NO: 375093 - DNA, 313 bp, Zea mays
aggaggttggttgtgacagtttgagcacagaaagccggtgttcactgtccaggtggatgggttccatcaccaacttacaaagaacaaactgacgaccagtctggctacgacctggtatttgcacattgctaatagcagaaacatccaggtcccagcaaattttacattattataatagaaggatatttcacagatcacatctagccatcttgtctaatctggacgaacacctccaaaaacaccggagtcggcagcccaggtacgtagactgatggcagtcagcaggaatgcagaatggagatcaaaatgcaac

SEQ ID NO: 375094 - DNA, 372 bp, Zea mays
  unsure (1)..(372): unsure at all n locations
ttcnttccatccnttttttttttttaattttttttttttgggccttttggggaacaacccggaagtgactaactgagggaatgctgccaagttatatcaccaagcgcagggctaggcatccacttgcaagttacaacaccatttaaattataacacaagatggtgaaaaaaaatacaacaatggacactttcctaacgaacaacaccaaatctcaggtattcagcagcagcagcagcatcaggcagttgttagctggagtctatacccgaaacattaagcagcagcaacatgaaattgttaacaggagcctatacccacatcttctttgtggcttccatccgctcgagcaagccctggatttcggtctgcat

SEQ ID NO: 375095 - DNA, 170 bp, Zea mays
gattggtccaaggacattggataaaccacttacaaccagaaccgggtgattaagttaacacaaatcacacacattgacagtttgcaggggaaatcttattaccaaatattgggggcaatagtaatactaacaatattattggctagacattttaaaatactaaatttaac

SEQ ID NO: 375096 - DNA, 211 bp, Zea mays
aaaaaaaaaaaaaacccgggtttccaaacagggcctttatgggaacccccccccagaaaaagaaacccccggccaatttcagggttaaattttgggcttaccctgggtgggccccaccttaatccattaaaacagggtttaacaaccgcaacatgggaacttccaagggcaattacaatgcaagacccccttattacaggggggggggaac

SEQ ID NO: 375097 - DNA, 208 bp, Zea mays
accaaccaccacctttattcacgtccaaaaatctggttttcacatcacgtttgataccatattttttataccaccaccaccaccatttacaagcaaagcaactgttgttgatatgaaatgaaacgaccgggggtgcaatcgcatggcactgacagggaccacccacttacctgcaggcaccattttccagctgatcccccgtcgtttc

SEQ ID NO: 375098 - DNA, 271 bp, Zea mays
tttcccaaagcaggaacatttgtccagggaccaggaaaatttttgtaaagaactaaaaaattaaaaactttcctactttttttttggtattcccccctgaacttctgagctggtagttccaccagttccctcaattgatgaggtcggaaacccatccaacatccggggcgggggcccttccctcaaccttggcggatgcgggggtatcattgggaacggcggtttttttgctgagccgttcaaacacctttttggggagggttttcccgga

SEQ ID NO: 375099 - DNA, 277 bp, Zea mays
aatttggcaagctaaatagttcaaggattaccatattacaaaccaggaattgcttggagggaacaaatttttacacaagttttttagctcaaaaaggataagcctgactgtttgagaaatgagcaaattccgtttggtggctcaaactaaaaatattacaggtcccatcgaatcggggggcccaaatttgatcagtttttctcagctcaggggggactgactttctctaggggaaccccggggcttggcatcttcgttggggcccttggggcttggg

SEQ ID NO: 375100 - DNA, 213 bp, Zea mays
ctaacacttgtgcatgcatgcaaatcgaccgaccgggtcctataccatattatatccgacccattatccattggggaagggcagcactgcactggtagggggagcgaagcgagcgatagatagatagcagccactgcattgcaggtacctgctaggcgtccatgcccgccgggtactggtcgacgcagtccaaccaggggctgcccgcggggc

SEQ ID NO: 375101 - DNA, 257 bp, Zea mays
gaacaaaatgtgggcaaattcaagagggtggccaaggtacaggtttctcgctactgggattgtgggataaaccgacaagtgtgattttggccgccccagcataactggaatagaaaaatgccacaagggcttaacatatacaaatattggggatcctttttttcaacaaaattggggccctaggaaaggtaagttctctaaaattacaaaacgacgtgcagtcctgcccacaataatgttagtggggagcaggattg

SEQ ID NO: 375102 - DNA, 135 bp, Zea mays
tttacagggggccaccatgttcctagggggggccagggggactaaaaaaattcctttcccctttaattacattacatgacggccaaatacccttttaagggcaaatgtaaaaaaccgcgcttttgtaaacaaaac

SEQ ID NO: 375103 - DNA, 152 bp, Zea mays
ttacagaatcacttgttcaccctcctctaggtggttaaacgtgacacaaaaaaagtcaaacaaattataatttataacggtgggagtagtattatgttatggatgatcttgctgggtgaaggaactgatatgatatcgtaacttcacgacct

SEQ ID NO: 375104 - DNA, 383 bp, Zea mays
  unsure (1)..(383): unsure at all n locations
tcnnnttaattaattttttttttttttgagaaaagctggtgaacatgtcatattatttgggcatggtacgcgtacgtacagcagacaaagcaactagttacagtgcctcgcgggaagggcgccgaaaatacaagccttttcagccgaggcaaatggtaaacaacagcaggcatgatgaacaagagagatggaaaccaaaaaaaacgaagatacaaaagggctctacggtactactagctaggtctgttcttgtcccaaagcaagctgctcgatggagatgcagttgcaacaacaaggaagccctctgccggtgcagcaggtagccgaggttgagttagcggcttgacacaggcggatcggagctggtcacggtgggaaaggga

SEQ ID NO: 375105 - DNA, 330 bp, Zea mays
ccttccccagcatctgccgcggacgcgcgcagcagctcctccagctcaaaccgcctcgtgcggccgtcgctgcagctgaggtcctccaggaacaccatcttccctcgctcgaacgtcgcgccaccggccgccgccgcgaccaccccggcggcgccgtaggggctcgaggagtacactatcttctccccctgctggaggcgccgggcgcttcgccggccggagaggcgcggccagaagtagcagaacaggagcccggccacgagccccaccacggcgaagtcccccgccacaattgccaccacggcggcgcggctcatctttcccttgacg

SEQ ID NO: 375106 - DNA, 196 bp, Zea mays
tggatttccatgtaccatgacattggatctcctcggctaactttctaatcaggtatttaccacgaatgtaaaatgtagcatgacattggaagtccaatccttgtgcgaaatgaaacaggtccaaagaacatccaacagtatagtagggtaataagcgttgaacagtaacatcagtacacatcaaacaaaaaacata

SEQ ID NO: 375107 - DNA, 338 bp, Zea mays
aaccaacaatagaagaatatctcaaagtgcaactgtcattcagtttagtgcaactgccatacaagaattaatttaaaccagcaatacaagaactatactgaaccatacaaggcatcatttctcataaggtagatggttctcagtgatctgcttgtccaggaaattactgggaaaatcattccaccaacagattagtgcaactgccattcaattttccataggttagagctaaaactgaactacaatcaccataacagaactgtagttgtctgaaaaaagataacatgcaactaagattagtacaagggaacaaataacaactatagtatctagaatat

SEQ ID NO: 375108 - DNA, 434 bp, Zea mays
  unsure (1)..(434): unsure at all n locations
ttttaattttnttttttgccaagaaaattgcccacggtattattttgatataatgacgggactcttacatacatgacatgggaacaaaatttacaaaggtctcgcacatcgccttccaacaagcctgccaagaaactttttagagatgaagtcataaccgatgacgacgctgctggttccacagacgttgatgctaagtaatggtatgtccaattcttccctacaattgataagctatatgcttctaagcattccaattgtatgtagtataaggtagtagccgctaggtacatcaaaatccaaatgatcagtagtaacgacttttacccaactaaaacactatgatacataggaacaacattcaaagcatcctctgaggtcatcacatatttcaaacaaagcattctaaaactaacaataggtcaatatggggt

SEQ ID NO: 375109 - DNA, 301 bp, Zea mays
atattagaaaacttgtaccatatccatttttttctggataggcatcccctgcttcaatcccgactagggcagactcacaattatgtcctacctgaatcctgctagtgtcattctaaagctaccttcagtattcggttatggacttctagtacttcataccaagcgagcaaatgcatatttgaagctcatgttaccttctctctcaatgcatttattttttcttgcatgagagtaacatagtccatactgttgtctctccagatatatggaagcacgctttgatacatatagagtgttgggc

SEQ ID NO: 375110 - DNA, 186 bp, Zea mays
atgcgacatttaaaaacattggcgcttaaatcccgaatggtacaaatgatcaatttgtgacaatacatcaaaccaaattggtgaaacccataaggccttgtttggttgcataggtaggaggggattgagggaaagtaaacccatttttattcaattttgactagcaagagatttgattatttttaa

SEQ ID NO: 375111 - DNA, 249 bp, Zea mays
  unsure (1)..(249): unsure at all n locations
ttgggggtttacttttttttttttttaaattttttttttttgtgttttttgaagagnacagccccaggctccccattaaaagaaaatgcaccaatgggcaacgacaacgtccattgagacatgatgttatgcctagccttacacaaacattaaggccacctataaattaaaatcgtcactttagcaaatttcacaagcaaaagttataagggagccagctatgcctgggtagcatttttcagttgcagc

SEQ ID NO: 375112 - DNA, 176 bp, Zea mays
gaccgggggatatttagagatagacaccgttccatacacaagctgaaacagatgatcataaaaccacgagattacactactggctgtgctcgactggccgagcccagagaaaaaacaaccggaaactaaacgaggagattagcacgcatgtgcttaactctggttgacaacactgg

SEQ ID NO: 375113 - DNA, 233 bp, Zea mays
ggcaggtgagacttttgggggctgatgccgacaattcccggactgggtggattcgacattggttttgagcataaactacacatcgggtacatctgaataatccgcaaaaaaagaaaaaaaagttacgaacaagtcttttttaaaaaaccttaacttaatcctcaaaaactcctattacagacgaagcatggagcagaccagggtaacctgcctggtgcgaagatatgtttacc

SEQ ID NO: 375114 - DNA, 162 bp, Zea mays
gacaaaggtaacccttgtttccattcaaagggaaccttagtttggcataaatatgcatttcacatacaggcacatgttacctactacctattttaacaatgaataagcggacaaattgggaaatctgtttttatgtatgggcaataactacaaataactaag

SEQ ID NO: 375115 - DNA, 130 bp, Zea mays
  unsure (1)..(130): unsure at all n locations
ggttnagacaccccaaacacccccccaaactagccctgtttatatttttcggcagggtaaactgaaaacagattttactaggggtacatttattatagaggactccaacaggggccgggcagccgtgcag

SEQ ID NO: 375116 - DNA, 369 bp, Zea mays
  unsure (1)..(369): unsure at all n locations
gttcggcctctgcctgttcnttttctacagccaaacacgcaacaactttgtgttgctgttgtcgaaaagggcgaagaggcactaccggagcaaggcgacaacgccgcctatgagggggaggtcggcgtcctcctcttggttcaagatttgctcctccaggtactcgatttcagagcggcaagaagcggcgtcggagatgccgatttggcggaggagggatcggagcatggaggggtccggcggctggccgagctcgaagtggcgcagggcggcgaggaggcagtctccgagagcggcctccgcagggtcgtggtagtgggccggcgcccgtcggcggcagcgcgcgcggaggaagtcgaggtactgagc

SEQ ID NO: 375117 - DNA, 291 bp, Zea mays
tttcttttgcctttattttttttttttttttttttttttgtgtttttgtaaaaccccttgcctgaaaacaacctcacagaaaaacgctgatacaccatttgggataagcgttaggataggtacacacatagccacttataaggttgtccatatatgtataggacaaactttttgtagttctgaaagtactaaataaggggcctactggcatatcagtcagccactacgttattccaagccatggctgactatgggctatggcattcgagaatcccagcacattacattacg

SEQ ID NO: 375118 - DNA, 281 bp, Zea mays
tttgttttgcctttgtttttttttatacaatttaaacaaggggggcattttagggaaactgccgtgtaccctccaccgctgggaagtattcacgaataaaaataccttcaattctcacaacaaatttcaaaatacaaacgcgtaataggaatcctctacagagctgtagctgtgcaagaactactttcaactgtcggggatgcaccggggagtccgtgacccaatccaagcttgaagggaaattctggtgcaagggaggaaaaatgctttgctggcatggc

SEQ ID NO: 375119 - DNA, 326 bp, Zea mays
tttgtttgccttttttttttttgttatttttttttttttgtgttttttaaggaagggcaccctacaactaaccgggggggggggggaaattacaagggacattacaaataacctttgaggacggggtacaaaaatcccgaggaattcgtttaatttattaatgggaatgctttacttaggcaccaacaacattttgatttataaacatatgttgaagtttcggggccaaaaacaccacttaaggcttgctatttaactggagaaattcatatatttgggacattggtcccactggttttttaacatgacaattggggctaaatgac

SEQ ID NO: 375120 - DNA, 329 bp, Zea mays
  unsure (1)..(329): unsure at all n locations
ttntnccttttttttttagctgaaaattggcacagggggtacttaagggattccacgatatacaagcttcggcaatgaagccgcttggtcttagcagccactatatgcggacccgatacatcagagtacactgccaccaactggagtcactaacaggatgtactttaaaaaaaaaactcttaaactttatcaaccaacgcaaaccattattttcaagctctcttcagcaaccgtccacgtcttcagacgcagcaacaaatttgacatttccagacgcagcacaaccgagcaatactataattcaagtaacgaattccaccccctgctct

SEQ ID NO: 375121 - DNA, 299 bp, Zea mays
  unsure (1)..(299): unsure at all n locations
ttntntttttttttttttagngnnnnnnnnncccgggaaanttggggcctgaagcggcttcaattgacacaaagcattacaacataagcagaaaaacccgaaacaggcctaataagcaccacttattagggcagtccaacacaaacgataagcgcggcgcacatcaagaaggaaccacagcatgtagaagccatataaaagcatgattaaccacagcagaccaccaaaagctttttactgaaaaaaaggccgccttaggcagaaggtttatccgacttgagtggcttcaccacctccca

SEQ ID NO: 375122 - DNA, 322 bp, Zea mays
ctttattaaacatttggcaaacataccgaagagcagtttttttaacagcaccggggacatctggcttctcggctttatttttctagatcacttccaaggaagcacccccaattgacctggagtatggctttttggggggatagggcctttttttgacaacttcaacatggatatcaacattcctggggtaaaaagcaaggttcctcctgaagaacttgatgtaaagaaaggtagtaggacccatggatttctgctggaacgggtcatccgccttcatcttgctctagaactaggcatctcttgttgggctgcggcctggtgc

SEQ ID NO: 375123 - DNA, 315 bp, Zea mays
actgcaataaacaagaccgttgctaggctgctggtacctaaaaatcacatttataaaaaatgcagctattatctgcagaatttcgcagttcatgtgctttacaactataaccctagacattgagactaaaaaagaaaaataaatctgaaagaacaacacttcctgcacatcctttaaaagttcaggaacattttcaggtccactatataactcgaaatcctacagaaacagtcatttaaaatatggataagctgaatcacagaagccagaaacaatcaaggataccaatctgttaacagattacgactctatttt

SEQ ID NO: 375124 - DNA, 357 bp, Zea mays
  unsure (1)..(357): unsure at all n locations
ttttaattgnttttttgttttttttttttttttttgtgtcattgggccagnntccccaagcaacctctgaattaaaatgcagagcacattatcagaaacgctactgcaccatacaatatatgacaaaagccatccatccatcagctctgctcttacagccttcttccacacccaacaccaagccaaagaagtggaattggtatttgaataccgtcaaaactttagcagcaatggtggatccttctttccacagccagaatcagaatctccttcctgagcaggtcttgcagccccccagtcacgccgcggtggctcaaacatgttgccaggaacgtctggtggcggctgttggggagc

SEQ ID NO: 375125 - DNA, 432 bp, Zea mays
ttttcctttttttttctttttaataaataagttggggtgttttgcagcttgcagcttgcactttacaatggcgtacacattacactgacagcagccacattacacttacatagtgacagaagacacaaccacatagggatagctgaacacataaactaagtaagtctgcaatagccaacaacaacacgccatgacccatgagccaacacagatgacatgtgaaaacaccatgagccaacacaactgacaacacatgtagaaaacaccaacacaggcgataagtgacacactgacacttgaagttcaagagttgaactgctaaagtccttaacagtcaacaacacaggctgacaggtagcacttggagagtacatgaacgccaattcaccgctcagacattcagtcttcactggagagcacatcagcacacac

SEQ ID NO: 375126 - DNA, 298 bp, Zea mays
aatctttacaacacgaacctgtggctaacctaactgattctaaagatttcaggagtaaaagggctaactacaactacaagaaccgtagtactgtactcatagtacaatttgtgaggcttatatactaggaagtacaagcgaagcttttcttagggctccgtcgctcgtcggcacgtacttggctaggtgtacgaccgccagcgtgtccgtctgtaccacctctgccacggtggggtccacgacccaacagttaatcaaatagggcgtcatccaaccccgatttcccttttcattaacg

SEQ ID NO: 375127 - DNA, 345 bp, Zea mays
  unsure (1)..(345): unsure at all n locations
ttttncctttttttttttttaagcatacaatctttggctatttattgtcgtaacacggtgattgattgcgtcagtcctccgtatgctacggcaatgaccagagcggaggctttgattaaaacttgtacatattggggattggatgccagcagcatgtatgctcgttgcactaaaaaaataacagcttataagatgcgccccctcaaaaaaaggcataggtgcctcgtctagtgccctcagtgccaagtatatactacagctaatccatttttgtctcaatactgccaccatttgtctcaagtccttatttttataatccgctggggtaaatcaagaactggcaag

SEQ ID NO: 375128 - DNA, 363 bp, Zea mays
  unsure (1)..(363): unsure at all n locations
tnnnacctaatttttttnnannaaannnnaacctggggaaactttggattaatggcggtttggccactgtctttcaagggagcacattttaaacataccgaatacaaaatctggaagaagtgcatggccagctttataacatcgctcgacccaagattattggggaggaaaagttaacataaaccaccagtgtcatggaacagtgccccgatcaacgatccaacactgtccaacaaaaaatgattaaggcgccaaagagaaaacagaaacagaggttcattgggctggatttggggacctgagctttggtggtgcccctttagggacgccaatcgaggaatcatactcatcctggggagcaaa

SEQ ID NO: 375129 - DNA, 443 bp, Zea mays
  unsure (1)..(443): unsure at all n locations
tttttaattanttttttccaaacaaagcagataattgatccattaggtccaatagcggcatatacatacggcagaacgtgtaatttaactatatgaccgccatctctacatctatcatgcaggcaaccatgcattcctggagttcgtcatgggcccaggggatctcttctcaaaagataacaagagttgagagtgacactagaatccaagcagaagcttgaggacttcaactggcctggtattctgggagtggcactgagaggacatccacaaaaccaccagcgccaaagtagagatgatccaaggcgcacttcagatttcagggtgcctgtactccctgctctagagccagtgagctttctcctggcatgtttcaaaatggatatgcccatgcatgtatgtatctaccgaaagatggagctggctaaagcaaggatagcaat

SEQ ID NO: 375130 - DNA, 280 bp, Zea mays
attaatagcacaattatgtttattaaaacatgggggcaagcttttcgcaggaaaaaagcaaaacaaccctccggaagaggggaagggttgatgcaagctctagcactttacaaaggaatttggaaacccattctaatatggctcgacccaacaaaactgtggagatggcaaatccggacaaccatttaagggcaaacgctcaagctgactattctttttgggcacactggtttgtggacactatacacaacaccccttctgcagatgatcgaatttttac

SEQ ID NO: 375131 - DNA, 237 bp, Zea mays
  unsure (1)..(237): unsure at all n locations
ttttcctanttttttttttttattttttttttttgtttttttttagtttttttgcgttttttacaaaaaacagggccttgatactatagggggaaaacaacagccataaattacatgatctccgaacggtaatagggtaacgctaaaggaaaggtcaaaacagacacaacacaagcaaaccaaacacgttgcctgaaaaaacacaatgcctggggggctggaaaaccctttacattt

SEQ ID NO: 375132 - DNA, 169 bp, Zea mays
agggatgactttttactgataaactggaacttggtaagaggatttcccgcaggtggtggggatgttttaacgggggctagaagaaaagatgaacacttaagggccacaggggggccaaggggggggtaaaaaacggtgcaacttcaaagattttcaaacaagaagcccc

SEQ ID NO: 375133 - DNA, 237 bp, Zea mays
ggatatgaaaagggatgttaagtacaggagtcctagaaataagcaaaagtcaagagtttaacacagccaagttacaacaaacaaagtaggttgagcaagagcaacaaccattacccagccaggggcaacaggaaagacttgctcccagttaggaggttttccatgcttccagttatttacttcgagattgataggaacaatgctttggatctaattgacaggcttgacaacctaaaa

SEQ ID NO: 375134 - DNA, 245 bp, Zea mays
gggtaaaaaaagaagggatgccagtaatataaagattaaactcggtttttcgaccagggaattatgcttttgccggaaagggggccccatctagccacaaaaatatgatcttgccatgccatgcaaactgaggcaggcctttcccagcagacaaaaaccaactgagtttcggcactctttaatggcaaaagcacaagatacacttctttttttcttttgaccttacagccgcaaggacaagcaag

SEQ ID NO: 375135 - DNA, 147 bp, Zea mays
ataagcacatgccgggggggttcttatttcactttgagcttggcctcaaaatggtgaggggcttcacccacccttcataatccacaaggacttacagctcgggttgaaaacggaccaggacccagggttactataaagggagggggg

SEQ ID NO: 375136 - DNA, 402 bp, Zea mays
attaagttatattttatagaagagaatagaggtagtaaagtcagatacattcatacacatgcatctaggcacatgctacagttacctagttcagttatttctctgtttttcctcgtcattttgaccattagtcgataccacagctgaaaagtttggttgagagtacaacttaatcctaacatgcacgtcatattcctccaaatttcagaaaagagatagcttagcttgtacacaatcaagtaaacagctatttggaaggaattcagcaggtaaatgtttcaggggtagtatcttaattggttcatgttaacacttattttatttgtaaatggtctgaagtctgaacatttggagagagaacttaaataaatgaacgtcagaccatattcagcgaggaataat

SEQ ID NO: 375137 - DNA, 214 bp, Zea mays
ggaaagccaaaaaaccacccattatttttatcaccaaatctggatttcataagggtttatgacccaacagggatcgcacctacaggggtgcgaacaagttacaagctaaggggattgattaatcgtacaggggggggggggcgccactgcctcctactttttgccacctgccttgtttttggtggggcccgggggggaaccggggcccccggcc

SEQ ID NO: 375138 - DNA, 169 bp, Zea mays
atcccaaagggatccgccgccgtttggttgctatgctcggtctgcaataaaggttccttggccacttttttttttgggggagagctcaatctgcaacctggtttttttggaaagcctttgggagttctgtagctaacacggggaattaattttcaaactaggacttggg

SEQ ID NO: 375139 - DNA, 372 bp, Zea mays
aaaacttcgatttcattgtcttttttatacaaatagctgtgtacctaccggcattgcccgttgccatttgaatcttagcttgcacttctctgcttcttcaggcccatcttgtttgaaataaacaaaccaattcatttttttactttttccgtcgcctgaatcctgatctagatacttcgtattaatatttcccatgcacggaacctattaccattacatccccttccatccagcaaccgtgtctttacaaactacaatcaacccgcctttccatcacaaactgcctgagaatcagttgcgtccatcaattttctttttgggtactattttacagcaagaacgaagacgtataccaccagaagactaaccact

SEQ ID NO: 375140 - DNA, 280 bp, Zea mays
acatggaaccacttctggcctggattaaaattctacatgacatgatacaatgctggctaccatattgaagggggaaaaaactaggcatctcttttacttcatggcttagtctcctcttaactcaaatatctacagaaactacactacactctgcagacctggaaacagacagagtaccacaggggctaataacacatacagatcccaagtgttattttatctttttccacagaagattggatcaaaatatcatacaggcattgagatgctacagctagcc

SEQ ID NO: 375141 - DNA, 269 bp, Zea mays
gatccgaaaacctggttactaagctatggccaataggaccatgtatatagtgttttgaactgtatacagaggagtttaaaataagaaataggagctaataagctgatggagatagctgaacacatacctgctattaaatttgatgaaagggtgtgcactctttactctaaagaaggggaagttggtatatagaacatacaattgctaccaaaaaaatttaagcgaaaaccatacaacagagcttgaccctcatgtctgtgccgacgaat

SEQ ID NO: 375142 - DNA, 328 bp, Zea mays
agaatgagtacttttattaatcgaaagtcctgatgaaaccatgtgttatttcattggcaataggctcaatacagatgaaacactgctaccatgttaattacactgcatacaacaacgggtatctccatcggtctttgacgctgaatccttgaccttagatccatatatcagaggtgcagtccccgcgcctggatatcccatctcatctcatgggccagggaaggaccattaggttcggtgccaaaatctacgaagaaactagtgttgatagccagccctccttcatcagtatcgactatcgatctgcaacatgtgggagcccttcttg

SEQ ID NO: 375143 - DNA, 347 bp, Zea mays
ccattatacgagtgtactgaatatacatgtaaatgaaacaattcctgaactaatggaccaaaaactggaacatgtatccagtccaagaattgtacaccaccaatcaagtaatcccttcccaactcatcagtcacaacctccaacctagggcctaatgaatcaatatgtatcatagtgcaaaatgaacaagaatttggctcactgtcttgtacagggcatggcgattctgtatcttctctaatgcacagggcatggcgtttgtcacatgtctccaaaattgggcgattttgaatcggggaagatgcgaccaggacgattttgaatcggggaagatgcgacaggtgagc

SEQ ID NO: 375144 - DNA, 228 bp, Zea mays
gagacaaatagaagcccacacaattcaatagtatcagtccaatcctttgctaagcttctctacatacataagcagagatagcgaagtcactggtcagtgagcgaatgttacatcaaaatacatctgttccatgacaccatattgttaccacaaagcttgtagtttcaagggccttctaaggctcatgcctatgagaatttgagctgcagcttctacagaaagctcagg

SEQ ID NO: 375145 - DNA, 238 bp, Zea mays
caggctagagatggctttgcattaggatggatatattttagtacatgacttgcagtaggatgggtattattacagccgagtcgaaattatttggtgaaccaaaaaagatgaggagccaatgcctgcagcctgctgcctggtctgcactgctctgctgcatgcatgcgatcgatacagacagagagaggcttgagcgccgctgagcagtcagcagtcagcactcagcagcacgggtaga

SEQ ID NO: 375146 - DNA, 362 bp, Zea mays
gacgcacgcaaacctcgagccatatatatatatatatgtatatataagcacacgtgtacagtacgtacgtgacaaccacagacacgtatgtcactcatattaggcgttgccggtgacgatccgggcggcggcgtggagctgctggtcacacgcgacgacgacgaagctcctcggcgccctgctgcccaacaccacctcctctctcgtcgtcgtcggcggcggcggcggctcgttcaggaacgcccagctgctccgagtccacctacgcgagcgagcatatatgcgcagcgtacaacagtacatgcatgatgagaccaggtctgactagctagctagttgtgaacacacgtacggtacggtac

SEQ ID NO: 375147 - DNA, 364 bp, Zea mays
gcaaaagtagaaattaaattggttgattaaagaaatggagggctagacaagaatcgtggatggtggctccacatgtaacacaagcatatgacaacaattcatatatatatatacatatatctatactacttattaaggctctaagagtagcctgccttttctggttctgccatccgtgaatctggaccgttcgcttcatccagagcgatccgacggcttcagcccccgccccctcccccgtcccagccgtccctgcctttggcaaccaccccgccgccacccatcgccatgcaggcaccgccctgctcacccttcgtggacgtgtcagcggatgtatgccgccgtcttctgcggcacgaactcg

SEQ ID NO: 375148 - DNA, 353 bp, Zea mays
aagcaccacaaatcacccagcaccatagcttattactaggctaaagtaagtaccttgcactagctggacatttactgaaccatggtttcttttcttcagacgaataatctagtaaaaaaagctagctagctataatgctccactatgatgatttgaaacaggacaaggctaaaaatgtacatatatatttctatatcagagagcctagcaacagtgatgaaaagccagtgttttgattcttcctcaacctttctttcctcccctgcctttggggaaagcaaagccagcagcgaccgaatggcatccacctcgtgaagcaccaccagccagccagccagagtgtgtcacggcaa

SEQ ID NO: 375149 - DNA, 343 bp, Zea mays
cttaacaaatattttttgaatctcaattttattttctttttgtaacaaccaccgcccctgttatagttgcattgcattttctcgtcactcactctatctctctgctagctaacgcgcgcgctagagctctttctctctcaaatactgcccatgcgccttggcctcccccgatcctctgatgaggccaatggccagcaatggcatggcgtcctcaccctcgcccttcttccctccaaacttcctcctccaaatgcagcagacgccctccgatcatgacccccaagaacaccaccaccttcctgctcctccccttcatcttcaccacaaccccttcctcccctcc

SEQ ID NO: 375150 - DNA, 55 bp, Zea mays
gcaagagaaagaaattacattcaacaacgaaccagagatggcacttacacttgtt

SEQ ID NO: 375151 - DNA, 352 bp, Zea mays
aaagattgtggatgcattttactcaataattaatgggtacaagactacaagctttgtttagccaacactgacgcataagcccgctcaacatcttcaatcatggcgtcagtcgacttggcagctgggctagccgacagctcactttctctggcaggggtgtctctgctgctctggtatgtgttgtcgctccacaaccccgagctattcgaggcactgccgctttccatgacgtagtggaaggggttcacgggcgggacgatggccatctccccctccagcatccgcaccacgctgctcatcgtcggtcgcgccgacggctggaactgcacgcaccacagcgccaccttgcaca

SEQ ID NO: 375152 - DNA, 353 bp, Zea mays
gcgaatcgataatacatgggattaatattaaacaagggaaaaaaaacaatggttacactgggaataaaatgcgaaaagggggaaggtcggagggccagctgcagtgccgagagcccgtgggtgggcccgccaaagagcccactttgtcagctccgagtgtcatgtcatggttgcgccgttagtgtcacggcggccgttgccttcacgttcacgagcggatcacggtttcgacacggacgcggcgtccttgggatgatgccgttgctgctgctgcgagtgcgagccctcgccatcagtcccacccccggcgccgttgggcgccatggccgactgctccgtgagcacggacatgc

SEQ ID NO: 375153 - DNA, 238 bp, Zea mays
aggggcaaaacacaaaatcccaccaggcccaatttttaagttcacaaattgacataaggccaaaaacataagttcacaaattcacaccgggtcacatccataggtcaaaatttttggtcacaaggtcaaacccccaaggtcaaacattagctccatcgttttcgaacaggaaaagggattggggtttgtggctccccccctcgaatggggacatttggccccaaaggcaacggggggg

SEQ ID NO: 375154 - DNA, 214 bp, Zea mays
gcacaggaaactagcggtgatatttttacttaatgaggggaccatcactgagcaactgtggtacaacggaggaagctactaagccttattaactcagccggaagctgtttctcctcactaacaagtaaaactacctatgggtgcatgattccatcaccggtggtatcaccaagttggataggttaaaaacccaaaaaaacaacattacaaacat

SEQ ID NO: 375155 - DNA, 315 bp, Zea mays
ggatcctcctcctcctggatttgtactgaaataaatcaatcctatcctacaatgtactgtggttgttggcagtactcaaagtgagacaaaaaaaataagatgatgttgagcagaaacaggtcaacgctgtgttgactctgaatcgaatcgatgaaccatatgaattgcagtctcactgacacaaaaacgtagtttcagagtaatgcatacccgcaagaaacagatagctaggttgctgtaactcttcgcctgctggatcggagctgccattccatttctcacgatctctgtcgtgcttgtgcacaatgtgcccgc

SEQ ID NO: 375156 - DNA, 298 bp, Zea mays
ccagaaagaataatatcgctgagtagttatttattacaaaaaagctgttgcatacttgcatcaataaaagatagcatattcatacaatcctatttatcacggcaccaaggtatgacaagtctccggccggccgcatggacacctaggcgcccatttgtcccacagtaggtatgcaacatataccatatgatacatcaaaaactagcaaataaaatataaggtccagcaagtagcaagcaactatatatatccatcaaatacatgataaactgaatagctgataaatatggtatattgc

SEQ ID NO: 375157 - DNA, 359 bp, Zea mays
gacaaagggaggaatcacttcattcctcactcaaaccaaacgacctcttacatgacacgccaatagagggacacacgagctgagtctgactgcagcgatcgaacgggttttagcacacacgagctgagctgagcaaacgcgtcaacgcagtagtgactactgcaatctctagctactcatcaagggtcttatctgaaacgcagagacgaaactccgcaactccgccgacgaactaataaccaaaataatcctcaaggagtgacagccatgacaggctcagcaggtgcaacatcaacacagtagctctgagcaacatggtttctagttctaacaccatgagctagtttcacgacatagga

SEQ ID NO: 375158 - DNA, 255 bp, Zea mays
agggcggaaatttaataaaatgtgggggctaaaaattagcccctagaaaccaaacaccccttaggactactggtttctgcccatatcgggcagcaaaacagagcagccaacaccagcctgccacctggacgttagtaccatgaaagcagatccgcttccatgaaaagccatcaaccccacaaacccttggttgcatgggttcacacgcacatttacatacgcacacccaactgacaggagcaagcgcgccttttg

SEQ ID NO: 375159 - DNA, 198 bp, Zea mays
cagaagcaaaagatagtggggggcttttaggaaaaaaacagattcaaatttgacaacaattaacagaatcctttatggagcaacaggttattcattactgtcaggggctagaaacaacactgtactcagaaacaacccacagaggtgtgccctaacccaggcaagacaaaaggtgaagttgttgatcaaacaaaaacg

SEQ ID NO: 375160 - DNA, 335 bp, Zea mays
  unsure (1)..(335): unsure at all n locations
gattngaaagggaaatttatagcccttacagtttcaaagacaatactatcttcaggttttttttatatgggaggacagcaatacaattaaaataaagcacacccagtgctagaggcttggataagggataaaccgaggcaagcctcccacgcaaatgcggagaggctgcttcgaaaccgtgacctggtgattcagtgagacagctctcacctctgtatcaggcctgcccttctaaaagggacagcaatacaataactgtatctaaatcgaagaagttctgccataagacaatagtctggcttatagtttgggaccaacacaccatcccatcaact

SEQ ID NO: 375161 - DNA, 181 bp, Zea mays
cacaatggctgaacacaccccaaaaacccaacaatggggcaggccaacatttggttaacaatacatacgggttttatgtttcacaaaagagactaaaggaagaaacctgaaaggcatgctcccacatagtaccatgggggctaaaagcaaacacttcaggaaccactggaaacacaaaaac

SEQ ID NO: 375162 - DNA, 195 bp, Zea mays
aatgggttaaaaaacccaacctagagcagtttacctgaaaacggatctgaaccgggtacatgcatactacaggacgatctatacacacactaccttggggtttcttttttttttttttaactaaggtatcaggggtacatatcctaaactggatctgcccatgggatgggacataacaggattattcaacaacaa

SEQ ID NO: 375163 - DNA, 402 bp, Zea mays
cctgtgttggacttcataggaacccgagcccttttgacatttgatactaccagtattacagaccaattctggttccagtttctactgctaacagagaatcacaccttactgttgcaaccagagaccttttgacatttcagcaattacatccggtgcgggcactgtctacatgattgcaacgctcaagtaatcaccgatttggaatccgagctctgcaagagttttggcatcgtcgcctcttccatgaccataagcaaaggtcgaacccacctggatgcagttgagccggtgtggagcagggatgagtacatcggagcatagagcctgctccagctcgagagacgctgaagatgcgttggagaagaccggcacgcctgcctggagaagatgcctagagaagac

SEQ ID NO: 375164 - DNA, 243 bp, Zea mays
ctcccctatccttataaaaaggatagaagaatagggaaccaaaagaggtgccttggtagagttgctcaaaacactagtatgggaccataaaatatattatattacattcaacctttttacgaaaattttacaaaacctactccgacgattaccggacacaagaaaaaaaaagggactcctttacatactttaatcaaggatagattgggacaaaaattctggttttcctaggatagaccaaca

SEQ ID NO: 375165 - DNA, 331 bp, Zea mays
  unsure (1)..(331): unsure at all n locations
tttttnttttttttttttttttttttttttttttttggtttttttttttttttttttccccacaaaacaggtattttacagtaatcacatttgatacacacacattggaaatagaggggaagacttttacaaaggacactttacattccaaaactaaagttttacatgggaaaaagagatgtttttattacaagtcttgatggtcctaaagggacataacttattacaataatgggaggggggaagcctttccttaagagaaatataaaaaccttttaagtttaaagtcctccacatgaagtaactaacccagggataggggaataaaact

SEQ ID NO: 375166 - DNA, 318 bp, Zea mays
aaccatagttgtttgacataaattaggtttttttcctttatatagagagaacatccgggcccagctttttgtgaacatggagcacatgttaggccgcggcccattctgaatatgcttggctcaacaactgaaaacacgggccgacgggatacacgaccaccaactgggcaaaaaatgtcgacagtttggcccaaatcacacacaaggcaagaaagcctgaaaccatctagctgaatgcaaatgcaacgcaagcgcggcaccaaaaaaaagctggcaaaaccgcccaacagagctgaatgcaccctgaaagcctgaaac

SEQ ID NO: 375167 - DNA, 159 bp, Zea mays
aggggaaaattggtttaagtatggcactaatttatgatattggtagcacctttctggatacggaaccgataggattacagagaagaacagagaagaacagcgagggaggcagagagtagtttttagttcaaaagtggaataatattctgttacaagtta

SEQ ID NO: 375168 - DNA, 86 bp, Zea mays
gggaaaaaaggaaaagggggggataaaaaaggggggcgggcccttaaaaaaaaggaaaaaaaaaaaaaaaaataggaagggggggg

SEQ ID NO: 375169 - DNA, 314 bp, Zea mays
ggactcaagctcaaatatgggtcctttgaacaagcctatgtttttaaacccctactcatcacatcaaacaacacaacacatttgcttaccaaaacgtgaatgtgaccttgccactgcatataactaaaacattatatacccacacatattcaaacaccaatataccccatatcgaccaaaacataattatacaaactacaaatcgcacacatgaaaccacctggccgactcgtgtcgcgcatgcctgcatgttgtccacggcttggggctttcatcgagcatgaaatgcgtgaggcatgacgtcaaggggcatg

SEQ ID NO: 375170 - DNA, 101 bp, Zea mays
gggggcacaatccacacacggggggcctttacattacgtatttataaagtttactgcgcaaccgaagcttaaatggctccatacttggatccatccatccc

SEQ ID NO: 375171 - DNA, 394 bp, Zea mays
agcataccaagagggttttttaaagagaggggtgtttagctcttgcacatccaactgctggacaaaaattcttgcacgcacacgaaacaataggaagaatctggtcaagcaagagaccgccacggtctgatctgcatcagccatgggccgatcatcaatttaaagagaatgaaagcctgacggattaaccagtctagtcgacggatcagttcacacacacttcacagcctgagcgtcagatcgggctcctcccgggcatgcacggggacgccgccagccgagttcaggacggcgctccccgccggcgcaggagcgacggcggtggctggtctgaagctcccgggccagccgaagctcatctccgcctcgtcggccacgaggaatggcatggggc

SEQ ID NO: 375172 - DNA, 272 bp, Zea mays
ttttttttttttttttttttttttttttttttttttttgttttttttattttttttgtggtacactgactttttcgactgggcgggccgggggaaaaaaccaccgggagctcaacccggagaaaagcacgtccctttacttttggatcacaacacaacccccatggccgatggataaaatgccatctatccaccgggggtggaaaccccaaatgggaaattacccaggggtttcagtgcctgaaccttggtggtgggggtgctactactact

SEQ ID NO: 375173 - DNA, 180 bp, Zea mays
gaacaatgcaagagggtacccatgcattggtgggagcaatacaaaatttgaacattatggtaccgcccatttcacggtcagggcccctttcaggctaaggatacatgaaatcgatgtatatggggaatttcctatcaaccctaccagaaggaaaaggccgcagaatctattaccacttta

SEQ ID NO: 375174 - DNA, 150 bp, Zea mays
ttttatttttttttttttagccacacaataatggggcattccttgcgacaaaaggggggcaaaccagatacagcagtaacactagtggctgatctagactctggcacctactaagaaacacaggctaccagcacaagggccttggaacaa

SEQ ID NO: 375175 - DNA, 346 bp, Zea mays
caagttgggactttttttccagccctaagggagaccttgtcttatggttgggtacatgttctgtaatccttgacaaatgcaggcccatataaaaaccaggaccctacctagcccagacctcttggaacagttgcctgcactgcactgcagcagccgttttccagggttgtaggcttctaggttttgcacgccaaacctctactgttgctaagctaagcttgtttaagcttgttcgatcaacgtctggtgttcactagttacacacatccttgttggcaaattccagcctgaaggcgctgcctgctcaaaataccttgttcagaatgcactagccctggtaagctgc

SEQ ID NO: 375176 - DNA, 366 bp, Zea mays
gaaaatggggttattactcatgtaagggtatagctcgggaccatgccagacttttttaaagcaattacatgcagaacatcatccattttctgtcatcccataatctacacacaaattcttcacgaaaccgttgctagcaatggttgaccatgatatgtttgcatatggaacaaactcatgccgaatgccaggcatataactccacgacagagaaaaatggtgcacgaacagtatcagattatctaataacaacttgatagccacctcctcgccgctgtgtatgttgacgccgagatagagctcgccgaaagatccgctcccgatcttcttcccaagcttaaacttccctccgaacacgtgctccat

SEQ ID NO: 375177 - DNA, 301 bp, Zea mays
gatggatacacgactatacttgagggtcgcaaattcgaaacaaacaaacgcatctagaaaatagcagtacaaatccagacaggggaaaaaacccggaacttcgtgtattcaggggtgtatggaaaggacgacacggcggattaaggcgacctccatggtaatgatacctcaggggcaagggacctttaattctcggggagaaaaaaaaatctcctacataaaaaaaacaccgccagactcaaatacaattcccctgctcttgacctggcaacttcttcgggtaggttaacatttccaaaat

SEQ ID NO: 375178 - DNA, 125 bp, Zea mays
caggaacaccatcctttattatctatcaagtattatataacattcaaagcacgcagggtatgcagatacagacataacaaaagcatactctttccataccaattatacaacaacaccacaataca

SEQ ID NO: 375179 - DNA, 379 bp, Zea mays
ataaataataatataaagggttttattcggaaatttctttgatattttcctctcacctgactgtactactacctcagcctttgactccccacgcccacggtgcacccacatcacctcgttaaaaagatcccaaacgcacgcgctccacgcacacacacaccctatacgcgccgtcatggccctctctatcatcccgagtacaagcagcggggagcacgctgcggcgtcagcatcggccacggccacgaccacgacgaagctgggtcagctgaacgcggcggtgcagaggtcatgggtggggcgacggttccgcctcgcagcgcgcgggactacgttcaccacggagctgcgtgccggcacggccacgttcctcaccatg

SEQ ID NO: 375180 - DNA, 406 bp, Zea mays
gtgcttcacaaaaatcttacaattgaaataaaatattccggtgttgcacacacacacacacacacacacaaaatcctcccataacctacctaaatttgttttgcaaaccctatgccttgtgaacttttgtggttcgtgccaattgagaatcgccaatcactagctactggcaatgcttcagggagaaattgctgggctgctgcttgatgctcaggaagcttgcagtcgtgtcatggagacgccgatggccacgctcgccgctgctgccgacctccacccgattggccaactgcaaacttacctgaagaacatgtaggggcacacacacaggaaagaaaacaaagggtccaaggggtgctgtgtcgtgtgacagcgggccatgttttcaagtcgtccgattaatcgt

SEQ ID NO: 375181 - DNA, 207 bp, Zea mays
aaaaagaggggcacgaccttgccaagacgattgcaatacgttacactttggagtctctgcgggagcccccagggctgcagatccaccgagggggccgcccctacactatgggttatcttttggtggacaaaaacccccccatcacagccatgactcattggctccgggcagctgagataactgtaacatgctcagcaaaagcaactt

SEQ ID NO: 375182 - DNA, 186 bp, Zea mays
agaacattcacgataacgacgccaatcaataaaaatgaatgatgaatttaactgagctgtatatttgggtttactgcgcaacgtagttagttggatacgggaatcagttaaattcatcattcatttttagaacattcacgataacgacgccaatcaataaaacccacgcgtccgcggacgcgtggg

SEQ ID NO: 375183 - DNA, 70 bp, Zea mays
ggcacaacaaaaatgttcgttgttgaatccgaccccacgcgttcgcccacgcgttcgcccacgcgtccgg

SEQ ID NO: 375184 - DNA, 101 bp, Zea mays
attaaaagggcttggcaggatgataatgatccacttgatacatatgcattcaaacatggcttccaatttaccagatgaaccaccctgggaatagggttttc

SEQ ID NO: 375185 - DNA, 208 bp, Zea mays
tcgcccttttttttttttttaaaaaaaataaaccgctttatttgatatacgtcattccaacggccccaatgaaaagaaagatggcattgctgggctcgtgcttgagcgcatgtgcgtgggtcatcctccatcgatccataaagaaattacttgtcgcaggaatatataaaaaaacacacacattcaggaaaagggggcacactatgga

SEQ ID NO: 375186 - DNA, 183 bp, Zea mays
tccacaaaatctgacatatataactctgtccctttggataaaaaatacagttaatagacaatttgtatggagagtgaatagagacagactcttcatgaagaggccttctcttttatttttttaaattaattttatagaaaccctgaagagacacattcagtatgaacttaacatttatttgat

SEQ ID NO: 375187 - DNA, 316 bp, Zea mays
aatccacaacaacgagagcatggattataagaaatgacaggtcacagacattttcacaatcatagatatcacgcacgtcataaagcgtacgtgcaacctcggagtcctccaggtattttattcaccatactactggcaccaacccaatactaataggatgctagttgatcgattatagaggctctcctgaccaacagaaggcagcgtccacggctgattcctagtagcatcaccagactgcaagctcggatcaacagagcaaaacaccgtctccaaagtctccactcaccagcttgacaagcttccatatatatat

SEQ ID NO: 375188 - DNA, 178 bp, Zea mays
ggggccaggaagctaaaagcgccatgttataaaatatactaggggataatcacccttccaaactagaacattttcatcttaattagcagggcatggtaatctgcaaaaggaaccgccagttgaaaccctcctgcgccaggtggattttagtcagcatcaccatcactgggtactttgg

SEQ ID NO: 375189 - DNA, 269 bp, Zea mays
  unsure (1)..(269): unsure at all n locations
tttcctttttttttttttttntttttttttttttttttggtttggaaaggacaatcatcattagggaaacaacagctcgaaccacaaaaaattggcctgtacaaatgtcgtatgtcatagcattgaggaaatgaaataatttccctgggatacccaggaagatggggttcgttttttttatctatcaggcaaggcctgatggtatgggaataatctctatcagggtttcatcagggtataagagcttggctgtacaacatgtccttccc

SEQ ID NO: 375190 - DNA, 279 bp, Zea mays
atgaacggttttttccattagatatttagaaaattactgagatcagctgacccaaaaagtacatgttcaggacaaactggatcaaatgcttacgaagtatacagcttttattccttcctatttcggggagctccacttctgtcatcggcagagcccccttctttcgtcaaaacgaaaaaatagttcctacagtacaatttttggcctgacactgattctactactttgcctaataatgccttaatttatgccaagctcctgctgtggctacagcgtgac

SEQ ID NO: 375191 - DNA, 372 bp, Zea mays
gaggatcatttttttttttttgggcatttatactccttctacagtttagtcttcagggaaaaaaacagaaaatgtttcacatttactagttgctgtaaagcttcttgacgcaaatgactactactacggcgcatattcagtttgtgctaccgaaagaaagctgcctctgcaggttcctctgcccaaatcgcatcttctctgtggtctcaccgctgacgacctcgtcgataaggcccttgaagatggatcgttcgatctcccaaaccatgccatgcagcacagtgtcgaagctcatccagtctttggttccattgattgcatcctcatccaataccatgtttttcgttctcctcctcctcggagcattttgtt

SEQ ID NO: 375192 - DNA, 261 bp, Zea mays
gagaccaaaaaacagggcccgatcttcggtttctccccagagagaggccaaaggtgggttaaagggaccctgggctttttggccattggagtttaaaacaaagggggggctgggggcggtcgaacctaaaacaggggtcgacccaatcttattggggtttataaaaaacccgagaccgcacgcgtgtaaaaatggtccaagacaacaggcaacaacccccaccatgggttgagaaaaggttcaaggggcaacccccttttg

SEQ ID NO: 375193 - DNA, 276 bp, Zea mays
cccttcgttaatattaatggggggtattataaggaaaaagcagggcccacgtagtttatctaaagcatggtttaatcgatgggggacggaaaaactttaaaagagtaattttcgatctgcagggttggccggcatatgcaaagaattcctgcaggttactggggatgcccagttcgccaagggtggccttgtcttacatctgcatttgtcccaaatagttcagcccttcccatttgagtgggggggaggggaatcaaaagggttccaaaacaactt

SEQ ID NO: 375194 - DNA, 399 bp, Zea mays
aacgatataatatatagaaaccggagcaatacacagatatctaactagtgcatcagtgaggttgaggcggggagaacgagaggaggcatatacaggacaaatacacggatatctaactatttaactatataatatatagaaatcgtagcaatacaggcggagagaacgagaggaggcgtatacaggacaaatgtcagatggaactatcaagaggtgctttcaaataaggaaatatgtagaagatgcagccgcagctaacaagcttgcaccggtcaatgaaagatccaaagcaaattccccgaatggcacagcttctctgggtttgggagggtggcattccattgaaatatttagagcccaggatggtactcataccgatccatcgataaacgatgtccg

SEQ ID NO: 375195 - DNA, 154 bp, Zea mays
tattttatcttttctttttctatcacccggggggaaactactggcggattattttgttgacttttcttgcaggcaaccgaaaaacccaagttgggcacgctcattgaagctgaaagtagccaaaccgcacgcacattacaacggattccaaaag

SEQ ID NO: 375196 - DNA, 307 bp, Zea mays
tttattttcttttttttttttttttttttttggtttggttttggacacaacacatatttatcatcatacagaaccaacacattataaacacatacatggataatcaattgacacatcaccaacatagtttacacaaacattttaaataagaacaagataagttaaagggtttaggtcacggaaaacataatgggcacgagttagtaatggaatacgacaaaacaccatacttagggataatcaccacttggggggttagagttttgaccggtgccgccacctggaggagggaacgcgaagagggact

SEQ ID NO: 375197 - DNA, 350 bp, Zea mays
atattttttttttttttttttttttttttttgttttgttttttttttttttttttttttttttttacaggttcaagcacagggcctttatttagcactgcccctgcccggcacgatcgacgtcacgtcacgtcacgaacgaagaaacatactggggcctggtcagtttttacatatcccaacatttattagcctgggagaacgggtacaggtaccctacaccaggggggagcacccccacggggcggggacgaacagcgccggggggagggactttctcccgggcgcaccgggcgcgttgaagctggcgcccggggcccggcccacaagcagttggccggcgtacccggg

SEQ ID NO: 375198 - DNA, 381 bp, Zea mays
gatccaactgttgccattgattagattgctcagctttaactcggtaagtaacccgtcccctaactcttacgactccttccgggttgtactgtcttatacatgctgtactcggtcgtatctaaaccctggtaaatggtgacagcaactacgtaacacgatactcatcagacgcagaggaccgataccttactctgcgcatactttgcagctcttccggcagaagccaggtgcttccttggtccccaccatgtagttagggtctcttggcgcactcgcccacggccgcccactgggggcagaggacattgtcgtcctcacatccatcagagggacccggctgttgacgcgtgaaggtcaaatgacctcacatggatccattta

SEQ ID NO: 375199 - DNA, 251 bp, Zea mays
ttttttttttttttttagcattgcaaactggatagagcaattcagtagattaccattcgatccaagcatcatttcagtgacatcaattatcattcaagccacaaaagatcaaccttggctgcaatcagatcgcctttctgaagcagcaaccaaaagagagcactgcgtcgcagccagcaagatctatctacagcattagcatgcaacccagcgcaggatgttatagaagctaaattatcaactaactagac

SEQ ID NO: 375200 - DNA, 191 bp, Zea mays
atattatctttttttttttattatatttttgggtgcggggaaaaaaaaccagattcccaagttcctaaagaatgagaaaaatagccagcggagagatacaactatattccacaacagggacatcaaatttaagaggaccattacaatccggcgcgccggatttatagagcaggcaagctagctactaggcg

SEQ ID NO: 375201 - DNA, 116 bp, Zea mays
acaaaaaaaaggtataaacccaaggtctgtgaatagaggaaacccatacatgatagtaacccgactgaggcatacactgttctgtacaccaccatatttatgaagccaacattgac

SEQ ID NO: 375202 - DNA, 147 bp, Zea mays
actgaactcttttagctggttgggccaaaaacatcttaagggccaaattacataaaacaatttaactgtgagaattttaagcagagctcaaaaactggcgagctcaggggcatacatcttacatacgggaataccaacccaacccta

SEQ ID NO: 375203 - DNA, 220 bp, Zea mays
gacaggaagctaggtaggagcgtgcatatggttaggctctagggtttaattttggttgcgcaagccctccagggacgacgagatttacctagcttctcccagctatgcccgggggcctgatgatccccggccgcaacatgccgacggcggcggccatgatcggcggcctcgccagctacgcagcctccttcggccagaacatgatggatgggcaccatca

SEQ ID NO: 375204 - DNA, 212 bp, Zea mays
gttttagttacatgagaggacacatcaacaaggaggatgacaagccgttcggcaacacatactgatgctggatatactgactacgtcaacagagccacacacacacacagaagagatgggcttaagtactgtgcaagagctaacaagcactgactcggtatgagctgattaagttccttgcgagcgacagagcactatccctgcaatatgag

SEQ ID NO: 375205 - DNA, 113 bp, Zea mays
cattttcaacataaacaggaccaggttctgtttaaaaatcgaaagggatggccacgtgaacaccaataaagttggggacatttatgttgaactagtatatatggcccagggat

SEQ ID NO: 375206 - DNA, 326 bp, Zea mays
ttatgacatcttattgcattctctacggatactctactccatggacccccgagacagaagagctatttataaaatcgctgcacagcagcagtgcagctagcgctgcgaatgattcacacacgtacggctcacagctagtggccgtagagttcctggtgggcgacgacgagccgcgcccgcgaccgccgctcgatggtgtagcgcagctgctccttcacccgccgcagcgccaggagaacggactccacgtcgccgcgcccagcggcggcctgtcgctgcggctgagctagaacgatcgcgagccttggcggtctcctcttcttctt

SEQ ID NO: 375207 - DNA, 236 bp, Zea mays
tacaggatttcacattgttgcccaaaaacttcaatgtaatctatataataagaggggcaaatatactcgatagaaaaacggcagtccagtattgcttaaaaacagaagttaagtccccctcgaaaatctgattttaacgccgatccttctcttcatataggccaagccaacaaaaaactctgtatcaacacgggatgctctgctttataagatataacgcggcgcactgtactcct

SEQ ID NO: 375208 - DNA, 122 bp, Zea mays
ttatttctgaacgaaaggcacacgcctaaactaaggctcaacacaaaaaacagcggcgcaggcactttgtggctgttccacgatcgttcacatgaggaagtccctggggaccgtgacacacc

SEQ ID NO: 375209 - DNA, 313 bp, Zea mays
tcccgttgctcctggtctgcgacgggtcgcagggcagggggcttttacccagctggggggtcatgctcacgtccaccggcgccggcaccgcgggcgcgcccaggcccctcagcccgaagtagaaggcgttggccgtcccggagtcggagctggacggcatggcgggcatcgcgggcgggttggtggacgacgtgccgttgtactggaggatcgcggtggcggtggtcgtgtccgacgccgcgaacgcgagcgggctcatggtgtcttgcgccagcaccgccatgtagtagctcccgggcgcggcggcggtggt

SEQ ID NO: 375210 - DNA, 337 bp, Zea mays
ctactaccgaacaagtcctaataaccaaacgacagagaaagaaatgtctgtacaagctgaagttgctgccgtccgcaccaacagaacaccaagattcacgacagcaagtctgaatctttcgtctcagggggagtcatctccctgtgcgcattctaagctgcctactaccaaaggataatgcctaccccaccagaaatgcaatgcccttccgatctctacacagtacaaaatgcaaatgtcctcgcgaaatgaaatgcaatggccttcctacctcctaccaaccagccccacaggcccacacacaccgctcatctgatgctcatcgctagtccaaaac

SEQ ID NO: 375211 - DNA, 335 bp, Zea mays
ggaaggaacccacagggaatatattacattaagtccaagtagtgcaggctgtttagtcttcaaacagaaaaccactgaaagtaaaaatatatattttaacacctcactgttccttaggagctagcagtaaatacaagcacatctatgcactgatgcagtattgcagaacaagtcagacacttcttttctccaggcttctgctgggattattcacttcaatattgcctttgtagtctgaacctaaataccttatcagtaaacttggtagtagaatagaaatcaaggtagtcttggaaacgatattggctaggatatgtgagctttgaagctgggca

SEQ ID NO: 375212 - DNA, 361 bp, Zea mays
aggtccatagagaacctgcgcatccgcagcacttgctggtttcatccaaaccagtctttatggggtaacccgtcggtaggatgtacagctcatacagctataacaacacagccaagtttggttctatggtaaactacagatagttaagttccaagcaagtctgctattacaactacttatcagcaggtaatccgaacatctccctggtgacgctttgtggtgctttcgcaaatccgccagcaactttcagcatagacctaaatttctcctcctcacgcttgacttggtccacgcggcttagaacattagcgagcatcgcaccataatttgaagcatcagacaagggcatgggatctgcaag

SEQ ID NO: 375213 - DNA, 486 bp, Zea mays
  unsure (1)..(486): unsure at all n locations
ttnntttntttnttttntttttttggagnagaacacacacaagtgtataatttaagaacaacacacgtgaaagcaaatacaagagcacaataataaaacgatagagtaacagttcataaatgcgctcaaatctctctcaaatcactaaacagtgtggtcgtggagtctcggagttgtagtgtgcacttgtgatgcttgcataccaggagagggcacctaggggctccttttatagccccaagaggtctaggagtcgttgccttctccacaaggaagctagaaaacttctttgtttgtgggcttactaaagcgtcccgatcctctgggactcaaatgtgatacaattatagtcccaggaggctagtaaacacatttatacatcagatgattccaaatctgcttaaatgagacaaacctataaaggtggcgaacaactttaagagttggtccacaactcgggacatatcatcagagtggggctgaagc

SEQ ID NO: 375214 - DNA, 319 bp, Zea mays
  unsure (1)..(319): unsure at all n locations
tttntttttttatttttttttttttttttttttttttttttttgtttttttttggggtttttttccgcggcatccccaggaaaaggaaaaaccttaaaaacagcctttttgggggaacacggtccaggggcctttggattatttgcaaagaccatttttgacggctccaaaggcaaaccgggaaaaaacattccaaggcagtttttcttgaagcaccggttcttaaacaaaaaaaaaaggatcctttgggagggggggttacagggcagattgtccaaaacataaactggttagggctaaaggtttttcgccttttttt

SEQ ID NO: 375215 - DNA, 267 bp, Zea mays
ccgggactgcccaagcacttaatttttgggattgcttgttaaaaagggtctacatataattcaatcagctttttcttctctgccttgattttatgggaaaaacaaacttttgtcacatacttaaacaaagacaaccatttttaaaacacagggacagaaaaagggggttttgtttttttgggcaattatttgcctttgggcaaccgcaaaattggggtaattttgggtgggaccattttaattaaggggaaggggggaaccaaactt

SEQ ID NO: 375216 - DNA, 343 bp, Zea mays
  unsure (1)..(343): unsure at all n locations
cggtaccctgctgtngttcaagggtcctgacacaccgaagactaaaaatttttctagcctacattgacgagtggaaaaactacagaaaaaggtcgccgaatcacacctatactacagcacataaaatacacaaactaacaccatatcgcttcagcaccgctcctaccccgctatgaaatgctgagctcatcgatagtcctggagagttcaagacctgaatccagcccattcgtcccgttcatcttctgctctgccgngccatggctgctatcacttgaatttgctaggcttccatcagaaagtttagcagcgccagcagaggaggccgcgcatttagcaaaac

SEQ ID NO: 375217 - DNA, 368 bp, Zea mays
aacatacctttcttggtttttatatatacaagcttcgctcttgtctgcatgtagcagaactggaagctcaccgagatagcgtaatactaattcagttccaaactatgtagctttgactcttttttttggtacatcaattttactatgcatggcaaaatttacgtaaaaaaaagtcaaagtgacttataatttggaactggggatgtaatgattaatcaatactcctcttcctcgctgtcgtcgaattcctggggcctccagaacctggagacctccttctccttgcctggcaaggacactacaggggcagaagccgtcgcgaagtcacggtagtgcagcatgcagccttccggagagctgcccgccat

SEQ ID NO: 375218 - DNA, 255 bp, Zea mays
tcgttttttttatttttttttttttttttttttgggtttggttactttttttaaccaaaagcaaggttctattaaacaagggaacacaagcattaacagcgacaatcgacggaatgggccacgcgggaggagctccacttatatagggtaacatggcgacaaccgacaacacggaaatgggacatcacccggcttcacatttaacccctttcaatgaaagactaagcacaggataccaccaaaagcactttgcct

SEQ ID NO: 375219 - DNA, 334 bp, Zea mays
cttcatctcagctcggggaatcctcaagtgggcctacagcaatagctccgatcctacacaatccccggccattggcacctttcttcggagacgaatacagtactccatatttgcatgagttggcgataatacatgatggacgacagatagaacgatggatgacaaaaaaattacacgccgcgcagaaaaaataactgactgcttccgtacaaaagaatcccctttcgggacaagctctgctagagtatcctctagctgtctcgcagtcgcaggcagcccatttacgtaccagtctaccacagcaggctggcgacgaggcagagataagcgacct

SEQ ID NO: 375220 - DNA, 220 bp, Zea mays
tctttttttttttttttttttttttttttttggttttttttttttttttttggtttttttttttttttttttttttttttttttaaagaccccaaggaaatccctcatcctcattataaggaaaaaaaccgggccccaaatggggggtacatgggcaagcaaagccaagcagttttttcccttgggttgggcctgccttctaaattacaggggggggaac

SEQ ID NO: 375221 - DNA, 316 bp, Zea mays
caaagaaacttaaaaccattcattattcatctggccaaaagagtttccactggttacagctggcccaaaagactgaaatttctagcctagtacatccaatgtgcaaaagctaatccagtttcgaggaaagctactgctgaacacttctaccctaaccctgaaatctaacgagcaaacgaggcaacgctagactcgagggaaggtggtcctcctgagccagcagtgtccacgctagatgcgggctccggctcctccccttcctcgatatctacgtcctcatcggccccttctgcctccatgtcctcgatctcttgat

SEQ ID NO: 375222 - DNA, 367 bp, Zea mays
ggatgggaacttgttgggacaaattaatcagagagtttatgagcacctgctcatttgatggatacattgttcaaccttgcctcacatcctgcattctattgtgtttatgagccaagtcctcgcttttgtcccagatctaggggctgtttggtttgttacctaagacgccacaacgtgcctcacttttctgcctaactttagttcttcaattcgagcgactaaggttaggcagattgtggcgcagaaacaggcctctagtctctggcgacttggctggagatgatgtctaatggaaacaagctttccgaggtaaaaaaaaaagaaagagtgtcccttgcgagccagcctcaatcgatcgacccttgac

SEQ ID NO: 375223 - DNA, 293 bp, Zea mays
tcttttttttttttgtgttttttttttttggggtttttttttttttttttgggttttttttttttggaacaaaaaaagcaatttgccaggggtaaaaaaaccttggggccgaacccatttcagaaaacaaaacgaaggattcagcaaacctaggggcatggaagccaaggatgaattccgttcataggggggtgaccacatgacgggcttttttgggggaaaaaaggaaggggtacatgattctcacactccattggtgccaaactgatttagcccccgccaggccgccacca

SEQ ID NO: 375224 - DNA, 402 bp, Zea mays
caacgaacacagtctttgacgcattcttttctttttcttttttgatattttatcaatgtttaagcaagcagagcagtgcggataggcaaccaacatttgcgccccatgtctctttttttttggctcgtcggcaagccggcctgatcaggccagcgcgttggccaaatggcgcgagaacgggaacagccaaacctgtatgagatgcgtgccttctttctcggacccgaacacccattcctgtacgcgcctgtcgaccaagtcgaacgccagcagcttccacggcgaccacaggtacaccagctcccggtcggggtggaacgccatgaacgggaacgtgatgggctgtgacgccgcggcgccggggacgacgtcgctaccccgatctcgtgcttgagcgcccac

SEQ ID NO: 375225 - DNA, 307 bp, Zea mays
ggccctccataacaagaagcatgcaataacaactgaaattcagacatcagaacattatcctgagtagtacaggatcatttgcgtgatccctttttacaatctacatacacacaaaagggggctttttaagctataccgttaccagcctccactcgcacacaacaccataaacctttttgagggacacaacacaaaatattcaggatattagagattacatgtcgccataggagcaccggattaactggcatgcccacaacagtgaaactccatgggggttataggcttattccgaactaagggtttg

SEQ ID NO: 375226 - DNA, 342 bp, Zea mays
gcagaacttaatccagattccagagcattcatccatttcaatatattagatagcctcaactataaaacataaattagtatacaactatacataaatgttttcaaatagctcatgaggcctcatcgcaatacccatatccataacgagtggaagagtgccagttgttgatctactcttcaaaaaactcttgctcgtgcagaagccatcaaggcacaacaccttggctctcttgtcctgcttcatgagctcaactctccacttcaaggctccatgtcgctttcacccaactccagttgtaccataactggagcaccacatgacaacatgttgaaagaagagaag

SEQ ID NO: 375227 - DNA, 458 bp, Zea mays
ttctttttttttttttttagcctaatgctggaaaccgacaccttggaattcacaataagaaataaggtacaagatacctatgtacttttcttatactttgtaccctgttcctataataagtcagatagtatagcaaagtacaatagaaataataaggtctactatacaaacaatagatcaaggagaataaaagattaaaaaccaaagtaatttgcaagtctagtgaaaaaataacgaataatctaatcaagacaaaataggccatacataaatcatggaatccctggcaacctttttatcctactaatgacagatgatgtaacaatcaactttatgtacctagttcaatcggaataattcctagatgaggtaagcaagtacagcaaaatcatggacgctagaagagtgcatcagaaaaaatgattgaccaattatttgatataacatgggaaaaaaca

SEQ ID NO: 375228 - DNA, 266 bp, Zea mays
ccccaaaacttatttttttaattccccatttgggttccccccatttctaaattttagggggggggggggccaaacaggggttttttaggaaactggttggggggggggggaaacaaaaaaggggccattaagggggggaactggggggggttaaaccggggccaaaatttacccatgggggtcccaaaaaaattggttgggactggtttaaattggaaacgggcccggttacaaaggggggtttgaaaaaactggggcaaaaaggg

SEQ ID NO: 375229 - DNA, 231 bp, Zea mays
aaagaggaacaccctccatagatggggggctcagtttagtaaaaaaaatcgaaaattgtgataacaagggcttagcattcctttattgggagataacaaatgaacatacggggtgggatcaacttatttacaatttctttatggaatcctgaagttcgctttcattggggtgattttttaaaaccattgttttctactacacaccttttgccttccctgttggtgcctttt

SEQ ID NO: 375230 - DNA, 253 bp, Zea mays
ttttttttttttttttttttttttttttttttttttttgtttttttttttttttttttgttttttttttttttttttgggggcaaactggattcaacatttgctggaaccagttacaaaatttttcaacatttttctggttcatttgggtggtgggggctcaatttacatcacaaatttgggatgccaaccctcaacttattttcgcctttcgggcggctaaaaaggtaccttgacccgacttcttgcctacc

SEQ ID NO: 375231 - DNA, 99 bp, Zea mays
agactcagaaccattgcaaactcgttcactttagacaactaaccatcaccaccgctgattttaagataaatgcatattgaaaacaactggcaccactca

SEQ ID NO: 375232 - DNA, 256 bp, Zea mays
gcacttggaataggctcatacagccaaccaaaccaaacagatcctgtgcatgccgggtacacatattctatgttatgcgggccctgtactcatggagcaaaccttgctactaataatagcgggctttacttggttattcctgatttattccaaattacaatttggcctcaaaggaggtgaaatgtaccaatgaaggcaataatatgtatcccttctcatgaaatgaaataaaaaagaataacaagactgacacctg

SEQ ID NO: 375233 - DNA, 333 bp, Zea mays
ggggcactcagtgccaacttgggggttgattattgttatgtctggaagagttcgagtacaataagacagtgacaagagcaaagtagcgcacacaacacaaacacaagcatgctaatttgtcttatgggaaacaacaggtagatatacattattgatgaaaaacgagacctacagattcagtagtgaaactgtgaaatacgtacactatcctcccaccccaccaccaccacacgtgagactgaacgaaatgtaaaataccggaaaccggacctcttaggttagcaaaacatcgtatgaagctggaaagcatgtggatgtggttagtgccagctc

SEQ ID NO: 375234 - DNA, 91 bp, Zea mays
aaattatatagagagaacattcaatggtcctaacaagaaccagaaaacataaaaattcagaaccaataataatcctcgaagtacatgttcc

SEQ ID NO: 375235 - DNA, 253 bp, Zea mays
gtgtcgaggtttttttttttcacggagggacccggggtccccttttttttttttaaacaacccacctggggcggagggacccgggaacacaatggttacgcaattaccaaactcccctacaacacaattttttgggggcgggctgggataccccccaataacccatattacaagcccggggggggggcccgggaaaaaaacacaatggtcatgaatccccatccacccgatttgttttttgggggggctgggg

SEQ ID NO: 375236 - DNA, 334 bp, Zea mays
gcccagatacacgattacaaagcgattgtaatatactggttttgacagctcgccgtgtccacaaagtgtgacgcacaaatactcccaccacaaagatatactatacaagcatacgagcagcaatctgcatgcctcactcaacaccaacagcacacaacccaggtagcacagcctgtggcttccccctgcccctggtgaaacccctggtggaagcttggttttcaggttatgcggtgtagttccaacagagtgaaggctgccacggttcccaccaaggttggttgttgccatggttattgtactgcgactggttgttctggtggtgctggttatt

SEQ ID NO: 375237 - DNA, 382 bp, Zea mays
  unsure (1)..(382): unsure at all n locations
ataaaattgaatttggattagtctggctctggcgcaatttggattgccatacgcatgccgaattacgcagtctcggttacaaaacgcaaactagaccctccttttcttcaagtcccgatgcaactttcttctgaacaagcatatgccgatggaaccgaatcgcggaatcagatccattgttttggttatgctaccaatacctgtatgtccatgtgaccccttttcttccgtgacttttcatgtgntatgatctccctcccatgccttttaataaaaatcgcgctcagcaggtagtggtgcacacaaaaccccagacgtcctctgcgcagcctttatttttccaatctctgtcgtttgggttggtgcgacgtcagatgatatc

SEQ ID NO: 375238 - DNA, 293 bp, Zea mays
aaaaaaaaaagggtaagggccccaatccgaaaactcttaaggaaaacaccaatgaattttcatcaaattcccgtccgacttaaaattttaccgggggggagttaaacatgatttgtcttttttaaaaaccattaatccaatggacaatagatttgaatgaaattttcaataaaaaggtcccccaattctatgctttcttctgggaaaggggaaaaaaatcttcttcccttgaattttcatcaaaagcatcaaaattactttagccctgggctttcttcttgaaaaatttgaag

SEQ ID NO: 375239 - DNA, 281 bp, Zea mays
agcagaagtgttgcaacgttgcttgcaaacagtcatatgtttatacatactgcaaaagagttttggttgcaagaagccaaattttgttgttctcataagtagaaccacaactgatctatttccattgaataacagatgcaaggtctcaaaagagtagctatgtagaaggtatctaattgttcttcatctttgtcctttttgcaaagactgaaagttggtcagcaccacgtgtttcttccttgtcggagtcatcaattgcattgaaatttctcttgtatgat

SEQ ID NO: 375240 - DNA, 416 bp, Zea mays
aaaaccaaactatattactgattattataccaaactgccaactgcataatgcagtagagatggcaattgttgtcaacccttagatgaatagcttaggtgaagccaccatgatacaacaagtcactaagcatgtcaacaatagaggatacgcttgagtgtcactaagtacttcactgtgtgataaacaaaaacatgctctatcttctaatagggtttctaccggtcaccaggattgattgtacatctgtatttctgtgttccctgcacattcatgcagtccaacaaagagatgtacgagcaccaccacttgaagtgcggttgccacttcccaactcaaaaaatcaatgagaaatttgttcctttatatcctcatcaacatcgtcgtcactgtcctgatcctcggaagcaacacccac

SEQ ID NO: 375241 - DNA, 308 bp, Zea mays
gtagttcaacattaatgaaaattcaggttctgcaatgattgtctcaagtgaaaaaggtaacaggtgacaagaccgggttgctgagcattgggttctgcggactggtctgctgtctcgtagtcgtggcgatggttggcgtgagagcttgccgtttcctaactgtgaattggtgttggtgcaggggcagggagttggtgtccagcatgtgcaggatgagcaccatgagcacggagcaggcgaacatgggtatgggcccgaagacccacatgagcagcgtggtggccaggtagagcgcccggaggcccatg

SEQ ID NO: 375242 - DNA, 390 bp, Zea mays
  unsure (1)..(390): unsure at all n locations
ataatcaagatgactattaaataaggtatttttcaacatctattacttattttgtagctacaactacaagttattttaaactgtcataattttttattcttcattgcgttagcaacacctaaattttctggcgtcctccgccactgaatatcatggcatgccacgaggcacctttctactcatgcattctttagcactttcacaagtgctttgaatgtggctgtactgtaccttcttgattgatgagtacttngtcagttgcggaatttttccggttaacccaacacgattcataggagaagaccaattgctcattctctacgaagtagttcaccatcaagcaccatattctaatctggtgctgcataagatggatacaccctcacatta

SEQ ID NO: 375243 - DNA, 222 bp, Zea mays
aggagcaactgcatttcaattttcagctatacatcaaaaggccaacaaaaaaacggaagcaaacctgaacaagaagccccatgagaagcgacatctatcgatgaaagcttaggccatatgactgttcccatacacgtactggtaccgttggtaggggcacttgatctatgtagctctacctagactgcttcattatcccagtagttcctcagctgcgacata

SEQ ID NO: 375244 - DNA, 391 bp, Zea mays
aaaggagcatgagtcaacataacattaaattaaggcagacgttctgcaccttaaacatcattcctcccattcccagaaagagtcagcaagaaaatgcaaatccccccgaagatacagcacaaccattttaccgacaagacatggttagcttggattcgtcagcgtccacacgaagcctgcttcgtcccacaggcgcattcctgatccagcctggcaaccatcctcttcttcagacaagtgtcatcaccaaggaaagtttcaatgaagatgtgcaagtcaaatacttcagctaaatttccaatgaagaatcaatgcacacgatctgcaacaaaagaatgggccgaatatgctccctacaaagcgaacggtaagaccctgcagttccttaatg

SEQ ID NO: 375245 - DNA, 234 bp, Zea mays
aggggaaggatgagcatgaaattaataacaacacatcgggcaaagtccccgacgagttcaaaccatgggggggtacatagacccaacaaacgagttcatggacaaacccaaaaaaaatcagtctcctggccggcactgcactagttcctcgcttattatcatactggatgctctagcctttaggcaagcaaacagcgcatgcaggtagctaggggagccaggcttcaagctcca

SEQ ID NO: 375246 - DNA, 302 bp, Zea mays
aattaaaattagcttgttgacgctactccaaatacttagagtaaccattaacattcacctaaaacaagaactcgatcaataaacgtagagtatcctaactactaaaatagagcaccgacttcactatacaaactaatctcaccataacaacactgacaacacacacatatcagctaaatgttagagacactaaatctatccttctcgcattaataattcaatcagctcaaccaataaaccaataagaagggacaacaggtcagctcaccataaccaaatcgactcggagtatgcggaaacga

SEQ ID NO: 375247 - DNA, 158 bp, Zea mays
ttttttttttagaaagaactctgagtatgtgtcctcaccttctcattatatgtataattattagggatcgcaacgggtatataccgtcggtaatatcatttcgtacctgtaaaaaaatctacacattgggttacacatatctgcttgttggtacctag

SEQ ID NO: 375248 - DNA, 327 bp, Zea mays
tctttttttttttttttacagctctcggaatttcggccccacaagctcattctttcagacattattgtacaaaacaaactagtagtccggagcgacgcttgtctgtacttatgtaaccagtagccccagcgtctgcgtgcgtgcaggtcattgccgctccgctgcttaactacagctggcgttggcactgttgcagctctgcaacgcaattacgcaagtacgcaggcacctgcgactgcgagcaggcctccgtttggttgtgggcctggacgggagaaggcctcgtcctacttgcggcccgcgccggctcccgggccgacccgctcg

SEQ ID NO: 375249 - DNA, 235 bp, Zea mays
aggccaaccataaaggcatccgcttcaattattaaacaataacaggtggggaaagggagttttatgttttattaggccaccactcaaggggagggattattatcaccatgtttacttttacagggaccgtttgacagacgggaaattactgaaccatatacccataaataaatgaatagggggttacagtttacacacccaaccaacaccatgttagcaaaaatatacatttttt

SEQ ID NO: 375250 - DNA, 371 bp, Zea mays
aaaacgactaatattttgggacgggagtactatggttcatacacaccattccagtctaatggccatgaaaacatagaacacctagatccctttcaccctcctttttttcttaaaaactgcactttccatttcttgtacaggtagaaacgacaggtaatttttacaacattttttcctattctattcggtacaggatctgagacaccaacttatcatactgtttgttatcttgtaaccgcagagcctaacgggcggtcttgctgctgatacacgataactgtttatatcgcggctggggtttcaagaactgcggatgaccacaataagcttcatgctcattgtacttttaggttgtcaagcctgtcaattag

SEQ ID NO: 375251 - DNA, 299 bp, Zea mays
  unsure (1)..(299): unsure at all n locations
tcttttttttttttttttttttttttttttttttttgtttttactaaagaaaattaggtcaatttcttttagaaaaacagaaattttttgaaaaagtagagtccataaactagccctaaaagagggaaaccagacgatttttcataagtactgaccgatacattgaaacgagcaactaatacattgaaacgagcaattaattccctatctggcaaatctagagcaagagcatgagaaggggttattcctctgcgctagtaagattcagctgaggcgactgcaaatgccgnctttttgct

SEQ ID NO: 375252 - DNA, 306 bp, Zea mays
gggttgggtttatacaaagcagggaccgttaagaccagacacacgactaatacaaatagagcacaaatcattattcctaagtttcatctaatacataactaacaaagtatctactataacaaggtagaacacatgtctcaatccgatatcacagttgcgaaatgggcccgtctgttctcaagaaatctgtcgatgaaacgacgccttggaatttgaatcaacgaacgtcgaatagtcttcaaggggtatgtagtgtgatgatctgggttgaaatgaacggtgtttggggtccgaggtttccaagca

SEQ ID NO: 375253 - DNA, 341 bp, Zea mays
tcgcgatttatttctagcggacgcgtgggtttttttgtttttttttttatcttactggtgttaaaatttcataaccataggcctgatagtttaagagttatgaattttacaaactggttgctgtgttctgtccaccgtcagaacagatttcgaaaactgtgttgtttgatttagataaacattgaatctccatgtatttcatctaggaactcgtgtgttgcttgattgaatctccatgtaatccatgtagtgcattgagatgaccatagtccacacataacctataggtctgatcctttttcttgaccaggattatagaagaagagaaggcactcttgctt

SEQ ID NO: 375254 - DNA, 153 bp, Zea mays
gggaaaccaagtaacctactccattaaggaaatttcagttccttcaaaacgaaggggtccaaaaacctaagatgatcccaggggagactggggttcatgacaaaaactggggggataatatttgccaaggccattgggatcgggaataaatta

SEQ ID NO: 375255 - DNA, 341 bp, Zea mays
acaatataaagattttaaagttttaaggcgatgttttgaccacagtttatgaagctgactggcgttgccttttccaagttgaagggacaagagaaagcagctagcctattacataaatcaaaccaggtaccggtagcatgtcactcatcaccatgaactttctcacagaagatcgaagaacagtagctcaccatttccaaccccaggaaacgcagaacacaccttccatctcatctgttttgcagtagaccggctagcggctagccgaacttgttctcgatgtccgtgtcttggagctcgccttccaggtgcaacatcttctccatgacgacgagcagcat

SEQ ID NO: 375256 - DNA, 347 bp, Zea mays
aaataatatttatacaagaatgttgataagctgaacagtcaaataaggtgtttgaaaataaataaataaaaacgccatgtattgttagacggatgtgacacatatggtatgcaaaactcgtataatgttatgtctgtagctttcactccagacgagagcagttacaaatgattcaggaacacacaaaccaaaaattggcggtgttgaaggaagaatcctcgctatgcatgcgcggcagaaatgtttagtcaatagtgtggtcatcaggatgtgatttagtaagggccggtggaatagattctttgcacatcatgcatgacttgcatatatatgaaaaaaaaacaccc

SEQ ID NO: 375257 - DNA, 256 bp, Zea mays
ggcacagcagggaagcttcatgcggggacaacaatggatcatataaactaactacaataaaaagactacaaccatacgtctcgcattcgaagctacaacaaacaatacacaggtgcatctctcggtatatacaatatataacttctcaaatataacaaaggaaactaaaaatctcccataatgcatctagatacgtttttacggagtgaatgaacgcctttcgcatgtgctttgaacggttgggtgaacgccttac

SEQ ID NO: 375258 - DNA, 150 bp, Zea mays
aaaaggaaccgccaaaaaaaaaattggcgaacaatttgtcccggcccgccaaaaagcagcaggttttaagtaaaccgggggggtacgttctcaaacagtcaacagggcaaagtccccgtcaggccgcccaacgggggggaaaacttaaac

SEQ ID NO: 375259 - DNA, 244 bp, Zea mays
aagggagaaaggcacacgctcccctccattaccaggcggtccttttggggttttcctatatgaacaacaactgaacaaggcccggagtttattttatacagggaatgttgtttcgggacaaacacataagccggtggttctaactactacaccactcgggcaaacgaaagaaaaatgaacaacaaccaccacccagggggccactggatgggctgccgggttttcattcaccgggcgttctccg

SEQ ID NO: 375260 - DNA, 279 bp, Zea mays
gggcaataggcaaaaacagaggataataatcatgtcagttcaataggaactttttggcaatcaccagccaagctggtgttctcaataagggtagatctccatcaatagggtcttgatgaaatacataggattcggagccaaaaagataaatatttgaactccggggcagatcttagaccacggaagcagttcctcagccaagtgggctcggcttttggaggaacggggcgggccttacataactgtaccccacaaagttgctgttagctgcaacagggc

SEQ ID NO: 375261 - DNA, 257 bp, Zea mays
gcgaataaccaatatcgattgacttgctcatctaatcttctcggcacaggggcaaacttagcagcctggtcaaatctacactacagaaacgaaagccactagactctattacatggttttgacgtccatcttattgcacaggtgacgaaacgaaatgcagtatggacgtcgccttcaatatctgattgcgcatgtatgggtctgccgacatctaaggatttaggggctcatcttccccgatcattttttgggcttta

SEQ ID NO: 375262 - DNA, 185 bp, Zea mays
caactgcacaatccgaaaatccctcccgactaaaaaggtcgcaacgaaagacgggttgtttttttaataatacagacccccatttcttcggggggggggccctactttttttgataggggggttccccccaccccttttttaagccccaacaataataaaacctggttccagggttcaacaaaca

SEQ ID NO: 375263 - DNA, 153 bp, Zea mays
ttcttttctcttttttttttttttttaggaaaaaaaggtagtgcttgttttattatcaactcatgaatcggcatgtacatactgcatacctgcacaatgtacaatcatctgatcactataccatacagaacagtattggccgtcgtgacaaac

SEQ ID NO: 375264 - DNA, 364 bp, Zea mays
aaaataagtgggtttactttctttttttaattgagatgtgtctgatggtacaaatcagtatcaacaacttccgtgacatcttaggaggtcagagctgtcgattgaaagatcaaatggtcgtcgcgacagccgactggcacatggtagcatcaagaggtgctctggtggcgctttggcacaagaggttgcctggtggtgacagcatcaagctggtggcgcttcagcaaggcgcatctgcttcctgatctgctcctgcggtgatctgttgtgcttcacttccagttattccttggcgggtgagttctcggagtgcggtagtcggcgcagaacggcacggcgcgccggcagatgtgctcctgcgccc

SEQ ID NO: 375265 - DNA, 140 bp, Zea mays
ccttctcttattattttgacacttaattctcttgcgaggtcgagaaaaaaaaacatagcacagcctgggatggctgaaaaattgggctctggatactaaactaacatcaggactaccttggtttttttccactaaaaagg

SEQ ID NO: 375266 - DNA, 284 bp, Zea mays
ggcaaaggggatccggtttttttgaaccatcccgaaaattagcaatctccaggccaggccagccactttcaggcaggggaagggacatgtccataggctacaacatcagctaaaaacatgcaggattttctccataaaggacagctcaggggcagctacccagggcacaggggggacgggggaaaaaaaccagacgggcagatttagatccagaactaatcctggtggggctaaaaacccacaatttacaaggggaaaagggctcgcaaatgccgacggacaaa

SEQ ID NO: 375267 - DNA, 250 bp, Zea mays
ggccaacagggtgtacagggcccttgaaagggggccattccccgtttaagttttccaacaaaaaaacgggggtcaacattttggaacttattttttatttccattacaacttacaggggcccatgggcatacatacagggggtttactttagaggggggacattccacccgaccccaacttaacaggactttttactcaggaaaacttttgttcatacttaaccaaaaagagaagctttttaagcttttg

SEQ ID NO: 375268 - DNA, 225 bp, Zea mays
gggccgcaccccaaaccaattgaaattaacagggggaaaaaatagggatttttacataacggggctaaaaaaaacaaccctggataatccacactcgggggttagggggggggggaccaaaaaacgattttttttttcaggaggggttgggatgggaccccacaggtgggtacccttttccctccgccttggacgctccggttactggttggcaccgccgggggg

SEQ ID NO: 375269 - DNA, 372 bp, Zea mays
gggtgtgtgtagggaactgatgcagttgatacatgaacatctccttgggtctggttttgctgccaccgctgctatgctccagaaggaggctggccttgcacctttaccattgacagcagcggtgcttcctgcccatcaagttgctgccctggaagcatcatctgttcagcaacagtggccctctggacatgttcagggatttctctcagataaaataaacacgtcgacatatcaatctgcccagagatcagatcctaagctgccttcatctaagaaaaaggcactggccttctcatccagtttctcacgaagagctcggtctccgcatccaagcaacatccttaaaagtcctgtacctattgcggctgatac

SEQ ID NO: 375270 - DNA, 297 bp, Zea mays
aaaaaaaagaatacagaatttactcaaatgggggctttttcaaaccatggcattaagtccattttggtacaggggggggcccaaactaatttcaggggtgggggcatgaaatttactacaggggggtacaacaccccatttacaaacaacaaaatttgacagattttggggggaacgggttaaaaaccccccttttattccaggacagagatgcatgaattcggggggcctacatggatcccgataacatttgccacgggcggctttgggctgcatgcctagatatttggggcaaaa

SEQ ID NO: 375271 - DNA, 306 bp, Zea mays
tttttttttttttttttttttttttttttttttttttttttttttttttttttttttttttttttttttttttttttttttgggaacgaataaagggccaaattttggggggggcctttatttatcgaaatttttaaaaaccccagggcaaaacacaaggtgcagggggaaaaaaaacggggggggactggaaaccccccgaaaaaacccgggtaaaaaaaaaaatagctgcctttggcggcaaaggaaaaaaaacagggatcgcccggaaaccccaactggattgggggaaaacccaacttgggc

SEQ ID NO: 375272 - DNA, 323 bp, Zea mays
agggggaaaatatatttcatgataaatctaacgatttttttacagttcctcccccgaaatttacaggtttgcccaaaaatagaaagggggctattacacaaacaaaatgggagccccaaccaaactttttttgaaatcaccaaatggaaaagggtggccattggtgtccctagtccatcaatacattatgacaatttgctagactatgctcaaaagtaggggctccacgggcttgggctgataagagctccataactagggcagagatactacaggagggggacccaattaaaaaagcacccaaacaaaaaaacatccatttt

SEQ ID NO: 375273 - DNA, 426 bp, Zea mays
ggagcaatcatgcggaacaagcttcacgacaggtagggaggccacccgatcgtactgcaatcatgttagttaggtaaacaaaacattgactggcttccagcaaaacagaacacgacattgtcatcatactcaacagagagatttgccttcattttgtgaaacgctagactccaggtctgcctcagttaacgcatgattggttggtgggggcatttcgcaccagcattgtgccagcctgggccgttggaaacaggggagttgcgtttccgcgcatgcaggctacccagtgaagaaaaaaaacaacgcttcatgcgtgggagcaggcgatagaaatgctttgcagccatccacacacgtgcaaagcgtgatcaacggaacgccgcgggccggagcgtagccaaccaatcaaccaatcacctgttagcc

SEQ ID NO: 375274 - DNA, 222 bp, Zea mays
aaaccaaaacgggcctttttggattgacacaacatggccgatatgatccatgggacaaaacaataggacagacgagaccttttattttaattatttttatttccaagcagctagttagggggcccccaaaaagggaaacccccattggatggagaggacggccgggtcaaaaggggatgctgggggggatgcccctcccggggactcccggtttggaaaagg

SEQ ID NO: 375275 - DNA, 244 bp, Zea mays
ccaatgaaaaaaccatcacatgccccagaaaaaattcggatggaaaaatcagcttacattatcctcgaaatcacccaccttttctacggattcacacgatataacaaagaaaacgaaaaaaaaactaggtcacattcaattaaccaaagcaaataggtaggattagtaacgggctatttaaccatggaaatgcctatctgattgactcaagttacttccaagttccaactatccatctgaattc

SEQ ID NO: 375276 - DNA, 83 bp, Zea mays
ggctagacacatatcttttcttcagttaaatctgaaaattcaggtctcacaggtttccgttattttgggctattcaactgcag

SEQ ID NO: 375277 - DNA, 315 bp, Zea mays
cccatccatttttttttttttttttttttttggttgtttttttgggggtttccgccggtttttcctttaaggggcgcaaacacatgaaaaaaaggggggccaaacccaagcaactggaactggtcgggggagagaccataaagaagttctttgggagcaaagaggccccaagaggcacaactcacaacaattttttaaaaaagcagtctaatattttgggaacccaaaatgcaacggggggggggggggttcaaatggggcttctaaaagtccatgggggcaggggcaacaacagcagcattttttgggcccctt

SEQ ID NO: 375278 - DNA, 302 bp, Zea mays
ggatcaccaacctggtggttggttgtatacttgcatgtacgaacatgatgcgaacgaaatcttgcagcgctgccgccacatgcatgtacttgcaggttgcagcttatataacagtcagtcagtcgtcctacactcctactacgactcattcctgatccctgaactcgttgtctcgtgcatgacacagccaaaggagcctgattaccgcaccagatatttaactagcaaggggcaaatattaaaaagaagaaaaaaagaaccatcagattattccagagaaatgggcttgcttcaccatcaac

SEQ ID NO: 375279 - DNA, 402 bp, Zea mays
ttattcccttttttttaacttcaatgagaactgaggttattttaaaagcatccttacagcactgaaagaactgtaattacaaatatcaccaaataaatgaaacaatccaaatattgacaacacaaatatgtaaacaagatgcatcccttcagaatcattaacaattttgtccaccacttgcagttcttgcatgtaactcctcaaaggtatcaccatccgacggtcgtctttcacctgacttagtatcatgttcaacttggacaatcggtttcctcctaggtgttagcttctttccagaagatgaagcaaattgagcccattcttgggactcattagttccctcatgtagttgcaagtcatctggtgtcgtgcttgcattttcaacttgctctacaaaaatag

SEQ ID NO: 375280 - DNA, 337 bp, Zea mays
aaaacctacacatggtattatgttttgcacatatttgcaaacactttacaaaatcattcacaaaagtactaacgcttcaagggattcgcaaaagccttcattgagtaactcaacaggattttccatagatctttctctgcaacttttgccgcttcattgagtaactcaacaggattttccagataacttatgtattcagaagagagacgtggagaaatgtttatatccagctgcccaaagaaaagattcactcaaacaatgctcatacaaaattgcaaaatatcactatttagggctcgcatcagaaagcttgcaagtcaaattgagaagaattttc

SEQ ID NO: 375281 - DNA, 170 bp, Zea mays
  unsure (1)..(170): unsure at all n locations
cccccacggaaaagggnccaacaaaaccaaaaaaggggaccagaacagggatttaatacatagcaaaaacaaaagaacaaaagaaccacaacaaaagcccatcaaaagagaataatcagctccgacaacaaaaaagtagccagctcgacagtcaggaccccacattcccc

SEQ ID NO: 375282 - DNA, 318 bp, Zea mays
  unsure (1)..(318): unsure at all n locations
ttntaattcnattttttttttttttttttttttttgttgttttttttttggtttccataaaaattgccgcccataaaaccttaagatggggccattttagtaagaaatccaccaagaatcccagcaactagaccggagtatcgctcgccctcccattttttaagcgatagcagaagggcgtgcccatttttacaatacaactatggtattcccgttttcagctcaacaccaatagtattctttatcgctatatgaacatcctctctgcctttgaaaaggtgggtctccatgcgcttaacataaacattcccagcccgt

SEQ ID NO: 375283 - DNA, 233 bp, Zea mays
  unsure (1)..(233): unsure at all n locations
ncctcaanttttttttttcttatttttttttggttgttttttttgggtttttttttgtttgggggaaacacatgccatttgacaattgacatcaaacaatggaaaacctagggggccgataatgatacacagcttattgggggtcccaaacccaaatatttccccggtcaggggatgctgaccaacagagtttggccatgggtttatttggtagcgacagataatttgaacaa

SEQ ID NO: 375284 - DNA, 333 bp, Zea mays
  unsure (1)..(333): unsure at all n locations
ttttacttcnatttttttttttttttttttgacaggtggtttatacaatataaaggcaccactctgcttgaaaagcaccatatttatacatgctcatagatagggctcaaatcaaccggtttctgaagcgcagatgctgcaccctaccaggcaagaaaaatatttggaaaaaagatccaaggaattattgatgccgggctgtttgccatggaatggtgataggatgcttcttagtaatccagcaatccctgggcccatgcaggtcctgtataatgtgctgggcactgctcagcgtggaaggccgtggcatgatcaagtacctgtagatcaccc

SEQ ID NO: 375285 - DNA, 406 bp, Zea mays
ttattcccttttttttctaaaaaaagaaatggggggggctgtttaatcaataaaagaagagagttcagaaaacacactgtacaggtccaagggccgagacaagacagactagcaaacacaacgtgaggaacgctcctaacagacccgcacaaagcagctaaaccactgcagcagccctaatattgagggaacatagctctcttgaaagtgaacgcgtcctttttaatcttcaaggctaattggataggggtgagggctctgttttcgaatatcctccagtttctctccttctagatgtttcacggagtgttcaactgcccatgattagtcattcaactgcccagacataaatcgacataaatcacataattcaggttggtgtccgtggaagctaacaccaaacgat

SEQ ID NO: 375286 - DNA, 320 bp, Zea mays
ctcatagggcacttgttttgttcacagtatatcaaaatataaagtacaatgatattttgccaatattgttgcaatcatacacgatttttttgacatgaaaaaaaacgaggagctagccctgtcttcggtacttcagacatttggaaccattagcctttagctaggccgtggtccgaaatggaagcatcgctgttcggctcttgtcaaaacaggtctgtgtaagtctgtataaagcataaagacacgccagaacaagcataagtaaatcaaacagaaacctaaaatgattcaccagttaaaagacatggattgagaggaat

SEQ ID NO: 375287 - DNA, 211 bp, Zea mays
tcctcatttttttttttttaaaccacagcagagggggatcatttaaacactatgggctgatgcaccaaccttgacagctgataatcgctacaataacaaacaatcctctatcaccccagactagcgcgccaccaagttttgacagcataggaggatatgaggaggcccaccccataccaccatgagacgtgcacatcaaagcacttgcctc

SEQ ID NO: 375288 - DNA, 368 bp, Zea mays
  unsure (1)..(368): unsure at all n locations
ttcctcnntttttttttttgatagctgaataacaacacttagagtcttgaagtatcgaagaaatgaagtatttactgtagacaaatcaacgagcgtgtgatctgatcagcacaacactcaggcactcagcacttggagagcacatgggccttttctgttgtggatcatcaagttgaggatagtatcatcaagttgaggatcgtagagtcttcacggatacaagtaattgctgccagttcatctggactgatacaaaatccttcttcgataagctcaggagataggtggtatcgtcttataccgtccataaaatgcagcgctgccttgtgcacattaattacaacctgaacttttccctcggtcaccct

SEQ ID NO: 375289 - DNA, 237 bp, Zea mays
acactcaagatttaggacacacaaatatatagctggactacgattcgcagcatatacaactttacatgctacataggcacggggcagcaggaaaagaaggtgaaggatcactgcatggagggatgtggaagtgacagcgataactcaagtgaaaagaaatcaaaagagcggttcccaaggaagaaatggctgaaccttccattcaaacttgacaggagaaagacgtgctgagcaatg

SEQ ID NO: 375290 - DNA, 363 bp, Zea mays
tttttacttttttttggcaactctgctgttgcattggggcagttcagttcggctttaagcactcagacatcgcagggtgcattcgagcagttcagttcggctttaagcactcagacatcgcagtgtgcagtcccagtcccagtcctaggcgtcttgttacaaccaaaaaaaaaaaactaacccaagtgccaaccgacctactggacattctagaatcacgacgccttttttttaagcatggtccagaaaacattttgcgtctgtctgctggaagcgcaccttatcaaagtgcagctcattggttgaagccgcctcaaatcgagtccacagttctttcttaagagtagtttctccagcacacct

SEQ ID NO: 375291 - DNA, 298 bp, Zea mays
  unsure (1)..(298): unsure at all n locations
ttttcactacnttttttttttttttttttttttgggttgttttttttttttttttttttttttttgggggccaaaaaatcacacctttatttggctacaaaacaaataatacatcaactcccgggctggcattttttaccccggggtttaacaaagggaaggggaataaaaataagtcccaaatttataattggcgagcgattgggccatcatcaaagcaggcattttggacatacatatataggggggggggttctcaaaatatgaagaccaccctggcatggacccgggacttttg

SEQ ID NO: 375292 - DNA, 189 bp, Zea mays
tttttcacagccccacgacaactggggaaaagggaaaatcagtacatgggggccacaaccacaaacatgcaagagctgaaaggaaattcccgggggggggcgctttctcgaggccacaacggggccttctggaagcgcggacaggggcccaaaaggggcatgggatttcatggaagcattggccccagg

SEQ ID NO: 375293 - DNA, 307 bp, Zea mays
  unsure (1)..(307): unsure at all n locations
cagaaaagagacacacacaacgggcataaaccgcaggccccaggccaacacactacaacnaaaaacagaactcagagggtccacagttatgtctggtgctaactcattcaagatcacccatctagtcgtcatcgctattatcatcaacaacatttgggatattgctctcgtcattatcactggcatattgccatcctggttcatcttcttcgtcctcaaaataatcttcttcatccctttggctatgtagatcttcaactacacttgcatctataatatcaacattttgtaccccaacaatatcatt

SEQ ID NO: 375294 - DNA, 308 bp, Zea mays
  unsure (1)..(308): unsure at all n locations
taaatcnatttttttttttttttttttggcacagtggatttcatcatttttcggattagctttgatattaaattctttacataaaacctagagagctgagcgtggtacctcagcaaaggacttagcatattctagatgaatgtacctcttttgtgtatctgtttcaaatgctgaatcaatagagtaattagtcacatgacaaggaatattgaccaaagagaaagaagtcgttgaaatattctggtgattgagtaaattaccagcagggctcaagtcattgtccggtagcgcagattcaatctgagatt

SEQ ID NO: 375295 - DNA, 369 bp, Zea mays
  unsure (1)..(369): unsure at all n locations
taaatcnatttttttttgttaaaaatcatctgggggggtatagtagcgatatttcttggagtttgagctatatcaaatatgacatatcacaggtgcattatagtgtaataatatatattgatataaagttgccttattaacaacaggaaagtacaaacattacgagtactgccaataaagtttgctgggcaaatactgatggcttgctatgccgctcatgtagaccaacaaggctgttattgttattattcatatattacgcaaacatgcgtatcattagccgaccgatccactgccggtacggtcaaagttctgtggcgtgctggtgctggtgctggtgctcactgctcagcagtcgatgtggatact

SEQ ID NO: 375296 - DNA, 396 bp, Zea mays
  unsure (1)..(396): unsure at all n locations
ttttccttcantttttttaatcaaacaattcaatggggggtctgaatcagtttatccaaagtttaacaaaaacactgtttttcagtgtacacagagtgaaatttcggaagcacgcagacccggtcggatccaccggcccgcggaacggatcgaggccaccggcatcctccgcttgcgtcgcattgcggcgccgagctcgaaacccctggatcggttgcagctttcccactgcccccgcccgataacgcggcggcagggtggtggcctgtcgatctcgcggctggagccggctaactacctgccattttgtggatttgtgtgcgtgcttgattttggtgcgtgtggtggcgtggagtctccggcggggggtggcggagctagggttttggtttgggc

SEQ ID NO: 375297 - DNA, 292 bp, Zea mays
ttatgtttaaagtatctataatcacgcaccttactgaattgccaaactatgcatatagctatgctacataccatggcaaactgccaactgggaaacgtcattagacaagaatctatgtatacctcaagaaactagttcatgtaggcaacaggggttgcctctcatcagttccaatccgagggctcgcatcaacagcagcaccagcagtcatatttacaaaagaagattcggatgaccggtgattttgggggtcttccaactctattaagtcagctggtttgtcatctttgac

SEQ ID NO: 375298 - DNA, 394 bp, Zea mays
  unsure (1)..(394): unsure at all n locations
tnactacntttttttacaagacagntatttaaaagggtattattgcgaagcgtcacgtttatagtccaaaaatacaattgtccctcgcaggggcgcaatccgcgcgctggctttgagggctggggctgggcgcgagtagagaggactggaaggagctcgacgggctcgcggctgggagcagtaccaccatggttgggagctgcaagggcgcggcaccagggagctccgagcagggacgccgcggtccgagcgcaggaagccgggcggagcgcgcgacgcagagagcagcgctggcagaagaactcgcgcgcgcgccagggagctaggaacggcgcgacacgcaggggtaggggatccggcgcaaggagctcggggcgcagagcaccatggctgt

SEQ ID NO: 375299 - DNA, 399 bp, Zea mays
  unsure (1)..(399): unsure at all n locations
ttttaaaataatttttgntataataaaatacattaaggggcataaacattaagcatcattccacctatgtgctctccaatgaacaaaccgatgtcaagaaaaccaaaaggatgaaaacaaaatcatcgaccagctagttcatacaagggagtagtgcaattcatacaagggagtagcgctttcccagtcagcatcccacctttacccaatcgatattccaccttgtaaaattcaatttggttctgatcaggatctctccaaggtttccagagaattgcccatcaatgtactcctcagtgtaggcaagcttttcaattcttcattagttgcagatcaagatcatttactctgctagaaatcttgcgcacttcatcattcttctcatccaaaattatcagc

SEQ ID NO: 375300 - DNA, 316 bp, Zea mays
  unsure (1)..(316): unsure at all n locations
taattcantttttttttttttttttgagaaagaagggggtattacgaaagcaaccaccagtggtgcctggcacgtgcgaagatcgatctacatgagaataaactgctaatggtttcatctagacgataagactacggactacctagagttgtcgaactggtaacaatctatgttgtactagcagacacatccctaacccctgggttcatccaccgactccacaaaagatttaagctacggctgccacataaacacagggaatcatatgtatgcctgataccctatttcccctttccagataagaagcagcagacag

SEQ ID NO: 375301 - DNA, 387 bp, Zea mays
  unsure (1)..(387): unsure at all n locations
taaatcnattttttttttttaagatagcagctgggggattgttttgaaactgtagcttctgtccagaatggcagcactaaataacagaagatattcctctttttattaagacctagagaatacactctactagtaatagccactggtacatcagatcatcagtgaatcgtgaaactgaatcaaataatggaggagggtgtgtgactgttccctgggctgagctgccccattctcccaaagtgagccgagcctcagttggagaactggacgccggaggtgaaagactgcccgaacttccaccaggccggcacgatgtcggggacgacgacagtgcggccgtccgtggaggtgaccccgaaggtgagcgcctggccggcgagacccgcg

SEQ ID NO: 375302 - DNA, 398 bp, Zea mays
gacggcttagagccggcgaacctcgtaccggaccggggtcgttaagaagagccgccgccgccgccgcttctccctgtaccgcctcaccctctccgcccttcctacagccacctcagcgtccgcgaggaccggacgcgggctgacggcggcgccgatgtagagcggcccgcagcccgcccacgccgcgaggatctcgtcgtagtccagcttgagcagcagcgagcgcggcgacgcgcccgtgctcgcggcggacgagcacggcgacgcggtggcggtggcggtgccggttgccgtcgctggcggtggcggcgaaggcccgccggtgcagtacacccagcgctccctggccctgccccgcagcgcgcggcgcgggaggtcctcctcctcggcgcccggca

SEQ ID NO: 375303 - DNA, 266 bp, Zea mays
ttctcggccttcagatcgaagtagtatacaatgcatatacaagattttcccttaatagacggtcatagcaagaagctatatcaaaacttgctgacaatcgtcgtgagatacaaattttcgaatgatggcaaacaaaaaatagtttaatgactcttatccagcagatcgcatcttcctttcacatgctgccgatcaaaattgccttcaaccaggcaagtcttcaaaataatttacaagtcggatgtgctgctgctccccacatcact

SEQ ID NO: 375304 - DNA, 381 bp, Zea mays
actcaagaaaacttcagtgaagcaacaaaaaaaaaaaaacacctgaaaacggcatcgctgccaagaaatgttacttgtaacaaggttccatctacattttacacaaaactttggagcatcttagctcgctaagctagacatcccgccaccaaatccatcttgattgattggacctttttcaagtgatagatctgcttcgtgaatcatgaaactcgttaagctcttccatgatgagttggtgctgatattcacacctgcagcttgttagtcgagacctgaaaatcatcagccatgttatctattaggataataacgctctgccaagttccatgatttgtgtcaagtttagctcgagtcaggttacacactggcacttgctga

SEQ ID NO: 375305 - DNA, 391 bp, Zea mays
gcaccacaataatccaaaccaaacctgttctacagatacagacttcagacagcttgtaaaccaattcatctatgcaaatacacaaaaaatcatctggaaacggttgtgacaattaagtagacaaacccacaaacagtatataatgtagacaaaataaactggaaagccgccctaacagaaaacgtatgactcagataaatacacaaaaaataaccactgaacaaacttaacgcaaagaaatcctctaaagtgaactcaatatatccaagagacaggagtgtcttctttcttgcattcctcaatttttaccatgatgtgatcaacctcagctttgtcttcgtctctctaggatgtgttccaggtaggaaaacataaagcttcgatgaaagca

SEQ ID NO: 375306 - DNA, 366 bp, Zea mays
gcgttacactttgtacgttggagtgcaaatacatcctctttgttcaacgtgcaagcaatatcaactcaggtgttgcgtactttacccagtctcaggagagcacttcacccaggagagacagttataatttccattttctcgatgcagaacagaccacaccaatctgtggtttcttcaactttgctcaaccccaattcatggatgcctgcgtcatcccaaccatttcccagtagtcttgtgagaactttactgagaaagaagccatttgttagtttcttatcttacgttattaccttaaataagtgctacagttcaagccaaagcaataaaaggagttatatatcaaatattctacaaactagagct

SEQ ID NO: 375307 - DNA, 142 bp, Zea mays
aatgtaaacaccatatcatccgtgataacgtccactctccttttcactttacatgtaccgggcccaagttaatgaactgcctacccaaaactgctttccgggagcctagtgcccgacatcagggggaagctggccgtgcatt

SEQ ID NO: 375308 - DNA, 157 bp, Zea mays
aaagtaaaaaccttccaacaaaagatggaacggtaagggtcctgactcattgcaatgcaagaagcggtggatgatccttttggcttccaaaagccatgccgtttttatgacgcaatccgctcacgtgtcaatgcaagttacagcagcatgtttaaag

SEQ ID NO: 375309 - DNA, 215 bp, Zea mays
aatttaatttaattctacatcaataaagagcaacaaatagacaaatccacatcgaatgcaacgatgattcagaaaaaggaaatacgatatagagtacaacgagccaaggaagtcatcatatatattactcaatattgagatgggcacaagagaccagaagacaagattgaggactactccttgaacgacaatacagtttcaaaggcccccaccaa

SEQ ID NO: 375310 - DNA, 206 bp, Zea mays
aaaaaaacatatttagctttaggacacggcatttatttctaccctaccatctcttttctacctagggatcatgaaatcacccgatgtgaccggtccacacatgttacatacccttgagtgctggaatcaactacaccaacatcactggagcccgcttaaaattagaatcaatggcaggcatcataacctatttccaacaggatttc

SEQ ID NO: 375311 - DNA, 389 bp, Zea mays
  unsure (1)..(389): unsure at all n locations
aaccctaatacttgcatgcaccattgtatcatttgacacttacacacataattgtagttataccatgagacacttataagtcttacgagatcacaataaccgtgtttatagtgtgattactattgtatactaaagtgaacgaacgaacgaggtctatgatgtatgaaccgggaactcggtggtagtganagatgacgaagagtattcggagaattaagggccaaaattgaagcaacacttgcatgtcgtctcgtcccttggatttggaccccctcgcacacgtcaccgaaagaatgagacggcagacccacccgcagtcccttctcgccagcgacagcgattctgcggccagcgttagatcatggtccaacgcctggaagctagcatgg

SEQ ID NO: 375312 - DNA, 380 bp, Zea mays
aaaacaaacatgaccttggttaactcaaactcggctacacagtgttatcatttggaatcagacaccagtgcactggcgtctgcttaacacaattgtacaatcaaagtaactcactctttggcactcctaccagactactagtagttcaggattatcatctgaaacaagccaacctaaccgcatcggtcatctccttagaaggattcatcccggcagctttcatctgatacatgattctggtgacctctctgtaccgtccgccgcgagcataggccatggccagggcactccacacgcggcgtcaggcttgccaccgatcgtctcgaacgccctggcggcatccgccagccgcccttgtttcgcgtacatgtgtatgagcc

SEQ ID NO: 375313 - DNA, 144 bp, Zea mays
  unsure (1)..(144): unsure at all n locations
tttttnttttttttttttttttttttttttaagcatataacgcaggcagtattattggactgcacatgccgcattcatcttcaggttacaggcgtacagaatacagccggggggcgggggcatacaaggtcttatcggagaact

SEQ ID NO: 375314 - DNA, 336 bp, Zea mays
aacaataatcctgttacaaatattgctcattgccagttctttctcgtaattactatagctcctgtttacacccctttgcatatccgctaagcttgtcgcggatgtagtagagttgtgtttatacagaatcaagatgaaccacaagcccatctggatgcccaaatgtgctgagctaccaccaccgtgcgtgctcagtccatttctcggcccttggtctccacagggaagaggatgcaggagaccccagcgaggaacagcaccagctcaaacaccagcaccgcttccatctgatggcagctccgcagcatgcccacggcgacgagggggcaaataacc

SEQ ID NO: 375315 - DNA, 348 bp, Zea mays
aagtgacgatcttgtattcaaactttttatttcttaatcatcaaaccctgatggcagccacaaaaggtaggaattaggttacacgtatattcaaaagaagaaaatatacctgcaggttacatatgagctctcttcagcaatacatgtccacttggctgtacatctttgtacgtacgacataatcatttgggagtcactttaacatattacagattatcatcttctctgcaaaacactactttcttttcctggagaaatttgatggtgcagctttgaaccctcaggagttcccaagtggtgcacccatgcaggagcagttatcgactgtatagagctcccatttcttta

SEQ ID NO: 375316 - DNA, 441 bp, Zea mays
aaaaaattcagaatttagacaacatacaattttacattttcattatgtgtcaacaagactgtaccactagactagacaaaagacattgtacattctgttcctaggtgagtaagagtttatccacttttacatgcactttcctgccatgaaaagaaacaaccagaactagtcgcagtcaaccaccaaaaggctagcactgctgctctagcagcacaagtgcagcatgtcaacatgccaacaaaaggctagcagcatccaaaaggctacgactcctatctcccttaagaagttctaagttagaacctgtcaacatccaaaaggctaaaagcatgccaccaaaaccaaaaggctagcacatattccttcaacctccacccccttagggaactccacaaactcgatatcaccatcatcttcctctgaacggtcccacatgacaca

SEQ ID NO: 375317 - DNA, 293 bp, Zea mays
ggattaaaaaccgattccagtacgattagtttaagggtccaggccaagatccaatcaagcctgctctttagtagcagcagcacactgtcacacacaacactgcaacaatcgttcaaaaatctgttctttcgcttggtttttctttggggggccaaattgtaggcaattgcttggtgctcatttggatccagatctcctgggctttccctgtagtacaaacaattcatggggtctccccctttacaatcccaatgcttgcgagaggcgccaccttacagagccagccatccacc

SEQ ID NO: 375318 - DNA, 346 bp, Zea mays
aagtgataatgtttaatattaataataaataacgcatattttaattataatttaaacagagatagggatcacttttggagatttatcccgcgaaaaacagggatagagaagaaatgttccccacaagtattcgtgggaatccctacggaaaaaaaatcgtcgcggggacggggagggtattccccgacgggggattgcgcgttgccatcctacttgggcgcgagtgtgtgcgttgacagcctccttgtctgcaccttgagccgtaacaagcatgccatcttcttgcggaaggccatggcctcctctttgacacgagcgcgtgaggtccctgtcatggatgcataaa

SEQ ID NO: 375319 - DNA, 295 bp, Zea mays
gacctttcgttccggagcgcgtccgtgcaccggcgcgcgcggtccatgtccccgctccgcagcgcgtcaccgcggctcaagctgatcaatgcgctcgtcgttccggcgccggatctcggccccggccccgacgcgacgggaacgcacggggaggcagccccgccggtaaccgcctcgtcccgctcgtcctcgtactactccacgttctcctcgtcctcgtcgggcacgtagtcagcgcgcgggtcccgtcgctgggtgttcatcagggacatgctcctccaccgcagcaagagcg

SEQ ID NO: 375320 - DNA, 270 bp, Zea mays
tttattttttttttttttaggagactgataattgagatggaaacgcactacaaaccaggtagctaaagcaacttcgatgagacaacagccagtctatatacacacaacacaacacaacaccatgcccctgaaccaaaaaccatcatggcaagccaaagccttcgagctgaagaccagcgcagctgcacccccacaccgaaccacatagcacccctacggctctacgcccgctacaactctttacaagcacgcgctcgctgcaacctacag

SEQ ID NO: 375321 - DNA, 326 bp, Zea mays
agacaagatctcagttttgattggcttgatcacaaacgatacaaaaaaaaccaatcggcgtgaagtcgtacacgtactccaccttaaccatttcatcagttcaaaaggttctgagggtatcacaagaatgtcaaaatgaccctgaaggaaccgggagaaggatggcgaatgctgcagcccaggaattatcccagatggcaacagtccacagtttttttccttctgaaactcagttcgaaagtatgatagcgacagagatgaatccacttaacatgcccctatgcctacgaaacagcattgcccaaggaaaatgatgcgtagcaaaa

SEQ ID NO: 375322 - DNA, 299 bp, Zea mays
atgcttgtattgactacggagcagcaggcgatcgagcgcgcggcaggcagcaggtagcatcttcggctaggtgtcgccgtccgatacccttactatacttgcactgatgacgtactgatggcacaggcaggcagggacgacgccgggcacaccggccgggcgggatcggaggtgaacgtacgtgcgcgcgaacggacggcgcggcggcttcttattgccggagcgagggagggccgggccggggcggatgacgatatatatgacgccgtacggcatgcccacgccgaccgagcgagcat

SEQ ID NO: 375323 - DNA, 346 bp, Zea mays
accctttgcactcccacaggtacggccctggtcagacatactgccatggtcaccacataggttggcaagtggggaggcaactggaggtcaatacaaggcgatgaagctgttagcaagcaatcataagtggaaagggatgaacaagacaacagaaacagacgcggcagaagagaaggcttaagcgcagtcgaggagatcaaagtgcgccagcccctggccaaatataaatgtggttgggccacgttgggccatgtaatatgggcctcaatactgatacacttgtgtgaccgcgtccatatataaatggcgtgtatctgtacaggagagggtatcgaagaacaaaaat

SEQ ID NO: 375324 - DNA, 182 bp, Zea mays
gggggagaacgtgttttatttttattggccggcccagggtgtttggatgataccattggctttaatccccaggttaaaccattattccaacctaaattttgaactacccgccttttggaagtccggggactgaatcgatcaggggttgaccttcgttaacaacaacctttggacctggccca

SEQ ID NO: 375325 - DNA, 322 bp, Zea mays
gaaatcgagatgaaacttggtggtggagctgaatgtgcaagagtagacgacaacaacataggccagggccagccagccaaggaagccgaatgtactcaacgcagactagtaatacagtgcactgcagtgcatcgtggtcgtggatttatttctgctgcacagagagaggaggacagtgaagtatcgccgtcctcgcgagcgaccggccggcggcaacaacacgtgcgagcagcgaccgacctgcaacaccaaaccaaccaagcaacccacgagacgagacgagaagcacatgctgcgctgtcgccctggtagagcgaggcac

SEQ ID NO: 375326 - DNA, 185 bp, Zea mays
  unsure (1)..(185): unsure at all n locations
tttnttanttttttttttttcttttttttttttggggaaaaaaaaaacttatttcgggagctaatgtgtaaagaacaagccttggcctaaaacttgggttggactacaaaggcaatggatgttggtgctatctgcaccggcgaatcaacggacacgagcactggatccatagcttggaatgctgc

SEQ ID NO: 375327 - DNA, 210 bp, Zea mays
  unsure (1)..(210): unsure at all n locations
tttttnttttttttttttttgaagatcgacaagttctttatcaaggagaagatagatagtggtattaaagttagagcacatcaattcttgtaaccaactttagctgattgcaaaacaaaaggttacaaggccaaaacgaatactatttcaataactgagggagtaacatatcggttgtccttttatcctccagttaatccgtacatgttt

SEQ ID NO: 375328 - DNA, 373 bp, Zea mays
caggcaaaagcataaagtatttgcagggatgattccatgaacaaacaaagttgatactgatacatgacggttaaaaaacacggcaacatggacaatcacaaatattaaaacttcacgtttttacaagaacaccgttgcctgtggttttaaaaacatgggtcatcacagctacactcgtttacgatggacggattgacttgaatgcatcatggagcagctccgagacacatgaaaacaaaatcccttgggctgcattacactcctcacctcatttagttttcacactagaagtcccattcttttcgatggctcgctgccttgcacgctccattttccgtttacgccatttttcgagagctttttggctactgcc

SEQ ID NO: 375329 - DNA, 167 bp, Zea mays
  unsure (1)..(167): unsure at all n locations
tagcnnctggcgacagtggcagcatgtaatggaacagtggccagagctgctgcttgcagaagccgtggtagaagcgggagcggaggtcggcgggcaggaaggtgggaacgcagcggaagccctcgaggaggtcgtgcgcgacctggtcgtgctcggctgggggcacg

SEQ ID NO: 375330 - DNA, 176 bp, Zea mays
attgaagcggggttcctttttgtaaactgtaaaaaaatcccccacaccccggctcaaaattccatttcaaagggaagacgtctaaggctctaaccctgagagcatgcccgggaacaaaatgcacacaggacaaggagcgaagccaaccagggggcagggggggattccactggccc

SEQ ID NO: 375331 - DNA, 88 bp, Zea mays
ccgggaaaatagaaattccttcaaaaaggacattccaaaacacccctcagccggttgttgaatccggtgcgtatctatcaagtttact

SEQ ID NO: 375332 - DNA, 352 bp, Zea mays
agaaaaaaggtagaaaatgttttaactcgtgctcgaccggtgatataatacaaaggtacagtacatacacgaaattgagcggggatcagtttggcgttgactcatacgcagtggccatctaaatcaatccactggtaatcagtttttcaacgcagagcttaaatgacaagtggccactttagatgcacagtttagtttcttcttcaaattaacagaaagcgccggtaatcggatgaataaagaaagaggtagatcgacgaagcacttcagagaatcagagttctggcttggctttctcgaacgagaaaatgtagcgctcagtatgttcagcgtcgatcatttggggaaaggg

SEQ ID NO: 375333 - DNA, 408 bp, Zea mays
  unsure (1)..(408): unsure at all n locations
tgctgttgtacacgcacacgtccagctggtccttgctgccgcccacgctcatgaggtagtgcgacacctctgagcgcgacccctcggcggcgaggcagaggatgaaggcaacgaggccgtagagcacggagagcgcgacgagggacacggcgacctggccgctggaccgcgtggcgcgccgctcctgcgccttgcgcagggacaggtcgtcgtgggtcacggctggcggcatcgtcgtcgtcgtcgctgccgtcggtgccgcgtacatggacgaaacaatgagacggagacggccactgaacctagcaccctcggccgctgtctaactaggcaacaatggatggctacgaagagaaggacctgcngcgagctgcaggcctggtgttcgaatatatgggcgggatggat

SEQ ID NO: 375334 - DNA, 203 bp, Zea mays
acagagacagagggttaccaagtatttcatcagaggaaaacaatattacttggcctaagggataagtataagttattttgcttggactgttaaacagccttctttaacaacattatcgttacagctaatttggagtccgagatctacagccacatgacaaaccctgctgactttggtttcctttgacacgaccatgagaccag

SEQ ID NO: 375335 - DNA, 154 bp, Zea mays
  unsure (1)..(154): unsure at all n locations
ttnatttttttttttttttttatcacacgattggcggcattgttttcactgcatgcggctttttatcgtaatgtactatcaacgatactgaaaatctccttggaaagatcaggagacactactgcttaagattacatgaacaccattgtatgtc

SEQ ID NO: 375336 - DNA, 250 bp, Zea mays
atggaaccaggagccaacactctggcaggtttttttttttttttgcatacattctttgatttgggaaaacgcaaaggaggttgaaggtgcaacataccacaaaacccaaacctggggcacggccatcccctgccctttttttacttggggggtccattgcacacagtacacagacgggcccccaacttttggggacacattttgcccaggtatacccacccccttctagagataagaggaataccaaaac

SEQ ID NO: 375337 - DNA, 234 bp, Zea mays
gaatggacattattatttattgtccagtgttgtacaacattaaaagcagggaaaggatgcaaaaacggacaaaggaaaacatactgtctgcataccaatgatacaacaagacgccataatacaattttcatgcacattacaaatgggaaagggctccaactcaaaggggctgagacgcgaagacaagcgctgacggggacgcccacgcggcagggcctacaccacaatccccag

SEQ ID NO: 375338 - DNA, 276 bp, Zea mays
gcatccaacatgaagcagaaatatataatcaaacaaacatattgattttacaggtaaaaactgaattcaagaccacaaaaaggcacatggaagatatacagattatttttttaaccgaaactcactatacatgtcagttcacaaggtactgattcagatatttcatccgccgaactatctagtacttcctgaacagggttcgaacacaaaggaagaaagatgtcttgaagagagttcggtacttcttccacccactaaagtatctgccaatggtaa

SEQ ID NO: 375339 - DNA, 188 bp, Zea mays
ttttgaattattttttttttttttacatttatttggggggcactaatacttggcctgtggggttcatcatagaaaagcattcctcgggaggaaaacgggaaatctacaaatcggtgcgacgcgaccgatagaatagaatgcacgcgcttaacaaaaaaaaaacagaaggaactgactggcgcttacag

SEQ ID NO: 375340 - DNA, 175 bp, Zea mays
acacaaaggtcaccttttggggtctttgaaacacaacacagggcttaaagacatacacgatcgagattcgtaagagtccagacgttgccgaacggaaagctaactttgaccgaggttaggaggatgctgaacacaaataaggcagagtagtagcacacatgttggctgacgcaca

SEQ ID NO: 375341 - DNA, 396 bp, Zea mays
ttcttttttttttttttttttttttttttttttttttgttttttttcggaaggagccattttattaaacgatttacaaagaaatacattggctcctattaaggagctgtttaaaagctagagccagagccatttttggggccggagccttacaaaacggggcctacgtactcgtaaatggcctgagatttaatttcgggatgtagagagggagggatcaatcatgagggaaccaaattaaagaatgattgagttgaaccaaaactggcaataatatacatacctcctcacactggatatgaatacgtagtggcaaaaaaaataatataggcttacatatacatacataaatttctaacacgggtttgcacagcaataacatctggagcaacaaaaa

SEQ ID NO: 375342 - DNA, 176 bp, Zea mays
ttcataattttttttttttttttttttttttttggggtttttttaaggtcccaagggattgtacatttcaacacaaaagattcaaccccttctttaaaaatgggccctttacagatgacatacccaagcggggaccattgccacaggggcaaaaaccttagaaaagaaagaaaaat

SEQ ID NO: 375343 - DNA, 398 bp, Zea mays
caattcacatcccacgaagaaatggtgcccatgcaaccataatacatgattcaaaacaactggaaaaaacaagtccagcaatttcttgtaataacagttaatcagccaacagaggagatacaaaggagatgagagtagcggcgacagtcggtattcatcgtctcaacatgaagcccttaacaaattcgttcatcacaagagttttcggctgtcttttagccatagttcaggcggaacatgtcattctgcacgaagaaggacccagctgccggcagcaaatggaatgcctacagagacagagtatcattatcatggaaacgcaaatacttggctggaggaggaacataaagaaccaacatagccaaagatgtgcacctggtgcgtaaaaggatgcacta

SEQ ID NO: 375344 - DNA, 385 bp, Zea mays
gatgttatcaaagatatgtagaaacttcaatgagaatcacaacaaattcgtaccatagaattgcattattcacgctaatcaacatgagcatacagaaataggaagctcttcagttaagatttcagcttgtagacaagtacactgaaaagaattgtatagcttagcactacgggccaatagctaaacactacacccccacttgtatgctcttgttcttcgttgcttgatacttctatgcaagatttttgtctttgtccatccctgttggtttcttctctacatggtttggcttgttgctcactgcactgctgtggtatccatctcgggatcgtcctctcatgaacaatcatctgctccaaacaatccaaggatcccagctcgcagc

SEQ ID NO: 375345 - DNA, 266 bp, Zea mays
gagatgaaacgcggtggtgttggcgtcattaataataatttttctacattccataaaaaactttacaaatatatatataaacaatatatgtatgtatacattaggggtaaaaaatgagatgtactgttaagttgtactatctggcgaacaatcgaaaaatgagctcaaccctccagagtccagacaaggatggagccagctgagtcagtgtatgcattttccgggcacccgccacgagaaaccctggcgcgttgccagcggcggcg

SEQ ID NO: 375346 - DNA, 365 bp, Zea mays
acacagagagatgtttcattgagggctcaaatattctgcagataagtaaatttggcaatataagctagagttcaaacgaatgaaaacccagccagaggggtacgcaagcatcactctaatactagtagtgctgagactaagaagcacaaacatactcaaacttgcctcaagccagaagcatactcctgacatctttcactacagctagaacagtcctcctcttagttcatctaatgatatgttagcagcactgtccccagatttaaccaattgaatcttgcctgcacatagaatagttatccaaacattaggctttcttcaacagagacatgaaaataaaaggtagatgtaacctaccatacaag

SEQ ID NO: 375347 - DNA, 377 bp, Zea mays
cgacgcgtgcatacagctttaaacggtcgaatatgccccaaaacagagaccgtagattcattaaacaccttacgactactaccactgctaatcttgcacattacatccttaataccgtcatgactttgttctcctactttttactggcacccaatactagtaccactagcagaaaggcagcaggagcaacacacaaaaaagaggccagggatagggccactcctggtctcctccactcgggactttttacaagcagctgacgaagcagagcacgtttcagcagcagcagtcggctgcagacctctccgggcccccagctccagctgcaaaaacaagtgcgttgtcaatcgaccgacgggaacgggacctgcgatgcc

SEQ ID NO: 375348 - DNA, 155 bp, Zea mays
aaaggcccgtggacaggggtttattattacacgtacaaaacaaggggtttatttttacaaacaagacgcgtggttgtacaaacataccggccgttaatttttacacacttaactttccccgttggggcatgcatgggaggtcgtttatttaggta

SEQ ID NO: 375349 - DNA, 389 bp, Zea mays
gaacaaaacgtgcatggtcagatttatattaccgtctaccaatatacacataatatttctgcatcctgcaaaggacactgaacatgagtaggtgcagatttcccaaaaataaccgtgcaccatcatcatcttggctaaccaattgctgcttcatgtggcatgatttctgtctgctccatctcttgtttctactgtactacccctgaatacttatattctagtaatgcacatcaattcttagatttttgcttatctatatctaatcacaacgaagaatcactagctacccctactgtgtttcatggcatctgcaggctacagcaagacagtacctgaaattcagctggcatgggaattccatttccaggatttactagctgggtttacca

SEQ ID NO: 375350 - DNA, 190 bp, Zea mays
ggaccacaagaacccaaacagacaacattttttatctattatctatcgggattaaattacacgggggttgaaaaaaacactatgcaagggcttttataaataagtcacgttacaatgggccggaccaacccttttataaaaaactacagtttttcggcattttgggcatttataccaataaacctttgtt

SEQ ID NO: 375351 - DNA, 487 bp, Zea mays
  unsure (1)..(487): unsure at all n locations
gactggttcatctccaccgccgacctagccaggtgaccaggtcttcgtcaggaccatagccagcgaagaacacccaagtacccaacagatgagttcgaagaaggttccgtaccacaagcatagggaggctgaggaggcgaggaagaagagggaggaagatgaagcagcacgtgtatatgcggaatttgttgagtccttcaaaggtgatagttcatctggggctaagtttatccgaggtggtgtgattgaccccaatgcaaagctgaagactgactcgnaaggtggaaaatccaaagatgggggggtctgttccaaagaaggggcagtaggtatgttccatccttcttgccaccatcatttgcaaaagagcctgagaaaaagaagggaaggggagaggccaaaggaaaaggaaaagggaaagccacgagtaatagatagattcttggaggaaatcaagcttgaacaagagcagcgagagaagcgccat

SEQ ID NO: 375352 - DNA, 198 bp, Zea mays
cccccaacccaggggaacaagcccctggcccccctttttttttttgggccatcgaatttttacatccacaaaaccccgacaaagccccaccttataaacaggggtggcccatctttctttggggggcaaacaaattatggggggggggctctgatgaaaaccttggcagccccccctagggggaaaacccggggctgc

SEQ ID NO: 375353 - DNA, 158 bp, Zea mays
atagcagtaaaacaattcaatctaaaaaatatacagtatgagcatgcttgtttctgtaaaaactcatgcactttgtaacataaattacacagatgagcatcattttttccctcaccccttctcgtatgctttagtctaaaatagtcgtaggtcataaa

SEQ ID NO: 375354 - DNA, 304 bp, Zea mays
aaaaaggggataattccactaagaatttgtaaaattagagaaacaaaaaccaaaagatgaaacagctaacccttcggcctagcagcacgagttagacaccgatgaagaaaaatggtagacaacaaaccaaaatttacatgctccaaacaggccccttttggcatgttggaaagcgaacgaatcaatacagaagctaaaaactgacctatacaacaggataataaggaatgcgaagtcaaaaagatcgtgatggggctgtgtaaatctggcttcggtccctcgacaacacgacatcaaaacaacc

SEQ ID NO: 375355 - DNA, 51 bp, Zea mays
aaagcggatgaacacggtgatttgttttaccgaggttcggttctaaagaac

SEQ ID NO: 375356 - DNA, 379 bp, Zea mays
gaacacaagttcaccaagcatttcataatatgagctcatacacaaacctttacaatcatgtgaatgggcaactatgaacagacttcaaaccacaatgtgttcatagtactaattgcatcatgtgcattgcgatgacgcacaaattattcgataatgaatttcctcgtacgaaaatggatgtttcatttcccatgtacgtgcatgcatgacccatctatctaagcaagataataaaaaggaaaaatatttggaacttggaaggacacacccaatgccaactttagaaacttataaccacacaagcttaggcccgagaatatactgagaacaccaacaccagttacatataagcagataacataattaaaatgctatctct

SEQ ID NO: 375357 - DNA, 329 bp, Zea mays
catccatataatcttgctggagagaaccaccagccccaatgtaagaaattaagaattgcagcggacaaaaactaaagatgaaccaatacaaaagtgatttaggtatgtatatcgcgacgatcttctcccaatataccggtccaatcaatgcctcaatctacttccaaaactcggttgcccctgaagatccagccagcagcatttccaatgaagggtaaagaagcttatagtaagtccggtggcgatcttcacacccatatgacaacatcaaaaccaaaaacaaggaatgaaccataagcaaacctcttcctgtaccagcaaggaccctt

SEQ ID NO: 375358 - DNA, 322 bp, Zea mays
aaagcaagaaaaatcatgatttccatagcaggcaaaatgatccccatgaaggaccctttccctttcaggggacgggatccattatccattttatacaagaacagccccattaacaaaattcccagcccttccatttagagaacacaacatcctaccaccttttattccattttgacccttcgccatctgatattctgttttacaaacgcaagtccagccccatacttgcttaattgggggacttggccccagtcaggcagggggcatttcaaagctcaacacaataatttggtcaggggagggtgcaattgggcaggcatgc

SEQ ID NO: 375359 - DNA, 350 bp, Zea mays
gatacagcaaaagaatgacctgtttcgataatttagccaaaaaatgaataatcagtgatacagcaaaagaatgatttttacattggtgagcagcaaaagcaacacagagctacgcctaattcctgttgactgaaaggaactttcagttttacatagagctagtcctagttctatgcttccaaaaaaaatgacaccaaccatttctggagacaatttacatccgtgcttgtgctttcaaggatctctcgtgcaaatcctggtaaactgtacaattcatatgtttgtatccttactaaaaaatgttaagaagttaaggtcaaacgctgcatgtgcagtgctccatgagcagt

SEQ ID NO: 375360 - DNA, 250 bp, Zea mays
agggttaccgacaatgaaattgatttgcaggtgcagatatattacaaacatatactgctactgtatacttatagctatgaaattctaactatctgttactagtatatatataacctttaatttgttgatgatggaatcaaaagaatggatcttttactaccaaggaggcgagaggccggctgagaaagaatggatatcagtggatgcagatgcccggtagcttccactggaactttcccgcgcgtcgctc

SEQ ID NO: 375361 - DNA, 404 bp, Zea mays
aggggcaaaagaaaaccaattaccaatatgtccggtgagctcaatcctaacaaagtgtccccaaaactccagaacaaaaaccaagctcaaatcaaccaaaaaaaaaaaaaagatcgtcaacaaaacagaatcagatcagcataatgaccttttagacgaaaggaagcctaatgagttgagaatccaaccaatgggcactcttgccttgcacttgaacggcagaccacaacggcttaccaccaaccaaccaattccctggaacaaaactgtggtgtggtctcctgtatcacgatgcaacaacaatactgcgtctcaatgctctactgaacctagctagatcatccatgcatcaccacaactgcaagaacatgttcatgaaacagagcagagcaagagatgagagg

SEQ ID NO: 375362 - DNA, 302 bp, Zea mays
cgaagatatctagtaaacaaatttccatcttcgtgcatggagctttgatcctttgttgctcctccattcccataaattgctccaaaatcggcatgagcccacatgaccttcacctcaatcgtcgtccatcgtctctgtgctccacacttgcacaacacaagccggccgacatggtttcatatacataatctcacgccccggtcagtccatgactcgacccaagacgctatccgttgacaatcactcatcgtcaattatataagaaggccgagcccaccggcacttaacaccatcaacagcag

SEQ ID NO: 375363 - DNA, 187 bp, Zea mays
gggcaaaaaactacccaggggggggcctaagaaacataaggttcgcctatttatttttcccacggcaagggtaaaaccgggggccccactgctgtaactggggtgggggggtccctatgcaagctttgtgaactttactggagaaacaagaacaatttttttcggcagaaactttgggtgaaaaccc

SEQ ID NO: 375364 - DNA, 168 bp, Zea mays
aaatgcaccgtgaggttggggggttcatatggggcttttaaatgtccatgggtgcaggtgcaacaacacagcattttttgggcccctttcctcctcctggatggagctggccttctccgggggcgccttcttggggacctccatggagtcgataagttcctggatcct

SEQ ID NO: 375365 - DNA, 107 bp, Zea mays
ggtaacctgcctggtgcggaatatatgtttaccgatggagatgctggtgggcgtgtagcccagctcaaatgtgctcctgggcccttcggttagggcaaatggtgcat

SEQ ID NO: 375366 - DNA, 106 bp, Zea mays
tgggccctaatgtacaattgcccaggggaatgcaggtaggacgtccaatattttttcccacagggacagggtcatttcccggacatgaggttcacgacaccttggt

SEQ ID NO: 375367 - DNA, 145 bp, Zea mays
gattctgattcagcccttgtgtcgagcacttggggaatatcacgctgctagttttgtcttcacccgattcttgagattttttgatgacgcacggaacgacgacaatctttgattaaagtcttcgaccgagcacttgataaacgat

SEQ ID NO: 375368 - DNA, 160 bp, Zea mays
ctgaagcatttggtcgggctgcagttagggccttctgagacatgtctgccatcaatttttcatcacctataaacaaactagatcagaaatatcaatctgaagggaaaaagatcatcaggaatgcgtgtctttataagatccaaaaacatgaacatgtttt

SEQ ID NO: 375369 - DNA, 143 bp, Zea mays
agctgccgcccaaatgacaacagtaagggcttgtttaggagcccgaaaaacgtaaaagattggagtgctatttaggagcccgaaaaacgtaaaagattggagggactaaaatctccttcttagggctagtttggaaactaaaa

SEQ ID NO: 375370 - DNA, 184 bp, Zea mays
caaagcacaaatttaacatcttaaaagcttaatacaaataaaccttgattgggtccatagcctgataaggtcagacttgcaggactgcatacatttattaggtggaggtacaatttacatgggggccttgcacaaccatagtattacgggttggggcaggcaaggctcattttttgccaaagaa

SEQ ID NO: 375371 - DNA, 228 bp, Zea mays
gggggaagcctaggtccttaatttgcccgggggaaattacaatttttaatgcggggtctcaaactccaaaatttaccccggatttcaaactcccaaaatggaacagctcaagatcatgttattggacgtttttgtaatttttaatggggggtccaaaactccaaaacattacacaacttgaaatcattttattggaaggccttttttggacaactgccattttttttg

SEQ ID NO: 375372 - DNA, 255 bp, Zea mays
ggaaaccaaaaacaggggtttttttggattatgctggggccaaaaaaaacccttagttgtaaaactggggaacgattttttttttttttaacatgcccggaaatttgggtccttatgggggtccaaacaaacaagggaaagggcgggggccccccaggggaattgggtcctggtgttccaacagggaaaacggggacggggggccaaaacaatgcccccaaaggttcttgggaatttcccgttttttcggggggg

SEQ ID NO: 375373 - DNA, 386 bp, Zea mays
attcctggcggtgcgcccggcgttgcggcgcctactccgatggcgagtcctcccacgccgtcccctttagctatccttccctccgctcctgctccgcttatccggagcgtgatcaggcgcaggcactggaggtgaccatcgacaccgcaccctgcgccgacccagccgcttccgtcccgatgtactcgtacggccccgccgtgctcggtgagaccgggcttgtgctgagtgcggacgaggaggaggcctgtgatagagggctgcatctcgggttaggattccgggatggaggacacgatgagatggagctcaaattgaaagagctgacagaggacagatgtctccttcaagacgcccaagcggaagcaggagcagagggcgaaggc

SEQ ID NO: 375374 - DNA, 279 bp, Zea mays
gtgaacaaaaactctgcaagcacattttgatacaaccttttgggttccttctgttttcaaacaggacaggagattatgttaactgcctcaactagggtacaagaccaaaactggaaccatgatgaatgggggtttttacatgttgaatggattaatcgaacatgcagccaatcacaggttggatactggggggatccccagcagggtgaaacactgtcgaatgacaacagcagtcgcctggcaaagcaacaaccggtttgttttctccggggacccaac

SEQ ID NO: 375375 - DNA, 212 bp, Zea mays
ggcacaaacagaaggggaatggactgatatttacaagggtccatgcaacaaatatttgcagttttgcagcctaccctggggctagcgcaagaatgaacaacaaaaaactggtggtcagccaggagctgccccagagaatgaaccccaaacaactggtggtcagccaggagctgacccaaacgggacaaaaacctgcaccaacacacccattt

SEQ ID NO: 375376 - DNA, 232 bp, Zea mays
gggtatccccccatcactgggggaaggacccacgggttgaactaaaaaaaacagcccacaggtttggccggacaaggggggccataaacttaaacttacctgggggagataccccacccttctttggagctaaacaagaaaatcatggcccccataaagaaaagggaaaaacccctgggcaacaccatgggaacggggctaatccgggtggcacccccaaaaccaacagggg

SEQ ID NO: 375377 - DNA, 182 bp, Zea mays
gcgggggactaaaaaaatacagcccctccaaacgggacctaattttttgaagttaaaagggtttatgacctaagttgtttttaataaagggaaacagtcctaaacccccttttttaattggctggccaaaattgaacagaaatctcctcctatccttaggcaaccgagggtctaagggggct

SEQ ID NO: 375378 - DNA, 390 bp, Zea mays
  unsure (1)..(390): unsure at all n locations
aggggataatgatgattagctgaacgaaattaaacagggccttcgtcgaactcgatcaacactttgtatctatctcccagtctaaactcaccgtacatctttctcagtctctgaacatactgaaacaaacactatacttaatccactagaacactctgtatatatacgaaggatggcagtctataagctagccacccagctgaacaaaacacccagctagcaggccgggaaacacatgttgagcttttataagatacagtaagggcaccaatccatgcacgatacgngtcggtcctcctcgtagctagcacagctggccgtgcgtcgtcgacctccaagctcctcggagtcatctggaagaaatggtcctaggcgtactggaagctgacg

SEQ ID NO: 375379 - DNA, 301 bp, Zea mays
  unsure (1)..(301): unsure at all n locations
ggacagagccactctgagactcgtgcgaatgaacggccatgcgtagctgtccacattgtataggtaacgtgacgcctttcttcgaccaacccaaccattttcacagaccgagtttttactagcaaaagctgcaagtataaaatgtaaaaaaaattctccggctccagctgtggtgtctataaccatgctgcctaaacacttatcctctactctgngatctgttctagaaatagggcttcctgcttgcttgttaagccaagatcactgaacgatacgtccccctcactgctcgtaaacgtgc

SEQ ID NO: 375380 - DNA, 329 bp, Zea mays
aatgtgatgtattattttgcatatgataaattttacaggggggccacattacgtcattataggtgggtaacatccaaaaaggcactgcatttttacctacctgcaggtatcatatcccagctaattaatgacaaacttggcatgccaacagcttatccgattggacatggaactgttctcagatgtcaagcatgtttgttactctagtgtgaagacctgaatgccatgcgcaatggtggactgatcttggccaaggcaagcggggatccagggaagatccaaaggccatcgccacatatcaacccagatgcaactgctggcaccattaa

SEQ ID NO: 375381 - DNA, 195 bp, Zea mays
gggcgacaaaccccaaattgtttaaaaaccggaaaatccaccccatttaaaagggccttttattctttggacgggtgcttaaattacaacgctttcaaaattcaaatacatacaagggggccagtccaagccaaatttttaacttttagtttttccagccccgcccaaaaaaccaattaagtttgacaacccatt

SEQ ID NO: 375382 - DNA, 286 bp, Zea mays
ggccaaatcaaagggcaaaatctttattgatacctcttcctccttttggccggggtaggccaggaggagtgcgaggacagcaccttatccgagcagcacaggctcactgccgctatgggcgggctggctactttttttttggacgttgcctatcagcagctggtgcatcagtctgtagcagtccagttattagctcagctgtaaatacaagggaaatgcatgacgaccgacagagcaacatttgaagcggacaaaattttgggccacaatagctagctgctgggaa

SEQ ID NO: 375383 - DNA, 208 bp, Zea mays
gcatctccatttattcatattggtaagctcagtctaagtcaataaatggcaatgtactgtaccagcaaatactttacggagtcttgagtgtctgacaaacattttcaacagaaatcacattgggagggagatagtaaccccaacattaatcagcgttgtccattaactggcattattattattattatccatgttgcttggctgcgtc

SEQ ID NO: 375384 - DNA, 183 bp, Zea mays
aaaaaaaagagccccatcctttattatcaagttttatataacattcaggaaccccatccttttttttttatcaaggtttatttaacattcaaagccccccgggtttgcaaatccagacataacaaagggttacttttttcataccaattttacaacaaccccccaatacattttttttttggg

SEQ ID NO: 375385 - DNA, 184 bp, Zea mays
aataaaaaaggcccctccctttgttttcaagtattctatgaccttcaggaaccccatcctttttataatttgaagtggaaattgaaatttgaagggaaaccgctcatcataaacattcaaatcacagggggtgatggtttaaaaccacaacagtaagtttaaagctcctcaggatggcaccata

SEQ ID NO: 375386 - DNA, 208 bp, Zea mays
gagacacacataatatcatatgcaacacagaatatcacatacaatacaaatttcaaacacattggtatatattcatatcacaaattggcaggccaaatacataagttcacaagaattggagattggaccaaaatgtatgaagggctaattagctacatttgagcaaaagatttcttatcatgaataactgcttgggcactatgcttaa

SEQ ID NO: 375387 - DNA, 313 bp, Zea mays
  unsure (1)..(313): unsure at all n locations
ttttatatttttttccncccccccccccccattgtgggtttttttttttttttttggcaaggcagccaattcatattattccgggacattaaaccaaacaaacagttttgcaaagccaccgtaacagaataccagtcaaatataggtcattctaaacaacaacgctgcaacaggggcaggtcttttttccctggaagaagcagcaggcttggagcacgaaaaccagcatccagccattatttatcaacttgagaatcgaaacatagcatgcgggcataacatctagagggggggcttaattaaaaacagcggc

SEQ ID NO: 375388 - DNA, 169 bp, Zea mays
cccccttggactaaggccattcataaagttataagggggttcacgatctgacaagcatttgtcctgtcccacaatgggaaaggcccagttaataggtggccaagtaatagttttttagcaaattttagctttgaactttttttaacccgctaacttttccttttttagc

SEQ ID NO: 375389 - DNA, 228 bp, Zea mays
ggggccaaaaaaaccatttccttcccattttcaaggggaaaaaacgggccccggggttccggggaccctttcttccaaaggggaataatttcccagggtcaaacccttttgtaacccccaaaggggccccccctttttttgggcccaaaacagaacagggtttacccggtgggcccccccctggggggaggggcccccctgttttgccccaggggggggaaccccccc

SEQ ID NO: 375390 - DNA, 414 bp, Zea mays
aaacacaagaaaaactctagttgctttcccaaatgttggtacaattaacttgtaaacataatcgtctcacatttttcactcactggtcgctatccacttgattagttacccacatcattccatcctgaatcatcacgtgcgttgattttggctgagcgtctgtttggttgcctggtgaagcgcaacctgcaggccaccgccaaggccttcatcgctgagggcaaggtcgccaccgaccccgtcgccatcgacgcccccggcggcttcctcttcgaggtggtggtccatcttctgggacatcttccattcgtccaccgccaaagcctcgtccacatccaccgccgccgccttcatcgaccacaccgccaagcaacagcagcccatcggcgccgggaccggggcgcctcctcctca

SEQ ID NO: 375391 - DNA, 344 bp, Zea mays
  unsure (1)..(344): unsure at all n locations
cnnnnnnnnncngggggnnttttntggtgtgttggtgtttttttttttttttttgggggttcccatactaggcctggaaggggaatttctgaaaaaaataaccccttggggtcccaagaatcacaagtaacttcgattttgccaagttttttttttttcccatacagcagacggaagcttttggggcctttgcataccttttttaaatttgtttacattaagtaatgttccaaaagacatggtgggtagtcactttttttaaaacattcctaagattttattttcccccacaaagaggtttgcatgaaaacttttttcaatgttttattggggaaaatgctttt

SEQ ID NO: 375392 - DNA, 347 bp, Zea mays
aggagctatattttattatacttattggagttgctctaacgcctgtcccagcctcccaggctatacatcataatctatagactgcctcatgaattccggttaaaccttaagtttagacgttctttttctcgtcgttacagctaacgtgaccaaaactatgatcgtggagatccctagaacaaccaagaccaccatccaaggagggcaaatcccgacgctgcacattacgccgatccaaccatcttatcgtgtttcctcctctctggcatgtgcgcatgcatcaaacacttttgttctccaaactgtctgtgctgccccaccatggattgctgagcttttagcatcag

SEQ ID NO: 375393 - DNA, 174 bp, Zea mays
ctggaagaaatgtgcaaggataattgccgcggcaaaatcttttatgatactttcaagccaaatagagcttccctttcgacaaggggataacccgatacccatacaacatagtgccccggggggggccaagagatatgccccaccccttgacacgctaaaactgggtcttaaaac

SEQ ID NO: 375394 - DNA, 332 bp, Zea mays
ggaaaattaggtagtaaactaaacaggtctagtgtctccttcccgccccacgaagcggcgctggtacactagatagcagtccaccgggatgtactattttacatgtaccaaatgttaaactcgagtatctgaacaaattttcttttgagttccaccatttctcacacatatactgatatcaacagttttctgtgcccttttatgcacaaattattcacacacaaattcctattccacgatttttggacttgctgctgtcatattgaaatccagagatccaatttccaacatgcctgaatttgtagtaggcactctctatcaccatatgcata

SEQ ID NO: 375395 - DNA, 330 bp, Zea mays
agttcaagtattaccatatcacaaaccaggaatagcttgaaggtaacaaattcttacacaagttttctagctcaaaaagcataagcctgactgtctgagaaatgagcaaatacagtttgttgtctcaaactaaaaatataacagttacaatcgaatcgtgcggcccaaatttgatcagtatttctcagttcaggggggactgacttcctctaggtgaaccacggcgctcgtcatcttcgttggtgcccttggggcttgggctccgatcgttgcccttggggcttgggctcctgatcgtccctcaggctcaggctgcgcccattggccaca

SEQ ID NO: 375396 - DNA, 312 bp, Zea mays
ttttatattttttttttttttttttttttttttttttttttttttttttttttttttttttttttttttttttttttttttttttttttttttttgggggggtaaaaacaaaccccaaaggggtgtcttgattggccctctatttaaaaccaaaccggggggcatttttttttaaagtaattgggggcccaatacatttacccatgcctaatttgggaaaaatttgatgccccacgggcattatcttcccacgggcaattttttgtttttgggggtttttctggtgcccttgggcttggttccggccttttt

SEQ ID NO: 375397 - DNA, 344 bp, Zea mays
agcggaaaggtacttagttacatcaagatgtccgagacatccacagagtctattacacaaccattgttcaacataattatcaaagtgcggaaatatgaaacgtagatgctaagcctacacatgcagctgactaggggtttgccactaagaaagaactaaaacttgtcatattcctagaactcctcgaagtcatccatgttgccagcttctcctcctgagcactgagagcaaaggggacaaccttaccaggttgttgctcagagggatcttcggcaacacactcaggaacctcagactgctcgttgtctactgccacgtcttgagcattctggattgctttggac

SEQ ID NO: 375398 - DNA, 464 bp, Zea mays
gaagactaggacatactagttgtgaaataaaaactgccagaatatgggcacaaaaaatacaaatttttagacacgaagttaaatgtagcagctaatttgagaattcaatcttaaagccatttttaccttctacttctagtcaaaatagcagcagttcacttccagtggctttagcaatacatttctctataaataattttacttcaggatcaccgatcttatccagtgaacctggcttttcaccctttgtatagtttttactatcttatcttgtagtatatttcctccttggacacccggtgcctgcaccgtatcttgacaggccctctgtctgatccaaatttctattaattctatgcatatactgtcaactagaaagctcacatacctgtaagataacataagataaacattgcagtgttcacacgaaatggtaacagaatttaaaaactagagatggcaac

SEQ ID NO: 375399 - DNA, 219 bp, Zea mays
agacaaaagcggcagcaacaacttgttgataaggaagacaaaacaagctcctgccattcttcaattcagcgagaagatttcacacttcttgctaataacgggtcagattacatgagggtctggagaaggagggaaaacacagctacagttgttcttcactcactagacacgagtaatacaacattctggcagggaagccccaaatacctgggctagcgc

SEQ ID NO: 375400 - DNA, 444 bp, Zea mays
aactcacaacacaaaagatgatgttggtttctaatattgcaggtcgtaatttgtattttcctttgaccctgaagatgcatttaacatgctatttttaattatgctaatcaataatcatatctaaacgtcgtagtagtctattcggatgtacccgttcctcctggacagagctgcacatggagggcaggcattaatcatcaatacttccaggtctagaatccagatcccaccctaaaatagtgaggcctgaccttgcactggtggccccgacagccaccactcacacgggcgccactgcaccaaccgctgttgcgcccatatgaataatgaatgggtctgcaccagttgattgtatcgtagtagagcataaccagctagcggaataggaatactaaggacactgttttgatttcctaagcaaaatcacaaagttggacatttact

SEQ ID NO: 375401 - DNA, 224 bp, Zea mays
gggggcaacaggcatttttttttaaacagaattaagcgctacgaaactcgtagggaagggaatgcgggggtctagcaaaaaaaggcccctggggcaccaaaggcctaatttgaaaacttaaaccccactgggaggggcccaaccaggaaagggggaaacaatgggcgaccaaacacatactgggcgatcactccaggtgggggcaaatgccgggcccatacaaa

SEQ ID NO: 375402 - DNA, 407 bp, Zea mays
gggcgacacaaaacttgtttatacaaacataataccgtaaacatatatttgcaaaacttgggaactaaaacatgaaaccaacactatgtatgagttatttagacatgatacattgatttacttgtacaaatcaatcggcgtttacacaacaatcaacatagaaaaaccaggggaggggtttgtccgcattattgcacttctgtaaggagagtgcctggggacgcaacactgagcgtgccaataaaccatgattaagaacaaatgctttgccaacgctcgggcaaacagcacgaagaaacagccaccaggctttgtttcacactaccctatctttgtatcaattgcagaggaaagctttgtggggccgtgacacccaaacctggacataacccatagatcaaatcttt

SEQ ID NO: 375403 - DNA, 170 bp, Zea mays
ccctcttggactaaggccattcataaagtaaaaggggggttcacaatctgacaagcatttgtcctgccccaaaaggggaaaggcacacttaatagggacccaagtaatagttatttagcaaaaattagctttgaactattataaaccagctaactattactttttaagct

SEQ ID NO: 375404 - DNA, 260 bp, Zea mays
gcaaccaaaccttgcagctcactggctgaaaaatgtacattttttctatcaacaatttgggtcaaaaacaatgaaattgccatcacaagttttttgtatccaaatcaccgttcatgtttctactagtaaaaaaacagccaacctttgaaataaaaagaacgagaagaatacggagtgattttgagaggagggtcatagcaagatttttttatcgctaactaaaaaattaatatgtattgattcagggaattataaatcag

SEQ ID NO: 375405 - DNA, 330 bp, Zea mays
caacaggttctgtatttcaaggaattgaagttccaaaacactaaccgcaatacccatgttttaccattcaataaaaaaacaaatggtcatgtatacattgttcagtaaacttcgtgagaatgagtttaaaatagtaacctccttagacgtattgtccaacgactttgatgaccccagcgcatggacgctccagtctccaaacatcctccccacgacatcgatattttcaagctctagctccacagatttcttttttcggcgaagtaatccgtctcgggtttgggctagggcggtgtcttgacgtgctccccccgcccatgaattgttggc

SEQ ID NO: 375406 - DNA, 380 bp, Zea mays
aaaagaaatgccatcatatcaaggctggagaagaacaaggatgcatgtttggcagctctggggcagaacaaaaaggaaaacgcaagaccttacgcgcatattatctcaaattgtggcaggtgtccacagaccttctaatgtaaacaccataacatacgtaataacgtccaatcgcctgtacactttacaagtcccgggcccaagccaatgaactgcctacccaaaactgctttccaggagcctagtgcccgagatcagggggaagcaggccatgcatcgacccgctacctattcggtttactgagatcaccgcctggcctggtcatctatgtgccttggtatacggccacaggaacctcaaaatatcattaccaaaatct

SEQ ID NO: 375407 - DNA, 332 bp, Zea mays
atagtcttgattctcagatgttcatgcacatacatatacatctccctgacgatatttcctaaacgccaacgcaatcataactccttacatacagctgacagctctacgcgagcgcacgcaaaccactagttcttcttttcaagtagaaaaagagctggggatccgcgaaaacagcagggcaaggcagagctcatagccttccccctctcatacgcccttagagccagggaggtcgacccactgaagctggagctctatttccccgctctctacgttcctcagccgtacaaccatgtcttgcttcaccttcccctccgatatatatatcgagc

SEQ ID NO: 375408 - DNA, 312 bp, Zea mays
aatgcattaaattccatgccctaaattagagacaattatgggtacagggtaaactacaatttgcaaagtgaaggatacaaacaggcttcagtcgggtcaatatctgaagctcaagatagacattacaactaagtcatttaaaactaaacattgctacatgctgctgctactactactactacaaatttctgcagattcttacatagacataaaagcaataaatcgggcctaactgcagctctacaacctacaaagctagaaacatactatgtcattttacctgatcgttacaaacttatttgtgccatgctt

SEQ ID NO: 375409 - DNA, 278 bp, Zea mays
cgtcgtgaactttcaggccagtggtcagaattcagaatctccaaccatacaggcaccatctgtcttgaaccttctgggagttgtcaatttttcgcgctcaccctagaaaacctctttaataatttgaatgtcgagaaccgatgcaccgctgactgtgctacagctttcctgactgctctgctctgaagtcctgcgcaggatgtcgaagagtgaaacgcctgaactgaacttggccttcgtgggttgggaggagttggcttggtccgtatctgaattac

SEQ ID NO: 375410 - DNA, 319 bp, Zea mays
ccaaaaccccaggagagcggcgtttcaattttttaaaaaaaagggggggggcagggaaacctggtacaactccccccgaccccacaaacccttggttttggggggagggggggaattaccctcacccccaccaaaagacttttccccccgggcccagggggccccaaattaaaaaaccccccctgaaattccgggaccaaaggggggttaaaaaaatcttgggccccacccctatcccaaaaatgacccccccccttgccccaattgatgcccatgctttgactaggctgccccccattaaaaccccagtttttggggg

SEQ ID NO: 375411 - DNA, 401 bp, Zea mays
actgcactgaacaagctggcaagctcactttcaacacggagaggcacgaataatctgttaagacagtgtacttcccaaccttagcaatcctcacctaagataatcaccgttagttgcatggaactaacagtgccatgaagggtgtcaaatatagcagctcttgcaacccattcgtctaaatttggcaatcctggaaatcctaaaaccgcatgaagtagatacagtcatcggctagcagcaagaaatatcgttgccctctgtgcgtcagtggagtgattagactgcaaaggtggccgtggacgagctccagcgagatacttgcttgctgccttaggaaaggagctttctctgcttccccaccaaccatgtatctgctcccttgccatccacccgagcacgtc

SEQ ID NO: 375412 - DNA, 266 bp, Zea mays
agggaaaaagaccaataaagcaaggggttgtcatattacatcaaagaggggccaaatggcttcaaaggttttttatttttcccctccaaattttacaaattacaaaattcatcaaaggttcattctttaagcataactttggcataaattgggtcgcaaattttccagactatttcatctggagctttccttgctttttccggggccacaactttggtttgaagggcaacgtgtccagctttggcatgcatatgtttgactttaat

SEQ ID NO: 375413 - DNA, 359 bp, Zea mays
gtatatgaaattaatcctccttataatattattatgtaaagaatgctgattaggttagtctcaagaatatgaatctatacaaatataataatgagaaactaatgtagggggaaaacaaatgccaaacaccagatcagatttgaatcaatgtaatcctatttttatgtagagatcatcaatcttctagattggtccgccgacatcgcctctcgaagtaggccatcctttgcaccacttggggtcaacctagaccctggctgtcgcatctcgatcattagcgtactccggcgggctatgtgagttttggccactccctcctccgccaccaggaaggtggccactccctccagaaccatgga

SEQ ID NO: 375414 - DNA, 200 bp, Zea mays
gccgcccttttttttttttttttttttttaagacagaaaaccagttctagacgcaatatccattgatcgcagctacaagatcctggacggagacccatccataggttttttccgctggccatttgagacaggcctatggtcacggtgtacccacctgcttaaaggcactactgtggctcctaaaaccggctatacccccg

SEQ ID NO: 375415 - DNA, 214 bp, Zea mays
acaccaccagttgtgccggcaatcataatgcaacaagataatgtactcacaacaccaagatatatcagacataaataagaggcaacctgatctcacactatggcatgcgaagaataatccgttgctgatacatcaacatgcaggctcataagattaccggcttccaggcttggctattatctacatggcgtgcacactggtctttactccagcc

SEQ ID NO: 375416 - DNA, 403 bp, Zea mays
ttttttttttttttttttttttttttttttttttgttgttttttttttttttttggtgttttttttttttttttttttttttggggaaacgaagcgctaatgggcccccccaggcaggggcaaaaaagacccgggacccattttaacaacccacccaacccagggcgaggggggcagcccccctttaacgtgaaggggggaaacacggaacaacaaacaccatcggggggggggggggcccccggtcccatttaaacaccaggggggcccccccccgacgggaagcccttttggggaaaacggaacccacaaaaatcgggcgccgatagagggggcaccggctcggcttgggagaaccaaccaccagggggggaaacgggggggggggggaggggacggtttt

SEQ ID NO: 375417 - DNA, 455 bp, Zea mays
gctgttgcaccaaacatcatttggattcaaaattgattgcttcaagcctacaacagagtatgctattcctgaacgacaagctgcatacttgcatttagatgaaaaaaaaaatacttccatgatacatttgaaacggatggctcctgtatggagtgtcaaaaaacttctctatgtcaaatcctatcatactatcaacattcaacaactcttgctaccttttaacacactcaatctcgataatcagatcttgaaccccagcttcttgaaatatccgtgaagctttatttcttatggaagacttgtcagcttctgctgatacatgtaactgaaaagtacctacagtgtcagtgttagttaagttccatacatgaacattgttgactccaggacgtcctcgatcttcataacatcatccaatgctacagccaaatccttttcatgatttcttgggactc

SEQ ID NO: 375418 - DNA, 384 bp, Zea mays
acaaaaaatctatttctcacatcgcgtttgctatggcatggaatggaaccatatttttatagcactacctgtcatttacaatccactatggatctggatggatgctctcatgctcaagccaaatgatgaagccaccgggggggccctcatcctccccgtcccagccatctaccatttttacatgcatgacaacgaccactcactcacctccagccaccattagggccgcggccatggcccacgcctaccacccgcgggaccagttttaatttcaatctaagacaccaataccagaactgcccttcgcttccagcctcacgttgccacgctggacccacgagcggcgtccggcgtccgacgtggagaggttggtggtgccgcggc

SEQ ID NO: 375419 - DNA, 300 bp, Zea mays
  unsure (1)..(300): unsure at all n locations
gacacctgagacttcataacatttcggagaaaagagccacttgatctttacaacgcaaatttatatatattaccacgggtacaacgtgcatctccgttaaagcatacacaggacagaggaaacatagtagtggaatctccaagcacaaagctacgtctagctcgtagatcagagaaaaaaaaggtagctatggcaataaacacaagaactgaacacaatatatnggtggtgctgagaagctccagacttcaatcaccatgtaaagcatttgacggggcctgactttattagtagtaccta

SEQ ID NO: 375420 - DNA, 227 bp, Zea mays
aaacccccggagaatgaatatttgcactattttttttttttgctacataatgggtgcccctaccatgtcatgttttccaatcggaggcatgcccccaaaaaggcccggacggcagtgacagatgtctagagaggcaggggcacacatataaacctaactgtgggtgcccttggcagatgaaccacatcaggccctcgggaatttataccgccgcttgaactggatcg

SEQ ID NO: 375421 - DNA, 194 bp, Zea mays
aggccggatgcctgtttccaaaggccccataaaaaaaataccttcttgttttaggaaaagcttggggtacaacaaccgcccacactttgtttgctggagggcttttttttaatcacaaatccccaaagaagagccaggatcttattccctttgaaaaaaaaagaatccccaacaaaacaaagaattaaccgggg

SEQ ID NO: 375422 - DNA, 319 bp, Zea mays
ggcggacaatacacagtagtattgggctataggcctctagctctagaccaatcatcaacatcattgactagttgtactgtatatactgcacgaataatccttctgatgaactgtagctacacacaagacagccctcacgacgcaccagccttaactgacctactcgctccttacactagctaatagcactagcacagagacccgaccttggtaccagctggtgctggatatgctcaccttcacttcacctccacacaccttgcctcgcttgccccaccccaaacacaacaaaagcacacacatgacacatgcatggttt

SEQ ID NO: 375423 - DNA, 167 bp, Zea mays
cctgggggaacaaaggcccctttataaagtccagctccaagctgttggggggggggcccactggggctgggggcagtctcaacaacagcaagggactggggcttaaaacccgccgccgccgttaaaccggagccgatcccttgaagcagccctaaatataacatttt

SEQ ID NO: 375424 - DNA, 263 bp, Zea mays
gggggtccattcatcccaggaaaaattgaagccccaatgggaaaagacgaaaagggtttggagctgggcctccggatcgagaccaagggaaggcaaacgggccgcctgaaacttttactaggggggtaaccttttttttaaaaggggccgggtcaacttacatccccggtaaaaacaaagggggcgaccaacctgggaacccggtttaacccagggatgaccacctaaaatttttaaaggggggggttgactaaaaacagttt

SEQ ID NO: 375425 - DNA, 359 bp, Zea mays
aattctcaatttgttctcatgtcatttctcaggattttgttaagaggcaaacaagagaaccacattttacagtgaggtactgagcatatatcaaacagcaagtcaacacaaaatactacagcattttccagcaaattgagaagtctctagcacctggacttgtacggttgtaccttataaactctcagggatcattcatatatcaccattctggactgagtttttaaggagaatatctctgcttttatggaaagcaaatgtttacagagttcaacagattggggacacaagttcaccaaacaagcacaaaagggatcgactaaaagacattatcctattgcagatccagcagtcatatt

SEQ ID NO: 375426 - DNA, 256 bp, Zea mays
agcccaccatttcaatatttgactcgaatccgcgcgggtgggaatgattttttgatccaaacaatttgtcgagcgcttggcaggttctatacgaacttcacgcacatttttattcgacgcttaacaagttttttcataaccgggtaggacccctttttttttggatttccccggcatacaccacatgacaaacttttaacaccggtcaaaagtaattcgagtaacccggggaaaccaaacttaacttacagccggg

SEQ ID NO: 375427 - DNA, 335 bp, Zea mays
ggcaaaaataacttgggctactaaaaacaaagtttccacatcctcacaaatactgtaacttccttagcaaatgatcgaaggaacggggtatgactcgcttggtattgcataacaaggggtttcacacaaagggaatactcctgcgtgtgatacagttcaaacaacccaattgcttcttcattggctggtctgtattacttctactgcaagggtgaaaaaggtcgcgcgcacattatttattctgtattacttctactgcaagtgtaagcgtcaggactcaggccttgacgttgaagtaaaccgtgtagaattcgtccctcaaactgtacaatggc

SEQ ID NO: 375428 - DNA, 399 bp, Zea mays
agcagtgcctgtagagcgttcgcccttttttttttttttttttttttttttttattaatgtttttattgggaacaaggttgattctcgcatttaaaaacccaaaaccatacggaaaggcctagtagaaataccggtggtcaagcaaaacaatctatgcatttaagtatcagctctaaaacgcacaaccaatcaaaccaagcaagttggacaacaagtaatgtgacaaaccaggggatacgacacagaacgctcgcacagggagccacaacattcaaaggtagctgctaaccccgagaagactcaggtccgatgaaaataaacgttgcaggcaaatctgccacacatatctcgagaaatgacgggggcataacttgggactagataacaatgaggaactt

SEQ ID NO: 375429 - DNA, 124 bp, Zea mays
agaagatgcaacatatcatatatatattatttatattcaacccggtggctaatttgcaccgccgccgccgctggctttgtacactatattcatgatcctaatctagaattgccggacgcgtggg

SEQ ID NO: 375430 - DNA, 422 bp, Zea mays
tttccgcccttttttttttttttttttttttgtttttttttttgttttttttttttataaaataacagcagccggcgcagtaatattattattaataagttattctcagggcgaaaattttgtgatctgcccggaagttaacagaagtcagcaaagactcaaacaaaacgcctatcagctggtccgtacttgacagcaacccaaacgccgcatgatcagttcatcttttgggcgcacacgggccgggcgcgcccaatctccctgtatacatgcctgcctgcactacaaccacttttttggacagactcaagaatccaccgatgcatgctcaagccgcgacaacgctatctctctacactctcatccgatcttccgcaaacgcagcctgccttagcctcacacgcatttcaggctgtagccat

SEQ ID NO: 375431 - DNA, 199 bp, Zea mays
aaaaaaaaaagatggatctttttagctgggccccccctggcataccacaaaagagccgggggggtgatgaatcccctcgggagctaaccccccattggtttcaagcccccgggacccattttattcaggggggggtacaatttaccctctggtgggggccccaaggccgcccgatcgaaatttaacaatttttgggggg

SEQ ID NO: 375432 - DNA, 260 bp, Zea mays
ttttcgccctttttttttttttgtgttctttttgttttttttttgttttttttttttggggggggaaccgggaatattgggggcaaaatcgaccgacgtgtgtgcgggaaaatatttctttgtttccattggacagatgaaagaatccaccatggacacaggtgactaccctactagaatcggcagccgcgtggaacactttaaacgtacagctcccggcaccacaaaacactgattacgaccagggaaatctaaaccaa

SEQ ID NO: 375433 - DNA, 263 bp, Zea mays
acatccaaccaaacacacttttactcccaaatactagagttaagcttcatacatcattctccattggccattttcataaaacaaaggcactcaaccctggcgacaaccaaagcattttagaaacggacatagatttttttttcctcccaggacacgttcagatgttctctttctcctgctgcacacgtacccccatgcgcatacaacaacggtacatgcacatggaatggaaacatatatatgcccctatagatgcaaaaaca

SEQ ID NO: 375434 - DNA, 248 bp, Zea mays
ttttttttttttttttttttttttttttttttttttttttttttttttttttttttttttttttttttttttttttttggggggacatggaaaactttggcccattcaacacttgagacctaatagaggaaccaaacaaatcccgggcaataaaaggttaaaaaaccaaaacttttttttaagggggcccgagacatcaagacaaatttcgtaaaaaggagcaaaaaaaagggctgggtgaacccaac

SEQ ID NO: 375435 - DNA, 417 bp, Zea mays
ttttcgccctttttttttttttttttttttttttttttttttggggggactctgggaagtctttccagtattttttttgtttccattttattctttataattattttaaaaagaatatgactcccacgtataaacaggaaagagtttcttctgtgataaaagtttgacctatatgaaacattcatgtttattctatcaaacagtctgcagacttttcaaactcgagatgatgtgtgtaattctgactgaccactaccgaggctccgttccagggttccacccttctcccgtgaccttcaatcagagcttggactcgatggttcttccatgggaacgtctggcaggtaggtccaaatcttcccactgtgggtcatcaattctggagaaatattctacaacagcttcgtcatgcacttg

SEQ ID NO: 375436 - DNA, 371 bp, Zea mays
ctgttctgagcttcaattccacatggggagcacggcacctgtctagtgggggaaaagcacatggccggagctagctagccacgtttatataaacaaaacgacgagagctcatcgacccacaccggtctccctagaggcctagaccctacgatgactcctcggggatgctggccagcgccggccgccacgaggcaccggcggccacgcggcggcgggcctccatcttcctcatctcggccacgatctgcgcggcggtagtagtgtgcttctggccgccgccgccgacggtcagcgacagcagccgcgcggcctcctccttggtcaggaccaccttcacgcgcacgacgccctgcttcccggccttcttaccg

SEQ ID NO: 375437 - DNA, 159 bp, Zea mays
gacaaaataaatatgcttcggtttaagccggtgcaccctggacaagctgcaaaaatggggcttgcatttgaaccagcaactgtaaacctgagcgtgcagacacataactgacctttttagcaaacaaggagactgtggggggtcagatttggaacaggc

SEQ ID NO: 375438 - DNA, 453 bp, Zea mays
ttcacgcgtccgtgcaaggtcagcagcttagtgcctgctttacctttgagattgatttgtgtatcgactgaaattgatttgtttgtatcaccattcttggaaggaagagttcgcaacatcttgatttgattgtctctgcaggggtcttctccttaatggttctgaagcattgttgcttttagtgaaacactaatttgctttctgtttcagggaacctagaggatttgggttcatccaatactttgatcctgaggatgcttctgatgcaaagtactatatggatgggaagatgctgcttggaagggaaattgctgttgtttttgcagaggaaaacaggaagaagccttctgacatgagggccagggaaaaaataagtggcagaggcccgttcttatgatgggaggttgcgctcaaggtcacctgtgttgaacggttctcctaggggtagatcac

SEQ ID NO: 375439 - DNA, 489 bp, Zea mays
tcttgactctgggttgccgaggtccgctttcgtaactacaggaggtaggcaaaggagacggcgacgacgaagaacatcttatagcaacggaaaaaagttagcacattccaaaaacttcaaagactgctgtgtacgacatcctatattaccgactgcttctgtttgaattgaacggcatcttcagaatctcggcgacgctaatttctaactcatatgggagaggtctatttctagaatttttgtttttctttaatagatttgccacctacattggcattttttcccactgcaatcgattataaactacagttttgcaacctttcagtgacatgaacatctaaccatattcaagtttgccctcatctcaatatccagatatctccacctcatcgactcaatagttaaccatattcaagtttgcccctttgaaaccatctgcttggattttatcgattccattacctaaaaatatggtacaatttcagtacg

SEQ ID NO: 375440 - DNA, 365 bp, Zea mays
ttcatgcgtgcggggacgcctccccactttcccctcccccggatccgcatggcgcctctgcagcccgcgccgctcggcctcccgtagccgacgcccggccccgtcccaccgcccgctgcgccgagcgctgcccgtcccaggtgcgtgtcgagcggatccgtgccgcccctcctttcccccttcgttaacttggatgcgtgtctcggcgcgattcgtggtgtcggaccgggggtcgggctcgccggaggcgggaatgagggttgttcagctgggtagacgcgttccagctcgtatcgaggcgggattcggggggggaggacgccgttctaagctgtgaattggccctcaaattaattgggatttcg

SEQ ID NO: 375441 - DNA, 397 bp, Zea mays
ttcagaaaagaccctgacagtccgacacccgcaagccacaaagtgcagcctcgttgctacaggaatgctgagaaatgtctgaccttgccggaaagcgcaacctgcgcagtggccgcaactgccaccgcaagcacgtcgaggacgggtaggttcatcggtctcgtcgccgggttttcaggtaaagtcaggtcaggccaactctgtcgaagaaggaacatcgaataaaggaaggaggtgggcggcaatggaggatgcgatggcggcgagttcctctgccccccgtgggtcttaacggacgcccggaagctcatcggggagctgctcgaccccgacccgagcacgcgcatcaccgtcgctcgccttgtccagacgccgtggtaccggaagccgttgcccg

SEQ ID NO: 375442 - DNA, 445 bp, Zea mays
ttctgttgaattcgacgcttcgctgtcctacgagctctaccgcgccgaactgccaagccagtggccgacgtgctctgtcctcaccgtccctgctcgttcccctacagcaagttgttggctctaagatgccgggttccctccacctagctccgccaccggtgctcggcttcatccgcgacggtgtcccggtgtcgagcaccttgcccagctccgctactcctgactcgccggcaacctgtggctcggacttcaccatcggctctttgtgtgcttcgctgcgccagatcgccgcgtcaccgtgaagctaaatgccttgcctttcgctgctgttgtagccgagtcgtcatcgcccaagtgctgagcgccctgaactcgccaccgttctgcagtcccgccgtcggctcactgctcgtctcgctacattgccatcgttcactatcctcgt

SEQ ID NO: 375443 - DNA, 281 bp, Zea mays
tcgttttttttttgctgcaaaaaaaaaaaaaaaaaaataaaaaaaaaaaaaaaaaaaaaaacggccaacaaacaataaagacacaaagtttaacgtacacctgggtggccgctcttgggggtccccgctttcgtgctcccacctttcccttcgccgcctttcttactgcgtctctttttttcagtcccctggccttcctttttcacggccgtggctggcaatcccctgtcttgtcccaactttgttgtctcccagtttcatcccctttttgccattcccct

SEQ ID NO: 375444 - DNA, 459 bp, Zea mays
ttgcatcgcacttgattgggccggggcgttgcgctctctggtctggtcaaggcgtcgagcgtccgtcctccaatggctggcgcggcggcggagcgcaaggtgatcagggtcctcctcgtcgaggacgaggagatccacagggttctggcgagggcgctgctgaggtcggcctgcggcggcgtggagctgcacgaggcggggacgggcgccgaggcggtgcggcgcgtgcgggatggcggcgccgccgccgcctacgacctcatcatcaccgactggaagatgcccgtcatggacggccacgaggtgcggcatgccgtatgcgcgacgcggcagattagggcgatgggcgtgacaacgccgatcgtcgggctgtccagcgacacccttccgccagacgtcgacgcgttcataaggccggtgccgacgacttcacccccaagcctctgtccaaggagaagc

SEQ ID NO: 375445 - DNA, 481 bp, Zea mays
tttatttctataacaggagtcaaagtcagaggttcttcgcagccagttgcaagtaagaattattctttatgcactattgcatggtggcttttcatctgttactgttccttgcatgaacatgtcggtccacagctattaaagtgggtactaatagagaatatgtgtagaacttcaagtagatatacctaatctgttcattccgaattgaatccttgtttccataaatggcacctgcgctagtaagccatgagcatgtgtgttgtctgagccatctaacaccttcacaccacaagtatgcctttgcgtttctctgtctgattgggcatgtgctaattgtatgaagcttctgtgccttgggtgatgccgacatgcatgtcttgattccggtcgctgcttcccagttagctctttttttttttgctgagattcatctatggtgtaataattttttagctgtcttatgacaatattggtaatccct

SEQ ID NO: 375446 - DNA, 431 bp, Zea mays
ttgacgcgtgggcggacgcgtgggttgtgatcgtggtgtgtggtggagtaaatttttgtgtaattgatggagtcgtgcgttgaagattagttcttagatacaaatttttgaagattagttcttagatacaaatttacgcaagatgtaaaggcagacatatatgtgatattgtggtggtatttttaattgtggaataagtgtatcatgtgcatatagtgtattgtattagtgtcatgccgtaaaatgagtacattagtgatagttagtgaagtgttgtttgatctaaagattgatttaaggtacaaattaggcaaagaaaatgtttagtatttctaactctttgcttataggaactattagtgttacttgtataaactcttactttaggtaatatgaatgccttgtttaagatgtgtaaagaacatgacaat

SEQ ID NO: 375447 - DNA, 393 bp, Zea mays
atcgtgacggccgcccttttttttttttttttttttttttttttttttttttttttttttttttttaggaaaaagggtatggttttcaaaaaaaagaaattacaggtctgcattttgtaaaacttaaaggaccgccttccacggaacaaggaaacagccccccaaacaaaagaactaaagcatccctagattaaagccagctctagagactggaccccggggaatacaatacgctgaaaaaaaaaccttatttacacacctaaactacttggggaaaggttccggcgggccaaccacacaaacagacattaccggaagaacaacccgggaagggaacccctctttctatttccacacgttccccaaagaggaatccacatattaatccccctg

SEQ ID NO: 375448 - DNA, 329 bp, Zea mays
tcgtccacgcgtccgcccacgcgtccgaggacgcgtgggcggacacgtgggcgcagtattgacaacgtgtaaatgcaattacctgctgtttaaatcgaaaaccacgcctattaatttcgtagatgagttagcttcagaaaaaactttctacgagataatcaacaatgcattctaacggaaatagcattgtaggttgttaccgaaacaaataaaacaagtgtaaatagccaactgatgattacaacattctaatcgaacctgtatatcattatctagaccttgtcaaagaatttgctctattttgtgttgagagcattttttttctttta

SEQ ID NO: 375449 - DNA, 479 bp, Zea mays
ttaactttcttggattacctatgcttatgaattggttgctgaaagtgacgtgttctggtgtgattaggtggcacatacatttcatgtagttgacaaaatatttttgaaagcataacttaagatacacaaaatgaatgaagttgcaggatccttccaactggtacctgtgttttgatatgccttgcccttcaactacctggtaatatgttttgatggtttacacggtacactgtctatgtactcttattgaagaacaaactccctgaacctgctagcatgccttgtacattacttggtattagggcttgcaatacatgaatccattgcaactttgcaattgactgcttaagttgtgttcttgcactgctgacatatttggtattgcaaaagttcgttgaccatctaaatgttggagaagttagcactttactgtcttagactcttaggttaggttatataacactttcccttgtttaaat

SEQ ID NO: 375450 - DNA, 336 bp, Zea mays
gccttacaagtcttggatcacggagagcaaagctccaaatactggtaactgggcatggaatacctcagagagagatgctacagcgataaggcacaaggtgcttatttcaggtttctagatcctcaccatccgccccaaattttacttgtagacttcttatttttaggttgcacgacaactcaagctgtgtgaaaaacaggtagcgagaaggagattgatgctgcaggagatggttttgccatcaatatgctactttgaatatagctccgactaaaactttccttggttagatccctatattgctttttgctataggcgacggtttaatcattttag

SEQ ID NO: 375451 - DNA, 261 bp, Zea mays
gtttttgatcgcgagcggccgcccctctttcggggggttgttttagtctcgccgggagcagcacagagtatttttatgtctgcaccaagtgcttttgccacaatttgatccaaggatatgtggagactccaacctttggtctcccaaaccggaacatctgaggggccgagattatgccacaatttagggttctgagcatccattttcagcgatacactctgcccaaatgatgttctgggaacatagatttctcaacacatg

SEQ ID NO: 375452 - DNA, 525 bp, Zea mays
ttcttctcccctcccctcgcttcaagatgcagatctttgtgaagaccctcaccggcaagactatcaccctcgaggtggagtcttctgacaccattgacaatgtcaaggctaagatccaggacaaggagggcatccctcctgaccagcagcggcttatcttcgccggcaagcagcttgaggacggacgcacacttgctgactacaacatccagaaggagtcaaccctccacttggtgctgcgccttaggggaggcatgcagatctttgtcaagaccttgactggcaagacaatcacccttgaggtggagtcctcagacaccattgacaatgtcaaggcaaagatccaggacaaggagggcatcccacctgaccagcaacgtctcatctttgccggcaagcagttggaggatgggaggacccttgctgactacaacatccagaaggagagcaccctccacttggtgctgcgtcttaggggtggtatgcagatctttgtgaaaacccttactggcaagaccatcactc

SEQ ID NO: 375453 - DNA, 399 bp, Zea mays
ctccgtgtccgccgtgcactgtctgtctctggtggcggcgactgggcggcctccgccgctgccctacgccaggatcccaggctgcatcttccgtacgccaggaggagggcatcgccgcaggttgagtgggaggcggagatgagccgggggcggtcgccggagccgctggatttcttcatctggactgtgcaggtgctgcgacttctatcgttcttcgttcttagtttcaatttggtgagctatattgctatttggatgtcgaaatgcataattgatctccctgcgaatttgctgggcaacaaatgaaatatgaagtgtgatgctccaatcttgtgtcacttgagctaataaggcattgggatagtcattcttcaatatatggcaccttttggccttaac

SEQ ID NO: 375454 - DNA, 335 bp, Zea mays
ccctctcttgatctttcgcttccgcggttaagagctgatcgctatggcatctattgcacgaggaagcggagggggtgccttctatcacaaaaagcgatgctacctaaacggtatatgcaccaccaggcattgcgtatagcttttctacagtatttgaagcgactgaatactactaatgaatccggctccgattgtaccgcccatttagagggctatacgacttggaccggcaggttcgttccatcacttcctttggcagtaataagtatctattagaacttactgatgggggtagagtggtcgcacaacggatcctgctttctcaccaggtagga

SEQ ID NO: 375455 - DNA, 543 bp, Zea mays
  unsure (1)..(543): unsure at all n locations
gtcgtggatgccctcgtgaggttctacgccgacgccttcaggagggattcacagaggccatggtgaggatggccagcttgagtcggctcaccgggagcagcgcgagatccgctacaactaaatgataggaggtttcgctgccatttgcagcgactgtgttccagttcgaccgtttggggaaaaggcaaggaaacaggatctgtcacggaagtgtgttgttctgaaacagtcacaaagagggcctaagaagctgatggaatcctcattcaccgccgctaaggagtttgagcgggatcggagaggagacgcgattcccatttctcagtgatgtcgatgtcctgtactcctgtatatttggattcaacaatatgccattagtatgctgtcaagcgtcctatttgcaagagataaatggcttacgcccgaggggcttattcttccttatcatgcgttttcaggtcggtcgtgactttggttatccactgaaaagatatgcttggtggtgctttcttgtgttgaagaacangtatcccacggaaccac

SEQ ID NO: 375456 - DNA, 524 bp, Zea mays
tcttgttctagatcgcgagcggccgcccttttttttttttttttatataataaacccgttcactactgccaacagaaaaagaaaaactctccactgcaccgcttacaggacccattctggcccagaaattctcctattgggcatgctttcccttcgtggcctggaggctggaagctatcctcaggtatatcgtgacaaactactagtggtacaaggtgtctgaataacctcgagatcaggcgtaccaacacactgagcggagaacgatggataaatcagcaatgaactacctctaggtccacttcaaagatgggtaacctaggtcattcgcttcgcccatgtgcgcgcctgcctctgcccaacctgcactttcatatgggctcaacagactcggtcacacccaccgcagttgcccttggtgttccaagctatggcggatctcgccatcgacagcaatgacatgcttcctcaatgctagagcagttcgtttcgtgttatatttcacttggaaccttccgactggg

SEQ ID NO: 375457 - DNA, 518 bp, Zea mays
ccacgcggcgtttgttagaacgatcacttcgcgataccgcctccagccagcttagcacgaacaaataagaagcccatgattaagcagctagctagctagctagcaatggcgtacaacgacaacgtcgccgtggccagcgaggtgagcaacgccgtgaccaagctcaactaccacctggccaccggcctcaccggcagcggcaggggcagtgagaacgccgccaccaccgtcgtgacgctggcggggaagaacagcggcgccaccatggtggcggcggccgcgggcgacgtggaggacctcgtcgtcgtcggcagcgcggacgcggaggagcacgacgaaagccatggccaggacgactaggaggtggtggtggaggagaacgtggtcatcaccgcctacgccaacagcaactaccaggccgtcaacaactcggtgctcgtcgccggcaagtgctccaccgacgaccccggcgtgcacgtcgtggtggtggagcacgtcgaccagatacgcgactacga

SEQ ID NO: 375458 - DNA, 446 bp, Zea mays
tgttggccagcgcgggcacgccgtcgaggcggcgcgtctttggctgcgctggtgcgccctatacgcgtcggcgtacgtgccgctcccactcgctgtcgactgtcgagctttgctgtcatctccctcccctgattctccgccttcccctcctcgccgcccacaatgcttgtcccggccgtcgccgccagccgcctggtcctggtcccgttccggctctccgccgcccggcgcatatcctccctgaaggtcccgtggaagcgagaccccgccctcgacgctgccatcgcccgggaccgccgtttcctccaagcgtaccgcctcgtccgagaggtgctcctctcgccgggtcgccgcctcctcttccgatacctcaccaagcgccgtgagcgcataaagctccccgtccacgtccccactttcctcaagcgctaccccaccctgctcga

SEQ ID NO: 375459 - DNA, 530 bp, Zea mays
ttcttttactaatacatgtccttaatgcattttgatagttctcgattgaatgatccatggagtagctcaatgagattgggtccatctactattttttcaataaaataagctcaatgactggtcactgtagatttaattttgttccatcctcttatggaatactaatccatacccaaagtttagatttggtaaagtgttttctagtaattaaactttggtattcgcttcttatgtgtgtgcaatagttagtgtgtccttccccatctactattcttcaatagatcgagctcaatgactggtcacagtaggtttatctatgcctaatcctcttttggaatactaatccatacccaaaaaaaatattttggtatctgcttctcatgtgtgcaacagttaatgtgctcttccccatttactattcttcaatagaatgacctcgatgactggtcacagtaggtttaacaatgatggattatcttctggaatactaatccatacccatagattagattttggcgcccacatacact

SEQ ID NO: 375460 - DNA, 564 bp, Zea mays
  unsure (1)..(564): unsure at all n locations
ttatctaggtccttgccgccttcagtgcggtggggaaggtgaggggctcagggcttttcggtgggagcttgactcgcttcgacgtgaaagcttgcctttctcgcggtaaattcggatcttttggggtttcgcgcgccctgctgttcgtgttcggttcctctcggtacggttggctttgcctgaggttttgttctgggggtccgggtttctggctggttttgcgcagcgactgtggaagaggtgccaggctcagtcttcccgtttgtgtctcggccttccggtgagtcgttccctgctgaacgcttacttgatcgagtgcccaaggatagaagttgccacacgaagcttggtttctgtgccaacgcccctttcttcttctgtgaagaaattgccgtttacggcgaagacttgtgcgctggctcagtttcacctagttcgtgcttatttttactcgatccactccaaatcttggatgcttgaatcctgctaattcgtggtgaagacgggattttctctttttttttctgacgacattaagcagtgggactgngagctatcttgttg

SEQ ID NO: 375461 - DNA, 377 bp, Zea mays
cttcatattccaagtactcatgctgatcttggaacagatgaccggacaccgaaagattgagattgtcgagaggatcggcatggatggaaggcacgcaaaccaaatcgctggggctcttgaggaatcttagcaattcaagaaggaacaaagtaacaagtctattagtgaggtcaatcaaccatcaaatgaaagaagcaaagaagagtattccattggaaagtgcgtagctattttggagtcaatggaagatctaagtgaagaagaaatggctaaagcattaggagtgtgaaagtgtgaagaaaaccgggagatctttatgactaccacgagggcacgtgtaaggttgtagtgtctaagggatgagattaacaaacagg

SEQ ID NO: 375462 - DNA, 178 bp, Zea mays
tttcttatcacgatcgaggcatcgagctagtagcagggggcaacgggcaaccggtttagatggctttgccgtcggcaggcaaggcgttgtcgttggtcgtcgttctcgcggacgccgtggtcgtgtcccttgctcaagcccggcgcggtctacctgaggccgaactactactcgtgca

SEQ ID NO: 375463 - DNA, 100 bp, Zea mays
cttaaatttccgccggaccccttacacaaatgaacggcccactttatataccaagcgtatcgatacccgagctgttaactactttatcacatcctcactc

SEQ ID NO: 375464 - DNA, 82 bp, Zea mays
ctaatattttggcaagacgcccctaacttacgccccgggatcttcaatacaccactccatcgctactaactctaaagagaac

SEQ ID NO: 375465 - DNA, 290 bp, Zea mays
tttaatatccttcgggcttcggcacagcaagcacgacccccttcgtcaccgccaccatcaccgctaccgctacggctttccacctaaaaaccctaaccctaaaccccctccgcgcgggagcccctcgcccacggagaaccccaggccccaggccccagcactcacccctcccatggccccgctccccgtccccatccacccgtcaatcgatccaatccccgctcctccgtcccgagtgcccgcccccgtcccagacgtcgttacattcatggccttcacacccactccct

SEQ ID NO: 375466 - DNA, 306 bp, Zea mays
ttattatgggtgcgatcgatatagctgatcgggccagtagcgactggctcagacgcgcgtgatcaagtgtcccgactggcctaggggggacatgaaccattagctgctggcttgcgacgatgcggatgttgcagaggacggagagcgacgacacgtcagttgtctcaatgacacggcgaagatgcctggattgatggtgaaggacgaggggtggcactgctaggtgctgtcgttgatggcgctcggcatggcgatgctgaatcaccggaatatgaagacgctcgttatggacagatttagggcggt

SEQ ID NO: 375467 - DNA, 86 bp, Zea mays
gtcttactatggccagacgccacacacaaatgccggggccttacaaatcatcagtgtatttccacactatcagaagactatcgtat

SEQ ID NO: 375468 - DNA, 96 bp, Zea mays
gttttattttggccggaggcctcaaactaacgaccggcactcaaaatgaataagtatatcgctaccctgtctgtagggcatttttttgtagtctga

SEQ ID NO: 375469 - DNA, 394 bp, Zea mays
aacgttctttatctgtatatggcacgagctgagccggcgcccataccatgcgcgcggtagacagagaccacagccggagccatcgacaggcggaataagaatggtgggaccggtgggaggagaaagatgaggtccgtcacaggggccgacagctgaggagctatgacactgtgcggaagaaggtggcggctattagctgactgaatgaccaggaggtgatgggtgttgattgcccctacagaatatgcactttgggggctcatattgatcatcatgctggagtagtcacagttgtgaccataaatcatggagcactttgctttcacggtttggttatctcaccttcaaggactgtaagacttgtttcacctttctacgtctgttttttggagct

SEQ ID NO: 375470 - DNA, 80 bp, Zea mays
gttattatatggccagaggcaacatacaaatagggggggggtataaataagcagtttttcgtcaatcgcccagaagagaa

SEQ ID NO: 375471 - DNA, 108 bp, Zea mays
gtataattttggatggaggcctcgtacaaacggtccgagctgataattaatatgcctatcggcaatctaactgtatatcactatctgctaggatgatgcggaatttgt

SEQ ID NO: 375472 - DNA, 208 bp, Zea mays
ttcatcttctacttcttctccggcggcatcgcggcgctcgcggccgtcgcggcgctcttccagggctcctggcgcgcgctctacgccgtcacctcgctcccctcgctcgtcttcgccgtcgccgtcgtgccgttcttcgtctccgagtcgccgcggtggtacctcgtgcgccgccgccccgacgacgccctgcgggtcatccgcgcca

SEQ ID NO: 375473 - DNA, 313 bp, Zea mays
tcctctcgtccggatcgcgagcggccgccccggtggttttttttttttttttgtttttttctcttttttttttttttttcacgcgaaaaaaaatatgcagtatgcccccattactgtatatgtctttggcaggatcacatctttggtagtccatgggcatacaattttgccccaaaaaaaagggttaaccctttttttttacaaataaaatttgattttagtattagggggcagactagttgggggcttcccaccaagtccagttttgattttttcttttaaattaaagcccccaagaaccagaagggggctc

SEQ ID NO: 375474 - DNA, 224 bp, Zea mays
tttcttccgaacaaatccggatttcataggggcatctactataaaccatatcgttaatggcctctatcaacctgatgattcacaagcttgtaatacaattgacgcgtctagtttaaacagttacagaagaagctcttagttttgggaactgaaacttaagcaaaactttctatttctgctcatgatctccagactctgtttcaaactttttgttgcggttatat

SEQ ID NO: 375475 - DNA, 235 bp, Zea mays
gagcggccgccctattatttattatggttccaaagccttatatatttaaaacaggatttacagcaccttaacagaaactgcaggcagtatacaggtataacactgttcaaaatagaaacatatgctttatttatcttcagaagaaggatgcaaatattacggtgtttcaaccaccagctctgcaaaatcaggtctcctgagaagaaaaacaactacacagggttgttaaggtaaa

SEQ ID NO: 375476 - DNA, 503 bp, Zea mays
gcggtgcaggcttaagtatagctggaatttaaaataattctaactatcaatcagaagcacaagaaaaatatctccatgccaatttactgattttgttgtgcttcacagagaacgagttcattggccacttcccctttcttccatggccttcacagtttcagcaggcaacaccttaatatgggtggttgcaaccaaccaaaacactgattgactgataggtggagttcaaaaacaagcactgatatgtgccttggagttgtagtattcactatttgttatggtccatggtcgagtaaagactgacgaaaatattgaaagttatttattcaataagacgatatattaatggcttagaactgctgaattaagtgtcgtttgtccgtgcttccttgtatgcttgaatcaagaagatacgacaggctgtacacctcaagagatcagagatgccctttattgttggaatcatggtttcatcctaagaaaaaatggtgtgggctgccata

SEQ ID NO: 375477 - DNA, 89 bp, Zea mays
gttatatttaggctggaggcctcgtccatacgacccgaccgctatgacaggcaccttatcgtcgccatatcagttggacattgcctgcc

SEQ ID NO: 375478 - DNA, 115 bp, Zea mays
tctggatctgactccacgctgacctttattttttgtgtcctgtggtatcagaagaaggtctggggccggttggcacgtgctgtccaaggcacgagcactgaactggaagagacct

SEQ ID NO: 375479 - DNA, 343 bp, Zea mays
ttggttctgtcctcccccgaccaaacacagaccctggatccatgggtgtcgaggaggagcgcgacggcgaggagcaacgccgccccctcctctcctccaccccgccagccgcggcggacccgcagcagcaacagtaccagttcctgggccggagcacctcttcagtgctgcgcggcggtggcggtggctgggaagggcctgaggtgagcgccgacgaggccaggtccgccgctggcttccacacgttccagggcccacctcctaacggtgatcacgcctatgcttacccgccgatcattcaaagcgccatgctcctcccgtccccatctcatgctccaccgtc

SEQ ID NO: 375480 - DNA, 271 bp, Zea mays
ctgtggatactaatgaaagggattgggacataggtgctgtggaacaacctgtagaagaatctggcgatggcttttgatcgtatgaaatatatagttgttatttatagctggcctggatttgaaaattaattatgttggtgtctctaactaattaatgcatcaaagaagatcttgcatcatcttgatcctggtattttgctggtacatcactgctgattagttctcaagaaattgtttgtttatcaaaatgctttatttgtattagagcaat

SEQ ID NO: 375481 - DNA, 91 bp, Zea mays
aggccgtaggcatagtactaatgtgggggatataaaaagattcagtgggtcggcacaatatctgttgagaacatttttcgaatttgatgtg

SEQ ID NO: 375482 - DNA, 309 bp, Zea mays
aggaccggaccgaattcccggacgacccacgcgatcatattttgaaatcacctaacgatgcaattgatggaaggcttaatgggtgttttcaacctacaatcccagccaagatgaagtctcaaagaggagaaggattatgtggatatgcaatgggcttttgtggttacatgaatgcggtgagccatttaatgcaccatcatctacataattttatgatgttgttgaagttgaaagggaaatgcgctcttgtgccatttctattatgttttggtgattatatgtccaacacatagagattattactttatt

SEQ ID NO: 375483 - DNA, 443 bp, Zea mays
aattatcataatctgcaaaaaaagtataatgaaggaggaagagtaaaacaggcgtaccatatagcacgcacgcagccaggacccatcccccagcagtagcttctatatatcgcccgctagtagtgtgtcgaggcatttctctggagccctttttttctttttcctgttgaaagacgggggcgcccaagcttgttgtggtggggggccttcctctttggcctctcctctgctgtagtggggccagcgctcggccacactgttggcttattctgcggctatttagtccgggcacaccagcggctcgatcaggtcggtcgacagcggggacagttcggatggggggggcggccggtgaccgaatgacgcctaccatttactctcggtcctgggcccgctgtcgaaaaattttaggaagaggaccaatgctgtccgatggacgatcg

SEQ ID NO: 375484 - DNA, 337 bp, Zea mays
cccatttcttgtgtgacacgccctctacctgttgccgatcctgtctactagcagccaggcaggttcactgttctagctagcagcatcgcacaaggcagagctcgactgacacaatggcgggcggccaggttaacgtgctgaccacactggaccagaccgacacacaatggtaccatttgatggcgatcgtcatctgcgccatggtagatcttcaccgacacataccatctgttctgtatcgcgctcgcgaccaagctgctctggcggatctactactccgaccccacctgcaaggacccccgaagcctgccgcccaacgtgatcgacgccgggaccg

SEQ ID NO: 375485 - DNA, 442 bp, Zea mays
cccacgcgtccgcggacgcgtgggttcacgttagggcccgagattcaatttttggcccgaaatgcagtttttggcccaaaattcacatgagggcccgaaattcaaaacagatttaataagacaaataaatttgaccaaaagcaaacttaataattatattaagttactagagctatgcaatgactacctcgtttacaaatcattttgttagaaagaaaaagagcctaatcaggtctaaataaagttcgtaagttcaggttattatctaatgttcataacaaaaataaaattatatcacatactctaactgaaagctacacaaacacatctaactaacattatctatagctctgtgctgtttatcaagtacatgaaagtgtggaatgaaatgtgattttaatcaacatataggccttttagtgcctctatatgggccatttcg

SEQ ID NO: 375486 - DNA, 178 bp, Zea mays
tagaacccccacagccaggaccaagctcccagtagtagattctatgtatcgtacacatgtaacggttcgagggatatatgtgcagagcgtagcttcttctgagtgttattaatatatgcacctaagggatggtggctgggaggactttgggtatggcgtctcgaatggtgtggacttt

SEQ ID NO: 375487 - DNA, 473 bp, Zea mays
  unsure (1)..(473): unsure at all n locations
acattagctagattcctcctccctccttcctcacggctgctgctgccctgccctgccctggagtaaggaagccgacaccacttggagttgctgccaactaccgggctcggctgtcaaattctctatctggcagccagcccgtgtccaattccaactccaccggtggtaaaccatcgacagcaggagcagggagggcaggctgcacaagaaaagagcatcattcctgctgatcggctcggctccactccaccccgaataaaatggcttccttctcgggacatctccaccgccccctgtccgccatggccgtggccgccttcgccgccgtctcctcccacgagcttcccgacaagctgtcccaccacaggcttcctgatgccagcacaggcacggacgcgctcgcctcgcttncattgaccaggtcagatgttcccgcagcgcctttcgcatctgccctttctggcgcgcagcta

SEQ ID NO: 375488 - DNA, 441 bp, Zea mays
ttcgtacctcttgctggtgtgctgatctaaaggaggtctaaggaaagttgagaagaaattatgccggcctaacagaaaaagataaattgaaggaggctgtccaaacgatccgtgaatatctgaaggacgaaccatggttagcattactatgcaagaagctgcagctggatatcaatgcgatcactgttgatgcgaccaccaaaactgctgaagcttcggattatgcggacagctgtccggatcctgccctcccctctgagagtaagactgcaaatggtggcgccaagtcaatcaaagtgaggccagcgaagaaagcatagactgtggtaggatccaagaacatgaaagatctggtccgaagggtcacgaggagtgtatcaagatcatgacgcctatctggaactttcaggtgactgacacctgttttgatgcatttgggcc

SEQ ID NO: 375489 - DNA, 465 bp, Zea mays
tgcatcatggctgttgaccctgtaactctgaagcctacacaggagattggccggcaaagtggtagtgcggctaagtcatcggcaccaggtcgagtggtgcacctgcaggcacttggtctggtgtttgcgtcattcgttagttccggggcatttggctactctggctatatgaggctatgggacattcggtctgggaatgtggtgtgggagacaagcgagccagggggagctggaagaagcagtaggtttggggatccatttgcagatgcagatgtggatgtgaagcagcaggcaatatacaaggtttgctcaaagtcaggagatttagcagtggcagacctgagatgccttggcgatgacccctgggtgtatatgtcatcaggaccacgagggagcgcaagaggctatggcagtgttctgtgctgtcaccgctctcaagtttttgtcagccgaaaggatggattg

SEQ ID NO: 375490 - DNA, 388 bp, Zea mays
ttcgtccgggctcggcctagacaggaggggtctcgttagactttgtgttatttaacatattgcagtgcttagcattagctgtaaccacctttttatatatcctttgcctttgttttgaataacaccgcggtatatttcccccttcccaattgattatatttcttcctttgcaaaagattcggcggttcccaaaacacccacaggtggctcttttttatttcccccgtgttccccaaaggaaataaaaaagcccccccttcaaaccaaaaaagtttaaattccggcggaaaattttttaaccaaagggcggggcctttcataaacctatccttatgccccctaggttttggccccaattttttaaaaaaccccgtaaaaaaaccccttt

SEQ ID NO: 375491 - DNA, 382 bp, Zea mays
gtgtctacctgtatgaggagagtggttggctccctttccaggctgcttggcttggaccttttatcgattaggcttacgaagtggctctcgtagaagaagaacatcttcaccagcagtaccaatacgatgatgacgaagatgatcttgacgaggaatcttattacatgaacaggtccccaagcatacgtattggcaacaggagatggggtgacaatgggtacatcaagggaggcacgaaagaggcgaggccagcgaatactgatgtggctgctggtccatgcaggactccgtagaagaaagagaaagccgcattctcttccgcgtcagtgtcagtgtcctggctcgggtcaggatcggggtctgtatccaaggatgtcgctgg

SEQ ID NO: 375492 - DNA, 461 bp, Zea mays
cgattggcaagggcaagctcaaaaatggataaccccgctaaatttcttcagatgggaactctatgaagtcctgaaacctgatttggcttacaccctctgagagactgtgcttgctacctgcacgcataatccacgtgaatctgaatctaacacgcataatattgtgaacgaatccaagggagagtcttacacgtttcacatagcataggaattatcaggcaatatacttgaccgcacggctgataattaggctcagtgctgtaaaaatacacagtatatataagacgccattttcaatctacctgggatgccagtgaatgccgctgttctaaaagttggatgcctggacttatgacacttgttggaccccagactgcaccctgctgcccttgtggtctataaatgcttttatggaacactggttaagcccacctacactaactccaagtattgaagtgcta

SEQ ID NO: 375493 - DNA, 225 bp, Zea mays
ccccggaccggccggcccggaattacccacgcgaccgatttcaaacctttatcacacgcggcacttgccccccgcgagggaacctcaccgcccgccaccagctggatccacaagcgcaacgctcgacagggctcaccgcctccatcactgatgcaacactgcaggccgcaggaactgaactatccattagataaaggcttcccgcccccccgagcgccaacagac

SEQ ID NO: 375494 - DNA, 116 bp, Zea mays
atttcgcgtgggctgcacgggcacacctgtgcttcattatattcagagcctcaaaaatactaattgtaattagttgacgcatactattttgagggaggtgaaggggggacatgact

SEQ ID NO: 375495 - DNA, 417 bp, Zea mays
gcttttctcatctctcacggccacgccggcacgtccgctcgcgcgcacactgttttttttttcttggtaagggccggcggccggaccgataatcgtaaaggaaggcgaggcaatacacccaccgagagagaagaactaagctttggacacggaagatcgcaagagcctcaaccacactattcaggtggcctaggactctacgagggacgttcgtcgtgcctcggatgagatgggtggcggcggcggaggaggaggaggcgggaagtccgagaaggcgcggcgttcgtcggctcgggtgaggctgtgggtcgcgcgcgccagcaccgtgctgctctggacgtgcctcgtccagctcgcggcctaccgggagctctgggcgcccagcgtgctctccaggtggcctggctgtcttaacca

SEQ ID NO: 375496 - DNA, 483 bp, Zea mays
gcgttacccccgttcttatccccacctcgtgcctgccgtactgcccccttgccctctctgggccctcctccgtccgtctcgtctcccaggtcatggcaaaagctggagcaccgggaaaaataacacgtgggagataaacaggaagagctaggcgaatacttggagaaaaaggtcccccacaccccccacgcaggtgaatactacaagtagcagtacaaggaagagagccaatctgcccgtgactgccagcgagttgctcgggagcggcggacagatgaggccacgacgatgggaggcgggctgatgatggatcagagcgtggtgttccctggcgtacacaacttcgtggatctcctgcagcagaacggcgacaagaacctgggcttcgcctcactcatgccgcagacgtcctccggcgaccagtgcgtgatgggggaggggtgatctcgtggacccaccgccagacagctttccggacgccgt

SEQ ID NO: 375497 - DNA, 490 bp, Zea mays
gtcaaaatggctgatacccataggtgtagatgggtttgcataggcgtgggcttccatgggtcttcacccatccgtagaccgcatgactgtattcgagtcgactcccaacttagtcccaagtcccaacatacccaactcaaccctaactccccaagtcttcacccgtgcaccggcagccgcatcctgcttcttgccccggcgaccagagtctcccctctccccaagtcttcgcctcggcggacggagctcccctggcccctgctgacgaccgacgctaattagacactttcacacttagaagccggcaccccctgtcccctagcgcacgctcttgcgtacgaagcgaacacactgccgtctcggggaccgttcacacatggttcttttcttttcacttccagggagatttatgcgtcgtttcgtgggcttctgatgctacctagatgtgcccttccactgttgctagcttcgagcttgatcagagactctt

SEQ ID NO: 375498 - DNA, 442 bp, Zea mays
cgttcgcgggtcatggcacaccggctgacgcctgggcaagggctgcttgtttgtggttagggcatggccgcctaccaggcccgaaccatgaagcactccatccatttccatgggagactcggtaggaagagagaggagcaggttttgctccgctggttgatctcataccgggcggcaaagaacggaaggggagggtagcccatgacacctactgggagacgaacagaacgaccttcctgggcaagtaggacacgatgctggagctcaggctcgggcctgcgggtctcactctcgtagaagaaggaacgacagctaccgtgccaagagatggaggcgtactacagcgagagacgacgaccaccccgaccctctcgctcgggtgctgaccacgtaaacgctgcagcctggggtagactgacctacagctggaactaagaggggg

SEQ ID NO: 375499 - DNA, 280 bp, Zea mays
ccttcgcgtcttctcaagtctcgtatactcatgcagagagagacacggaggacctgggtttggttgcactgcttgactcgctccgtgttccaagcgccttttgagcattcaggcagatataaaattcctctttttacactacaatccccgttgtatcagtagcagcaactctctccctgtccgttcttggtggtgcgagacccttggccgtacgctctgcctcactcctccgtctcttgcttaccttgccgctcgcggcgcgcggcgccgggcacggatc

SEQ ID NO: 375500 - DNA, 452 bp, Zea mays
cttgttccgtttgtccgcaccgcacagccgctcaaaaaccctggatctcgccgccacctgcggcgctcggcgcccgccgccagtccaccacttgcccacctggtcgcgacgtcgcgcagatatcttcaccgcccgtcgcagcaggttcagctgctggcacgggacatttgaaccggcactacaaagcttgtttagcaaagctaggaaagactcaaggaggaggtacgcaaacccatcttaactttgctgctgatggtacaataagtacatgggtttacaacccacaggtagcacgtgatgaaatagccaaatttattgtttgtgaagatttaccgattatgttgggcgagagccaaaattttaaaaacttgattcaacgtgctttttgcccacaatatcagcctgtcactagaaaaactacaaaatctgatttgattgcaatatacaaaaat

SEQ ID NO: 375501 - DNA, 482 bp, Zea mays
ctcccccacaggatctagggtttgctcgctcggccttcgtccttcttgggccgagccctaattcttctgcaccgccacccagcaggcttcggtttggttcgcatccgctgcgcccgcttcgtccccgtattcttggattccattggcttctatcttcagtatggatgagccaaacaacaattttaatgcaacggtgcatgccaatgagatgtttgatagcaatggtgtgatccatgaagatgagatggcccatgacgatgagatgatccatggccatgcgatgttccttggcgatgagatgattcgtgggaccgagatggttgaaggaagtgagatgatccatggtcatgatatggttcaggttaatgatctcatccacggcaatgagatggttccagttcacgacatggtcaacggtgacaagatagcccatggtaatgaattggttaattctcagatgaccccacgaatatcaagacgtc

SEQ ID NO: 375502 - DNA, 476 bp, Zea mays
gcctttccggaattaccggatcgcccattttccggctttgtatgtgactttcaagttgagttcggtgggtgaaaaggaacagtcattcttggccgcggagaaagcactgtcgcgtacctatgtgcattatggcccttatgccactgcacaacaagcacttgctgctggtgatatgtgtgccatttgccaggagaagatgcatgtgcctgctctccttagctggaaacatattttctgtgaagactgtgtttccgaatgggccttatcattttgtgaagaagcatttggatcgcgattcattaccacccctacgtgtgagttatcttaggacaaggcgcttcatgggggagcgaggggtgcttgacaggagtgaggtcaagccttgctaccctggagctgagagtgaaagagataaatactggcaagaccaactttgtcttgctttatttatggttcgagcgagagcggacttgccc

SEQ ID NO: 375503 - DNA, 458 bp, Zea mays
cccacttgtccacattatctaggggttgatctcacgggcttcggccttgttgggccgagccataactcttctgaacggcgggagagcaaagctaggacaaagatagaatgctctgagcgcgcttcggccgcggatccttggatgccattgcagacgatcttcagcatggatgagccaaagaagaactgtaatgcaacgaagaatgtcaatgagatgtttgatagcaatggagcgatccataaacataaaatggcccatgacgatgagatgaaccatggccatgcgatgttccttggcgatgagatgatacatgggaccgagatggttgaaggaagtgagatgatccatggtcatgatatggctcacgttaatgatctcatccacggcaatgagatggttccagttcacgacatgatcaacggtgacaagatagcccatggaaaagaaattggtaattc

SEQ ID NO: 375504 - DNA, 324 bp, Zea mays
gtttcgcctccttgttttactccaagtcctaagcgagcttgggggccgccatgatgcaacatccgccgccacattagcaacaggaacgggcaatggcgccccagccctagcaggaggactaccatgcggcgcaccctccgccgtcgtaccaggaggtctactaggctggcgctatgtgtggccatatgtgagggcaagcggcaccggaggcggcggcggcccccgctccggccggcgacgaggcgagggacctgtcgaggacccacctgaacggctacctggattactacatcgattataactacttttttaggtgtttctacg

SEQ ID NO: 375505 - DNA, 360 bp, Zea mays
ggtctagatcgcgagcggacgaccttttatttgggtattatttttttatttttaggtttttattaatttttttttttttttttttttttttttatttttattttttttttttttttaaaaaaaaaaaaaaaaaaatgctcccccaaaataaaaacacttaaggcctttttttttaaaaaaggaaaaaattgaaagggggggggcccgaaaataaaaaaaaaaaaggttttttttaaaaaaaaaccgggttttttttttttccaaccaaagggcaaaaaaaaaaaaatttttgggggaaaaaaaccaaacccaattgggtcttgttctacaattttttgggaaaacttaaaaaggcctttt

SEQ ID NO: 375506 - DNA, 335 bp, Zea mays
ctagatcgcgagcggccgcccttcatttacgcgtactttttttttttactttgtgtgtcttaaacaacacacattggttgattggttcgattccatggtatggtacaagtggaagtccatgcataacaatataatgagtacattactgcattactacaacgagtgatgacatatatagggaccatgctcgccaaaggccaaagcgggacgggagccacatagatagctagcaagaaaccccatatggcggcgatagcggctgccacccaggcggcggcgacggtgctactgctcgcggcgctggtgctggcggcgggaccaggcgggtcgcggcc

SEQ ID NO: 375507 - DNA, 453 bp, Zea mays
tcttcctctctgtccgactcctttccttcattttcctcttctgacctccggcagcaccatggagaacgtcgccgcgaatccttccgctgcggccgccgccgcagggaatggcgtccaagcatcgggggccggaggggagcgcccggaggacgcgtcgaagcagaacctggcgcaggtgacgagctcgatccagaagacgctgggcctgctccaccagctcaacctcaccgtctcctccttcaactctgcctcccagcttcccctcctccagcgcctgaacgcgctcgtggcggagctcgacacgatgcagaaactagccgagggttgtaacatccaggtgccaatggaggtcgtcaatttgatcgacgatgggaagaaccccgacgagtttactagggatgtgctcaacagctgcattgccaagaaccagatcaccaagggcaagactgacgc

SEQ ID NO: 375508 - DNA, 62 bp, Zea mays
tcgttatttttcaccaatataatggttgtgtatgtcaattacgaaaagatatgaacaccatt

SEQ ID NO: 375509 - DNA, 459 bp, Zea mays
tgtctaaaaccccctcggcccctccgtccagagccccctcggtccagaccgcgacgtccgtgaccgacgacgtcgacgaccccgcgcccgccgtggccgaccaccaccacagccaagcggccgccgaggctccggcgccggccacgccaccacagcacaaggtctgcgtcgggttcgggcggccggagaccagcgacctgacggtggtgctgtacgggaaggagggcgtcgcggtcagcatgagcgtgcacagggacgtgctcgcccagagcagcgccttcttcgcgcggcgcctcgccgccgacggccagccctgcgtggagatccacgactgcgaggacgcggagatctacgtggagacggtcggcctcatgtactgcgacgacggggccaacaagcaccggctgctcaagcagagcgttccgcgcgtgctccgcgtcatgaaggccgccgacgcgc

SEQ ID NO: 375510 - DNA, 446 bp, Zea mays
ttatcgcgagcggccgccctttttttttttttttttttttttttttttttttttttttttttttttctctatattcttcttaatctatataaatagagattttaaaaaaaatccccttcaacaatttatctaaagggctatcaattatagccatattctattccgggtttctcgctagccaaatttagaaaatgtaaatgcctctttagagggcaaacaccctatagaagggctattggattttgagaagatataaaaaggggtttttatccaaatgactctaaatgatagtttagagcgaaatttagaagaaaaaaaccttttggagaccctctagggttcaattgcccgaacagtcttttaagtgaagcaggcgtttctaattcagtctttcaccggtccagctgccagtccggtccagtccaaatatctacgcttcaacatcc

SEQ ID NO: 375511 - DNA, 452 bp, Zea mays
ttttgcggccgcccttttgttttttttttttttgttttttaacaaataaagctgctactgcagttagatgagagactacaacacagttactacattacttagaacgacgacccagtcacttactagcagttgattaaccaagcttaacgtacaacgcatgaagaaaccactactagctagatagatgggcacaaccatgtagtgcagcgaagaactagaagctccagccgaaagcgccatcgagctggccggggccgacagccatctgcggtggcgccgagcggccctcgaccttgacctccatgccgccggcggggagccagtggagagccccgccgccgcccagaccgcctgctgagaggaacggtggaagctggaggttgtcctgaagggaacgcaggctcggcaggaaggccggaggcggcggctgctgctcgaacggcagcggggct

SEQ ID NO: 375512 - DNA, 459 bp, Zea mays
tcggtgcaatggtaggataattgatggaagtaaaattcagactggagaaagcaatacagttgattgtattcaagcaaaagatcactcagctgggagaacggaaatagcagcatgtctacgagttgctcaggttgcacaagtgcgggtagctgctgcagaatcatcaatccagattgtctatctatctgtaaacgataaagttgaattggatataaaatatgctgatgaattaggttatattttcaacgaagctcatggagtagtccctgtaaagattgagacaaattatccagatgttgtttcggttctcatgccaagagattttaatggtacatatgacacacgtgaacgttttgttcttcaggcgagaagtcatggaacagctcttgtaaggctccacacaaacaatgtccctaacaaagtggatttcataatggtatccgtaggagcacaaatata

SEQ ID NO: 375513 - DNA, 463 bp, Zea mays
cgcggtattgtcgcccatgcatctctacctcgatcgtcagtccagcttgtggtcgacgtactacgtcatcctaggttaaatttccaccgtcgtcagccacaatatggctgccatgctcgtccgctcgtcgccttgcctcctcctcgtcgccgtcatcgcgttgtgcgcgtcgtcgtcctgtgtgcttgttgtgccggcggcggcgaccatggctgagaacgccgtgcagcagcccgcgatgccgtcgtcgccccagcagccgggcctagctgctactaccgcaggtcagacgaccaccgccacgccagatgcatcgtcgtcgacgtcagccgcggtggcggcgctcccaccgtcggcgccgtctggaaccgcaaccgccgccaccgctccgaagaagttcccgcaaccgagccccggcggcgtgggcggcgggccgtaccagcagccaggcggcgtgggcggg

SEQ ID NO: 375514 - DNA, 461 bp, Zea mays
ttttatcctcgctgcaaaaagactataaacttgggagttcctatgatatccatttcttgtgaggatttgatcttgattctgttggttcttggtgaggtggttgagatgaaaggagtactatgctaactcatcgaggaaagaacagcacagtcagtactgttctaaggaaaagctgacatttctgtgcttttctttggaggactgcggtctgttcctgcaagaatttgtgtaaaaagggtggtaattctagatttctacaatttttgcacaggagaagctcgattccaccttgcagatccaatggcgcaacctgaaattcctgcatttggggattgggaaaccactggaaacacaccttacacacaaaagttcgaggatgcacggaagaacaagaaaacaggaattcttgcacaaccaaatgatccaaggagggatctggaacctcctcgcaagtcgccttt

SEQ ID NO: 375515 - DNA, 394 bp, Zea mays
ttgacgctgccggggagtccgggacggtgagggaaactttaactagcctgcagctccagctaccccgaaaccccgtccaacgtccatggctatccacctgtgcgcccaccgcttttcggccaacccgctgcgtggcgtctccgccgccaccacctccatgttccccctcgcggccgccgaggcactccgctaccttctcgaccccagctccgccgccgccgccgccaatcccagccagaacctcttcaagattcttactttccgccgtggccgcctcttcctccgctccttcgaccgttccgcggtgcccggctggcacctttcgtgtgtaccgtcgtcccgcgttccccgtgtggacctggatgccttcctctttctgggcgcagcttttata

SEQ ID NO: 375516 - DNA, 446 bp, Zea mays
gtctagttctagatcgcgagcggccgcccttggtttttttttttttttttttgttgtttttttttttttttttttttttttttttttttttttttttttttttaaaaaaaaaaacaaacctccatgaaacggggggtttttacttttggggggcttcgggcccggaaaaggggcaacattccccttcacaaacccccccgggggccagaaaaccaaaggcccccgagcagaattgcacaggggcctgccccccccctggggttttgccccgggaccaccacccggggccgcccgtttgggggttttgccttgcctttaatccccaccccttaatatttacaggacggttgacaatttgcaccgaacgacaggggtttgccccccccccccggggggttaacaagggatggggctttaactttccttgggccttggggggccacccc

SEQ ID NO: 375517 - DNA, 181 bp, Zea mays
ttcactcgtccgccaaatctagcctctgaccgagggttgttcccgccgtccgagttgtctaggtctccactgcagtgccctaccggccgagagcgcggtccaatgaacccaacgctgtcacctgctgactctaggcgaccagaactagctcctagcgcccccctacgtgatataggccttt

SEQ ID NO: 375518 - DNA, 471 bp, Zea mays
agccgtcctttccgcgtgggcgcgcagatacttcggccagagggctgcagcggcggcgtggaccggtgccggatcccccaactcggtgctgctctcgcgctcggctccacacgccgacgtgctcgcactttcggacctacgctgcatgcgccagcggcttctgctcggagacagcaccccagccggggcggggctgacacacgcggcgccgccagcggtgctgcaggacggggcggtcactgtgctcatcaccgacggcgcctactgtatagcgcgcgtcttcgacgagctcaccgagcggcggctcatcgaaaaggttgagacttccactcactaatctgtagtctgccggcttcttgtctgaaaaaaaaaaccaaaccttcagctctgcctagctgtcttggctggatacaggcgacatatgatcctgacctcaaacatttcagtagaacggccattacctttgcttat

SEQ ID NO: 375519 - DNA, 465 bp, Zea mays
tttggccttgccggggagtcggggacggggagggaaacggcaacgagcctgcagctccagctaccccgaaaccccgtccaacgtccatggctatccacctccgggcccacgccttcgcggccaacccgctgcgtggcgtctccgccgccaccacctccatgtccccctccgcggccgccgaggcactccgctacctcctcgaccccagctccgccgccgccgccgccaatcccagccagtacctctccaagatccttcctttccgccggggccgcccgctcgcgcgctccacggaccctcccgcggtgccggcctggcgcctcgcgtggctcccgccgtcccgcgtccccggggtggccctggatgccttcgtcttcctgggcgcgctcgtcgagggggacggcaaggaagcctccgcgtactgggcggtcgacgtcagcgagggcgagggagccagggttggtg

SEQ ID NO: 375520 - DNA, 472 bp, Zea mays
ctctccgcatcttcgcatcgacgggccgccttgtctcaatagcgcgccgctggggactggggtagtggggtggggtataaggatcaccactcaccacacttatactactctaaatttgcactgtaaaaaaaatattctgtcctggacagcaaaatactttactctataccacatatctacgcactcatgtttactctatatcccaaccctataccaactatcatatattatatcattttgtaactctatatccctagctggcgtcggcgaggcatattgaagtgtaccagtatcagcagtagctagctagctcttcacccacactcatgctcctgcagtacgatcgagtggagagagggactctataaatagcgttatacaagcgcactctaattttacagtagcacataaggtgcacgactacagcatctgttaactgaaaatgtaactgaaaaaacataccgcatgcttt

SEQ ID NO: 375521 - DNA, 331 bp, Zea mays
ggcttggatggccatcggccgaatacccaacttcagtcctgatggcaccaaacacgacagcgacgtggacatggacaacaggactgccacagggcaatactgatgatgaaactcgcacatgggctcgcagatggagaattgttatgttagcaaaagcacacgctgtgggtgtggatgaaattgaccaccaatttgccgtattatcggcgtcaacagcatcagtttctgcaattggatccgatcctgatccaagggagatagtcgagagtcccccttcaaaagtgtgtaggaaaccatcaacatactaacgggaggaagcagcacaatgtta

SEQ ID NO: 375522 - DNA, 537 bp, Zea mays
cgtcgagccgaacgacgacgagattgccgaggtgctcgcgctactagagtacagcgaggggacttcgtcggccacagtcctcgtctactgtaacaccaccagcaagtcgcctaccaagtgttcgacaatggagttctccgacgccgacagcagcgccaggactggggctgtcacctacgatgagcctagcttccaccgcttcattccgccggccttccgtgcctgggaaaccaacgaggaagaggactcctctgccgaggaggccatggcggcaatgggagcggtcgcctcaccatcccctttacttgtgaccgtggggaatatgctactgccctacctcgcgctaccaccgactcatgctgcggtgtgggacgagccgtaccgtgacgctaaggctgctcgggcactggccgagacggacaaggccaagggttgcgcgaccatggaggcagccgcggcggtgcaaaagctggccgagtccgtcgtaccgcttcacctcaccacggagcttcgtcagcgtggtcccgtcgacatcga

SEQ ID NO: 375523 - DNA, 336 bp, Zea mays
cttcggctttcctttagcttaatggaggagggagaagagggcggcgctagcaatgatcgagcagcagccgccattgccgcagcctcgagatcatcatgcgggaggctctggtgaaggaggacaaggagaaggcggaggatgctgcggaggacaaggagaaggccgccgtcctcaagaacggtagcaggatcggcccgatgaatggcctcgtggccaccaggagcatcagcggaacgccccctctgtgctgggaggagacggcccgcgagatccaggacgtcagtgatgcttaccgacgcgagacggaacgtccggtctacgtgataccactagagc

SEQ ID NO: 375524 - DNA, 482 bp, Zea mays
gtcagccattgcattgctagcttttcttcacttctggttggcatctcttcttgtttctagtacaaaaggacgctgtttgcttcataagcacgaggagagatacatcgtggaagctactcaccaagtgtcttactcagaaccctttgatcataagcacgaggagagatacaaaagggcgctgtttgcttcataggctctgagatgagtaatgggtgctgaggatagagttgcgcaagcttcctcccattctgcgtccctgctaacatctggagattgccagtggctatgatctgtaaccaaagaagagggaaagtgtgagattagcagctggttcagtgttagctcagtatccatcattcacttgtatggctactgatttgcttcgtattcacagaatcctctccaccttgttggagataaaggggataatcatcgtgaaatatataaaaggtggagataacatccaggaaataaccagatca

SEQ ID NO: 375525 - DNA, 399 bp, Zea mays
gttcggagcgcacacacacacaaccagatctcccccaaatccacccgtcggcacctccgcttcacgatgcagatctttgtgaaaaccctgactggcaagactatcaccctcgaggtggagtcgtctgacaccattgacaacgttaaggccaagatccaggacaaggagggcatccccccagaccagcagcggctcatctttgctggcaaacagcttgaggacgggcgcacgcttgctgactacaacatccagaaggagagcaccctccaccttgtgctccgtctcaggggaggcatgcagatctttgtgaaaaccctgaccggcaagactatcaccctcgaggtggagtcctctgacaccattgacaacgtcaaggccaagatcccaggacaggagggc

SEQ ID NO: 375526 - DNA, 261 bp, Zea mays
cggtcgcgtgggtggggattttgctgacgaccttggcgactgcatcgtgggctatctggacggttcttaacgggccaatgctggaagcgtacccatccaagctgctcaacacgaccctccagatgatcttcacgactgtccagtgcttcttcatcgccctagcggacgaaagggacttgtcgaggtggaagctggcgctggacatacgcctttacgctgtgatctactctggaatactagtctcgggagtcgcttactaca

SEQ ID NO: 375527 - DNA, 418 bp, Zea mays
cgctcctccatccagtcccgcatcgggacctgcacgcgcacgagcacacgacggcggacggtcgcacctcctccgctcggccgctccacagcttggcgctccggcgggcgctggcacctccggctacgtcctgctgcctgcgcgcggtagccacctgttgtacccgtgctggcctgctctctctgacctgatactctgactctgcaatcggcttgctctctccaggctttctggaatcacatttcttgagaactatctgttggagagctaaactaggctcttgttcatattatggatcagcaagctaagattgatgctgattttcttgaaccaactgtactcttagatgagacacattaccaggaggggtacagaaatggctataatgatggtttggcatctggaaaggaagagggga

SEQ ID NO: 375528 - DNA, 421 bp, Zea mays
ctgtcacatgtcgtgtggtgtgggggcgctctgatccggatggtgcagcgccgcgggatcgcccacggccatgattgatcgcgaacgagcagattaccctggtccatcagcatttcattcaggaccatagtgatggttcaggtttgttacataccagagatcaacggccacatctgacacccctaccataaacacccatcggagtttcaaagtttggaaacaaaaggaacataacacatgtcacacaggacaccacgtccaaggctatgcaaagtaaatcatgaggaaatgcaagttaataatgaggcaccactagggtgcctcaagccaaatatttctcagtataactctccagagcagataggtgggtgtgaagggtttcctgagaataatgaaaaaaggaatgatattgttgctgcgg

SEQ ID NO: 375529 - DNA, 490 bp, Zea mays
aagggattctagatctaatcgactaaccagagagaaaaaaaaacaaaaaataacgcgagaaagcatgagccacttcgccgccgccgccgtgaagagccccctcgccgtggccgcgcccgccgccggcgacgccaagagcccgctcttctgccccaagccgcggcgccccgcggcgcccctgcggtgccaccagggcggcgacgccggcatggatctgctcgacctcctcctgtcaaagggagaggagagcggcctgtcggcggcgtccccgctgttctgcggctcgccgccgcggcgggcgtcgaacccggtggtccacgacagccggttcggcgtggactgcccgcccctgcccgtgcccatgccggtggcggcggcggccgtgcaccggccgtcggcggcgccgcccatgtcgccgcgcggcggcaacgggtgcgcccgcgcccggttcgcgttccagccccgcgcggtccgcgtcgagggttttgac

SEQ ID NO: 375530 - DNA, 533 bp, Zea mays
aaacacccactccaacgtcttttctgaactctaggagacgagcaagacgcttggttataaggataaaacaaactctctgcacggagctgtattgaaaccaatgactatgaagcagcacagtttgcagtacttaaaagttcaagtggaaaatgatttgacagtgattatattctatcagtagctatatgtatcaatgatggaaaaccttcaaacaatgaatccttattaattgaggaaaaggaaaggaatggttgagttgacactattgacactagagcatctgccaacagttctaatacaaagggttatgatggatcacacgaatatgctgacaagaatggatgccgattatcttgagagaaacagatcagatcatgctgatagaaatatgtgtgcatatgcaactggtgatgatagactccagtcaagatgaaaagcagagatgctactagtacgtactgatggatgatcttgtgctagagaaaaagtaacagaatcatatgtggcttttacgcatactagtacccagcaac

SEQ ID NO: 375531 - DNA, 425 bp, Zea mays
cggtcgcgtgggcgaccgccggcatggctacactggccccgtgccgcgtccgtcgtgacagggatccgagaacaccctatggatgtgtctgggattcgaggcctcccccctcccttccccttccccaccctcatcggcgatgcctggatccgcgaccgacaccgtccaaccccgggctgcgtgtatgaccgctccgtcgtgtcgcaagcgctggaggcatgcacagggggctactgatggctgtgacgggttcgtgctcaccaccgatgactgggacgtacatcgggggacctttctagcgtggatggtgtcttcacacggaaacggcagctcgctggtgctgctgaacacccgtccgggtccggctgcggacagtgcatgcattggcagagcacctgaagctgcacctggggcaggtgagccta

SEQ ID NO: 375532 - DNA, 458 bp, Zea mays
ttttctttgctttatgtaaatctggtccatatgttagaactgtttgtttgagcgagagggagagagacccacccaacatcgatgatgatcggtcatcatcaaccgcgccatcagagatttgtgctaaaaccaatgatgagcttactaataacacgcgggatctcagagatgggagtgaaagcacattcttggccgtcaggagcaatcatatatgcattactcacgcctacatgatgcggtgcctctgtgtttataaatgccatcgcatccctctgcaggtgcagagcagttccattccattgccccctagcttaccacacacttgagtgacgagcactacccaccgccgactcgtcatggcctgcggctgcagccttaagtacatggtcgttgtcttccttgttccgattctttccatctctttttacctttcctccgttcgggccggttgtgacacc

SEQ ID NO: 375533 - DNA, 325 bp, Zea mays
ttttctttcacgactcgctcgcccgcacaccggccacgggggaatccgggggcggttgtgctagtcatgcataccggacctccccttgccccttcgtttcgttccacgccagcacctatgaacttgggccagatcttggtgttccgctatccgcacccgcaatggatagcttgaagacaccaccgtacccgtatttggtctgtggttgccgttcggcttcccgtatgtgggctgagcgcatccttcgctagcgtgggactcttacagggcctactcctggggcggtgaacccggaagcttctgtcaactgctctctgacttacac

SEQ ID NO: 375534 - DNA, 147 bp, Zea mays
ttttcttcttgtcaaaccctaagcagggagttgagggagccgtttcagccatgagtcagctgcactctcagtctgtcaaggctgccatcttccatattgttggggatgccaaggtgaacaataggatgtttactgagactgtggaac

SEQ ID NO: 375535 - DNA, 524 bp, Zea mays
ctcatggaagaggctgtagttaatggaaattttcatgagatcacagaaaaagtttctgttctctcagaaatggtagagagctctaccattattggtccagtgagagaagaaagtctacgtcttcttaagaattttcaggaccagttggattcatgggagcgttttgtagcaacacaaatggatctgacttctgagtataattgggacttcgaccattacctagaggaggatataccagccgcggtgggtttatgatcctatctaatatgttacctggcaaactgcaggcagatttcattgctagtagtgcaatcatgattctttcaatggaatattgtcaagtttaccttttatttgtacagctggatgttatttaacatcacagcatagcaatttatggccagttgcttgccattggacactcaatgggggggacttttgttgaatgcaaggctgtcaagatctggttttgagggtgtttgtcaatttagctgttttggcactttggcttcttttgttgacta

SEQ ID NO: 375536 - DNA, 535 bp, Zea mays
gcttctcgcatccataatgctgtctctcaaataataccgctttcaatctctgctgaattgtaatagcgctcaagctgcgaatgcaaattcttcatatcttcgctttttgaagaatggtagtgtgtcatgtttaacaacaacttcagccgttctgtgtggaaccgttcttttttgtagagcacccatgtttctttgtcaaactattccattttgtcgtgtttttgatttcgattaacgacttatcccgctttaataggcacatatctaaactctgattatcttcaaatccgaacaacggaccaatcaaatgcttttaaatgatttcttttttcctattcccagatttgctgccttcgatattccctccaatgtctttgcttggcaatttgaatctgaatttcagagaaaagttttcaaattcagatagtgcttcgaggtgcgaatgccaccaggtgttcttatcccatccattgcacagaagacacgcgtgttggcaaatgaaggatgctgtacttaatttgatgctttttacata

SEQ ID NO: 375537 - DNA, 417 bp, Zea mays
tttttccgctgtcaccccgcgtcgtcacgcgcccccggccgccgccatcactgtcatcgttccccctcctaaagccacccgtacgccagccgcaatggatttttgcaccgcatctgcatcctctcgccatggcgccgccgcccgcgtcgcctgctgactcggtccctgatccaaggccgaccgccagcgcgcccgtgcccatcaccgtgccgagcccgtgtgaccacgcgcaccaccaccacctggtagatcgtcgggacacgccgcggggccgtgcgtgggaaccggagcggaaccggcgcggagaggcgatggacggtgcttcatcggtcaagctggtacccggtgaggccgggtacgttctataagacgtgcctgacgtgttggactaccttccctatcttccgacctactcaa

SEQ ID NO: 375538 - DNA, 283 bp, Zea mays
gctactttccggccccttcgcaccgtttccctctgcgctcccaccccccgtcccccgaaatcaccgccgcgccccgcgttttgtccacgctcacaaggaaaggaggggaggagaccggggcccatacgccaacgcgcggacccctcgagtagggcgaggtccgggctccgctcccggtttccggggagagtgcggaggacccccatcgtgcgtgccattgtactctgctcccggctgcttgccggggagagggcggtggatccgatttgttgccgcttaaccc

SEQ ID NO: 375539 - DNA, 459 bp, Zea mays
tttcctttccgggagaagatcaagtccaagttcgagaagatccatggtctgccaaactgctgcggcgttgtggatacaacacacatcacaatgtgcctttcatcagccgagccgaactgcaaggtctggcttgatcaggagaagaactacagcatggtgttgcaagccgttgttgatctggacacccaggtcacagacattgtgactggctggcctggtagcatgaaagagtcgagcattttgcacagctctggccttttcaagctctgcgagaaaggcgagcggctgaatggcagcaagctgaaggtagcagatgggtcagagatcggggaatacttgatcggcgactccggctacccccttctcccctggctgctcacacctttccaagagaaggaccttacagagtccagtgctgagttcacattagggactcttctgcgagacagtcgctccgag

SEQ ID NO: 375540 - DNA, 383 bp, Zea mays
ttttctgctggccgacggctcggctctgttgacagcaatccctgcactgcagctttgccatgctccccacgaggagcgcaccatcagagtgattctgcagaaggattcattctactggcgagccgagctggtgaaggagcctataataagcctagcgctcacttcagtcattatccaagtgattgaaaaaggcaagtcgcctgaattactggtttcaagggctctgtagttgcttctccacactttcctatgcttttgcattaatcttgacatctgagcactcaaagctgggattatggccttcttattattcgagccctgacagtgtaagagatttacataccatgtactcaacagagtcaggcaatgcatctttatccgtg

SEQ ID NO: 375541 - DNA, 494 bp, Zea mays
gtttttcgtacgcgagactagccctagccgcgcgtacgcgagacaccaaccaccggcgccgctatgccgatctcctccacgctcgccacacgcctccgcaccggtcattcttccgcacccaaacccgcacggcggagcccctacaccagacccaagcccagcggcggcgccaaggcctcccgcccttccccccgccttgatccagcgaccacgagacctctcgaaccctctcagaaggcggtgcgatccggtttgggtcgccgtgccgagcccgatgtgcccgacgcgcgcgcggctgagtcgaagccgaaactggcgcatggagacgataggccgccccttgaggagaagcgccgctgcagcggtgagggcggattcgtctttctctgcgcccttgctggacacaccgaggctatcggaggggattctctgccgtctggttcgaacaagctcctacttcggcagcgtcgacggatctgttcgcatctgggact

SEQ ID NO: 375542 - DNA, 318 bp, Zea mays
cccactctttttcccacgcgtccgctagatcgcgagcggccgccctttttttttttttttttttaaaaaaaatctacaaatctaacagaaaaaaaaggagaggcccgggatctacaaaagattcaccacagttcgagcacacaagatactaggagtagactgtatcatcgaagctttagacataagcttcggtcacacctgggaggacccgtggtggatggcacattactcagtgctgagcactgagctcaagctcagtggaaggggagggcttcttactgggcgcgtgacgacggctgtcgccgacgtcctcgttgt

SEQ ID NO: 375543 - DNA, 441 bp, Zea mays
gctatgttaatcctgtcttgggtggggatccaggtgacgctagatttccccccttttgcctttcactctttcactcgggagggaaaggttgggttcctgggtactaacatccaatcgctctgcttgattctaccttattttctaatcactatttccgtgctcttaatgcaagtggtgggaaggcaaagtaaatattgtattgccggttttggggacatattcttggggatattccggtctgtgcaaacatatctcttgcccttagttcagtttgatgcccataccagtattcagtactggtggggagcgcacatatcacaaatcctgattatcctccgccgttggggagatgagctccccacaagatcccaccttcaccttggcctcagcggctgcacaagttcatgcttccgctttggacttgctccctgtctatgccca

SEQ ID NO: 375544 - DNA, 172 bp, Zea mays
gtttctctagcctccaagtcagctttgtccagttcatgaagtgccactccattgcctggtgaccacagcaatcatcctttcaccttgctgtggccagagtctctcgtgaagtttgttacccatcaccgtagccgtgatgagtctctacgttgatcgaacaactcacgctttc

SEQ ID NO: 375545 - DNA, 351 bp, Zea mays
cacactttgttcggaagaagcttcgaaccccttctggccatctctcgtcctcctttcaattcttgagctttgtgcttccatctcctctcctctgctctcttctttgtctctgcgtgcctgttcttgtcgtctcgctcgatcgtaagtgcaacggaattaagaatggcgtcgccgtcagcgtcaggagagaagaagactacgatcctggtggcgaggaagggccggctgcggcagcgctaccacggcgagttccgcctggtggccgggtgcgtgccgttaccgtgtggtcgccggcggccagacgcagttggtcatggtgttcacgcccaacagggaccacctcgtcttccc

SEQ ID NO: 375546 - DNA, 376 bp, Zea mays
cccactcgttcgcgatgattgctgggcagagccacaacgtgacgctatggtacgcacggcacaacacaagccaatgcttcaagtctcaacttacctgagctgaacgacgattggtggcgagacaagagcctaatgctgcttcggccgggctctctgtccctggtgggccgctttgcagggcaacctggtggccaacaaccagaacggttccgcaccggatcaaagggctggcgggctacctttcacgggaaggggctcaagctcgggatctactccgacgccgggtgagagtgacgagggagaaatagctagcttgcgtgcttgactgcttgcctccggcggcacttggtttttcgccgtatagtctaccacgacc

SEQ ID NO: 375547 - DNA, 296 bp, Zea mays
ggcatgcacgtcgtcgacggtgtcggtagtggtcatgttatgccgaccatgaactgtgcgcatatccagcaaggtcaacggcagccaccgcggtcgaaggaacatttttcttccattgctggcctataaatacattgtgttgatctagttggtgtctcattccctggcaggctcgacgtgatcgccgcagttatatctcatcaactgccatggcctcctgcgtgtcgatgtcgacctcgttcccgaggttgctgttggtgctccagctttgcggtggcggtgctgaccaccctggg

SEQ ID NO: 375548 - DNA, 125 bp, Zea mays
ctctttttatactccaaagcagcatgaccatttggcaaaggggcgctagaggccagcatcaggccataataggccagagagcatactaggcatggctacgtccgtggcctgcgccttcttcttct

SEQ ID NO: 375549 - DNA, 166 bp, Zea mays
ttcttttgaggaaggcgttcgccacagacgctgattgccctggggaagagatgggtctcttctttgggaagctgttcagtcgcctcttgtcaagaaggagttgaggatactcatggttgggctcgatgccgtctgcaagaccaccatcctttacaagcttaagctt

SEQ ID NO: 375550 - DNA, 210 bp, Zea mays
tcggtttttttttccgggacgagccggggacggcagcgtggacatcgaggtgtgcctgcctccggagaccatggcggcgctgctccacgacgccgagtttatgcactacgtgtcgagcccgtcgtatttgtagcgaagcactgtagtcgagcgggcgggcgcgagtgggccaatggtcgtgacatgccatcaggtacctgttggaatgct

SEQ ID NO: 375551 - DNA, 181 bp, Zea mays
atattttacagaaaggcaaagctacatgcataatgtggatatatgctgacctgtgcagtggcgcctccagcaggtccttgcatgcccatgtttacacctggtgcccctggagttggtcagtatatgttttattgtcagtcaccatctgccttcatcatcccttaggctggatttagctttt

SEQ ID NO: 375552 - DNA, 193 bp, Zea mays
gccgctaagcgatggcgaaggtcatgacgggcgccgacgccgccaccgacactgtcaccgacgacgacgacaccgacaccgacaccgtcaccgacgacgacgacaccgacaccgaagacgccgacaacgtcaccgccaccgccgcagagaagccgaagcacgccgagaagccggactacgccccctaaaacgg

SEQ ID NO: 375553 - DNA, 154 bp, Zea mays
ggtatgccggaatggcgagacacgtttttggaccatgggtgctgtttgcaagaagctgaactagacttcagtggtagtatatcattgtgtgtggtgatggtaactagtatggctaatggggaggtatttggaatcggcagtgaaactagcttgg

SEQ ID NO: 375554 - DNA, 427 bp, Zea mays
ctcgttcttctctccctgcacgccggatccccgccgtccccaccatcgcccgtgttgggtccgacccaggccgctcatgcctcgccgcgcagtccttccgtagcaccgccacaccgcacgcgttcgcggcggcgtccgccttggcgccggtctcgcacaccgtcccgcagcggatccaatgacgcctcctcaccctccgctgcttcctcccatcccctctcccatcgaatccacgattacgtgtcccggtgtccacccagttccccgctcgccgtcgatgaagggcggccgcctgcaccgaccggagccgtcgcagacccacctcgccatggcggcggcggtcgcggtgccttccattctcgcccctaaccacacttccctttcatcctcgctcactttcaggcggccccattccagttgaaggagc

SEQ ID NO: 375555 - DNA, 452 bp, Zea mays
tttcactcgtccatgttggttgtttggacgaatttattgcgctcctcgtccgctgcagtccgtttacgagcgtgccaacagcagtttccatcgacactcattttaattggacataattcccgtttttattctacccccgccccaactgcaaattccacctcaaaatcctcgtcattacccccgccagcgccaaataacactcgcaagcctaaagtcgaattacgccctgcccccgtgagaccacaaagaggctcccagccttcatcaagtaccgagtccgcgacacgtacgccagtaaaacccacacttaactcaaatctccaacccaagactcctccgtcctcctcgtccagtccattcttgtcagaaatcaagaatgaagcagttccgtgacatagagctagcagaggctcatggcatcctttaaccaccaccagccgacgcgaactggt

SEQ ID NO: 375556 - DNA, 297 bp, Zea mays
ctgcgtacgtacgcgtgtcagatcagtgatctagctagctagtctgagctgcaggcattaacatagtaagggactgaaaaaaatgcttcgtgtacgtgtgtgtacggcaggtcctgatcaaggagaggagcaaggtgtccgggatcaagatgaactccgccgcaatcaccaagtttttcgaggagctggccaagatcggtgagtagatccatgtactacataggtcacacagtgacagtgtcagactagaccgctaattaataaatccacatctctgatatcttcatcaatgaacag

SEQ ID NO: 375557 - DNA, 306 bp, Zea mays
gttttatatcgcgagcggccgcccttttttttttttgtttttttttttatcagactgccatccattcccttcggctttgcaactcaaggtcctctaccttgataagctcaaagttttacgtgaacaagaattgccgtgggtccctcaattttatttctaaagaaaatttgaaacaagggtttccttgtaattccctttgaagatggtaagcaatctaaaattctatgtaagatgttaaattacactcaggagtcaagacttgacaactagtacccccaaataattttcccttttttagtcctgttt

SEQ ID NO: 375558 - DNA, 251 bp, Zea mays
gtttgttggctctagggtttttgccacgccgccgccggtctgcccttatcaccccaccgatataccaagatgacggtgcaggctgcggaggagctcgccgcccagatcgagcagcagaagctcgaggagcagaagaccgaggcagaagaggttgtggtggaggaggatgacgaggatgatgaggatgacgatgatgatgacaaggatgatgatgaactggatggacacgaaggggatgggagtggcatgtc

SEQ ID NO: 375559 - DNA, 356 bp, Zea mays
acggccggtctttagccctaacgccatcgtcaagatcaagaccagagggccctgccccgccggcatccccgccttcccctgtgtcctccccttcctcctccgaggaggctgtgcggagcaggagcctgcacgggctcatctccaacggcggggccgggagcgggctgcgcttcaccatccctaaggcctgccgcacgaagcccgccgcggcggcagctgtgaagccggagaggagcggcggctaggacaacgccgagtcagaggcgatggccgaggtggctgccgcactgcggtccgtcggggaggggcttcttcgcatggaggagcccaagctccagctggcgcttcagatggag

SEQ ID NO: 375560 - DNA, 319 bp, Zea mays
gccattctttccgtctcgctcgccgacgcgggggccagcagcggatgccccgtcgtggaccacaacgtgacgatcccgcaggacgtccggctgtccctcctccacagcatcgactacctcctcttcttcgccggctgctccttcggcccgggcgccggccccgaccccaggccgccgaagccgccgtccatcgagcccgtcacctgcggtgagtctggtgacctgggcaagccggccgccgccatgacgttcgtgcttccgcgcgccgaggtgcctccgggcgactgggcgagcgcgtgccggaaggtctttcaggtgc

SEQ ID NO: 375561 - DNA, 486 bp, Zea mays
gtggtgtgctatttggagacgaactcccatccggagcacacatacatatatcggtagctgccctgagcttctgattcttccttttgagtggtgtatctgcccctggccttattacctgctcatccctagaagaagattgatcaggtgaagcatgagatggagctttaccctggatatcttcaagaccatttcaacatccacaaactcagtcgtctgcagccgctgccgacgagcggcgcgcccgcccgctacgtgacatcgggtcccgtcggggccatggggatctacgagcggcagcgccacctggtgcccaccggcgtgtggggggaaccgttccggctcgacgccgacgccgtggccatgcccctgcccctggccgcgtttcccctcggttaccgtggccacgccggcgcccctcgacgttgtcgagcccgtagcagaggagatcaagcttggccaacgactggtacctccgcttgctttgca

SEQ ID NO: 375562 - DNA, 377 bp, Zea mays
gtttttgctggcctcgcccctgttgcggcgccgctcgtgtccccctgttgctgcgggcgctggtcggctcgtttgacctcgtctgcgtagattcgtcgaagaggtgggccgtggctgtggctgaggctgagtggggcgagcccggaggacttgagaagcgatgcagagggaggtgggcccgcaggtggcccctccgctcttcatccaccaccagatccagccgatgcctccccacgccgcggccgccgggaaaagcgcggacagccgtgtccggcccgcccggcggcgcccgcggaggccgctgcggggaactggaaccccaggctgtgggactgggacagtcgggcgcttaccggcagggcgttgggcgatgcact

SEQ ID NO: 375563 - DNA, 350 bp, Zea mays
cggactcgtttgcggacgcgtgggcgcgagcggcgccctttgtttttttttttttttttgtgttttttctttagaggaacactctgtatattattctggcaaatcagggtacatcagaatgtattagagatagaagaaccggttacatgagagggaaggagaggaagcagatgagagtaatagagaaatgtagtctttagtttgtaaattgattctttgatgatcctccacagcttcaacatgtcttctttttatagctgaatatgcctaattgccatttgtcaaagaccccacatgacagtatgctggcatttcccaccgcttcaaatgcgggttggcccccaaccctt

SEQ ID NO: 375564 - DNA, 310 bp, Zea mays
cgcgtgcactatcaacaaagcaggcaggcaggcaggccgcactgtcgcaggcagcagcagcgttcgttcacaatgacagctagtcttgcctgagctccaaagagcgcgagcgaggggctacagaagcgcattggcgccgcgcgcccgcagcgtggcctcccgccgccgatcgccggcaccccgttgctgcgttggcttggctgaacagcttagccagcttgctgcgccatcaggcagccgaaacgcggcgtccccgcagatggcgggccgccgtctggtgacgctgacgctgctggcggccgcgttcctg

SEQ ID NO: 375565 - DNA, 401 bp, Zea mays
cccacgtgttcggcgcggcggcgatgccgagctcgcggcggaccacgggccgcgggggcgcaggcggaggcagcgcgggagcgggtgatgcaggaggcggcgacggcgaccgggtgccgccgttcatgggcaacaaccgcgaccacaacccgtgggagctgcgctcctgggcgcgccgcacggggttccacccctcggccttcttctcgggggagtccaactcctccttcgcctcctccgccgcgccgcaggccccgccgtcgccgccgtctcccccggtctcctcgcgtcgcccgccgccggcacgggagcgggaacccgaaccggacacggaggacgaccttgttcccgcgccgccactggaattagagcgcggtgggcccgcccccgtccgcggacgc

SEQ ID NO: 375566 - DNA, 363 bp, Zea mays
ttcgaccacacgaggacacacgtcatacatggtccatgacctccattccactgtagcgataacgcttacagaattggtgcataccaatgtccgaggttcactggagccatcctccccaacagcaggagcttcctgtgcatgataatctgctgcctctcgttggctatccggagagatacaccagcactctgagctagggatcacacgtatccaaactggctattgtatcacacataagccaatgacaccatgcacagacgatctaacagcgagctcagtagagacacctctcagaggtgatcaggtgcccctgcaactcctgagcctgaagctgtggcaggctgcccttccagaggccaaggc

SEQ ID NO: 375567 - DNA, 528 bp, Zea mays
ttcgactcgcctctctaggtttccttgcagccgcatgctgtcccgctgcactgcaagctagcgactagcagcagttgccaacgaccaccaccgacgccgccctcacctcacctaccacacactgccgtgatccccggcccttttgcctgcagaccgcctgtgccttttgttccctgtgccctgggaggttctgttctgtccccggtcgatcgaccttctcttctcgtcggagttattagcaactgcctgttgtccagccaaactaaaacccttttgccgtcacaaaccagcttagctttgctgatcagggcaaggctctgccggatttttttacaagaagaacctagctagcttttcaggccgtcactctgccgaaatttttcgccagaaacactgctgtctagggcgtcactctgccgaaatttccggcgctccaaaacctgcttgtacgtgcagtgcgcgcggcaccctgtcaaaagatttcaccttgcctgttcaagggaaactctgctgggattttgtctttct

SEQ ID NO: 375568 - DNA, 283 bp, Zea mays
agcgcgtcttttcaggggaggcccggcatcgatttcgaaggggctacaccaaggccaggatctggtgagcataggtggatggtgcgagcctcggacctacactttgacttcgataatgctgaacaagtacaacccacacataaggaatatgcgaggacatctactgtgcctatttgtatctacaatacagacaagaccagaggttgataccctgttgactatggcacagttgacaaagggagcatgcactatggcagtgcacatttaataccgagatgcagtg

SEQ ID NO: 375569 - DNA, 144 bp, Zea mays
tggcctccgccgcggcgccgagcggcgcgccaccggctgggaagcgcccggcctccagcggacgggagggagaccagatggtcatcacgccgctgggcgccggcagcgaagactgtcgaacgtgcggtcacattgaccattaag

SEQ ID NO: 375570 - DNA, 529 bp, Zea mays
cactcactatgtgaaagctggtcccctgcgggtccgggcccgagatttccgggtcgagccacacgcgtgttcactcgtgcgcccatggatcctattgctgcggcacgccgagcgctgggctggtgagctcccgttctactgcgtgcctcggacttatcgcggtgctacggtaatgctgaactggtacgggccctcgctgacgaagtggcgccgccatagtctatgacgatgtcgatctcctctacacacaagaccagacccatgctaccacaggggagctattaagggtgatctactgggatatcaagtacgggaggactcgtatgaccacgacaggcctgaggagattccaaagaagtttcgtttgatactcagggacgagatggcgacgaaagcagttgcccttatgagaacatatcagggtgagcaggttgaggctgccatgcacatgcacagccatgtcactgagcatgagcctgatcatgaccatgatggtgaggatgaggacactgcgggagatgacaacgac

SEQ ID NO: 375571 - DNA, 461 bp, Zea mays
actactatagtggaagctggtacccctgccgggaccgggcccgagatttccggggtgagaccacagcgcgcgctttacaagggggctcacgtaccctagaagaggaggtgaacaataaaccatggctgtgagctacaacccaaattcgtacaccggccactcctcaaagatcagcgaatgcaccacatcaacctacacccctgagagtgagagctccaccatattcacctgaagtcgtcgacaacagaaggcccatatctaaaccaaggtcatcaatggcatgccaaaggattgatgcaacctactacacaaatacggcctacaaagaatagaacagaaatgaagcgattcagatagccctggaaggagaacaattcctagtaacgaagaatgtaccatgagaaatgaactatggccatcagagaccaaaacagatgttattgatgcgaaagagaacaatg

SEQ ID NO: 375572 - DNA, 419 bp, Zea mays
agccttcgtgtgacaccagtattcaccacctgagacctgggatctgatcgtcaatgacgagatgtcatcatcactaccagacaggatatctgaccatgtgcgatggccactggatccatcttggctagcagcacgagggtcctaagcatgtagaccttataccgttggcgcgctatgctgagagaaagaccacactctgaacttgagaacagacatatccatactgtatattgaatctgggtgaaggctatgaaccatgcacagaccatacaacaggagcttagcagttgcaacccgacagaggtgagcagggaccccttccaactcgatatgcataagcagaggcaggctgcccctacagaggccaaggcttgacgagaccaacgcctgatgtgcatgcggacggggggaacgaaaag

SEQ ID NO: 375573 - DNA, 471 bp, Zea mays
cttcgttcaacagcacacttgtcatagagaaatacatgctcgttggctgcatgacagcagtgctatgatccctactcagacaaggaagcatgatccgcaagtcacatgtggctcaggtgaggaccatcactggctgaacggccacgtagtggctcttacacaatgtgagcacatgtatgcaccttgagcgccgctaatgctagacgagtaaagacacacagttgctcgtagcttgaccaacaagtgatcatgcttccatgaatatccaatgtgggtgaaggctatgaaccatccacagaccatactacagaagcctagaatttgcaaccagacagagggcagcaggggccccttccaactcgatatgcataagcagaggcaggctgcccctacagaggccaaggcttgacgagaccaacccctgatgtgcagtcggacggggggaacgaaatgcgactgcttaacactgat

SEQ ID NO: 375574 - DNA, 429 bp, Zea mays
ttgcgacaacaggaggcaatacctgagacatgtgccctgccgaccaatcaccaggagtaatcaccctcacagaaatgggataaaccaaagtgcgagggacaatggatccatcctgcccaacaacaagaggttcctgaacatgtagatcttataccgctggcaggctatccggagagaaacaccacactctgagcttgagaacagccatatccatactgtctattgaatctgggtgaagtctctgaaccatgcacagaccatccaacaggagctcagcagttgcaaccccccagaggtgagcagggaccccttccaactcgatatccataagcagaggcaggctgcccctccagaggccaaggcttgacgagaccaacgcctgaggtgcagcctgactgtgggaacgaaaagcgactgctcaacactgat

SEQ ID NO: 375575 - DNA, 297 bp, Zea mays
cttcgttcagaaagtacacttgtcataaagaacatgcatgctcgttggctgcgtcccgcagcatctgaaccccatggccaagatcaagatcgggatcaatgggttcggcaggatcggaaggctggcggccagggtggctctgcagagtgacgatgtcgagctcgtcgccgtgaacgaccccttcatcacgcaccgactacatgacctacatgttcaagtgcgacactgtacacggacagtggaagcaccatgaagtcaaggtgaaggactccaaaacccttctctttggcgagaagg

SEQ ID NO: 375576 - DNA, 503 bp, Zea mays
cttcgtctgacgggaggcctgccagtgataaccaattgctttaccaaggccagaacaggtcacatggatggatagcacgaacgtctatccaaccttctgctatcaataatgctcgctagagtcgacccaacacatcatgcgaatctgggagcatttactggccccatctgtattcctcaactagacaagaccttgagttgactccccgatgggttcttgcacagcagacccaaggagcagcattgtcaacaatcctgctataattccaagattcaatgggtcgtcaaccgcgaattcgtacgccagtgcttagcgctgcgacacagatcattgtaacttcaatcccaaagctgataaatgtggatagcttagactaacgctatcctgagtgcacactggatgtcgctcatgtgtcccactcacgacatcaggtcgcaatgtcaagttacctggagcagaagaactgccagaagtctgaagattgatatcaacactcccatggc

SEQ ID NO: 375577 - DNA, 340 bp, Zea mays
tcgtttgacaacaagcggctacacctgagacatggtgccctgagcgtccatatcaccacaaggtacatcactcgtcacagaacaagcactaaaccaaagtgcgatgtacaatggacacatactgcccaacacacaagacctttctgtacatctgaatcttctaccgttcgacacctatccagagagaaacaccacactctgtgcttgagaacagccatattcatactgtctattgaaccagctgagatcttgaaccagcaagaccatcaaaggagccatagcgcacccccagagtggcggacccctccatctcgtatcacatagcagggcaggctgccct

SEQ ID NO: 375578 - DNA, 285 bp, Zea mays
tatgacgcttgggcatcgtcgtcaccgacaagggacaagggatgcaggtactccaccaaggacttcaagggcagcgggcccggctgcaaggtcgacaccgttgacaccaccggcgccggcaacacatacgcaagcctcactacatcaaaacagacccatgggcgactgactctgacccagctaggagaggctacgaggggctctgatgggctcctactcacgagtgccagtgtggaccatcaagaagggctccatccccgggctgtcgagagtcactatcgccca

SEQ ID NO: 375579 - DNA, 319 bp, Zea mays
tccacgcgtccggagagagcgcggctcctacccggcggcggtgaagccgcgacgatccaaccgagcagaggcgccatggctgctcccgaagcagcccgatgctgcgtcgggatcgcgcggcagtacaggcgctggcggcttatgaaacatatggtgtggaaagaacgactaagggtagctagagacaccctatggatggaggggaccgtgaggtgcatgaacagacaccccacaactttgcttctggagatccatagacatacatgatggaaccaccgattcacggagtgtcgaaccgtctgaaagcttgtgccagacg

SEQ ID NO: 375580 - DNA, 96 bp, Zea mays
tcagggaattgcactcagcttaggggacaagatcactctcaagcagaaaggtggcagttaactgtgacaagtaatcgcagttgtatcatcatttag

SEQ ID NO: 375581 - DNA, 164 bp, Zea mays
gcgttcacgcgtccggcacacgcgacgcgcgctgtgccttctctctcgctgctgccgagctccagactccaaggcaaagcctacaaacacatggagccgtcctcagtgactagaaattgcactagctgatgcataggtagcaaggaaagaacgcctttacgctg

SEQ ID NO: 375582 - DNA, 312 bp, Zea mays
tgtccgctgcctgctcgcagttgccagcccccgccgcctcggaggacggaaggaagcgaatcaaccgcgactgtctccgacgggaataaagcaggcgaggccagccggtcgcggcacccccaagcctgagctgcgtcccgacaacgagccgggtgccttttatgaccagaaggatatcccaggaggtcagtggtggatgcttgggctggggagtcagacgcctgccctcaaacacatatcgattgattgcacgggagctcgctcaccctagatgagaagaacctccgtcttatctttgagggcgaggtactc

SEQ ID NO: 375583 - DNA, 185 bp, Zea mays
tttatattcttcccgtccaaagacggagagaggaaaaggtacaagggcaaggcaagagagaggcgtcgtcgtttgatctgctgccggagtgcgaagaggaagaggaagaggagcgccggagttgtcaagatgtttctgtcggactgtctctatggggctctgaagtcgctagatctgatcgagat

SEQ ID NO: 375584 - DNA, 167 bp, Zea mays
atctcactgctccacgctccagcgaaggcacacaaccgctgccgatgcttcatctgccaatcttcatcttcctcgcagagtaccttgctggcgaacaggacagagccgacggaggaccaacgacgcccccgtggtcggcagaatccagcccacggaggaggaggtga

SEQ ID NO: 375585 - DNA, 382 bp, Zea mays
gcgtctcacgcgtccgcatccctaggtctttccttcctgctgtgcgaaaccgagcacccgaaccctaactttctatttgtatccggatctgatcgaatctatatgcatgtattattcctactaacatcgattgtttgcagaaaaaaatcgggtctacatgtgtacacccatgcgctttactgggttcgccccctgatgttagaattaggaagttgtatgcatgctagaagcctataattcgctgagcagtggacactttctctggtatcagaggatcaatgtccaattattatgatgactacgatgacattgacgggatggaggatgattatgatatggatgaacctattagatgacttttaattcgtgcatccgggggttt

SEQ ID NO: 375586 - DNA, 382 bp, Zea mays
ttatcactcgatctggaaggggaagctgttggcggttggtctgaaggtgcaggacattggggaagtgaaaggaagcagagaggttgcgagtggtggcagcacatctggaggaggacaaactcagagagggaagcgacagtcagggtgggggcaagggcagaggtggaagaatggccctggagaaggatgcctctggaatctggatcatgatgtatagataaatcaagatcacagggtggaccagactctaagaaggatctaattatccataaggatgggaatagtcaaaatattgcagcacagactttcacttttcgtgagctcgctgcagccactaagaacttcaggcaagattgccttttaagagagggaaggttttggt

SEQ ID NO: 375587 - DNA, 498 bp, Zea mays
ctggtacgcctgcagggatccgggcccgagaatcccggggtgagcccacgcgcgcgttcgtacttcgataaaaaaggagacgataccggggattgttaccgaacgcaacctcaaatctacccatgccggctcgagccagccccgcggaggaaaagcatctgcaaagaaaggccaccacgccccctgggagcagcaccgccacgagaagggggaccgggaaaggcccgggacgagggcagaggagagagctgcgccctttatttcgcaacaggcacgaggagtctgggctggcgccatgtgacgctacgccaagaaggcgccgggccgctccgacccggggtcgatcaggtcgagggcggctggggatccatccaaatgggaatgaagaaatcctgaggacactggggatggtgggccatctggtagggatcacagaaggagagatgtgaggtgaaaggggcgttatccaactcattccgcttcgggggcacaactcat

SEQ ID NO: 375588 - DNA, 197 bp, Zea mays
gatcgcgagcggccgcccttttttttttttttttttttggatgataggataaacagtctcctcatatttcaaagttccagattctaaaggggaaaaacatgaatggcctgtctatgtgcttctctcaaattctaggctatagcatatgtcaatagttgttaatgtgttcacgacttcactttaatttctttcattat

SEQ ID NO: 375589 - DNA, 267 bp, Zea mays
cgcctgtctgaacggcctgcaatgcatgcgacagtacagaggctctaacgacgccgaacgcatcatacacctatgatgcgcgagtactgggcgccacaccgagaccccgaaacgcgagcgcagagaacagacgatcggacacgcataccaaaacagcaccgcctagctaaactaagggacctgaacctgcctctacaagcacaggcgaaacgacaggaagttagctgccgccatcgggtgctgctacccggagcccactggcaagga

SEQ ID NO: 375590 - DNA, 141 bp, Zea mays
tgcagcccgcgccgagggtgtccatcccggggcgcgcagctcgactggaggtacttcatctagcgaacgtcactggctgcgctcccaacaagctctccaagattaaggttgtgaggttatcgattgcacaagtgatgacag

SEQ ID NO: 375591 - DNA, 159 bp, Zea mays
cagggtcccggcccgaatttccgggtgcgagccacagcgtccggtcaacattgcatagagttgtggcagaaggggggtgcatttgagccatatagcctagccagcatcgatgaaacagcagccattcccgcaaggccatttcttcatatccaacaccta

SEQ ID NO: 375592 - DNA, 192 bp, Zea mays
ggtttttgcacgccgccgccgctctgccccttccaccccaccgatataccaagatgacggcgcaggctgcggaggagctcgccgcccagatcgagcagcagaagctcgaggagcagaagaccgaggcagaagaggttgtggtggaggaggatgacgaggatgatgaggatgacgatgatgatgacaaggtcg

SEQ ID NO: 375593 - DNA, 303 bp, Zea mays
aaaccagagtttatttttgagaacacgtgcacctgaaaaatccttgcaaaagatcaaggcctcgaacaagcatgcatgccacatcttcgcgtaggaatcctgcgggaagcttcaccattttgtcggagcaaatgaactgtttcgtgtcctgtagaaatgtagaatccctatggaactctcgcattcaagcacgcaggccactagcggcggcgcggtcatttactgctagcgtagcagcagtggctgctttgtgtctgtaagccggggttgggctgcgcctgcgcggcgaggctactgtactga

SEQ ID NO: 375594 - DNA, 93 bp, Zea mays
gtttgctctcgcccctctctctctctctctctgtggcgctctctttatacctgtcgaaaccccagcgaagagagagcgccggaggccccccca

SEQ ID NO: 375595 - DNA, 321 bp, Zea mays
ggaagcctatcttctttatttatctttcctttttcatacatgattacaagtataccttcagaatacctgaagaatatttgaaagtacaaggtttcggagctttggatgcggagcgatccgaggtcagctgattacgtgaatagtttcgtccccttgcacgtgggcaatgtgcccatatttataggggcaacgtagtgtacaactccgtatgaaattacaactataacctcaaaccttatacatgtgaactataaaatctgctaagggtaccgctgtctttttctcttgaagatgtggtgcgcacatcgatcgatccttcct

SEQ ID NO: 375596 - DNA, 472 bp, Zea mays
tctttcttgcttctcctgttcttggcttgtcatcttgtcaatgcgtcatcttgcacatgtgagctagtaagtacaaacaacaaacgaaaacaaaacattcgattgattttttgatgcgccaaagacaaattttccgccaaacaaaaaggcaaacgacacataagagctagagaacatctaaaaccaaaccccgataacaaatgatcatggtggatcaagatccaaaacccaataagagaacaatcttgaaggacaacgaacagacagctaccagaacggaaaaacataaggtagagatgcaaacaaaaatgaaaggggaaaccaactcaaagaagaaaaaaattgatgaagatgcagatcaagatgacaatgcacctcaaactcaggtagtacttaccctaattcatcattgcctgcttccaatctttggacttgaaatttgcatatcttggaattaatcatgactacaaac

SEQ ID NO: 375597 - DNA, 238 bp, Zea mays
gcgtagccttcccaatcaatcgcattcttcgtgcgggacccatttcaggtgccgacagaccagataccagagcatacaagaagccgtttcactccacgtcgcaagggaaatgggcaccgccttgttcgcactgctcgatcagacgctgatgccgtcccctttggcgcacaacggcggtttcgaccgccccaaacaggagatcttctccatcttagagtccaacttcctatttggcgcg

SEQ ID NO: 375598 - DNA, 311 bp, Zea mays
ggggaacaaaaaaattttctttatccccccgggtttcaggggaaaaaacccttaaagggtttagggggtgggaaagaaaaaaacccccccgttgcacggtgggggggtccaattgggggaacccccccacctttacagggactttttttgggttctaaaaaaacaggggggggggggaaataggggggattttttggtaggggggggggaaaaaaacggttttgaaaccctggtttggggcggaaaactttggggttttcctttttgggggggggaagggggctcccacttaatttaaaaaaggggggggg

SEQ ID NO: 375599 - DNA, 435 bp, Zea mays
aaagcacaacatcatactccatatatttatgcaaaactatttcatatggactctagtcgaccttgtgagatgaatttgccagtcagtcgtgtatgggcattgcataaacatacacaagactgcatttttgtttccctcttgaaatggagaagaagaaaaaacatcaattttaagttaataaatcaaatgaatcacggcccatatatagaatgaagatgctgtatcagtcctgtactctgtggatgggagcagtcttggttcttgaagtaacaatggacagagaacgatgtgtggtccttgatcatttttccagttagccttcctgagtctctctagtaggccgctgctttggattgccatgcgctatagatcatacttggaggaggcgagcaggagcttcttcgcgccgactttcatgttggggcccgaggcgaa

SEQ ID NO: 375600 - DNA, 290 bp, Zea mays
ccctcgtttccggctgaaccggccgtccgacgcctccgcgttcgcggcatcggaagctccagcgaccagctgctcgttcagccggtcgtccctggacacggcggcggctgtgcagacgccggcgccgccgagcgccagcccgctggacccgtcccggttccacaaggcctccaacagggagatccggcgcgccgccatcacccgcgggcggcggctcaaggtgtgcacgtgcccgtagccggaccaccagcaccgtcgtcgtcgatagcgcctgtcgctgtgggcgccct

SEQ ID NO: 375601 - DNA, 179 bp, Zea mays
gcatcgtccacagagacatcagagagcggtcctccttgtgagtctgagctgaacaggaggaggaggccgcggccaagcttgagactgtctgccaggtggacactagggaagcgccttcctcttaagatccaacccccaccccttgcgagctccggcgattggtcccctgggccgcggcg

SEQ ID NO: 375602 - DNA, 173 bp, Zea mays
aaaaaaagggggggattgcgaaataacttacttttttccatataccactatgggccggtttaaaaattatgaggcgctcccgctaggaagggtttttaccaaatcatgggaaacttataacttcttacccaatcaagggaaaaaaaaaggaaaaagggggaaccgggaaagca

SEQ ID NO: 375603 - DNA, 384 bp, Zea mays
gcgcatttatatacgtcgggatgacgaggtcaccgtcaaactccttcacggcgtcctggttcgcgtcctgctcgccgccgaccccaggggccgcgtcgaggcaattattgtctgaagccgcggtcgctatcgcggatggccatcacgaagcggcggccgcccatctggccgccctgaagcgcgcggctaaccagcacggcgatgcggaacagcggctgattgccatgatggtggccgccctgtcctcccgcattgctccggccgcctccgccccatctcaactcctcgccgacctctgcagcgtcgagcagcgcgccgggtcccaactcctacaggacctcttcccgtgctttcgcgtcgtcctccacgccgtcagcgccgcca

SEQ ID NO: 375604 - DNA, 348 bp, Zea mays
tgtgctgcagcagcagcatgttcccacaggcagatgcgcatccagcccacgagcctctcgccggccgggtggccatcgtgacaggaggcgccgggggcatcggctcggcggtggccgcgcacctggcgtccctgggcgcccgcgtcgtggtcggcttcatcggcgacccggcccccgcggaccagctcgtggcggccctcaacaactcctcgccggcaggcaacagcgacccgcgcgccgtggcggtggcagcggacgtgtcggacccggcgcaggtggcgcggctgttcgacgcggcggaggcggcgttcgggccggagctgcacgtgctggtggccccggcggggg

SEQ ID NO: 375605 - DNA, 261 bp, Zea mays
cttgctctggccagccattcagtaaccagtagatacaatacaaatgagctaaacatgggaaaatattttatgcaatcacttatattggtgcaagcgtacaatcaagcggtttgttaaatctaatctaaatctaatgatgactgttattttatatttaaccccttccacctaaaatatagtacctattttacttttaaccttttccatataaaaccgttggatctagattggatgctttagatagtttgattgcacgcttgc

SEQ ID NO: 375606 - DNA, 386 bp, Zea mays
ttcttcatcctaatctcccaccacttcccccacacactcccctcttccgccatggtcatggacaagtccaacctcccacagccgccgccgtctcctcccttcttcgccttctcgctcaagtccctcaacaaggcctcctacaagatctccaagcagtcgtcctccgcctcttccgctccctctcccgctcccccttccaccatgagagcgccttccccgtcgccgccggctccccgcccacccgcaccacttccgccgccgcaggcctcctccgtccctgccgaccacccgcctccccagcccccggtgtacaacatcgacaagtcggactttcgcgacgttgttcagaagcttaccggctcgccgttccaccttttgccggccca

SEQ ID NO: 375607 - DNA, 107 bp, Zea mays
gttggttctcagccggtttttttgtcgcccggtacgccactgcgcagcggccacgcgtagttcgacgtcggagacgttgagctccgggtacccgtgggcgcccacca

SEQ ID NO: 375608 - DNA, 324 bp, Zea mays
cctacgtgtgcgcaccatcctgcttgtgccagttacttgtgagagaagagatgggaggagcgtacctgcagccaccggatccacacagtcacagccacaaagcgtcgagcagaaaacctaggtgtttcctgttcaaaactacctgcgcttggatcgcctgtggttttctctacttggctctgctccacctgctctgctgctcccccgccggcagtcaacgagcgaaggtctctcctctgctccagtacattaacaacacgtgcttcttcgtttcaacagttccaggttctggtcctgcggtggatgtggaagaggaagagaggg

SEQ ID NO: 375609 - DNA, 51 bp, Zea mays
aaaacacccgcctccgtctccatctccggtgagcaggaatattgggaggga

SEQ ID NO: 375610 - DNA, 322 bp, Zea mays
gctaccaaaggagattaatacactacgaataactgacatatagagggtcattatttgcacagcggtatccacgaagctgattcctcagcaaagaatttcttctcgaacttaaatgctgtgccgtgaacacaaacactcgaatcacactgtccatggattcataactcgtcaggtaacatgcacaactctagcaggatcaggtattcaggtgggtcctaatctaaatccagttccttcctgctcttcacagtggcgttctgcttcgactcagggtccaggacattcaagtcccatgccgtggcaaggtaaccgtagaggaccc

SEQ ID NO: 375611 - DNA, 206 bp, Zea mays
tttacttcgcgtccgatgctgaaaagcagatgaaagtggagaagcaggtgacggtggaggacactgtggtggtcccgaaggtgcttcattagcactcttttattatgatggataaaccgatctttgagaatgaatctcactccaataattactggtcctatgggaagcatttccccgctgtagtgtcctgtatttcaatatgattt

SEQ ID NO: 375612 - DNA, 192 bp, Zea mays
ttttccgcagcctttttttttggcccgcgtcgcctcgcgccggacgccgggctgcttctgatttccgaccggtcctactcggagtcggccggatttcctagtccttgtcgtacgggagggtgcggcttactggcgcggatgtaagtgaaggccgtggcaggggcagggaaggaatgcagaggccgcggcgag

SEQ ID NO: 375613 - DNA, 460 bp, Zea mays
cttaacttctttcacttttgctatgtgaatcttttgactttgactgatttcaaaaatgtgatggactggtggtggtgttattttaccatgtctactagtaacaaataaacccccacccttagttttatctggcactgtttttttcattttggggacatggctatgatgtctctttggctatgaataggcaaatatctgaaattttaccatagtacttaccttaaagtcacccaaatgattctgaactctggtatgtgcattggcgaacaaaattcttactacttgtattttctgaataatattatacactacgatgtgtactcgttactcaagcatcactgttttacttgtatcattacatatagttgaacctacaccaatttgatgaaccgagctcttgagtgtgtctccccttacattaaggagtatactgtatgatacataactcagttttggatcg

SEQ ID NO: 375614 - DNA, 363 bp, Zea mays
atatacagatcaagctaacactatattcatatatgtaaagtcacagatcgaagaaccctaaaatgacccttgaaaagatcacagaaaagccgctacacttatttccactcgaccagatgactaatttacaaagcaattcccaaaggtaaacagcagtaggccaggacgacctggaccaccgttcttgaggggctcacttgccccctccaggccctcccagggtgagcacaacatcgtgcaggtcgctgccgcctcgctccggctcggacttgactgcctttgccgggaacccttgccgcgcgcggtggacacagttcggcagcacgaaccccgtcgcctgcggcaccggccgggcgtggacag

SEQ ID NO: 375615 - DNA, 177 bp, Zea mays
agtggcaaaaataaagtaaaattatataccaataggggttcgaattacctaggttgccaactttatattcacattcatttaaccaacataacacatatctttgtgttttattaaaacaaagttccaagagttgaaaatcatgtgctatactccacgaatgccaacaaccgaagacac

SEQ ID NO: 375616 - DNA, 236 bp, Zea mays
attacaagcagggcggtgcaccatattaacaaacaactcgccagtttattcagccttttcttcttcagctccttcttggtcgcggatgttgaagtatttcaattcgtagctattcttttgagaggcaaccacacgcaaccaatttttgagggattgcttcttgaggtacttttttgccaaatacttaaggtatctcttggagaatggggcttgagcggtgacaaaaacctttgtct

SEQ ID NO: 375617 - DNA, 373 bp, Zea mays
gcacagcctgcaggattatcaccacttgaacctgggcgcggccggcgcgcacgactttttctcggcagggcagcaggccgccgccgcagctgcgatgcacggcctggctagcatcgacagtgcgtcgctcgagcacagcaccggctccaactccgtcgtctacaacggcggggtcggcgatagcaacggcgccagcgccgttggcagcggcggtggctacatgatgccgatgagcgctgccggagcaaccactacatcggcaatggtgagccacgagcagatgcatgcacgggcctacgacgaagccaagcaggctgctcagatggggtacgagagctacctggtgaacgcggagaacaatggtggcggaagg

SEQ ID NO: 375618 - DNA, 236 bp, Zea mays
ggccggaacaaaaataagttttggtttcaaaaatccgggggggatacatttttggcatgcaacaaaacaacttttgccacagaaacaagggagcttaccaagaaaatctggtcattacttattacaatttcacacattaacttacactagacattacacactgggcacaacgcatgggcatgaacccacagggggttagttagcttgcagccccttcagggaatcctgatgggggg

SEQ ID NO: 375619 - DNA, 191 bp, Zea mays
agcaaacgcaattttgttaaatttatcatatacgtcagggaataggatccttccctaacaaaaactttaaggtttgctcatttttcttcccttcgacaggcaaacgcatacatgtgccatctctcaggaaacgaaagagcgggcaaatacggagggagaagtgctacaacgtgatagagcccaacaccatt

SEQ ID NO: 375620 - DNA, 304 bp, Zea mays
ttcctcgcgtccggggcggtaaaggtagctggaccgtgcgccagagcagaagagctagtccgctcggagccgaggccggacctcttcagcgcggcaaaggtagctcgaccgcgcgccggagctagtacgctcggcgccgtggccggaccttgccctctcggcagcggtgcgcgcagctgcctgcgcggcggcagcggcggagctttcccacgcagccacgtttggtgtgcttgttcctcctctacgcccgcctactctttttcatagagcgtgtcgtggggcgaccccgtccgtgaaaaatggc

SEQ ID NO: 375621 - DNA, 387 bp, Zea mays
gggaatggcggcatttgaaatagaacagtgtacgactccacaacaatttatctggtgagatacaattccatgggaccacttatatgtcgaaaatgatcacctaaattaatgttgaaccctacattgtgcatcttgtaaacatgttcttcgttgaccaaactatcgaagtgtttggttgtctcatatagtgcagttcgatagtttgactgtctcatgaagcctaaaccaacgggcagtgaaaacattacaaatccttaacgccagttaactgatcaggattatagtattgtggccttgcttcaccctgagtaaagcaggaggaagagaagccatagatatgtatttcggttaaacacatgtatagcaacaaagtataataattaatct

SEQ ID NO: 375622 - DNA, 409 bp, Zea mays
tctagatcgcgagcggccgtcctcgccgtctacagcttactgacgcgcacactgcaaacaactaactggttcatcagagaccaatggtgacgacggtgcctggccagaccgatgagcaagggacgaacgggagtagcagatggctatcaccctgaccaaggcggcacggacggcggagagaccacggtgagtatcgggtcgaccccgaacaccacacgccgatgacgagggactcacacagcccctatacttagccagatacccataggatctattctataaggctgaggacgcaatggcacgactactatacttattgcacagaggaagacgaagcaggccttgccgattcggacatttggtccagcatcagatgagtatcgcacgagcatcaccatgacccatcact

SEQ ID NO: 375623 - DNA, 410 bp, Zea mays
ttcgtagatcgcgagcggccgtccttcgtctgcaccttactgggaggcctacttctccaacgactcactagctatgcacagactagtgggcacgaccgcctaagctagacctaaccccaggcaaatgccactcgaagacggaagctagggcagctagtattcacagcgaacgacggggagcgcaccatgatcatgtgcacggcttgagcttgcgagggcttcgacatggatcccgtacgagtcgcgcctggacagtgtgaacttggacatcactgagcgagaaggagcaaggagggatcgaagcaacggtcgagagcatgcccatgtccccatgaagcgcgacatcacgcccggcccatccgcagcccgatgacgatgattgccttccaggatacgcaggagtacatcag

SEQ ID NO: 375624 - DNA, 219 bp, Zea mays
  unsure (1)..(219): unsure at all n locations
ccttcctccttccgcagcaagctccagcctcccaaagcccccactcccccaatagaccatgccggccgctgcgctctagccgaccgccgnccctccctttcccctcctcgccgacatgtccatcgccgccgtgtccgcggatgggctcctcgcgttggccgacgaggctgagcgccggtatgacttttccggcggggncgcttgcctcgagtccgcgct

SEQ ID NO: 375625 - DNA, 308 bp, Zea mays
tgattgtattgcattgggaccaaacaagagctatgacaagtctcagatagcaccgtgacgattcatgctgtctgggccctgcagtatgcgcggaaaagactggaggtcgccaatgttgctgattgcccccccgatttaggacgacatgttaaggccactggagacgtttgggatggccactgcagcagcacataacgcgcggactgcagctcgcgagagatgaagtggagtcattgcacccagaggataggcacagtggtggtctcaagcacaatgcttggccctgctaaaggactggttcaggtttg

SEQ ID NO: 375626 - DNA, 287 bp, Zea mays
tctgccaaatggaataacatgcttttgttagcattttagagcccaatgagaaggtctgtgaacgggttctgaaacaacaaaggtggatatatgacttgaatttaggtgataggcaatgcttgagtggggaggcaattagtttgtggattaaaccagcaaaagctgtcaagcagagctgctgctcatgtactagactgccgtatagatggtgcagtaagtccaaaagtgatctttgtagggaaatattgttttaaaagaaaaacttttatacacgtgcccacatttgg

SEQ ID NO: 375627 - DNA, 491 bp, Zea mays
tctagatcgggggcggccgctcgcgatctaaaacggcggacggcgccgcggccaccatgcgcaacttcacggccctcctggaggcggcgaagacggcgggcggcggcgtggcctcgctgccccccgacgtcgcgcggggcgtcgacgacgtcgcgcgccgggtggacgcggccgtcgacgccaccgacgtgcgcgcggccagcaactcccgcaggatccggacgtcgctggacgccgtaaggaaggtcctgatcggcgtcgcggccgtgatgctggccctcgtcctcgatggcttcccgttctcggtgacggggaagaagtcccttgtgtccacagcggagtttcttgcatggatcataattacggcgaccctaatactgtccggaactttccttctcctgcacaacgtgataggagacacctgcgtggcgatggacgagtggctggcccaatcggaagggcaggggcagagccacaccgggctggacgac

SEQ ID NO: 375628 - DNA, 523 bp, Zea mays
ttagaaggctcctttctaacgacatatcaagttttataatgaaatgcaagagttgtttattaacaaacatgctgatggctttctagccatggaagcttcacattgtatgatagaaacttatcctggagatgacagtgactccaatgatgaggtgtgcagcgactggtgcaactatgctcagtctgtgcatgatctaggtgatgattctgacactgtacaatctcccaatcatcatccatctcaaagtgttgatcatagctggttaagttatggactgaagcgcccacaaggagagggagtaccagcgaagaggaacgtggaaccaaagagtcggacaacaaaggtagtagatgaactcagtgctactttggtagaacttcaaaatgatcttaagacgccaccaccttcagtgcctatgccttttgtaaccctgatgcaatattgtggcaaaggcttgagaatatgacaattactactgatcaaaagttaatggtaggaatgtatttagcacacaaagatcaaa

SEQ ID NO: 375629 - DNA, 565 bp, Zea mays
tccacgcgtacgcgcgacgcaatgccccacccgcacgttcgcgccgcgcagcgcaggaacccccaccacgcggtcggcgtcggcgttgtcggcggtgctctcgtcttccctctggcttcatctttgttgtgagtttatgcagctaggaagcatgcttgttattgctcttctttgtagtttttgttttcttttctggtgacctcttttcacttcttttttttttgtttttctattttcatcttttcttttttttttcttgtttttcttttatctttttctcccttatttttttattatttatcttaattttttttctctttcattattcttttattttttctttcttttttttatttatctttcttttacatacttctttttttttctctgatttctttatttttttatttttattttttctttttcttctctctttttttttttctattctcacatttttaattttcttctatcatatactcttttctttttcatcttctatttttttttatatttttctcctcttcctttttttcttttttacattctattttctttctttatt

SEQ ID NO: 375630 - DNA, 110 bp, Zea mays
tgcgcgagcggacgcccttactgaaggtttgtttttttttctgctagggaggccgatgacccagagcggcaaagaagaaaaagctgctcccgctcggcacaatgcctggt

SEQ ID NO: 375631 - DNA, 203 bp, Zea mays
tcgagcggccgatggcgatctagaacggtcggcgctgttggcggaggcgaggcggaggacccgcgcccctgctgcttcgagacctcccctgctggccacagtgccgacgactgcgacgccgcgttccggggctcctcggcgtcgtcgtgcaagtcctgcggaggcgggtactcctccgtgctgttgttcccgtgcacgccacc

SEQ ID NO: 375632 - DNA, 254 bp, Zea mays
actctctcccttcctccctctatctccagggcacattgatctttgcttcgggcagggacggccaaggaagcgcccgcggagagagatgatgcttgccatcctagacaggcggcctgccgggcagacaagactccgacgatcaaaggctggcttgtccgcctggagggcgtacgcggcggcgggctaggagagcgatgtggtggtgcagtttacaatctcccacccatcatccattccaacgtcttgctcgtagc

SEQ ID NO: 375633 - DNA, 149 bp, Zea mays
tcacactcgagagacgagcacacccaccgactatcgacatggccggggggagcagccttaagaacatggtcgttggcttcctggttccgctccctaacattctgttgtacctctccttcgcacgcgccggaggggacacctgcgccaga

SEQ ID NO: 375634 - DNA, 127 bp, Zea mays
tccgaggacaagtatgggatagtgctgctgcgctgtgtagctcttgcttcctacaactggtagtggaggcggacggaaaagacctacattggaatgcacgaccaggccaacgatgcataccccgcac

SEQ ID NO: 375635 - DNA, 407 bp, Zea mays
ttccgcgggccgcgcgcgaccgcgcgcggggcatggccagtgactggaaggaggccgccgagaagaaggggggcgtcgatggtgccaagcctccctactctcactccttcctgcagctcgtctccacgtttgccgcaccccagagggaggacagtcctctgtaccgcacgattgttcgttagcttctcctgtctccgtcagattccacttctcgcgctcacccttctactcgattaacaaatggccgctattatttgaggaactaattgctattaggcagtattttgttgctgtaaatctcccttatgacgctgggctttaggaaaagtttcttaccgtttttcttttgaagttctacctttaatgacttttagaagacatttatacctttgttttatcatttttca

SEQ ID NO: 375636 - DNA, 481 bp, Zea mays
ttgatgcgcatgtcctacagccccgccgcccacttcttcctcttcctcgtgcagtggacggactgcagcctagccggcgcgctcgggctgctcaggatcctaatctacaaggtttatgtagatgggagtaccaccatgtcgacgcacgagaggaaagcgagcatcagggagttttatggcaagtgctctgctctgcaacgacgacgcgtgtttgcaattttggccttgtgatagtactgatgtgtgcactgcattgttgcagctgttatctttccctccctgatgcaactgcccaaggggatcagcgacgtggacgaccggaggcagaaggcggcgtgcacggagaggtaccggaggagggacgaggacgagggcaagaggcccggttcggaggccgacatcgaaagggaggaagagtgcggcatctgcatggagatgaactgcaaggtggtgctgcccagctgcagccatgccatgtgca

SEQ ID NO: 375637 - DNA, 363 bp, Zea mays
tgcaagcaagccacatcaggccctacttggctcggggcgctgagccacgcgtgcctggtccgatcgatgggcaactgccaggcggcggaggcggaggccgcgttgaaccaccaccccgacggcagaggagagcggctggacggtgcggccaccgaagggcacgtcatggcgatggcaaccgcgggcactacgggaccgctcgaggtgctcccaagaatgagcaggcggggagaagcagggcagcggatccagacccctacgcgtgcccggagcccggcggtgctaccgacggcaccatgatcaccaaggctacacttcttgaaccaagggacttgctgctactgcggcagggctaccagctca

SEQ ID NO: 375638 - DNA, 391 bp, Zea mays
tgagacgagacgagacgatccggcctgccctgaaccgttacttgttttaccccatctcatcccactgacttcacccacccacccgaccgctgactgcgtcggaactcgaaggacttggatccggctgaccacgaccaccccgtgcgcggtgctgagcagtattagcatatcagggtagatgggcgcgctcgacaccttccacttgacctgggacatagtagggtgtgaatttatggggggcctacattgcatatgccgaccacttctgctgcagaaacagtctgaatatgggcttttccaaccagccaatccagagaacagggctagcccaagacagctgtgtgggctgagcagaattctgccgagtttattaccaagaatgatcaatccc

SEQ ID NO: 375639 - DNA, 125 bp, Zea mays
ttacatctgctggaatccagccctacttggggtagggcttagactctccgacggcttgagcctatcaagggataactgccaggcgggatcccaactgacgcgcagtcacaaagcctatggagctc

SEQ ID NO: 375640 - DNA, 248 bp, Zea mays
tcaggtgtctggtttctatatccatattttgaccaagaagagagccgaggctagggtcggggctcggatgcgtaccctagcccatcccatggacgagacgtctgagtcgtagtggttgaaatagcgattagtatggtgaaaagtgcatggtaatccgccatgtatatcatgcaatatggtgtaaagcaaacttgacatactccctaatgttcctcgtaatccatcccgttgacagcattcattgctaa

SEQ ID NO: 375641 - DNA, 550 bp, Zea mays
  unsure (1)..(550): unsure at all n locations
tagaactgccaagaacctgatggagaaagctggccaaagatttcacgcatccgtcggaaggacataggcttccaatattttatttaggaaacatttcatgttgtaaacaggcacctcgagctcaaggtcaccccgtcaccactcgccgccctcatcttctacagagtcggcaccgaactaggtacttagcacccaggccagctacctgcgtccataataggctctgcatttatgggggccctacattgtttatgccgcccacttctgctgcagaaacagtctgaatatgggcttttccaaccagccaatccagagaacagggctagcccaagacagctgtatgggctgagcagaattctgccgagtttatcaccaagaatgatcaatcccttgtcgctgaatgaatcaagttcatttttccgagaattaattntggtatccaaatctaagttcatggaattcataccagtgatatattgaaaggtagcaccctcactgtcgacggtgccttgtactgcattgaatttggtgttatgccacattttatagt

SEQ ID NO: 375642 - DNA, 351 bp, Zea mays
  unsure (1)..(351): unsure at all n locations
tctaccttttaacgacaccagcagagaaatttccttctgagcgcgtgaaacatgttgtctgctggccacgagaacatctacaactacatggaggacctaaacgttacgaggttatagacctatcccaccactaggggcacggtggtctgcgggctgaggtttctcatgtcgctggagactggacaataggtattgtgtaggactcatgcagatggagggagccacggnggaacaataactgaaggaacagcattcgtacagcctgcctgaggagctaccgaagtagacagagactgaatgccagctagacgagaatcatgacctggagagggaactgcttgacgaccgaga

SEQ ID NO: 375643 - DNA, 203 bp, Zea mays
tccagcgcgtacggaaaatagttagtggggcagagagcatagagaatggacacgctttcatgcatattctacggagaaagcttactggtttatcctcaactgacgctgcaggatagtggcctgtggagcgaatccacacaggaatctgtccaaggacggagggcaatggaatgataagaggacccgcgtgacaacgtgtgacc

SEQ ID NO: 375644 - DNA, 294 bp, Zea mays
ttgtaagccttactacacttcaggctagatagtactcattagtcagtacagcacagtggcgccgaccacatgacgatgatctaccgctcggagctcgtaaacatcacgctggtactgctcggtcctaacctgcgggcatccgaggcgctgacgcccaagcagggcgtgaggtccaagacctgcctgaacccgcccatgctggttcccccggacgacgtggtccacaaggtgtactacgacatccggtacccccggggtcacgtggggctgaagagcttcaacggtgaggtggta

SEQ ID NO: 375645 - DNA, 299 bp, Zea mays
tccaccccacaaccacacacccacgggcgggggagcttatggccaccagcgccgaagaacccggcagcgaagcgggacacggggcctgccgaaggcgcacataagggcggcaaaggcaacggcggagacagcggcacccaaggcagcgagacgctccaggagagacgcccgccacaacatacggaaggtgggtaaggacgcgggcaggaccaggaaggcacagaagcgcgagtccaggcccagtgcaggccggacacatgacgccaaccagaagggaaagcactctgcgaacggaaagc

SEQ ID NO: 375646 - DNA, 508 bp, Zea mays
tccgactcgcgctcggcacgcaagcaggcgactggcggggcgctcaggctcgggctctcagcaacgggcgggcagtcccagactcagcggctccctctctccaatcgccttgcgccctcgctccgttcctctgctcaccggccgattctgcgtgcgcgcctcccgctcccctatcgcctcggtcgaacgtcgacggcgcccggccccggcggctgcattgcgctgcttgcggccggcgggtagcgggagccagcaggctctgctcccccaaggcggccgcgccgctttggtagcgcttatgccccaaacgaagtgttacccatccgcttagcgctcaagcgtgcgcttaatgcgttttttggaaccctgttatttgtagttcttggtccagatgttagttgcagaggtgctcagagctggagcgtacatctctaggttttctcggcgtgcatgcaaagttgcaatattttccagcatagcttgctcacctacttctcaatttagaaga

SEQ ID NO: 375647 - DNA, 269 bp, Zea mays
tcccactccagtgtggccgttcgttcccctctgatccgcgccggcgcgccgaccaactctgagcgatggaaggcaccgtgctgtgcgcggacaaccacgcgccggtgacgcccatcagcttcctcgagcgcaccgagctcgtctaccccgaccgccccgccgtcggagacgacggacacgccgacgagccgccgccgcgcacctggcggctgacccgggaccgctgcctccgactcgacgcggtgctcgggaggatcgccaatatcgcg

SEQ ID NO: 375648 - DNA, 336 bp, Zea mays
  unsure (1)..(336): unsure at all n locations
tgcagcgtgtctcgtgctccccccaggctcctcttcctcgctttccctccaccccgggcgcaaaccctaaccctaccgtcgctcgccccgcggcgtctgccaatggcgcgccccgtgtgagtgtgcgcgagagaggggtagaccttgaggccgctacccggggaggagagcgagagatgtataaacaggggggagcggcgggagngctacnnnaaagatnctcagcctcatgccatactgnactatcagcacagggcgactaatggaggtcctatgtaccatcaaccaccggagtattcagacactgctcaagggtacgtntgtcgtctgctagac

SEQ ID NO: 375649 - DNA, 378 bp, Zea mays
tgaatacagaaaagccaaacatcttataatgtggaatgtaaggagtactagctgtcatcacttgagtaatacaaaaaataatacagatatatgtatatgtatctgagtttgacccccttaatctcttggaagctctggcattagtgatgatgtagaatcctatttcatgatgctatgacctctatagcatgtgatgtttcatttgtactggcaggcaccgttgactatgatgcaattctgattttttggatactctatttcttagttcttacactaggtatgtgcccgtgcattgccacgaggcgggggagcacggggagcggcgcctaggctacaaatataattcctgtttatttggaaacactaaggtatgtgtgg

SEQ ID NO: 375650 - DNA, 168 bp, Zea mays
ggggtacactcgccgaaaacgaaatacagggcacttttagcagggccccgagaggacatggaatgactgtgaactgaacggaagtacccgagcgagtgccagcctttgaaccattctatcgaggatcagtggaggaagactaccctgacagcggatcggaaaagacgg

SEQ ID NO: 375651 - DNA, 179 bp, Zea mays
tagtggcactcctacctatctggctcaagagacctcttgtgtccgtgcctccgtggtcgcgtcgtccctgagaaccaaccagacggtggacatggtgttcggcggcgaccgcgccatgggagcggcccccggcgccgacgccgcaagcacgatgcggctcgcgttgaacgttgagcgcg

SEQ ID NO: 375652 - DNA, 98 bp, Zea mays
tgcgagtaggctggcaatcaaagacaggctgtccaatttgaggagggctccgagagggcctctaggaacactggaagggaaggccatgtcgagaatga

SEQ ID NO: 375653 - DNA, 231 bp, Zea mays
tgacgggaaccaaacctggccgccccctaccccctcgccgccgcccttctcctcccggccccgcgcgtcgccgtccccggcgacgcaccgccggcgccgccggcactccaaaaaacataagccccggcccgcgccggcgccgacgccgcagggcgcggacttctccgcgctcccgccggatctcgtccaccgggccctcgcggtcgcgtgcgcctacgacgtcgaggtggc

SEQ ID NO: 375654 - DNA, 169 bp, Zea mays
tgtgcgcgggcaatcaacgcaacccgggggagctttacgggggaaacccgcatctcccatagaaggctgggataaaaactaccgaaaactgggacgaagagaaagtccggttcctgataatgagcggtggagggcactataaggtacgcacggacatgaaggcggacgg

SEQ ID NO: 375655 - DNA, 275 bp, Zea mays
tcggagtaggggagcaaccaacgacgggctggagagattaagggaggaagcaagagaccaaacggatactctgagcgggaatgcgattacaagcatgaaaaataggaggtccaggatggtaagaggcagagggaaggaccacatggtgtaaagctgttaaggatcaacggggcgctatgccgcttatatacagcacctgatggtagaagcggtaaacggatcgaaagcgcacctagaggggcaatagcgggacaacaaggacagtattctccgtg

SEQ ID NO: 375656 - DNA, 153 bp, Zea mays
tgagggaaaccaaaccctggcacgaccctaagcacatggacggcgaccttgtcggtgcagcccgaggcgccgactccaagaaagaggcaacggcggcggagacagccttccaaaaaaaaaaagcccgggccggcgccggggccgacaccgaag

SEQ ID NO: 375657 - DNA, 133 bp, Zea mays
tcgaccgcgagcccccgcttgcgtcagacggccagagggaagaggcgatgcacagagacgccggcagggcgagcctcaccgaggaggagccctccaggcggcaccgccccagaggagccggcgccggaagcgg

SEQ ID NO: 375658 - DNA, 168 bp, Zea mays
ggagagagccccggagcaggagaggcacggagatgttaagaagggaaccaaaacacccccaagggacgatggaacaaactttcaaaacaagcaccaggaatagaaagaaaaatgaacggataagggatcaggaagacaaacaaaacgacaatagggaatgagaaaacg

SEQ ID NO: 375659 - DNA, 427 bp, Zea mays
aattccttataatatcgcttgcttgttgagaaaggtaataatggagattgaacgccgcatttctactcaagcagaacacataagaaatcaaaatagccttatcagagcacgtgaagagaaatataaatcaaggataagagtactagaggcacttgcaagtgggacaggtggacaaatgcaaataaattcaagtgcggcaaatggaaaaataaatattgctgaagatcatgtgctccagatgatgataaacaaaagcaaaattggagaaagaagattagttgataaagatatgtcaagcttgatggctcagaaggaaagatgtagctagattgacaaaggatacggaagatatggttaaggctgctgaaagatccggaagatataattagattgatgaaagagaaggaagaactggttttgctgattt

SEQ ID NO: 375660 - DNA, 214 bp, Zea mays
agaatccgatccgcttctccacgccgaacccggtaatggccgccgacgcttctcgaatggcctcaacctcctgctcctcgcctcagccgccgccgggggcgggggcagtgtcgcccggggcagctgactggcccgaggatcgccgcgcaggcggaggccgcggcggcccgccctcggccccgaccaatggcaaggcggctgcggatgccatggg

SEQ ID NO: 375661 - DNA, 246 bp, Zea mays
tcagagtcggggggcgagcacagccaccctcgacagctttggcagggtagcgaagacccaagaacatacactggacagtaactcttaccactagctcgaagactagtatagggatcctctaggcaggccggcggagacaccggatccagaccggtcgcctcgtggcgcgcaggggagcctctgctcctggaggacttcgtttgagggctcaacgaggacagccgatgttgggtcgaggacctacta

SEQ ID NO: 375662 - DNA, 214 bp, Zea mays
tggaccgagtgttccgggcgaagacggaggacgagagggaagaggcgatgaagcagatgcttgcggcagtggacgctctggagggagcactgaaggaggggagacccagacccttcttcggcggcgacagcgtctggtacgtggacgtcgctctggtcggtgccgtctcgttcgccacggggcacgactcggtctttcctttcccggggatcga

SEQ ID NO: 375663 - DNA, 225 bp, Zea mays
tgagtctgcttccattctggtccaagttagcggcgctattccgctccctattcaccatccaatccaatcggcttcccccaggcacccatggcgacggcggcggaggcccccgcggaggcgccggcgaggacagcgaaggtcaccaacgtgtctcctagcgcacttgcgctctgagattaaggagttctttttctttacaggagatatttgagtgctccggagctg

SEQ ID NO: 375664 - DNA, 243 bp, Zea mays
gaaacgcgggacggcaggcccagaaccggggcgactttagggatgagggcccgatgcaccgataaagctagcgcagatgcatgccagaaaccaccacacgtgtacctgaagaccatgacgcgcgcggaatgtagcaggcaagaaccgcgatgaacctatctttctatctctatcgctctagttgatgctcgactccagcgcacctattacgtgctgaggagcttcttttgggatggcaccaat

SEQ ID NO: 375665 - DNA, 284 bp, Zea mays
aggatgcctccgcctccgcctccggctgcgcgcttaacccaatacagcgccagggcagggcaaccaaaccctaggccctcgcgctcgtggaaaccatgggctgcccgcgccccgggggggagccgggctccagagctagggacccgttctccggggtaccgccatggcgaggcacccccagcgcacctgacccggccatgttctacatccccgcggcagcgacaagcacagggacggggaagggggagacgctgcgacgtggcatatcatcttccccaccatcg

SEQ ID NO: 375666 - DNA, 426 bp, Zea mays
tgatgaagagcagcaacaagtgggtgtgtgtggtgtgttaccagcgtcagcctgtgctccatgtccatgccaggggctatcgtgctgctgatctccgccgcttcgtccaggacaccaaccttgcccgtggccgccgggagttcgcaccgctggccgagcccgacgtggacagggatctggcggcagttgcggagggagatgtgttccctatcgagaagagtcagacggaatggtccgagtatgtggacgatccaggggagacaggtccaggttgtggcggccttggcgcagatgctccagatggagacttggatgaaggaattgaggtgataactgcactggctcagaaaagacctatagttaggccctcgcagagcccaatccgatgtagtacgaaagagaaccaagctgtcaacacatcccact

SEQ ID NO: 375667 - DNA, 391 bp, Zea mays
tgaagcaggacagcggaaccagttcttgcgcggccttctgatctccgtcctctgctcagataaagctctcggagctcctgcgcgaaacctccgacgctcaccgtcgaccaagacgccgccgcctgtagcaggtaagaaccgcgtgttacctctctctctctctctctcgttcttgtttatgctcttcttcagcgcacctatttcgtgctccggagcttcttttgtgttggtcctatgtgtcttcttggatacagaaacattatctcggatgggtccagcagtgtccttgccggctgcttctgcttctgatctttatcacttcaagcatagatttcatggcgctggaatctctcttccccgatatcatccgaatgacaaaataggaggagcc

SEQ ID NO: 375668 - DNA, 277 bp, Zea mays
tcggaggatgtctgcatccaaggcaggctcctagggttcaagcaggaaagccacagaccaggagaagacactggacgcgacgcccatgccgagcacgaggatgaggagggccagcaggggaagagcctggctgaaggccaccataatgacaagctgttcgtcaacaaccgtgcgctcgccgacgccaggaagctcctgctggagggcgcggagaacggagcgcaggggcacctgctgctgcagctgaatgactacaaggacaataagaacggggaca

SEQ ID NO: 375669 - DNA, 228 bp, Zea mays
ttcctttatccctcctttgctttctcgcatggaggaggatctttaccctccctctcccacaccttgcatcaaaagagcagccatgtcttgggtgatggagtgagtagaagtgctctgtcacacatgcacccgcacatgagcgcgctcaaagccgagatagagcccatcttgggcggggaatcaccttggcagatacgctactgcgtactgagtccaacataatgctta

SEQ ID NO: 375670 - DNA, 262 bp, Zea mays
tgagagctcgtctgcgccatgggcgtctgggggaacatttagagccaaaatcctctagcaccgtgtaaactgctgccgatctaggttggccccctctcgctaatacttgtgctgttgctgccggtcgacgccatcttctcaggcccagattgcatctccctggtgttcctttgcatctttcggcccgggcagaatgcctcttttttttcttcttccctctactcgcaggctgggggcttatgctcgaaggcgcgatcttttc

SEQ ID NO: 375671 - DNA, 169 bp, Zea mays
ctgacccccgaaccgcatcgcacgcctggggaggtttttgacagtttctctcctacgctgtggtctgactggtgcgcgtttagacgaggaactgaggggggccaagaccaatcggccatgggtacccgtattcaggttgagatcaactgggaaattggagccttttcca

SEQ ID NO: 375672 - DNA, 146 bp, Zea mays
ggaatgtgcgcgagaaaatgccaaggtaggcaacatactgatactgaacaccttgcatttgtaactcatggggctagcatgataagacgacaagggtgaacataaaggcaaaaacaaggagaaaccaagatgaatggcgcgatcat

SEQ ID NO: 375673 - DNA, 337 bp, Zea mays
gtgagagagcgagaggaggaaagaagagtcatcgcagacagaagagggtgctccagcgtgcatctcgtcgcccgccgtcggcgtgattgcttggcagcaggatggaggaggccacgcggcgccgtatcacgccgacgacgacgctgctgctggccctggcggtgctggcggcgagcgttcccgccggcttctgcgccatcaaccctcaggacgcttctgctctcaacgccatccagagccaatggacgaacgcccccttgagctggtcctcggcgagcgacccctgcgacgggggctgggacggaatcatgtgcagcaacggcagggtcacgtcgct

SEQ ID NO: 375674 - DNA, 415 bp, Zea mays
  unsure (1)..(415): unsure at all n locations
tcccttgggtcgtaccccacgcccgtccggtanactagactcgcgagggcggccgcccattactntgggtgttttttttgatatgtttttcctcttttcttccttcttttctttcggggggaatgaatgtaatcaaatactgaaggccagctgttcatagtccagacaagcttgaatcatgaatcagatttggctattaataaaaccatacgccactccagaccctacatactcggcatcagagggtactctgattaccaatgaaactaaatttttgtaccaccctacaactaaataacaattttgggaaccctttccttgggcatcgcattcagctggagaatcagcagccctgaggaagaatcatacttgagctcaaactgagctgaaccgagcgtggactttcttggcctga

SEQ ID NO: 375675 - DNA, 218 bp, Zea mays
cggccgatcgtgaggcggccgccctcaaatttttatgggtctagattttgaaaaatgtctcttgataaatggtagaagatattttttccagatatctttgaataatgttgatggatgtgggaacatgtgctagacataagcgagcagcatttccctgaataaaacaataacacatttaacagttactttgtcatggattacaagaaggcgtttaatgt

SEQ ID NO: 375676 - DNA, 160 bp, Zea mays
  unsure (1)..(160): unsure at all n locations
tcnataacgggccacccggaagcaggaaaggagaattttacgacccgatggcgaaatgctaacagactgaaaggtaaggttaaccgttccttaaatacgaccaggacgacggggaggacggcgagaaaaaccagaaggatctttaaggtagggaaaccaa

SEQ ID NO: 375677 - DNA, 270 bp, Zea mays
atgacgcctgggcggacgcgtggggaagacttcattacctttagcgggcaacattcatctcagtcactgcaatctctgttcaatctgcggtcagactgcaagctacgtcggctggccgtccgaaatcaacgtgtgcagcgcttccctgaagaaaccatggacatgccagaggtgttgagatcacctagcattatagattgtaatattgaggttatggcccccattgatagctttagggcttggccgtggggctgcaatagaaaacaactt

SEQ ID NO: 375678 - DNA, 225 bp, Zea mays
accacaccgcgcggtgagaatggggcaaggcttccaggacgaggggtgattctaaaaactagtaaaggatgaggatgagcacgacggtgtcacagcccggaccatcattatatggccgaaagcttaaggaaatacccaaggggactcaaccttggataaaaccgctagccaaaaggctctccgatgagctagttgcctgcaggacagaccagatcgggaggactg

SEQ ID NO: 375679 - DNA, 324 bp, Zea mays
tttagtcccctgctccattctcagccgccgccaatcccttcccgtgctccgcaaccgctgagtgagaagaagagatggccggcaagggcgatggcccggctatcggcatcgatctcggcacgacgtactcttgcgtcggcgtgtggcagcacgaccgcgtcgagatcattgccaacgaccagggtaaccgcaccacgccctcgtacgtcgccttcaccgactccgagcgcctcatcggagatgcggccaagaaccaggtcgccatgaaccccatcaacaccgtctttgatgccaagcgtcttatcggagggaggttcagtgatg

SEQ ID NO: 375680 - DNA, 277 bp, Zea mays
atacttatagctccgtctatggcgactgtttccatttagacgatcggccccacccctgctgcggctgcgcagcaagacccatgcaagggagagaatcctcctaccgaggatggaaccgaactgggtgacatcgactcgagctgggttatcctcaagaactgggatgtcgctcccgcggatttggcacctcgacggcgcctgtggccataagaacccttgctcttttacgattcctagctggggacggtgggtcctcggcggtgtgggatccactttt

SEQ ID NO: 375681 - DNA, 284 bp, Zea mays
gggtcaaacaggcctttttaacgcaacaccattttagtcaggacaaacgacagggcttgacgaaacctgagcgccggtggaccgaaagggctaaaaatacgagggggtttattataaacatcacacccccccaggttttatagccgaccagtttcgatgctgccgggcgggcgatattcgctcggtggtctttgccaaaccccgaattaaataattttatacacagcaattggggggggagccttgtctgatcacaagaacggggggatcctttgggaaggggg

SEQ ID NO: 375682 - DNA, 369 bp, Zea mays
agcacacagccgcaattcatttatatgaaaagattgcgtggtacaaacacacacagcttgataaattggcatgcgacatcagtctcgtcgcgcctctcgcaactacgggacgacaaagaaaaaaaaagagaaaaaaacaaaattacagagaaatcaacagcacgttcagacatcactagggactgcagagaccgtggagggagagggaagaattccattcctcaacctgctcctcatcttctggcaccgcctctcgcaaaagccaggatgcatgcaacgccgcctcccgaaggccgaagcacaccctcgatcacgctcccagctagctgtaatttaagggtaataattcaccaaggagcggtacgtccc

SEQ ID NO: 375683 - DNA, 381 bp, Zea mays
acaaaaactttgtatcagtttgggtatatcgggaggatttgggacggggtacacgggacacacgtgcacgataacatggatggaacccacaacacaggggaaaccacgaatcaaacacgtccccacacacgatatatgcacgggcgatgatgtcacgatggcgccattacgttccaggaacagccgaccaggcgcgcgcttaattcaactcacccgattgatcgaacacgtagttactttccagggttttgaacaccgggggttccgccttcattacctgcaccaccttcagggccgggtgcacgtacaccacccagttaccgtccccgggcgcgcttgggattggcattacgtacccggggccgccgggccaggggaact

SEQ ID NO: 375684 - DNA, 310 bp, Zea mays
tcgcgctctccctgctctgtgctctctaccctgtccctctctggggcacaccgcacacactcgtcgctcgcaacatggtcaagcaggaacgcgtctcgacggtgaccgtcgcggccgtctcgacggtggcaccggcgctgcccatgcaggagcaccgactgccgctgtcgaacctggacctcatcctgccgcccatcgacgtcggcgtcttcttctgctatgacgcggaccccgcgggcggacgtagccaccagccggtcgccgccgccctcaaggcggcgctggccaagacgctggtggcgtactaccc

SEQ ID NO: 375685 - DNA, 371 bp, Zea mays
ataaaacaattatacaatctgggttcgattttctcgtcagcagataccagtagcacaagataacattacaataaagcagtacatccactgccacacggacacacccacacccatgcctctatttcgctatccaggcgaccgctagttttttactcaagacatgcaggttttaatttcacattccgatgtcaagagctatagctaggcccctgggccctggatcgttatttcatttgccaccatagcccgagactccgagagctatcacgccgacgagacttgtatgtggaagaccgtcccgaacagccggagcacaccgaacgtgacgagcatggcgaaccagccgcccaggagcaccctcaggccggacc

SEQ ID NO: 375686 - DNA, 373 bp, Zea mays
gcacgaacttgtttaatttgtcgctagcttactgttacatctagcatacatatatgcgcatgcgatgataatatcgatgttctacgtacccgcacaccgcctggagcggtacaaactcggtcatcctcaaccttgttctcttcagcaatccaggcatccggcgacatatatgcacgccgttaatcatatcatctccaggcatctatcatcatgtagcttgaaacttggatgataatggcgtacgtgctagagctagcttgaataattgacagcttcaatggcactggccaacagagcagggtgaaataaaaatgtctgtatcaattaatcgtcgtgttcgtctattattaggctataatccctggtcaaggat

SEQ ID NO: 375687 - DNA, 452 bp, Zea mays
tctggaagctgatcatggagggctccctgggcttcttcgaaaaaagagaagctgacagtgtcctgatggacagcacgttctgcatctggaatcctaaacctcctgatagagaagcctgcagcagcgtcagtcccggtgctgcgacagctacttgtggctcaaggagaagacgatctttttaaagattttcatgttctttagcttttatcctctactaggtaaatacccaggagaacaagtacttggcattaacctgagggtttatcttgtcaagctgcaaaacgatctcacccaagaacttgtacccagaaccatctttcgcgtggaagttccacaggtcgaaagcagggtgagacagcagcttctgaacatttgcaacatttccaggaatctctgaagtagcttgaagagcaaacaacttgcttacaacctatcagagtaaaacaaagaaa

SEQ ID NO: 375688 - DNA, 269 bp, Zea mays
tccccatcttcatcttcctcgcagcgccggcgttccatcttccgctcctcccttattcgcgctcggcacgcaggcggcggcggcggcactcaggctcgggatctcagcgacggcgctcaggctcgggatctcagcgacggcgcccaggctcgggatctcagcgacggcgtcagcggcttcccttcagcctcgcgccctcgcctttgatcctccgcacaccggccggtgaccctgcgtgcgcgcccctctctctctccgtccgctttccg

SEQ ID NO: 375689 - DNA, 449 bp, Zea mays
caccaaaagaatcggcactggatacggcctgcatccattgtcttcgaaccagttctgctcagccgctcagggaaatggaaacctctgtcctaactttacaggaactttccgaattgttctagggaaagtaaccaggatgcagatgagcccaacgaatctagctgtgtacaaattctttccatctctctgactgcccgttacaacttgattgagattcccagaagcacactgaacactgcaatgcagggaactgcgtagtgcaagaaataatatgagatgtctgccccacaggtcaccctataaataggattcgccaaacctccagcttttggccaaaaaaaggacttgataccaatcaagtgctgggaagcgagaagtcacacagtaggtcagcactcagcaatagcagacggcaaactcgtctggagatggggcgttttcatcacctg

SEQ ID NO: 375690 - DNA, 355 bp, Zea mays
tgttgcgacgagctgcggtcatttgaggccacaggcgtctaccgcctcaatggcacctgcaccagcgccggagccacttacctcgacccggtccgcctcctcaacgcgtcctaccagcgcttccgcatcgtcccttctgcgtactactcccgaagcttcggcccccagcatcaggaaggcgagccagagatcgagcggcccgagaaaaggaggaaacgcaagcgtaatcagaagccgaagcccagggagctcaatccaatggaacggatcgctgaagcccggcaccaggtgatgcgttacactgctttactgggccaaagtactagattgactaaatggcaacatagtatgattt

SEQ ID NO: 375691 - DNA, 366 bp, Zea mays
gcacaaacagagagcttagttatagtattagcgatggcggtggtgcaggtcatcaaaactcagaagccgttaacgcaacgccggccggccccgtctctctacgactacgagaacagcagagcagcccaacgttccgagatcgtacacgcgttgcagggtttacacagccactggcaattaattaatgcgctactataattactactagtgtgcggtgaggggtgcatggagctcctccgtgtccgtccgtcagtgaacgcacttggacgacggcggcggtgcctcgacgccggcggcgacgtggtggccgccgccgccgccgccgagcgcgtgcttgccgtagccgttggtgccgccgttgggagc

SEQ ID NO: 375692 - DNA, 357 bp, Zea mays
cccaaaacaaacccgttggtttaaattagacctccccatagccatagggcttttttgacctagggcccctttgcttacagggcataaactttttatttagggttttatttcccccaacttttatttttttcatccagtttacacactcaccacaattacttgggtaaaaggcgccaacatacaaacccggaagggcctagtcctggtctccagcctgggccgggcagttggaacaactttccccccgtgctggccagggcacggtcgttacacccccatgcgctacggggggagccccctggcgatgcggccgtcggccccctggggaaagaaccccccgtgctgagcggggttgcc

SEQ ID NO: 375693 - DNA, 244 bp, Zea mays
tgctctttgagcgatcgtcgtagctagccgcccgccgtcgatcgatgggtgcaccggcgccgtccgtcgccgtggtcgccgcggtggtggtttgcctgtgcggcgcctttgcgcgcgcgcaggacatggacaacgagtgggcgcggccgccgtaccgcggcttctttggcggccccggttcgctgttgccgcagtcggacgtggacctgttggagtttccgttgaacctggagtacctggagac

SEQ ID NO: 375694 - DNA, 250 bp, Zea mays
ataaaaaaagggccgaagacagttataggagttggcgtaattgttttacagaatatatttcattagtcagaagcgaaatgaaaaatatgggggggaccacaagggtaacccttttcatcacgcaaaaaccctggcttttcgaaatactcaatggtgtccaacaaagttttctccattggccttgggttccagcctagacttttaagtttttccgatgtaactggggagatttcagattcataggccttgg

SEQ ID NO: 375695 - DNA, 427 bp, Zea mays
tcgcgatctagaacatcctgttgagatggccaagtcgaagaaccacacggcgcacaaccagtcgtacaaggcgcacaagaacggcatcaagaagcccaagcgccaccggcagacctccaccaagggggtaagatgatttacttgatgtccctcttccgtcgtcccgttcggttgattgtgcagatgcgtcagagtggtcattggttgataccggaatcatgtagctgccgacttcattggttgttccggataggtgaaatctatcttaggttgtgaagttagttcctggatgcgaaatttttgtatggtctgttctagtcgctgaacttggttcctacatgctaattgtttttgcctggttttctagtgccgtactagtagtggctcatgctcgcggtactagcaaatcctgttagctaggatgaaa

SEQ ID NO: 375696 - DNA, 243 bp, Zea mays
aaaagggcacgcagaccatttttttatatttgacacaaaccctggagatggggatatatacgtacacacacaatacttattatggggggggcgcacacccagtacgggatcgaacgagtagccaccccatgcacacccagatgcgggggtacccacactggatgcagccgggctttttgcctttacttggcaaccccgtcgagggggaggaacgggcgctggccgttgaccttgcccgggggg

SEQ ID NO: 375697 - DNA, 325 bp, Zea mays
ccgtgcacctcgactgctcgccgcgcacgcgccatcgccaatccgccaccgcctatccctagccccgatctctactatctaccgccgccttccttggtcgccgcgcgcggccttcctcgccgcccaagccccaatctcgacgacgcgcctcgcgtcgtcgtcccgcctcgtccctcttctcgccctgccgatggatccggccgctcccgagcctgtccccgcacccgccaccgacaccgatgccgagaccaatggttacgaggatgcctctgaattcgaggacgcggcggctgggggcgagggctctggggcccaaaccgcgacc

SEQ ID NO: 375698 - DNA, 291 bp, Zea mays
ggtattgaagaagcggtcaacaactagtaacttcatgatgtcacgaaggcaagcaatgtgaactagactgctatgaaagatgtaatgggttgagatgcagtatatggcattttcttgttggtgtcagatagcactgccaaggaaagtgtaaagcaccacctgacttgttttggggaccaagggatgtattactatggggactgttatagccggttccagagagggcgtgacgttacaggcgggcctgcacttcgagcaccacgagcacacgctcatggttgctgtactcgc

SEQ ID NO: 375699 - DNA, 384 bp, Zea mays
tctccctctcccttcctcctcccacccgtctgacgcctctgacgccgccgcagcagcaacagacgccaacacctccgcgtatgacatccagatcttcgagcccacctccatcgaggagcgtcgtcgcctcctgatccagcggcgtcgcctccgactcgccgcctcccatgcctcgcggctcaccgttgcctcgcgcgtctcctccaaactcatcagcaccactgcctcctgctccagcggcgtcgcatccgatctgccgcctcccctcctcatggctcgtcgatgcctcccgcctcttccccaacctcgcgcttgccgcccttggaggatcccaaatccgacgacgagctcagtaggcccacgcagacgcggatgtgctatgaa

SEQ ID NO: 375700 - DNA, 353 bp, Zea mays
aagaaaatggtactggaattaattcctaatccctcacaatctttttttctcttttcttctatggcaggctctagaacaagggcccagattaaagaaaacaaacaaaacataccacatcctagaggacaacccacaaagcaacaaacattcccttaaagcacacccacccataaggcagactggcttttttggacatcagccgcagtttaattgaaaaaaagaagagaaaaaaaagacccaacccgacaaaagaaagggccctccaagatggggaaaaaatagacatggagggcgctctaatgccttagcactagggtcctcaacctaaatgagtcctagaaccttttttccca

SEQ ID NO: 375701 - DNA, 467 bp, Zea mays
ttaaggtgcaaaatcaaatctcttctgtctttcaccaagcttgtttcactgtgcttaaattatttgcaccgtccctcacctctatcacacatgcacacatcatggtgctattgttggggatgagaaatgtttcccctttgtgtaagatgcgggaagtccagaaccataaaactctaattacacagatttggcatcacctcgtctttgtggaacagatttggcattataggacgttggtgtaggccctgcattttgtggagctccttgatttaagccctacagatctggaaaagaaatcccaagcacccaagtgaggcaatgatttcaaataagacatttcaacgaagccagatcattaagttggttgaagcagtagtcccgaggatgctctggcttgcttatgtaactgaaggatttgctttatctgatcaagaattatgaacataagagccagatatggtgtttta

SEQ ID NO: 375702 - DNA, 322 bp, Zea mays
ggcccacagaatggaactttatttttcatataaaacacagacagaattgacgaattacaatttaaccaccctggattttttctttgtgagagggcccccagcagaagcaagcaagcaaattaaaggcagccaagagtgaggccagccagcttagtttattcttccaaactggacagagccctactagctagccaaagctaatctggtggctagattccctttccttttccttttaggctggctcaaacgatgcggggtgtattctgcaagaaagcaagagaagaacattgatctggtttttccctttacctatggggaagcg

SEQ ID NO: 375703 - DNA, 386 bp, Zea mays
ttaaagaacaccaacgcactggcccctgtggcggggctttttaactctaacttcgcctatattcaccggcacagggagccccagcacgggaggagggaacttccagcttcttcctcctcccaacacccaacgcctttgaccgcttggcttccttcaacgcccctcggtccgtggagagacagccagcccctcttgaccaccccgctgagacagagcaagagggttcggggagccctcacattgcttacaacaacagacccccggatacaaaatccgccccggccccaacccgaagcgggcgttacgcggagacgcggtgaaggaagctgtgcgcgcccggggagcagcaatcgtggcggagcctcgaggctcgccgcggggcgccg

SEQ ID NO: 375704 - DNA, 336 bp, Zea mays
gggtcgctaaataatagcagggagttgttaagcaagtttatctcttatcagttggggcagaccctggtctataaaggggaagcagtagcatgtaactaggcatcgaaggaaatacaatctccctggggggcgattacctcggtcaccctggctgacggggaacttgctcctgcttcttcctttcgcttttctccaccatacacgctcaggtccctgtcccaggctgggctggtcctctattcgcccttacgcactcctagaaggcccaggcgtatcacgggatcctctttttcctcggcaagggccccatcagctggcagtctgttgggcctgaaa

SEQ ID NO: 375705 - DNA, 265 bp, Zea mays
attataaactttaaggatttctattaatatatgaactaactttttgtgaagaaccatttgaatcgtgatacattacacccctgctaataaccaacaaaccagatcgacggcaagattgggatatgatcttgaccgcgcaagtgaaggaaatgacaaagaacacaagaaagcgtggaggaaatttcaatcagtgtagtacaagataaactacggcagagaggtctgcagcgggaagggatggtgatcaactgatcatctgatgaaa

SEQ ID NO: 375706 - DNA, 326 bp, Zea mays
gggttcacagcaaagctttccaaccacttgatcatccccacacaactaagcagatatcacacaagcaaacggggaatccaaagacctgctcgccaaaagagagggcgatgcagctcgatagagaagataggtgaagttcacgttctcgtgagagatctggagggcattttcaagaccccagacaaaaaactaacgagattaacaattcaacatgggtgccagttacttctagcatagggttactttggctacagttcggttaagcacttgcatctcagcactgcaaatatatccttgcgaacccaaatatccagaccaacaacatt

SEQ ID NO: 375707 - DNA, 202 bp, Zea mays
ggaccataacatcatttgcatgaagttcaatacagaaggcaaatgccttgaacaaacaagtaacttaaagcaactgaaccaacacaacacgtttatttatgggtctaacgagctacccaaagcgagcgtttgtgtctgcaagtgaagtccacatacaacaactcaggacttaagggaagaaaaggtccaaaaaatagttttt

SEQ ID NO: 375708 - DNA, 311 bp, Zea mays
acatagcaaccaaaattatcatgtaaacaatcgttatcaagaaatcagttcttaatccaatcgcacacctatcatagtaaccaaaattataacactaataattacaataccctgtacattcagagctagcttttgttgaagagtgaagcttttccgcatgtactcgcggcgcgcgctgtagattcacttgggctcaaccctcgcggacggcaacccgctgttgctgtggtcgaaggggctgtcgccgccgtaggggtgacgcggcgtccggctggcgtagctcatggagttggacgcggactcgggccccg

SEQ ID NO: 375709 - DNA, 319 bp, Zea mays
aaaaacccccggcccaatccaaaatttaatttatgacaaaggtttgggctaaccaaaggaaaacaaataaatttccgggcccgcttggggggaaaaaaaaaaaccgcagggggaaggtctggggcatgttaaacactttaaggttttttttgggggccaaattaaaactttcaccccctgggcctttggggggggggaaaagctcaacactgggtgggggggccccaatttaacggggacttttaataaaggggggccggaaagaccctgtttggtgggggttttttttaggttggggccaccaaaagggggggggggg

SEQ ID NO: 375710 - DNA, 416 bp, Zea mays
ttaggtttagtgaatcgggtgaatactcggctagttcagcttacagggctttgcttcttggctctgttagctttgagcctgctgaacgcatttggaaatcctgggctccaggaaagtgtaaattcttcctctggcttgtggagcacgatagatgttggacggctgacagacttgctaagcgtggcctggatcacccagtgtcctgccctttatgcgaccagatggaagaaactatcaaccatttgctggttcagtgcagttttgcaaaacagttttggttcagccttctgcggtcgggtggtttccaggagctctgcccttcccatgatgacgtctgttttgaaacctggtggaggaatagtgctgccagggtgggcatgcctttatccagggattcaattctcttgtcttttggg

SEQ ID NO: 375711 - DNA, 571 bp, Zea mays
  unsure (1)..(571): unsure at all n locations
cacaagaccgagaagccgccagaggctggcgacgacggaacgcacggcaacggcaacggcaaccacaacgcggagacgatgcgccatccactcatcaccccaccaccaccagcagcaacagcagcagcaggtcgccgcaaggacgacgacggcgacgaagagaaccccaggccgcgcccccaagcggccgcgaaggctcccgtttccgtctcagcgacttctcccgccgacctcgaacagatcggcatcaagctgacgcccagctggacggcgtcgttctcggacatgggcctggagaaagggcggctcttcgtgagccgcctcacgcttgcgccgctgtcgctgagcgacgcgcgggcggcctgcctcgtgaacatggcggcgctggaggtctgctgcgcgtccaggttcggggaccgggccggcgcggccgccgtctgctcctacctcgcgctgttcgcgttcctcatggccgggccggaagacgtgcgcaggctgcgggccctgggactccttcacgggccccgcggcgacggcgacacgctcgcctttttagcgccgncgncgagca

SEQ ID NO: 375712 - DNA, 289 bp, Zea mays
tacgtcacacgcgcgaggcgctcagcggatctaagtgttggtagttgttatggctctggctcccattgtgcagactttgtgattcgtaaaattctttggttggtgaaaactagagcgtttgtcactacgtaaatatttatattggcaaataaaagcaccagcaatggcacctgcatgttcatgcttataactatatgggattcttacatatttcaattactattctgatgggctgaggctcacacgtattatcatgtgacctgccttacgcccacctgcactgcttgct

SEQ ID NO: 375713 - DNA, 635 bp, Zea mays
  unsure (1)..(635): unsure at all n locations
agcgcttctcttgctctcagttctcgtcgttgctttctcacaagcactcgatttccactctgccaccgcaagaaccgttggagacagcttctggcttgaagatggagaatgggtctgttgatatcactggaagaaccgatttggtctcctctgtcatcgaactttctctcggagtttctcatccaggttatccttgttattattcagtctggggtgatgaaactcaactcactcatggaaccttcgaaaacgttgcgaacaacattatcccacttttaacaggaacagttgatgcttcttctgtttcaatgttgaccgttaaaacaaatggatgtgttcttggtcgatatgctgtcccatttacctttggtgattcctctggatacaatgttcaaggatcagttgaattagttgacatcagtccaacatcntcattagttacatccttctttggaaacaaccaccttggatacaacgctgctcctctcacaattcctgataattttgatgattgggtagcaagaatgctctatgttagacaaactgattttgattgtcaattctcatccccagcatgtgatggagcaccaaatgaacattcttggttcttatataaacgcttgaacttttttttc

SEQ ID NO: 375714 - DNA, 334 bp, Zea mays
ttcagtttcatatgattttgacgtcctatttaaatgtgattgaaacattctgttctattaaaatgtaaaatataatttggtttactacactggtgatatatgactttatcttgtggctactgctctaaaaatacacaatgccatattcatgcctcttagatgcactgttatgtgctatttaccaggcaaggctggttgccggaaggaggttgcgctacaaagtaaacacagtataatgcgtcgtgcaacctagtcgaggaggagcatttcctgttcacttgtttgataagttaccgtattcatatgttgacagaggatccgtgcttctaaactg

SEQ ID NO: 375715 - DNA, 544 bp, Zea mays
gcaactctctcgtcccggcaaaggtcacaccttcctccctcgtccacatccgtgcctccagccaccggccgcctagggcggcgctcttgccaccggctgtcgagccccgccgaccttgccgccgtttccacgccgcctgacctgcccccacgacctgctgccgtcacgccatccgacctgccccaggacagcccaagcccccgcgaggccgcgacctgctggggaggagattgataggagaggtggtcggcggcgtggataccaacgacggagacatagtgattgccgcccgtcgtcccctgtttccgacacgctgaagcctcacgccacgagcgagcagagggccccaactgccagcagcaaccttaggcactggttgcttgaaggcaagcgcgtctaaccaaacattcggacgcgcataaaatcgccacgcacgcatcgctggttttgccgtcgcagagcagaaggcactccgggacggcagcgtgctctgcagacgcttgaggcaggatgtggcttgaaaaggtgaggcggagggagcgtg

SEQ ID NO: 375716 - DNA, 531 bp, Zea mays
  unsure (1)..(531): unsure at all n locations
aacgggacccaacccaccctaacccatcattcattcattctccactagaagcacgggttactgcacccatgacctgtaggtggtggtgcaagatacttcagataaagatatatatgtgcgtgtgtgtgaaagacagagaacctggctacgcctcaatctagccgggaagaacagctccacggaagaaacaaaggcggcagagtgctagaccggccatccgcgtgccagactgccagtgccctctcctctgcagccaccaactcctgcttcccagaagctagatctggacgaacatggcagcagtcccggtctacagcatcacaagagcggagatcgacgagttctggagcaggaangaagtggaagcagaggagcggcgactcgctgccgagaaggaagctgcaagaatcacggccaagacactcaagatggaagattacgtgctctacgagcaaatggtcagggagattctcatggaggggaacggaggagacggatcagccattagcgcagctgccaccggtggcacta

SEQ ID NO: 375717 - DNA, 333 bp, Zea mays
tttttgcgtccgctcacgcaagaaggtaatactgctcttgttcgacccgagcgggcgccgacagcccgtgccctcggagccccctttcgatacttctttcctggaatgggtgtcagcgcgaggaccatgagaaattagtgtacgttctgacttcagatcagcctgccttattcacaaggctggagccccatcgaattctgtttctggcgtgatggctgtgcaggttcaccgtcaccgtaacatggttcgtaatggccaagctattaggtgtgcaatggcaactggaaaagagcaaggctcaattttcactgccagtagcggtgatcaaaccat

SEQ ID NO: 375718 - DNA, 446 bp, Zea mays
cctgggaggtggagccgttgcgatcgtaggtggcctgaacgccaagaaggttgagggaagcaaagtatcgatagccttgaccatcgccctctatggtctctaggctgttttctcattcgttggccttgatcagggccagtgcccgaaagctcactctcgtcaagatctatttcgggatgatctttgcacacctcatgttcagcttgggtgttgggatttacgctctgttccgcatcttgcgagatggccacgtcttcgccgataactgtgtggccgccaatgccactgagacgaacgctaccaaagttggctatgaaggattgcgggtcatcaagggtgagactgtcaccattaacactgtgatctgggtgcttgaaatctggagcgtgcgtcactgctagcgattacgctggtcagctcgcacatgagaatgcggatgaaggagt

SEQ ID NO: 375719 - DNA, 228 bp, Zea mays
ctgctttttcggcaacaactgacggccggatgcggtgggcgtattcaacaaccagaagcttgtgccatcgatcaatggcggcggtatcaaagatctacgccgtgtactactagtgctgcactcgcgtgccgaggttaacctgggagaataacacttgagctacactgttcttatagggtcgcggcgaccatgctaccgcatgtgtagtctgtggctacggaggcgctg

SEQ ID NO: 375720 - DNA, 162 bp, Zea mays
gcgttcgcatttcatacacagacgagaaggctgtaaatatttcttctttctaggaaaaaaggaagaagaggggaggcgccacaaaaagggcggcgcgccccgccccgccccgcatagtccccgacgccggcatctatccctcgctctccttctcccgatctt

SEQ ID NO: 375721 - DNA, 481 bp, Zea mays
  unsure (1)..(481): unsure at all n locations
tttcaaaacccgcgggactgtgaacaagcgcagaaagaaatacgaatgcaacaagtcctacattctgttctccttttttggggggccaaaacgttgaggtctcaactcactcgtgcaagcagtttcatcgccacccccatgtgagcaatccgggacaccgcggagatgcctcgtgaggaaagcggtacggcgaggcagagcagcgtcggtggtcgtggaaggatggagcaacaaccccacatgttttgttctaatgtaagttattgcaacctaaatttaaattatgtgaatccttgaatttggagactaccgctgcaagctgatccattttagctgagaactcattactcctaaatgaagttaaaattgagtatatagctcagggatgacaagttttgatatttagattgatcgcctggcgnggatgttatttgttgtacacaatataactattgagatgctctatttttataggccatag

SEQ ID NO: 375722 - DNA, 280 bp, Zea mays
gatttctcagggcccattggaagtttttgaaaactgtggtcaaccaacccctctgagttcatgcatgagatgcatcctggagttcaggatatggcatgtgataccttcctgaaaattgttcataaccgcaatcaccatgtctctatgtccacccttaccgtgggctccttgctctctgtctcctacttctgtccaaccttgctatcataccctgatccttttcagcctatcaaggttcatacatttttacgatatcatttggccatattatttaagctta

SEQ ID NO: 375723 - DNA, 236 bp, Zea mays
tttgacggcggcggaggtgggcggcgctggcgctgacgcggccggggatgtgcagattaagggtgccaaggagaatgcgcagcccacggcggcgcagcagcagcagccgtccggcagcgaggcgctggagatgccggccacgccactccagcgggacatagactggtccgagcatttctccttcttcacctcgctgggtgggtttcgggggcagctcggacggcgcgatggggcct

SEQ ID NO: 375724 - DNA, 431 bp, Zea mays
tttacagttacaccacctcctcccatgcagtccccgtctacacctgccgcccgctccctggtccggcgcggagaaccagccagccagcccgtcgtcgctgtcgcccgccgatgaagcagtagccgcgcgtgacgccggatccaatccgtggccctcgccgcgcgcgcggccatggacttggacggcgccattggcgatcagggtgagctgagggaatggcaaagccaggagtatggtctgcagaaagattcgttagccgctccatgtggcatccagagggctgaagcacccaacattatgggggacgattggagcatgttcagcagagcagacaccaagtaaacattgtacagacttccattgcagacctgtgatataggagaaccatcgcaaggagttcgaagagggaggaaacttgcaggcaagcgcaa

SEQ ID NO: 375725 - DNA, 444 bp, Zea mays
tgtcgatagctgagtagagcgctgcgcagctcgatcttggtcggttgctgggaagggtcgccgccccatgcctccaactcctcgatctaccgcggatgcgcttcgcttcagctagctaagtcccttcttcctttgagattttgctacgaacaaccacctcgatctgctctcgtgctcatccgccatgctccgtggtgccatactggcatgtcgctcacggaggtcaggctacacttctgctacctacactccctctacatcgtgctcctatacttcctctacgtgatctcctgatcgcctcggacgcctcccgccaagctccgatcgaacaaggctttggtttgattcgatcagagccgaagcactagcattaattactcgatgcttgctcctcttcgttctccatgatcttgtcgtcccgttcttctccagacctctctgctt

SEQ ID NO: 375726 - DNA, 273 bp, Zea mays
tttttattgagcgagcaaaacatctatttgatgaagtattgcatgctttacacatgatatctgacaaaaaggttcaaggcagttcgattaacatggaatttagcaattacattgctgatcttgaaatcatgcttcgaaaggaaaagtcagaatttgagggatgcttgaataaagtcttgagaagggatatgcagaaaggccaaccggacattcttgagatcaataggctgcgaagacagttactcttcattcatacttgggggataaaaagac

SEQ ID NO: 375727 - DNA, 364 bp, Zea mays
tcacacacgtcgggtgtcatggaatcaagcgtcctgctactctaactggctccaccgctccttgaccgacatgccggccagagagcatgtctactacaacttctgctcgtatacggttcccgatcactcaagcgtgacatggaagacgaccagggtatgaagaaacaccaactgatcatcactgacgccatcagccacgtcatgatcgtgatgccggacgacgctcacatacacgctctgcatcgatacgtctgcagtcctgatgacaacgccaacgggccaaacgaggttagctgtgacgaggaggatctgacgccgcttagggacaggttctatctgtgacgagcagacaagctgtggctac

SEQ ID NO: 375728 - DNA, 386 bp, Zea mays
tttctagctcgcgagcggccgccctcttttttgtcttctgttaggaaagatagtttgatatttatgaacgcctatcaatactcgctaagcaatctgcaggctggtgcgatgttgttcagatcattctatatgccaggttcttcttcttccgaccattgcaagaaacactaacatggatggtgaccggaatacagtctaggatctctagcttgatgaccgtaatgaccgccaccacctccgacaggtcggtctcgaaagccctcacgaggtcccctctgaacttgcgggtgactccagtgaggttgtgcaccttctgcctgtacgccctgaacgctcgccgtcgacgggcgcggactacccggcggcgccatagagtcccttcctct

SEQ ID NO: 375729 - DNA, 104 bp, Zea mays
tttaatgcaaggatgatgcattgaaagcggggaaagtagatgaagcttgcacccacatgaagtgttcttttggtggcatttggaatggtggtggtggtgctgga

SEQ ID NO: 375730 - DNA, 353 bp, Zea mays
catgcagacggcgctgatgggggcgtgtcggatcggccactgggaggtggctcagacgctgctgctgttcagatgcacacgtgtacaaggtggacagcctgagcggtaggacggtgctgcacgtggcggcggcgggcggccacgtcaggtgcgcgcgcctgctgctcgcgggcgccggcagcggcaggagcaagctcgggaaccgggcggccagcggcggaggcggcggtgtgacggctctgcacctggcggcgctgcacgggcactcctgctgagtgcacctgctggtggactagcgcgccttcgttgtctcgcgcacgctgtcctgtgccgtgccgaccatggcgttcgtc

SEQ ID NO: 375731 - DNA, 453 bp, Zea mays
cctcggcgtccaaagccacgtcaacccggggcgcgccctcgcccaccgcctcgcacggctacgcgccgacggctccatcacggccacgctctccgtgccggtaaccacctaccggcgcatgttccctcggtcggcggattccgcgccagcgacggcggagaccagcgacggggtcatctcgtacgtggcgcactcagacggcctcgatcgacgacggctcgtcgtcgtcctgggccgcggacgccgaggacagggcgcgcaggcgccgcgcgagcgccgacagcctctccgccgtggccgctcgcctggccggccgcggccgcccggtgacgtgcatcgcgtgcacgatggtgtcgcctccggcgctcgacgtcgcgcggagcacgccatcccttcgccgtctttggctccagccggcaccggcctcgcctctgtacactactccacggcacg

SEQ ID NO: 375732 - DNA, 298 bp, Zea mays
  unsure (1)..(298): unsure at all n locations
tcctaatcgtgttcgccgcctgcctctcccaaaccctagcaacccacgatcgaacccaaatccgctcctcccacccgaggaattatgcgaaattccccgagatcctagcccagcactagcagatcgatccatcgcttgcccacctgccggccaccaacccttgtagtctcagtcaatctgtagattgagactacgatgagcctgtcaccgctcgactcctcctccccgcggccggngggtgccggcttgtgctacaggaggggccccttggcccggggcttcggttttcaccccaccg

SEQ ID NO: 375733 - DNA, 328 bp, Zea mays
tccacgcgtccgcacaggcacagctagcaggtgtctgctagcgcgcgagagaggagagcagcttgtgaaccgtacgtacgcggtgcgcccaccccaccggcggatgccatgacgacgtacagggtctgctgcttgctgcggcggttccgggcggcgtcgatcgagccgtcggaagcggtcggcgacgtgttccgggcgtacgccgacggcggcggctgcttgctcggagaggaagcgctgcggaggttcctgcgggaggtgcagcgggagaccgactctggcgccgacgcggcggccaaggaggtgggtggcgttcgcggcggagcac

SEQ ID NO: 375734 - DNA, 449 bp, Zea mays
tttagtcgcattaatgaggttcctgatggcgggctttattgccctgcattcggggaacacattgatgaatggataccatgctaaggtcctcatgacgaagcatacaatgaataaacgcctcctgggaagcgttgctcctgaccataactagataacaaacaaagaaaagctggccgtgaaataagcctggctattggtctgccaagataccacccgatattatcctccaacagaatgtacgaagcaagggactaattctgcgatgattgcatgcaatgcgtgagatgctgaacgctggcaatgaatgtgcacataagcacgttctatcagggaatgaggctacttgctcgacaaagacatgcacagaatcctaaatctactctggatcactggccgcatggacataaatggtcaggtttcatgatgattcattaccatatgcgcacaca

SEQ ID NO: 375735 - DNA, 341 bp, Zea mays
tttcagtggcacagcgaccaacccagaacccgacccaaacgcccgcaaccgcaagctcagattcattcccaaatccactgcacaccacacgacagatgatctcaacgatgactacattccaacaggcgagcgacaggggcgaccatccggatccagccatgtgcggagccactatcattggggacatcatgccggcggcgactccgccgcgggtaacgggtggacacctatggcccgagagctagcatgcgaggaggactccatccagcagtagattagcccccggggagcagcatgagcagcaggaggatctcgaggccgacttcgaggagttcgcggat

SEQ ID NO: 375736 - DNA, 432 bp, Zea mays
  unsure (1)..(432): unsure at all n locations
ttcagtctgacacggaaccgagcggaaaacccaggccagctcccgataagaaatcctcgagtcgaccagtcccccataggccgtagaccagagcagtagaccgccatggcgaaccgcagcaagcagctcgttaccaccgcactgccgctcgcggcggcagcagcagcctcgctcgccgtcgtgctcctgctctgctccacgggctcatcggaagccgacggatacctcgggcgcgtgggtgcgccgtggggccgtaccctcacggtccttccattcagccccgcggacctgctgcccctcctgccgcgnggcgtcgccatggccgcgctccgggcgctccgcggcgtctcggacatttcccggtgttcgtcggcgcccgtctgcggcgggtcgggcttcgtgcccggcacgtgggacggtgagtggaagggg

SEQ ID NO: 375737 - DNA, 265 bp, Zea mays
ggataacgcggattaccatttctcaaagaccagatcaaaacctggatcaagatccaccacgtccatgtccaaaaactagcccctacacattacgcgagggggctcccgattattcgacttgctgcacggctccaattcagttgatcaccatacacgcttgcattggggcgcacgccactcacgagcgcggcgcccatgcgcccacaacttatttcgactggtcaccaaccaaccaaaccaagccacccagcaggtccagtccagg

SEQ ID NO: 375738 - DNA, 448 bp, Zea mays
ggaagcgatacccagacagtttttcacaaacataacatgtttattatcttcggcgacagggccctcctgaccaaccggcaacctatactctaaactcccatgcaacggatgttatatacatgggcccaaaaaattgaacctatcacacaagtgccatcacagggctccagagtccagggagcaaagagcatcttctctgcagttcacttctccttacttctaattctagaccacgcaatatactatgcgctttttacagggtgggaaaggttggagaatatactactgtactacatagtgtgcaatctatgttatatgtatagaagacgtgccacttctctgagctggcaatgccattcaaggaactcttgtgctcttttgcctcttctcttctagctgtgatgcctcgttcagcatgtccacggcgtcactctgcatgtttagcttg

SEQ ID NO: 375739 - DNA, 59 bp, Zea mays
aaggggggtcatatcttttcgtaattgacatacacaaccattatattggggaaaaatac

SEQ ID NO: 375740 - DNA, 288 bp, Zea mays
aacatcggatgtatgatgtattatatcatttcaaactggaatacatggcatttctgcagtacatacaggcatacagctttacaattccagaagaaatagaaaagcccggacaaagagtaaaaaccggaatagaactatgaactatggctgagaggggcatatgaattaccagctggctgttagagctagttaatttgctcctctggagcgattggcgtttgcaactgatctggttgtggcagttgctctgcttgctctggggcagttggtgatttcaactggtcaagc

SEQ ID NO: 375741 - DNA, 451 bp, Zea mays
ctactgttctacacaaatatgcaccttaaagtgaggaatgcacagttaatgatgttcaagatacatacctgcacattatggaattaaattacattcaaatcacttgtatgcgctacatcctgttagaatctacgccttgggaattatgacaaggagagttcataatctcagaaccagaagtatccagtccatctgctgaaaaatctagctgtttctcaactgatttgatgatagccattctttttgaccttttctgatagggtggtgaagaatcaaaactccttacagaagtcaatagcccatcaacagaacccagcgatgagaaggatgcagcagttttaaatgaccgtggagtagtgtccttcccattagttccattaggagtgtaaaagctatcattgtttactccacccgtcttcaacttattacctgaaccaggtgttgctttatt

SEQ ID NO: 375742 - DNA, 228 bp, Zea mays
gtttttgttcgcgagcggccgccccccttcttttgctggcttttttgacacggggaacaataatggacccactgtactctgtgtgtttacatataccggcctcaggcgcgccgggtcagaccattgttgttgctcgtacaggcatgatactttgagcgattggatacaccctctcaggctaccaaccagggctccaggtggctgctccaagttgagccgatgagaccc

SEQ ID NO: 375743 - DNA, 227 bp, Zea mays
gtgaggtactgcatgcatgcaacgcatggccgtacgtgctctcgattagtaattgcccagcctgttccgaccttgtgtgcatttggtgtaaagggctggcgatcacttctacgccggtgctaataagttccaatcaagtttcagtgttcagcatgcaggctctgcctacatatatagctacattcttctagccgccggagagacaacagagcgggaatgacaagaac

SEQ ID NO: 375744 - DNA, 496 bp, Zea mays
tcgttcaccggtgccgcttcccctcacccgctcgatttactgcccaatccggcccgcttcgccccgccacgaattttaatcaaccgtttggagcttgaatttgaattccagctcgaatcacccacccggccagctgggagcgagagcgttccagctcgaatcacccagcccgccagccgggagcgagagcgagctgggtgagctcgattcgatgcgttgctgagcgtggctcaaccgattcaggtcgggcggtggcgcagtcagagggatctgaaccctagcgccgtccggatctgtgacccgcgctgctcggcgcgtcggcggcatgagtgcctggaaaacgtggcgaggaggagaagcggcggggatatgagcggagccagcggcagcggggacgacttctggcgggcggtggcgcgtgccgcagtggcgcatgcgctggaggccgcggggttcgactgcgcgcaccgctccgcggtggacgctgtcgtcgaca

SEQ ID NO: 375745 - DNA, 501 bp, Zea mays
gttagcggccgccctttttttttttttttgagatactatatatactatttgatgcctcggcaaaaacgaactttattttttgcatgtgcagtcgttcatattgatatatcaatctactgagttactgaaaaacaatagattctcacatacttcaacgatcaatccaatccttgaagagaagcatcatgtacaagggggcattcagagcggcaatgacaagaacagactgaatgacacggaacagccgttggagcaccttccttgctcccgatttgccagcgcgggccaactttcccccatcttctgatgtcatctcagaacccatgtcgacacgaatcgatgaatcaggctccaatcggtgtcttcctgctgttgcccttgcaacaacacttccgcgtccagtaggtctggagtctgagctagcacttggggtctttgccactgcctttttaacgaggtgcatggatccttccgcatcaaaaccatatcataatcaccatc

SEQ ID NO: 375746 - DNA, 391 bp, Zea mays
gttctagatcgcgagcggccgcccttttttttttttttttttttttttttttgacaggaacagcatcatggccaaccagaatgctccatcgctctctccatcccctcgacagagacggagagatggggttagaaagaggggcaaggcaacaacatgctattgcaatagcatagggacactgcagctagtgctagtacgtacgtatctgactttgcttgtactaccatgcaaatcaagcaagcaacgttcgtttgttcatgcgaatttgtgatgatgatgatgctctccttcaaggcgggcacgaggtgtggtgtgaccgatccatcacatcaatggctgcacaggtcggagagctccttcctgccctcgacaatgtcgtccaggaagtcgt

SEQ ID NO: 375747 - DNA, 464 bp, Zea mays
gtagctagctattagcatgttcgtcatctctgggctctcgtaccaccagcagccagctgtcagtccaggcgacggcgcatcagctgctccgtccgacgacgacagggaccacaacctcacggtgctcctcaccttcggcatcttcttctccttcaccctactctacctcgtcgccggcgtgatatgcgcctgcgtcgtcaccgcctgcgcagtcgcgctctcctgctgctacctaaaggctcgccagcgcgtcgccctgcaccgtagagaggccctgctgctgcacgctgcgcggagccgtgggccgcggacggaagcttcagcggcacttgtcctgtccgcgatcccggcgtttgcgtacaagcgggagggtggtactaccactacgggccgcggcggggacgcggcggtgtgggcgcagtgcgtcatatgcctggggctagtgcatgtcggcgaggtggtgc

SEQ ID NO: 375748 - DNA, 430 bp, Zea mays
tttagatcgcgagcggccgcccttttttttttttttttttttttttttttttttttttttttttttttttttttttttttttgtttttttttttttttttttttttttttttttttttttggaaaaaaaacccaggaaaaaatttttttaaggaaaaaacccaaaggggggggggtttaaaaggtccacaaaaaaagggtgttttttggttaaaaaaaataaggggggggaaaggggataaaaaaatttagaaggggcccaaaaaagggggaggggttatcatggatgccgaacaaaaaaggggggggttttttttttttaaaactaagggtggcaggaataaaccccctggattactttttgggaatttttgtgggggatggattacaacattgggacctttggaaatataaaacccatcatggggggg

SEQ ID NO: 375749 - DNA, 522 bp, Zea mays
gcgtttagtattagcgacccagaaagcagagttgctataggagatgctagtcacaaagtatcgtccattattgatgtgaattatagccttgctatcaatacaaaccagctcgtattctgggaaaccacaaccttgtgggtcaccttgcatacggaaaggagatcggatgtcttgaagatgcccacaggaggaagaaggacagaaggcttgcccttgagtggctatcactccagtgtttgtcataattgtggaaaccatggttaatgcttgcagggagagaagaaatccatgagagctaaccattgaagctcagcaaaggagggaagaggaagagaagtcaagcactcaagcctcggatcctatctgttagtaaagctgacatgaacttccacttatagatccctgtgatgcacacaatgcaagggtgtcaatcgcgccactatttgatgagcatagaagatttatcaacgaatttcttcaatcaatacaaggaaactcacttttgcagatgtaaggaactca

SEQ ID NO: 375750 - DNA, 333 bp, Zea mays
cttgtatgcatgctcggagtggtcgagaccgccgtgataccccgctgcagccttgatcctaaaaaactcactggggctaccacatctgtacaccttctatctggtatgccgctcacctggcctgcttttgtccttgtacccttctgtgggcggtcctgactacatgtgctgccatgggctcacgctgcataccctggttgccagggtcgacgctcacgccgtcagcgcacggtctaaaatgaccatcaaggctttgtgaaccgagccttcctaaaatgacatactgctctggtgcatatctaaaagggaccgctcatgagatgagactgcata

SEQ ID NO: 375751 - DNA, 330 bp, Zea mays
cttgtatgcatgctcggagtggttgagaacgccgtgatacaccgctgcagccttgatcgtaataaattgactggggctaccaatgtgtacaccttctatttggcatggcgctcacctggcctgcttttggccttgggcccttcggtgggcggccctgactacatatgctgcctgaggctcacgctgcataccctggttggcagggtcgactcgcacgccgtgagcccacggtctgaagtgaccatgaaggcgttgagaaccgagcactcctaaatcaaaatactgctagggtgcatatttaaaagggaccgctcatgagatgagactgca

SEQ ID NO: 375752 - DNA, 315 bp, Zea mays
ctatttttcatgctcggagagatcgataccgccgtggttccactcttcaactcttgatcgtaaacaactcacgtgggctaccacatcaaaacaccttctatttggtatgccgttgacctggcctgcttttgtccttgtgcccttctgtgggcggccctgactacatgtgctgacatggggtcccactgcataacctacttggcagggtcgactctcacaccgtgagcacacggtttgaagtgaccatgaagggattgtgaaccgagcactcctaaaacaacatacagctctggtgcatatttaatagggaccgct

SEQ ID NO: 375753 - DNA, 356 bp, Zea mays
cctagattaagaggcggccgtggaaatggacgacgacgaggtgatggaggatgatgaggaggtggaggaggcggaggtccttctactaaaacaactttcctgactcgagtctgatcgctcttctgagcgcaccaaccgtgctcattgttcacctatcctttctcataacctacctgttcttgctaagacccctgcttatcatgattctaccaagaatgcaccttcactatcctcaactgatggtaataatgccgcacatggagtcatcatgcctgaccccaccctacaggcacttgctgccagggccgaatcattcgccgactatgccggccgcaatcgacgaattctggactttc

SEQ ID NO: 375754 - DNA, 548 bp, Zea mays
  unsure (1)..(548): unsure at all n locations
cttatttggagcggcacgccagcaatacggaccgggggtgacctgaggcgtggagatttttggccgctgcctgcatctccacgtcgcggtcccaatcaagatcattatttctttctccttccttgtccccgcccaaatcgcaaggcttcgttgcgaatcgcccttggcgtggccccaggattcgacgccccagcgccctcgctggaatcgtgggcgctgtggaggaggactcgaggcggccgtcgcgcttgtctcgtctctcatcaatctcactctctctctggtctatctctttttttaactgcggggattcgccctgatttagaggagcgagttgctggtctcggcgccgtctagctcgtcccggaccgacgatttggggcagggcaggtccaaaggcagcagcatcatggaagattgagaaaatttggaggcatctactacaaggttttcctgtgtgccctcaagacagggcgctgtgccgagtgggcctactctaggcatccatggngttcctcagccttgtggcactcctagggtgctctgct

SEQ ID NO: 375755 - DNA, 541 bp, Zea mays
ctgacgcgtgggctcgaagcagcgagcggaagacccattgagagagagctcgaataagctgcagaagagagtgactgctctgaacagagacctgcctccccgtgatgagcagttcatttcagattatgagcagttgcgcatgcagtttcctgacgctgagcagttgcaggcaatcacagaatcagttctcatctcctttgtgctgcagtgcagtagccacgcaccacaatctgagttcttgctctttgctacacggtgcctatgtgctcgaggccatcttagatgggatagcctccttccatctctgcttaatactgtttcctccatagaggcacctatggtgcaaggagtttctgtgactggtggtggttctgtaaccccttcgtcagctattacaatgccaaatgctccaaactttcaccaatcaaacccagcctcacctttgtcagtaatgaacaccataggatctcctactcagtctggtattgaccaacctgtaggtgcatatgtgtcgccaatcaaggcagctgaattctccagc

SEQ ID NO: 375756 - DNA, 362 bp, Zea mays
gttctgatcgcgagcggccgcccttacttttttagagatgagctcgaataagctgcataagagagtgactgcttttgaacatgagactctgctctccctcgtgattgagcagtttcattttcagatttatgagttttttttgcaatgcaaatttctgacattgagcatttgattggttttactgaaccaggacacatctccttgggggggagagcaatacccacgtaataaaaggggggactttgcccgcaaaaaaaaagtgcctaggtggcaaaaaggccaaccttgatgggacaggcaacggccatctctcgggaaaaaagttcaacacgtgtggggaccaaaccggaaggcagcccccc

SEQ ID NO: 375757 - DNA, 163 bp, Zea mays
acgcttacgcgagagcccatgatgatgacaggatggtgccggatgctccggcatatattgcttacctgctataatcgacgcgcgaatactacgaactgatgaggcgctatgactctcacaacaatgaatacttggaaatctgccgtcggtacaaggctagaaa

SEQ ID NO: 375758 - DNA, 145 bp, Zea mays
ggccgacccacccgtttgctttctcgtccgcccacgcgtccgcccacgcgggcgagaaaaccctctacaaggggttttttttttgttatccggtccgcccaggctcttcccattctccggcgcttccctctggcccttggctcgc

SEQ ID NO: 375759 - DNA, 278 bp, Zea mays
aagaatgaaacaaggcagtttccattcaagtggactctacatacaccattgattgtgcaccttctacatgttagcataccagtattctgaataacgtcttgcggagcactgtcacagttcatacaaacccactgatcaagccggggtatcacctgtagcattgttaccaatctcacatggcacagtataattcaaaaaacgatttcacatggaggcacatcgggccatgctgctaccaaccagccctggagcccttttggacccgggggggggggggg

SEQ ID NO: 375760 - DNA, 477 bp, Zea mays
aattcaaacaacaataaattaggagcaaagtgactccatcctaccatattctgaaaccaaacactacctaaatacatctgataagtaataacctatttggtaatatggcgccagaaaggcagctgtctaaaaaggagttgaaaaagaaggaactagcagaacttgatgcagtattggctgagctgggactctctgcaaattctagcagcactgcacaggatgctgagaagaaaggtaccaaccaaattggtgatgcagagaaaaaggaagatgctcctgctcctcccgagagcaaggcctccaagaagaagaaaaagaaggacaagagttcaaaggagggaaaagaaacacaagaagcacttgatgggtcagaggagactgccagtgcaggacctgatgaagatacttctgctgtggatgtgaaggagcgcttgaagaagatggcatcaatgaagaagaagaaatcgagcagagaga

SEQ ID NO: 375761 - DNA, 343 bp, Zea mays
cacagaagaattgggtatctaattttgcttgtcccatggagattttgaaggaattctaccagcatgagttgacctcatgaaaacctccctcatatccaattcttgtgtttttcctgcacctcgtccaaacatttgttcttgcgttttttttgggtttgttcgatctataggctatagctacaggattcaagatactacggcaatcaattcctatgtctcgagatttttgtgccagagaggtcataatctgttagagacgaaaacaacaaagaacccaactcagcttttttcaagcacatatcacctccttcctatttacctgtacaaatgcatgcaagctccc

SEQ ID NO: 375762 - DNA, 448 bp, Zea mays
acagtgtatatcaattctgtttaccgaggtttcaatgataatgctctccttagttaatgtatggtattttttgacgaagtacagtcttaccatagacatagcagaagatatcttccatgtttaccttcttcttttcttagttgatggtcaatgtgacatatgtctttttccttctttttcctagcctaccatacgacattagcactggattgtgtcttatggtccttagatacaccatcatttgtcggtttttcaacatcaagaaaatctaacaagttctcaacaaatatgttttcctcttgtgtttaagagccgtgacgaaattccttttaagctataggtaatttggcaatgagatatcccttgccacagatgaatcaggcaagacacacaccattaatgagttgtatctgttgggtgtgtcctctacagctggtcaacagtgacc

SEQ ID NO: 375763 - DNA, 199 bp, Zea mays
atatcacgtatgtgaggtttcagagcagagatcatactttatcttggcttttggttctgtagaaggtttgggtgcctggagttcacttttggaaggtctgcacggttgcgcggatatcacataggcaatttgtatgttttttcctggtgttaaaaaaaaaaaaaacaaaaaagggcggccgctcgcgatctaaaactag

SEQ ID NO: 375764 - DNA, 360 bp, Zea mays
aagaaacacactttttttaccctttttcagagatcacatacatccattgcctcctctccttttccttacttgccatgactctaccttagttacactgcaaatccgatcctacaggggaatgggttcgtctccttatcgttttaccttcgacattttaacctactacaactacaagtgacagaattaatcaaaaggatagctagcagcacaaaccattacagatcctttttagggcgcccgcaaccttactgtaattttgcacctgccaaacatatcatagtcatcatcgatcaacatcgaagaagctcttgagctccagcttcctttgcctcttgaccctcgcaatgaagtcctccactc

SEQ ID NO: 375765 - DNA, 341 bp, Zea mays
ttttttttttttttttttttttttttttttttttatttttttttttttttttttttttttttttttttttttttttttttttttttttttttttttttttgggccccaaaagggcaaacgggggaatcccacatttggaaaaacaaaagggctttgggggggttttccggccggaaaaggggaaactgggggttaaaaaaatggaccccctccccaagggctttttggttgaaaaaaggggaacccttggggcaaaaaaaattttttctcaaacttttgccctccttggggggggggaaaaccttgccccaaaaggcgggggggggcctccccccggcccc

SEQ ID NO: 375766 - DNA, 364 bp, Zea mays
acaacaaaaaaatctcgactgcaaatctgcaattacaagaatttgaaacgtgttgagtgaaccatgagaagaactaaaaaaaagaagtgcacactgtacacgttgtcctaccgtctacgcggcgcagaaactgtgccagcccaccttgtggacccgaaccggacggcgccgccgtcgccagcagcggcgcggatcggcaggatggtgcgcgcggacgcgctgcccgcggcgtccctccgcaccaggcgccgttcctccaccgtcctccgcagcaccacatcctcggcgcgctcgcggaggccccgagccgcgcgcgcgacgccctcgtccagccccgcccacttgcaatccgacgcggtgccgt

SEQ ID NO: 375767 - DNA, 402 bp, Zea mays
attatatataatatataatataataatagctcctgtatgatctcctttcatgtaaatcaacaaaatttggctggtggatacacagaatggtacaaggggcctatcctttggatagttggcaagggagcaagcatcaagaaagcttgcacactgctgaaagaattgcctgtacacacaacaaaaagaaccaaagaaagtgtagagctatatcctactcgaatgaacaaaagatcactgtgtaaccccctaccctaagctctactcactgtactcatttgaacttctggatgagttacatcatggaaatcttgcgacttctccatttctcttgcaatctgaatgtcactggggatgaaatactcactgaaggcctttgcggcaaaatgaggaatcatcccaaca

SEQ ID NO: 375768 - DNA, 155 bp, Zea mays
ggaaaaaaatcccgttcttattcaattttgaatatggaaaagcttttagcccatccaatcactttcgggttggggggtcccaaactagcctccagggggggggggggaaaatgaaactaatccctttttccttggtcccacaaccccgaacaaaa

SEQ ID NO: 375769 - DNA, 244 bp, Zea mays
gaatcaaatgattctttatcaggctctcaagttcaatagaaatgatattgtaacagctcatcagacttaaatatcaggcatattaaagcatctgcacatagagaactatgcatagcattcgaacggtgaagaatgcgataagcaagagcagggggctcaacgtgttgctccagcgacccatgagccccagagcgaaggggttgagatgcaccaccacatacgcgttgaacgccaaagcgaacac

SEQ ID NO: 375770 - DNA, 320 bp, Zea mays
aaaaaagtcgaaagagatcgatctgtatattattactcaacatgtaatagtacaagtttatatatactccgatcccaagttatgtacagaagttaacatagcgcaaacttacatgtacagtttataattttatactgtattaaaaaacactacgagttcaatagtaaaaacttcttatgcaaatcaaactagattaactagcatgctgggtatccgtatgcctattcgaatgtcggaacccggcgccggcgggcggatcggagggagaaggatttaggggtgaaggatgggcgggtcggcgtagggcccgtagagccagc

SEQ ID NO: 375771 - DNA, 366 bp, Zea mays
ttctttttttttttttttttttttttttttttttttttttttttttttttttttttgattttttatttttttttttcttcccttggggggagggccaactggtttgttttaaaacggggccaaccctaaaaaaaaaccaatttgggggagcggccaacggtttaaaaaaaaaaagggttctaggggttgatttgatgaccagggaaaggggctaaatctttgggggaaaaaaccctttgtttttaaaaattgaatgggagggggttccctctcctagggatcccccctatttccgggggcatcaacccaaaaaaaattggggggggaaaatccagttttttgggcagttggggcaacccccccccc

SEQ ID NO: 375772 - DNA, 183 bp, Zea mays
cgggggccaaagatccatccagtgaaagaggaagcactacttgggtacatcacattaggttacaaatacaaatcaccaatagaaatccgcccaaaggaaaaggggagagaaaggaaggggaagaaagaattaataaagccacaaatgcatggatgggtacatggatggatggggcacaccaac

SEQ ID NO: 375773 - DNA, 132 bp, Zea mays
gattccaaacatgtaaaagtgtaattcatcatgcaatacatggatacgctcatcagaactgtcccagatcacgtgcagatacatattcgtttcgaattttacgactcctatacgcatatgatacagatccga

SEQ ID NO: 375774 - DNA, 232 bp, Zea mays
ggggcagcaacagagagaggcccaacctctccctttttattaaatataaaacgggcttcctatataatccacagtttgaacttgatcctaagagctgggggaaaaaatttataatggggtggggggcctttttccgggctttaacaagaatggttgggagcttacataactttcattgggggggcgggggggattttttgagaggggaccccccatggagaattccaggggg

SEQ ID NO: 375775 - DNA, 480 bp, Zea mays
ggaaaactatacatcttttggataagagtatagggaaagcacttccatgattcttaccaatacacatgcagaacagcagtagatttataccattcaaaaatgcgagataaaacacaccaaataggatcccactgcaacagatgcacatctcataattcccaatgactgcgtcaattagttatgggcaccaaaaggatgtccaccgaaaagaaaaaaaaacatggcattctactgtgctacaaaatttcaacaccatgctcattgtctactgtgcgatgcgaccagaagagctgttgccgcatcaacaaactctactacaatttgttaacaggcataataacactgcaactttttacacttgatggtgccatagtttcttgtgaagtgcacatatgaaggatggagtggatttagtttgatagagggcttaagagatttttacggaggggggcttgaataagattatggaatatggatgct

SEQ ID NO: 375776 - DNA, 464 bp, Zea mays
gtcacagttcaacaacaagctgagggtgttttaaggttacaccagtcatacatggagaacactagatcagccagtcaattctacaacccaaccccagaaggccagaaccctgatcgatacatagcaccgtcaaaaccgcgcaatgactttgaacaagatctgataacagctgtgtacgtatacgttggcccctaggcatctttgccagtcaccgtccacgagatcattttgccagaagacgccggaagagacatttagccaacaccccacacgtaactcccacagcagagtacagcgctaagccttcaacgtcaaggcagtgacctctccacagcacgccttcagtatgaacacctctccaccaccagtcaactggataaggagcaatttagaatgtttcagaagaagaagaagaaaagatgagggcaaatctgaagatgcaactgcgcaaacataatggatat

SEQ ID NO: 375777 - DNA, 234 bp, Zea mays
aacatcataaactgataatgtgggagaccatatccagcttcgttggtttttttccattatccgatctacaatcagctctgactactgcactgcactggtatatatatatctaagcaccgccacaacagttcagttactgttggcacggccggacagggggtggacgcccaaacgtggttgctgaacccctgctaggccacaccctccttggcaatggcaacgcagaaaacgggg

SEQ ID NO: 375778 - DNA, 206 bp, Zea mays
ggccacctgcaagggcgttcttcaagccgctccacctccctcccctccccggcgacgccggcctcaggccgctctccctctccgactacgcgcgcccgctgtaccgtcaggagcatgtcctggcatccgaggcggtggcggttgctgggcgcaacgaacgcgccacgtcccccgcgccgccgtccggcaccgttgacggcgcccgg

SEQ ID NO: 375779 - DNA, 481 bp, Zea mays
aactgataacgttaaatcatatttgtttaattccaaccgtaatcggatctcatattaaaaactggtatcggcctatttaaacttattaccgctgtcactcgagggtcaatcgttattattgttatttacgttacattttatgaaccaaacgtcaccttaaagcagctcgatcgaaatggacccaataataatccaacagagaaacaccggtccgttccatgattttttttggctcatatttctcttcgttcctacggtacccagtaaatcaactctactaataacgggtaacggcgagcttttcaccagtacgaacagggaggcgaaggcgacgctctgggccgcttgctgtcgccggcgaactccgcgtgcatctgcggcacccaccgctcccagttggcccgctcgtctgcgacgtcagcgggcaccagctcccgccccgtccacggcatgtaagcttcttgcagcaccccgctgatct

SEQ ID NO: 375780 - DNA, 238 bp, Zea mays
  unsure (1)..(238): unsure at all n locations
tacccccgcatgtaccattccctaattcccatatctacccactcatccgctcatgcttccacccacacatcccactaaatcnggatcggcctccctcccctttttttttttcaaaccctttttcctttccattaatcctcttaccctcccaccccccattctcttattacctcccaaacccctcctcccacatcccctcaaatatacaacactttacaaaacccccccacctatccaa

SEQ ID NO: 375781 - DNA, 285 bp, Zea mays
ttcttgtctagatcgcgagcggccgccctttgggtgtttttttttataacacatggtgtgaattacaaaaacaactcatctatcattacaacttcctgacaccgtggcaaggcagcaagggatttcattatgaaagattgggctatttcctccaaatctgatcataatggatcttacctacccatgtttccaatccactcttcattatctaatgatgtccggttaggattgatatcacaagtacaaaacttacttgaatgttcatttcaacatccaatgcatata

SEQ ID NO: 375782 - DNA, 201 bp, Zea mays
ttctttaatttatctttgtatctacgagatcgagatgaccacgattttgttgcgtgggttttggaggattggcttttccattggaatggatggtggagaagctgaaatccgttgggggctaatttggtgactagggatcccagggatccatggggaggattcccatttcaattcaatttaaatagcaagaggatttttttc

SEQ ID NO: 375783 - DNA, 523 bp, Zea mays
  unsure (1)..(523): unsure at all n locations
tttacggacagcgacggagcatgattaatggggctcctcaacggctaataacgattcttcaggaaagttttactcttattaaactccctgacatcgtccaaggaagcaagtgatttcattatgaaagattggtctattttctccaaatttgatcataatggagcttacctccccatgttgccaatcgactctccaatatctcatgatgttgggttaggattgatatcacaagtcggaaacttagttgaatgttcatttcaacatccaaggcatatatgtgctacggggagtggcacagttcaggaagcattcagctgtttgaacaagtttgctgaagctttctatttctggttttctagagcatcgaatcctaagctattccaaaggctatcagctgctgcaggctcaagttcaagagtttgtcggtcacacataaagcatgtggcctcttgcttgcagcatttaccaggactacagtttggttcacaataagaaaagatcatgctgtacagatgcntttagc

SEQ ID NO: 375784 - DNA, 209 bp, Zea mays
ggaaaaaaatccttttgctatttaaattgaattgaaatgggaatcctccccatggatccctgggatccctagtcaccaaattagccctcaacggatttcagcttttccaccatccattccaatggaaaagccaattcaccaaaaggaatgcaacaaaatcgtggtgatttggatctctgagaatacaaagataaattcccggacgcgtg

SEQ ID NO: 375785 - DNA, 212 bp, Zea mays
tgttttccagcaacgcgtagcatgcagcgcaaggagagctcctagcgcccgggcgggtagcttcaccatgaacatgggcagaaggtcccctggtgggacaactatcctgcgcaaggactctatcgcgagcctgaccatgtgcgccatccagcgcgccatacactgcgcgcaatgctgcggaatgactcgcatactgctgtcgctgtcctcgc

SEQ ID NO: 375786 - DNA, 311 bp, Zea mays
acaacacattacattcatttatatgcacatacatactcgcattcacatccggtgtaaccattaggacgacgacggtcaccgatcgactacatacattttccaagagccgtactgtcgtccagccccggacttggccgccaacctggggccttcagcaggtttttattggaattttgtatagcaacacacattgtactacagatcacatacaaatcactaataagacacaattacacgggtccattaatcaatctgacgatcgagataagctcacatggttgacccaaagcattgcaatgcagatgcaggct

SEQ ID NO: 375787 - DNA, 489 bp, Zea mays
  unsure (1)..(489): unsure at all n locations
gttctgncgtcgatcaatccgacgatctcaatcttgattcttttaaatctataacggggaaacgatatatcagagtcacgaactcacgatcgactcgcaatggctgctctgaagattgccgccgtgtgcgtgctgctcctgtttgtcggctcagacctggcgcgctgcgttgcgtcgtcagcatcccccggtgacgaggaccaggccgcggccggcgcgctcctgctgcgggagttcctggagctcgagctgagccttcttgccgaacagcacggcggcgttggcgagttctgcccgcccgcgtgccagaactgcctcataatctgcgggatcacctgtgtgctcaaccccaatccggccacctgcttcgttaactgcaccaccgccaacggttgcttcagcaagacactgccggtcgtcgcataagcctgcatctgcattgcatgctttgggtcagccatgtgtgcttatctcgatcgtcagattgat

SEQ ID NO: 375788 - DNA, 188 bp, Zea mays
ttcttagagctcctccagtattaataagcaaggggtccgaagctattcagctggaggatcctgtcaagggatcgctcgagcgtggccaacgcgtccttcagggtatactacagcctcggcgccggcaccgtgccgttcctgtgggagtccaagccaggcacgcccaagagctcctccacccctgcctc

SEQ ID NO: 375789 - DNA, 382 bp, Zea mays
tctagcagagcagaaaaccccccacacgctggggttggtcgtacgtccgggggtctctgaggagcacacagcagtcgattttaaactgcagctacagaggtcaggtcaggggacacagcctgagcggctggctggcgggggctagcgagcggcgccacatcgcagcacgcagagagccagggcggcggccatggcgagcgcggcgagtggcggcggcgggtccctgaagcggatgggcccgctccgggtacagtactacatcgtgatgggcgcggtggcagcggctgtggtgctggccacgctgcgctacatgccggggccagccgtcccggcgaccaccgtccgtaccagcggaggcggcgtcgtgcgctcggccccagca

SEQ ID NO: 375790 - DNA, 411 bp, Zea mays
ttccttgggcctcccgttccccgttcctcctgctgactcctttcaacgctgcgcgggtccccctccgcacaagcgtttcgttcgttccttcgtaacctccgtatcagcagctgacgcaaagagctagagctgccggtgtgccggtcgccatgcataaccccaggccgggcggcggggacatcgtcgagatgtcgtcgtccgccaccgccgaggggcgggtgatcccgcacagcggcccgctgagcaagaagtcgggcgcccggaagagcgcgcggttcgcggagtccgtgtcagcgccgctgttcgcgccgccgtcgagcgccttcgtcaacatcaacaacaacatcgacgacgacgactacgtggagatcaccctcgacgtgcgcgacgactcggtggcggtgcacagcg

SEQ ID NO: 375791 - DNA, 204 bp, Zea mays
ttagtcctagatcgcgagcgggccccctttgggggtttttttttttttttttgggttttttctcccccaccgaggctctcagcggtaacctcgccacgccacatcgcgtgcgagcaccaaccgtcgccggccctctatttaagctgccccagcggtgcgatccggtgatcaccgctgccccgccggaggaggaggaggaagggg

SEQ ID NO: 375792 - DNA, 352 bp, Zea mays
ttccattcctccccgcagccctcgaccctcgtgaggctctccagttcacctcgccgtgctccgtcatgccccgcgagggtttggggaattttggagcggaggaggaggcgagggatggtggacaggaaggtttggttacggaaatggatgtggaggaatcctcgccgtcttcgtcgccgatgtcgtctccggccgggtcgtcagattccatagacctcaacttcctgccgtttctcaagagggagcccaaatcggagccgtcgtcaccagagctcgggcccctgccgctgcctgtctccctcacccagacgccgccgcagcagcatgcagcggcggcggcttcagcaactga

SEQ ID NO: 375793 - DNA, 233 bp, Zea mays
gtatgtcgccgtgtacgaggcgactcgcggccgtaggttccgtttgtacaagccgggcgggacccccggcggcggcaaccagggcaagctcccggtgctggtgtacttgcaccgagggggctactgcggctgtgcctactaccaccccttgttgcactcctgctgtcagcgcttccccgtcgaggtacccgccgtctagctctcagtccagtacctgctcgtcccggagcacc

SEQ ID NO: 375794 - DNA, 395 bp, Zea mays
ttctttcgtccgccaaggaagccactccctggggcggcattgctaccggaccaggcgggcaccgcccgtctgaccgacgcaacccagccgtccagacgcgccgtcgaccgtcctttcaccaccacgcccgcgccgtcgcacgctccctagggctccgcaaggccggggatcgccggagatggactggagcgcggtgacggcggaggacttggtggacgcgctgctgtaggtggactggtccatgccgccgcggcctgtcccggagttgttctcccgcttcaccgtgccacgctgctactccaagtggaccagccccctgatgtgcaacctgtactactacaggacaaactatttcatcttgatcatgttcatccttgtgatgggcttcctttgga

SEQ ID NO: 375795 - DNA, 365 bp, Zea mays
ttctctcgtccggcccgctctgccgcgcgccggtgggggtcgccgccgccggcggtaaccccaaccccgcaccgggaacgtccgggcgccgggaagagggtaaccctgctgctggcgccgtcatcggtggcgttcaaacacaggaccccgcgcgcggcggcggctttcctgaccgggccgtcaggcgggccgcgtcgtccatggcggcgctgccgcggcgggcgtggccggacgtcccgctgcgtgcgccggcgtcgagcagcttccgcgacggcgaggacgacgtgacggggctcggcaagatcaggcggctcctcaagctctcggacgcgctggagatggccggggtcggggtacaccggtcc

SEQ ID NO: 375796 - DNA, 72 bp, Zea mays
gacctacccatccttacctccccgacccacccacccgttttgtaccatccaagaaacccaacctaaatgggc

SEQ ID NO: 375797 - DNA, 406 bp, Zea mays
tcgttcgatgttccggaggctgatggtgcgggtgggcccggctgagcggctggctggtgacggcaaggagagggagaaggacgagaggccgccggcgtccggcgccggagcggaggcggaggtcgggtcggtggggctggacaagatggtgctcagcttcatggaggactccgccgcggccgcggagcggccaccgcgtgggcgatgcagcagctgctttaacggcaacaaccaggacggcagcgacgacgaggacttcgacttcctgccgtccgcctccgcccccgccgtggcgccagccgcggccggcgacgccttggagctgctgaagggcttggtgcagtgcgcgagcacgccggagcggaacctgctcgcggacgcgtcccggatcgcggagcgctgcggc

SEQ ID NO: 375798 - DNA, 500 bp, Zea mays
aatcaaacttagaaaagctcaattgttgaaaacctatgcattttttttgggacggagaaagcacattgtagtggtatagccttgtgacagaaacaaggtctagaaaaggatatcagattaatatcttagcacacccaggacagaaataacggcaagtctgccaaatgtattctgtgaaccactaggtgaaaacatcatcatcatcaccattcaccatcttagagcatacggctaagtcacttcaagtttgaaaaaaaaatattgagggggacaattgtggtgaatagctccttggtgtgctattcatccaccattaaaaattccatgaggacaacaaacatgggagatcatgaactcggtttttcagcctttctttccttatttgcaaagatccctggaagtaaagctctcaagatctactcggaaatggggcaggattcctcaaaagcttgctgctccttacggcagaagtcgaattcgttggtgtagtaatacatgca

SEQ ID NO: 375799 - DNA, 249 bp, Zea mays
gggacgcccctaaaaccttccccggttcccttaccctgaccaaaagtttcaacaccgcacaaaaaaaacccccagatcaaaactaacatttatgggtgttttagaattagacccaaaaacctaaacaacttttttctgggcggccctccaaagggaggggggttacttgaagcattttgcatttagcagggcccccccccaaaaagggtccgggccccagaaaaggggattgaccccctcctttggggc

SEQ ID NO: 375800 - DNA, 84 bp, Zea mays
gagagaaacggaacatatttgacgtataacacacaagcaaagtccagtgatacaagcaagaggccgtcgtgccccacgcgtccg

SEQ ID NO: 375801 - DNA, 446 bp, Zea mays
aagccacgtgtctcaaattaaatctaactttgtgctaacaaaacatcaggggttacaggaggttctacttctagcaccctaattttgatcctgtcagttgctcttgaagtagccgaacatggtgtagacggtctgcagcatcgacggcacgaagatgagcgcggcagcgacggcgagagagacggccacccatggcgacgggaagaagtgcagcacgaaccctccgcaccacccgttgacaagccggccccggtggcccgctacggcgtcaagcatctcgccgtagtcgtcaggaagccgcgccccgacggtctcctcacctagctcccggaacaaggccaccagctcggtgtccgtgcgccgtgtgctggcaaggacccctcgcttgcggagcatggccgcgtcctgtgggcaacgaatcaggcccttcatccgcgctacgtgcg

SEQ ID NO: 375802 - DNA, 173 bp, Zea mays
ggcaatcaataaataaataaatgaataaccgtttaaccttctggggatccgggaatgcattaatgcttcaaaccgcgaaagcactccttgaggccttgacagtttaacagcaacaaacccacaaaccctggatggggggatggtaacatccggtctcccggacccacggggga

SEQ ID NO: 375803 - DNA, 333 bp, Zea mays
ccgctaacatcaccacacctcacatggttatattcgttcatcaggaaagtattacagtacagacaccatttcagacaaggcaaagttgttcacagcaaacaacctgtacatttcccattcatatacagacatggagtaggtccacaagaattcaaaaaaaaggcgaagcccaaatcagtagcctaattgatccaggattaggcttacgtatcttggaaataaggcgcggggttatgccccttgttaaaaaaaactagtttacttaacacaaacctataattgatggcgtttgagaatcaatcaggtcgaccccagtttttatgattagcattt

SEQ ID NO: 375804 - DNA, 373 bp, Zea mays
ttctttttttttttttttttttttttttttttttttggggggggaatggaataatcacttaatacagatcattacaacaacattggacttggacaaaggggcactgatctcttgcagatagaaatgtggcaccactgtgacacacaaaaaccgcattacatttgaattgtgaagaaaagaacatctagcaaactaagcagcatggctatattcagatgctaatggttcttttctgtctgaatggcacgagctattgacataatgctacttctgagacatctccataaagctcagaatgttaagttaccactagatccaggatcagacaccgtactcgttgtctgactgagaaacaggactatcagaagtcaac

SEQ ID NO: 375805 - DNA, 244 bp, Zea mays
ccaaataaagtagcatattcacaagagcgaatctgttaatccattgataaattacttactcaaatcacactctgtaaatgccggggacaaactacctgagcagtagcaacaacaaacaacaattacagcacgcacgaggccagtgggaagggaacaaacatacggcgactgctagccgatgcacgcgcagtcaaaaggcgaaacaccaagcaacacatggggaaagccactgtgacgacgacgg

SEQ ID NO: 375806 - DNA, 213 bp, Zea mays
aaaaacgggattatcagggttccgggattatttaaccccctcagatcctatcaggattgggggggaattcataacagccccgcctaaaccataccaccaggccaccaccgggtactaaaacgcagggcacatattattaaattagccggaaggggaaaaggaatcccataataataataaaatgggccggaaggaaggagagacaaaattctt

SEQ ID NO: 375807 - DNA, 325 bp, Zea mays
aaagagtctcaaagagatgctgttacacactaacttgttggaagctatagagctacaataaaactatcattcttcctaaccatgcaatgcagctacataaccttgcctaactatatacttatacttacactggactgtatccgaatatattgccatcatcatccatagccatatttacacactattggaaaatcttcagagcagaacagctaaccacagtaaaaactatctaaaacatgtgaaaaaattgctacccaagtgcgcatcacgagtagagtttgatgaggctgaagctctggaacggcctgtagaacttaaacaggtt

SEQ ID NO: 375808 - DNA, 321 bp, Zea mays
ctgaaaacacgtatccttattatgtaacaagtagtagtagcaacagcagctagtaatacatcaacttttgcatgcaactcattgctgcatcacacaacacaacacatcaaccttagttgcacgcacttgccgctccttgaacagcatcacctgcagtcttcgtcgaacatgcgcgcacacacacaggctcatacattacacgaggaacacggtgaactggagtacggactcgacgccgtcggtctcgagcagcgcgccggacgccgacaccccttcgggccttaccacggccaccttggcgaagcccttcgcaccgacgta

SEQ ID NO: 375809 - DNA, 279 bp, Zea mays
aagaaaaaaccgagacaggcgatgtctttattcagagcgatgcgcgattgctgtgacgaatcgagtcgatcgatgaataagagacggctttctctcacggccactgaacgaatcacaaatgcaccaccaccaccgatgaaacaaacaacacaaactccgctgcgattcctacgcgcacaaacggtaccgaagctagcttcggatcacgcggcgaagccagcgactacggccgcggcgacgaagaagccggcgacgagacgggcagccgagcccggcggc

SEQ ID NO: 375810 - DNA, 405 bp, Zea mays
atataatccataagctagattatataatagtggaagaaaatgaacagaaataccgtacactgaaacaacatagcccgaaattatgaaacatagcaagcaccagatatacttgaaaagctgaaaacgatggtaaaccatggaggaactataaacacacacacacaagcaacgacgactgcgatttacagcttcagttctttcaaacatggtaactaagctgcagataatgtccaagtccaagcaccatcggtgagcttcttctcttctcttcgatctcttctcttctcctctccctctcctctagatggtgtcactgttgatgtgacccttggcccctccatcaacgggaggagcaccttcccttgacctgatctcaacaggctgggatcccactgatgacttggc

SEQ ID NO: 375811 - DNA, 361 bp, Zea mays
aaaggcgaacaaccatgctaaaatatttattcacaagtccgaccaagtacagttaaggggacaaaaaacaatttttttttatgaaatgaaaaaaaaaggggaaacacaaacagacacctgaccggacttaaaaagctggcttcagtttaaaccagttatagaaccccccacctttaatcaggctgatcatcaggctttatgtgggaggtcatacagacccctccggatttttttttgggttttatgggggcaaaaccttttaatttgcatgacatttggcttgacatgttgcataggcttttccaatccataagaatgaagtataaacccttttggttggggcactgccaacctttgtttt

SEQ ID NO: 375812 - DNA, 282 bp, Zea mays
tttttttttttttttttttttttttttttttttttttttttttcccaggaggattttcctgcatccatgtccagcagagtacaaactcagttacaaattaaattcaactgggaaaactacagtaaccccctactagtataaaaattttaattattgggccccgtttccgagacactgggggaagttgtacccatccatgtccagaggacattaaaaaagaaattacaggccccgatcaggacgcaggctgacaaacgctcagggcagcaggttctttattcc

SEQ ID NO: 375813 - DNA, 315 bp, Zea mays
ggggagggggggatgatgacttgtttttcttatcgctgttacagctgtcctttttgacattttggaaagaccgccgcttgtggccgccttccttcgtttacgcctgccctgcccctgcctgcccgcccgccacgccgcccctgctgctgctggcctgctgccttcgtgcttatccacaacgtacccaaaaggccaaaacccttgccgtaccgccctcccgcccgccgaccattcggtcgttgaggacggataggataggataggcaggcggccgggtcagctggatcgtcgtgtacgtacgtacgtacgtgggga

SEQ ID NO: 375814 - DNA, 216 bp, Zea mays
tgccagcgctccctcttggcggtcggttttccacctactggcgatctccctccaccccccggaacctccgcgacctggcagtgcttctttcctttgtgacctgattgcccgtgtgccgtcttttgtactgcctggatcgtcacctctcgtgtgagctttttagacattacttcaggatgccgcgcacgaagaatgggtcggcgccagggggaggcc

SEQ ID NO: 375815 - DNA, 180 bp, Zea mays
  unsure (1)..(180): unsure at all n locations
ggacacagcggaggctaaagtcagtacantttgacccaaagggtggcatgtccgctttaacaacccgatatatctcagacacgtttcctgggctgtgtaaggtggctgtcagcggtattcctatggacaagttcttcaacttggtggtgctggatctggaaggtttgggagaattttaag

SEQ ID NO: 375816 - DNA, 53 bp, Zea mays
aaaccgaagctagcaaccggctggattataaaaaaagggggggggggggggcc

SEQ ID NO: 375817 - DNA, 234 bp, Zea mays
  unsure (1)..(234): unsure at all n locations
ggatgcatgacaaagtcgccttatccccccatangnttaccgtaagtggaagcctatggattttaagcaagtctactctggtacaatcttgtgccatttgcttttatcctgcgtgggctgtatatgttggactttgggaattgaggccatccagacagtattccttaaggttgatgcctttccacaagttttgcccggaagatccttgtaacactgtttgggatattttttgag

SEQ ID NO: 375818 - DNA, 190 bp, Zea mays
  unsure (1)..(190): unsure at all n locations
ttctttgagccacttagaagttccttggatatgcagcagnctatcgtggtgcacgcccccccacctatttgacatctggcaacgacatttaaatggaaaagtggggcggactttcttgatttccagaaatcttataagcaagcagcaggatctttttctgaatggaggggcaagcttactagggactttg

SEQ ID NO: 375819 - DNA, 275 bp, Zea mays
  unsure (1)..(275): unsure at all n locations
aaggtttcattcacaaggttnaagttagattatgatatttttaaagtgtgatcgtcagttccacacgaatcacagagaaagaaaccagtaccatgtttgcttcacatataacagagtgaacatgagaaggctttacaaatcaattgattgatgcaaaatatttgggacctggcattttgttttcccacaaatcaccttatagagttttgaaaaggttgccatattaagcctctttatccatatataaattctgtgcaagctgatgctgttgcata

SEQ ID NO: 375820 - DNA, 271 bp, Zea mays
  unsure (1)..(271): unsure at all n locations
gcttctacaggcatgaaggannggttacttatgaaaactggtatgatggggccatcagatcggcccatgtagacgacgattaggttatccaagaatttgttctaggcgaattcgatgacgacgcgactgctgcataccatgaaaatatcacttttgagttagttgacgatgaccatcatgtgaaagatatatcttagaggtatcatgttcacttgtatacaaatgggactgtatgcgatcttacagatttttcgtgggagacagaggttag

SEQ ID NO: 375821 - DNA, 359 bp, Zea mays
acacacaccttccaccgggcctgggttgaaagctgtacttactatggatttctccctccccccacaaacctcatctcttctctcccgccgcgcgccactggaaaaaaaaaaggaaaagaagagagaaaaaaaccctccatgtgttccatatttccttcgcattcagtcatcggcgtatcgtcgcaggcgcaggctgctgctgctggcggcggcggcgggtttcagagcccagagagcagagccagcagcatgagcggcggcggctctctgccctccccttccggacctgcctgctccagatcatggtccatcagcgaggactcgctgcggaggtacgtgagctacgcgagcgagagctg

SEQ ID NO: 375822 - DNA, 387 bp, Zea mays
cggccgcccttaattttttttgggtgaatttataataaatttgcgatttatcttttatgaactcttacagactcaatgctaaaaacaaaaatattaatttgtattgcacattatatatcttatttattcaaaattaaagaaaaaagtcaaaccgaataaatatacgtttgcgaccgttttcctattgctgtcatgctatccccctattgctgtcatgctatccgccaccgctatccagcttctgcagatagacgaggacaaaagcattgttgagttaaaggtggagagaggcaaaatgtttttgtttgcacaagcaaatcttgccctatttttcttttattcgcagggaatttttgtatcaaaaaatttgttaaactaatttgaaaa

SEQ ID NO: 375823 - DNA, 209 bp, Zea mays
attccacttccacttggatcgaggtaactgtatatggcggtactgtggtggtggccatcgccctcgcttgtcctcccgcgccgttgctgctgtgcttgttttgcctgctggtggttcacggcagcgatggaaccaggcacaacatcaacaatggcggtggttgtggtagttccagcagcagcaagagccacatgcaaggttgaggggga

SEQ ID NO: 375824 - DNA, 139 bp, Zea mays
  unsure (1)..(139): unsure at all n locations
cgtcctgattctcaatcncggggtcacccatgaagaaagacagggaatgacggaccgacacctcgcgctgaaccagacccagagggtccgtctcgaggccgagcttcaagagcttcagtccgttgcgcccgccgctgtc

SEQ ID NO: 375825 - DNA, 270 bp, Zea mays
acctcgactttgggctgggcagtgggtatatcgcagagcgcagagagcacgccacccacctcgtgccctcaatttcgcctgttcgccccaacgcctctccatggcgggcgccgacgcagggctcgcgtcggccgccggcgacgtcgaggaggccgcgcccctggtcgccggccccggctcccgccgcgcgcccgtcttggtgatgggggcgtcccgtgacctgcacctgctgagctccgcctttcttttctcttccttcgcttcccatgc

SEQ ID NO: 375826 - DNA, 259 bp, Zea mays
gccgctcgcgatctagaacccggtttgctctattccactacctaacgctacctgccttttcacagcgtcgtgcgccaccgccacgttgagctcgcgttcgtcccagatccgccgtgctcctccatcgctcgcgcaaggttggttactggcctcgcctgctcgcctttccttcaactccttcccgcccgcaggattcgggctttctcgatcacgaggcgcttcgatgaagatcacggtgcgggggtcggagatggtgtac

SEQ ID NO: 375827 - DNA, 329 bp, Zea mays
ctagatcgcgagcggccgggctggattttttaaattttgggtacactaacatcggcccacccaaggcaatctgtacattacaatacacgtgaccatcacacgtaaaggtccaactaatacctcagcgacattcttatggctgggagtacaatacatagtgcttggcgtgggtcgtgatttcgactatatcactatacatataaccatctatcatgtgattatggccctgtttggcacagcttattttcagctttcttacaaatttaagctgaagtccttccaacagtcagttttttcagcagcttattaggtcagctttttttttaaaa

SEQ ID NO: 375828 - DNA, 87 bp, Zea mays
tgccgtacgccaaccgggtgcgcggctacgaaatccgcctcgcgctggaggacgaacgtccacacacctcggggaccaggcggaggg

SEQ ID NO: 375829 - DNA, 124 bp, Zea mays
atttcctccagtacgtttggacgagctccacgccgctatttggtctgcggtaagcagctactagaggccgttgtgtaggcttacacagaagatcattgaggaggatgctggtgaacaagaacaa

SEQ ID NO: 375830 - DNA, 330 bp, Zea mays
actaaggggaaataagggatggcgtgaaaaacaggggcaaatgaaggattagctcaaacgaaaatggtcttgcggtcttgctctccttcctcgtggtcggcggccggtgcagctgtagccacgcgcgcctcggcaaacccttcgcctcctcgcccatcctcccctccattccgtcccagccgaagggccatggactctgctgccggcgcaggccgccaccgtgattgaatcgtagtcgatggtgacgtgcacaatgattgggcccttgaggaagatttaaaggctcttttatttcttcagccgcgattttgttcttttttacaggctatt

SEQ ID NO: 375831 - DNA, 243 bp, Zea mays
ggcatcttgacgaagatccacgaggttgcattatgcaaagacaagagggggaggtgcgcagcaccaccccacagggagattgccgtgcaagcaccttgtacccatactgacctgaatcatccccctgggctggttgcagcacaaattcctgtccctgtttggccgtatctcgctgcccatcacagccgactcaggcatgtatgtaccacgcagccgctccgtgtggcctttcagcaatatcta

SEQ ID NO: 375832 - DNA, 294 bp, Zea mays
ggccgcccttaatttgttttgggtttgaattttgaaccatataatcagagtttttcacaccaaccattaattattttgcagggcactccgtcacaatcaccatcattattgacccgagcaccaatctccatgcaatcgctactactagtggtggatcatcgacaacacctgtgacccggagattaaacacatggcaattgcaggatggccacatgcagctgcacgcacactgattttgatttgtgtttagatggtggggccttcagcttacttccagatgctctaccttcattg

SEQ ID NO: 375833 - DNA, 174 bp, Zea mays
  unsure (1)..(174): unsure at all n locations
gccctgcatggagccaggcncgccgtggacgaaccgagccggggttactgccactgccacacatcggcgatgcagttccagcttcagttgcagcagcgggccgacgcggcagccggtggaggagcgcttaagaggagcctcggcgagctggagaggtggcagcaccaccagcag

SEQ ID NO: 375834 - DNA, 164 bp, Zea mays
tagcccgatcagatcgatggggggggtgccagagcttacagcgtgtcttctcgcgctcctacaactcctctttgcgctgtcggaggggtgcgcgttcgccaccggcgtaattacaggtgcgccgaaagttcccgcgccacggaggacggggtgtggttgaatat

SEQ ID NO: 375835 - DNA, 341 bp, Zea mays
  unsure (1)..(341): unsure at all n locations
gtccttcttactcaacacaggggggtancaagagtggaagcaagcaggctcgacatggcacaagctactgcaccaaagacgatgccgtcgtccgttttcgccgccgtactgctgctcctagccgcggcggcgtgccaggccagcccttactaccctctggagctagggtactaccgatacacttgtccccaggccgaggctatcgtcaaggccagcatggagaaggttcatttcccagtaactctggcaatggcgcctccgacaatcctatgcttttttcattgattgcttttatgtgggtttgtactgtatactagttttttttaaactgtcctttttta

SEQ ID NO: 375836 - DNA, 211 bp, Zea mays
  unsure (1)..(211): unsure at all n locations
cctttttttttttttttttttgggttaaaanatttaataattttggggggtggcggccttccccacccaccaagggaaaagggggaaaactaattgggattacatttaccatatgggggcaacatgcattgtaccaacatgccaatttgccatgcataaacacttttaaagggcttggggttttttttgtttgtcaaattagaacttgttt

SEQ ID NO: 375837 - DNA, 57 bp, Zea mays
cctccaagtaaggatgaggccagggtaccgttcggcggacgcgggagaggagggttc

SEQ ID NO: 375838 - DNA, 285 bp, Zea mays
gggttggcttctcctcccccaccgttgcgatgtcaggttctggttcgtgggcgacaggcaagcgatggcggagtcggacgttgagtaccgttgcttcgttggcggacttgcctgggccaccgacgaccactccctcaacaacgccttcagcacctacggcgaggtcctcgagtcgaagatcatcctggatcgggagacccagaggtcccgcggcttcggcttcgtcaccttctccacggaggacgcgatgcgcagtgccatcgagggcatgaacggcaaggagct

SEQ ID NO: 375839 - DNA, 131 bp, Zea mays
  unsure (1)..(131): unsure at all n locations
ttccgtctctctcatctccggggtgacntctatctcacccctgcctctagagagccgcaggaaacaagtagcgccggtacggtttgttcaggattcgaaccccaccttttgattgctccgaatccgaggcg

SEQ ID NO: 375840 - DNA, 216 bp, Zea mays
tccggctccacatctgccgtcgactaaacccgccctgctagaatactcgctccctacaccctctccttgcaattaacacctccgttagcacgagctgcagggagggagttgggaggagaaacagagctaccggggcgatgggcacccgtgctcgattctgcactttacttggcgctcaccgccctcgtaacttgggggtaccagcatgctgttttt

SEQ ID NO: 375841 - DNA, 199 bp, Zea mays
ccctcgcctcgtgacgaggcgcttgggacgatgaccaacagccagtgtgggcgacacacccacaagtcgagctatagggcttggggatagcaagggaccacccggggccggaccggagcacgtacgttcgtaccggaacgatggcttggtatgaaagcgtgcaggcctttgtttgtgcttggcggctcttttttttttg

SEQ ID NO: 375842 - DNA, 232 bp, Zea mays
atgaaccagcaagccaaacatagatgagttaactgccattattattgtcaagagcgagaaatcacgatgagtaaaaggtattcaaattcattgcctggttcacttttgtagtcatgcacaatatggaatgaaataggcatcaatacttgatggtttccaaatttgttggtccatatgaattcatgaactgtatgctgagcaaaaaggaaaataaagcttgctttgttgaaaa

SEQ ID NO: 375843 - DNA, 232 bp, Zea mays
atagtcctactatgccattcatttaacacgaaaaagaaatacataccagtgattaagtgtagccgaacagaaggtaaatcctaaagagttaccaccaactccaaccgtgatgggcttttaatcgaattgattgttactaagttacaacatatggatgggccaaggtgaggaggaaaaacagatatggtccttgacacaagggtgaaaaattttttaacaagaatgtgaggca

SEQ ID NO: 375844 - DNA, 323 bp, Zea mays
acaacgctgactgacccaaagatcccttccgcgagctccaacgaaacagtcaaacaccgtgcagcgacgacgagaactgggggaaaaaaaagaagagaaggtgacggcgagagctggtggtcacctgcgccgaagggcgagtccggagcgccgcttgcgggcgacggcgacgacggcgcggagctggactcgctgcgcggcgacgtggcgacggacagcgccgccggccgcagcatggtgatgctccgcgtcacggcgggcggcgccgggccctccgcggtcggtgacggcgcggccgacgagggggagaaggacgcgtgctt

SEQ ID NO: 375845 - DNA, 402 bp, Zea mays
ggagcccgtgacggcggttcccaagaggcagaagcgcggggatgagatgcccctggacgcgctgccggacgagtgcctcttcgaggtcctgcgccgcgtgcagggcacccgcgcgcgctgcgcgtcggcctgcgtctcccgccgctggctcgcgctcctcgccggcatccgcgcctctgaggccgtgctggccccggccgcccccgccgtgccggacctcaaccaggagtacctcagcgaggacgacgaggccgatctgatggacctggacggcgacgcccgcgagaggaccctcgagggcatggaggccacggacgcgcgcctcacggcggcggccgtcgccggccgtctggctgccgtctccgtccgcgggagccaccccgcgcgtggcgtcaccgacgc

SEQ ID NO: 375846 - DNA, 248 bp, Zea mays
tttcttttttttttttttttttttttttttttttttcccgccctgggcaggagcttagcttacatgtaggcggagctctttgccaacccaaaaaaaaaaaattatacaacttcctgcgaacctttgtatgaccaattctggcatcaccatccttggaccgggctagagtttgatcggaacggtttgatcgcttgcggggttaccacatgcatgagaggatatcctgaacagaagcaaaagatgagcaa

SEQ ID NO: 375847 - DNA, 100 bp, Zea mays
acaatgttccatgcaacaaatatttgcagttttgcagcctagcctggtgctagcgcaagaatgaacaacaaataactgctggtcagccaggagctgacgc

SEQ ID NO: 375848 - DNA, 372 bp, Zea mays
gagaggtactgttcatcagtgtttacaaatacgggaaaccatcagacagtcctagacctagatgatgatgcatgctaatatataggcagcgtggcagaaatatacagcacacgcagaaggtcgatcgatgcatgtactagtagctagcagcagcagatgagattactatccccttccccttgtgcgtgaatttataggatatttggtttgaggatggtccatcattttttcactcctcttccgctcctcattttctgcagccgcggcatgcaccgtcctcgtcgctgacggtcacggcttgcccttgtgctgcgtgtagatgtagtcgaggtgcgcgtcgacgagcagccgcctctgcacgcactcgtcctt

SEQ ID NO: 375849 - DNA, 363 bp, Zea mays
tagccgctagtgctagttctagccggggcggacggcggacgaagctcgctccgacgataagcctgcggacggcgatccataacggcagctaatgtactgggagtgtaattaagtgctgtaacatagtgttaattaagctctgatgtttttgcgaggagagaaaaaagtcgtttaattctcagttttgagttttgactcctgatcggtgaccagctgaccttgcatgttatggtgtcggacgaagcgaatggctggcaggaacgccgtttgtactctgtgtggcatgtaaattgttaccggttgaagaagagttaccagtccaaaaaaaaaaaaaaagggcggccgctcgcgatctagaactag

SEQ ID NO: 375850 - DNA, 260 bp, Zea mays
aacaagaaaaaaatctttggttggcaccggggcacgcgccattaaaaatgaactgatatttttatttacatggggccccgagaaagagagagggggggtcgaaccccgggtggggggtggtttaatatcaactcaccaactcacaagacaggaaaaaatgggggggactttattcctcggtgatcttatcacactagttttaccacccattagggtaaagggattgacttatttatccaaagaccattactttattaggg

SEQ ID NO: 375851 - DNA, 511 bp, Zea mays
caaatctctatttctataaagcaccagtttcgatcattgttctgcacgaatcatataagtcttcccctcccctacttaccactctttttatatgtagacatcgtatattaacctccaatttcccatctcttttccatccatgtattactcatccagattcttccgcatcaccataataaaatcttactgggcgagtcactatagagaacctcgagcagacatcctgctaggtgagtcaccatagaggaaatcgagcgggccattctgttgaagctaattttacagcttttttaaaagccaacttataggtcgtttgtttgaaactgacaagatttaagaataacttgcatgtatatatcaggatgcccttccacaactgcttttccttctccggagcccctaaccaatacgtttcgcttgtaataatggaacgcatcactggaacttggagctgctatgtacgccatcaaagggggtcaccagaaacccacctcacaaacatagcaaagca

SEQ ID NO: 375852 - DNA, 316 bp, Zea mays
  unsure (1)..(316): unsure at all n locations
tttntttttttttttttttttttttttttttttttttttttttttttttttttttttttttttttttttttttttttttttggagggaaacccccaggttagttaatccccaacatcacacgctggtgttggtcctaaccaattaatttcacgtccccgagatgagaggcgcccttgttttacgggtttacatgctacactgaaacacctgggaaaacggtctcgcatttccttttgggaatttttaacctttttaactaacgggccatggtgttaccacgtcccccagttaaaccgggggtttttcccacccgaa

SEQ ID NO: 375853 - DNA, 463 bp, Zea mays
  unsure (1)..(463): unsure at all n locations
tttnnctttttttataataaattgacatcaaaatcagctggatcataaatcatgcatcaatgttttgtttagccatattttacacaaattgcttgggattcatgtgtaccaaaacttcatggttgccagttttaaataccagtggtccaaacnnngcacacacacacatcattcattgcaaattcgagcatcatattagtaagtgttgcctctacataaaagtaagaagttcatttcttcggcagcaacattagcaggagatagcctgcatcttcgctgaatgtagaatctgatcgcgtaaatcccttcttcgttgtgctcaggagtgattataacctctgatatacagggagtagcaccaagaatttattgtggaaaaataatatcataaggtttctagttcaaaggtacttctagtatgctattactgattataggaagaagcaccaaaaatttatcagca

SEQ ID NO: 375854 - DNA, 387 bp, Zea mays
gtaaggacgttgtacaacattcatttcatgtgaactgctcatgggagctctgtatgatttctatgtacaaaattcctccacactcacttggtacagacgatggagtgccaacatgcatgcccacactagctagccacacccacacggtatcacaaaacctaaaaccagacagcagttccatgttctgcaacctctctacgtacgtacgtggtcacatatcacggcggcaacacagggtttcttacttgctaaccacaaattatattaattgctagaactcctctaacccccggtgcagtcccgacctcgcgctcgttgtacgtctttcttccagaagaactcgtccgtcaccggcgccggtacgttttaccgtttcaatggtcgacg

SEQ ID NO: 375855 - DNA, 390 bp, Zea mays
  unsure (1)..(390): unsure at all n locations
attnnaaaaaaacttcacgacttttaataatttgattgtacagcgattacatgaaaaacataatatttttttgccataattgcattgcaacacccaaaatgaaagaaagaaccaacgtaaaagaaagaaattacacgctatcatacacgagggaggctgattgtgagcgtgctgcctgtaaacactttcggacgcgttcggtcgtcatctcctggcctgctcgaccttctgcatcctaatctgctccctgaacttggctatgaactcgtcggcctttctgtccaccttgccctccaccttcgtctccgtttccccctccagtcccggtctcgtcgccagctcaaagagctcctcgttgcacgagttgacgccgtcgtcctcactcacccc

SEQ ID NO: 375856 - DNA, 317 bp, Zea mays
gcacgccgcattggcggttgtggcagcaggcaacggaggaggcggcacctcggccggccaagacagctgcgtcaccgcggcgccagctggccgcggcgcgcgtagcaagcggtcctcccgcgcgcccgcggcggcggcgtggcactccctcgtgtcgcgcccaccgtcgcagccgtcgccatcctcgtcgtcctgctcgtcttcggacttcccgtcgtcgtccaacaggccagcgcgcggcaggaagagcccggggcccggcggggacgcggcggcgggctcggacggtggcgtgcggcggtgcacgcactgcgcgt

SEQ ID NO: 375857 - DNA, 362 bp, Zea mays
tttctttttttttttttttttttttttttttttttttttttttttttttcttttttttttggccaaaagccaatcactggtccatgatttatacccttttgtcacatgcccatggcctgtacgtacccaaacgtttttgttcgtttgggaattgccatcgtcgtttcatttgaatacaagcgtatacaagggtttactggagtagagaacgatggtttccggggtacaatttgctcgagtcactttggatttcatttcactgtaacagcagactgaaaaacacaacaatttggtccaagggacaatttgggccccaatagcaccttggtttacgcacacgtttggacaacgccgccgcccaa

SEQ ID NO: 375858 - DNA, 217 bp, Zea mays
aaaagggggggatttggtctggagctgggatttaaaaaacccggggtacaacaatcggtttgggtctttgggggctgggaaaaaaatagccccgggacaaaacaagaggggggcccgttttattttacagaaggggggacagattcagcatactggcaagggaaaaaattttagggggcctagtttttacggtcaccttacattacctaaaattaac

SEQ ID NO: 375859 - DNA, 241 bp, Zea mays
agttgaaaccctgaaccaaaggctgagctgagctggtgtgcacagtccttaccagctgcttattcacagttcactaacagaacgcttaggctcactgctacacattgcacaatgggggtgtgtcatggctatcggcaggcagcacttcattcacacgctgctccttgggcgcacgcggaccttcagcggcactgccatctcgcaggacagacggagcaccttcgagaggtcgacgtcgcct

SEQ ID NO: 375860 - DNA, 371 bp, Zea mays
ttctgctgctggtgcggaagaggaggaggagcggcgagggtgattcggctgcaatgcgttgcggcactcgtgctcggggtggccgtgctgctgtcggcgctcttctggctcccgcccttcgcggggcggggtggcggcaaggagggcccggatccgggcgacgagttcggagctgctatagcggcaagctttaggctacacaagacagttcctgagctaagtggaaataaatcccagctcgtattggatatctatgaggaagttggcattcctaattccacggtggttgggaataagctacatccattggatggatcaaactggacaaacatcatcttcagcattgtccctttcccagagaacgcaactat

SEQ ID NO: 375861 - DNA, 227 bp, Zea mays
ttttttttttttttttttttttttttttttttttttttttttttttggggattcaggaaaatgctgtcactcgtatcagggattaggcttggggcttatccgaagctacaacaacccaaggtgagcatacgttgcatcctttttatacccctatccaatccattgaattccattccaaacaaattaaggggcaaagataccttgcattgtttaaaaacacttggaac

SEQ ID NO: 375862 - DNA, 154 bp, Zea mays
cacaacaaatcgttgcttcattgagcatttttaattaaacaaataaacatgtgaaatacaccatgggaagacatgaggatgatgcattgacgtccggttctcagaaatcaaatcacaccatgggaagacaaatagcggtacatttgctgaagtc

SEQ ID NO: 375863 - DNA, 115 bp, Zea mays
gctgcggaagctgggctttttggcgtgcacggtggtggggttcagctacggcggtatggtgtcgttcaagatggcggaggcgcacccggacctggtccggtagctggtggtgtcg

SEQ ID NO: 375864 - DNA, 286 bp, Zea mays
ggaggcggagggggactttggcgccagcgatcgtggggatctcgccgcccccgctgaggacgcggcgccggccggatctgaggacgccccggccccggcggtgacgccggacgagaccgtggtacctgccaaggcgccggccaagaagggtggatccggggacgccgccggggtccggaaggcgaggccgcagaacggcagggtgcccgtcgccgccgccgccgtgccgagggtgaagaagcccggggtccttttgcagagcgcctccttcccggcgcggggtgcc

SEQ ID NO: 375865 - DNA, 286 bp, Zea mays
gaactaaaaatatgattttgacccataaaatgaactaattgcaatcatctaaatatgatttacaataatctaaattaaacagatcctcatgctagtaatttttctcattgaactaattacaatcatttgaattacaatcatatggactgtagtagcaacttaaaatatggataataaaaaacagaaactattaaacagaaactatgattgtaattaaatagaaactatgattgtaattaaacagaaactatagtagcaacttaaaatatgataaacaccgtgagga

SEQ ID NO: 375866 - DNA, 313 bp, Zea mays
aggatacactcatattcatttcaatcccatccaatcagaatgatccaaactagctacagcagagcgcacactattcagatcatcttcctgtccatctccctctgtacatacagaccctgatacccccgcaccgcacctcgggctcggctcggcacggccacggacccacggcgatctgctgacggatcaccgatcagcacgcagcggcgcaccgatcggggggccgcatttcttaagttgctgccgcccgcacgcgggcgacccgccgaccagctccttggccagtaggtaccggaacgccaggttgtggggc

SEQ ID NO: 375867 - DNA, 153 bp, Zea mays
ggccgaattgggggcaacattaaacagtggccctattccacggataaaacacaaaacgggatacaagggtttttaatatcacaaaatacaaattccaatgcttggttaaaatgcatttgaaccttacaccattatacaagacagtccgcccaa

SEQ ID NO: 375868 - DNA, 293 bp, Zea mays
cacaagggtaggtatatgtatctgctatatttacgcccgtccaaaaatatacacggccacatgtagaacctgaaatattgtaaaatcttacacagcttacaaacacgcgtcacacgtgctaccacaggcatggatcctgacccagcagctgcagctgatactgacacgccggggttcggagttcactcgatgggggggctcttgcctactgctgccgtgggcggcggcggcgtgaggtcgccgcagtcgaaccacatggtgtccgcgagccgggggaacacgaacctgtagaa

SEQ ID NO: 375869 - DNA, 282 bp, Zea mays
gttcttcacctcttcattgttggctcagttcgacggccccagatttacaaatataagtacttaattaatttgccctcaatccggcaggcacaaatgatggatagtatccaaattcatttttagcagcagcatcttccatgatccacttttctagttcctataccagcgtattctgaatttttgattcactgtttacatgaagaagaaagaaactgaaacgttgtagcatcagtagcagccaaagcccaaagcttgaagggaagctcagttcacgatgcccat

SEQ ID NO: 375870 - DNA, 118 bp, Zea mays
aaaaaaccaaacaggggcccatgcatttaaattttcgagccactgtcatacgcaggggtccggtcaaccaccttgccatttaaatctcacgggctccagttgtcaaatcagagtaaaa

SEQ ID NO: 375871 - DNA, 298 bp, Zea mays
aaaaaaaatttaatgaaagatgttattgatgaacaaacaaaagaagccgctgcttcgatcgaacaaagtaacaacaaagctgcaggacgctttactaacacgccatcagccacacgtacatcatgcctgacctaccagcagtcgcatgcatacacaacacatgaaccgtgtccatcgaacacacggtacgagtatgccacacgattgagttcttgcacgatctatcggaccaccactagcccatatatttttgcagtactaacatataagcgtcgtgctcagctggcgttgacgacca

SEQ ID NO: 375872 - DNA, 228 bp, Zea mays
cacataagggtcctccaaaagatcaaaattgcccaagcaggtcccgtaagcgaaaaccaaaactgttccccgtagatggggatccacatacacacccgagagggcgacaaaacagacagccggactcaagtcgacgcccggggaattgcccgatactatggagggagacgatcggagggccccgttgttggcggccgggggcggccgtcccccgtttttggggcgccg

SEQ ID NO: 375873 - DNA, 95 bp, Zea mays
aagaataactgaacaaggcattaacatatatagatttggattgggatcaatactaattacccaaacaaagcctaatggtcctgcacaaacttatc

SEQ ID NO: 375874 - DNA, 213 bp, Zea mays
ggcccgcaaaatgttgcccaggaattatttcaattcttgaacgataagattggattacattcgaaacccaacttcaagaatactaccaacaatagcccaacccgttacagacagggaactaaacgaagtacccctaacaacaaacaggcttccacgacagcagggggaaggggcttccagcctagcctccaaagccgaaaagggttcggccct

SEQ ID NO: 375875 - DNA, 208 bp, Zea mays
aggcaaaacgacttatgatttaaaacggagagggagtacaacataagggtggcgcacgaatgccaatgacatcttcttcaaaaataacataacctgcacccgatgtggcagaaagaggactgtttataacactgaccgtgggtcaaattctacgttcacctggcgaaacaaataccaagttgtggaacaaaatgattatacaatcaac

SEQ ID NO: 375876 - DNA, 325 bp, Zea mays
gggcacggatcagttcagcagcttgctcagtctgcctcacttttcttctcgcaaatccagatgcgccatagacgagtcatacagagggctctacaaaatgtactgcaacaaactactggatactgatcgaaccaacaagctgtacaaaagggtaaatccactgaccaacaggggatcttctcgacggggttcaaagacatgattcaaaccttcgcccatgggtcctcaccttcactggtcaccagaggggttttcgggggttcatacatagaccatacttatcaacaaaacgtgtttcatgccatccacggcaaggaaacatgaa

SEQ ID NO: 375877 - DNA, 263 bp, Zea mays
gggggggagaaacccatccgatacttaaaaaaagggattggttgcaaaaaaaaatgcccccccgacaaacaaaggggaaaccctttgaccaaaaatggtttgggggccccgtgcccccccccaagaggaaagtccccgggggtgggggaacaaaggccccccccaaaaaaaaaggggggaaaaaacccccccccacaagaaaaaaaaaattcttcggaaggaaagggaaaaaccccccccaaccccggtgggaaagggccggg

SEQ ID NO: 375878 - DNA, 306 bp, Zea mays
aggatgaatatgtgtgagcagcagcaggcttgttaccttgcttcacacacaacggggtttccttgttatgtatatgatatgatcatacttgggttcagttttcacaacctttcggtaaaacaccagatcggttagtgttgcctctatcaaaggaaaatcatcttcagacatctctctctctcgcttgcatctcaccatctactgccgcgagttagtaatcatcttgaaatagaaaaagaaaaggtagctaggcaaccctaaaccatgtattgcattcccacctgcatcagcctcgtgtggggtatg

SEQ ID NO: 375879 - DNA, 217 bp, Zea mays
gggcagggagttctcaaacgtggctttgtgttaaagatgaagcgcggggatccatcatacagaataaatgcagtttacgcaactctaatgtataggactctttaactatacaaggtaaaacctatcaactgtggtggaaaatcaccggctattatctatctggcatctatgatgaaaaagtgaagggcaaaaaaaaggggggtaacatgaatacatg

SEQ ID NO: 375880 - DNA, 197 bp, Zea mays
aaaatccaaaaacccaatagataagccaagatgaaaactgattcatcgcatgacaaatcgtaggctgtcaaagccataaaacacaatgacagtaaagcatttacagaccactttcatatatttaccgatacttaaaaggacattttctataaaactacatgaaagcattttagggcttccaggatgcttggggacta

SEQ ID NO: 375881 - DNA, 400 bp, Zea mays
tttttttttttttttttttttttttttttttgggtcagcactcctaaaaaggacttgataaataaacttgttcagcactccttgaaaagaacttgcatgcagtctccaaaacaactagtattactaccactaccaggctaccagacacggctggaggcatgactgtactgccgcttgatgattaggttacgccctctgcgctctgagtctagctgttttgaccaaacaacatttcttcccggtagcctgatgccaattatgggagtgagaaacactgcagttccctccacatttctcatccgggcttggaccggcaaaggcagtgttaaaccgcaaacaaacaacaaatcaggaaatacaaacaatttcacaaagaaatcgtgttcccagacataatttg

SEQ ID NO: 375882 - DNA, 277 bp, Zea mays
gtacatccagaagcatccatcacatgctaggttttcttcttatcacattttcaagccctgccaactcactcccattccgaaggacgctaaggtagtataccttaccaggcttcaacggacttaattaagcccgaccaggatatgcaatccgtcgattaaaccataccttacgttagtaaataacgctcatagaataaaatacaacacgtctccgcacgtagaggagtagcacagcatattcgttgcttgctcttgacagtggtgtccggttcacagg

SEQ ID NO: 375883 - DNA, 132 bp, Zea mays
caaacagcatcgttgggtcaccatacagcccaagatgcctataactatcattcggcaatcaacgctgattacaacaacacctggctccagttggtcattatgctccaactccatggggggaaacaaacccac

SEQ ID NO: 375884 - DNA, 359 bp, Zea mays
gttaaccaagcgtaatgacgtctgataatgtcgtcacgaacgtcaacgtgcaagcagacgctatgatgaagtcagaggggtcacccgggttgacagaaggatagtcgctgacgagattagtacaaaactataccgatacaatgcgatagcccctgacagaacgtgacaaccctaattgaagctcgaggttttgctcaaccaaatcccacgcgttcgtgagcgaacgtgagcggtcttcgccttgtcctccgactcttccattccattctattcccgcttccacacgtcggtcggcgcccttcgcgatcgtgtcgtttcttcccgcagcctgcctgcgtgtggggtgatggctaggcact

SEQ ID NO: 375885 - DNA, 232 bp, Zea mays
gaacaagaatgttattccgttttgccagagcagacagatgagaaaacaaaaggctagcaacaatccttggaaaactcgtgataatccctttactttcttgcggttactatgctacaaaacatcaagtagcgtccaccatacttatgaagcctcttctaccaaagaggaggagaggaggacacaaagtttcccccacccacccatgtttatacacaaacacacccacccttat

SEQ ID NO: 375886 - DNA, 133 bp, Zea mays
aaaaaaaaaaagatatataataacgggctcaatttgcattcatgagggcggctgcttggagcaagagaatcctcatgcggggagcacaatttgcctaacgaggttgtagatggcccaaaggcatcccttgggc

SEQ ID NO: 375887 - DNA, 199 bp, Zea mays
gggggcatgtgtaggcaggggcggatgcggatctacatctacagttctacacccgggccacccgagccgtggcccagagcgtgatccatgtaagtccatataattctatttaatctagtctgaatttgctaggataaaagagaagatgaagaaatttagtaggtttggcccggggcataacattctagatccgcccctg

SEQ ID NO: 375888 - DNA, 225 bp, Zea mays
ataattattagaagaggggccaaaaggatctctaagttacaggttataaaagggcctacataagggcaaggtccgatatgccccaaaacatttggattggggggggttaaaaggaaaaatcccccccaaagcttgtcaatcccctccaatacatatggattgaaaaaaaccgaacaagccctaacaaaaaaacggcaagttaaaaaacagtaaaaacaggggaaa

SEQ ID NO: 375889 - DNA, 218 bp, Zea mays
gggaccaaaccagagacaaatcctttccgcttttttaggcaattgccgagccatggacggaccctgtaaaaacacggagcacaaaccttgaacagggccggccggtcgcttgcttctacgggcctaccggggggccaaaccaaaccactagtattattagctagcaggggggagacacaccaaacacctttttacatattactacagggcaaaacccc

SEQ ID NO: 375890 - DNA, 347 bp, Zea mays
gagtgtatgttgcaggcgcacacgcaactcgcagccgaccaggccccccgcaggccgcgatgccgccgccgccgcagcagcagcccccgcaccggcacgccaagacggactcggaggtgacgtccagcatggcggcgtcgtccccgccgcgtgcggcctactacgtgcagtcgccgagccacgacgacggcgagaacaagacggccgcgtcctccttccactcgtcccctgcggcatccccgccgcggtcggcgtccaggcactcctcctcctcctcccgcttcttcgacagcgcaaagggcaccgcctccggcgccggcggcggccggcgacgcggcagcgcgtgg

SEQ ID NO: 375891 - DNA, 346 bp, Zea mays
tttgctttttccctccaatcgcaaacagcggcgggggcgccgggccccgaaaaccctgtggagctcctcatcaatagcgagcgatccccaccgccctctcctccgggtccgccgaactctagccgtcccgggcaggcgaggcgtgcgttcggatcgcgcgggcgggagatgcagggcggcggggtggccgccgccgcggtcccggtgcacgcggccgtggggggcgacggaggaggggctggtcatatagccccccccgcgaatcctcttccccattatggataaagtgagggctccctcccaggaactgctccttgttggggtcgatggcgcccggacggctttg

SEQ ID NO: 375892 - DNA, 413 bp, Zea mays
gttatgaagatatatttcaactaaacaatgaataaatacaaggcatgatagtttacatattccagaaatagctcaaagacatccagtcagaagagccaagaacaaagaaagcaaccgatcttttgcataggatgcagacagacagtctcagtagctatgagattaactagaggcgaaacgatcgctagaatcctgacaatagagcagacacagactccgtaccttgcgattcatccgagaagaattatcagtacagaaaaaaaataagccatctactgacaaggctccttgctattctcagatgtatgagcattattcacaaaggatgacgaaatcaatttcctccagcatttgggttggtggaaggactctgttgatcgggggtgagagtgcctctgtcagtgtgcgacggt

SEQ ID NO: 375893 - DNA, 354 bp, Zea mays
gtatggaagctccccgaggccgcgacggttcccgtcgcggtggtggtcgaaaaccccatcatggatgccgactcctggccggcgctgcccgggctgtcgtctccgccgccgccggctgcggggccagtggccaaggcatctccaaaggccgcttctccggcttccactggggcggtgatgtcgccgccgtctttggccaatcccggcgctccggatgctaaccctggtagtgaggctccggtgcgcaatcctgtggtccagcgtgccctggtgatgcctgcggcaaatgggctggagaagattgcccctgcaccggagccgtcccctgtttatgtgcctaacgctcggagcaac

SEQ ID NO: 375894 - DNA, 504 bp, Zea mays
tctcctttcgtccgcccacgcgtccgcgcgagcggccgccctttttttttttttttcagttctgtgtatacctatctctatttttttggtatattatgcttttcctctttttttttgttttttttttgaccaactgatcttcacctcacacgagatagtgtgcaggccgtcactgtgaaaactcggcctgccgttatacttcttcatcttgaaatatatagcctcaaaaggtatcgctcctgagtaaatttcttgcagacttcggccccaaaagtggttcactcccgttgctcggtagcccacccatggttgatgcatgataacctaaactaactgaagttgctgatcttgtcaagagagcttcaccatgcattactggcatggtagcatggtatgttgccccctcgagtccaacaaatcgaaactgagacgtcagagattcaatgttagatgtcacagggggcaacgaaccagaagaactcccagcagaaataattttgtttg

SEQ ID NO: 375895 - DNA, 346 bp, Zea mays
ttccttgcgggcgggacaccgttaccggggagaggctggattgcgtggacaggaacacctggtttcgctacgactgaagcaccataggctaggatatattgctacatgagtgacaggaaggcaagatgcaggccggggggttgtaggtctgggcgccacccggagggaagttcgaggctaggaacacgccgatcggtataatatcctgcatcatgggtgtcacaggcggagtgatgcatggctacgacgtacgcatatgaggtggtgtgacgctaacggacgactctctggggcaagacttcacggaggagctgcggaagaaactgtaggatcaggagagttacta

SEQ ID NO: 375896 - DNA, 302 bp, Zea mays
gaaaagcctataattatatcaggggcagggattttcacccctggaccaaaatttgtagtaataatgaaacaattagcaatgagactgtttttggatcaaacaccccaatccaaacagggaatatccatgtctttttgcttggctgttccacggttacataacaaaccgaagggccatgcaatcccagtttcctttgtttatcttgcaccggcagtgtactggggtagcgctaatctcggttctagagggaatgtaaataaattccaatacctcaaaaaaaaatctgaatacgtggctgcaaa

SEQ ID NO: 375897 - DNA, 503 bp, Zea mays
ctcattggttagggcggggaaggaaattgcgggaggatgcgaagccattggtgtattgcatatggtggcaccaagcatgaggcaggaactgcattacttgcaagaaagtcacaagctcattccaatctgattctctaaactttggaggtctcttacacctaggcctgaaagctcctctcccattagttgcctacaacattggaaaagagtttctcacattatcttagaatccattgcaagatcatacttgtggctttcttgcaagttgtgcagttgttgcctcaagcttgctgcctccctttgccagagctatcggtaaaacaggaagtactgtcagtttccgagctacaaacaagctataagtttagaaaaataatttaaaaatgtacaacaaagtctagtaatacattgttaaagaataatcaatactcaataagttcctcatgctttggatttggggataacatacctgttttatttacatgctaatatttggaccaaca

SEQ ID NO: 375898 - DNA, 454 bp, Zea mays
aaccagatctcccccaaatccacccgtcggcacctccgctgcaagatgcagatctttgtgaaaaccctgactggcaagactatcaccctcgaggtggagtcgtctgacaccattgacaacgttaaggccaagatccaggacaaggagggcatccccccagaccagcagcggctcatctttgctggcaaacagcttgaggacgggcgcacgcttgctgactacaacatccagaaggagagcaccctccaccttgtgctccgtctcaggggaggcatgcagatctttgtgaaaaccctgaccggcaagactatcaccctcgaggtggagtcctctgacaccattgacaacgtcaaggccaagatccaggacatggggggcatccctccagaccagcagcggctcatctttgctgggaagcagcttgaggacgggcgcacgcttgccgactacaaca

SEQ ID NO: 375899 - DNA, 320 bp, Zea mays
tcccattcgtccgggccgccctttttataaagggagggtttttttaacaatctattgccgtcccctctaaataatgatttttaaagaaaagaaaaagacggaattttggaaaaaaagagtttcaaaaaaataaaagctgggtccaataaaaatatgggtacaaaaaatggttaaggaacaaccaaaatgggaggaaacaaattttagtacaatggcacaaaagcttattccaaacatgtaaattataggagggggtatagacacttgctgttgaagggagaagagcaagaaataatgggactataacagaggttaaaaat

SEQ ID NO: 375900 - DNA, 231 bp, Zea mays
gggtttcgttgggtagctgaccagcatcgcggcaggggggttttcggctgctagagacttatcgtcgccgaaaacggaggaagcggcgtgcacacatgttgtgtgagcagacggcggctagcactagcagcagccggggcggcgtcaagcagtcggacaaggtggctgcagccggtggctgcgaactaggaggaggaggaggaatgcacggacatacactcgcttaggccg

SEQ ID NO: 375901 - DNA, 336 bp, Zea mays
gcaaccagccgccgccccaagcggggggggttttttttttttttttggattgttgagcgacggtaaacatcacaaatacatacacatatataggccaaccagcattttttttttggggacttgacaaagcgccttcaagaccgacatgacaaaattggtagaaaatatgtttatgatgagactagtattattcaatcaaagttatgcccaacttgcgtgttaaccaaactaaccgggggggtacacaggaccacgcctaaacaataaaatggggggcactggccagggcagttctggctttgctcagggattccaagaaaaatgcaaaagaaaacc

SEQ ID NO: 375902 - DNA, 419 bp, Zea mays
ggttagtaaggctacaaagcatggcaatactgcattagctctgtcgtatacagaacagggcaggtcaatcacacaagtactactgctagtacatgtaactagtagtaggtggtggtgcaaatgacacacgcatgagaattcaggaagaagtgacacacggccgtcgtacacagcaccagtgctacagagaagaccgcacggtaaataaaatgccatcactctgtctgtagccaacacgagtgaactccccagtacgtagtatctccctttccctggctgtgaaaaatataatcgccatttctgggagagcagaggtcactttttatttcccagtatgaacatcttgagttgatcagagcagcatttacccctgtgctgtgcattgggttcagaagacgatcctgttgtcatccgagaag

SEQ ID NO: 375903 - DNA, 272 bp, Zea mays
gtacaaaaaaccaggttcacaggcttatttaatttggcacatcaatcacgaccgtacaatacagagtttcgccgacgtgaacaaattcataggaaccattgacccacagtaggaaataccagacgagtacgtagcacaaatatccagaggggagtacaatttgacgatcaggcagacacatgcagcactatcacatatgattccaccaggcagaaaatagtagtagtacgtagtaagcaaacgtcagaaaacagaaccgtcgacggggggga

SEQ ID NO: 375904 - DNA, 336 bp, Zea mays
aattattacactctagccgccaacatgtaactgatatatcaggagttgagaacacatgtaaaggatgtgaacagaaaagctaaccaaaaatgaaaaaaaggggggccactgtaaactacaatagctgatccacaccacccaaactgttgggtacattggcatcatgtcagatatcgaaaatgctgacagtttttacggttctacccttcaaattaaaacaagaaaagaggcgccttttcactggtattgactaacacaacccgccaaaatgattgcctaggcaggccttgctgccataaacaaaaggcactgttactttctctctttgccctgggt

SEQ ID NO: 375905 - DNA, 220 bp, Zea mays
ccaaccacaccaagcttgtttattatccaccggccccatacatccaaaaacgacacaacccgaaactttaccttgtttattatccacccctgcgggggagggccgggtacgtgctccaaccaaaaaaataaaacccgctcggggaaaaagcaaatcacacgtggatcgacaaaacactaggaagggggatgcctagcctcaaattttgctgcccgggacg

SEQ ID NO: 375906 - DNA, 342 bp, Zea mays
aaagtatcatattacttttattgggagattggttatccagtatatacataatgcattgcgccatacccatacacaggcgcccttggatcaacagtcggttgatccataaatgctgccgagtaaccagattttaaaactactggagcttcctgaactcgatgccttccaggatgaggccgcgcttgggatacgatccaaccacctcgaagctcgccaccacgtcctcaccgggggcttcatgctcaccggcctcgacggtgcgtagccgccccatctccacctcccaccacccgtcatctcgcagtctcggcacatggacgcctccgacgccatatggaatga

SEQ ID NO: 375907 - DNA, 357 bp, Zea mays
aaggggaaactcccgcgcataccaaatatggcagtaacaaattgtccgtagtaggatttgtctactgtacaatgtacatgtatagcagctcgtatacgccttttttttctacatgctgtttgtgtgctttaaacggctcttgacccacaagactactagctcccaagagagccgagcgaaatgcctacctgtctaaactctttagagctcaactttgtcctcggcacagtacaaaccgtcctcctttttgttttctacgcgctatacaaaagcgaagcaaaccatcgtcgtcgaaaccggagcagattatatctgtcgagatcatgtgcgcattttgcattggggcccctttagtgc

SEQ ID NO: 375908 - DNA, 332 bp, Zea mays
aatcaatataatgcggaatgcaaatgcatatgactaggaatgaatcaatctacacaagtgaggtatcacactgtaaaattcactacccgaccgattctgaatgggaacttgtgatgcctggagtcgtgggcgcatcgcgtgtagaaggagagggaggtcacgaggaagagggacggacacagcagggaaggcaggacagcgacttggaagcgaagctgctcttgctcttgtccttctccttccccgtcgtcgtcggcttcaccgtggggatgtgggagccgtcctcgccgccgcggtccttgcatttctcgcactcgtccaagaaggccttg

SEQ ID NO: 375909 - DNA, 379 bp, Zea mays
cccttgttcatcattatgcatatcatgctgagacagtcgttagagcatggtgtaaaaagtggacaagctcgaaagaaccacttatacaagtcatcccacatcaaagcaaacattgttgcttctaagtgtctgggtgtgcttaccagattgaaagcaattttagaccccataaactacaaatcatgaaaatggtacagtgagcaagggatgacctacccctaaacctaaactacaaagcatgaaaatggaacattgagcaacggatgccttcagattgagggttcactctcggaactcgggccaagggatcattctcataatatcaacagcttaggcatgtaagttaaatcagcttatgtacaatcaaatgtgttagcag

SEQ ID NO: 375910 - DNA, 432 bp, Zea mays
  unsure (1)..(432): unsure at all n locations
ggactataaactattgggtagttttactatagcaggagctaaatgtttgtacaagtnaatcataaagcataatctggtgatttagacgcttgcaagaagcaagagacgtgtgtgctgttttatctatctagattctagatcgagctatcaagcctattttatcttggaaaacaaggaggagtgtgtgggtgtggctagctactaaacaatccattctcattcctcgttctcaaacaagtaagggtacaacaattaacttgttcttcggcgtgcagctgctgctaggatgaggtgcttccgcatctgctcagtctggtagttggacaggaacttcatgcacataggcggctccaccttgaagatggccagcagcgaagacggcagcgcccagagcccatcgccacagatcaaaccagacgccaccacgaccga

SEQ ID NO: 375911 - DNA, 341 bp, Zea mays
caagtaatttagggacagacccatctaaacaaccctctcctatcacgggggcagcactcaacagctctacaatagatctactggggtatatatggcaagcagctctcatggtatatggttaaaaacttccagactcattcacaatctcctgccgctaccagactccatatcatttagagtatctcttagggggatcccaccgtgaccaggaatattgactgtttcgatctcggctggtctcacgctgtaggagtttgtatttctgctgctcccttcctcggctaactggacagtgtatgcgtgaggccacaaagcatcgtcatcaaaaggatatggaaaaa

SEQ ID NO: 375912 - DNA, 416 bp, Zea mays
aaacagggaaagaactgctgatgcctgatctgctatacaacaacaacactactcttttgtaaaagttcccatgaacatgaatttttggtaatattccagcaacatacatgaattcgctagtatatatacttttgctgctgcttcctgcaactgcaatgctcgtgtaatcgtgtaccactaaccaataccgccgtgacagatccaactccaagatcagaaatcgagatgaatggagtcgccgcgtgcttcgtcgtcgtctacgtgagaatgatagatggagtcgtcgtgggcttttgcttcgccgtctacgtgagatagatggagtcgccgtgtgctccagacgacgcgtcctgcgtcgcgagaggagtggcggcggcagcggcagcggcactgcggtgcgaacggatctgcgagct

SEQ ID NO: 375913 - DNA, 338 bp, Zea mays
gggaaatattatcagcacatggtttacaatcaataatacaaattactcgattgcaggagatgtatgattgcataggatacatgcccgtctaactctggttccatagattgttcgttggacatctttcacatgatctgtttacatcctcaccgacaagaaaaaaaaagatgacgtattagttacaggttgaccgagacaaacattaactgaacagtacacgtttgttctactacccaaacaactttggctaccgtatttacacttgtaatttcttcgatctgtcaatcaaatccaaagcctaattcactgctgtaaccattagaagattcaggttttat

SEQ ID NO: 375914 - DNA, 278 bp, Zea mays
aaaagggcacgccctcaaggccttaactttttttttcaaataatgcccccaaatgctgatgacattcccagttttggagacaaatgcccccaatagctgatgacattaccagttttgcaggtaactggccaaactgacaataaaataaacgggcctccattaatttaacattagccgttttggaaataactgtcctaactaacatgccccctaaaaaaacatatatgtctagcttttcctagggggaattaaacaaaaaacctttttcacgcgttttt

SEQ ID NO: 375915 - DNA, 418 bp, Zea mays
tccgcgtcggtggcgctcgtgcccctggccgacgccggcatgtaccaggtgccgccgcactacgggtacgcgccgtaccaccagccggctccaggcggctactacggtgccgccccaccgcccaaccaccacgccggcttctaccccaacggcggcggcgtccattacccgcccgcgccagcctacgcgtacggccccacccacctccacgcgccccagatgttcagcgacgagaaccccaacgcctgctccgtcatgtgaactcgctcgcttcgccggtttgccgccgccgccgcgccttggcacccccttcctccgtgtgagaccaagaaccatgggcttgtcctggattagcggtgtctttagttaaaattatcagtgagtagtagctagcttaagcagtgctccgatccgagat

SEQ ID NO: 375916 - DNA, 247 bp, Zea mays
cacagcacaaaacaatgttttttacacaactttttacacggtctgctggacaaagctcgatgcacaatgtctttatccacttagaaccaagaaactagctttttactcgaattctgggtggggcttccttctcatttcctgggaaaaatatcgggtcaatttacatgcttaatacaatcatacgagcctatttttatatatttgctaagaagatccaggagcagggggggtcctgaaaagctgttgc

SEQ ID NO: 375917 - DNA, 407 bp, Zea mays
ccacacaaattgctcacagagcccacgaaacagttatgtatagacactagactgcagagatgaactcatgtattgttcacgtcatttttcaaatgtaagcaattatcaagttatagtcgaacaacctttaataaaataatgtctggctagtgactgatacggggaaaaacaaagtggcgtatgcccaggaagagctaaatcaaacaagctccggtgagcatttcttctctgaatgttgctgctgctacatgtgcagatgtgcccgtgtgtagcataactgaaggaaatatcatgcacaattcttataaggcgccttaacaacagcaaaatgcaatccagaagcataacaggatcaatcagtagcaacttttttccgtgctgcccttgcgttatcatactcaaatttg

SEQ ID NO: 375918 - DNA, 245 bp, Zea mays
aaatcccccaaaaattttttccccctggggaggggttttaaccaagggggggaaaaaacaggttcgttttaaacctccccctgcccgggaggaggaattgaataaatttattatggggacaagcagtttctatttgggggcctccaaaaatttgggcccgggttgttgtccctgtacccctggggggggcataaaaagggcaccaaaaaaaggcctttattttggggggccaccatttgggggcc

SEQ ID NO: 375919 - DNA, 391 bp, Zea mays
caggaaagtgggaaccacttacaatatttgagaataatttggtagacatggagtacaatttttgactcgttgggctatgtacatctatcgatcaaattgatggtccctgttacattgacatattatatgatcactgttcccatttcccatgccggccaactactaacactccaatgaacaaaaaaaaaaatttaaccatgatggaattattaattacacatgaaccaccaatccatgcatgcctgtgtgtggggtcaaaaacggcgatctgcccttgccggtcgatattctgcatgagcgaatgctgcatgtgccgccgatcctgatcacttttgagtagcagcggttccgccgcgccccatgacggacgtgatcgccgccaccagcaccg

SEQ ID NO: 375920 - DNA, 262 bp, Zea mays
attaaccccttatccattttaattacaaaaatttaccttttacatttcccaccaaaaatgggatgccctgaaataaaaaaaattttatcaagaatcacaagtttgaacaaattgggcactgggcttcactggttggtcctaatcctgctccccgtttcctccggggttcttttctttcttgttgccgggggagtcttggttgacccccacagggaccttcccatgggaaaggcttcattggctacccgggcatggtcccggg

SEQ ID NO: 375921 - DNA, 139 bp, Zea mays
ggaggccgacaaggcgtggtgcgtatgggaacccgcagagccacgttgtggtcgggaggcacgggattcggatccggccgaggccgcacccggaccccgtcgaggtgatgcggacgcacgggatcatggagcgcgtgca

SEQ ID NO: 375922 - DNA, 239 bp, Zea mays
ccccgaacaaaccatttttggttatccatttatttggcactcaagacaaacccgtttaacagagtttaaacccatcacaggagggcacatgtaaggggggttcgagttttcgggatcttcccaagctacaagacccattttactaatcccacagatggggtttttaaagcccaggaattgattcggggttgtatttttccgatgtcgacagtccgttatccaccccggggggggttttt

SEQ ID NO: 375923 - DNA, 155 bp, Zea mays
ccaaaaacgcgcaggaaaactgcccattagattttttaagatagaagaaaccccattggtctaaagaagaccagggtcccgagaaaaaataaaaataaaacccgccaaaactgttcctaaactaaggccagatggggcccaaatttttggcaccc

SEQ ID NO: 375924 - DNA, 156 bp, Zea mays
ccttgtattcagagcctgaatagacaaacacaaatatagttgactacgataacaccttgtagctatactctgaagtcgaactgtagtagtatttgttaagcaagcagcagtcacatgtggataatcttgttgaaacacagcaactctacatacata

SEQ ID NO: 375925 - DNA, 237 bp, Zea mays
catgaaaaaacatttttgacttccctttgaatttttaccagcacaggaacacagaacagaagttacacggggcacataaaacttaaattttaggcccaaaccgggatttttttctttttcttaaaaaatataaaaaattccctgacccttagtccttaccagtcaaaaatggggggtttgataatgcaacatggggccaaatttttacgacaagatttgtattaaaccccaattaac

SEQ ID NO: 375926 - DNA, 377 bp, Zea mays
accctaatattcccatacagtgagaaattcagaaaatattccatcatggctggcaccatcatacaaatatcccccagattttttttaaaaaaaaaatctccaatacagaacagttcctagatgatttatcttctcttgtttcttgcagatcccatattgtaccccctaccacataacatacctaccctaaacactaaatcaaaccacactgaacttccccttttcacccccaaatgcagtacaatccacatctcagtaaagatatagcaaagcccaagccttagcaccacccactggccatcatctgtacaaggcagaagcttccgaacccacggcagcagctgcctgcctagaactggaacctgcttggatgggac

SEQ ID NO: 375927 - DNA, 455 bp, Zea mays
ggcggcaagttcacctgggatggcgccgacgactacggctacggctacgccgacgaggacctcggcctcatctccaagaaaggcaacatcaacagcggacgcgctagccaggtccagggaggcgccgccgctaagaaggacgacgacgagtaggcctcgccgcctcggctcgcccgcccggtcccgtcgatcgccagcaagaaccaacaagcccttctgtctgtttaattccagtatcagttcgattctcatgttgaataatcatgatcatgtgggtttaggtgtcgtgctcacgagtatgtagtgtagctcctgctagcacagagcacagcacagagccactgggcgatcgacgggccgtgcatggcctgtagataccatctcatatgttcaccactgctactttgctcaaaaaaaaaaaaaaaaaaaaaaagggcggccgctcgcgatctaga

SEQ ID NO: 375928 - DNA, 401 bp, Zea mays
atcttcgaggatgaaatttttttgttaccggtattgtaacaattgcttagcacctaaactaataagtgatacaagatgtatatatgtgttgtaataagagagggcctcaggtttaagtcttgctctgggcccccaaaatctcagggccggccctggtaataacttgttgctgacattctaaagattctacctgctgacttttaggccctttcgttgaactttgaaaggaggctgcgctcacgggtgcccgaatctgttgctttagctgcagccaggaagaaatttgctttgtcattgaggcaagttcccttgattcagcgtcatccttctcagccgtaacattttcatcaccaccgtcgttatcaccaccaccagcagcagcatttgtgctcggggtgggg

SEQ ID NO: 375929 - DNA, 409 bp, Zea mays
gttacacacaaaaaataattatattgatcaaagataacggtattgtgatgttacagtgccggcactctgctgtacatacttatcgctccctcaaaccgcaactcatctcaaaaacaaaaaaagaacacagcaggcagagttgatacacaaaaaaatcaagcctcagaatcaaacctgtgtgaccttgaatcaatgaagagcacttgacaaaaaaaggaaaaagggaatagcacacctatgaactggaagaataagagagctacttagctagcaaaacaaatccaaactaggaaaaaggagaccgatccaggacaatgtgaaaattgatgtggcattgcagatggtgattacattggaagtgttgatgatcaggctaaaaaagttgaagagcaatttttagcctgttctg

SEQ ID NO: 375930 - DNA, 450 bp, Zea mays
ggcggcgaggtcaagtgctgccagatcctcgtgtcgcgcggggcggacagggccgccgtcaactgcaacgggtggctcccggtggacgtggccaggacgtgggggtgccactggctggagcacgtcctgtcgcccaagtctctgctgcccatccccaggttcccgccctccgcatacctctcgtcgccgctcgccagcgtcatcaccctcgcgagggattgcggcctggctctgaacatgtcgtcgctgccaatggacaccatggacggcggcgccgacgacggcgacgcatgcgcagtctgcctcgaaagaccctgcaacgtcgctgccgaagtgtgcgggcacgagctgtgcgtcaagtgcgcgctggacctgtgctcggtgatcaggtcctacgacgcgccggggatcgccggcaccatcccgtgcccgctctgccggagcggcatc

SEQ ID NO: 375931 - DNA, 228 bp, Zea mays
aaaaaaagggttaatagagcttttgctttgcaaaccaaaaaaaaacaaagggggggagggaacagcttctaaaatttttttggcgggggacggcaaacggccctgggaattcacatttggaaatgaaaaaaaaaaacttgggtagtcataaggcgccctgaacccaaaaaattgttggcttgacgggctccgggattttgacggacccctccaggattttggacactt

SEQ ID NO: 375932 - DNA, 337 bp, Zea mays
gggcgggggggaactcatccatatgaattagcactgcatgcagtacttttgttcaagttgatgcatagtcctaagccagcagcaaactgatttaaaagcatccacaccctaaattgacacaatctcattttactcatacatatgcttattattacccgccaccgaagttaaaagttcgccggccggcatgcgtacgtttaggggcactggcacacaacaaagatcattgccccaacaaaaaccacagtccacgcgacaaaataaaagcaaaagagggatgcatgccagagagagaaaaaaaatctttgatctcaacaaccacgggggccgaaaactg

SEQ ID NO: 375933 - DNA, 292 bp, Zea mays
gggggaaaaacaattttttttttatccctgcccaaaccaaaatttttttttcttgaagggaattaaacaaaccgctccaagttaaaaatattaaccctccccccccgctggggccctggcccccaaatgcaaaacctgttccacgtactggggggcaaaaacggccccaaatttcaaaaagacccaaactggacgggcgaaagcccacccccttgggttgggtaaaaacccaaaccaactgggcacattaggaacattctaatttggccctgttgttgaaaaaaaaactaaa

SEQ ID NO: 375934 - DNA, 136 bp, Zea mays
atgtaagtgcttcgtcctttacatcgacagtgtcccagaactatttgtactgttaaaaaaaaaaaaaaaaaaaaaaaaaaaaaaaaaaaaaaaaaaaaaaaaaaaaaaaaaggggcggccgttcgcgaattaaaac

SEQ ID NO: 375935 - DNA, 379 bp, Zea mays
agcagcagccacgggacgttagtagaggcgcagagagagagaaagagagaaagagagagaggttgtgctcgctgcctgccgctgagagacggatgaagaagtgcccatcggagctggagctggaggctttcctccgcggccgggaggacgccacggcggcggcggcggcggcggtggccgagcagaagcctacgcacgacatcgctgcgctggcgccgttcggcgccggtggcgtgttcccctccagcgatctgtccgccttcagcttcgctgactcgaacaccctcaatggaactggaaacatccataatcacctttggtcccataaccacaacgtcaggcatcccgcagtctccacgacgatcgagtcgcagtcgtc

SEQ ID NO: 375936 - DNA, 397 bp, Zea mays
ggctgccgtcttctcgtccagtgctagctcgttcccacatccagctccggcctgctgctccatccgctcgtcgcggccttctgtcttggcctcgacggcggtgtcgaagaaccccctcttcgtcccagctgtagctgcgtctaccgcaggcttggaggggttacgtgggaagcacccgagcgagagggtcggggtggtcgtcgtctctcgctgtagtacgcctccatctcttggcacggtagctgtcgttccttcttctacgagagtgagacccggaggcccgagcttgagctccagcttcgcgtcctcctcgcccccgaagccgccgctgttcttcgaccttcccgcgtcttgcgcttccctccccttccgttctttcccgtccgggatgagatct

SEQ ID NO: 375937 - DNA, 91 bp, Zea mays
aactaaaacgaattttgatcaatttatgaatgcatgtcctcacaaaacatagttcaaattaacagagacactcaacttatcaagaattaac

SEQ ID NO: 375938 - DNA, 211 bp, Zea mays
ggaccacactataaagttttccgggtccgaaagggttccccacaatgattgaaacaactttttcacagataagtcctttttggggtcctgcaccacctttttcaaagataaacttttttttaaccagccctgatgtccccgggcgtttggggtttttttttggggggccagggcctgggctgttttttgtttgaaagttgggatcctaggt

SEQ ID NO: 375939 - DNA, 275 bp, Zea mays
gggcttaaattcaggggcaatatattaattaggccctggaacctggatcaaagtttggtacaggtggtttttagaacaaaagaaaatggaagttacagtagccgatgaattgaagaggtaatttcccaagagctaaacgtactaaacaatgctggcagtttgagccacacttttctaacacaaaaaagatatatattctatccattaatgccattaaaaaaaatgcctcccacatgccaatttaatactacaggtattattggacttctaccctt

SEQ ID NO: 375940 - DNA, 208 bp, Zea mays
acaaactagcatgtccatttcttgtactgctggccacaattcccagcacccagcttcgtaatataccagaatttgccgagttttacatgccacgtcaaaatcaaaatggcacgcgtatatatactgtccaccaaatccctgtaccccaacctttcttctgctcgctatatatcttgttccacagattattacgaacccaacctgataa

SEQ ID NO: 375941 - DNA, 165 bp, Zea mays
ggggctaaacggcacaaaccgaacgctgaatcaaacatggggacaccgtgctggacacccgcccgcttccccattttcgggaaagatttgaaaaaaaaagcggccaaaaatccaaagttcaatccccccagggggtttccccggaccctgaaaaaccccttttct

SEQ ID NO: 375942 - DNA, 405 bp, Zea mays
gctgggtgaccaagcttccatcgtcggaggggcaatggagttcgtgaaggagctggagcaataagtccagtgcctcgaggcgcagaagcggaagctgctggttcaccagaccgtggcggtggtagaagcctgcatacgcgacgccaatgcgcgccagcagcagcggcgccagggcctgctgcgcggattcggcggcggcggcggcgacgacgagcaactgcagcatgggcttgacgaccgaagacaccgcgggggaccaacgcgctgccgccgcccccgttcgcgcagttcttcacgtacccgcagtacgtgtggtgccactcggcggcgcgcgaccccgcggaggaggaggacgggcggcggtcatgggtggccgacgcacatgggaccctggtggagacgcac

SEQ ID NO: 375943 - DNA, 508 bp, Zea mays
  unsure (1)..(508): unsure at all n locations
cactcgtcgtttgtatgcatttagcctatttgtttagttgtgtttgaactgacaatgatctatttgggcctgaactggttttctacctataaatttcacagctgatgtgtctgtagaatgaatacacgctgatgggcttgaactgtcactatttgggccatgggctgtatacttatagctgcatgtgtgttttcatttcatgttagtaatgctaatgccttatgtatttctcataattaaacttttcgactggatcatgaagttttcaataaaaagaagggacaactcggtggtatcaatttctacaatcatgaaaaaccacatggaagtagcaaattcttataaattataattgtcacgacaactcggtggtatcaatttctacaatcatganaacatgtatttgaggctgnctcctcttaatttatctcttatggtaaaataatagaaaggtcaagagtatatttttttatcacatgttagatctaacgcagtacgattcatcaga

SEQ ID NO: 375944 - DNA, 370 bp, Zea mays
gcgtactcgttgtcttggtgcatttaccctatctggcggggggtatttgcgctgacacggatctgttcagggcctccaatgttcaccgaccgatatgggcgacaggtgccgtgtgctgtcagtggatgtggtcagggagtgtctcgttcgggttgtcttggacctgctgtcggtggtgcgccgtatctggcgccagtggaagtcggaggtggagtgctacggactaccaccgtttgtgatcggttggtgggttctgagctgcgatcatgagcgttttcaataaaaagaggggtcaactcggtggtatgatgacgaccactcatgaagacccgcgcgcaagcgctagattgttgtcaactattaccggctg

SEQ ID NO: 375945 - DNA, 476 bp, Zea mays
  unsure (1)..(476): unsure at all n locations
caggaaccaccggtgatcagtgctaatccctccgtccacaaaaggatgcaattttcacttttcgaggagttaacgattcaaagtttgaccaaagttatataaaagggtacataatatttttttagtaaacctagttctgagacataaatggtaatactgttcactataaacttggtcaaaccgtcaaagttagtgtgacttccacaaatcccatagttgcatccttttgtggaaggagtatttctacaattatatcttccataataaactganttattccgtgtgcctattccaactcagaagaattttcctgtcacataggggggggttaatctgtcagatagaatcatgctatattttcgacctcgtgcaagttcaagtgtattacttttatggctgcttgataagttatctttttttaaaaaaaatagtttcactttctctgttttaatgaatttactattccctataagaag

SEQ ID NO: 375946 - DNA, 345 bp, Zea mays
aaactaactgcctacggcgtttcgtgagggtttttttacctcgcgtaagggtttctgagtggatcaatagtgattgttctttcgccatccctgtcttctacccactaacatagatcatggattgaggtctgcttgcttgtgcaaatactcgttgaccgatgaagagagaccgctgcgtttagtccctactagtgaattgctgtatcgattttttctctttcaaggttttgcaatagtcatgtaatcagcagttcgctatgaaatcggggttttggcaagaaactcttagttcgagttgaacttttgggccaaggttttttcaaacacaaaaaataatattctctg

SEQ ID NO: 375947 - DNA, 373 bp, Zea mays
gtcgctcgctgccggtcggacgaccccgcggtgagcatgctgctgccgggactcccggtcgccggcctcgccgtggggttctacaacgagaagtgcccgcaggcggaggacctggtgctcgccgagatgcggaccctcgtcgacaaagacgagaccatcggcccggcgctgctgcgcttcatgttccacgactgcctcgtccgggtgcgtacgttgccgcagccggccttctcatcgtctgcctactgcttgatacgagcttcctggatgtctttttttttttgttgttgttgttgcctcgcgcgcgtgcgcagggctgcgacgcgtcgatcatgctcgtctcgcggaacgggactgcggagagggacgcctt

SEQ ID NO: 375948 - DNA, 381 bp, Zea mays
cgtctagccggccagggcctaggccaccgtgagggccgtccgcctccatctccggcccgagcggatgcgccaccgccgccgcccggccgcagttcaccaggcgtagagccccgccctggctcgcgcgcgtggagcctatgtacggccccggctgcaacctactcactcagccagacctggcttctctgcaaactgcagggtctcaggttctgttataacaggcagtaaccgcagtaaccggacacttttgcccttcgaactaaaagcgcctgcatgtcagacccgacggcgctctcttatctatcctatgtgagcactacaccaaaaccgacgacgacgtcgctcttctgcaccggagctcggcgctctacctccaccagc

SEQ ID NO: 375949 - DNA, 336 bp, Zea mays
ggatcgagttcgatcgaaatcgacctaattaatcgaacaggaaaataccgttctcctttctgaaagtttggctttaggcagagaataatttaaaacgagctcgatggaggccgttacttttttggctcatttttcggtcgttcctacagtagctctactaattagcccaatacaaatcatcttgctgaagacggcgaacttttcaccaatcaccagtacgaacagggaggcgaaggcgacgctctaggtcgcttgccgccgccgccgaactccgcatgcatctgtggcacccaccgctcccagctggcccgctcgtctgcgacgtcagtttgcacc

SEQ ID NO: 375950 - DNA, 258 bp, Zea mays
gggcgacaaggaattttactggatgtgtgaaatattctttacaaagtactacggcatcaccctcctagaaaaggagcacaatatatcctatcaaaaaaaaacaggagcacaatatcctatcaaaaaaaaaaaacaggagcacacaataacttctataactttaactaatcaacgaatccatatattatggcgtactctcccaatatgcacagtcaaatctacttgcacgacccaacgaatgcaaaaatccctttgtct

SEQ ID NO: 375951 - DNA, 413 bp, Zea mays
aataaaaaaagttcaaatatttactgagggagagggatatatggtcagtagagtgggtgaatattgagacggaaataataaacagccaaatgagttatgaaaggtattattgtttttctagtgatttaatgcagacggaaataataaacaaccaaatgagttatgaaaggtattattgtttttctagtgatttaatgcatattttgtgtgtctttttatcatgatccatatgacgtttaatctgagtaacatgttacttgcacgattttttctgatgattgatacttatatgactgactattcaccctttaaaatattgcagtttaccaggatacatatttttgtaattgtttgggacatgttagtctttttgtttacctatgttcatccatagggttctgcaaacatctttt

SEQ ID NO: 375952 - DNA, 350 bp, Zea mays
cgtacgcgtgggccggctcttgctctgctcggttcctcctggcagcaaccgaatgtctcccgacgccgacgccgccgccgggggaggaggaggtggagaggcgagcgctcggcgccggtgccggcgcgtagtcgcctcccgcgtccgcttccgcggcggcgaacggccgggcgctggtgcggtgggaccagatcctgccgcgccgcttcctgcgggtgcttctcgtcgagcacgacgactctacgcgccatatcgtcactgctctcctccgcaagtgcggctaccgcgtggacgacgtcgcggacaggatgaaagcgtgtgacgttatgctggagcgtgcctacgacttc

SEQ ID NO: 375953 - DNA, 469 bp, Zea mays
  unsure (1)..(469): unsure at all n locations
gattgctgtatcatacttctttgatcatgaatattatcgtgattcagatcatgcgaaagaactagaaggaattgacatgggaaaatatgtcgcgagcagtatagttgtttttaaccttgacacccggcaagttaaatgggctgcagatcttgatttgagcacggatgctgtaaatttccgtgctcatgtgttttcctctccaactgtggttgatttggatggtgatggatatttggacatccttattgggactgcttatggcttgttttatgttattgatcatcgtggtaaggttaggaacaaattcccccttgagatggctgagattcacgcaccagtcattgctgcggacatcaatgatgatggcaaaatcgagatggttaccactgattcccatggaaatgtagcagcatggactgcagagggagaagaaattgngtagtgcatcttagagtctgattccaagaga

SEQ ID NO: 375954 - DNA, 247 bp, Zea mays
ttttaccacatcgaactgtgcgcgcgctgcgagggcagcagcggcggtcataagcttccgttgcgacagctcccgacctgctgccggtcttgccctcttctagtcggcgcgaatcccgaggcggacgaggaagatgggagctgagtgggggtgggccccattagccatgagtgtcatcggggcccccctggacggcggccttcttgccaaagggcccgggcttcggctctggccagtggtattggtg

SEQ ID NO: 375955 - DNA, 330 bp, Zea mays
gaagcacgcgtaccggatgttcttcgcgccgtccaggggcggcgccgcggcgaggggccccggcgccggcgccgcggaggagttcgacgagtcggacgtctggggctcgttcggcgcggactcccagtactccagccccggggccgagctgggcgccggctgggcgcgcccgatccccggctccggcgccaggcggaagaagcccgtggacggcggcggcggcggcggcgcggcggggtcgctgccgatgaacataccggactggcagaagatcctcggggtggagtaccgggaccaccaccgcgcgggcgagtgggagcctggcgcgga

SEQ ID NO: 375956 - DNA, 480 bp, Zea mays
gttctagatcgcgagcggccgccctttttttttgggggttttttttttttttttttgttttttttgttttgaatattttttctttttttggtggtttaacctttttgaaaaaagggaaattttcttcttttcgaaggaagaaaaaaaccttttttttggggtcaacccttggggcgatggaactgggcgaccttttttttttttttttttccaggggcccttaagatggggcccccatggaggaccacaccccccctcccttttttttggcccaacccgaacgaaaaaaagggaggaaaaaaaaaaggttgaaaccgggacttttttcccttttaagattgccacccaaaggggggaaaaaagaaaagttatttccaaaaaaaaaaagagaagtccttccgaagataacggaatttgtgccctttcacggccctggatgattttttaacccaccggtgccttcacccctttgtggggggg

SEQ ID NO: 375957 - DNA, 278 bp, Zea mays
aagaaatggggtattccccaaaccaaacacactataagtgaaacataaagcatgactgattttgctcgatgccgtttgatttctagtttgcacgaccaggaatctcccacacccaatgtgggaacagatttaaccccaaatgaatactggatatttcttatgctatcggccttttccttaaactttttggccccggacacagttgaaacaccaagaaggtcaacatggggactttcagaattttccgcttaccttggactcaagaacataccaccacc

SEQ ID NO: 375958 - DNA, 270 bp, Zea mays
aggcaaaaccagggtattcttattgcccaaaccaagaattgggtggccaccaaattagttgaccgggtacaaaaaaaaaaaaaccatgctcagtaactttcatacagctggatagaaaaacagtggtggacgggtggaacattagtgtacattgggaaaaatggaaagaatgcccgctcggcatcgcaaaaaaaggttgccgcaatcaataagcaagatctggaagggacaagggtgatgactaacttctagcatgcccatccgcttttt

SEQ ID NO: 375959 - DNA, 477 bp, Zea mays
  unsure (1)..(477): unsure at all n locations
cttcaaagccctgcggcgatttcgattcttccgtgctatctccaggtatacccatgggagcagcactgacaaaaattctccaggaactccaagaattcatctggttagtgcctgagaacaatagtcaatgtttgattcgtctaggattggggttgactttgaggaaaaggaggaaggaactgatgattaaaagcctttcgctgaaacttatctgtttcttttctacctttacagaatcttgaaattctgagagcggtccggttttgaatatccacaaagattcaatgtttattatccggaaatttcaaataaaaagattaggaaatttagctctgcactaactaattaggagtcttagtttatgattgcacaggacctaggtccaattattgtgaaatctacattcaaaaaaatttgattagtagtttccatactcctacctgaatnttatctaacaacttttcatctcactctaca

SEQ ID NO: 375960 - DNA, 492 bp, Zea mays
gtgtggtgtggtggactgggtgggtgtctctggcggtggtcgccgatgctgaccccctcggccggcataccgccgccctccctctccgcagctagcagcccctccacgtcctactctctcctctaccttccccgacgatgccgacgccttcccgtcccccgagcctcctccagctttgcccccaagcgctcggcgccggtccccaccaccaccctcccgcccgaggccccctccacctccgccgctgtcgaggcgccggcgcccttctcggtcacggccccggggacctaccggggaggggaggacccgctcgtctccaagctccgcacccagctcggcgtcatccacccgctcccggcgccccccatcagccgctccgtcgtcggcctcttcgccctcttcttcttcgtcggcgccgccttcgacaagctctggacgctgcggaagcgccgtcgcgccgagcgcgagctcaaggtcaacggctcctggccg

SEQ ID NO: 375961 - DNA, 248 bp, Zea mays
gggggggcaaaaggggatttgatttatataaccttttataaaacattcttgggattctctctctctctctctcatatttacggggggggaatttacatttggtttgccaaatccccccccctattttttttttaaaacgtatacaaaaaattccctgggaaaagagggccttaacttcacttttactttcccccggagaaaaaaatgaacaaaaaaattgggcccaataaaaattggccaaccccccc

SEQ ID NO: 375962 - DNA, 477 bp, Zea mays
ccccgccccgccaccgatccccaccgccgaacaaccgacgggtgctgctgctcctgctcctgccgccacctgctacgtagcatacgcggacggacgtaccaccaaacccccaccgaactagctgccggtccatcgcgctacgccgctacctacgacgatcgggcaagcgaagcgcgcgagttcgacgtcgtcgtcctctggcatcatctctatccgccgtcctgtggtatcgtcagcagcaccggtgtcgtcgtcgtcgatcgtttccggttgtgaggagaggcggcgatgaagaggaccacgagcaggagcggcgcgtcgcccgccgccggcctgtggctccggccgggccggctcggtgaggttctcgccgtcgcgactctgctggcttcggcgttgatgccgtcggcggcggctgcgaccgacgcgccgccgccggcgtcgtcgccgcggcacgactacgaggacgcgctgcgc

SEQ ID NO: 375963 - DNA, 418 bp, Zea mays
ctttcttcttcttcctcttgattgataggtgcgccgaagcttgttttgttgggtggcctttgtttttgtcgacatggacaaaaggtcggattacggccgggcgccaccacctgcaggctatactagctagctattaagtccggccaaccaagcagctcgatcaggtcggtcgacggcggggacagttcggagggaggaggcggccggagaccgaaggacgcctaccatcaactcgcggtcctggccgcgctgccgaaaaattaaaggaagaggacgaaggctgaccgaggacgatcgttatcctcatcatcagtcgtcgatggcaacaccggcagcagcgagcaagatgagcaagaagctgcaggcgggtggtgaccgtaagtagggcagtagtagtaggggcagcggcaacagtgat

SEQ ID NO: 375964 - DNA, 208 bp, Zea mays
ggaaacacgtacaattcttcttgattaattgaaacacaaacattttacaagcgttttgtaccgccgacaacttcaataacgtatttgacttgggattactcacacagtactgctactatttgttttctcttaattcactagccatttcggctaaccagatcatcaaagaaaaacaatggaaattaaatcagcgagcgatgatgcaagc

SEQ ID NO: 375965 - DNA, 282 bp, Zea mays
  unsure (1)..(282): unsure at all n locations
gcggccgttcttttttttttttttttttttncnnccngncgctcatgtactatatatactatgtatttactcaaaaaagaatgagtaaaaattaattagacgggcgacgtacaaacaccttattaacgctaagctacgttattttttctggacttcttttttcgtcttcttctttggcgcgcgcgtatataccctactactagctacttgccgctacggaattaaggcaggagaacagaattagtaagaaacggagtagaactggagtggaggaatagtccc

SEQ ID NO: 375966 - DNA, 264 bp, Zea mays
aacaaatgggggatttttggggggaaaatggttaaaaatacccttagttatgagctcccccccaaatttaaattctttaaaaaacgggccgtctagccctgaatggggatcccaactttaacttgaatttaccctgcagggggtgccaacaacccttcctaaattttattaatatccctttaaaaacgaaccctggatgacgctcccaacttttactagaatttaccccccaaaggttgccaaaagggtttaccgccaattaat

SEQ ID NO: 375967 - DNA, 435 bp, Zea mays
gtagaaagatgcatgtagaaattgtgcgcgagtttctcacacataccatgcaccggccgaattgccatcaccgtgtattcgatatacacaaaaaggtcactacaatttgctctctgtactttaacagaacgacactagcacagcacatagcagacagatctctacaaaggcggcgaaggattcgtgcaagctcagctacaggtatttgattcttgaagcttcaacgttgctgctgctgctgccaaagaattaatggaactacgtactatacgcctcgcggtatgtatgtacatcgctgcagatagaaaccaaaaaaaaaactgggtttcatttcaacgtcaggaaggatccatttcccctgccgttcccactcccagtccctggatctgctcacttgaagaagaacttccatatctccctgtcacacacctcggt

SEQ ID NO: 375968 - DNA, 202 bp, Zea mays
  unsure (1)..(202): unsure at all n locations
aaaaaacgacgacccttcgtcccttttattgatctgggcgaaaaaaaaccttgtcttccattttcaactgctcaaaagaagaaaaaaagtccagtggggatttttgcagcctttgacacggccaagcacaagacccttatgaagcacaacaacactgcacacggttcctgcngaaaagagagagagggagagagagagaaag

SEQ ID NO: 375969 - DNA, 375 bp, Zea mays
ggctcgagcgtttttctgccttcttggacgaggactactgttcatggtctccctgcatacagggctaccactggcgatgcgtctgctccgctgaccccgctgctggtacggcgtccttcaccgtctctcttccctacagcagcacccgcgagcccctcaacgcctcgttcaagctcagcctgctggaccgaggaggcctgccggtgccgtccaggacccgagccaccttgttccagaactgcctgatccagcagatgtggcagtgggagtgtccgggcttcctcaccagggacgacctagagcggcacgagtactacctcgacagcgacggcggccgctgcttccgcgtccgctgcgacatcgccatcaagccct

SEQ ID NO: 375970 - DNA, 184 bp, Zea mays
  unsure (1)..(184): unsure at all n locations
ataacaaggtnnnnnnnnnttttttttttttttttttttttttacttcaaaaagcagctgtaggagcctgtagcttttttcatgggtttaaaagctttacataagccgcaaaaccagaaataatcctttagtgggggaataagcagacacaatacgaccccgcacacgtaccattttttaggac

SEQ ID NO: 375971 - DNA, 446 bp, Zea mays
tcggttcagccggctggccgatggtttcggccgcggcgcaggcgggtgtggtcgcggcgtgcgtcgtgctcttcgtccccatggggctggccggctggcacctcagccgcaacaaagtgcttttcttctccggcgcgctcttcatctcgcttgctgtcggggtccacctatccccgtacctcccctccctgccccacctcgcctcctccttcctcctcccccactccggcgccgcgtccgcgtccgcgtcctcctcctctgggtcttcctgcgtcccgtttctgcaccgtgtgtcgtggtctgacgccgccggcgccgcggacgacggctcgggaggcggaaaggcacgggcgtggtcgtggccgccctcgctggcgtccgcctgcgggttcgcgcggctgtcgcgcgatgacgcgtcgctgctgcttaacggctcgtgggtgatg

SEQ ID NO: 375972 - DNA, 290 bp, Zea mays
ggcactgttagcgtcatgatctgtatatctgatgtgaacaatgtacattggacatcaagactagtatgttatgtaggagtgcaatataatacaatataatataatataatacagggagtagtacatggatgttatgggggtatttatatatgcctattaatctatcaataccatatattcagaatttgtgatctgatgaattttggtagtgttgctcgtcatcaaggtttttgcacacggaggggaggggcttctgatcgtccatcctcgcctgcatcagcttttccttg

SEQ ID NO: 375973 - DNA, 200 bp, Zea mays
ggcagcctgaataacgctatctatttttgagaaagttgagaccagcacatgtctgcacagtctgaaacgactgaagaaacaagctgaaaactgcacagcctccacagaccgaagaaatagtctttacatgcacatgcaagcttcagaccacacacactacaagctaagccttattgactgaaactgaataaactgaataa

SEQ ID NO: 375974 - DNA, 167 bp, Zea mays
gggctaggccattttgaagcccaaacccgcaccaattttcatcacgggcattttcccacagaaggaagtttttaggggcaacgaagggcgtcatcagctatttttttttcgaaaacttaataacagctgaagcgtcagtttgcgccatacaggtggcccttttttaa

SEQ ID NO: 375975 - DNA, 310 bp, Zea mays
gcagccggcactaatttttcatgtattgaatgctcaatcgaatcaggtaatttctctgtattatatctaaacctaaactgttcctagatttgcaagaactgagtgaacaaaccaaaaaaacatcagcctctgggcacactgtattctgtacaacgtagttgcccacaactgaactttacaccgcggcagcacagacagagagttgatgcgtcgacgacggcaatggaggcctcaaaagtcaagacgtcagtgtccttcagggtcctcttgcactgcgatgagcaacgagtacttgaccttgagcgcaacc

SEQ ID NO: 375976 - DNA, 138 bp, Zea mays
atacaccacgactcggaatatatataaatcccaaaaccagaaaagaagcaagaaatataaataacggggcgaaggaatcaatcgtctgaccaaccttttctagctgggcatctggaggctggagctatagctatgcga

SEQ ID NO: 375977 - DNA, 376 bp, Zea mays
aaagaaacaaggttccccattttactgtattaaatatgtacagctgacaattcaggcacaccttgggcatgacatctaggtatttcgtacagtcgtgaaggttaaaggagtgtctatgattttcatggttatcaagacatttcagaaaatgaactcagccttcctattattcgaaactccatatttacctgaaaaaacagtagccatggcatgcgtccgcgcatcatggtcgcaaggaaatcctaacccgagaagtgactgtttcttcattgaggcagtagagagcgtcgatgaggtgcatcctaagagaggcaggccccttggctgactccatcccaatctctcccaccagaccaaagatggcaagagcgcatgc

SEQ ID NO: 375978 - DNA, 164 bp, Zea mays
gggaacaaaaacatacatcaacttatttatatatatcctttcattccccccccacgaaaaaaacaaaggtcgatacccgaaatttgatctaccctgtctacaacacgatttccttgggttattacaccaaatgggactaaaaggcccccaacgaaaaggggccc

SEQ ID NO: 375979 - DNA, 444 bp, Zea mays
  unsure (1)..(444): unsure at all n locations
aaccaaaaaatattctcatgcaatgtcaccacattatgtacgggaaaaactacaatgattcaagtcacatgtgatctgacagaaacacaaaaaaaaagagaaacaaacatgatccatgtcctaatcatacatcagtcggcaaaatggaaagagcccaaacgctgctattcttccttcttggtagcaaccttgttgccagacttcagcggcgttgagaagagcagagtgtacttgtggtgcttcatcaccatgagcataacaaanggtgttcgcagccagaaacatgaggcctgcaacccagagctgcacaaaaacgtttcggccctcgaattccagcaggtaagcccacatgagccaatgcagttgggaccccatccacactaccgcgcaggccagacccttccacttaagtttcatgctgctccaagggagaatgaggggcaa

SEQ ID NO: 375980 - DNA, 397 bp, Zea mays
agccgccgcgggatcttagccggctcgccgcatcgcggcgagcattgccgaggcgaaggcgcggacggacttgacggcgtggcgcagcgcggtgtggaagtgggtggcgttgaggccggagaggtggaggccgtcgagggccgccagggtgcggcccgggcgggcgcgctcctctaggccccgctcggcgcggagctcgtcggccagcgcggcgcgtgcgcgctcggcctcggcgtcccgcgcacggagctcggcctccagcttgcgcgacgtgatctcgtaggtccggagcaggtggcgctgctcgtcggcgtgcgccgcgagggcgccggcgctccgtgccgcggcggccgggtccctcgagtaccgccgcttgagatttgacagcttggtgagc

SEQ ID NO: 375981 - DNA, 298 bp, Zea mays
gggggggggggaaaaaaaaacttggttggggttaaaccccccccctttaaaacaacgtggggttccccacctttcggtgttttccccccttttcagggcttgcccttttgccccaaattacaggtttttcaagccttgtggtttgaataacccacttttcagccccttaaagttttacaaccgaaacgttccgttccaatttttgggcgggggaaaaggaaaaaagaaaccccaaagaaccctttcccttgcccaataaagctcaactgtttaaatttttggttttaccagcttttgg

SEQ ID NO: 375982 - DNA, 381 bp, Zea mays
ggaacagaaattgcttacattgatattccttaaggccataacatcagacatatatcatatctacagaaagctcaagatcaaaagagtacaaaattattggggggacactgaatttacatttgtatttcgggtaatctcaaatataccatcagcgtcttcggattccgctgctatttttgatgctgatgatgacatgaaacggaaccctgcgtcacttgcactcttcctcactgaggcgagctgctgtgacttcttgcagtatgctattgcgccttgaattggattgtccatctctgaacttgcactgctactcctcctcagcactggtccaacaccgccagagccatttgagcttgggattgagaaggatgatgagtttga

SEQ ID NO: 375983 - DNA, 288 bp, Zea mays
  unsure (1)..(288): unsure at all n locations
gaggncaaagacatattgcccatgtccaacaggggacacatttcacatgttcaacaaaaaacaaattgcacatgttttacataagaaacatggctaacagaacattgtccccctttatgggacattacagaacgttgtttaatgggtaacataagtaacacttcttgcttttgggtcccctttgggttttttttttttacactggacttgatggggcaggcaatgacagaggatcattttttaccaccaccacctttttttttttttgtctcacccttttaggctttg

SEQ ID NO: 375984 - DNA, 225 bp, Zea mays
aaggagcaaaacaaattttattccgataatattggttgctatacagacctctgcagacaaaaataaagaaaaaagggcttttattacagaaccaaagacgtgttacacccaggctcgcccttagctatacacatacttttcttataagcttttatagccagtaaacgtcacacttatatgttgtattgacgtatctactattgcatcagcagaagattattcaca

SEQ ID NO: 375985 - DNA, 381 bp, Zea mays
atatataatcatgagtctgagtcccaagagtcacactataatgcaattagtctacaggtagcacacgtgtgatagacaaaagggctagatgcgacatgcatgtatgtttacaactctcaacattattctatacttccaagaaataataggcatgaggtgtctaaaagaacacattcacgagttgccttttaagctttcacggaaaacagagatgtttggttagagggaggtggtccatcgatcacaataagctcatttttctaaattttgataggatgactacgtacatgatgcatgcttattaatcatgtagtgcccttatcaaacatgagctaagtgaccaccgtacccttccactcttgaaccaagcaaaaaattgag

SEQ ID NO: 375986 - DNA, 212 bp, Zea mays
gggcccaaacttacaaattttcattatatcaatgctttctgcaacgagcacaaaacaaaatattcctttgagagtttgtatcagtttaaatgggacaacaaattgcccaaggggggatttttactattggcaaccaaaaaattttgcaaaacagtacctggccagggcgaagcttttttccgggacttgtatttgacaggccgtcctttttt

SEQ ID NO: 375987 - DNA, 268 bp, Zea mays
atggggacgtgggtgatctcattcatacttttactaggccaaacaacgttgcaacttgtagcaccctaaaaagtagaaaccaagcgggcgcatatggttgcattcaatgcagtaatggccacacgacacgaccgacaaggccgtcctacattacgaattagcttagctagatctacaaggcagtgcatacggtatatgcaatgcatgcacacgagcacgggtggtggagctagatgcctgcttctcctcctcctcccctgataatgga

SEQ ID NO: 375988 - DNA, 367 bp, Zea mays
acagaaaattacgtttccgttacaacaatggatggcatcttgtacagtggtttttttatagagaaaattttactagacaaaaaatgttctttttttttgctaaattacattggtttttctcatcagtgtacaagagctagctagcttaagctacgcagcaaagcgcggcatggagccgttggtggacggcgagctccggtcgctgacccacacctcctgcaccgacacgggcgaagccgccttctttgccgccgtgtccgggccgcccaagctcacgtcgatctggatgtccatcatactcacaggccggagcctagaccccgcgggctcctcgggatcggcgccgtccggggcggcggaccggatc

SEQ ID NO: 375989 - DNA, 347 bp, Zea mays
aggggcaaacagtaggcaatgacagattgatagagctatgcatcacgctgtttgaagacagttttctcagagataccgcagttttgtcaaacgccatgcatggcgctacagcaaaaggctgtaaaccacaaattgatcaacgtttcaaactccaatggttggttctctttttgaaaaacaatggaatacaagctccaaacagcatcggaaccaaagaatggttcgatccaaaggaagactggtgcgagctctcggctgatcggcctgtacgtacgtttacgccgaggccccgtcgcccccgaacgagccctccaggaagctgtctccgtctccgtctcccttgagat

SEQ ID NO: 375990 - DNA, 325 bp, Zea mays
ttcgcgaacggccgcctttttttttttttttttttttttttttttgttgtttttttggggtttttttttttgttactactaaaaaacacttttttaattgtttttgatagcgagatgatgagatgagatcggaacatgaacaaaaatcggtaatgcgacatgcatggacgacgcccacatgggggggacgggttcagtttagccacaaccacgtgccccccttacacggaacgtacgggctggggttgtttttggtttattattattaattattacacacagggaaagggaagtaatggatcggggcctggtcagtcaactcaag

SEQ ID NO: 375991 - DNA, 268 bp, Zea mays
gcagataccagctcaatgctacatgttaagaacctccacacctgctgctcgacagcatggactaacatgcttacagcttgtcagacaaaccaattagtataattctcaatacctcaatatgattggcgcatgaagactaacagacctgctaaagttgcgaggctcaaacacaaaccaatggagaggaggacattatacatctagatcactttggccacattaatctcttacaacaaaaccatgagcattaatttcatcaacgtgcaag

SEQ ID NO: 375992 - DNA, 253 bp, Zea mays
aaaggggaaaagatatattacaaggtacgcacaaatttacataagtttttatacaattatattacaacaatttttctagaatcttttgcagaaaagtcctttggagcatctgttaagcttcagcttgtcattcttcagtttcatcatctggcttaaggtggctccgagcttcgtcaccagctatttttcgcccgccgtttacccaaatctgggtcataaacctgtttcctatgcttcgggctaggcttgggat

SEQ ID NO: 375993 - DNA, 230 bp, Zea mays
gaaataactgtgattgattaccaaaaatatattcagattccacagcacgccgcggattaacattacttttacttacttaacaccagtcccaaaatataggaaaaaaagtttcaaagtaaaggaatacaacataagatattggaataattacatgatccaatttaatcaaccaatgactctcttcacccggacgcgtggggactagttctagatcgcgagcggccgctcgc

SEQ ID NO: 375994 - DNA, 267 bp, Zea mays
ggttggttattgtgttatttttggttttttgtttgtatttatgtgtaccaaaactcacaggaaaaattcatttcttatatcggctggcacatttgcttaaaaaaacttacggggcactacccccccctttttggagggggggctttactaccctttggtccacaccgtcatgggccaacaacattgccccttttttgcagggggtgctggacttttttccaaccaattctgaaaaagaaaaaaaaccccgggcccttacactttttt

SEQ ID NO: 375995 - DNA, 197 bp, Zea mays
gtccgcggcctggatttcttcctgacccgcgtcccgcacgaggactacgtcttccccgggtggcagataatggagtgccgcggcggttgccttctcctcctcaactggagaaccaagcagctcgccgcctacaaccccctcacgggggccttggatctcgttctcaaactgcctgacgacatctgcaaagggcaccg

SEQ ID NO: 375996 - DNA, 448 bp, Zea mays
  unsure (1)..(448): unsure at all n locations
agaagaaaatgggataatgaggccatcaatccattgctccatcgtcaaaagtgtcaatgacatttcataccaatcacaaatcaaggttatcacgatggtcttactctgcaagaataaggtagccttggaaccttaggaagaatgatgcacccatgacccatccgttgttgttttttttatatataatccattgctaatgttctgttctgtgattctgtcctcttccttttcccttttgggtttcctctcttcatctattcccacacatgaggaatgaaacaatactgtattatacattgaagccagctaagaatggaactggagaaatcagttctgaagggaagacacccactgctccacagaagtcctgttatcagaaacgccgccgtgggcggngacaccaccaggaccagggaacctaccatcaggtcgggcaggtcggtcaacg

SEQ ID NO: 375997 - DNA, 334 bp, Zea mays
gagattaatcttaatgtacttgtagcagacaaaacatggtatatgaaggtgacagcttatggagggagcttcacgagcaagcgaatctaaatccaggcctggaacacaacggaataatccgtccaccagaaaaacacaaaaaaataaaagtgaaagctacgaagaagaatggggacaaggaaaaaaaaagagtagcctagacaagcatgggtcctagtacaatcttgtttttatctaacagatgaagacctcacttgggcaagcctacgagtagctcgctcttattacctatgctgctgcttctgacaggatatttttcttaaaacactatttg

SEQ ID NO: 375998 - DNA, 334 bp, Zea mays
caaaccaaaacggaggaaaaccccgttttattttattaaaaaggggggtaaaagggcttgaaaagcccaaatacaaagggttcccacgggggccaaaaacccaaaaaactgaaacaattctttagacccccccccaaccccttaaaagatgatttttttggggggggggggccccaaggtaagaaagcccttttgcccctgccacttccaaaaaaaatttttcctcccctgctaacctaagagaaaaggccaaacttggggtccatccatcgaatacccatttgttttgaaccttccaaattgtccaagctcccaaggaaattaaagggggggg

SEQ ID NO: 375999 - DNA, 221 bp, Zea mays
ggcgggccacggaactattcatcagactagcttaactgatagcaagcggggttaacactagatggagatatacaccaggtactaattgatataaaatgctccactacacacatacacatacgacattctgctcgattacaatttccgtatattcggatgtgacaactgcatatacacagtgacttggatttatcaagacccctagatgaatattgataata

SEQ ID NO: 376000 - DNA, 363 bp, Zea mays
attatgcatcaaaacaaaaaataactagatatactggcatttaatttaacaaattgcccagccttctctgctattagttcttcatcgattcttccatgatccctgggaggagggagctacaataaacaaggatcaatattcatgcagcatgcagcaccataaacatatgatggttgacggcctcattcgtcattttgggcgcaaatggtctcatctttccatagtcgtttgcttaggctgtgctactacttaccttgcatgcaatgcaagagcctctgcccaagagtggagcataataatgctcgtttcggatttcgattcgcctacttcatttctgggtccaatgagcccatgccaatgccc

SEQ ID NO: 376001 - DNA, 336 bp, Zea mays
ggaacaacaactcacatccagcatttttatttagtcagataacatatataatcgtagccaaaaacatgttgcatacagccaaatactagcaaggagactatcctctatttacaggggggttaacctcaagatacaatttcccttgggaaaatgaggttcccaaactagctctaaaaaacattatgtccaccttaaagtccatagatgtttgttatagcacagggaaatagatagatacttaccagccatgcccaccctaagtattgctgggcccagatcgacatttagcatggacaataggtcccaaccgtgacctttccagaccatcaatattac

SEQ ID NO: 376002 - DNA, 387 bp, Zea mays
agcacaggatctcgtgttgtttatagagttggaagtttggtgatttcctgagaatattactgtcggccaggccacctgttaacaccaaccattctgaagaaaaaggatcatcaggatttttttcttaagagcaaccagaagccccaaagtgacaactgctgaaactggtcgagagcaaacaggaaaaggaaaccacccaagcctgcagaatagttggtgtttctggcacgccgacttactaccctctgctatgtattcatacgccacacgttccctcacagttttgcaagcaaatctaccaaaaaaaattcaagatgctagtgctaatgctaatacgagatattacagagaatagcccctggtttctgacaggcgacaggacaaaca

SEQ ID NO: 376003 - DNA, 389 bp, Zea mays
ggaccaaaactaaatattcttctttggcagtctagcatttaaatataaatgcaaaattattgcagtaaataacaacaaacaaaaacaggtccaaagatgatgttttttgcaagctcaccagagctgaaaagctcaaaaagaaaggttctatccaaaagttaattagcagacatatggatttgagtatcctagagaaactatgcttcttggctcgcctttgactgcatttcctccccttccaactccttaactgcagttatgaggctgcgacttataccccttaggcataaaccactatcctccatttcctccaggagtttctcagctcttctccagtccatagccttgagacacaatgactgaatcagtttgtcatactcatccacatt

SEQ ID NO: 376004 - DNA, 447 bp, Zea mays
gttcttcgcgctcccgcatcgggagaaggacagggccgccggctgcccgttcggatacgccagcaagcggattggcgccaacggcgatctcggctgggtcgagtacctcctgcttgccgtcaccgccgccggcgcagcggccgcgccggggtctgcgtgcgagggcgcggagccgtcctgtttccggtgagtccgtcacccggcccgttactttacttggtagtagaatcaaattctgcgctggccactatttcttttactgggtattacttacccaaacccgtacccgcgaagaaaaaatacgcccgctaaaaaacccatacccgtgacgggtataaaattttgcccaaacccatacccatgcgggtttcgggtacccaacgggtttcccatacccactaacatcaacataaaaaataattcatcatgtaaatgacaatcaataca

SEQ ID NO: 376005 - DNA, 438 bp, Zea mays
gtaaacgaacctccatgaaactggaggtctgtacatttgaggagcgtcggagccggagaaggagcaacagtacactacacgaacacacacggcagccagcagaccagaggcgcgcgagcagcagtgcacaagggcctgccacccccctgtggctttgacccgtgaccaccacgcgcggccgcccgtcttgcggctttgccttgccttttatacccatcccttcatatttacatgacagctgacaactagcaacgaacgacaagagtatgacacagcccgccgaggggttgacaagggatgaggctctcagcttccttgtgcctttggtggccaccccccgcccccgggagctgctggatggtggcgtggccgggccggaaccagatgcgccgcgccggtggagccccgggggtcctctttctctttttagcacgtacg

SEQ ID NO: 376006 - DNA, 405 bp, Zea mays
gaaatgcagggcggaggttgtgcccaggacgacttcttcgaccagatgctgtccacgctgccggccgcgtggtccgaccttggctccggcaagtcgccctgggagctccccgcggcggcgggggccgtgaccgaggacaccgccgcgctcgacgagcctgcgctcctcgcgtcgcgcctccgccaccaccagatcggcggcggggagaagcccctcatgctccacctcagcgacctgcacggcctcggcgccggcgccggcgacgacgcggggttcatgccgctaccgctgttcacccagcacctcgccagggacgacgtggatgccgccttcaagtcccccaatgccgccggaggcgaccgggagctgtacaacgggttcggagccgctgggaatatgcacacc

SEQ ID NO: 376007 - DNA, 368 bp, Zea mays
ttttttttttttttttttttttttttttttttttttttttttttttttttggacccatcaaaatctcattataacgctacacagtaaaacataagaggggttttttttgtttttatctacgggacaagctatatgaaaaagaaaccatttccccagggtccatcatacactggacagttgttacctcataccgaactataggcttcctgtcttttctggaggaagctttagcttttccaggccttttttgtttgtcgagctggcaaaaacttgtttctatgtgtctgcaatctccaagaataaacaggagaaaaataaaccatgtagcatcttctgtcctcaaaataacttatcaccaaaccatttgt

SEQ ID NO: 376008 - DNA, 178 bp, Zea mays
atatgcttccaaaagttttatcttggggggaccctggctttgcttaacaatccttgggaggctgtaaaattattttcccaaagccttttttataagccttttttgcaagggaaatgcaagctacacgggcagccttgggctgtttgcttacgggcaaaaacccagacggggacataac

SEQ ID NO: 376009 - DNA, 257 bp, Zea mays
ggcaggggaaccacaagctcagttgttgggaacctgtagcacgtacacaatacgaatacatggccgttactagagcagcagttacaggattgttttacagtacaggcccagtttacaaccaccaggtgggcttgaaacaaaagctttgcctttttttttaataagggggggcgctcttttggaccaccctttgactttggccttatttttaaaaataaacccttttttctttccctttctttttttttagggcttat

SEQ ID NO: 376010 - DNA, 364 bp, Zea mays
accattgatttaatggaatgaactgaacctgtccagcgatcttattacaaacaatcgagtcggctaccactgaccaatcgccaatgcaccttggtaaattattgcgcgctaccactaaccgaggggtcaggcttgtgagaagccagcaagaagtccagcatgaccttgttgaagcgagccggatcctccagctgaggagcgtggcctgttttcggtatcacctccagcctagcggtcccgttcagagccctttgaaccgaaaacgccttttccaccgggaacagctggtcggggtctccccatacaatcagcacttcctgagatattggcgtcacttggaacttctctgtcccgaccgtaatcc

SEQ ID NO: 376011 - DNA, 364 bp, Zea mays
ggatagaaatgtgtctgaactaccctcccaaggacatatattgacagtactttattgaggtctgtacacttttccaggccgtgtaaactcaggaactaatatatatatatgtacgtcaaagacgtggacttcgcctgcgacaagccatgaaccaccatccaagatccaacacagaatccaccaccccaccaaacttgtataggccagccgacggtcgctccatccaccatcgagcttactggtccaggctactgctagggcttgtgcaggatgcccctggcgtacacggcggcctccacgatggcggtgatctcgtcggcgacgtccgtgacgttgcaccggttcccctcgaacgtgtccgcca

SEQ ID NO: 376012 - DNA, 235 bp, Zea mays
ccttcaaattgtagatgtggtatctgacaagcaaattaacataaagaacgcgaaccatgcacacagcatggatgtgattacaaatttacaattgcatgctcttgggcgattttcatcgcgttagacacccgaagcctttgcataccctcatccacacggcgaacagcacgaggtacagtaccacatccacgacgatcacgaccgacgcgtggcgccaccacggacgcaaccccgg

SEQ ID NO: 376013 - DNA, 310 bp, Zea mays
catacaaataaatataaagaaatgtaacggtataatacaaaaagaagcaacgaaagccaaaccgaaccttgggattcgcaaagctggggtgggcgagcctaaacggcccaaaaaaaagaaagaaaagagctaaggaaaggaacgcatttccctggggggggtgggcaagcgaatcggggggggggggggagcatttcctggggggactcggcgccgtcgaccccccacagcggggaaagaaagcagaactcccaccccacccacaaaggctaatcggcggggggatggggggggccggaccctgcccagc

SEQ ID NO: 376014 - DNA, 331 bp, Zea mays
aaagggaacagagcagttttgcaataattttcaccaactgggggaatcagcgagataaaagcgggaaaaagggaaaaaagaaggatgaaaaagatttttgccgagcagggcatggcatagggggctcgccgatggtaaaacaaccacgggctcactcacaggcacagcctgcctgcctgccgacgctttcactacaaaaatttaaccaccatccgacacgctggagggggcaaccgaccacactcctccagattttgagcccccctccttttccaccttcggctcgatggccttgaaaaggcccacaatctgcttcatggggggccttttg

SEQ ID NO: 376015 - DNA, 407 bp, Zea mays
ggagcaatagcggtaagattctggtatcgtcttcaacagaaaacttgtctgattatcagggttatacttgcataagcagctggcacgcggtcgtcacaattgacacgtaaggttttcttctgtcaaacaaacacttctgggagcagctgtctaacctagcctgaacctgtcgacttattatcgtctaggacacgatcagacatggcaaggcgtgaactgatgagtcagtacaggatgaacctgacacgcgcgctcttgctcccccactctccccgttggtagccacccttcaagcgagctctaccacctagagtgccgtttctgccgtatgaagtagaagtcaaaatcaacatccatgatcaaccatttatcctttggtcaaaagccccatatcgaacaccataata

SEQ ID NO: 376016 - DNA, 274 bp, Zea mays
cagaagctgaaccaccaggctaaggctttcagccattgtgggaccacaatgtaggcacatgaatattgcaaaaagaagctatggaacaaagctgaggaaatacattgtatttatcacaccatatgcaggatatgagcagctattttgagtagcctatatgaatggaggatggaactgaagttacttttgcactgatgggcctaataaggaatgcatctaggcactacagatagcatttgttttcaaaggttagctaaagtatgcataataaatt

SEQ ID NO: 376017 - DNA, 314 bp, Zea mays
ttttttttttttttttttttttttttttttttttttttttttttttttttttttttttttttttttttttttttttttttttgggcaaggggcaaactataattcccggccaaagggaaattcccaattccgacagggggggtaaggatgtatcattcttgaaaagcaaagggcatgtttgaaaattttattgaacctgggaaaaaaacttaaaagttgcccccaccggggggcccaattcataaactggattcagggttccctttgaaagccaaaagctgacaaaatctgggggccccccaacagaagccact

SEQ ID NO: 376018 - DNA, 309 bp, Zea mays
ggggctataaaaaaaaggggaccatttgttcacttttaaactcatacgttccttgtgttatagataaaatttaatatttggtcttatgggttaaaaatcttatatggggatcatatgttcattttaatattaaatttatttttatatataaatatcaaatttgggctacgtcggggggcacggatttgcactagttctttgttaatttcgggatcctcaaattcatgagagctggccagttgctgacgatgtccattgatccaacatggccaggcactttttcggcctgtactccggagctgggggccc

SEQ ID NO: 376019 - DNA, 379 bp, Zea mays
ggcgaaattcaatactggacgaatataaattcaatcctttgttttacatgtgtgatgcgtcagccaatcagaacatttttctactctacagtgagtcacaatatctatcctctaaagtgacacacttatcctcagtatatatagttatatacaccgaatactgctgaaataaccatttttttaaggacgagaaacatttgaatgaagtgacctaaatacagtgcattcagaatcttgggccgatgctgatcagcgctcccggcttttcacaggagaggcggaggcactgtgagagcctgccaagcccagcgacgggtgcaggaacaacgaccgatgcccactggaaccctgctccgctgctgcggtcgtcgacgatgac

SEQ ID NO: 376020 - DNA, 259 bp, Zea mays
ggcaaaaacttatgcgcattcaatagatcaaacttgaaagagtcgggctggctgaaacgaataccaaaccgagcattggcatgatccacaaacagcaccctacagtaatcagtagagctaatgaatcgaaaccaccaccagcgttccggggctacctcatgggaccaagaacagaaaacatctttgaccaaagaatgatcaggaataatgaactgactgactgcatagcttcactggacacagagctgtcaaaccaacc

SEQ ID NO: 376021 - DNA, 109 bp, Zea mays
  unsure (1)..(109): unsure at all n locations
gaanggtaattaattacggactgggcaatggcaacatttttaatttgcatgtgatccaagggccagccaacacaggcacaggcaaccaaaccaagcttaaccagattga

SEQ ID NO: 376022 - DNA, 344 bp, Zea mays
gatgggaactgacaggacagttgcaggatcacttgatacttcacgctccaaccaaatcgtacaccgtcgttgcaagggcaagcgctagcccgacttcggcaagcacggagctaggctttctgccccccagaaagcacaagaaaaacgcaacagaatgtgttctcaaaaccctaccagcaagtcgatatctcgtgaccaaactgctaagcgaaataggcattcaaacaccaaacagtacgggaggtctcccaggtacacggcaacttcggttacataattctcacgaggaactggactggcgcaatcggcacagcctcatgggggccggcacacacccagtaggc

SEQ ID NO: 376023 - DNA, 406 bp, Zea mays
gcagcaatcagctttatttattccaggaacagtagcagagattgcagagcaaccatgtttttagcagaccaaacgtcctgccatagggtaataactaacgacacatgtccaaaatacaatgaaaggtgttttggtggacgaccatcaatacaaagaccgtaaaacaagtgcaagcctgaactgaagcgtcctcctccaaattgatctttttatttctgctggcggggcagtgtttagcttgtttgccacacctcgtactggtggcaaatcctcaacggcgtgtcgttagacactggtctttcctctgaccagagctccatcttcacattagcagttccccagtgcacaaaacatttgctaacctcccggggattaaaccgattcaccaagctcagcccgacacact

SEQ ID NO: 376024 - DNA, 415 bp, Zea mays
gaaaaacaaagaagaaaccttttttaatagagaacagcttcaaaacattccatggctccggtaccacatggtcgacagaacagaaccaagcttaaccagctgacaagcatttctgagctgatttgattgcgtgtcacattttcactgcatgaacttcagttaaacatctcgactttacacaacccagcaggtgggtcatcatctcagggcacctggatggatggatgcattggcgatatatgtcttccataccttatatatatagtatcatgtaaatatataagagttattggtcactcctaacagctacctagtttccaaaatcatctcagcagacaccagcaacttaaggacggtcagctagcttctactacttatgtacagcaggctttcgtatattgctaccgatctccat

SEQ ID NO: 376025 - DNA, 366 bp, Zea mays
accctcctcctcccgcttgccgcggccactgtcctcgtcgcctccaccaggttcctcttcgccgccgtcggcgcgcgctggcggccggccgacaccggcctccccgtcccgcccgacgccttccccacggccgtgaccattgctttacccaacgccaccacaggcaaagagctctcatttcttgacgagaacggccgcccggacgactcctcctccgcctcagcatccggcgccaccgccgtcagatgcgatccccgcgccgccgccgtcagggtcttcatgtacgacatgccgcccgagttccacttcggcctcctcggctggtccccgccgtcccctgcctccgtctggccagacgtcacggac

SEQ ID NO: 376026 - DNA, 372 bp, Zea mays
atagagttctaattaggccactaaagtaaagcttccatttttctgatggatgatgtacaacaccacacccacgtgataaacgaccgcatcgtcgtctcggctgccactggcaggggcagtaacacacacacaccaacaccactggcaaaagctcctccttttcagttttcccaccccggccaagctcttcttttaccagcaggtgattcccgactaaccgtcgtcgtcgtattttcggttacgtgaccctgatggtgcccagaaagggcgtactcggcggtgagcccgtctggacctggagctcgctctgccggccggtcgagatcttcagctacaggtccggtgcctggccactactactagcctttgccg

SEQ ID NO: 376027 - DNA, 344 bp, Zea mays
ggaatgaatggttagcaggtctttcttttcaacaatcataatatgaggtgtctggtcctccaaaagctttcggccacaacctgaatgacaagcactcccctgcctctgcctgctacacaggatcactcaatcattgaggggcgatagtgtcttgatggattgaggtcatggtacaatgcaaaggatagggtctcgggactaatccatttttcttacaatcctaaattttgtacccctaactaataaacatcaaggacaatgcaaggaatcatgtgagctccagcagcttgctgagctggatatggtggccgtaacccgccttggcgatggacctcgccgctttc

SEQ ID NO: 376028 - DNA, 206 bp, Zea mays
aaaaaaatagagaagtttggttagattactggatttgcaacaaattcaatctatagagttctttttaaaacacgcaaccaggtgggtgctttcaatcacacaaacgaagacgttaacttccaccgatcgtatagctgctcgatcgatagatatattttaaccaagctgcatgcacgcgacaggcaacaacagtccggtcacgtaca

SEQ ID NO: 376029 - DNA, 335 bp, Zea mays
gcggcctttttttttttttttttttttttttcgcacataaattatcttagtatggtatatgttcccgggggaacggacggacactcacctagtgacacgtaaagaaaggatagaagatgtccctggagacatttttgtgcactcatgagatcagaagttcaacaattgaaacggtctgattcgcttacaaaagaaagcagctgtgacaggccgggttccagttacaaattgcaatggaaataaaaaggtgatttaaaacgaggatggcacattcctagcctctagtgcctattccactggaaatggctaccaagcaaaaaagattggcctaaaac

SEQ ID NO: 376030 - DNA, 259 bp, Zea mays
  unsure (1)..(259): unsure at all n locations
atanctngagggattccctcgacacattttacgtgtttataatggtccaaagaatagtttgtgcccacacattcgcctgcttttgggaaattcaacaggcaaaactagcacattggcttcagaaggcattttccagtgtaggtatcgctgatctgtgctctcaccactgaatgggctctgcacatgggacagggtacagactatcccttcatgtctatgcccatctaaggtgctcagtcaggcctcagcgtggttagat

SEQ ID NO: 376031 - DNA, 119 bp, Zea mays
gagcctaaaaacttgggacttttcatcaggggtactaaatacaagggggtattaatagaaccccaccattttgatttcatttataataaccaaacagttttttacaaattttacggggg

SEQ ID NO: 376032 - DNA, 205 bp, Zea mays
aaaagattgaccagggttctgcgaagcatcttattcttgctgaattggagcataaaaacaaaatgatagcccaggatctcgggttgtttatagagtaagcagtttggggatttcctgagaatattactggcggccacggccacctgttaacaccaaccattttgaagaaaagggatcatcagggtttttttttttaagagcaacc

SEQ ID NO: 376033 - DNA, 248 bp, Zea mays
  unsure (1)..(248): unsure at all n locations
gccgccgaccccgatttttacctcctcctcctcttcgtcctcctcgccggccccccgtctcacccttcgcctcggcctgccgggctccgagtcccccgaccgcgaccgggactgctgcgaggaccatacccnccactctctacctcggcccgctgccggcggccgccgccgtctccgccaagcgcgccttcccggaccccgcccagcgccccggcgctttcaaggctagcgacgccaagcagcaggct

SEQ ID NO: 376034 - DNA, 179 bp, Zea mays
ccccagcaatggcgggggtcaaccgataaaacactttctgtaagtggcctaatggccgtatgatttttaaagaagacgtatcagaattaaccgtggttgggggtcccaggacaaattctagctccaaccaaacccatttataagttaaaaaaaccctggggggctataggactaggagg

SEQ ID NO: 376035 - DNA, 179 bp, Zea mays
atctcaggggggtttttttcttttttggagcacagaatggttctatacattaaatctgctcaaaccagggtttagtttaaaagtacaccaaacttggcattattaaaaaggctttgttcaactagcaaaaaaaaaaaaaacaatgggacaaaatacccaaccatttttagggccaagac

SEQ ID NO: 376036 - DNA, 295 bp, Zea mays
cacaactacactgatatcaccacctaagcgggatcccattacattacattcgagcaaactgcaaattcgtgcgggggcccaaacgcaatgcaacaaacaaagcgtcatttttttcaccttttttttgcgtgtgtgtgtgtgttttcttggactctgctactgctgagctggaaactaaagtgtgaggcgattagcgtgtgacagtcctgttgctatgtacaatcatggagaatgtccaatgattggagcctaacccttgccgttgtcatgtggcgatcggagaaactgaactgtc

SEQ ID NO: 376037 - DNA, 237 bp, Zea mays
ggtggtacaacggaacccaccaccggttgcttacaagatctatcctataccgctgaaaactttgtgttccatttcctcttcatcttttcctgcccctatatttctccccctcagtttcaggggttcagtcctcagatcagattttgtacatcatacccacctccaacgtggaggccttcgggatagaaaccgcgtttttgggaccccggctggtcctccccgggaagtcacaacaaa

SEQ ID NO: 376038 - DNA, 265 bp, Zea mays
gagttagaggaagtacactttccatgtaacaatgatgtccggaatgcaccatataattgagagaccaactttatctgaatttttttttagaaaaccgcacagcgaagactcatgaggaactacatatctggcaaagtaaatatgtataatgacatcatatcctctgctgctacttgacatgtccatctccctggtctcgctgtcgcccacacacactggctagcagctagctacctctctatagtatccatgcagagcacgcacg

SEQ ID NO: 376039 - DNA, 240 bp, Zea mays
actaccaattggtcactcatctcatttaaccatttgcagatttagatacccaccgtgggattttaaaaaattaagatattcttaggtttgacatttttttttgagaaagccccaaaaatgcgtattttgatgctacgcaaagctttgtataacacaacataataagccgcaggtcgataggcaaattcaaataatgaagtagggccctcagcctgcaggcctaggaaagagaatgaaaat

SEQ ID NO: 376040 - DNA, 268 bp, Zea mays
gggggaaaaaaaaaggggggaaaacccttaagggggcccccaaattccctcaggaaggttcccaacccctggtccaaaaaaaaaaaggggattttgggcaaccgggccctttatccccgtccctgggttcaaaggggcccccctcccaaattttgggaaaaaaaagacccccccgctgggggggggaaatttacatgaaaaaattttatgcccaaaaaacccttttttaaaagggccccaaaggggttgggggaaaaccccagggttc

SEQ ID NO: 376041 - DNA, 374 bp, Zea mays
cagatatacagagagaggtttatttttattcaggcaaggcaatcaccattcgactgcaaacacatacacagagagagagagagagacatgtcatggcttcgccttcgctcaggctactgcttgtatggaacggggatcctgtcgggaccggacttcatgtcctcccacagcagatcagacagcgccggcatcagcttcccaaccttcccgtctccgatgggtttgccgtcccactcgacgacgggcagcacggggaggccgctgccgacgaacgccatctcggcgctgcgcttggcgtcctcggctgtgatgtccctggtgctgacgcccgcgagcaggccggcgtccacgaggcgaggcgccagcgcgagcat

SEQ ID NO: 376042 - DNA, 303 bp, Zea mays
aacaggccaatcacgaagttcaaattttccatcccacagaaaagaagcgttccctttcaacagagggagcgacccagggcactaaactacatttccagttggacaaaccgcaatgttgttaacagcatgaccaaaaatcaaacccgtacacactggtggacccctacccccgcctaataaactagtagtaacagataacccttctggccataaaagtttgaaccacaaaagaacttgcaagcacatcaagactccgggggctgcctgatgccttcccaggggccaaaaaaaagttttaaccga

SEQ ID NO: 376043 - DNA, 299 bp, Zea mays
ggcaaaaaggggggcgtcatgaactcatgcctcccacaacaggaaaaggggtcccctgggcctttctgcttttgggctaaactgcaaaatacgtgggcaaaatatttttgcacgagcgccccccgaaagctcgcttggccacataaaaaaaaatttagcgccggtgggaaactcaaaaacgagtccccaaggggcttgatgatttttaccccaaaaaaaaaacatgttgggggtttccctgccgggggggtaattagggggggggctaaaaaccacatgcttttttattttgggggggg

SEQ ID NO: 376044 - DNA, 532 bp, Zea mays
ccgcaagaaccccccgtctcccgctcacccgcgccctccggatcccgacacccccatggtcagcggcttcgctccgggcgacatggtctggggaaagaagctcaaccacgccgcctggccgggcctcatctactccgccggagggaacagcaccggccacgaggcccagctccttgtctcctacttcggcgacaaggccttcgcctggtgcgacgcagccgagctcaggccctacgagccctacttccccgtcgccgagctctacgacgacggcggcgaggacttcgacgccgccgtcgaggcctctctcgacgagttctcccgccgcgtcgaggccgccctcgcctccgccgcccgccctttcgcctccgccgatttcctcgcctcgctccacgatctcgccgcggatcgcatgggcttcaccacagggtgcaggccgccgtcgccaaggcgcatctcagagccttcgacgccttcagggctctgccggacccacctcagtacaccttggagctcggtctactcccacacg

SEQ ID NO: 376045 - DNA, 287 bp, Zea mays
accaacaaacaaaaaggcatttttggttgacatcacacgaaccatccggggacaaaactggtattaagggccttccttctaccatttcacattttttttaaaaaaaaaaaacaaaaaaaaaaccgaaacctttttacatcccaataaccaaagggggatttgggacgtacgtccccttaagcacgtcaccgatcaactggttttcccctgggcgcgacggacctggtagaaaacccgttacacaaaccaccagttgacgaacatgaagcaaacccagggcccccccc

SEQ ID NO: 376046 - DNA, 413 bp, Zea mays
  unsure (1)..(413): unsure at all n locations
gccgctgcggactccatccgctgccccgtgctgacacggccgaccagcgtccccgaccgtttcctcaacagaaccaggatgcaagcgctcgccgcggaatgcaccgggctggtgtcggcggtgagctacttggacgcgccggcgccggcgctgctgctagccacgatggagctggagtggtggatgctggggccgtgccgatgctcgagccacgctaactgcacccaggtcaccacgccggtcgcagggcaggaggcgttccggtgcgactgccccaagggctcggagggcgacggcttcgccgaggggcgtcggttgccgggaaggtccaaaatgcaatccttcaaaatacctacaaggangattgtggcaagacgatccaaatcgtccttctcgtggagggatcatgtttg

SEQ ID NO: 376047 - DNA, 133 bp, Zea mays
ctagcgagcgggcgccccggcgaggcgattgttgtccgctccgaccaggcggagccgctgccaccggcgcccgtggcgtccgtgaggccgctgcagatcgaggacaccgcccgcctgaacgcgggggagccga

SEQ ID NO: 376048 - DNA, 258 bp, Zea mays
ggcccccaaaacgttccgggtaaaacttaaaggggggcccaaaggggaaagaaaaaaaatttaaacccaccgttaaaagggtcgaaggaccctcaggagcccggggcggggggggccaagcttaactcggggggggggccaaaaaccacggggcacttgggcagtttgccgagccccgaaaacagggggtcctccccctggaggtcccggttccacttcttcgggggaagcaaaggggggtacaaggcccaccggggc

SEQ ID NO: 376049 - DNA, 579 bp, Zea mays
  unsure (1)..(579): unsure at all n locations
agcttcttcttcttggccttctctgcttcgctgttcttgttcttgagatcgcgctttctgaccggggagtgccgtgccggagatcctgaaaagagattgcgcgcgagaaggggggaaacatcggcttgaaccttcaccgacaacaggtactaaccgaggcatggacagggagcagatgaggatggccatcctgaaccaagaacggatcttcagacaacaggtactactaaccgaggccacatttcatatccgcggtttatgtatcgcgactaaaaacgcgctgaacaatctctctgcatcttctctcgcctctgctgcgaggttacctactaccgttaccccccagtttcttctcaccgtactctctgtctgcctgcgttcctaccgatcgaatcgaccaggtacacgagctgcaccggctgtaccacgcccagaagcagctgatgatgcagcaggcgcagacggctcctgctccggcggtcgtcgacgccgagccgagaccgagaccgncgcagctggatatctggtgcggcgagagggcgacagcaagtcctcagcagcacatcatcagctttcacg

SEQ ID NO: 376050 - DNA, 352 bp, Zea mays
aataaatccaagcgtcgtcgttgatactgtcaaaggattactcctgtggtagtttatatataggatagtggtttgatggtttcttgagtccaaatcaactattagtaccggctctcaagtctgaactgctcccaatgctctgaccgctgcattattggggcatgaattttcgctcctagcacacatgcctacatttcaacgctctgatgcgctttcaccgttcttacttatggatgcagaactcaaacatatgacgatgctgctccatttggaataatcatcagcatattaaattaaattgaattacctgcttattatctacgcactaataagccacatgatgcgaacgtga

SEQ ID NO: 376051 - DNA, 502 bp, Zea mays
gagaacttcctttccgacctgccggcacacctgcagcgccagctcgagatccgaagcatagttcgatacggtcgtccctccatgtcggcgccggcggcggcgccggcgccgttgaggagcgtgctgctcagctcctgctgtggcggtggcgtcaccaggaccagcaggtacgacgatgagcaggattacgcggtgtcgaccgccaccctcctcaagcatcgcatggacgcgctggtggatttcgtcaaagaactccctaagctataccggctgaatgtgctggacctgggaggctgcaagggcctaaggcgccgccacctagtggccttgaccgagctggaatgcctcaggtacctgagccttcgggacacagacgtacccggactggttcccgaccgccatatgaacaggttcgagcagttggagaccctggacatccggggaacacgcataccgccttgcgacaccaagaggatctacctgcccaagctcaagcacctgc

SEQ ID NO: 376052 - DNA, 455 bp, Zea mays
gttcgattagtcgcgattaatcggctgataataactccagagccgagcaagggtaacgacgcgatcagggcgatcagatatctgatcgtccgattagttgaacgatcagcctggctggttggattgaaatttcggcccagtggcccagcccagcttcctttttcccattcccaccacgtgagcagaagctgcacaaccaagagccaacagagcaacgcccaggcacacacgacacgaaccaggcaaccagctgccgagggaggaccggaggaaccctagcggaacactgtgcaggtgacggcggcgcgctaccggtgacgggggatacggcggcatcgtccccctcggcccttcctccatccccggcgcggcggcgccagtagccggcctgcaggatgatcaatcaccacgaaatagtgcagtttgggaagctgtacaatagagacatggaatca

SEQ ID NO: 376053 - DNA, 467 bp, Zea mays
tttgggactgcaccgacgccttgttccttgtttcctcgacgacacccgagccgtgagagcaccgagccgaacgagatcacgctgagctctcctacaggcaacggagtcggagccggagccccagttgaagctggatccgttggatacagtgctcgccgaataccgcatacagacgtgtgcggacggttgcaactgaattcggtaccaccatgtgcagattggcatgacactacgagaggagggctgagggactcaacaggttaaggtaccgtatttgtagacttggatggagaaattgtgagtttctatgatgaagactaataagagtaggagtgtacataagtctgggaaaggtaaatatgtcaaaggagaagggcctaactgggatcttgatgtgagggtttgatgcttagcgcgatttcagaaagattgggtgcagactaaagcagtggttaatgagaagcagg

SEQ ID NO: 376054 - DNA, 511 bp, Zea mays
gttctagatcgcgagcggccgcccttttttttttttttttttgcaaaaagaagacacgtcttgtagtatatatgattatatatgaacaataaccgggcaaagaaatacggcaaaataacgctatgattcttcaccctttggtcgccggcgcggccatgccgcggtgattatgccacgagtaggcgccgagccctttggccagccgctgcagcgggctcaaccgggcgcacccggcgacgctgtccgccgccgcggccgcgtccccatcgccgtgtttccagcccttgcccatgtcctcgcgctttgtggcgctggctttgatcgtcaccgccggcggctgctgcgctcgccctcttgacgggcacgtcgagctgttgacgcggccgccgtcggacgagctccggaacaggaggagatcgctgagccgccaccgtctccacccggcgctcctcgacgcgggacgcgtggctggtctcgtgggcggcgagccatggggggcaacagcaacacc

SEQ ID NO: 376055 - DNA, 259 bp, Zea mays
ttctcacgtaagcccacggctagttattggcttttgaacaaggcgaacttgcatgagagctctaaacaaagtgagaacacgctttctttacatatggggggattctacggatcatgatcaatgctttgtgtcggccgcttgtgatgcacttacatgcatttgacgaatattgaattgtggcgcttgacgcttccaggtaaagtaaagagcaggggcacatgttaagccgccacaagacacaggctatactgtctagcca

SEQ ID NO: 376056 - DNA, 440 bp, Zea mays
ttctctgataagtccacggcttgtttttattttttgaaagagtaggaaatgcataaaaggttaaaagaaaatggtaccaccccttcttttgatctggagggtcttcaatgcttaggaacaacgctatttatagtcggtttgagtggcactcacatggatttgccgaatatttcaatccagtggatgcggctacatccaaaggaaagcaacatgggacatcatttcacggcgccacagagaccagtgtatgactgtgtagccacaggatgtgtaggcgctatttgcaagctgaaatcgatgtcggcggtgtaattgccgttgcctagacaggtgtgccagtagaccctgatgctggattggttgtttatgtagagacactcgtaaggaaagctgaaactgaattgaatgttgtatggcttcaattgaatggcattgacctg

SEQ ID NO: 376057 - DNA, 302 bp, Zea mays
gtcacgatggaaaacacacgctagcaggcctgccccggccgttgtcaggctctgcatccctgactctctgatgaagctctcggatcgccatggacgctccgagcgacggcacgcgtactgcgcgcgccaggtgaccgaacaagctcgcgctctgctgctacagttgcttgtccctgtgccagactggtacgaggtaggaagcttatagcagatacagctaatctggggtgcgtagccgaagctagagctagctagcatagcgcgcgcatgagcgtgctagctcgctcggtagctgtgtacta

SEQ ID NO: 376058 - DNA, 330 bp, Zea mays
tttacgcgtccggtgttagatcgcgagcggtctggttcagctgattcttcctaccgagggcttgatctaataacgcacgataacaatcggcatcacagtcgcgggtactcaggtagtgtcaatgtgtggtacggctactgtacgcggtcgcagcgacgtgtaactgagatggatcccgatgccctggtcaatggtgatgatatggataaggggggaccaatggatcacaactcggagaactggtgcgctgatgtggtggcatctgaggaggagcaccataactgactcgagcgcctcagcgggtaggtggaatcatgctcaggaagggtg

SEQ ID NO: 376059 - DNA, 218 bp, Zea mays
ttcacacctacggtctgaccaaggagctgtaactgacatactgcgtgtttgtacggaaggaatatactatggatgaaccacgattgaactccatccgggttgcattcaatcacgacggtccaaagtatgttccgaactcaattgatcgacaggcattcttattaactggatgcgagttaggacagtagttgaatgatccagcttaatgaaggcggggc

SEQ ID NO: 376060 - DNA, 188 bp, Zea mays
ttctcacataagctcacggctagttataatctttggaaaaaggcgaacttgcataagaggtttatacaaaatgggaacatgctttgtttgcatctggagggtatctaatgatcatgaacaaccctttgtgtcggccgcttgtgagggacttacatgcttttgacaattattgaattgtggcggttgac

SEQ ID NO: 376061 - DNA, 219 bp, Zea mays
ttctgacataagttgacggccaggggtaaactgtggaattaggagggctagatgaccaggttcatacaaattgagaacaccgtgtgttcgcacctggcggggatcttctgcctcaggaacacaccatattgtgcaggccgcccgagagggacttaaatgctttcggggcttatccagatgtggctgtacgacggtccccagcaaggacagagtacgggg

SEQ ID NO: 376062 - DNA, 151 bp, Zea mays
ttcacgcgtaccaccatagatcagagttctgggctacgttggctttctttataattgcactgctaattaattgctctctgctgctatattatgaacggaacagttcaaaccggctacctagtcgatgcctgagttagctatcgatccacat

SEQ ID NO: 376063 - DNA, 315 bp, Zea mays
tttacgagtgcccggccttttttattttgtgtttgtttttccggatcaggaaaaagaagcaatgtattaatgattaactaacaataaagaattactaggcataagcaattactccgcccacatcgttgctttgatttttaacagaccacccaaaattgttgactttagtttattatacggcctcgcagctcttttgtgatgtccaaaggtccgaatggaccacagataggcccccgcaggtggtaaggggccagctctaaggaacgtagcatcagtggctttgtcacctaccagtgacttagagttccatatcga

SEQ ID NO: 376064 - DNA, 192 bp, Zea mays
tttaaacataccgggttatgattgtgtagggtgtgatctactgagacgttgtaccgaagtcacatactaagcatggacaatatttatctgaatgcaagtcgttagcactcagtatgagctaatggttgttcagattattgacgcacgacagagctacgtgtaactcaaatagatcaagagcccgaggtgaat

SEQ ID NO: 376065 - DNA, 219 bp, Zea mays
tttaagcgtacctgcttatgtatgtgtagggagtgatctactgggtgtttgtatggagaggaaaatgctaagcatttacatgatgtaactgcatgcatgtcgctttaactcagttcggactcattattgttgcgatatcaggcgagcgtattaactacatttaactcaaatagagttagggcaggagttgaataatgcagcttaaggacaggggaggac

SEQ ID NO: 376066 - DNA, 215 bp, Zea mays
tttaaatgtacgggctgaccaatgtgtagtgtgtgaaatactgagagtttgtaggggaggaatatactaaggatgtacaagatttaactgcatgcttgttggattgaatcaggacggactaaagattgttccgaattttgttgatcgtcatgtttgctattaacacaattagagttagggcggttgtggatattgggcagcttaaggaaagcggg

SEQ ID NO: 376067 - DNA, 186 bp, Zea mays
ttcaaatctacgttctgacattggtgttgtttgtgttatacagagagtttgtaaagaagtaatatactaaggatgtacaagatttgtatgcatgcatgttgaatataatcattatggtcaaaggattgttccgatttttagagatcgacaagtatgtttttaacacaaatagagttggggcctttg

SEQ ID NO: 376068 - DNA, 215 bp, Zea mays
ttctcagctaagttcaaacataggaacagtctttcgaataaagagaactttcttaggagttttatacagagtgagaacatgcgttgtttacatatgacgggaagacaatcaacacgatccaccgttagttccagccctttgagagggacttgcttgcttttgacagtaatatacttgtggcgtttgatgattcaatctaaagaatgaaacaaggg

SEQ ID NO: 376069 - DNA, 530 bp, Zea mays
tggacgcgtgggctagttctagatcgcgagcggccgcccttttttttttttttttttttttttggttcaaactaccaaatacatatacatccacatctgttttaaaaagggcaaggtaaatgtagtctgccatgaacagtaagcactatcaaaagtgtactgtcgactgtgtaaccaagtaagtgtaatcatacagtgatcaaaaaagtgaaaaggcaacattcctggcgtccctctacgagacagtatggtcaagtcgatcttccttagatacatgcctgactgtgaggtgaagagtgtaaaagctacccaaaattttgcttctaaatgtgtggaaaggactgtgacggctgtgaatactgaatacacctacagcaatagtacagtggtatcaaatgccattgtcagaaactgtagtcgatatcagagatattctgtaacgttgattgtttaaccagcccacgccgctcgtcgtacaggtccaggttcttgcaaggcacaaggaaaacgtagccaatgacctgcccctg

SEQ ID NO: 376070 - DNA, 216 bp, Zea mays
tttacgcgtgccgggtgatgattgtcttgtgtgtgctgtactgggtcgtggtacggacgccacgaagtagggatgtaccaaatttatctcattcaaggtgctttggactcagtctgcgcttatggttggtccgatttttgacgctcgtccgagcgacgtggaactcagttagcactcgctcccgaggtccattgcgatgctagagatccgggagga

SEQ ID NO: 376071 - DNA, 216 bp, Zea mays
tttacacgtaccgggtgacaactgtcttgtgtgtgatctactgagtcgttgtacggacggcatgaactaagcatggacactatttacctgaatccatgtcccaatcactcagtccgaaatgatggttgttctgatttttggcgcacgactggacgacgtgtaactcaattagatttagcgccccaggtcaatcgggcacctagagaaccgcgggga

SEQ ID NO: 376072 - DNA, 202 bp, Zea mays
tttaagcctaccgggtgatatctgtgtaggttgtgctctaccgagtggtggtatggaagctccatactaaggatgtaccatatttgtctgcatgcatgtcgctttcactcaggacgaaccaatgattgttcagaccattggcgctcgacaggactgcgtttaactgaaatagatttaggaccctaggtgaatagggcagctg

SEQ ID NO: 376073 - DNA, 184 bp, Zea mays
tttaaatataccgggtgatagttgtattgagagtgagctactgagaggttgtacggaaggaataaactaaggatgaacaatatttagctgcatccatgtgggaaggaatcagtatggactaatgattgttccggattttggcgatggtcttgcctgcatttaacacaaatagaattagggccgg

SEQ ID NO: 376074 - DNA, 215 bp, Zea mays
tttaaacctacctgctgtcaattgtgttgggtgtgatctactgagaggttgtagggaaggaataaactaaggatgtacaatatttaactgcatgcatgtggtattcaatcattatggaccaaagattgttccgaattttggcggtcgacaagactgctattaactcaattagagttagggctgtagttgaattaggcagcttaaggaaagcgggg

SEQ ID NO: 376075 - DNA, 168 bp, Zea mays
tgttcaaatctacgggctgacgcccgtgttgattgtgttctactgagaccttgtagcgaaggattatactaaggatgaaccagatttatctgcttgcttgttggattcaatcagcattgtccagggattgtttcgacccttggcgagcgacatcttggcttttaacac

SEQ ID NO: 376076 - DNA, 378 bp, Zea mays
gttttagatcgcgagcggccgcccttttttgggtttttttctggttttagcattggaaagcccgcgataaacagaattgaagtatgactcctaacatgccaacttgattcaaaatgtgtacgagatagaattgacattaaccaaaccaaaatatactgtgagccggatgattcactgtttctcgcccatcgaacatcgccccaaagttttacgggccagcctggcctaacataatacaatggggtcgccatcgttcctgacaagcatctggggtaccaaataaaattggattgccagcagagactgtctacatccatagcgagtgcatctgcagatactaagagccctctggcgatctgttctcaagggacgaactga

SEQ ID NO: 376077 - DNA, 216 bp, Zea mays
tttacacgtaccgggtaatgattatcttgggggggccgtactgggtcggtgtacggacgccacgaagtaggcacgcaccaaatatacatcaatcaatgtgcctatgactcactctgaaattattgctgatctgatgttaaacgcacgtacgagcaatgtggaactcagttagcatttgcccccaaggacaatagcgctgctagagaactgggagga

SEQ ID NO: 376078 - DNA, 282 bp, Zea mays
tttatacatcccgagcggtcgctgttttttgtgtcctttactggttcttggaacagaacgcctgttgtagtaacgcataagaactatctcgttcaatatacctatcacccaatccgatattacttatgatgttaattttgacgctcgtattgttaacatggaccacaatttgaatatgcccccaagggccatagggaccctaaagaaccggggggtctatacagaaactatacggcaggctgggcagatatccgaccagcctgagggatgcggaaacaataa

SEQ ID NO: 376079 - DNA, 399 bp, Zea mays
tttaagcgtaccgggttctgtttgtgtagtgagtcatctactgggacgttgtatggcaggcatgtaataagcatgtacctgatttgtttgaatgcatgtctatttaactcagtctgtactaatgattgttcagagttttggcgctcgacagtcctgcatttaacgcaattagatttagggccggaggggaattgggcagcttgagcaccagggggactaaaatgacactctacaggggactgcgctgatgtctgacctggcatcagtggggcgttatatattactggagggctttctacactagcttggtagattgttcatgaagacgagctaaaatgagctgtttaactctatggagatggtttaatcggacctactgactatggggttaatatggtt

SEQ ID NO: 376080 - DNA, 189 bp, Zea mays
tttaaatgtacgggctgacatttgtgtagtttgtgaaatactgagaggttgtggggaaggaatatactaagcatgtacgagatttacctgcatgctggtggcattgactcagtatggaccaatgatcgttacgaattttggcgatcgacaggcatgcttttaacgcaattagagttagggccggtggtg

SEQ ID NO: 376081 - DNA, 215 bp, Zea mays
tttaaatgtacgggctgataattgtgttgagtgtgaactactgagaggttgtgtggaaggaatataataaggatggacaagatttaaatgcatgcaggttgaattgaatcagtatggaactaagattgtttcgaattttggcgatcgacaggtttgcttttaacagaattagatttagggccgttggtgaatagggcagcttgaggaaagcgggg

SEQ ID NO: 376082 - DNA, 317 bp, Zea mays
tctcttagatcggcggggtcccccctgtgttgggggtcttttacagagaggctgcgaaagcccctaatcaagaggatgtgcaggattcattctaaaagtcccattgtttttattattatgggctcaaggatcgttgcgattattggcatgggacgatcctgttgttcacacaattgactttggcgcgcccattgaatagcgcactttggttttacggggcgtatatgggcgaacctaaaaagaagggggtcccaatcgttctttacaagcatgtggggtaccaaataaaattggattgccagcagcgatggtttaaa

SEQ ID NO: 376083 - DNA, 466 bp, Zea mays
tcagaaacaggtggttctcgtcggccgggtgacgccgggaagctcgatccagaaggagctggtgaaggaggccaagctctgcgccgccatggtcgtggtgcttggcgccaataagaagtactccttcggagggtcgtcctgcctggccaagtactgcgccaagaagctgccgccgacaaccaccgtcgtcgccatccaggacggcaaggccgtcttcgtccgggaggcgcccaggccgccacttggagcagagccaaagccggtgctccgcacggtgctgcacccgagcgtggggctggagcccaaggtgatcatcccgaacccgaaccggcgcgcgcggtccatgtccatggacttggacgccccatgctgcggtcacggcgccgcggacgcgccggctagcaggtgcttggacgacgccaccaaagccgacgtcggcgtggcacccgagcagaggctcgggtgg

SEQ ID NO: 376084 - DNA, 389 bp, Zea mays
tttatatatcccgagcggcccccctttaagggctcctattctggttctagcaagcgaacccgcctgatatgcagaaaggacgtattcctcattgcatcccagttggactcaaaattgtttcattagtgagttcaccttaaccgaaccaaactattatctgagccgacatgttatttcgagatcggactttatagctataaccaagaactgacagccctatcagatcactcatacgtactggtggctgcaatcctgtatgctacagaacaggggtaccaaagttaaccgggtgctcagcagcaactggctatgttcaccattaggagatctggaggaacgatgactccactttcgatctggtgtaaggagacacactgactatggcgtgc

SEQ ID NO: 376085 - DNA, 209 bp, Zea mays
tttatatataccgagtggtcactgtctagggggtcctgtgctggttcattctacggaacccgcgtcgtaggaacgaatgacatctacctcagtgaaggtgcctaggacgcaatcctggcttacggttggtctgagtttaaacgctcgtagcgattacgtgtaccacacttagcgtgtgggcccgggggcatatagcgggcttatagcgc

SEQ ID NO: 376086 - DNA, 409 bp, Zea mays
gcgtttttacgtccccacagaccaacattgttgcttgctcggcccagatctccaatggccgccgcacccgtagttacgccgctagcctacacggacgacgagatcgtatacgagtccatgccctgcatttgcgtatacattaaacgctcggagcgctactttggtaccgagttcgtattcgcctccacggacgccggcaccgttgttgcctccagggacctagtcatataccccaacgtatgctcgcgcctttaccttccaggcctagacgacgagagcgcacaagctacacatcttcgtctactagcacgggagcgggttctgactcgggtccgctagtaaccgcaccttgcattcctacttgaacagtttagtgggccttgccaacggtctcgtcaggctccgttga

SEQ ID NO: 376087 - DNA, 295 bp, Zea mays
tttatgtctacctgcttccttctgtatagtgggtatgctactgggaggttgtgggggaggcatctgctaagaatgtacgtgatttagcttgaatgcaggtgggattcaatcaggatggaccacgggtcgtttagagcttaagcggacgacggcatttcttttaacgcaattagagttagggccgagagtgatattagacagattaatgacggcggggttgaatatggtactacacaggggacgtgcctgatgtctgaatgggatcatagacgcgttaataatactggatggcgtg

SEQ ID NO: 376088 - DNA, 538 bp, Zea mays
cccgtgttcacgagtgaacagagtagagtagttgtatgggcatgccccattccagctccctccaccacttcctccgccacgtttccttccctccggacccgcaccttctccccaccgtgttcaagtcatgcccgacactgccgctcgcccgcgctctccacgccgtcgccgaggtcagcggcctcgcgcgggaccccttcgtcgcctcctcgctcctacacgcctatctccgcctcggtaccacgggcaacgcccgcgccttgttcgacggaatgccgcgcccgcagaggaccgtcgtcggctggagcgcgctggtcgcggcgcacgcggcgcgcggggacgccgagggcgcctggcgcctgctcgaggagatgcggcgggatggcggcgtggagccgaacgtgatcacctggaacgggctcgtgtccgggctaaccgcagtggccgtgcccggacgcggtcgttgcgctggcgaccatgcacggtgaagggctcctgcgtcctgacgccacgggcgtctcgtgcgcgctgtctgctg

SEQ ID NO: 376089 - DNA, 351 bp, Zea mays
cgcttggctgccgcttgctgctgcggtcgtctagctaagctagcttacatagccagcttcgacacgtcgcgacgcagattaagcggcacgaggccagcctccgggagctggtggtggagctaggcaggcggcgttgtgcttgctggcttctgtgatggggtcgtccacggatcacgccgccggtgcccgtggcaagaagcaggggtcgcagctgtggaagaaggcgctgctgcattcctccctctgcttcgtgatgggcttcttcaccggcttcgcgccgtcgtccgtgtccgcttggacgtccgcggcggcggcggcggtgggccgggtgggcagcaacaccgtggtccg

SEQ ID NO: 376090 - DNA, 362 bp, Zea mays
cccattcgtccgcccacgcgtccgggaaaaatatggacaacccctatataccgatctcgatggcgaaccctcgcgtcttcttcgacatgaccgtcggcggcgccccggcgggccggatcgtgatggagctgtacgccaacgaggtgcccaagaccgcggagaacttccgcgcgctgtgcacgggcgagaagggcgtgggcaagtccgggaagccgctccactacaagggctccaccttccaccgcgtcatccccgagttcatgtgccagggcggcgacttcacccgcggcaacggcaccggcggcgagtccatctacggcgagaagttccccgacgagaagttcgtgcgcaagcacaccgcc

SEQ ID NO: 376091 - DNA, 462 bp, Zea mays
  unsure (1)..(462): unsure at all n locations
cccacgcgtccgctctggctcagtagtccccaggtcgcccaggaaggcacagccttctcccagacgcctgtcgggttcggcctccccgttgccagcaccagcaacaggctccccgctgccggggtcatcgaggagtagtagtaggactgcgcaggtgcactaggcgtgcgacagaaaggatgaaagggagcggctatacgtgtgtgtgtgactgtgttgttgtcgtaggcatgtagctgttggtttcattccatgtgtactagctgtatatttttgctgtattcactaccggaatccaaggctttgccgagtgttgaatctttgccgagtgccttttgtcgggcactcggcaaagacgtctttggccgagtgccgcactcggtnaagctaggttttcggaaacgaggctttttaccgagtgccggacactcggtatagtgttgcacctcggacagctggttt

SEQ ID NO: 376092 - DNA, 177 bp, Zea mays
ctattagtgacttctgtgccactactaccaacagtttttttttttgagggggggggggaccccagaaggcggtctagctaaagccaccctatctatctgtcctgatgcaacatctgaaactattgctcagctgggaatacaactcgcttccgtcctgatcacgtcctacaatgacca

SEQ ID NO: 376093 - DNA, 351 bp, Zea mays
acgtaagatatacggagatgaaccaagatgatattattagagagtaggaggtactacattggtgttatagaggcgcaagtcgaagatagtgctatatggtgcacatcgaaataaatgcatgtaaggctatagaagcacaggccatctctcaccccatgaataggagggaggctaatatgatagggacggaaagtggcgtaatggcatattctaaaaaaataggctatggtattaccaagatgccacatagtactattgataggaaacaaacggggccttatattttggtgcactttttatttgcacatatacttttacaggttgtctgaaattggtaaaaacacgtgtggt

SEQ ID NO: 376094 - DNA, 359 bp, Zea mays
gtctcccgctatggcatgtgatgctgcttcaaatgtttcgtttactatgctccatgtactctcagaggttctactctcccagttcccgagagtagtcataagctgatcctgacatcattcactttggtaggcctcaagttaagcaggcattcgcacaagtgatccaaggctcgctggcgaaccactccttgacatgcctcaccctgtcacccaaactattgtgcgtagtgtgaggatacctagagacaccgcactgcatcttatgacagtacaaataccgctttccaatactggcatggttctgggaccctcgactcgtagctcgagaggctcaaatgcaactggcatatgcaggacct

SEQ ID NO: 376095 - DNA, 164 bp, Zea mays
ttttattgcgatttgttctggtaggggacgtggaggtttcgatgataatccattaggatgttgagagggtcttggcaggatcatgctgagattattgtggtacggaagccatacatttagagcattgcagtctactgttccggactgcacataggctgatagag

SEQ ID NO: 376096 - DNA, 528 bp, Zea mays
cggtctcgtgggttctagatcgcgagcggccgcccttttttttttttttttgccggaattaaaaaaaatgactatatttcgtagcatttcacaatcttggtgtgagaatcaccatcttagttattccaccaagaagtgtacagtacagctagttcggtttgccattcagcaaagaacagtgtggttctaggatatccctattttacaatctaagggttgagcaattaaagggttgtgacttgtggcatgcgaccaaactgttgaagctatcaaagaaccttccctagttcacaacaatctctggttacctgcgtaccgtgactgaccaaaaagaacagggggttgggggcaaacctgttgaagaaccccccagccactgaaatcctttgttgggactcaatcaccagtgcattgagcatgatatgcatgacagcgtcatacacaccaccatcataatgcataccatctgctgtgcactgttagccgcacccctgggtgagcttccccacatcaagcagcatgaacggg

SEQ ID NO: 376097 - DNA, 64 bp, Zea mays
gtctctctgacgcaagatccacgactaccaacaggggtctttttttaaaagatcggggttccca

SEQ ID NO: 376098 - DNA, 455 bp, Zea mays
gccttccatcagcctaaaccctgcgacccaacccggctccaactccaaagccgtcatggcggtgccgtccccgaccactaccgccggcgtcgtcgtcggcgtcacgacccaccaccgcgtgctcctcccatccgcgcgcccccgcgccgtgccctcttatctccggctcccggtgcgagcgcagacccacgcccacgcccactcccagcgcgcgcgcctcgccgaccccgtcgcggccgcggccccggccccggcggcgtcgacaggctcgcccgagtcccccgcgtcgggcgccgtcgcggtgaagcccacggcgctcgcggccaagaagctcggcgccgtggtgatcgcgctggtgcgggagtacgacaacgtcgactgatcctacggactctgccccgaggaccctcgtgccaagatctcgctttgcgacgcgctcattgtcaggttcggga

SEQ ID NO: 376099 - DNA, 69 bp, Zea mays
ctttctcgtccgaccacgcgttagtgcgagccagctcacttttgatatcgtacaggttgttatacacaa

SEQ ID NO: 376100 - DNA, 342 bp, Zea mays
gtttatggctgtgtcctgtggtagcgtactcaggggttcctttaatccgctaaatggacgtttagagggcttactctcgcagctcccgacagtatggacgatgtgctacccaaccaatacaccttggttgtcgacatgataagcagtcattccaacaagtaaggcaaagttcgattacagaaccactcctcggcatgggttaccatgtgacacaaactatggaagccaggatgacttgtcatagaggcaccacactgcaagctatgaggtttgaattaggcttgctcaagacagaattggatacggtgctatggcctccagagacgacctggttttacgaat

SEQ ID NO: 376101 - DNA, 192 bp, Zea mays
gtttatggttgtttgctgacgaagcttactcaggggtttcgagtagacacccatacgatgtgggaagaggcaagccaggattctaccgacgcattgggcgtagtcagaccacacccctacaccagagctgactagattgtcaggcctcacagccaaccagaaaggtgaagttactgtcaaacagtactcaga

SEQ ID NO: 376102 - DNA, 170 bp, Zea mays
ctttttcttaggcatgagccatgctgagcaacagcgatcttttttgagcgatcggggagtactacattcgtgttatgttggtgccagtcaaagaatgtgatataagacggacaatgcatagattgtgtcaatgtgaatataagaaacattcaaaccttactccatttaca

SEQ ID NO: 376103 - DNA, 95 bp, Zea mays
gtctcacgtaggcatgagccatgatgagcaacagggctcttatttgagagatcggggagtactacaccgcggaaaggaaggtgccagtccaagaa

SEQ ID NO: 376104 - DNA, 72 bp, Zea mays
cctactcgtaagagtcagcaatgctgcagtacaggtcacttttgtcaacgaacaggtagttataagaaaatt

SEQ ID NO: 376105 - DNA, 329 bp, Zea mays
ctttctcgtccgagcccggcgtactgcagatcgggttaccagtctacttgtacaagcagggatccgaaactgattatgaggtgtcattctaggacgagcgttgggcgacacaagcatttgagcttggctgtggagaaaattagatgacatctcaaagggttgcgcgtggagctagtgttacacacacacatgaccgggagtacaagatcacaggtgcatgtgtgagggagcaccacttattattagggaccggggatccgacaaagactgcttttgaggaggcctactgaacacagattttgccactggatattcacagctgagagact

SEQ ID NO: 376106 - DNA, 184 bp, Zea mays
tctatatcgcgagcggccgccctttattttatcggttttttttaatccacgtactgctatcatgacccgccaaaagacgattactcgcgaggccggaaacatagaggacctatccaaataagttgtcaccaactaactagccaagctgaagtcgcaaaagatacatcacgacgaccccaaaact

SEQ ID NO: 376107 - DNA, 140 bp, Zea mays
gtttctcgtaggggtgagccatggtgagcagcagcggtcctatttgagcgatcgtggagttctacggtgctgtattaatggtgccagtcaaagaatgggatattggatggacaatgcaaagagtgtgctaaagtgagtat

SEQ ID NO: 376108 - DNA, 91 bp, Zea mays
gtctctctaaggaccgcgccatgtagatcaacaggggtcctttttgagcgaacgtgggggtacaacaatgctgtaataaaggtgccaatct

SEQ ID NO: 376109 - DNA, 110 bp, Zea mays
atctctctaacgcacgagccaccaattacaacaggggtctttttatatccatatgcgctcacacccctcattaattaataacgcccaactaaaataaagccacaatacaa

SEQ ID NO: 376110 - DNA, 262 bp, Zea mays
ctttatcgtaagagacaggggtgctgctggacaggctactgttcccaacgtagatgtagttacaaagacattaacgagtggaagagtcctaaaagctgatttggttagcgatgtaccatcatggagatcattgaccaaatcatatatggtcgaatgagggttacgagtaagtctggctctagaccctcgcatgcagggaaacaagtttggagggaatataggcgatcgaactatggagcttcctacttctctagctctacaa

SEQ ID NO: 376111 - DNA, 364 bp, Zea mays
ctctatcgctgattacacgccagaggagttgacgatcgtggtgagtgcggatgaaaagcatatgacgaacaaaggcaccagtatcatgatccgtgaatactactgagaccagtatcatcgctacaaagtcaggatctacggatgcagtggcaccgaagacctgtgaacgctctctcgatcccgaacggaatgaggaattaaacatggaatgcaacgggtgcggtcgttcgctggcgtacgagccgatcgtgaaggagtactgacgcgccaacccgaactagtcgatgagacgtacgcgacgcttaggtaatgctgtcagcctgcataactcgctgtgacgagtaccagcacttgatgaaggaca

SEQ ID NO: 376112 - DNA, 147 bp, Zea mays
ctctctcttaggagtgagccatgatgagcaacaccgctcttattttaacgataggggagttctacattgttttaatagatggtgccaatcaaagaatgtgatattagggggacaatgcaaagagtgtgctaaaagtgaatatatgaa

SEQ ID NO: 376113 - DNA, 112 bp, Zea mays
ctttctcatacgggcacgcaatgctgtcgaacagcgcactcttgttttcgatcgtgtacctctaggttgcttcaataatgtcaccattctataaacaggatttggtggagta

SEQ ID NO: 376114 - DNA, 156 bp, Zea mays
gtttttcgttaggtcgagcacagatgttgggcgggccacttttgccatccgagctgccgctacaggcacattcaagaatgacacgatgctgtagcccgacttcggaagcgtcggcgtctgcttcagggccatgtgcatcaaggtctacgtggacga

SEQ ID NO: 376115 - DNA, 258 bp, Zea mays
ctctatcgcgagcggtcgtccttttttttctctggcttttttttcacacaataaattagtctcaattaaatgctggattcaaaaataaatacaaacatgggccgattatgtgattcgattcttaaatcttatggcttaaaatctcacagaccattgtcaactgcagctggctcggcgttgtcgccctccagggaggggatgaagcccaggagctcgggctggggcgtcgttggcggttgtgtccggctgcccttttgt

SEQ ID NO: 376116 - DNA, 114 bp, Zea mays
ctctttcttaggagtgagccacgatgagcaacaccggtcttatttgagcgataggggagctctacaacgcgctaatgatggtgccaatcaaagaatgggacattaggaaggaca

SEQ ID NO: 376117 - DNA, 104 bp, Zea mays
gtctttcttacgcggacgctatgatatgcaacaccggtcttattttatcgatagtggagttctacaatgctttaataatagtgccagtctaagaatatgacata

SEQ ID NO: 376118 - DNA, 176 bp, Zea mays
ctcattcatacgcgtgagccatgctgagcaacaccggtcctatttgagcgatcggggagtactacaccgcttcaatagatggcgccaatcaaagaatatgacacaggggagacaatgaaaaaagtgcgtgaaagtgaatatatgatacaatcaaatcttactacacatacaagggg

SEQ ID NO: 376119 - DNA, 100 bp, Zea mays
ctcttgcttacggcgaagccatgatgaagatcagggggcttttttgaacaaaaggggagcgcaagcctgattgaataaatggggccatacgataaacagg

SEQ ID NO: 376120 - DNA, 373 bp, Zea mays
ctctctcgtccgggctagcacagatgaaggactggaaattttaccttaccaacgtgccgcgagagcttaattggatctcggcgcccaactctaggcagactatcgaagaggagctaccgaagtcaggactgggtgacacatctctctgaagactactgatcataggaggagattgatgacgacaacggcgaggctgtaccactcaactgagagagtcaaagagagaacgtggactatgtgtgtaaagcgatgagattagcacatccagtttccaggatctgaaccaacagacacagtccctaacacatgctgatacttctttggacgccatcggagccaacaattggcaagaccaagaagatcctggctgtat

SEQ ID NO: 376121 - DNA, 376 bp, Zea mays
cgctcccacctgctgtgaggtgtgctgtctcgcagctttggctggaggctttgtggtggctcaggcggcaaccgcgaggggcacgatggccggtcatgagctcgtgctgagtttctgggagatggtgatagactttgagcgctccacccagggtgtctagctgtctgactctcctgacttcgttatggagccgggtggctcgcccggcaccgttgccatggtggtatgtgacctctggcgacccatcctgtttatcgtcacggtggatgactagctgttggtcctcttgctctgcaacataatcggcgacatcgggcctgtcgacaaatgtgacctacaccatgaacacgatggcaccattatctgcgctagacat

SEQ ID NO: 376122 - DNA, 428 bp, Zea mays
agatcgcgagcggccgccctgtcataccatgctggtgggtgaaacaacatcaagattcatctaatatattaacaaagagatacatgatgtacattacatgtgcatattgggcttgcttgaaagccaaagcgtggatgcaaactcaatcaacagggaacagcatcgagcatatattcataagcaatcggacaatccgtacgatattacattcatcaccctcaaagattacatacaagatttacaaaggtcacagggacaatgttatcatcatgactcagcagcttgaacaacacattctccctacatagagtcactgtgacaacgttacaaaggttgcttcgttggggcttcattgatctatggggaaggatttttagaaacgaagctgcgggtacactgtacaacacaccgaaaatgaatgcgctacc

SEQ ID NO: 376123 - DNA, 412 bp, Zea mays
gtctcttttgcttctgcacggtcataccatgctgggggttgccatgctgaccggtgtctttcaatttttggtggaggatctcatgcaacatgtttcaatgacctacatgggcttgttttgcagactatggaatggtcaagatccaaacaacagggcccgactccaagaccatgagctggccatgcaggcggaactgccggctagaactgacacatacttgggggtggcaataataaaagtggtgctactgaaacacttgtgcttaacatgtcaactatgacgaggtcggctgttagcactgtggaatgaccagtcccccttgctagtgtggtcatgactttagtgcatacaagctacgttggatatgattgtgtcatgtgtttcgggggatacagtggacgatacaacaatg

SEQ ID NO: 376124 - DNA, 116 bp, Zea mays
gtctctcttacgcctgcgctatgatatccaacaccggtcttattttatcgatagtgtagttctacattgctttaatagatggtgccagtcaaagaatatgacattagacagacaat

SEQ ID NO: 376125 - DNA, 247 bp, Zea mays
gtctttcttacgcctgcgccatgataaccaacagcggtcttatttgaacgatagtggagttctacgccgcttcaataatagcgccagtcaaaaaataggacactatacaggcaatgaaatgaaatgagcaaaagtgagtacatgaaacaagcaaatctgaccccaaatcacaatggcgatgtgactgttactgacctacacacctggctgtgagggatactcggagagaaatgttcaagtgcttcct

SEQ ID NO: 376126 - DNA, 546 bp, Zea mays
ataacgagaagaagcaacagctgagctgcctcgagcagcagcaacaaacacgcgcggcacggcacggcagcctgactcggaagctacacgcaggccggccgtagcgagatgaagtcgagggtggcgctggagccgctggcggaggagcccggctgcggggaggaggacgcggcgcgccggcgctcgggcctccacgcggcgctgcaccggtgggcgcgcctcctctccggtggcgtggcaggggacgacgcccgaccggtcgtcgacctgcgcgtgctcctctccgtgctcgcctgcccgctctcccccgtgcccctactgccgcgccttccacgccacgtcgtgtcgtcggcgcagtacatcatcgagcagttcagggccacgacggtgtgcggtaagctggaggacggcgccgtcaagagcatgtacgcgtccggtcgggtgcgccttttcatgctgcaggagcccggcggtgggggaggcggcgggcgccgccacgaggggagcttcgtgctgtggcagctcgcgcccagcatgtggctcgtc

SEQ ID NO: 376127 - DNA, 391 bp, Zea mays
gttttgtgtcgccagagggggtgtgggaggcgcggccctgtgtaatgctattggcgagtctgagcggagacgcacgacgacgagctcgtctcctggggccaagccggtgcgcaccatacgggtcaaggccaggcactgccaggtcacgcacgagatctacgtgaggtacgatgcctctttcggcgagctgatgaagatgatgtcctacaagacggtgctgcaccaggtccaccagatggtgctgtccaaggacaaggtacgcgactccaaggggaacctggacgttgcctgcatcatggaccggtccaaggtggagtgcgtggaggacccatgagaccgcgcgctcctgctcatcgaggagggtagcatctgccaccttcagaaggccgtc

SEQ ID NO: 376128 - DNA, 354 bp, Zea mays
gttttgggtcaccagaaggcgtgtgataggcgcggctctgtgtaatgctatttgcgagtctcaacggagatgcacaaggaccagctcgtctctctagccatggccatgggcacaatccgggtcaaggccaagcactgccagcgtcaccacgagatctacgtgctgtccgatgcttctttcggagagctgatgaagatgagactcctacaagacggagctgcaccacgaccaccagatagtgctgcccaaggacaaggatccgcgactccaaggagaacctggatcgtcgcctgcatcaaggacctgtccatggaggagtgcttggtggacggatgtgaccggtcgctcctgctg

SEQ ID NO: 376129 - DNA, 372 bp, Zea mays
tttacgcgtgggcaagggtccatttgacactttcttggttggtggagatacagctgaagtttctgacatcaaatttagcaacgatggcaagtctatgcttttgacaacaactaacaaccatatatatgttctggatgcatatggaggggataagaggtgcggctttaatttatagtcttctttgaacgaatgactagttattggtttcactagcacaggggaatagtgtgattgcaggataccaaggtggaacccggcccgcttgggacatcattgcagtccaagagattgatagatgtaacaggcacattgttgcgattacaggattaatgagtgcccttagtggagcgataagtgcaacggtaacaactg

SEQ ID NO: 376130 - DNA, 165 bp, Zea mays
tttttcaaacatgtccggatgttgttacctgggggagcaatgaagttcaagaggctgtgcctctaagagctgctatcgcgcagtttcacgccctctgctctccttcaccaaattggacaaaatgatcagctggttgtcagtaaacttgtcactagcatgaccagg

SEQ ID NO: 376131 - DNA, 404 bp, Zea mays
gatcgcgagcggccgccctttttttttttttttgcaagagtaccaaggtttcattggttgtcaaattctagaacaagtacatattcatcccaccaactgatgttggatccaaaggaaggagtaaaagaattgagaaatctaaagaactaagtcacgaaagcgaaagaatgccaaccatgatccagcagctcgtagatgttgatttgtagtattttgttttcagtttgtatattctggaccaatctattgctgtgatacaagatgtttccagtcatgaaacaatctatttaattcacatgggtctatacaatcagtttacaatcgcagttgtgacatacctagcaacctgtcgaagcaatccgtggaagcaagcttacatacatgagtttctttttcatgacggc

SEQ ID NO: 376132 - DNA, 473 bp, Zea mays
tctccggccgcctcgtgcccgacccgagatcggatctcctttgaggccgggctcaggcctcaggggtgccgccaccgcctcgttcgtctccagggaccgcgagctgttccctcgcctccagcgcagccgttcatccgccggcggcggctccaaggcgtccctgtccccggagaggcggtgcggcgtgggcgcgatgcagcagcgggtggcgcagctggaggaggagctccggagggagcgggaggagaaggcccggaccgtgagggacctcgaggacctgaggcgggacggcggcgccaagggtgtcgcggacaaggtgcaccttctggagcgggaggtgagcaagttcaagcagtcggagcgcaagatgctggagtcgctgatataccagaccaagcagctggagcagaccaagatatcgctcgaggaggccaagctggagatggccacgcttgcacagcaggcgagcaaga

SEQ ID NO: 376133 - DNA, 265 bp, Zea mays
tctttatcgtgagcgccgtctcatcgcctcaccaagcgatactcgctggaggttaggtgtctgctgcctacagagcccatactctagagcaaccagccccgatactatggtgagctcggtttccaatgacactggggggattagtcccgtagggtgggattagagcatgcgccgagtggatatggcattcaggaaccaattggatctatttggagacgtcgagaacctacgaccactgaccagcttttcgcagctgtcgtgaaga

SEQ ID NO: 376134 - DNA, 528 bp, Zea mays
gtcaatcccaccctatcgcccctcctctgtctcctctcttgcccacccgccccaatgtcgccgcccctcgagccccacgactacatcgggctctccgccgtggccgcggccgcgccgtcgaccccgaccccgacctcctcctcctcttcgtcctcctcgccggccccccgtctcacccttcgcctcggcctgccgggctccgagtcccccgaccgcgaccgggactgctgcgaggacgtcgccgccacgctctccctcggcccgctgccggcggccgccgccgtctccgccaagcgcgccttcccggaccccgcccagcgccccggcgcttccaaggctagcgacgccaagcagcaggcttcccccgccgcgccgtcggccgccaaagcgcaggtggttggatggccgcccgtgcgcaactaccggaagaataccctcgtcgtcgcgaccgtcttcaggagcaaggcgccggcggaggaggccgcgttcggagctgggcccatgtacgtgaaggtgagcatggatggc

SEQ ID NO: 376135 - DNA, 59 bp, Zea mays
tcttttcgacgaactaaaggctcgcgcacgtgggggattttccactcaatgattccatt

SEQ ID NO: 376136 - DNA, 604 bp, Zea mays
tcatattttgccatggacccagatactcctatttcatctgcctttgcaaaacatggaatgcaatgggccatgtatgttgtgacaactggtgctgttcttgcactctgctcgaacttgatgggctcacttcttccacaggtatacagtgataaaacataaaagtatattatgacttactcctgatgacacccagtggatgaaattgaatggaatttgagttgattctactattctagtacatgtgaacttttcattccactgtcagttactctgcaataagttgtgaacctagccttgtaagtggccaaaactcaatgactcctgacccttattgtataatttatctgttcttcggtttgcactttggattcctcatttaactcaacattatccatcaattacattgccccccattcattcattttgaatttaaatcccattgaactaatgctgcaatgaactttgatttccatgccacatctatgagcgaagatgtaggcatgtagtactatggtgaaccacatcagcactatgcagatgatattttaatacttgggtgtcattatgatttggattggtattctcgcagcctagaatacttatg

SEQ ID NO: 376137 - DNA, 385 bp, Zea mays
ttttcagtgggcgcgatcgggctgacttagtcgaagtcttaatcgtcaccgcccctgacatttggaatggcggctgccgccgtttgaagaggatatgccgctgacgccgccaggagggatcacatcgcgagctcgcctctggccagggtaccggcacaggcgacatcgctgtacatgctgagccacagtacgccggcggcgccgagcgtgctcgtcggggacgcgtatcgctccgcatgactgtcgtgctgttcgtcctacgttaggaagctctcgcgcgtggccagtagaatgtagttagtgcgtgaacaggtttcggagatcgagcccgggtcttcaactggcgctgatgctaaacagtacgttggccatggtgcgtgcgatg

SEQ ID NO: 376138 - DNA, 233 bp, Zea mays
ctttcacgttgggggacatcccaccaactcttcgattagtacgacctgtatgatcggcgccgatcaccgacacagcccatggagttgtggaccgaccttcgatcccattatcaatgttctcattgtaagcgtctaggggcatatcacccgaagggtcgttacacagtatggacagaggagtttctcaggagctggatactatcggggcaattccgagaccaagccaactacca

SEQ ID NO: 376139 - DNA, 276 bp, Zea mays
ttttcacgttgggagacatcgcagcaactattcgattagtaggacctgcatgtttggcgccggtgattgacacagcagatggcattgtagacagaactggaggtcattagaatgtacttatgacttgagtccgtggacaggttacccgaagggtggatacagagtatggacagaggagtacagttaagcgggatactattggtgcaattctgagagcatgccagttaccgctgttaatagttgttgtcggggtcggcgatgaactcatgggacatg

SEQ ID NO: 376140 - DNA, 73 bp, Zea mays
tttatacatagggagcggtcgtcctaattgatggattggtgggatctacatttctggtgccgctgaaggcgac

SEQ ID NO: 376141 - DNA, 456 bp, Zea mays
ttttcacgttgggggacatcctaccaactattggattatcaggacctacatgtttggtgccgatgattgacacagcacatggcattgtagacagtaaccggttctcaattaaatgttcttaagttaatcgactgtgggcattttaccctaagggtggattcacaatatggaccgtggagtaatgaggagcaggaaactattgatgcaatagtaagagcaagacagctaccattgttgaactagttcttgccgggtatggagatgaaccatgggaacatggtctaacattttgaagacaatatatcctgttgggaaatatgacaattttgagcttgtgaattttaaggatgttaatggtctgaggatagcaactgagagaatggtggcaaaatttaaattgccagcgctgatggaaaaccgtaccacagtacagagatcaagtggtttttaactttt

SEQ ID NO: 376142 - DNA, 308 bp, Zea mays
ttttcacgtagggagaaatcgatccaactattcgattagtaggacctacatctttggtgtcgatgattgacacagctaatggcattggagtcagaacttggatgtcaatataatgttcatatgttaattgactatggacaggttacccgaagggtggatacacaatatggacagtggagttaacaggagccgtaaactattggggcaatattgagagcaagagagtttccactgtggatagttgatgttgggtttggtgatgaaccatggaacatgatgcacctgtttgctgacaatatacctgctgg

SEQ ID NO: 376143 - DNA, 232 bp, Zea mays
ttttcgcgtggggagaaatcgtcccaactcttcgtgtcctgagacctacatcgtgcgtgccgatgattgagacaggaattgtaattggtgacagtactgggtgtgttatattaatgtggttctgactttagcacatggataggttgccctatgtggacatacacaatctggtcaagggagttgacaggagcagtattcaattggtgcagtagctaagagcaagaaagtttct

SEQ ID NO: 376144 - DNA, 270 bp, Zea mays
tttctcgcgtgcgttccgctcgagagaccctgatctggtttgctaccagcagcaggcctcccgctgcaaggcacacgactcggaaaagggtatagcatggcccggtgagcagcactggtagggcttggactctctagagagtttgctcggggatgaccggaagagtgtgcgcaaggtatttgatggcagtcggacgatgatgcaagcggccagatacgacgacagggactgccttcaccagagctaccccgatctgaagaagtcccttgg

SEQ ID NO: 376145 - DNA, 423 bp, Zea mays
ttcacgcgttcgggttgctctagatccgttcatactggtggttttgtgaggtcgtaagcggtttagcgaattacaagatgctggacaagctgtgggactacttggtaggccggccctcgtccgtagacgggtcttgagaagtctctgcaaggccaccaccgcccgcccgttcgttatcaacaaagacgcggacggcggtagctacaagcggtcgcagtcgatgccgattgtccccgacgacgccggtgacgccgttgtcgttttcgtctatgactacgccgcgcggtgccggcttacgtgtggtgcagcgtcatttacacccggggagcaacttggccaccaagggcatgggcgctcaccttttctaccggtcgttacccaactcctccacccgtttatgactggctctacagcgacgagacc

SEQ ID NO: 376146 - DNA, 315 bp, Zea mays
ctttcacgtagggggagatctcaccacctcttcgagtggaacgacctatatgtttggcgccggtgatcgacacagcccatggctttggggactgaactcggaggtcactagaaggttcttatgatatgcgactgggggcagttgacccgaagggtggtttcacaatatgggcagtggagttatgacaagcgggaaacaattggggcaattctgagagcaagagaactaccactgtgaacagtttttgtcggggtcggagatgaaccatgggacatggtgcaccagtttgatgacaatattcctgttggggaattt

SEQ ID NO: 376147 - DNA, 238 bp, Zea mays
ctctcacgcagggagaaatcgctccaacttttggaggagtacgacctgtaccttctgtgccgacgatcgacacagcatattggtattgattgactgacactggtgctcattttcaggtttatatgttaatagtctttggacagtttttccgaagggtggatacacagtatggacagaggagttaatgcgagcaggatacatatagaagcaattttaagagcatgacaactactactgt

SEQ ID NO: 376148 - DNA, 188 bp, Zea mays
ttttcacgtagggagaaatctttccaactcttcgatttgttggacctacatgtttggcgccgttgattgacacagcacttggaattggtgactgaactgggtcatcaatatcattgtttcttatgttatgcgccctaggggcagtgtttccctaatgggtcgattcacaattatggacagtggagtta

SEQ ID NO: 376149 - DNA, 223 bp, Zea mays
ctttttcctagggggacacatgacggaatttgggactggtatctcgtccgtggtgtgcgccgtttatggacacagcatatggcattagtggcatgactgggagttgtgagcatgttatcttggatttgcactttttgcgcgtgcccggtttggttgactcaagaaggagatctataacattagtattcagcagccacttttgacacgggctgcaaggagaacc

SEQ ID NO: 376150 - DNA, 303 bp, Zea mays
tttctcgcgtgggttcaactcgatccacctcgagctggagtacgaccaacatattttgcgccgctgaatgatacaggacttgcagaaggggactgcactgaccgaggagaaacagatgatgtgattgtacgcgatggacaggttgccctagggggccatgcacagtatgtacaggggattgcacacgagcaggatactattgatggaggcgtgagactaagacaagtacttctgtcaattgagcttgccgggtatggagatggaccatgggacatgatgcaccgaggggatgacggactacta

SEQ ID NO: 376151 - DNA, 439 bp, Zea mays
ttgtgctcgacgcgcacatgacggcgctggccactggggtctgggccgcggagtacgccgcgatggcgggaacaatggagcgggagctgctgtccgtcgagctgcgcgccgcgcagcggtggtgcgcggtttttgcgcgcgctcggttcggccgagtggagaaggagcgccacaccattgttatccagcaccagttcgacacgggctacagggagaaccacctattacacgcggcgcgcgcgtacgtgggcacccggatcgacccgcgcgccatgcgccgactctgcctcgcgcgcttccgaaccaaggagcctgacagcagctgaaggcggaacacgttcctgtgcatggagtccgggggatacatcgacaacgtctccggtggcgttgagtttacgtggaactgagtccagaccgagggtgacgacaagaaggggaa

SEQ ID NO: 376152 - DNA, 310 bp, Zea mays
gtcttccacaccaccttagctcggccggtggcggtctgcttccgaccgtccgccggtttgcttgcttgcttgcttcatctgcctccgacgcacctcgtctccgttcagccagccagccagcgccaagtcaagcgatccggccgcacccagactcgacctacccggccgacccgagagggcggcgcgttagcccttcaacggactcgcctcgcctcgaggtgtgagcttctccgacatctgctgcggtgccgccgtttcctgcaagaacaggtatctttcactttttcgcctgcaggagtgagtttgtgag

SEQ ID NO: 376153 - DNA, 100 bp, Zea mays
cttttgcgtacggtgaaatcgttccaacttttggattagcaggacctacatcttttgcgccgatgattgacacagcaaatggaattgttgtcagtaactt

SEQ ID NO: 376154 - DNA, 115 bp, Zea mays
tgtatgcgtggaccaagcctcgcgagtcctgaggatggtcatcatcgtggtgccggtcgactagaagctcgataagctaagtgccgaggtcgccaagctctaccagatcagtgag

SEQ ID NO: 376155 - DNA, 325 bp, Zea mays
gatcgcgagcggccgccctttttttttttttttttttttttttttttttggataacacggtggttaataatttgaacttccggttataaccaaaaaaaaaactttattagcgcgaggaaccgaggggacaaaaaaatgaaccgccggaaaacaaggaaaaaaaaactttttatgccatggggcccggggccagccccccagaattaatccaattttctacagggaccaaggacccccccccatcatgtccccttctagaaacccttttaaacccaagtggtgagtctgaacaagcacccccccaaccccttgtttttgttcgccc

SEQ ID NO: 376156 - DNA, 456 bp, Zea mays
tcgcattgacatcacaggaagaaccaactatctacattaccacgtgatacacggagaaccatgccgtcctcctccctcgccttcctcatggcactgctgctgctctcttgtagcaccaccatgagtagcgcggcacggtacctggaggaggagaccaagcctgcaccgcatcccaccaccaccaccgtgccagagctccccaagcctgaactgcctccacaccctacagtgccggagctgcccaagcccgagctaccaccacaccctacgactgtgccggagttgcccaagcccgaactgccaccgcaccctgctgtgccggagctcccaaagcctgaactgccgcaccccgctgtgccggaggttccgaagcctgagctgccgcacccggagccggaggtgccaaagcctgaactgccgtcaaaccccaccgtgccagaggtgccggagcacgtg

SEQ ID NO: 376157 - DNA, 423 bp, Zea mays
  unsure (1)..(423): unsure at all n locations
tcggcctgagctgcccggcgcctctgtcctcctccgggctccacaggccttgccaggcatggggttggccttgttgaaaccaccagatttgtgcctcctagaccccagttcctcggcaacaaggtaacctccgtgcccctgctccctttcctgactgctggtgatgaggatgatcctatccggtgcctcctctgtgaacgcctactcctgggcccctgcaactaagagcctccgccggagtcgccgcggagaagctgctgctcgccgtcgcagccgaggtaaacatccgtaacaaaaaaatcattgccaagcccccctccctcttcattcattttgtcgttctagtcagttctctgattcgactgctgtatattatttatctttaattggctntatttatntatttatcctactgggcgcaag

SEQ ID NO: 376158 - DNA, 256 bp, Zea mays
tcggtctcaaggactaggaggacactgttattagtcaccgcgaggttgccagatgttgagagcagaggccagcagatactacagcattctactgacacggagatagcattggaacagtgttcttgagccatggttaaggcgaagactgagatgatcagtgtggtgattggccatgtcctctgtcgcaagggaaggaatgctggccagcaggagtacgagatcggaagagtggacaaggaagggattgacagggtcc

SEQ ID NO: 376159 - DNA, 347 bp, Zea mays
tcgacttgttctagatcgcgagcggccgccctttttttttttttttttttttttttacaccaaacaatcatcagattcactaaaccctactctgttcttcatcatggagagcagaggacgaacaagtacaaaaaacacatgtacgaggactcttggctaactaaattacctagcagctggttttttcttgacgaaacaagagcgatgacctgtaatcgccatatacgtaaaatcctgcatatcagtagaacgacacggctagggaagtgagcgcgtgatggtcatggcacgcagacgctgcgggacggctgcgccgtcctgtcgacggcgaagagcctgcggaagag

SEQ ID NO: 376160 - DNA, 367 bp, Zea mays
  unsure (1)..(367): unsure at all n locations
atcgcgagcggccgcccttttttttttttttttttttttttttttttttttttttttttttttttttttttttttttttttttttttttttttttttttttttnggggaaaagccattgttgtaacaatgataatttttgggttgggcccatgtaaccgggggggaaaaccgcggggggaactcccccccaaacccccatttgtttgaaatccctgggaaacagatgtttttttttttaaataaaggggggaactccttaaatccccttttccagaattccccggccccgggtgggggggccccaccccctgaggaacccctcggggtcaggttgggtggaaatccccccgttctcaaaccggggga

SEQ ID NO: 376161 - DNA, 467 bp, Zea mays
cccacgccgtcctctgtcaccagcccaccacctcctgcgccggcgctcctccgagacgcagttcgcctccggaattcgatcacttcgccgccgctctcgcctccgcccccaggccgcgaagtggcgagaagccttcccactgagcaaaggtcctaggttcgatgcagcctctcggcaaaatgcaggctggctaaatacaacaatgatggagaacaggatgactttgaatccaactgatcttgatgattttgacaaggtgaaggcttctttcatttggatttaacccgtatcggcttctactacttctacagtgttttgtctttatggattgcagctgcagcagttcgaacaactgatttgtttacatgttcttttggggacttgagactaaattacattataattttgtccagagaaaattgccatcacctaggttccagggtgagggtgtcctggtagattacgat

SEQ ID NO: 376162 - DNA, 104 bp, Zea mays
cttaaatacagtttgaagtagtattgaagcggtgacaatgatgataacctattttagtgctgacaaaaaatgttgttataatctctagttgttacaattcctgc

SEQ ID NO: 376163 - DNA, 465 bp, Zea mays
tcggttttagatcgcgagcggccgcccttttttttttttttttgacgagaacaacaacaacaacagcacacagctaatatttcacaagaaccatcatcaggcaatagatggatcggtacaagtacaacattgcaatggtgatcaacttgctgttcagtagtggccccggtggacctcgaatccgacgagcgagcggcagtagccgacggtggccgcggtgagcacggagctggtcgagccgcactcgctgcccaccagcgacgcgctggaccggtccagcctgacgcccgcccacggctgcgccgggtacccgtacgcggccgtcgacggcacgccgacgtgcgacgacgagcgctgcatcttcctgggcgcgccctgctgggcgcggagcctgctgagctggcgctccagcgcccggtcggtgcgctggcgccgcgcgctctgggacccggaccttgcgcggga

SEQ ID NO: 376164 - DNA, 342 bp, Zea mays
tcggcggccgcccttttttttttttttttttttttttttttttttatttcaccatttgcagcatcatattgaaaaaggccgtaacgtgcttgtacaatacagcattctttttgagttacaacatacaacagcacatgtagaccactggcgtcccggaggaccttcaaaatcagaccaaaatttaaggggcctgccgacaccgacaccgacctaaccaaagcctcaatccacatgatcatctactacgacagcctgattgttcgagaacaatggttcccttttcttggggaaaccagggggctccatacctggccccctgtacttgatctcaggagtacccct

SEQ ID NO: 376165 - DNA, 305 bp, Zea mays
tcgcctacgcgtccggcgagcggccgccctttttttttttttttttttttttttttttttttttttttttttttttttttttttttttttaggggacaaatcactgggggggtcatgcttttgattccttcacaggaaccaaagatgcaagggacaattgttttgttttagcccaaaatccacatggggcttgtaaggggcaacttgtgcatgctttttttcaagggttacatttcaggctccaaatgccctggaaaatggttcttaacctggttccgccaagcctttttacgaaccgtttgggg

SEQ ID NO: 376166 - DNA, 500 bp, Zea mays
  unsure (1)..(500): unsure at all n locations
gtgttgctgttctcccagtgtctctgtctctgatgaggttagtacctgcactgctccgccatgctctccgccgcattcctcacccaggcttgctcgcagctactactgttgctttcggcactggtctggctggcggctcttggctgagaaatatcaaaaacattgccgcaccaccgtccgctgcgctgcggctggatggagatggattccgccccccccgcccgcttccagatcccatctccgccaccaatttagaaatggacgccccggattggccgccccccctccttcccttcattccttccaccaccgccgtccaaggatgttttggtgaactcaatcaaccgtcgaggcgcttcacgttccttccttccagcttccacacgcaaaggcaaagctcagtactctacctgcttcgcatctcagcagcagtgctgtcagatgactggacttatttgatgctcttgccgttctcgacttgnggcgcgagccgatggatc

SEQ ID NO: 376167 - DNA, 236 bp, Zea mays
gcgtcgccgtcgacgccggggaagccgtactagtaaaccacgccttggccgctcgctcgcgctgcctcgccgtcgccgtcgccggagtataatacttttccagccgccagtataatacttctccatgcatccatatccatctagtattttttttctcttggtttcgattttttttctttctttctttgtatctcatgatgagtatttgatcaaattgaatcaaagagttgctatgt

SEQ ID NO: 376168 - DNA, 399 bp, Zea mays
gcttcttctagctctagctaggctcgtctgctgcaagaaggtaacagcgcaggcatggaggggaaggaggaggacgtccgcctgggcgccaacaagttctcggagcgccagcccatcggcacggcggcgcagggcacggacgacaaggactacaaggagcccccgccggcgccgctcttcgagcccggggagctcaagtcctggtccttctaccgcgccggcatcgccgagttcgtcgccaccttcctcttcctctacatctccatcctcaccgtcatgggcgtctccaagtccacctccaagtgcgccaccgtcggcatccagggcatcgcctggtccttcggcggcatgatcttcgccctcgtctactgcaccgccggcatctccggcgggcacatc

SEQ ID NO: 376169 - DNA, 294 bp, Zea mays
tcgattgttggcagaggcccaaatcatctttgtggtgaaagcatggatcatagagccgagcctgatcaagcacagctcaatcgagacgattcccctggacaggctcaagctcaagctctcttcgaacttaaataggacagtgctggtcaaattcacgaggctggaaaatacagtgtgggtgaccacgcagccaatctaatacatactgtccgtactggttatggacaacgtcaagcggaagcctaagcgcacgacctattttaggaattctaagggcattcacgagaaccctaa

SEQ ID NO: 376170 - DNA, 342 bp, Zea mays
tcgatgtttcggagttgcgcgtacgatttcggacgctgctacagtcactcagggagcacttcattggtagctggtacctccatgcacggtcgatcccggacaggcacgaggaaccatggcggcgaaagggaaggaggtttatgttggcgcaattgacgagggtaccacacgcacccgggttatcgaatacgaccaactcgtacaagctgtcggatcgcaccaggtccagttcaagcaacactaccaggtggaagactggtgtgagcatgatcataggcggagtatagagactgatggggtgtgtctgaaagaagccgaaggcaaaggccaagatggtagaca

SEQ ID NO: 376171 - DNA, 343 bp, Zea mays
  unsure (1)..(343): unsure at all n locations
gttcctgatcgcgagcggccgcccttattcgctggctcttgattgtttcatgtaatttttttcatatgtagaaaagaaagaacggactcgggtcacactgtgtgaacgatcagggagcctagtcatcaaccaaggagtcacagnggggaaaaccggagaaccgtcctaccggcggactgaccctacgaggagatgtgaccacactgggtctaccactcaaggggagatgcaccaatagactacaagacatcgctattagtgagttccgccctagataggtaagtggggtaataaccaccaccataaacagtcgttgaagagggggtaaacaaccccccctggt

SEQ ID NO: 376172 - DNA, 340 bp, Zea mays
agctgcccggcattcggtggggtgcccaactacatgactgctacaatgtcggcgtccgccaaggcacgggcactggcgcacctgcaggagcaggagaagaacaaggacccccaggagaagcccatgttctcgttcgggctggtccagaggatggggagctgcgccaagagcccgttgtggaaggacgctgtgccgtcgcagagggtggccaccccgacggagcctaccgccgtcgggcgacaccgatcgacgcggtcgatcagcggggttagcacggactccaccgtgtccatgccagccgggctcggcacgaggtcctttaagtagatacacatgcagg

SEQ ID NO: 376173 - DNA, 442 bp, Zea mays
  unsure (1)..(442): unsure at all n locations
ctttgctatcgagctgacaagagctatgcaatcgagctgacaagagctaagcaatcgggggagttcactgatgtcttgcttcagcgccatgaccactacgactgtcggcagaggcacctactactactcgtcctcgccggggcggtcccgcggcggcggcggcggcaagaggccgtggcggcgttggctcgccaagtgcgccggcatcgccgcagccgtcgggtccaggctccggagatctgtcgtcagggccgtcgacggaggccgctcggcgcacgccgccgtcttcgtgctcatccgatcccgcgggntggtgccaccaccaccaccacggtcgacgaagcttcggcccgtctacgtttgacgacctctacagtcacagactacagccggtagccaaggcccccgcggcgtcgtcttgcgagaggagcaggtgcatgag

SEQ ID NO: 376174 - DNA, 361 bp, Zea mays
ctgcaggtaccggcccggaacttactggctggaccgacccacgcgttttttttgccgctgcggagccactacggagatgactgacctgtgaatcccgggaggcgactggactcttgtttgactaccatgaccactacgactgctgctaaagcaccgtactagtactctccctcgcaggcgcggcttctcgtctgatggccgctgacgaggaggcctcgggcctaccttgccacactgacggtgatcatcggatgcgcctacactacgctgacatgcgctacgccgacgggcatctactgaacgggcttgcgctcgccttctccgtagaggtgacattgacagaggtgctcatggctactaa

SEQ ID NO: 376175 - DNA, 462 bp, Zea mays
gttctccgtcggtcgcggtcttttcccgtccgccccgcctccagctcccgtctcccaccccaacccggatctcgcgcgcgacgccgcgcaggcgaaccccacctcctctcagaagcctctagaagttcctcaccccgctcccgcgcggatgagtggcagctcgggccccctcccctactcgatgcgcgatgtgggtgctggcggcgcctacaacaacgccaagttccgccaccggtctcgcctcaggatggttctacagtccttggctactaacagaagcaaataccattgtggaaagctcactgttggtaaattcttgagcctgttgatggtttctggcttattgtacttatttatgcacaaaggctcagagggtattgtatccagtgagcttcatggcaaagaagtacagaataaaaatgtagggagatctcccagtatacgcacattctggagaaaacc

SEQ ID NO: 376176 - DNA, 455 bp, Zea mays
tcttggctgtagccatgcgccagcgaaaagctttgatctaggcgaaagttttttagacccaaaaagattgtggtatcgatgaaaccatggtttaaaatacaaattttctaagtagtcttccaaactcctttttttgtctaaaataccatatatcctcaaataccatagtattgtcttcgaactagaaaaatactatggttgcaaacggaccctgatatgttgtcatacttaagacatgttctaaacctttaaaactaataattagcatctagctaagagatttagaatgagtcagataatagaacaattaattattagttatatctcttaaatagctattagttgttaactgctctaacccagctaaaaccatctaacaatttattagctgactaataattagctctagaagtctaaaacgatctaaatttagaatgaaaccaatagtatttagt

SEQ ID NO: 376177 - DNA, 444 bp, Zea mays
tcccacgcgtccggtttgcattgcttgatttggttttcttgtgtgtagaaaaggtcagatctattgttttaaattaattcatttgacagtcagtggaaggttctttgctacttgcattcctgtattaatgtgatatcttggtattacagtgctaccacttatttctattgatgatttatgcggcatagttgtcacaacgatgcttaggcatcctgttggttgttgatgtcgggttcatgctatgatccggcatctttctgctctatcttgcctctggttctgttcaatgttgtgatctacaggcatcatccccatctggccactagtgcaatcttctgtacagagcgctgaaggaaagctagggcgctacttaaaaacatgatatgtcaccttgagtatgtttgaggaatgtattaattattctgagcattggtttctgtaggt

SEQ ID NO: 376178 - DNA, 184 bp, Zea mays
tactacactggagcagtatgcgatatcacagaactgctagagaactggtactacttctactacatgggcagaggtcaccagcaccagctgagaggactacgactacatgcgactggtggcgacatacctaatcgagtagacgtacctgctgcagttgtatgggcaggagcagatgcaacgcaga

SEQ ID NO: 376179 - DNA, 463 bp, Zea mays
  unsure (1)..(463): unsure at all n locations
taactttatgttatttgttttttaaagtaaaaatgcgaactttgttatgttttagcgctttatggctatttcaaaagtttatttattgtctttttggctgcctttggtatcatgatcttacgagaaactaaaattatttatatttcccgaaactaaaagagctaccatttcaactttctaactgtagcattagttacaaaaagaactgagtagttactagaactttttcgattttagttatacctggtttacggatttaatgtgttacacttacttctaggtgaggtaaatcttgtaagggtaagctttgcaagtgaaagctaaatttattagttattttaagaacaagatttatangtgatctttattgcgtgtcattatagctatctctatattttattttaatcttaactttattactttttaatcccgatttttcaatcaattacacattgtaatcaat

SEQ ID NO: 376180 - DNA, 448 bp, Zea mays
ctgttgttttagaggtgtggggagatgtaccgtgggggccttgaccgcttcaagaaggcacagaccttggagcccttctcagtgaagtctgagtcaggcaccaagaaggcacctgcagctgcaggaacagctaatgcactggctccgttgacactgccactggattctaattttgtgccaggtcagaaccaccaaagtcctcaaggcaccatctcaagggtggctgggcaagatggtgatgctccagggcatgttgggacacaggtcggtggagggcagtcgacgtggcaacctccagactgggcgattgagccgcgcccaggggtctactatcttgatgtggtgaaagatgccagaggtcattgacaggatcaatctggacaacaggaggcatctattggggaggcaggttcctgcttgtgacttcgagttggaccatcaatctgtg

SEQ ID NO: 376181 - DNA, 420 bp, Zea mays
  unsure (1)..(420): unsure at all n locations
cgttgttttgtattcatgccaacgcagacaggagaccaagaatgcctatggatctggcttgtttctgaatgtccatgagctggagctgcaagcataccaatcaaccgtcagagctttccatgctgcaggacccctgacatgggagcaagagtcactcctgacaaacctgcgcctctcgctcaacatctcgaatgaggagcacttgcttcagttgaggcatctcctatctctttgataattttcaaaaactaatgtgccttttttatatctgtggattacctccaacccgtagagatctttgcatgcttgcagcgtatgtttcccaccttgactgttgtatataaagaagagttcagagaaatccacttatagctgttgtacttcaccaaanaaaaaaaaaaanacctacntggcactttt

SEQ ID NO: 376182 - DNA, 432 bp, Zea mays
tggtcgcgtgggcggacgcgtgggttcgtggtggcgccgccgccccccgctaccttcgttttgcgaggttccgattcgccagctgctggagtgaggtggggagcgcgtgtcgtgggattcccgttcggatctgcggagggggctgctctcctgctccaatttggttggccggcaatgagggtccttgaatcttgttgatgcgctgccagatgcgggaggagtactgggcgaaggtttcttgaaatcttcgtctgggctccgtggagtgaggtccctcgccgggatcgccctgtcgtcctatgggctgtgtcagctccagacaattccacggcggtgacgaccgtggggacggcaagccgcgccggcggccctcgagcaactcgctgaagcgcctgattagcttcagttccagcaagaggcatgaggagttag

SEQ ID NO: 376183 - DNA, 455 bp, Zea mays
cccacgcgtccgcccacgcgtccggctagcctagcactagcagctgcagcgcctggcctcctccctctctctctgcctcttccttcggccatctcagtatacggctgagagagagagagagagagagagagagagagagacggcgagagataacatggaagagagaggggttccagcaatggggagaaccttgttcctgccgctgctgtggatcgccatgctgacgagtgctgctcgcgtggtgcaatgtcttccttacgactactcgtccagctctgagtgcttgccggagccgctggagcctcagtacggcggcggcatcctccggaacgccaacttcagcgcgggcctccagggctggtcggcgttcgggtacgcgcagtggaggaaggcctgtcagcgaccggcaacggctacggcgtggcgcggaaccggacgcggccgtaccagagcgt

SEQ ID NO: 376184 - DNA, 349 bp, Zea mays
tgtttccccctccggttcgggttcgggttcgtgaggttctccggggttcgggttcgcgggtgagcggatcgagatggcggcgtcggatgttgagtaccgctgcttcgtcggcggcctcgcctgggccacggacgaccactccctccacaacgccttcagcacctacggcgaggtcctcgagtccaagatcatcctcgatcgggagacgcagaggtcccgcggcttcggcttcgtcaccttctccacggaggaggcgatgcggaacgccatcgagggcatgaacggcaaggagctggacggccgcaacatcaccgtcaacgaggcccagtcccgcggcggcccgtgaggc

SEQ ID NO: 376185 - DNA, 454 bp, Zea mays
cttctttccctctgtataccgcgagcgcccgcagctagctgctagccgcgcgcccgccgctacctgcccgcctccagcgcgcccgccgcgcgtgccccgccgccacccctcgcggtgatctgtgtgggcgacgtccacagctacatcacgaagctggagagcctctggtccaacctctaggccgcactccccgccgacgccttggccaccgcgctggtcatcttcctcggcgactacaacgaccgcggcccgcacacccgcagggtcctcaacttcctcctcgcgctcccgacgcgctacccagcgcagcgccatgtcttcctctgcggcaaccacgacctcgccttacggcgttcgttgggggcgccgccgccgccgcccaacggctccccgttcttcggccacctgcgcagcgccatctctctttcctccctatctcgctgctccctcccct

SEQ ID NO: 376186 - DNA, 121 bp, Zea mays
ccgggccggactggctggatcgacccacgcgttttttttcgcgtacgcctaagatgcgagtgtcgcgggcttaacccttgcgtatgcttcgacatgaccatgggctgcgtcaccgacgtcc

SEQ ID NO: 376187 - DNA, 407 bp, Zea mays
  unsure (1)..(407): unsure at all n locations
tcttgtttgcgagcggccgctcgcgatctagaaccggacgcgtgggcggacgcgtggggaatgttctggtgccagtacactcgtttagatattttaaattatggttgcttgatttgggtagcagtagaggcttccttttgaagcattctagtgttgtccaccttttgtactcctttagtctgtcaggtttgaactacattgttagcatgtctttccaaccattttctgtttcttttctttgcaagttaacgtcaatgcagcttcagtattgttttctacanaaaaaaaaaaaaaaaaaaaaaaaaaaaaaaaaaaaaaataaaaaaaaaaaaaaaaaaaaaaaaaagaaaaaaaatttaaaaaatactaaaaattaattgggggggccgttttagaggttccaagtt

SEQ ID NO: 376188 - DNA, 533 bp, Zea mays
gacgcttacctgaccgtccagatcgcgagaaaccttgtcgcgagcgcggccgctgatggtggaagccgagacggagcgacggacgacgacgacgcgaccttatctggtgtcggtcgaccagcagccgtccgcggctccgcccgacgcgatgtccccaaccggcagccgagcgcggattgccgaagcaccacactctcctcgctgattcgtgcggccgccctccgaagctccgcccgacgcgacgccaccactgcttcacgacggcaggtggcggagctcgttgcgcgccgcgcgcgtgcagacgtcggcgaacggggctcccgggacgtccgcgctggccagtcgtgtctggtctatggaagaaatagccgagcgaccagatattagatatccatctattttcctctagtcccctattgaccatgatattcttatgtctcgtttttttgaaaagagatggtgcaatgtgacgaggtgccctccgggttatttcaaggatgaaagcattgataaaattttggtgccaagaatga

SEQ ID NO: 376189 - DNA, 312 bp, Zea mays
gatcgcgagcggccgcccttttttttttttttttaacatagacagagaatgtggacatctgttgaaggtacaatgatgcatccttgcacaaacaacgaataatgactgtcttgtgacgcgttacggggtcaaagctaatgagcatactgggccgactcttatgtgcacactaggggtccctaatgcaatctataaacaaagcgaaggtgagtttgctgaggaatatgagattgcttgaattattcgattgcttacagtacatcaactgaatgctcaacaatttggcaagattatgctatttgtaaaggacat

SEQ ID NO: 376190 - DNA, 437 bp, Zea mays
ctagttctagatcgcgagcggccgccctttttttttttttttttttttttttttttttttttttttttttttttttttttttttggaactaactcaaacatattaattcatctgggtttcgaacctgcaaatatgtgaagaacacactcaaaccctgtccattggaaccctaccctggcctgaatactaaaagggcgcctttgtaccgttaccacgtgggtcgaacaatagcagcatcaattaatgcatcatatcagtcaggcgttggcctccacgtcggcgtcgccctttttgacgggctggaaccgggcgtgctggtacaggacggaatgcaactcgacgggggtggcggacagggacttgatgatgctcccgaacccggggcgcggagacaacaggggcccgcccggcggcggtttgggcaggctctgcccctt

SEQ ID NO: 376191 - DNA, 356 bp, Zea mays
gcgtgcggccgccctttttttttttttttttttttttttttttttttaacaaaaaacacagaatcagattcaatagttcttacacagaaacattgcagcagaaacgatcaagggctgtttaaaaaatctatagcatgtctaagcatgaaagaaaaaaaaaaaacaaatggggtagttttcgcattaaccataagaagacatgtttcaataccaggggatcatgttttccacgacgcagataattaaccaaaaaaaggaatatttcatgcaaagggtaaaagaaccctctatttccttcaagcaagggtcggttctgcactcttcccaccctcaccaccattaggagaagatacatt

SEQ ID NO: 376192 - DNA, 494 bp, Zea mays
tttgatgactaaaagttcgaataacctcgccgtgttcataattcttttacttatggtcgcagcttcctgtaggaggagattacagttcacatttgaaaatcttcatactgaggctaatgataaagttgctgcaatagcgggagctggaagtgcatctgtcacagggaataacccttctagttctcccctgaatgatcccatatcaagtgtgagtttgaagatcaagggcaagaaatgcgggcccgaattcttccaaaaactgaacgaaatgcttagtaaagacaccgcttcaactgctgccggtctagcgcaggttaaagaatacctagaaacgtatttcacagttagtgacgaggcctgggccacaatttccaccagcatcaaggaaaaaagtttaatgactggtgatagtgtgaaggaagatagagttaccaatatccctgtcacctccagagtgtggactgccagttacggagatgccgcgaaaaattcca

SEQ ID NO: 376193 - DNA, 333 bp, Zea mays
  unsure (1)..(333): unsure at all n locations
cgataaaggaagcaatggctccgtcgctcgcgtcgacggcggggctcccgagctgcggggcgcggcgcggcggccggtgcgtggcccgccgcgcgtccgcggttgcgactccggcgacggcgacggcgaggacgcactacgaggtgctcggggtcggggccggcgcgagccggtgcgagatcaaggcggcgtaccggcgcctggcgagggaggtgcacccggactgcggcggccgcggcgacgaggggttcatccgcctgcacgccgcgtacgccagnngtcgggaccccnccnagcgcgcgcgctacgaccgcgccgcgggggtccggagcc

SEQ ID NO: 376194 - DNA, 423 bp, Zea mays
gtattagatcgcgagcggccgcccttttttttttttttttttttttttttttttttttttttttttttttttttttttttttttttttttttttttttttttttttaaacaaaaaaaaaaacctttttttgttttaaaagggacagtttttttttttggctttccctacctttttttaaaggttgggttcacctaaaaagggggttttaaaaggttcctttccccttttcccgggaattaaaaaccccctacactggaacaccggccctccggggcggaagcccggccccacggggaacccgacctttggggggggggccggttttccgggtttcttttttcccgggggacccttggacgaccggaaaatgtttttcatgtacacaattgagaactttgggccccgggcaacctggaataccc

SEQ ID NO: 376195 - DNA, 430 bp, Zea mays
gtttatggaggaagtctggtactaatagtggagtcgcatcgtgttgttgtgatcatggaacttcagtttctagaatcttgaggccatgtgtctgtgatgcaaccttcctcagaagcttaacctgcacccatctcccgactttacattttcctcgaatcaccaggcgttgataattcagcagtgctgtaactgtagttcaacaatctcactgcattgaaacatgcttctgctggtattttatatgtaagtgttgggggtttgtttcaaagggagctgatttgttaggccgtggttcctccgcagacatggcatccaaaggaatgatgctctagagttacatttttgtagctgtattggatgaaaatgtttgtacaaaagctaactttattcttttgaccaagactggccacagacaggggttgatatacct

SEQ ID NO: 376196 - DNA, 479 bp, Zea mays
tttcgcatatgttgccttcatccatcctccgagcttaccgtctcgcccccgcccccaaaccctagaccccctacaatcacgaggaaggggagaacggccgaggaggatgctccgcatggaaggggaggacggtcgaggatgacgttgttgctcgtcgctgagcatcttcgcgccctcagtgctgccaaggagccctctctatccctgatggcgtcccaaccgttggccgatcgtcggcgatgatgacccagcctccctctccacgtgcctgctgcccaactcatacaggtgttgtggcgccctcctctccactccgctatctattttgttgattgatgtctactttcttcgccgctctggttgcggcacgattggtgcaccacctcctcgtgcgaggtgagggcaagcctgcacatgctcaacttcattgacaacctcacctttatgccactctgggagcatgccgagtggcgatgtga

SEQ ID NO: 376197 - DNA, 489 bp, Zea mays
gccttcttcaggtcaccaacctaactacatgggatttgacacctctgcaaaccaccatggttatactgatgtcaatggtgttgcgagtactcaaggctttgtcccaatgcaaaccacgtaccagggccagaaacaagcaaatgcaacctcacaagggcacctgtcaaatagctatttgggtactgacaactccatgaactttaatcagcaacaatttctgggtgcaaatgcctcaaatttgcaattcggtcactccccgcatgaaggtaggtcatcggctggacgaccaccacatgccctcgttgcttttgggtttggagggaagctcatagttatgaaagaaactacctccatgcctgcaagttttaacagtggaaatcagggtaactctagtagcacagtgtcggttcttaatctgttggaggtagtctttgataaagttgatccttcaagtgtcactaatggtagtgcacttagttatttccatgc

SEQ ID NO: 376198 - DNA, 507 bp, Zea mays
  unsure (1)..(507): unsure at all n locations
agcattctgagttgcaacgcacgggcactattctttttagatgatatttattcaatggtactttattcttacaatctactagcacaaataaataagacattgaaacttgacttatgattggagatagtngggttgttctgtcatggatggcacttttgcactaagttttgtgagtgcgtgagtttattgtagtgttttttgtgtgtatgggcaggctctgctttcataggggctccttacccccctctcattttctcatattcttaatataaaactatgcagctcttcttcgtttcagaaaaaatacagttatccatgtatttgatgttatatgatacaatattctgtgggtttcttgtaatcttgtgttgctatccgttatgcaatagtagaacatgaattaactatntttgtttagggtatgtattaaaatgattgttttatactatagaggttttgtagactccagctatagagctatgttagaagattcaatttttttggaac

SEQ ID NO: 376199 - DNA, 445 bp, Zea mays
cgtacgcgtgggaaataattggaatgactcatgggttgagaaagaagagcggaaatgggaaatagctttgctggtagtgactgtggtttgctatctttctacattggccttctctggtgtgctcttcatgtggtttaatccatgcggtcatgactgtggtctcaatgtgtcctttatcgtcatgacactcatccttgcttttgcgtttgcaatagttgctttacatactcaggtaacatacctgttcaaacatcaaatctctttaagctataataagaacacgtatttatgtgcaattttgaaataactattggtaggctccaagaaacctgaatcatttgatttcgcttaatgatccaaatttgtaatgcatctgtccatagagatttctgctgatgcctcataaatcgatggtgcttatatgcgtaatggaataccattttgt

SEQ ID NO: 376200 - DNA, 504 bp, Zea mays
atttgtatgtttctattattgagattgatgtcctcttgtacatagttgcacggagttgatgacaacattggcaagagcaagaagatcctggctgcaatgtcaaagaggatggataggaacaagtggatcattgggggaattatcacggctctcgttctggccatccttctcatactctacttcaagctcgctaattaagcctgcctgcaggtaacagcaaaaggtttgaggacgctgaaacaagaaaagaggcgggacgggacgggacggggggctagcgcgtacgttttggtcttgtgcggttgtgccttcagccttgtgttgttgtgaagcaaaagcctggaggtagtaacaagtaaaacctgtcacaacttgtcccctgtgacagcacgggcagcaacttgtgttacatcgatcgatcggatatccctttgtttgacgaaacattcaatgcgtaacgaccgtgatgcgacgcgcaagtgctctggagtctggacagatgct

SEQ ID NO: 376201 - DNA, 398 bp, Zea mays
gcgctcacgcgtccgccgacgcgtgggctagatcgcgagcggccgcccttctttctttttttttccttctttgttttttttttttcttggtcttctgaattgaaacggccacttggctaaggctttcccgataacactttaaccatacgcccataaaaccttggccgtgtatgacaattcacaaaaacgttcttttcacaggatccaattgatgtcgggggcccctctcatgtaaagaatttcataaccaccatatatgctcacatgtgaacaggaggaatgcggctttccgacctggggccgccaggcgaagatcttgatgccgggaccgagctcctcactatgtttgcagaaaccgcttagacgccgggccggccttccctttttgcaagtctagg

SEQ ID NO: 376202 - DNA, 396 bp, Zea mays
  unsure (1)..(396): unsure at all n locations
tttgagcggccgcccttttttttttttttttttttttttttttttttttttttttggatcacgatccaaatactttttcacaaaataaaatagtctcaattaaatgttggtttcaaaaataaatagaaatatggtccgattatctgattcgattcttaaatcttatggtttaaaatttagagaccattgtcaactgcagctggctcggcgttggcggcctccagggagcggttgaagcccaggagctcgcgctggncgttgtgggttggttgtcccgctgcccgccgccggactcgacggagcggatggcctccctgagctcgcgctgggtgtcggcacgggccgcggagacgatcatgtcctcccaaatggagcgcgatccgcatgtggtggcgc

SEQ ID NO: 376203 - DNA, 378 bp, Zea mays
  unsure (1)..(378): unsure at all n locations
gcttttacgcgtgcgcccacgcgtacgcccacagcggcggacatgaatgccatcgacttgtgcggcaaccgaactggtggccaaggggagggagtcgggtgccgctctcaaggccatgctcggccagcttcctgcggcggcgacgccccatgatggtctccgggatctggccgagcatgtactacgctgatgagaccgagctctggaagccttgctcagaggcgcggaaacggaggaggctgcctgcagcagctccagcaggaagcgccgcaagcagccagcacagcggcagggcggcctggctactactcctccttgtactgctgtgacgggatccaagaggatgaggatgagccgtggagagcngtggacacgagc

SEQ ID NO: 376204 - DNA, 208 bp, Zea mays
gctcagatcgcgagcggtatctataatcacacggagctaactgtccatcctagctacattgggtagcacgcacaaggaagaagtaggtgtcctgaatgagagagggagcggtactgtactactcctgtgtcggaccgacttgcggacgggacacctcacgagcatcacatgaaccaatcacagctagcgctcagaggttcctcgacgc

SEQ ID NO: 376205 - DNA, 266 bp, Zea mays
ggttctttgatgactggtaccacctaggacccggcgggcgacttgatggaggatacaaggaccgctgatgcggcaagagacagtgaatgggggcttggtgcaaacccacaggacgaatccaaactgcaaggatcaacaggagactgtgaagagaagggacgctggagagacagactacccgaccgggccaaggctgtttaagccaaaacaacaagctgtactatacacccaagaacagactggaggcgcgtgttacacacggggac

SEQ ID NO: 376206 - DNA, 410 bp, Zea mays
tgtgttgacatcgacgtggacatcggtacgggtgactttgaggccgtgcggacctccggcctcatcttacgccgccgggtgcccacgccgactacgacatcgtcgatagtggacaacgtactactactccctggtgacgtcctcctcgatcggcatgcatgaccaggaggattaattattgacaggcactagatgagctagctagctagctagggccagaagatgtatacttctcgcggtggcatgtgagtactaaggccatataactgagcgctcttttttgaggaatcaaactaatttcggtagctaccgtaatatatatgatgcgctactgctctacctagatctgtacacgcccacgaacgacgtcaccgacgggccgctcaagatcaccaagaagagggaggcga

SEQ ID NO: 376207 - DNA, 397 bp, Zea mays
ccggagtatccgggtcgagccacagcgcccgtctacgcgttcgttaggaggaggcgccaccacggcagagatggagtccatgtacacacgcggctgctgcagatggctgatcgtggcgctgattgcggagctggtggccacggccagtatgttcgccatcatgaagcgcaagcccgggggccggcacatcaagccgctgccggtgccggggccgccgggggccattgactccaagtacggtgacgcgctcggggtcgcgctgcagatcttgcaggtgcacaaggcggggaagctggagaacaaccagatcccgtggcagtggggactcggcgttgaccgacagtaaggaagcggacatggatctttcaagggaatgtatgatgctggggatcacata

SEQ ID NO: 376208 - DNA, 498 bp, Zea mays
tgtttatccaattgtcacttgctctccctccaacaagctaattaaggccggtcatccctcttctagctcgtttcattatccatggcggaggagaagcaccaccaccaccacctgttccaccacaagaaggacgaggagcagctcgccgccggcgggtacggcgagtccgccgagtacacggaggccacggtgacggaggtggtgtccacgggcgagaacgagtacgacgagtacaagaaggaggagaaggagcacaagcacaagcagcacctcgtcgaggccggcgccatcgccgccggcgccttcgcactctacgagaagcacgaggcgaagaaggacccggagcacgcgcaccgtcacaagatcgaggaagaggtcgcggcggcggcggccgtcggctcccgcggcttcgccttccacgagcaccacgagaagaagaaggaccacatggaggccgaggaggccggcggcgagaagaagcaccacttctttcgctga

SEQ ID NO: 376209 - DNA, 463 bp, Zea mays
ccctcgcgtccgcggacgcgtggggtaatctccacagctagctcacgcacgattcccacactagctataggcagctaggctactgtatatagccagtcaccaccaaagtgtgaagtgtgtgtgcgtgtagtgcaagctacctgtaatatatatacgcttgaggcgtcacctcacctagctagctagcggctgcttcaaagctctatatgagcttggttgttgcggcgccaatggcgatcgtcgagttggccaacgcccagctgcagcagcaagccgcagcggcggccaagaaagacggcggcggccacgagctggaagatgggggcggcggacgcggacacgagcacgacgtatgggtatgagctgcaagcggagcgagcagcagcagagctggtgaggtcgtcctcgtcctacgactacgactacggcgccctgatgaaaggcgtgaggcacctctcggaca

SEQ ID NO: 376210 - DNA, 389 bp, Zea mays
tgcagggcaccggcggaatatccgggtcgagccacacgcacgtgtcctccatccagtgctccgacgtctgacctgcacaattagtccagcttcgctcgggtacctcgactatgacgatcgcatctgtgaggtcgagcgcccttccgggaagtatggaaggaagaaacgagcggatctgaacacaggaatatcatggagcatatgggctcttgctggttggtatagagtttctacctagggtgacgttgacggagcgcccactgatgcccaacattgatctacaggtgtgcactgtcaaccaggcactacctgcccataggaacaaccaccttgtgaccgacaatgtctctgagctggagacgctgatgacgcacaacataacctactgg

SEQ ID NO: 376211 - DNA, 402 bp, Zea mays
gtctattcgccgaggacagcatatttcatgtcgggcgctctcggaacttctgaccgtctgtcatggtttccgactgtatctgtccgagagatgtatgtattagtcgcggttgtgcacgagtcagtgagggaggacgacgaggagagccgtggttatcgtatcgctaacgagggctctacggttgtgcaagatagagggggaggaggtgacggggatacagccctcgtgcgtgcggtccacatgggaaacgtcttgagtgctaattacggggagggctcctgcaaggcatgctgctctgagggccgggataccaaactgtgttgaccgcaccagtgcaacaaagacggcgcatctggcatgaaagctactatgtttgcagcacaggcaattgaattgggcatc

SEQ ID NO: 376212 - DNA, 394 bp, Zea mays
ctttctcgttcggccgctccctcgagcaaatccaccagccgttcgctttcctctactatcctctccatcatgccggccggctcgccagtcgccaccctccctttcctattttcagctacagatgagcttgggcagtagtaggtgggttccgctacccttaccatcccccgagcccttgaccttgctggggatcgggaggcctgcatgcttcaacctatctacctccctgtccacatctggctccttgtctgaggaagagccggctgctggtgccagtactgctagccgggaacccaaactctagataggactggacaactgcagcgtgccaaccacgagagtttgctgttcgctctgctctcggggctcagctactgcagctctgctaggacca

SEQ ID NO: 376213 - DNA, 390 bp, Zea mays
  unsure (1)..(390): unsure at all n locations
ctttcttgtcgagttctcagcaccggccgatccatcctcctccgcctccctcggttcggcctctggcctgcacaccatgaactctcgcttccggagcctctggagagccatggctggggctttgcagccgccgtgccgcctcggagctgccgcgtgtagcttgctcgctaagcagcagctatagtagctgagcgagtgcgtccatcgatcggagtcgtccacctccgtctccctttgcgattcngacgtcgtgaactcgtgttcttgagcgtgggggcaaggggcaaagcaacaaggagacacttcttcttcttctttacaacaaataagaaagcaacggcaatggaagaggctggtctgcagtgacagtgacacgagccatggatcccg

SEQ ID NO: 376214 - DNA, 124 bp, Zea mays
agctggtacgcctgcagggtagccgcggcgcagtatccgggtggagacaccacgcgcgctttcttgtatatgaaaaaggataatggtcctgagacaagttagggtgagtatatgattcactacg

SEQ ID NO: 376215 - DNA, 432 bp, Zea mays
gcgttattttacaggagaaccccgtccccggggcgcaggcgtcgttaggttccgtgaccgcggtccaatcctgccacagatgccctccctgctcccctgtgggcgtgggcgagtagtatgcatcacggctagcggtgcagccccccggcgcgggcccacaggtgcgcaagtggagcccacgggcaccatcggctccgctgtcgcgtccaggcccgctccgcacggcggccggggggcgctgacctcggccggaggaggcctcggcgagctactgttcctgggcggcggagggcgcctctgagccgctcctggatctcaccttcttcctttcctagcagttagtgcgttctgctaaccccgccggaccccggacgagttctcaccccgagagtgactgaccgacctaccgggatggagatgaagctgaccatc

SEQ ID NO: 376216 - DNA, 448 bp, Zea mays
cacgtcgccttgttccaaggtcacacgcgcgcgttgtcgtcgccgctggaggaggagccgccgaaggcttgctcggaccagcaccagaccggccgtgctgggagccgtcgggaaccagcgaaagtcccagctggctcactgggcggcggcagcggcagcagcttcgtgtggggtgcctcgtcctcaggggagaacagtgctctggatatcaaaggttttgttgatggatgcagtggtgacttcctctcgacggcgaactttggctccttcaacctcagcttcgggcctgctgacgggttcacaggagagccttctagtggcggttcgttctcgatgctaccttctgagcactttcagagcgctcagacgatggggcagaactgaatatggataatctcagacagctttagatgtatgtatctgagcggtttagatgaccaccatcatc

SEQ ID NO: 376217 - DNA, 460 bp, Zea mays
ccctcgcgtccgttttaaaaaaaaatcggtatgtagttatctacaacgtttgacacctcctcccggacctcaagatgaccggcaacgcgtcttatcagcatctgggactgggagtcgacgccacgatgcgcagctgcttcgccagcggcgacggcagtgttatcagcagcgccgacgcgcccttcttccacgtcccggagtacacactgcacggcggcggcggctttgggtttggcgaacccgcagcggacgtcgccgcctcgagcttcttggcggatggttcggtgctgctcgccggccagctgctccgtgccaccgcactgcagagcgtgtcgccggaggagaggcacggtgcctactacggcgtcacgggcgggtcgtcgtcgtacggcccgtcgccctgggatgtcaccgttgctcacgcgcccagcaggatgaccaagcagcctgtcgctggaga

SEQ ID NO: 376218 - DNA, 388 bp, Zea mays
catatttacaaggaatttgttactgtttagcagttgggagggcatttttgaatatgttgcctcacaaaatgaaaataacaaatagttacgaactgaaatcaactgacacaaatatcatctgttcccaagttgagtggacgaaatattaacatgtgtatgtcattttcatttattttatttaattctagttgttaggctttgttctttgtagaagcaaaatccaaccacttatttgtatagtgtatttaatatggctttcggttttattgtctggctacttttccttctaattttatattattcagactatattctattgtttcatcactatatgttttcatcagttttttccttataagtaggcagcacatgacgcttttgttgagag

SEQ ID NO: 376219 - DNA, 438 bp, Zea mays
gtggcgcgactccctttcacggcctccccgcgtctcagcctacacgtccgagccgccagccgtgcgctttaagtgagcgcacccacgaaaagcagccaggcagcggagccggagagaagaagcagcagtagcagcagggccgtcaacaccatggcggtgggcgcgaccgccacgaagctcctcccgtcggcggccgcggccgcgcgccgcccatcgatgctccacctcgcggccgtcgccgtcctctgctcgctgtcctacctcctcggcatctggcaccacggcggcttctccgcggggcccgccgccggcgactcctcctcctcggtctctatcgccaccgccgtctcctgcgccacccccgccccgacgaccgccttctcgtctccccccgcgggaccgctcgacttcgccgcgcaccacacggcggaggggggt

SEQ ID NO: 376220 - DNA, 362 bp, Zea mays
tcgcgagcggccgccctttttttttttttttgggttttttttttaaaaacattatggatttctcatttctcttccttctaggatgatctgaactttcatttctgcctaaccctagcaaattatttacacaaatttcagctcaagcggaagtccacaaatcctaataaaaccatcgcgaagtaaagagaaacatcctaataagaaaaattctgatcacacgagaaccggaagagcagtgaacaagaaggaacagagaaaccgcaagcacgaagcgcacgcacggacgggtgtgtccggacggacgagtcatcaaggccggaagagcgccccgatgaagctgaggcagccgagcagcatgcggc

SEQ ID NO: 376221 - DNA, 197 bp, Zea mays
gacattggcggggggaaacgtctatgtgtcgtgtcggggcttttaagaagagttcacatttacaacagagggacaccatgtgctgaatggagttggcgattgatgaattcagcttgattagcgtaccctagtactagaccatgatggtcacgaagtggcacgatcgtctcaagcataagctgcactagaaggggtgt

SEQ ID NO: 376222 - DNA, 416 bp, Zea mays
tttacgcgtgggctagatcgcgagcggccgcccggttttttttattttttttttgtttttttttttttacaaaaaggcactcccactcccgttcctttttgcagtcatgagcttttctcattatacaatgatacagacctttgcaaccgagtaaaatataagagaaatgcttggaagacaggaatttgtcgtggagaaacaactcatttgagcagaaatcagaaaaataaaattcacggtgcaaacaatgaggcgctaattgaagaggggaccccattcatgagggtcctctgccttttgcccttctgccaacaacgggtacttccagttatacttctccagcttctccgcctccgttcgaccctcgacgattcctatcctaagcttcgccaccttgctgatgacggcggccaccg

SEQ ID NO: 376223 - DNA, 348 bp, Zea mays
cggttgcgtgggttcggcggggtcctagccgccccggccgtttctccaagcgctgtggggtcggtccacctccgccgagaaaaaaaaagctgcctttttatctccttcggcccggcgggcgcgcccagctgagatccggcgccgcacacctgggctctgggggttccggttcttatccggaaagggggggcggcatccgaggcggggcgccacgggcgccatttgacgagcggttggccaaggcgactaccggcgcgggaaagcgcatcggcaaggcccgcgcgccggggcttacataaggaggaacccgactggccctaccgtaccgacccgtgggaagggacccgg

SEQ ID NO: 376224 - DNA, 314 bp, Zea mays
  unsure (1)..(314): unsure at all n locations
aattcccctttcgacccacacgtcctcctgatcatccaaaaatggactccacccccctcgccgtcnccttttaacataatgacgtgttcttaancctccccctnctcacccataactaacacatccacctctacacatanccccctaaccttcaacatcctccactctatacttctaccactcacctctataatcaactcaatccccacaaactcccctctctatacctattcccccacttcaccctttccctcattggaaactcaatcatactactttttttctcacatgctccaaaattctaccctggactc

SEQ ID NO: 376225 - DNA, 423 bp, Zea mays
tttttaaccctttgccgagccgaggatccgaggcgaggatccatcggttcgcgagagcgttgctccgtgtagctacaattaaggaaccgtcgccgacgcgcgcccctgccctcgccgccgcccggtctcgcctcgacgcctcccatagcgatctgcttactcttttaagccggtggccggagctccggcggccctctccctcaccggattcggcgccctcttgagaggattcggcgccctcttcagagccctcggtaacctgctcgaccgctccccaccgcccgcggtcatctcccacctcgcgcgaccgacgtactatcttcacctgttggtcgcccctgtcctcgcgacgaagacgccgccggcaagctatcctgtctatctctctatctatctatctatctcatcagattgatatcagct

SEQ ID NO: 376226 - DNA, 435 bp, Zea mays
tttccacgcgtccgcgcgtcgcgccccctgccattaaggccagatcctagcccgccattaatgccgctactagcccgagctccacgagatcagagaggcggcggctgggctgaggccccgtgttcgcgccaggccaggcgtggccaccgtgacacgcgccgacgccgtttataaaagcgcaccgacgccgtccgccctcgcctggggttctgcatgctctgcgcctcactctatgtcaccgcgcgtccgtgtccgtcaccagaccttggcggccgcgtagcgtaggatgctcacgtgcatcgcgtgctccaagcagcagttttccggcggcgggaccgacactgcacgagccggcggaggacgacgatgtcgttgggaaagcctcctgctacagttcctgatgacaagaaatgggctgagtggactgcagagagg

SEQ ID NO: 376227 - DNA, 378 bp, Zea mays
ttcctatcggatcgcgacgagacgccgagcgatcggacctaggctgaccccaacgaccactctcgcaggcggcggtcatggcgcacggtgatagtgttaccaccttggaggactcaaaggaggacagcgagtacggctatgacacgaaagatacttttgacctccaaaacgttgctgatggaacgggaggagcctgccatgcatgatactggggcgcgtcaggcatgatagcttaataagagagagcgatgagcatagcgggcgatttagttacaatgcagttttggaggaaacatctacactgtgggtgaatgaccctgttttgagaacaagaaaccatctatcagctagaaggtagcctggaattactggaaatat

SEQ ID NO: 376228 - DNA, 416 bp, Zea mays
tgttcacttctccctgttggcgagaccgcccgcgcgcgcggtcgattaaccttttttctcccaccgctcgccccgtaccgctttccccccggcagcgacgactcctgcggaggtacagagagatgaggacgaggagcgggtcccggtattccaacggcggcgaggtggttgccttggtgggtcagaagaggaagaggtcgccttctgccgtcgccggagagcgcgactgctgcgggcgcaggaagcggcctgccggcgagccggactacctggacgcgcttcccgatgaccttgtcctctccatactgaccaagctagtcgccggctcctcggcgccattcgacctgctctcggtccatctcacgtgcaagaggctgaacgagctcggcagccatgacatggagttcgccaaggcc

SEQ ID NO: 376229 - DNA, 504 bp, Zea mays
  unsure (1)..(504): unsure at all n locations
aacatctctagctaagctagcatccagctgagaagctgcaggtgacgatgtttcgacgcgccaaggccaccaccacggcgcctcctcctactgatggcgaggtgaggattcagaaagttgacaagattgaggtcgtctacaaaaacatactctccaagccaaaactgtacaagcctactgcggcaaccgggaagcatcctactgctggtcatgaggtcgcaggctggaagaagaaggtcgttgatcagaaccccagcaggcctagaagtgcagttcatgtagatgacatcaacaagctgtctgaaaggtacatcacagagatgaagaaacgatttcttggctagcagctagtacctgatgaacctcctgtgatggccaaggtggtgatattaattggtgtgtcgtccatgtacgtaattggtttgggtatatgtatatagntgatattgctacgtgggatggaatatatatatatatatatatatatatatatatatatatata

SEQ ID NO: 376230 - DNA, 482 bp, Zea mays
gttgggttggcttctcctccccctccggttcgggttcgggttcgtgaggttctccggggttcgggttcgtgggtgagcggatcgagatggcggcgtcggatgttgagtaccgctgcttcgtcggcggcctcgcctgggccacggacgaccactccctccacaacgccttcagcacctacggcgaggtcctcgagtccaagatcatcctcgatcgggagacgcagaggtcccgcggcttcggcttcgtcaccttctccacggaggaggcgatgcggaacgccatcgagggcatgaacggcaaggagctggacggccgcaacatcaccgtcaacgaggcccagtcccgcggcggccgtggaggcggcggcggtgggtccgggtgtggccgtggaggcggcggcatcggctgtggcgggcgccgtgatggcggatgcggctaccgcggtggcggcagctacggtggcggcggcggctccgtggtg

SEQ ID NO: 376231 - DNA, 311 bp, Zea mays
tttttatcactcaggctgtggctctctatgccagggggtgttttgaaaatgttctggggcctaccgccgacccagagagcgttactgatgtccgttaagacagggatggctgtgctgacgacacagaggctggacgtgctgccggacccatacaaggtggcgatctccacgtactactggcgggtgcccgttctaggacaatatggggtgactccacaagaaccctccctaggggagactcctgaagaggcccctcgaggggcctcaggcccaagtcaatggaccttccttggtggtggagatgaagcttg

SEQ ID NO: 376232 - DNA, 393 bp, Zea mays
gaacgggatcggcgcgctgtgctcgttcggcgtcgcggccgccaccctctgcgtgttcctcgtcggcggcaggcagcagcagcagcagcacaggcggcaggagcagcgggaggagacgatccagctgcagttctacggcgacgataagaggatccatcaggtggtgcagcagacgtcgaggctgaaccaggccatgtcgtccgtgatgggggcgggaggaggcgcgtccgcgagggccaacatatccttcggtgggttctacgatggattctgacggaaaagactggggaacagatgggtgtagctagtattagtatatactgccacgtatactgccgtaggcgcatgcgcacgtagcgcgtccgttggacgatgtaaataattggggggctc

SEQ ID NO: 376233 - DNA, 498 bp, Zea mays
  unsure (1)..(498): unsure at all n locations
caaaaactgccacaggtttacacagcccaacaagtcgtggcccattggcgtgagacacactacgcagaacttcgccgccgtcgcctttctcagtttctcctgggagcttgcctgtgtcgaacatggcggtggctgcgacgacggtgctggacatcgcggagctctccttctccgacttagtcgccctcctatctcccgagactcttgctgacgacggccgctgccgacgtgttgtggacaccgtcgcaaccgagctcggccgaggtgggtccgggttgctggctatcgacggagtgccgcgcgtgggcgccctccggcgacgactcctccccttggcccgacgcgtcgccctcatggatcacctgacccgctcccaactcctcaaggtacccctgcacctcccttntcgatctcgttgatgttgaaactacagtgtgccttgatatatttccgtcgattatttcagagcacggnttgggcgcgacgttcctttgaaga

SEQ ID NO: 376234 - DNA, 494 bp, Zea mays
gtaggagctactgcctatcatgttactaaaaattacttgcttgaaacgtacatgtggcaggggacagtggttagctcaattatttaaacatcattttggaataaaggagaattgtctgaatcctgtgttttttgaactaatccttatgaaatttctataccattcctgtaaaattcctgtgtttcaaaggagcccttagtttgcactggaatggcccagtatgtggaatttgcatcgcgctttttaacagcttgttaaaaatgaggctagaggcgcttgaaattatgttaccctgaagggttgttcattagctttatgatcttgaaattcttgatgccttctttcgatccacaactgcatttagggtgagttctgagataagtttagtgtttattccactcttcacttcatcctgattacgtgtgccttcttgttatggccacggacacattaccttgcatggcctgtaaatgctactaacaggtataataact

SEQ ID NO: 376235 - DNA, 287 bp, Zea mays
  unsure (1)..(287): unsure at all n locations
ctctcccgagccgtccgcgaaccaacccgtgctacctccgattcttcgcctcgtcgttctttctagaacctccgctccgcctaatcccgaacgagactagggaggttccagcgccgccggtgggggagatggcgctggagctgagcctggcctcggcttcgccgcggcggggcggnacntntaccgnagtcttaaannnaaacnananncatgaagtcaccgttagtggagggaacgacggccgcgccaagggcctcgatgtcaccgcgcccggcggcggcccgctt

SEQ ID NO: 376236 - DNA, 485 bp, Zea mays
  unsure (1)..(485): unsure at all n locations
cccacgcgtccgatcgcaactcgatctcttccaatcctacggcggcggcggcggcacgcggacgtcggcgtcctcgcggcgcccctgcacggcggcggcggtgccctcccgcgccggctcgggcgccttcgcgtacgacggcatgcgcgccacgcctctgtccacgtccacggccaacttcacgcgctccctccgcaaggcggcctccttcgcgcacaagaaggcgccccccagcgcncgacgcgccgccgccgcggcgcgcgctgagcagcaaggagaacagcagcagcgccaccatcggtggcggcgtcgaaggaggcgctactggagtcgccgcaccggncgttcggtgccggagcctgcatccgccgtgaacgggtcggccctgggagccgacaaggcggaagcggagcacgggacggtggtgaatgggcngggcgcgctgcgggagaccgtggcgccgcgcagaagcatgagccggagcc

SEQ ID NO: 376237 - DNA, 328 bp, Zea mays
gtttttagcgcactcacctgcctaaggtgtagggggcatatgaaccagcgagcacgtagagcccggcccgctaacagcagtcaaacatggacgccgagaagtctcttcgatgagccgcaccaaggcaaagcaagaagcaccacaggtacaaggagcactgcagaggagaacagccagtagtaaaggtccaagcgcagacagaggcggagacgcatacgcagacagttgcggcggggatagaactgaacgagtctgacaagcgccgggactggaagaagctctgtgagaacctgaggaaccacaagcacgcgatgacgctggcacgcgt

SEQ ID NO: 376238 - DNA, 349 bp, Zea mays
gaactgtctcgttttagacatcattgtagaatatactcatacaaatatacccccgtatgaggtttcgtctctctgatatagcagggtgagaattacaaaaggcaatacaacatgataattattgttcccacggttatacatcgcaaattgggaacaaataatttatcttatgtcattcatctatcctatcatcgaagtctttggcttgttactttgggatgtaggataactatctttgttgtgtgtggatacttcacacgatcatgagtgaaaaaacagcttgaaccagttggtacaaaaagcccaagtctaaaggatgacaatgttcatgaacttcctcttagcaaaa

SEQ ID NO: 376239 - DNA, 317 bp, Zea mays
  unsure (1)..(317): unsure at all n locations
tttttntttatttttttttttttgtttttttttttggggtctttttttttttttttggggaaaaaaaaaccttgccggggtttggttttaccacacacccacccaccatattaatgcatatttggggggtgcaacatacatacatgggggaaatcaacaggggaaaccccaaaaaaagactggctgatgataattattactgggggatcggatcatactggtccaatccatgggggccccaaagcgcgcatcatgcatgggaaccccttatggatcgtacccatgcggtcttttatttccacccaccatggtccatg

SEQ ID NO: 376240 - DNA, 237 bp, Zea mays
tttttatttattttttttttttttttttttttttttggggttttttttttttttttgggggtttttttttttttggggcccccaaaatttattaaccccttagataggtgtgttcgaaaacaaatacaaggttttaaaccgggggaccccaaaatatttggctgggttttttttccagcccccaaaaaaaaattggaacaagcccttggtgggaggggcattttgtttttactgaac

SEQ ID NO: 376241 - DNA, 318 bp, Zea mays
ttcttttttttttttttttttcgacccatttgcattatggagggcttttttttggcttggggaattataatcacaatacatatattaggtactcggggaacatagtggggcgccatagctagatgcaataaaccttaaagtcctttgaactcgaaaatcctaacccaaaagagcaaatagagcgcagtcttctcaaccataaaacatgacaccattgaaaccaaagatgacactgttgacgcttcaacagtgacccttccagccacttgggccaaatcacgccttccctggttggtgatgaggcgtccacccttggga

SEQ ID NO: 376242 - DNA, 238 bp, Zea mays
ggtggagccatccgtacgtgggggttgttcttagtgttcaaattattcgacttgaatccaagcgcaaaaaaagagaggctacatcacagcgcacgcgtaggggttctcctcgctgatgaactcattggggtgtgtgcagtgcaagaacgacgtgtcatggtagcctttgagctcaaagtgtgtgtagctgaaaccgtacggtgggtaccctccgcagcccccgccgtagccgtaaccg

SEQ ID NO: 376243 - DNA, 153 bp, Zea mays
gttcagggtttgtttaataataatggggctctattcactacaacatatatgtacttaggactgcaccgatgattgccatactggtcaaggccaatggcgcatggacattattcgccgtgttcttcggcttggggtgatcagtgacaacaagga

SEQ ID NO: 376244 - DNA, 189 bp, Zea mays
tttttctctttttttttttaggttggtagtattaccgcagcaacagtgttttgtatggggacatactttggtctcattacttggttactgctggacaagtacaacatccgcgtcgcggataatactccaaaatgggtaggtaataagcacactaaagcatccttaacctccggttcccagatctcgcgc

SEQ ID NO: 376245 - DNA, 245 bp, Zea mays
ttttttttttttttttttttttttttttttttttttgggggtttggacagggaccatgggtcttatttcgattccatgtaggggacactgggggacttttgttagcccgcgattacaaagggaacaatatgctacaaaacctaggggggccttttctagacaccaaaacagtattgttgatggtccagacggatgcccacattttagctcagttagctatcgattccaacaagaaaacgcctgcc

SEQ ID NO: 376246 - DNA, 345 bp, Zea mays
tttttgtatttttttttttttttacacgaaaccaggaaattgcatttgaggtcaacaccaaaacattttacaacacttccatttgagcgacgggtacaccggaggagatgagcagacagacggaggcaggctcctcagcgatactgaaaagggctactaattacacgagtaaaccaatcagggaggctccaactacctaaatcccagacaaaataatcattagcaaacggaagggggtttctgcttagcgggcccgagaggcagactacaatgcgtggagaagagcatcggcagcaagctacaacctcacttgttacccagttttacagacccattttttataag

SEQ ID NO: 376247 - DNA, 214 bp, Zea mays
aaagcaaaaacccttaaaaaacaatatggggctttaacaagcaatccaatttggggacaattttttttaaaacaaacccttttggggtaaattaacccgggacaacttttggttgggatataaaaatagcccatagaagggccccaacagggggaacaaatttcgccccacccctagcacttgatctccttaaaaccctgagaaaaaaagggga

SEQ ID NO: 376248 - DNA, 377 bp, Zea mays
atagcacggcaatttcactataaaacggactgagctgtactgaaaaccaatcttaggattccaagtttacatctgcagcttagaggggaagagaagcaacattaaaaatgaaacaaattctcctaacaccagccaactggtttctgcacaaatcacctatgctggccctggggtaccatccatgctggtgtcctcagggagcgccgtactggttttattctgttctgggagtgactgccagcttgctgtattatcatcagccctgctgcctggttttgcatctattgaattcgacccaacaccaacatctgttcttgcatccatgtaaacaactccacctgattcttcgtaatttcttgcattaagatcaggatcac

SEQ ID NO: 376249 - DNA, 225 bp, Zea mays
gggataagttgcaggggatattcacattaacttcacgatccaatgtttcagtagagtaggttcggcctcaagaacaactttactcgtacaacaacaaaaaatgaacaaaatacatggagactgggagagggagaaaaagctttacatgctgttacaagatcgggaagaactgaaggtttctacaggtgccctagctagcaagacgcatgaaagccaatgcaacag

SEQ ID NO: 376250 - DNA, 168 bp, Zea mays
ggttagaaaaaataggagccgggtgattaaagcctcaaccaacaggctgaagtctggacccctggtcacaggctgacctttttacatgttttgatgggactccgttcaaaccgagtagcatcctaggcatattccctggtttttttttctttttcggggcaaattctg

SEQ ID NO: 376251 - DNA, 259 bp, Zea mays
ggggcaaaacaaaaatattaacttcattgtatatagggacaacaactccccattttttccacacacgcattaacatatgatttaatcatatttaacggggggggggaagatgcctcacaataaaagggcagtttagctgtataaggcgtcatcgtcggttgcagccccagcggatgcaaaggggtcggccccaccggcagaacctgcaactgccgtcggttggtcggaaaaccggaacttgttgccaaacccacgggac

SEQ ID NO: 376252 - DNA, 147 bp, Zea mays
cccaagacaaacccgtgcggcacggacgtccctgttaactggtcaaacaggtatgccgtccatcaccagaactgaagtgccacaagccatgcaattccaaaatgctgaggcggaagcagcaaagcaaggcgaaggcaactactgaat

SEQ ID NO: 376253 - DNA, 217 bp, Zea mays
gaggggtactatttttttttaagggggcaacaaatgcctcctgttggatgcaagggggttacaaaagtccacatccgccaagaggattacatccgtagggccaacaaatttcaactttttatataaaaacctgttacgtttccctggccttttgggctttacatacaaaatttaaaccggggacgtaaaaatgggtcacgctaaaagaagggggctg

SEQ ID NO: 376254 - DNA, 380 bp, Zea mays
gacaaaaacatactaagtattattaatcggctagcaaagagaagttaaacatacgacatgaagtgaattaactagtgcgcacgactagttaaaaaaacaaacttcctttgacaataagtttctaattaaatcatggctgcgcctggacagcgttattgtgagagtggaagtggacgtgctgctactcccctcattcccaacatgtatcaagtacctgcattgagtaatgcaagagtgagatgacacatctcagcaagtaaaataatatcaaactgtttaaccacataagaacattgttttaccaccacttgattccacaaccttcttattacatagggtgcagcacgtatacaacgtacaacacacctagtcaccacacc

SEQ ID NO: 376255 - DNA, 429 bp, Zea mays
attgagatgccgatggcaccttttcaagaatttagggaaaatgacaaatataaagagtcttatataatgacattattagctatttttaataataactcaattaaatcagtaaccagcacaggtgatgaacttgggttgatagatttgagtgtagaagaagttggacttcttggcagcggcaacagcgtcggtgttaaggaaacattccttgtagaagttgtcgaagttaagagcatcaccagcttcggaggccttgaagtaggtgtaatagttggagcaagcagagagttcatcagcagcaccgtcccaaactaattgagagttagcgtaagaggcagcgtaacaggcagacaattcgtcttggttggtgagttggtcgcagatcttgacgggcaacttttggaagcagttctaccagctgtcgatggt

SEQ ID NO: 376256 - DNA, 286 bp, Zea mays
accaaaaaaatttgtcaaattgaagaacattttattgcttttgagcaggggcaggggaggcagctttgttttcctctggcttcttggcttgctgaggagcttcagtaagggcaaccttaacaaccaaagtacgttcatcaacagtctttccattgacagcgttcaaagcctttcgttgatctgcttcattttcaaattcagcaaaaccaaatcccttgcttcttccgcttctttggttcttgacaacgtaagcttgcttgaagttgactccagcatccttgaagat

SEQ ID NO: 376257 - DNA, 200 bp, Zea mays
gggaaaaacatctaaatactcaaacccatacataatacagactacagaataaaaaaaaatgccaagagaaatgggggtcggaaacccgggcccttttggttcccaataaactacattactaagaaattttaatggggccctgaaaaccaaacccgcatatagggttcaaaaaactttaaacattggtaaaacaggaaccg

SEQ ID NO: 376258 - DNA, 385 bp, Zea mays
gactatcaatgacagggaaaaccattattattataaaacattaaaactgcatgacttgatgactagctagctcatcgacccagcagacctgagcacgccagagccgaaactacagctaccagtaaccaccaatgcaatgcagacagagtctaagacaggtcacctactaacaagaagtaacaagaactgagttcacccgtgtttgctgccgcccgtggcatcaagaacacatgcatgactactgggacgactcatcgttggctgaagctcccttggccttgatcaaagacccgagcttgggctctccgaacaaggtgatgccctggcgggtcctgagcatggcgtattcgctggcgccgcgggccttcctcttgatgctggccca

SEQ ID NO: 376259 - DNA, 442 bp, Zea mays
caattaaaactcattattgataaaaaataaatacgtgatctgtttcctactttacacctcgtgaatgattaatgctacattgccggttgccttttctagcaacaaggactatactatccgtatgtacacagagattggctatggtacaatacatatcttatcttgacatgaaaaatccaaactgagctaaatctattttagttcgtgtgttatttcagggccatctgtagtgttggatttctcttcagctcgtactggggctaaactggtgcttgattcatgatgccttagagcatccaattccatccctgtccctgatgcggattttccttctgcatttagttttccacgtgcgataattagccggaggttgtttcttaactccttcaacactgcacttttttgtgcagcgtgtagctctgaaatgacctgatcatgcatt

SEQ ID NO: 376260 - DNA, 291 bp, Zea mays
ttttattattttttttttttttttttttttttttggggttttttttttttttttttgggggaaaaactaccaagttattttttccccatttcaggcatggcccgaatctgctataaactatataggacattggattactccaatttggtgaatcatcttaattacggaagcgccctcccttggaaaccctgccccgggggggtttggttcctgcttgtcatatatagatataatatgggggggaaaacaactttcggatctactttcaccatctgggattaattcttttgg

SEQ ID NO: 376261 - DNA, 178 bp, Zea mays
aaacaaaactcaggccctggaaacttcggttggccccaggaagggtcataaaattggctcaaacttaaaggatggcaaagtttctaagcaaaaccccgctgggataccctccataggtccacgtccccgtccccccccaccttaaataaatttgaaaaaatttaggcagagaaaatgg

SEQ ID NO: 376262 - DNA, 111 bp, Zea mays
gtcggtgttcctcttattcaggatgaacatcagccgagataaaggtatcacagttcatcatggccgaaataagctgcagtaggactgccggccctaacccaagcctgacca

SEQ ID NO: 376263 - DNA, 254 bp, Zea mays
gtagaaccgggggtttttactttctgtcaggaggttccaaaccgtagccagcaggctgatgcgatataagaacacattgccagtgaccaatcacttgtcttgcaacagcctaaacggaatctaaagcaattttgttgtaactaacgttactgcgatccattcttcttcatcctcagaaagctaactagcgtgattctagagggaacgccggtgccctgcctttttttgatggtggttgccttccaaggcctccc

SEQ ID NO: 376264 - DNA, 324 bp, Zea mays
ggttcaaaaaagaaaggcaattgcaccttaactcgacagatagtagtccgaaaaacagaggaccaacaacagctgcatactagtagctagctagcttgtttcccaacaatgaaaattaaggtgctagctagctagctagatcattgttaataagacgttacagagttttaagtcagtaacgcgtttatctttagatccctgcggtgacacatgcaaaaagatttcacagatacagacgtcagtaaacataagctgataagcagagcaggtgcatatatatacaccaaggcataagtactcccttaacaattgcccacgcgtccg

SEQ ID NO: 376265 - DNA, 237 bp, Zea mays
ttttttttttttttttttttttttttttttttttttggttttttttttttttttttttttttttttttttttaggacaaaaaacagggcccgatctttgattacaagggctccacagagggaagccaaagatgagaaaaagggaccctgagctttttggccattggagttaaaaaaaaagggggggttgggggggggcgatcctaaaacagggctcgacccaaacttattggggttc

SEQ ID NO: 376266 - DNA, 331 bp, Zea mays
tacataaaatcctcttggccgacctgcgttcaatttaaattcctggccctatccgattactctcaaattgcgtgtatattgaacgctcccaaaccaaggaaaccagcacgtccagttgcaactttggaaggcagcaacacaacatggttcagaccatggttgatggctcagctttcagcggacgctttctttctcttctttttccttttttcatctccggcaagtctactacttgaccgcttcgactgctccttcttgatttccatgagtttcgccttggcatcacggaaaggtgcatctgatctcaatgccaacaattcttttatatgat

SEQ ID NO: 376267 - DNA, 200 bp, Zea mays
  unsure (1)..(200): unsure at all n locations
ttttntttttttttcttttttttttttctttttgagggctattttggatctcatatgtatatacaacattttgcactaacattgaccactgcgaccacaagcatggcaaatggcatgatcacacgccaacgaggcaattttcatactatttctaaatagcactgaattcatacatacaccattagctcttgagctgcaaa

SEQ ID NO: 376268 - DNA, 183 bp, Zea mays
aaattaaaccccaacgttttccataggagaggagcaaatccagatgggtagttcacagcatagttgagcggaaagtttgcaaaccagagcatggcgtatttggcgggttccatgctactggcctgtcaaaactgtttggtatcaaagttggcaaagatggatcccaagtatccggaccatttt

SEQ ID NO: 376269 - DNA, 223 bp, Zea mays
  unsure (1)..(223): unsure at all n locations
tttntttttttttttttttttttttttttttttttgggtttttttttaaaaaatgggggattgaaagttaatgcttgcccacaggcttgaagttgttcagaacattgtttagctgcatatggattgagtttggagctggaaaaattttatggttgccccatccagcatgagccttgtgcaggggagttaatgaaagacactgttccttttatttatatatata

SEQ ID NO: 376270 - DNA, 292 bp, Zea mays
ggggcggggaaaattcaaacttttaaccgggccccccaaaaaaaaggggcggggggcccccgcctttaaaaaccgaaaaaaaaaaccccgggggggccacaaacggggccttaaatgggccaggaatgggtctcgcccttgggggagggaaattcaaaaaccgggttggggaagggtattatcgccccccttttacccaaaccaccggggggctccccggaaccccccacaccccaaaaaaccccccccggggggggggggccaaaaaattttcttggccccgggggggccc

SEQ ID NO: 376271 - DNA, 133 bp, Zea mays
ggggcaaaatggactgcatttgtgaactattaacaatggaaatacaagggattaagtagtgataaaacactgaaattttggagtagccgaacctagcagcgacgtaaaggctattggcaatctgcttgcaact

SEQ ID NO: 376272 - DNA, 205 bp, Zea mays
gcggtggggcctaagctgaagggcccaaaaaaatggcgaaccaaatttttcacccccatcctaggggggggggaaaaacaaagggggggaccgggttctatctttatgggccgccccagggggcttgaatgaacccatgggtttaaacccccagcttaacccatttttccaccctaaatctaaaacccccccccttttggaagcc

SEQ ID NO: 376273 - DNA, 312 bp, Zea mays
gaccaacatgtttggatcactcctttgttatgttatgaccaacaaaaatgttccattacaagatacttttcagatgttatccatccctgattcggctagaaaacaagaaatattttgaacattttgaagccagcatttgcattttctgaagcacagaactgagcattaccgccctagagaactagacaggatgaaaacatttgtttgcacatcagccgcctgtatgacaaaattgaaacctggaatcacacccagttgctttaaaatgagatatcatcgatccgaaacgacaaattccccacgtactccttt

SEQ ID NO: 376274 - DNA, 213 bp, Zea mays
aaagttagttcatgggtttacaaatgtatagccaataaagtttggaagaaaaaaaaacgaagttagggctgatttggtgtatagcaaatagcaaggggattactccccatggatcaccctgtccaccaaatcagtcccgtagtaaaaacacatgtatacatttgccaaaaatacaaatgtatacattaccgtagtaattatatcagatctgga

SEQ ID NO: 376275 - DNA, 251 bp, Zea mays
ttttttttttttttttttttttttttttttttttttttggtttttttttttttttttttttttttttttttttttttttttttaaaaaggggcccagggggatttcattggcccatccgcccatttggggggcacataatcgggttttaaatcgctaagcagggcctttgggggggccccatagggaaaaactgcttttttgaaaagaaagcttttggattattcatttagccaacaaattccggccttgt

SEQ ID NO: 376276 - DNA, 219 bp, Zea mays
tttttttttttttttttttttttttttttaccaaaacggggattgttgggccaaaagggggcactgctcttcatagcacgtagtacaattggaccatcgctgctacattccccgaaccactacaccaatgcttaagaaatcaactctggggtctaccaattttcacctgaggccagcgggggcctaccccccaacttttgaggctagcggggtgttatt

SEQ ID NO: 376277 - DNA, 214 bp, Zea mays
ccgggcgaaacgggccgttgccaaaaaaaaaagtagattgggggcatccaacgggcaaggttggccataaaaaaggggtggtttcccgggtttttcatcagcccaaataaaaacgggcggcaccccccctaaaaaccgggatcccaaaaccctgggccccctctttaaactttttaaaacagggggcttttttaagctagggctaccccccaaa

SEQ ID NO: 376278 - DNA, 154 bp, Zea mays
aaagaagcaggaaattcagttttgcatataccgaaattttgaaggggcccagaagggttttccccccccatttatggctacatctttatggggaaaattccatcacctttttttccggcaaaaaagagacatgaatatcttatccccagggggg

SEQ ID NO: 376279 - DNA, 310 bp, Zea mays
gggggcgaagaaaaacggaccaaagcttccaaagattttaacgggtttccacacaagacgggcattgtacacgtttacgggggggaaacgtaacaggggggacccctacggggtacaggtgacaacatccaatacaggttggggcccttattaccacccccccacataaagcatgggggctaccatttatgacggtttatttttcctttacagtttacgggccatttaaagccgggggatgctggggggaccaaccaggagtttaataccagcctgacgactacattttttttacagttttgacagggga

SEQ ID NO: 376280 - DNA, 258 bp, Zea mays
ggccaagcgcccaacttccaggtaccccattaatatttaaattacagcagccatttttacaaaaaaacggggggaagggaccatggcgaaggaattgggcctaatttttgacggggctaatgaagggcaagccccactttaataaaaagcatggggttacttagccacgggttaccacttacaagaaactagggcccagggaaaaggcactaaagttagaaagaatttgggggcgggtagttccaatttggtgggcaa

SEQ ID NO: 376281 - DNA, 265 bp, Zea mays
aaaaaggcaacctcacattgatacaattccttgcacacacaagctacagacgcttagatatctctcacactaggggtttacattattcgaaatcgaagagtaagtacttagtagtgtatatggatataaaatgggagtctacatttgattcgttatagctagagacgacactcctgttttctcggctactttgcttcgattcgtttgagtgcagtgctgtcccggccgagctggaggttgcggcggtatatggagtcatgaggcg

SEQ ID NO: 376282 - DNA, 208 bp, Zea mays
gggccctcaatcacattttttttattaatcggggccaaaaaatttttccaaccccatcaacttcttgaattaattaggggccaaagaaaaaaaaaaaactttttatttgagcacatttgttgatccgggtagaccaaagttttaggctcaaaagggaacctaattgggactaatttcctataaataaaagccggagggaaacggggcc

SEQ ID NO: 376283 - DNA, 213 bp, Zea mays
tttttttttttttttttttttttttttttttttttttgggtttttttttttttttttttgtttttttttcccagaaagggaatttaacacaaacttcaaagacccggcctttttccagcaaaaaaatccagaggggatgggcgaatttatcaatcccctaagttttataacaccaaaacggttcgggccccccaaaattggcctggggcttat

SEQ ID NO: 376284 - DNA, 205 bp, Zea mays
ggaaacaccccgggcaaatttcacacgaaagggaacagcctgcccctacaaaagagtagagcaatgcttggtccaggggtcccaccaccatgggccagacctacaagggaagcccggaccgatgcttggccccacccatacaagctcatgaaagttccacgggctgttagcagtgggaacaaaattaaaccattcaagggggggg

SEQ ID NO: 376285 - DNA, 222 bp, Zea mays
ggggagggaaaagcccgggccttggccccaggaaaccccaaggggaaccccccggggcccaagtgggggggaaatccccgccgggggaaaaccccgggggggaaacccacggggttttcccctggccccgggggggggggaaagacccccccaaagggggggggcccccaaaccgggccggggcccccccctggggggggggcctggcttaaaacggggggg

SEQ ID NO: 376286 - DNA, 344 bp, Zea mays
gggctatcaaaatttggagatctttcagagttttcttcaaaaatttgcagcgcaaatccccaaaaatagataactaaaactcacccgggggctaatcatcacacttccacaccaaaggatatactggatcacatttcacgggccagatcgattccattcaaatacatcgggccaaagtatctcgaccatatctgctgttgagatgatggtctaaacacatactctgaaaaatgggctatcctaccacacggttaacttagaaaattacctttcgaagataggagacccaaagccttactggcattcttcaaaactgcatttgatctcggaacccgttttttcct

SEQ ID NO: 376287 - DNA, 265 bp, Zea mays
aaccaaaaaagcaaatcatcccttaacaacccaaatcagtcgtcgggggaagccatgcaaaaaagcaaatcatcccttaacaacacaaatcagtcgtggggagaagccatggttttctggatgggggatcagcccaaaaaaaaggggcgccttataacaattttaaaaatctgccaaaacaaacgttgatccacacctttccggggcacaattgccataatctcaacaggaaactcaaaatgccccaggacggtttgaccagatg

SEQ ID NO: 376288 - DNA, 163 bp, Zea mays
ggggggatacaagatgtaataccatttgctgccattttttcaaaggggggaattttgcacacctaaagaaaaaactgaagtgtttttttattacaaggacaagttttttcctttaggatagcttatgaccaaactgaaaataagagccaagcccacgcgttcg

SEQ ID NO: 376289 - DNA, 178 bp, Zea mays
aaaaaaaaaaaacgaccggccctttccccattaaaattcgaaggaaccaaacccgacacgttttgggccatatcccaaaaacccttcgggggggacaggctgcaacaaatgtttttggggcccttaaaaaggggccgggagcaactcatgcccaccccgggggtttccgggggccggg

SEQ ID NO: 376290 - DNA, 232 bp, Zea mays
aaaccaagaatgggccatgggaatcaggccagagtcaggttacagggaaattaactgttaataaacgacccactaattatatataaaacaatcgttggacggggaaatacatattgaaagctatggggtttttcaaaacatattgaagcatgggtattcatctgttaggcagtcatcaggcaaaacgggtgggccctcattagccgggggaggatccacaagctgggagaga

SEQ ID NO: 376291 - DNA, 155 bp, Zea mays
ggcacaccggggggatttattattgataaaatcaagggaatgcaaacctcgttggatctttacttgggcccaaagttggccttgatggggcccacctcccccctgctgatgcggaaggccttggcgaggatttatgagggcacgggcggcacggc

SEQ ID NO: 376292 - DNA, 122 bp, Zea mays
caaaagaaatagggcagggatgattaaattttggaacaccagggacatttggggggcagacaattttagagcagatttgatccgttgactcatttgccacgtttaaggttagacaagtttaa

SEQ ID NO: 376293 - DNA, 454 bp, Zea mays
ggcggcagttggtagcgcgagtggctcctcttctggtcgccgtgagcaaggagagcagcccgcctccgcctggcgatggtgctgctcggaagaacgacgtgcaccgtgggtacgcggcgcgtcctgcgggtcaagacggtggacgcgcagcggggaagacgaggaagggagctagctacagagcccgcggttctcgccatcgtgccgtcgtgaagaggctaagcgctatctcggaggacggcgagtgatccgtatatcgggctatcggctcagctgtccttatcctcgctgctgcagggtcggcgcgataaacgatgaatcaagttttgatcaagggccggataacacgatgattcgatgaatcgctgcagaatcaactcccggtttctaagccgtgagtgcgaattcggtaaaggcctacctagtcgaatcatatagctggaactaaaagaga

SEQ ID NO: 376294 - DNA, 353 bp, Zea mays
gaaactaaggggttttttttttttttttttggggttttttttttaaagttttttctgtacactcattcattctttgcctatagagatctccaggtaatcccatatagcatagcttagtcgactcgagaccacacacattccactaacctgcagcaaagcaatacatcaatgttgcacaggcagcacgatggatgatcgcctgctagctccaactggacgagcaggaacacttgcccatccatgatcctttaaaggctcttgcctcttggcctccggtcggcgacgacgacgggtcgacggcgaggcacaaggcgagcacgcagcggacgctccatgaagttgaacaggaggac

SEQ ID NO: 376295 - DNA, 221 bp, Zea mays
agggcggggacaaagcacccttaatccatgtacagaatgtaaggaaacttggagctattatcagttcgtttttgacatcagtttgtttgaaggcggtaaattagccaaatgcttaacatttacaatacacggtttgttttgctgttgggcgcaatcaaacaggcgacacctgatgttggggggggcaggaaggcaacaacagaccgcaaaagctttttttt

SEQ ID NO: 376296 - DNA, 223 bp, Zea mays
aaaaagggccccagaaacattctggggtttaacgaaaaacctaatttcaagggcttacagggccccccccctaggaaatttaccggaaaaaactaatttcaaaggcttacagggccattttattttccccaaacccaaaattttacgggagggggggccaaacagttttttttgggaggggccctaaaaccccaaaaaagggttaaaaaaaattttggggggg

SEQ ID NO: 376297 - DNA, 335 bp, Zea mays
ggaatcgaacaagtacatatgtatgttcagctacctaacctcagttcaacaatgcttttggggtctgcttgtttggttcaaagcatgccagtaagcagtctacaccccaggtacacaaaaaattccaaagcctggaattgcatgaagagccaggcaaagctgcctggattaaaaccaaacaggccaagattgaagcaggtgtataaaaccgatagtgtttggtggcaggggtagatgaataaagcaaaaatgtgcaactcggtgaaatttggcaggcaggagcaaagtttggtacatctagttcctgatgctaattttcattaaggccatgtgat

SEQ ID NO: 376298 - DNA, 298 bp, Zea mays
gggaacaaagaaaagaagctatatgacaagggactgaccaattttaagtcctttgaactgaacaaacttctataaagtaagattccacatgctgccacatagattattccctttataaaccaattacagaagaaaaaaaaaagaaacgaaattactagcaaccattcatcaaaccactagatttgtttccagtgctcactgatcaacgctacttacaaattcaagaaagtttcacatatgtccactaaatccaaatatgtcgtggttcactatgtctccactgtttccaatgctgtgg

SEQ ID NO: 376299 - DNA, 228 bp, Zea mays
aaaaaaacaaaaagcttttccagccccgcccaaaaaaccaattaagtttgacaacccatttcacgaaccaggggtcacgacagacacagggggctcgcccatggattggggccccaacatacaaaggggggggcctatccccaaaaaaacttcagggccgggggaaacaaacaaacgtttcatgcaaatctgccacacatattttgagaaatgggggggacataattt

SEQ ID NO: 376300 - DNA, 336 bp, Zea mays
aacacaacaagcccgtattttttttattttccggggcagaaaaaaaatggtttttatactaaggcaaaagcctgcataaaaaaaagggggacagcaactgggtactatttttggaggaatattctgctctccagtatggggcgcacacacactttactttgtttttttccagaggcccagttgggaggtggggttgctatcatcaggaagcgggggtcctgtttttaagaccattctactggttgggattaaaatctaaaccctttgttggggaccgatctgagaaggaaggaacattgcccacccccctgggaccccaaaagaaaagaaaagggg

SEQ ID NO: 376301 - DNA, 293 bp, Zea mays
cccattcattccgggaacgggaccagggtcatattggatttgctaaccccttaccataccatctgaagggctagttttgttttggccatacatacaaacaaccagatccagtcaactacccccgggggtctacacaacacagttggacagggatcctaaaacccccatttcccttgggcatgctgggggcatgaccaggcgattttttatacagcaggggggcgagggttatcattggcagcagggccgaaaccaaactgttgccctgtaccgtttgtagttacaaaaggggg

SEQ ID NO: 376302 - DNA, 335 bp, Zea mays
ggcacaacaaaacttttttttgaattcagcacaaaaacccccaacatccatacgttaattcaccccgggatcaaaaaatgggggaaaagccgatttttttgccatataaactaccacccggaaacccatttttcctattggcccccggattacatttttagggacaaaaggggccgggccctggatgtcgcccgactcattatacatcaggcgcgggatgctgagctgctgcccctggaaacgtttcccctgcaggaaaactggggaatgcacccccagtcccttgggaaggggggcccccaacaggggcaacagctggctggactaggccccca

SEQ ID NO: 376303 - DNA, 177 bp, Zea mays
ggccccgggaataaacatttatttagccattcccaattttttggcaaggggaagagttgccccaaatttccagagacagggtacattgttccctaattcaaacgattctacaattcaagcctttttttaaaggggacccctattaaaatcacaggcctttacttgttattttggccc

SEQ ID NO: 376304 - DNA, 169 bp, Zea mays
acatattgtcttgtctggcaggaaataaagctccctcataatagggccacaaaccgcctgactggtttgtcttaacaccaaactttggatattggccgaaacccccatggatggccttctggagggcctgtttccaaaccgagcccttggacccctggcaaagggggac

SEQ ID NO: 376305 - DNA, 400 bp, Zea mays
acacatagccagctaagagtatttattcagcagggttatgaactccactcccaaatctccattgtccaagcaaagcaaacaataagccaatatgctacacacttgactttctgaagcgctaactgaagctatccttccaggggaaggtacacaacgctactaagattgtacagaaaggtgaatacacagaggaccaaaccaaggctccaaaacctgtagactcgtctatgctttttctatggaacatgtcctacaacaaccgacccaccgaccgatcgacaccatgttgctgctgcccactagcgttttctgtacaaaactgctgccatatctagctcaggggctgaaatctcttcagctgtgagttttgaatcatcattcacgactgcctgccctgatt

SEQ ID NO: 376306 - DNA, 121 bp, Zea mays
gttaattaagaaaatcaaatgaataatcgacgcaaccacattttgttcccatccagcgcaaaaaatgggtgattcgaacagagcggtggaacatctatttttttagatctgcttagagaag

SEQ ID NO: 376307 - DNA, 174 bp, Zea mays
gttccaaaagataccggggttttgtcaaaccccatggatggcgctacagaaaaaggctgggaaccacaaattgaccaacggttaaaaccccaagggcgggctctttttttgaaaaacaaaggaatccaggctccaaaccggattggaaccaaagaatgggtccatccaaaggaa

SEQ ID NO: 376308 - DNA, 238 bp, Zea mays
aacgaggaaaacacccttattacaacaggcaaaaaaaactgggttggggggacccaaaaaagggggaaaaaaccacctccccaaggggcggcccaaggcgggaacaggggccccaaaaagggggcatcttttttttggggggaacaaacccctaaaaatattttagaaaggggcccccaaaccttaattggaaggaaacttttttaatttaaacggggaagaccttttaaaggggggg

SEQ ID NO: 376309 - DNA, 371 bp, Zea mays
gcagtcagcaattcttccttttactgaacttcctgcatgacaagtacaactacattcttcattttttttattcaactatccaaaaacgttgcaaggaagacatctgaagattgtgaaggaaatacataatatcgttccttcaggcacgaaaaggcatttttgtgtaaaacatctcgatatgactactttcggttgaaataactgaacacgtagatctcattttgctttggcgtcaggggataaacattaagagctcctgaccgattccatatgttacacaccgaaattgaatcctgaagttactttgcagaagtaaattgttgatccttctggcgccaccaatttactatgatagaatcaataatgatctg

SEQ ID NO: 376310 - DNA, 268 bp, Zea mays
aggaaaagccagccgcccccaagagggtgcattggattccaggggggggagaacaacgggggggggggtcaactcaacacacccaagggggggcccaaagaaaataaaaaaaaagaacccgcggaaccctgccttattagttgaccacgggggggggcaggccgttgaaagatgaccgagaccccgggggaatgatataccatcttggggggggggtcatcatcacattaaaccacccgggggaaaaaggggaccccccccgggaagg

SEQ ID NO: 376311 - DNA, 288 bp, Zea mays
atctgggcttttttccattggtttttggtgttattttcctctagggggtttttttttttttttttcaggccaaaacccgggcccaaaggtgcccaaggggcaacaccgggggctagcaacaagtttcttccgaccttcttaaaacaaaatgggggggggcaggggccaaaaaacctttggtccaaaattctaaccctatggaaaatggccccggagggttccccaagaaacccctttaattgaaaaccccccttaaacacacacccaaacccggggggggcccccccc

SEQ ID NO: 376312 - DNA, 436 bp, Zea mays
gacgtgaattcagattaaacacaacgggccacaaaagcctgcaacaggaaaagcatggaacggaaacagcactgcctcttgcctaacccatcagggcgagcccggcgaggcccgcggcccaggccaaaacgcccatagcgagccgggcctccccaccgcaggcagcgccagtgctgctcgaggtgggcttcgtcgtgggcgccgacggcgacgtcgttgccgtgggcgtagacccggacggcgtggctgtctctggaggcgagtcagcggcgggcggggatgacgccggggtggtggtggcggtcccagcggcgaccgtgacggcgagcttcatgccgttgccgcagtggcccggggtgccgcagatgaagtagcgcgtgccgggcgctgtgagcgcgatcttggtgttctggtcgctgtaggactggatggagtt

SEQ ID NO: 376313 - DNA, 415 bp, Zea mays
gaaacaaaggtccttgccagtgaccatgtcatgccatacaaaccggcaaaacaaaatttgtgcagcttcattcgcagctttttactaggttctgttcatgcatgtgaatttcttgaacacaatcacactatgacacgccacgggtatactcattgacttattttgatgttgcgtatattggttatgtgcgcatttgataaccttgatcgatcaaaccttgtacagcatgccgatctcgactcgctgttgcagcggcgtccccagcgccggcagcgcggagcgacagatgccgtgcaggaactcgtagaacccgagcatgaccttgtcgaaccacccggcgtcctcgcccacgtagaacctcatcttaccccgaacgtgcacgacgccgttcgttctcgccgtctccaggcgcgcg

SEQ ID NO: 376314 - DNA, 279 bp, Zea mays
agccatatacggtgtgtacaaaagcttatggagtgtatatagtaggtgcgtacaaaagcttatggagcgtatatgaaaaaagaacaaatgaaacaatctcccgtacgtcgacctaggccgaaagttgtggtcatagggccgccggcatgatctgtaccaaggtttttcggtgacggggactactttggacgacgaccgaaccgccaccggtgggggcaaccttggccttgatggtgggcaatgcctcctggccgcccacgagggaggagggcggcatcc

SEQ ID NO: 376315 - DNA, 223 bp, Zea mays
gcccaaaaaaagagggggcttttatcatggattgcttttattattacaacacaattcctgaacagtcggaaaaaaaaaaatgtacaacggttgcaatggaccccccacttttggggggaggcaaaaaaaagggcatttgggctagggttgcccattgggtccccagcaaggaagggggattcacccttttttttttgctttttgggggccttggctttaaaaa

SEQ ID NO: 376316 - DNA, 153 bp, Zea mays
aaaatgcaaaagcgcacgcattggagacacgagaaagcgtactacataacagtggaaacgtccaacacgcggggatatacagtgtctccacacttgttacccaataaactcatgctaatcaccgcagcggatccaggctcacagcagggcacc

SEQ ID NO: 376317 - DNA, 301 bp, Zea mays
gggcgaaacaaacttcagggctttttttacttaaacaaacttcaaaaaaggggcaacacttgcaagaagaagggccattacccccgcgaaaaaaaggcccccactatctaaatcttttaaaagggccccttggccatagggctctcggaagaaaaaaaggggttgctaaaataacaaaaaatggccgcaatttctctctatttcattttacgggcccaggcctcccccctttaaaaagaatatttcgaaaccccaccccgagcatgaagaatgcccaagttgcaaagcccttccaactaaa

SEQ ID NO: 376318 - DNA, 148 bp, Zea mays
caaagctgggatacccagaggggttatttcccatcacagaggggtcctgtcgaccacgacacgacagagacgtcaaggggaccatcccacgtgactggctgcgaacaaattatgaatcgcggaggccatctttctatggcagctccag

SEQ ID NO: 376319 - DNA, 181 bp, Zea mays
gattgcaataaattatgcagcaaaaactgtaaacacacaaaaaaagattcagatctggacactacaacaattcaacatattccaggcagttacattgacttacaaaaaaaaaaaaagttgagctaagaataccagcttatagagacatcagtggaaagcaggcaagaaaaccgagtcgtgc

SEQ ID NO: 376320 - DNA, 185 bp, Zea mays
aaaacgactcccctggtaactaaagggttggaacatacaaattttttcagcctcatgggacacccctccctagtagccaaaccatttgaccccaaactaacaatgtcgaaaagtttataaaacctttacaaagcccctgccaggtaacccaaatgcaacatccaaaaaaaacccagggacaaaaa

SEQ ID NO: 376321 - DNA, 346 bp, Zea mays
ggtcagatgtggggtattcctctttcattagacgggtataatcagatatacgtacaacacatgggtagaagactaaccacatggaaaacaaaacagccaagtacaaaaaccccttgcaaggattagatgtagcgctagcgcctagcaatacgactgaagttgtatctagggatgtctatcctaacactagactaaaaataaatgaatgattcaccatccttcactgttgtccctacgtgacctaaagccctccgtatttaattacatgcacacccttgtcagagattaagagtcaatttctggggaagagttggatgtggaagccatcaggaaagccgagaccggg

SEQ ID NO: 376322 - DNA, 227 bp, Zea mays
tttttatatttttttttttgaaaaaaatgtgagggggtttccgtatttacacaatgtttcaacatcatcaggcacaacttctgtaggcagaaatctgcctgagaatccaatttcttcctcaagaatcgaaagaagaggagataaaattagccaaaccactggcttcaaatgtacagatttatcccactattcacaagtattactgtcagaccgtcaaatttgagcct

SEQ ID NO: 376323 - DNA, 387 bp, Zea mays
caaagataactattgatagtcttatgcattatattttgcctccagagaggggggagggagcttaatcccttctctatgctagctaggtagatacatttgcccggtttcccatttcatgaatcaatagatttatattattatacgaagaacctccctctaccaaagccttccttgctttaacaccaaattctcttgctctcatcctcatctcctctgcagcctcaccttcatccatcaacctggacacagctgcctccacatcatcctttgtcactgtaacctcctcttgttcatgcccccattgtgtcacccctttgactccaacctccaccccagttttcagcacgtccaccaccagcctttcgttcacaaactgctctgcaaagt

SEQ ID NO: 376324 - DNA, 329 bp, Zea mays
ctccaaacacgtaaattcatttcaccgtacaacagagatatacatgccaagtccagctaagctagcagactagaagttgtacaaaaagttctgacagtaacaaaataatatatactttatcagatctgttctgcgccacaactgacattgcaaattgctaaccaatgacctcacaactcaggaactgtctgcggcaggcttgtaatatctggataccagagtcaggacagattggttccaacggtcagacaagcttcactccctcagataactgcctgacaaactgaggctacaccttgatccatctaccggaaactatatactttgac

SEQ ID NO: 376325 - DNA, 233 bp, Zea mays
aggggaaaaatttgggggatattgaaaatgtttaccacacggaatatgcatatcatatatgggtaggagtttcgccttttacagatttcatgaatagggaagtgatgtacattaatcactttacatcttatatttaaaacccggtgaaataaagcctgagtacacggcaacagtcacagaaccacatctttgtaaacattataagggctggcttggcctcgtctccatacacg

SEQ ID NO: 376326 - DNA, 185 bp, Zea mays
aacaaaaacaggggggcttctttttaactttcattatgggcatgcctgcctccccttgaatttgaatttttacccatatgcctgcttagtttatatacttcaccggcccaaaacccaagggggggggggctaaacagagaagccccaaagggccttgcaaactgatgggtaactgaaccggcccc

SEQ ID NO: 376327 - DNA, 306 bp, Zea mays
aaaaaagccaaaaaactttggggaaccccattcggggtttttaagaccgaaaacccctgggtcacggggaaatcccaacccggatagcaatttccggggggattccccaatttaaagaccgggggcggtttttccaggactttccaacaaaaaacaggcttaaaatctaaacagggcccggggtttccccggggttaacgggccaaaaaaaaactgggatgaccgggccccccaatcaaaaagggtgaagcccaaataaaaaagggttttttcctttttttccacctttttttttttttttgcccc

SEQ ID NO: 376328 - DNA, 418 bp, Zea mays
aatcgaaatattgtacaatctttactgctaggaaaatttgttcaaatgcatctcgaatgcttgtgcagaggaaagaaagctctctctctctctctctgtgttcatggctcttgtttcagtttcaactgtaactgtaacagcctactctagattggtgttgttgttgacagcagttgctgtttgaacttcgatttgctgttctcccagtaggattagaaaggaaccacacattctcattggagcataattcagtctgtcagttaaacatgataaggagacacggcaggcagtgaagatctgtagtagctccaaatttgcctcctggcgaaacacctttccttgaaacggctatcaagcgtgctcttcttcacgcacaacgcaacctgttcctgcaccatctatgcaacctggctggctc

SEQ ID NO: 376329 - DNA, 444 bp, Zea mays
ctgttacagataatacaatttataatagtacttcagctgttaaagcagcacacaggaacaattacattggggattgcgagttgcaaaactgacagtcacggttctacagcgcacatatatacactgagataatcgaacaactttgtaggaggattacagtgaatgtaggttctaataagcagagtagcttctcaaattcattataccccccacccccacccaacttacacacacaagaaggaaactaatatgattgtgttgagtaattacccgatttcagtggaacaaagcgtcagccgtcaaggcctccaaaatatggcagcttgctgaacaacttccgccacgagcttctcatcgactctgtcagtgagttggctctaagtaacagtacctcgtgattacgttagacgtgtgtttcacttctttgacccctgactctcagta

SEQ ID NO: 376330 - DNA, 388 bp, Zea mays
tcttttttttttttttttttttttttttttttttttttggtttttttttttttttttggggtttttttttttttttttttttttttttttttttttggggaggccgggggtcattttaaaccgccccacaaaaatggccccgtccctttttaggacgggaaacatggcttcaattggccccaggggaagggcccttgtttttcaaaccccgccattgaaaagccgggggggggcccaaaaattcccatttttatttctgggccaacaccccttttaaacaggaagggttttggaccgggggaagttttcccccccctttgcgggacttttgtttacgggccccccttgccataatgggagatgacccccaccccctgggggggggggg

SEQ ID NO: 376331 - DNA, 236 bp, Zea mays
tcttttttttttttttttttttttttttttttttttttttttttttttttttttttttttttttttttttttttttttttttttaaacctggaacccctgaatttgggttgaatgaatctggtcaatataaacgggggttagactaaatgccaggcctatccgaacaggactacttgtttacacataaaaacagcttggggaacgggcattttgcttcccaaattcattcaatcgg

SEQ ID NO: 376332 - DNA, 337 bp, Zea mays
tcttttttttttttttttttttttttttttttttttttttaaaccaacacattcttgggctttctctttttgcagtacatgatcatcatcacccttctataactgataacaggcacacttacatggccaatacatgatcatttaaaaacacacaggtacatgcacatatagctctatgcagtgaagttctgtcacggatggacacttcacagccatctgcactgagagctctatatccacgtttactacaccgtagtctcagtaaggaacgatgatggattcaatgagctcctggagtggagccagctccttcttgtaaatcaggccaaactcattt

SEQ ID NO: 376333 - DNA, 220 bp, Zea mays
ggcggcagcaaaaaaaaatttccagtaaatcggccccccgatcgagggggacagaattacagcatgcatgcccaaaaatatacatggatggatggacggcccggctattttgactactacctcctcctatcaagcctatgaatctatgggggatcgatcgatcgatcgattagctgatgggaaccctgacaagtaactttaacccctccggatcaagaaa

SEQ ID NO: 376334 - DNA, 384 bp, Zea mays
ggttatacagattgattggttgattgattcattcattggaaaatcaagcaggatattacaatatacaaaatcaggaagaaaaaaagaggaaaatatcacaaattatcaaccctcgcagcgtgtgaatgtctttctctaagctcatccactgacttctctcgtgttgcttctctctcgggttgcttctctcagaccggactctcgtaatagctagccactcttttgtacagattctccatgaaatttcttggttgcatggatggacggacggacaacaaagaaaaaacaattccccatcaaaaaacaaaaaagaaagcatcattaattgacgaactaggacatactacctaactattcccgaactccctcccaccaaacccaatg

SEQ ID NO: 376335 - DNA, 149 bp, Zea mays
aacggggattttggtcaaaagaggtaatgaaatgacctttttgaaaaggtttacccccccggggaaaaaggaaaaaccctattccaggtaaagggttggggggctctacctgggggggcttccaaatggggtaatggccataaattggg

SEQ ID NO: 376336 - DNA, 312 bp, Zea mays
aagaaaaattcaactaccaatggcacttgacagcatacagttatacacaatccacatttttcattatcttagctccaatctgggtgaagacaatctactcatctttcaacagtacatctcatttcaagtaacagcatgaaatgtcagagacgctctatcgtttccttgatcgcctgggagcggcctcctcttcgctctcgctgtcatcgtcccgaagggcgcttctaccgtacctgtctccagactgggctctggctccatctgctccagggtttccagtgttatcaatggcccctgctgccctggtctaat

SEQ ID NO: 376337 - DNA, 235 bp, Zea mays
aatattaaacaacaggccttggttcattccttttaaacaaaacaatgatgatggggaatcaaccagttaggcgctttcacgtacccccgttgttttcaaaaaaaacaagggcccacacgttttttgcacgtactacagggtagtacgaacagaaacaatgggtttgaaagagacacatacttgttaattaaaatggcataaatgcttctgagttttaagggtttgacaggctacc

SEQ ID NO: 376338 - DNA, 170 bp, Zea mays
ggggcagcagttaattgcccctttttttttcaccattcacaaatggacatacagccagtggtgttcgagcatccgggcccaaaatgcttttgctaacagttttggagggggaaagaaaacaaataacggaaatttaaccccagcccacagatgacccaatttcacaaatt

SEQ ID NO: 376339 - DNA, 255 bp, Zea mays
gggggaataaaaccccaatttttttgtttactggccaaatgggcacaagaaaaaatccccgagaactttggattttacaaacgggaagggcccaaaacattatttgagtcagtcgacggcccgggtttttaaaaatgcacaaccctcctaaagtttgggggttttttttagtttaaaaagaaggcatttatcagagaactttttgggcagggggggtccccaaccctcccaaattttgccctgccaccatttttt

SEQ ID NO: 376340 - DNA, 215 bp, Zea mays
ttttttttttttttttttttttttttttttttttttggttttttttttttttttgtgtgttttttttttttttttggattccccacccaaaaatttgattggacggtttccaaattcggggcttaaaaagaccaaaggggtcctttacgggattacaacagggcccacaggggatcaaccccagcattttttggtttaaaaacatgcgggggccg

SEQ ID NO: 376341 - DNA, 166 bp, Zea mays
gagcaaaaacaatgaagttctgcagcagtataaagataggggggggacataccaggtgaccaggaacacctacaggttaagataatgaatgttttgggctggccacaagggaagtaatatttccaggacacggatagatcaccgcacttttctttagttggggggg

SEQ ID NO: 376342 - DNA, 211 bp, Zea mays
ccgggggattattcctaaaatttattccttggcataacatttccaaaagcaccatgtccctttgggggctagtttgggttttggagctaacgtttttatacagttgcccttttgatccttttttgaaaaacaaaaagatacccccccagggcaagcagggggacccaagggaacttcgggattttttccttaatcataagcagcagggggg

SEQ ID NO: 376343 - DNA, 233 bp, Zea mays
ggcgaaaaaactaccatttgcattgagaagattaggttctataaatggttccttgactagggggcagttttggaaaccacgggccctggttgggggggcttttacatacataacatccgggccttttttcctcgtttcctttgggcaccgaaatttttgttgacggggattcgggagaaaaaaaaaactggcggggagggaatttgttctgatttaaacccatttggggagca

SEQ ID NO: 376344 - DNA, 222 bp, Zea mays
aagacaaggggtatgcaatactgtatcaaatagcacgctatacataaaatgccgaacttattccccaatgaccaaaattttttacaaattcacagatcatacatccacaaaacaacaataacaagggggaaactaagggcttgtttggttcggggactaaaaacctgtttaactaagggcttgtttggttcggggactaaagacctgtttggtttggggtta

SEQ ID NO: 376345 - DNA, 160 bp, Zea mays
aaaagggggcttaaaaaagggggccctaaaaaggggcccttaagaaaaagggttcaagggatactaatgaatccccctgggggccaaccccggcaaggactccccaacaacaggggcccaaaaagggggcccataaaggaaaagggggccttaaaagggg

SEQ ID NO: 376346 - DNA, 226 bp, Zea mays
  unsure (1)..(226): unsure at all n locations
tntaagcaagggattttttcatgtttcagcaaagggctagatgcaacaatacagacgcgatagtcactgcgcatcccgcgatagtcactgcgcatcccgcgtctgaatatttctgtcactccagcatcatcagaccactacgaacgaatgaaatctgtacaagacggaggagccacctccaatgaatgaaaccaaccgagcacggagcacggtctatcttccagac

SEQ ID NO: 376347 - DNA, 279 bp, Zea mays
  unsure (1)..(279): unsure at all n locations
ggccgcccttttttntttttttttttttttttttttttttttttggggttttttttatttttttgggggtttttttnaaaacaaggcaactaataatatattcctggcaggaaatacagaagcctccccaactttttattaacttatcccacattttgccagccctttgggtaactttgaaaaaaaactgactttatcagcacatttttttgatacaaaaatttacccttatcaggggcgggggttacattagcaacggaacaaaagttgaaacaaatt

SEQ ID NO: 376348 - DNA, 278 bp, Zea mays
attcgagttgttaaatcttacaaattttcggaagtgtgaatggtagccttggtgtccagtctacatatttatcggattattacaagacttcgttccccatcattgaattgttcagtgtcatgcccataataaaacaacaaatggtgaacggagcagcttaaatgcaatcaaaacgcagtgaattagaagatccttttctcgtacttgccatcaaactctagagataaaatcatcacaacttcgactgaacatttccaaagagaaatccttgggcaatt

SEQ ID NO: 376349 - DNA, 210 bp, Zea mays
acatcaaaaatgttttaaaaattttgcagggtttttttttatgacacatggaactggactttcgaacactgatcatagggctagtcaaacaagcttttacctaaatcttggaagaccaaacacctagatctttgaagaccaagacccccccaaagaagggattaaaattttaacaacttaaaaacagaatgcttaaacagtatggtccct

SEQ ID NO: 376350 - DNA, 287 bp, Zea mays
cagaccaaacctttccaggggcggcagatcactgctagatcaaaagccgccagatatacatatctgcagtgctggaagcagagtagagaaagttaagcaactgtagaacaccaggaagctaccacagcagcgtatccgggccgaaactggcagggaggccactgacgtacgtcaaggagagcagagcacgcgcgccaagatcaggtaaaacagaaagcttcatctgatgtaggcgacatggccgaacttggccgccgggatcgagcgcccgaacttggtcctgatca

SEQ ID NO: 376351 - DNA, 205 bp, Zea mays
ttccttttttttttttttttttttttttttttttttttttggttttgcaaccggggagaattataattacctggacccaaaaataataatgctcaaacctatttggagcacacattgcggccctttaatcaagaccatcatcaatttgttaaccgaaactttacaggatcatttaccttctggacatgaaaaccaaaagaaaggg

SEQ ID NO: 376352 - DNA, 171 bp, Zea mays
gggggccaaaatggcacacacaagggaccagcatttagcaaaattttactcagggcattaaaaggggggacaatttttttactaatccaaaatgacatgatacatgtaagtctgaagggggggggaacaacgggccaaaaatacttaacgggggccccaaaaattgttcct

SEQ ID NO: 376353 - DNA, 246 bp, Zea mays
gccttgctttttttttttttttttttttttttttttttttttttttttttagagacaaaccactatcatcaaccattgtttgaacacataataaaacaagggacggcattggggtaggttaaaacatggcgcggcaaagtagatcaatcaaccattggtgttttactcttttaacaaaattgggaaaaatgtttaaaagacaagctgggagcttatacaacagttccgatgcccgagggttattat

SEQ ID NO: 376354 - DNA, 153 bp, Zea mays
aaaccgggggggtttcatccttataaaacccactttcactttaaaaaaaccccggcacgtcattaaatttgtttacatcatcaacattgtttttttgaaaacttattacatgtaaatggaactttaatgaaaggtccgatgggtctggcctta

SEQ ID NO: 376355 - DNA, 182 bp, Zea mays
aaaaaggaaatttgtttaggaaagattaaaaaattccttaagggttggcggaaaccccgaaaaggttgccctccccacgaatccttgtgggggccccccctcccccttagtttgggcaaaaaccaagggccccataggggggggttcttcgttgccccggcccggggaaccgcttgcaacca

SEQ ID NO: 376356 - DNA, 338 bp, Zea mays
aacaaatagccatgcatatatggtatttacaagctaggcactcagagaaaacagaaaagggaaacatataaaaataccaaaatttaattttctagggatggtatcaagattgacttttcttccgtatactgtacacggtcagtatatatagcctcggtatcacatgcatgtccactctgtggccagcaaaatctttctgtatgaaccgatataaataaaaagaagaaagaaatagagtccatgcagcgcacgaataataagctttgctaactagcatttatctgttcttgcaaatcctaagtttcttcacacttccaaggaagagctcccacggtaca

SEQ ID NO: 376357 - DNA, 267 bp, Zea mays
aacacaatcgaccgtttgccccaagggatttattgaaaactttgggggggggggataaaattagccttcccaaacacacgaaacttggaagggtaaaaaccccaactggtccaggctaaaaaataaaataaaataaaaataaggggtgggttccccccccgcaggccaaaattttatttggtgccccggggggaaatttccacgaagggtaacttaattaacccaaacaaaccgtttaaaggtaaaggcccaaaaacggaccctaaa

SEQ ID NO: 376358 - DNA, 302 bp, Zea mays
gacacatgggcaaattatcgtattctttttattgccaacacacacaaaaaaaagggttaacatttttttattggtttacaacaccatacaaggggaaaaaagaatgggcaaagcatgaatgtcattgctttgcttccatttccatgctcctgccttgggccattagataacctccaaactcattggctttatactagctacatcccaatgcaaagccgtaagtgcatccacggaatagccaacaaaaggaagccgaaaaaaatccccaaaaagatgttttgaaaagggaaaaaagaaaagat

SEQ ID NO: 376359 - DNA, 232 bp, Zea mays
aaaaaaccccttaaaaaaatggggttttaaaaatagccctaaaaaatgcaagaaatccggcccgttacacttttgtccacaacatatttttttgcagagattcagtacataggggtttttcaaattaaccatccccccccataacaggggacatttgcgaaactacgggtacgggtttaaaaatgcaacgggttcaatactaaaatataagcgtagggcaatctaatttttt

SEQ ID NO: 376360 - DNA, 216 bp, Zea mays
aaaaaccgcgcgcaaaggcccccgacagttactaatttttttgaggcaacattcactgtcgccttggtttacaagttgaaaggcaaacaaggctcgatttggttgttacattacatgcatttttcttaactaatccaaaataggccaatctttttatcttttaaacatggaagatgaccacgtgggactgtaatcttcactagagactacactatt

SEQ ID NO: 376361 - DNA, 222 bp, Zea mays
gggaaacggggaacaattccatttaaaacaaaaactgggaaaacagccccttccacggggcccaggcccaaaggggaaaaatgggtattatcccctgggagggaaaaaaaagggcccgcccatttggcacccaacccaacaggttatccgccggccagttcaacagggtaggacctgtaccccccccccaaagcagggccaaaaggggggccaaaccccccc

SEQ ID NO: 376362 - DNA, 221 bp, Zea mays
aacccgaaacttcgggattaaaaaccgaaaatcgggttattagctcagttttccttttaaggttcggcggcgtcgtcgttgggggaccttatttttactactaggtacccaagccccgcttgcaacttaacaggggccatgacgaacggcctgacccatgacaaggacttcccattctggcatccattaggattcaggggatggggccccggtttttgggg

SEQ ID NO: 376363 - DNA, 156 bp, Zea mays
ggggcggaaaggactcgaacgtgaaatattttgaaacacatgggcatgccgggccctgactttatatcacatttcagtttaccgatgatttggttgacacaacacaacacaacacattttattttaccggtggagctggtcttagcgtaattagcg

SEQ ID NO: 376364 - DNA, 251 bp, Zea mays
agccggccaacctttttttattacaaaacaaaaattctgctacccgcaaccgagttacaaaaaaagaattggctccgatggaactatgcagcaactcacttttgggataactggctccacacattacagaatagcaaacatccaattccttgggtccacaccgatttcagggttttaccaggaccctgggaactccttgcacacttgaacacgaccggaggcattaatttttcaagccagatgtgactggc

SEQ ID NO: 376365 - DNA, 339 bp, Zea mays
cgatgcacaacacgctcgcatgatgcattcttaaaattttccagtatatacacaatacaagcagcacacgttcacagctaagataggggcacaatgcctaaagtcacatgttattaagcagacaaacttgataacaggggacaaacaccgactttttgccatccatgctcggagcatgttttaaaggcaacatacttgataggatatattagctaccacagtagacacgtttgatgctccaggcttaccggggttgaacttagaattccctgtcgggaaagaggacgggtgcaacaagcgaccatatgaacagacctgccgtcgcccactgggttgcaa

SEQ ID NO: 376366 - DNA, 251 bp, Zea mays
ggattacaagcattttataagccacaaaatttgttacaaggcggttatgccaactataaacaggtgtcaaccccaatccaattggttacaagggtgttaagccagttatcaccagttgggtcacatgcaccaaatgctaatgctattaaggaaatctttactgacttactaatctccttcagctgggacatttgcccctcctggaatacttgcttgtccccaaggaagtgcatttggaaacctagcccgaa

SEQ ID NO: 376367 - DNA, 322 bp, Zea mays
ttttttttttttttttttttttttttttttttttttgggggttttttttttttttttttttttggccacaaaaaaaggcgcacaggtttccagctcgaacagtcatacatttactggttgtagcccccgtaaagaaaatccaaaaaaactaataaaaacttttgaaatacatggggggttttaaaaagcctcccacaaacattttatttggacgaacgctacctgttactatttgtacatttggcagttagcgctgcggaataggggttgatccaaccgaccccttccatttttaaagccagggtcagcgaccgaggttttg

SEQ ID NO: 376368 - DNA, 326 bp, Zea mays
aatgcaaaaatcatgtggaataagcagtgtaattttcagttgtgtggctacaatgcacaagaatgttatttaatgtacatggtaaactaccaacgcatgattgtaaggatagaaaacaacaattttacacaaacaaaaaaaaaggctgcttactttaacatgcttgtctattgggctcacgtgaacattctctatcctaagctcggtgtgtgccagcccatggctatgtagataatttacaccaatcaaaaggtctctcatcaatatcctgataagacgcagctgtcgagttacagctggtcctccaacagagtcatctcctaccc

SEQ ID NO: 376369 - DNA, 292 bp, Zea mays
ggttaagggtccaccaggggcgagtatgaattgttgacagggctcacgaaatgggagcacaaagccccgcattgggtgtctcggtttacattccatatgtttggttacccgcaccgtctcgtcttggaccatcgtatgcgttgactttgtctgagctcctgtttggttgtctacacaaggagacccaagctgtttgagcggatgcaaaaaagttattttatagccatttgattgcatccacttgtacgcagaaaattgtcgaattaaattagccagggccaccggagcctgc

SEQ ID NO: 376370 - DNA, 204 bp, Zea mays
attcaaggagggggggggcaagcccaaacaaacctttctttaaacgcacgcgaggaaaacaaacctttccatcccgccggttgatcgttattgaaaaccaaccaacaaacattgctagcaaaacggactttcctaccaaccaacaaaaggacgggcatcgggcttcctttttttttacgggcggcaatcaaaaaaaaaatggga

SEQ ID NO: 376371 - DNA, 217 bp, Zea mays
ggcaacatcgggctttacagaacattcagaaaatttcatctgcccagtttcagggggaacagcaatgcccgtttttttgccaggggttttttcacatccccataacccccaaaaataagaaatctttttgcaacgggggacggggggggaaaatatagcctcctaaaggggggggggccccactcccaaatatcccataaaggcaagcatccccggg

SEQ ID NO: 376372 - DNA, 213 bp, Zea mays
ggggggaaaaaaagcaactttattccttttccatctaatttcttttcaatccctccttttttttaaattaacatggagggcactgtttacatataatatgggggcagaggtttaggaaacacccatgcaggcccattgggcccggccctgcaaagttggggcaacgcccaccatagtttttccaagacctgggccccacaatacagtcccggg

SEQ ID NO: 376373 - DNA, 294 bp, Zea mays
tttcttttttttttttttttttttttttttttttttttgttggttttttttttttttttttttgttttttttttggaaaaaaaaaggaccatgttcctccaaattccaaaaacagctcctggaaatccacatagtccttttaattctacgggggcggcaaatttatttgaaatgggccatccccatccttaaaacaggggggtcacatgccgcactaccacaggtggggaacattacacacaatccctggcctaacaaacagaagcttttatttttggcaatatgcgggggggg

SEQ ID NO: 376374 - DNA, 287 bp, Zea mays
gaccctaattgaatggggttactgagtctcgaggacctattatataggccctccgaagttttatagtattccacttatagggcaagacacctccgagcaaaacaacattactcaattttaatctaccagatatggagataccccaacatactctacacaaatatcacaatttggcacgctttcgaatatatttcatcagtcagttcagttcagcttctatcattgatcaaaggtacacttgcctctgcctttaaaatctttgcatctgttttgttttggaaaacctt

SEQ ID NO: 376375 - DNA, 192 bp, Zea mays
gggaacaaatttccccaataaataaaaaaaattgtgaacctgggggcttcagccctttcaatggaacagggggggttctgggactatcctggtacaaagggagggggggggagtcaaagcttttttttggagccaggcatttttgaacattggggggctggctctcgtattggccatagggaacagggtgac

SEQ ID NO: 376376 - DNA, 248 bp, Zea mays
gggcggaaaatgagatagtccaatgaaatagggggtttgttacaattcctgcaaactaagggggggcttctaatctaaggtccatccactacccagggggggggtcctccaaaactttggttttttctggggcttaaggcctttttggggctttcggaggcacatcagggggctcaatagcctcatcgatggcctcaggcacagtttttggggcagccggagctttaatttttttttcagggcttact

SEQ ID NO: 376377 - DNA, 288 bp, Zea mays
ggttggtggcaaaagctaaactttatccatcggaaaaattaggcattatcggctaattttacacaaacagggacaagaacctctatcagctttacaatttggctggagcttgagaagctttgatcaacgaataccctttttacatacaaaacagccccccttttttccgaaacgcctgggctattttcgccttgggattaaacaagctggctcacattttatttacctcttttggaaggtgaatattttgggcgagagaccaaagagcaggggaaagagcccaggaaa

SEQ ID NO: 376378 - DNA, 295 bp, Zea mays
gcggccgccctttttttttttttttttttttttattttttttttttttttttttaataagcagaagtgcaaactcaacattcagggatcaaataccgcagggggaaggttcatactccggttaacaaactcatggaacgccgtatgttcatgtgccattgcgatgccacatgaacgtcagttcaagataaccagttaatcatccccaacatacatcataagctacagttttcaacagagacctggcttccggttgggcgatcacttggggttcctcagcacgatgatgaccgagt

SEQ ID NO: 376379 - DNA, 129 bp, Zea mays
aagcccttggcatgggaatttgattgaaggccgcccatcggttgtttatcggcccaaaagacccaatgggtttttttggaccacaaaaaaaacttgactttttttgggcaaatagggggggacttttgg

SEQ ID NO: 376380 - DNA, 225 bp, Zea mays
gggggggaaaaaaattcccaggggaaaatcagccgaacctgaactctacactctaaaccaagcgactggagaccgcccacccgtacggtgcacggaggacctacccccggcgggttcaaaacaacccccgcgctggaaccaatcccgcccgaggcaggccggaccagggcacggccggtggctcggcgagccgggacctgttgagttgcaaccaaagcaggtggg

SEQ ID NO: 376381 - DNA, 280 bp, Zea mays
ttaggaatagcatatataggaaccggggcatggattagttaaaaaagcatagaaaaacgcaggattcaagaaatattccttcaagcagaaaataaatctgaaccaagtgcagcaccatatatttggttgtggtctactacgtaactaaaactaacaatgaaatgctgtctctctgcacagacaacagatgaaccagcagctggagcaatgacacatatacaacaaacgccacgatgaccagggatatatatatatatatatatatatatatatatatata

SEQ ID NO: 376382 - DNA, 191 bp, Zea mays
gggcaccaaaccaagggaacaagccccttggctcccttttttttatttggccatcgaattattacatccccaaaaccccgacaaagccccaacttattaacaaggggaaaccattattcattggggggctaacaaaatattgggggggggctttgattgaaacctttggagccccccctaggggggaaaac

SEQ ID NO: 376383 - DNA, 381 bp, Zea mays
  unsure (1)..(381): unsure at all n locations
tttnttttntttttttttttttttttttttttttttacctgatgactggtttttatattagtcattgccgataatcatatagaattacaacgcagttcctacaaccatgatgtatattacatgcctcagaccgctgttgcgcacatgccggctatatattgggtgctggttatttttcactctacaaaaccccttgatgtttaacatgcgaagcctcctttgagactcctgcctcattagcgactagcgaggcataaaaagcaactttcccagagtatataccacttggttttattttccgatgcaccggttggggttgccaaacctgcaaaaattaccatcctaggctcgccggggcagcgtctacaagcaccggagcgg

SEQ ID NO: 376384 - DNA, 213 bp, Zea mays
ggaccaggcacaaaagccccccaacgacatccctccaggtggaagcagttaaaaagcctacaactacatcactaagggggcaaatcaccctagctttgggtaaaaagcccacaactacataactttagctgctccagagctgtttagtcacaaaagccccaaagctcccctaaggcttaaggcagttaaaaagccttaaaactttttttaaaa

SEQ ID NO: 376385 - DNA, 166 bp, Zea mays
ggacggcaattcaggctttggagttttatctgctctggacgttgatgcacgtaagctccaaaattaggacaagggttttacactaatactagaccgacccaaacttgttccatttaaaacaagcaacacattaatcactggggcttgctgcggctttaatccgact

SEQ ID NO: 376386 - DNA, 352 bp, Zea mays
  unsure (1)..(352): unsure at all n locations
tttnatttttttttttttaatttttatatccacatgcgtgcgcatctattgaacagtgataatggtttgtttacagagagcaggaatatatggagcatctgaaaagaagttgatattggtcacaaacgaacagctgctattcagactagttagatcaggaggaacagattggatgaagctagagtttacaagaatcatattgctccatgggtctgattacgagacagcgaggtgctgtctcacaactcgtcccttatttatgggcaggtaggattaggaataccatgccaccggatgacatggcatcgtcttatattaagagacaacgaggtgctggctcattaatcttaat

SEQ ID NO: 376387 - DNA, 201 bp, Zea mays
tttttattttttttttttttttttttttttttggtggttttcctatcagacatgcccttattggccgatataatacatttctgttatattcaggcattcgccggggacaaggggccgcagccttgtgcacacaaagtacatatccatgcgctctgccggcgacctatcagggaatgctgggatcagaacaccgcaaagcat

SEQ ID NO: 376388 - DNA, 301 bp, Zea mays
  unsure (1)..(301): unsure at all n locations
tttttanatantttttttctttttttttatacacaaggggttttttttacttaaatatgggcgtccatcatcaacaaacatatgaacataaataattacacattcttgtaatgatcacccccaaatcgaaaacaaagaaaaccccacactacaaatgtacacgcggttcatcgagacgactacggtacaaagaataacaaattaatgtccatgcatgccaagcgtttgtctgcttttacttgataacttttcactccgtgcgggtacgcttaagtatcacggcaacttaatttaatttacc

SEQ ID NO: 376389 - DNA, 371 bp, Zea mays
ggaggaggaccggccattcatctattccatgggtcactaaatttatttctgcctgtaaatgacgacagctgttcacagaagaaagaatgactttctgatttctacagtttctgcgtgtatcgtaagaacaaaactgttgcctacacaaactggggatctatgtagaacttcctgtgtaattttctgcatacctacagcagtgggtgtgcttgaatggccccttcaggtgaggaatgctgaataggccagccacttctgttttcttcttcagcgaatcgcaggagctcctcttgccctcttcgaagaggtttctttggagaactagaagttttgtcccatcccatcattgaaggtgctagtttcgaagaggc

SEQ ID NO: 376390 - DNA, 253 bp, Zea mays
aaacaaagaaaaattggaagcctgaatgaaaaaccggagcccctggggaaaaaaaaacggccgagaggccaaaaatcccccggcgaaaaaaagaaaacccttgctcaacaacaaagtatggccctccgcccccaaaaaaactatgaccccggacggcctttatcctgggccgggcccggggcatgcctgccgtttcagatcagaccaaaccaaaagggggggacaagcccgggggacccgggggtccacccgg

SEQ ID NO: 376391 - DNA, 200 bp, Zea mays
ggacacacacaaaccgggtagcttttgtttgattattggcgatctgagaagaggggcgatctacacagaaaacctttgggatggggttccacgcgtgcgtacgtgcgcagcctgggctagctccaagctagacctaaagcaggggggccatgagcctgaactcctaaagggggatggggccgtcgccgtcgccgtccagg

SEQ ID NO: 376392 - DNA, 204 bp, Zea mays
ccgggcaaataaaaggcgtggctgttatccatgtcctcagcgccgggccggggccggggattttgcatcaagattaaggaaactgaattggaagtagcagagcccgtagtagcagtcctgacattacattcattacgcgctggcaaaacatgcatttggggaaaagatagtacagtcctacacataccaactaggcactcacta

SEQ ID NO: 376393 - DNA, 233 bp, Zea mays
ggaacaaaggaaaagaaacatgccgctttggccaaaattttctgggatctccatgcgggcgctaaaacaaagcccaaagttgccgggggcctttgtcacggggatggccccgggtccccccccaagcgggcatttgggcgggctaatgctagtcaactaaacgggttttaaaaattatagcaggccaggggggccccacaatcaacatccacagggggcgatgccctttaaag

SEQ ID NO: 376394 - DNA, 289 bp, Zea mays
ggggggggcaacccaaaaaagttttttcccaaaaccgtttggggacaaaggggcctacccgaactcccgcacaaaataaactttaaggccgtttttcccctagtttttcccccccccgtttaaaagcgaccaaaccgcataggggtccaaatggcccttctcaatccctcccccgccattggggccgggcccaaaaaacgcctacccgcgcttgccggggatgcggggggcaacctggatttttttgggcatgagggggacccccttggcggggatggcccaaaggttg

SEQ ID NO: 376395 - DNA, 360 bp, Zea mays
cattaaccaaggagatattattccaccaaatcgtgaataataatacatcaacaatgctaattacacacccccacactcgtctacagtaacaaatcacacgagcagataatgaaacgtaggcagctcgacgcatgcatgccacgcaccaccaccaccacacggccgatcgtcgacctcacgcagatgtagtactagtagatgttttatttacagcagtgtgctatacactaatcgctagtaataacgcgacgcatgcatgatgcgcgctcggtagtcgtcgtaggctcatcgaatcgacgatcagtagccccagcagcagaggtggtggtcatggtcgtggccgtggtcgaagcgttggcc

SEQ ID NO: 376396 - DNA, 230 bp, Zea mays
tatttatatttttttttttttttttttttttggaagggcaaaatttggaacataggggatcaacaccaaagtgttgatgattcacaaataaacaagtccttgctaggttacatgacgcagttcctacagaagcagagcagcgccgacagagaaaccagcaacatttaactacaacacaaggggaacatcaacacaagagaagcctacaaagggcgagcgtgcaagcctag

SEQ ID NO: 376397 - DNA, 301 bp, Zea mays
ggactaactgcaaatttttttaaacatttggggggcccaacacaactgggccctgaaacttaacaaaaaaggggtttgggggggatatataagggtccaacgggcagggggagaaacaaacttttggccaaagaatcctatccagctggttcaactcagggcggcccgaaactttacaggggggggttaacaaggggacatttttaatctcccaatgtaatgtacaaaattggcgatgacttgccatgggggggttttcctgccagcatgcttgaaatgttcaatggggcacttttggggc

SEQ ID NO: 376398 - DNA, 323 bp, Zea mays
tttcttttttttttttttttttgacaagcagcaagagctggacgattcacgcttcaagccaggtgtctccttattccatcggagctataagacgcagacgcacacttcttttgctaacaacacacagacaaagaaagacccgatagctcccctattaaaccccaaacgactcagaccacaaaggttggatgctcagaccatgctttgcttatggggagaacccaggctggagctcaaacagtcaccataaatgctaagcaggtacggaattaatgaatttaataacaaagagtaccatgcgggcatcaaaagcagggccctcc

SEQ ID NO: 376399 - DNA, 321 bp, Zea mays
ggaactgaaaaggcgaagcagatcaaagcaaaagggcatggtccctggtggctggtgatacaacaacttgatgatcagatccaaaagcaaaccgagaaaacacactgaccgatctggaaagcagccacgaattacagtgacttgagaccatacacacacagttcatacacgcacatgtacacagcagcagtagtagtagtatagcttgcgcgtgcatatatacgcagcagctatttagcttggcacgcgtatagcttggcgcgtgcatatataattgcgtatgagcatcatggttcgtgcatacacatatatgtgtgcggt

SEQ ID NO: 376400 - DNA, 292 bp, Zea mays
acacccacaaagggcctggatattcattcatccaaaggctaaaaatccaacgcacaattgatactataacttcccccaaccgaagaaagcaacaaccactcctctataaaaccccacacgagcaggtttacaaagttttgaagctcagaccatgactaacttggggggataacccagcctggaacccacatatatacccaaagtttagagcatctccccgatgaacacaattgatgcccaaagatgctgtgcaaatgatcagcccaagcaacgccaagtagttgagcccccc

SEQ ID NO: 376401 - DNA, 413 bp, Zea mays
aagacagacccaatcaattgtttggatatatttagttaggtcaaagttttgagtgggacccacatattttttcatgaaaaaaatagcataacttcagaaccttcatcaactcaggttcctgcaatcagcagagtccaagtcggggctaccttcatcgacatctgcagccgcaattctttcatttacatccgcagtatgttcaaggcccaattatttcaaaagacatgcatcaaccactctttaacatagcacagtgggaccctgtccaaacagcaatgcaactacagaactgctgatgctgcccaggaacaaactcttgaccagggacacgcccattgcctcaaaatgtgctatgtacaaactacaaacaaaatataaaagtagtagttccaagcagattcactcccatgccc

SEQ ID NO: 376402 - DNA, 218 bp, Zea mays
gcctttttgcatcctcgagagctcggagacccaaaggtgataccggcctgagcatgggctctctggaccggctccttgaattcagatcttgttcatgcctgtcggcttgtcgcttgctttcttgatgtttggtctggatcggtggagatggacgccaggcgatggatcgcagtcagggagaggctcaaatcctcgctgtcattttttaacaagggact

SEQ ID NO: 376403 - DNA, 176 bp, Zea mays
gaagcagcacatcaggaggggctatattttacagagacagggggggtgcttctgctcgaacaatccagcgagataagaaacacacgaaacggacagcatacgactggctacataaaaggacagcttcctatggtctggcggggcgcctgtgcttgggcttcgccgacgggggagag

SEQ ID NO: 376404 - DNA, 276 bp, Zea mays
aaaagggccaccaagaacagacgatgctatatcagtcaagtgcaggacacatacaaatcatcaatacacgatatcagcattagttcttttagttactccatcgttcgccttataattatgtcagacatatatatatgcactaggggttaatgccagcactggaagacatattacttgctttttcaggtggaaaggattcgagcttttcacagagcatcatctgaagattcagcgaagctatccacttgggctcacaacttgacaccattgagggca

SEQ ID NO: 376405 - DNA, 323 bp, Zea mays
aattaaacttaaagcatcatataattttccccaaattacaatataaacccagtctcagaacatgctagaattaatcaaaaggggcgggttacatcgcctacgtttacaggaaagcacgtttaaaaaggggggaccattatcccaacggggttcaaccatggggcaggagaagctcgccatcctggggcccaagatgcccctacttaaatctctgcctaattttccggcgctttcttttgagcctacccatccttttttttttccacttggcccgcattgcgtcggaacaggatggagcgcgcgctcgagctacctgtccccct

SEQ ID NO: 376406 - DNA, 265 bp, Zea mays
ggttgactgaaaggggggaaccccccaccctcctggttataccttagatgtaaccagggagggaacattatggaaccaatctaaacggggtggttgcctaaaccatttaggggtaaaccattttaaaaggggggggggaaaaaacctatgctcaactaaggtcacttttcccaaaaaaaagtattttaagacaacccactggttcatgattatccatccgggtgaaaattggcttaagctcaaaaagttgggctgcccgcagggg

SEQ ID NO: 376407 - DNA, 333 bp, Zea mays
acggcctgtccttttttttttttttttttttttttttttttttttttttttttttttttttttttttttttttttttttttttttttttttttttgtttgggggaaaaccaaaacggggttccaccaaaacatttgccccagggtggaaaaaatacgcccaaaaacacttgggaaaaaaaacttttctacatttcccaacatgaaaaacgggaaaagaggtttttacagatttctggcaggtgggttttggaacaccaaaaggggggggggcccccaaaaatagggcctaaaactagaaaaccccctttttaactttttcgccttttttgggg

SEQ ID NO: 376408 - DNA, 311 bp, Zea mays
ggaaactggtcttgtcaattgcattttacagtgttatcgacttggtgaaaaagatacaattttattccaaagttgaggcattattacagccacattattctcgggatctttggaaagtaagatgcgacagaggtcacggcatattggcagtcagagtttggagtcctttaggtgccactgccacaacactgcccgccatcacttggctcctcatgatcacctcatggcagggtatatgggccgcacttgtagcctacgtggcggttggctatggcgcaacgcttggggatggtcatggccacggcaggctt

SEQ ID NO: 376409 - DNA, 420 bp, Zea mays
tttccttttttttttttttttttttttttttttttttttttgatatgatatcaaagctcacttacaagataaaagcactatgcaatctcttttcttttctaggacacaattgaaacatgcttttttcaaacgaacacaattatcatatgacttattgaccacgtagaagtcctgctcaaattctacagatccaatcctccgcacatcaaattcaaaccaggtggaccaaaatcagctacaactccggccagggatcgcttactgctacaagtcagaaatcgcaacaaacagctgccgccgtctcacgagtaacaccgtccacccttactggttagccaagggggctcgcgcgagcataagggtaacctgccagtgcacgacgccagaaagccgggccgagcattgaagcccacccggccg

SEQ ID NO: 376410 - DNA, 244 bp, Zea mays
aaaaacccggccgggcatttttcccgcccgggtaacctcccacctaaaaacaaggggggaataccccctttaggggcccgacccattttttttaaaaacaggccagtgcccaaatggggggccctggggggccccggacaaaaaaaccccgggaaagtcgggggcccacagcgggggaaaacctatttaatccacaggggccgggggcctgcagattgccaaaaacctcatttgggggggccaa

SEQ ID NO: 376411 - DNA, 307 bp, Zea mays
ttgctttttttttttttttttttttttttttttttgtttttgttttttttttttttttttgggcgaaaacatagcataaagccccaaggcaccggtaatttttggcctttttaggtccaaaaaaatttctgaaaaagaaccaccccgacaaatccggaaatttaaacatccttaaaatacgggaatttttaggcacaaaactgtatgggttggggcacttaaacaaaggatttttctagacccattactggaataatggggatataggggggattttttttgaaacgtaactcccatgaaggggact

SEQ ID NO: 376412 - DNA, 344 bp, Zea mays
ttgccttttttttttggaccaattagcaccatatgcttggggagtactttgcgtatgaatatatgatgatacacaccacaggcaacaaattaacaatgaagaattggaagcatgaatgatagacagtagtacatgtggaaataaaaacgtacgagagtacaataatccgacgtcgtcagaatgaaaacgctagctcaacaacaaagtatgtacgtacgtacacaagaatactatgatcctgcactgactttatcctggttctggcacggtgcatgcatgcagtatcagatcagatcagatcagaagaggtcgatcagcacggtggcggccacggggagcgctgg

SEQ ID NO: 376413 - DNA, 175 bp, Zea mays
ccccaaataacaaagactggattaaaactaaaattgccgtcccaaccccaaaaaaggaaggggccgggctaaacaaatggggggtttttgggaacacctaatttgcccatgggttacaaacaaaacccttggggaaccttgggccccattaaacatttatttaggttttacgggg

SEQ ID NO: 376414 - DNA, 316 bp, Zea mays
tcgtttttttttttttttttttttttttttttttttgttttggtttttttttacacacaaaatacatgtccagattcatcaaggacagcttcaaagatatccaaccgtttacattgtcagggcagtagagactacaatagtatcacacttataagggtacagagtagtcacactcacatcacagggggcaaaaagaacataaaaaatgggtcaatcacaggttggaactgcatattaaacataagctggcctaagctcggttcaactgaattcagggatggccaataaatttgaagataacattaacaaagatcct

SEQ ID NO: 376415 - DNA, 324 bp, Zea mays
acacaatacatcctttaacttggtaccacatccatactcttttattttctgttggcttaggacattgtgttatccaactaaaatctacgagaacaatacaatatactgcagtgtataaaaatatcaacatgaccaaacttacaatcttttggatacataaaaaatcacaaaataattgctagactactggtctggcagatcttcgtacaatcagcaacagagatatgggcatatggatgctggcatgctgcaaatcaatgaatacagtagtcctcgaatactgcaaagcgaccttgtataccttattacaaatcaatgaataca

SEQ ID NO: 376416 - DNA, 288 bp, Zea mays
acggatagatacatctagctactattaacacactgttcatatcaagtacacaagatgatggatggtgcagcctaaagaagaagaaccatgcacgcacatacaaaaaccgtatgtgaatacacgctacagatataatatacacgacggggtcgacatgtgtcctcatatataggggtcgcatgtgaaacaatcaaatcgtagccgaagacaaactaatcccgtacagcatacgatatgttcctaccagttgtccaggccgtaaagcggacgcgtgggcggacgcgtggg

SEQ ID NO: 376417 - DNA, 259 bp, Zea mays
ggggcaagtaaccatctgtttccattctaagaattcattactatatccgggtagctccaccattgttaatgctgctgagaacaaaaacacacccaaattcttgccaactctcgggtcatgtcagatggactagccaagacaatacactcaagattcagaaagggttttttccaaacaatctatgatcagcagctaagcttaacttccgccagcattttttttttttggacgagcttttatttgatctaacgtcaaaaca

SEQ ID NO: 376418 - DNA, 397 bp, Zea mays
tttcctttttttttttttttttttttttttttaaaataataagaaatttgctcttttcaaagggtaattggtacttcctacacttccttagggaactgatgtatcattttctaggcgagcaatacatattgtacttttttttgtgaagagtccaagggatcaacatggatcacgttaattgtatttagtaataccacatttaaagaaatcttttatcaacataataagaactagaatttatgttgcacagggttgtcaaagcaggcccggagtttccattaggaacctcatccttttttgcatacacagatttggctacaggagcaagagcagcatcaaggtcccaaatgaaaacctcaccaccaagaccaccagaggctacaatattgctctacaa

SEQ ID NO: 376419 - DNA, 218 bp, Zea mays
gggggggaacccacttattaacatagcaaatacccagatgatactttggtggggatggaacacacgcaatcctccaataagggaagataattttggagatacaaagggcacatgaaaactttgaaaatttgcctacaaatgcaaaggggattggatttggtttacagcaacgccaacatttgctttacatgcaaattatggctccacagggggcttta

SEQ ID NO: 376420 - DNA, 319 bp, Zea mays
ggggggaaaactttatgggactgttttttgggaacaaggtacctcctgggggaatcgccgaaataaggcttgttttttggggcaaaaccacctttgggcccacgtttatttcggttatgaacattacacacggggccaacaaacagacaaactaaaacctttttttggcaacagggggtccacaggaatacgtgccccttttgtggcccgttaatgaatgggagggttacccccattacatggccttttttttcccaacagcgggggggccggcccaaaagaagctgcatacgggcctaagggaacaccgggggggggc

SEQ ID NO: 376421 - DNA, 245 bp, Zea mays
gcgtaataacatttgagttatagcttggagttacactctttaggctttggtacacaccaaggccaatgttccttcttaaaaaaaattacagatgacatttgtacaagctgaatgtacataattgtagcacagttacatggccaataacatcagagttatagatttcatactgctatagtaaaatggcgataattttaaactttaacaactaaaaaattgataaatcgggattagcacaaaactac

SEQ ID NO: 376422 - DNA, 179 bp, Zea mays
attatcttcattgtctgtttatttttttttttacaaaaacacatatacattattgccaaagaatcaccatggaattaccggaacatataatatccgggtactttatttattccgggcccaattccacctttttaaaacttggggggggctttagggctccagtcccaaggggggggggg

SEQ ID NO: 376423 - DNA, 353 bp, Zea mays
  unsure (1)..(353): unsure at all n locations
ttcntttttttttttttttttttttttttttttttttgtttttggttttttttttttgcaaaagggatgaatggtttaccagggaaacaggagtattaaaacgtaaaggttacatgaaactgctgacaattacccgatgtccagttaattccggaaccgtgcaaacggaaaaaatcgctatgaaaaaaaataagggctgaaccaattggacagggtgctgcccttgggcatagatagcatccttcataaatacgaggaaggccacttcacttggatctttattcaggggactaagcaacccatcacggcgcagatttaccccaagttcccaaatggccccctggcaatcaaat

SEQ ID NO: 376424 - DNA, 296 bp, Zea mays
  unsure (1)..(296): unsure at all n locations
aanaaaaaaattggtttttggttttttttttttgttccagcaaaaacatctgaaataatgggatcggtcctaaagtaatcaagacaggaagtttctcatccgagtaacagcaatagacaacaagccttttaactggaatgatttcaaggaaatgttttctagatcggggaaacattgttttccttaaacatttaggaaaacgataaattttctttttctagttggttggagactcaaagacttaatggcagatctgggatcggaatcctttcataaattttcagctgtaggggaag

SEQ ID NO: 376425 - DNA, 259 bp, Zea mays
gactgaaacattacttatcagatgaagcaaaatgatttgggtcaaaacaagcacattcgagggaacaacaagattgttatatacagctccagcctccaatgttcctagcaaaagccccaagaaaaaattttaaggcaaagaacagttccaagagcccagggctttttttaacaatggagtccacaaccttggctgataagatactacgggataaaagaggcaaagattgcccagaatagaagcatagcacagatttttt

SEQ ID NO: 376426 - DNA, 285 bp, Zea mays
aaaaaacacataccttaataatatttgttgttgggtgggcttctaacttatttaataatctagaggggggtaaacaaacaagggggaaaagtttattttcatcaaataatagaccggatgaaaatggcccctgtttaagcataaataacagataaatttttggggcactaggcagcaacaggaagcaggccgttttgtttaaaaagtggttcaagcaaaggcttccgtccttggaatgaaacgaacaccttaagcggggactttccaccttcaagcgcaagaaca

SEQ ID NO: 376427 - DNA, 228 bp, Zea mays
gggggagggaaccaatacaatatgaatccattggttttggtgaatctgggaactacatccttaagggttagtcccgttaaacgaagggccccccaaaaaaacaacattttttaagcaaagatgctggctgtttgctattttttttcccatgctaaaaatgggaaccactttccacaaggaaacaaactttccgggaaagaaaaacaagccgggactgcattttgtttt

SEQ ID NO: 376428 - DNA, 227 bp, Zea mays
ctagattatggggatgacatcttttgcaggggatcattttttagaacataagactgccccaaatgtaaatgaaaaaaatggtttttctggggcaaaaactgatgtttgaaaaagggtacaaagatcctgttcctggggatgccaactccattagctccaaggtcaaaggcagaaacccctcagggggggctgaagctaaacaagcctgcctgtgcataccttttttt

SEQ ID NO: 376429 - DNA, 146 bp, Zea mays
agggaaacgagcgggaggggagatataagaaggggtggaaaagaacaggtcatgctagtagtgttcttttatgagcctaacggcactacacttcatagaatatacaggacattcgcaagcccaaggcagccactccaatgcgaata

SEQ ID NO: 376430 - DNA, 166 bp, Zea mays
  unsure (1)..(166): unsure at all n locations
ttcgctttttttttttttttgcttataaacggngaagctgcatgatagggtagaaaggcatggaaagtcgagagtgcaccaagtacctgcttacatatttgcagctccctaatagctagtttggtaactccattggttcaaccaaattcttatttttttaagaaaa

SEQ ID NO: 376431 - DNA, 323 bp, Zea mays
aggggggccacgagatttattgatcaacgttcggtctgtcttatagatacctcccggaaaactcctcagggagacagagaacacgattgttctaaaacagtaatggggcatatattttgccctctttctcaaaacaaaaaatgggaatgtttcttattgataattaagtgtaaaatataaaaattgataaaccggggtgatgatcaagtcacaatcggaatcgcgagatcgaatattaagggggacattccttggatgctgggtttatcttcatattcagctcaattagttggggcaagtgaagtcctccgggcaaattttgc

SEQ ID NO: 376432 - DNA, 369 bp, Zea mays
aaacccaggctcagaaaccgaatgggaaatttctgaagctatcgcatagacctaaattttacaaatcgatgaactattacattaagcacacgcagttagacctaacatacacacaaaaccatataacatccagaaaacaagctgagcagtcacaacgaaaaagctgaattaacagcatgtctgcattagctaatatgtgcatagctgtaagtgaatgtacagatgggatggatgtacatgtacgcgcattcccctattcagggtgccttttggcaagcgtcttcttgagaccttttacgatcttggaaaaccatattatattcatagtgaacagtatggtgggggcgacagatatcagaacacaagcaa

SEQ ID NO: 376433 - DNA, 326 bp, Zea mays
ttacgttttttatttttttttttttttttttttttttggtttttgttggaaggataaacgatttattatttatccctgtccaaacgataatatctgtttcatgaaaggaatagaacaaacagctccaagtccaaatcatcaacactcaccccacgctggggcactggccaccaaatgcgaaacctgttccacgtactggagtgcaaaaacggacccagatctcacaaagacccaaactgcacgggcgacagccgacacccttgcgttgggtaaaaacccagaccaactgggcacattaggaacattctaatttggcactgttgttg

SEQ ID NO: 376434 - DNA, 353 bp, Zea mays
accacaagggaaagggttggttgtaaaaagagacgggcgaaaacaatgcactactatttgataaatactttagcttggacaacacagtcagaataacccagttaagtggggaaacacctgggcgaaaaaactgcaggggctggggtataaacacactggtacggtaccagcctttttaaaagaaacggggagcgtgaattgcaaaccaaccagggagcagactctttcaggtgtaaaaaatgcaatatgacaaatccatgtagtgtatcccatgcagaaattgaccaaaaaagagaaaagtggcactgataaaaaagccttgaaatccaatatgatgtagaacaacttcatga

SEQ ID NO: 376435 - DNA, 248 bp, Zea mays
  unsure (1)..(248): unsure at all n locations
gtacgtgtacacacctggacgcacacactgntaggatatgcatgctgcacacgctactgattcatatcagctgcacacactcacacacagcaagtagctagctagagctagcaacttcactgacacaatacaacgtaacgacgactgtggtcaaacactagctagctagctgatatgcacgtactgatgaacaactcacaaagtaacaaatttaagatgcatggatatatatgtatatagttaaggat

SEQ ID NO: 376436 - DNA, 234 bp, Zea mays
agtacaagtgcaatgcattaccttatcactactacacttaatacataagaaactacagtgtgtacgcagtaccacacaattcactaaatacaaaaggaatcgcattaccaaacagttcactgaatacaaaagtaactgcattaccaaacacatagtacaacacttaatgcaaccaacgaaaagtaatacaaacagacagcatccacggcgcagcccgccttgtgcgcagcaacg

SEQ ID NO: 376437 - DNA, 380 bp, Zea mays
tattttatattgtcaactgagggatcatctgtattaaagttaagtatatctcaaacagttgaggtaagcacaaactgaaacatcacatccggatgctacctactctaggacagagggaaacagggctgtgcaaatgccatcaaatcaggagagaaatttgctattttgccactctcaattttggctgcctgttattatgccatcccgtgtctatgactggtgggaccgcctgtgtctatgatttgtgggtccgatggcatactggcgaagcccacaaatgataatggcaaaattgccaatggctccaatcaggagggtgatagcagaaaaccattgtactgaaagcttctgtgcctcgtggcgagcagaattgtcatgca

SEQ ID NO: 376438 - DNA, 319 bp, Zea mays
gggcctgaaactcgcggctcgagccattttgcgcggcctttgccgcggcgctcagcaccgggccgcccaaccgcgctttggtctcaaccgcaatgcgcatcaggatgaagcggcgcaacatgtccatcaggacatgagccgcgatcgccagaatgacgatcgacgacagcttgatcagcgtatcgacgctgcggctggtcagcacgcggtccgacatgtcgaagagatagatcgggatggacagaaccagcaggttcacgaccagcgagaaaatgccgacggtgatgaggttgcgccgcgcggaagccagacccttgcc

SEQ ID NO: 376439 - DNA, 202 bp, Zea mays
cctctaccaacaacaatagctacaaaatctgctgtgaagtgtttggctgcagtggtacagattacacgttataggcaaccctcattcacgccatctgcactctgctaacccttcgatgtcatttcctgaatctttaattgcgtatgtggctttctataaggcctccgcagtgtgtcaattcacggcagataggctttggtgt

SEQ ID NO: 376440 - DNA, 219 bp, Zea mays
atgattaaaggaatggtttaatagtacatgcacaattaaaatgttctttttgttcccaagctaggctattaattgtccacgatcaagctaaaaccccctacccactaaacaggagactgctaggcaggggcgaacagggagcattcctgcatgtaagcaaccagccaaccaaatcacagccatctattcatttccttttctaagtaggtggttggggga

SEQ ID NO: 376441 - DNA, 222 bp, Zea mays
aaaaaacccaagaattttttacatttgcataagagggatgtcatcctggctccgagacagtccacatccatgggggcacaagctttcgcagcctaaaagttgcgtacatttcagcgattcatgacttgaaacagcacacttccaataaccaacttttattgttttggccttcctgctcccagctgatcacggggaaacccaccttttcaccaaaagggaccg

SEQ ID NO: 376442 - DNA, 378 bp, Zea mays
cgccacggcggggcgcaaatgcgaatgattccatgaccatgtacagaagtgcataaaccaactgaactctcaaagactcaaactgcatgggcgacacgcgacagccggcacccttgcgtcgtgtagaaacccagatcgcgcatatcaggaacgcactgatctggtggtcttgaaaaaaaaaacactgacctgaccatacgtactactgaagttacacatgtttcttcatgtagtacatcagtcgacctaaccatctttcacaatgctccatggccaacagcccttcaatgatccagaaagaaccgagaatgctagagaaaccatgggacaatctagaatcccaactaactgaaaatataagtaaataacagatataca

SEQ ID NO: 376443 - DNA, 103 bp, Zea mays
ttaacatgcttatatatgtgttcgtacatgaatacgatagactccccctttcagccactctgcttgcttacaaactagggtaccattaggtgtgcatgaaaag

SEQ ID NO: 376444 - DNA, 237 bp, Zea mays
acaaattcacacaggttcacatccatagttcacaagttcaaacacacaagttcaaacattagcttcatcgctcttgatcaggacatcggattgttgttagtagctccaccactagaattgagacatctgtcctgaaagtcaacgtaagggggaggagttatttgatgagagccggaattccaagttatacttagaaggtgacattaccagtggtactttcattaacatcagtagtct

SEQ ID NO: 376445 - DNA, 302 bp, Zea mays
aaaccagcaagatgttatttaaaaccaccaaaatatttaaatgccaaatgaaaatgatgaagtatatagtgtgttctggaacactgttcatggtcaatatagtatatatctcattggcaatccaacattgagtcatgccctcaatgctacaaaggatccaaaaggaaagcgtaaataacaacccttttgaaaataaaataaaacttaggacgtcaccgatcagttcagcaatggtggaatactcacactatcacactgggaagacgctaaatcctcaacaaagcgcagccacagatgctccc

SEQ ID NO: 376446 - DNA, 427 bp, Zea mays
caaattttgttcactgatgagtagtatttttatacttgtaaaagcgaacacttaaaagtcaaagacaaacaaattatctttagctattcaattattcatcattgttgtggtgagaagcaatgtggctgacaatgctaacaatggtcttttggtgcttgtcagcgaacttgccaacagccttagcaccatcaacgacattgtgccagccgaacatttcaacatctccaccatcttcagctccgtcttcagcaacgtgcatgccgacgctagcaatagtaccggcgtggtgttcagcgaacttaccagcatccttagctccatcaacgatgttgtggattccaaacatttcaacggcatcaccaccatcttgagcaccatccttagcgacgtgttctccaatgctgataatagtgggggcgtgatgaat

SEQ ID NO: 376447 - DNA, 400 bp, Zea mays
tgatgatcacacccagtctaagtatgttcataaaaatatataggttgtacagcaccagttggttgagttaagtacagttgttacatctatctccacaccacctcacacaggtcacagctgtatcatcttcttcttcctctctctctctctctctaccaacccaaagtcacaaattagcttctttccccgcccctacatgctacatgtcagatttggtcaagctaccattcactgagattttatctcgtctatacaaataaaaaaattaaattagacacaaaagatgcatctgaagaacttatttccctctctgatattttctgtttctttcttttgaaaattaaccgtttttatggacatcaactaatgcagcctatgtatgtataccaaccgtgaaaaa

SEQ ID NO: 376448 - DNA, 192 bp, Zea mays
gcacgttacaaggcacgtatctccagacaaagctgaattaaaagctagcgttgcgataagccaaatcgctgcatggttagtttttccccttgagtcacaaactgccaaggtttttcgcattctcttgagtgagatagtacaactccgacgcagctgctaaactcgggcgggattatatatacagacagacac

SEQ ID NO: 376449 - DNA, 310 bp, Zea mays
ataaaacctgcacttgatatatatcggcccatttttttttacatgccaggtcgctgcgccgagaccgtgaagagcccgagagacgaacaagcatgcatagcagcatactgggcctgagaattgaaggctgcattgttgtttcttcctcgaagcaaacgccccacgagacggagaagaggccgtcgactgctatcgagctatcaaaagacaggggccggccgacgcgttcagccgtcaggctcaggcttggccaaaaaatccctgtcatggcagaaacgcagaaacagtcagatctccgtccccaaaagag

SEQ ID NO: 376450 - DNA, 166 bp, Zea mays
ttttaacctaaatcataaagtttaagattaggaatttaacatcttctcaagcaattcaaatatcacagttggcttgacgaagtcattgtcgaccaaggtcaccaaaacatattcatcatgaatcttgtgtagcaattctcggcttgcactaccatctggataaatg

SEQ ID NO: 376451 - DNA, 235 bp, Zea mays
catccggtcatccgtgcggaggttttaacatttaagcgtatactcacaaaaacaaaatgagataagtatgcaatacaatacgcactctgtaccaaacatcataaactcccaacatcatatatatggatgcttttgcaaagtgcacatggagatcttctgcatcccggcaactcggagatacgtcaacgaacagaggacgcagttgaaaataccagatactggctactcaaaattt

SEQ ID NO: 376452 - DNA, 184 bp, Zea mays
caaccacattgttttgttaatgctaacctttgcttacaccaaaagacagtaaaacatttttactttgagtcactggacaggggctacaagatttatcttaagattccaataggctaattagaaaaccccagaaagtccctggatataaaatctgtaatgtatggccatatttgttttatttgga

SEQ ID NO: 376453 - DNA, 184 bp, Zea mays
taaaccattaacaaacaccacaacaaaatcattcacaaaacctacacattattatgttttgcacatatttgcaaacactttacaaaatcatttaaccccaaactccgtacattgtttaacaggccaagaacgggggggatacccaaaccccatacattggttaactgcatccagcacaaggggt

SEQ ID NO: 376454 - DNA, 216 bp, Zea mays
gggaaatcccccttttccccaaaaagggaacacataatttttcgatttccaattgggggaaagcaacccgtttaaataaaaccgtaacttgaaaattttggacccatgggcggggaatccacccatcaggtttccccatttcaggggcagttgtaaaacaaggtatcttcgggggttattagtctttgctcaaaaaacatcagggttgaaaccccc

SEQ ID NO: 376455 - DNA, 181 bp, Zea mays
aaggtgctgagagcccatcgaacaaacattgaatctccgcttgaaagttaactaaattcgaaggcacaacatgaattgcacaacgtcctcgtgtttccacctttaagaccagatgctgagatgcatctgttatgctatgcactcccgaggcaggcctgtgagcctgtcactgatgtgatgc

SEQ ID NO: 376456 - DNA, 194 bp, Zea mays
aaagaagggcaaacaaacagttacatgggagatccagagacgcaacaacgatttgcaactacggttaccacacacaattcctcaaacgttccttgcattagatggacagctccgtcattgtcgccatctcctccctcttctggagggtgttggcctccaccttgcagcacttgcacggcgggctcactattggc

SEQ ID NO: 376457 - DNA, 307 bp, Zea mays
aagtgaaacttttagcgatataatgcggcctggcacattacagacagaaccataccagaagtggtgaaagtaccctgaacaaaacacaacaatgaatccagcttgctatgggaacataactgttagaacaatacttgttggccacaaacacaatgacctagtgataaatcatggggactaaaagaaacatggacaatctgtgtggagttgaatgtgctgtgatcagtacctacaagctgcaacaaagtacagttggatataaaataaaacataaattttcttctgcataacagttaatgtaaacatt

SEQ ID NO: 376458 - DNA, 212 bp, Zea mays
gggacatgcaaaataagtattagtttgggaccttaaccaccctacattacaggaatcatactacccagcggtggggggacacaagatagtttaaggttaacatagggaactcatgaacaatatgaccaaaatgggtaaggtctttatcataaacggagcagtttttactaggagaattttgaacaaaacatttaaattactggaaataaaat

SEQ ID NO: 376459 - DNA, 201 bp, Zea mays
ggggccgggtcaaccaaaatattataagggaaagttaacacatcacagccttgtttcgttacaaaacacatagccacaagtttttaaacaaaataagggcagcctactaacattgacaatttttccagactcgcttggatctcccatgcttaaccttaatggacttgaatggacctgggacttaattggccaccatgcttt

SEQ ID NO: 376460 - DNA, 268 bp, Zea mays
gggcagaatataattccattgcttgggatcttacattcattcaccaggagtacacatcttacagagagggtgcgtaaacagtgcctagacatacagcagctactatagttacatacttatattaattgggggtgaagtgaaattaccgaaccttctctgtttctttcaaaggttcttcaattcaaagacgtcaggtagctttccagatagacgacgatgccttccagagtcatggggaacaagctagggccaaaaacaacaggagaga

SEQ ID NO: 376461 - DNA, 287 bp, Zea mays
aaaacctctacgcttctcaaagtagacacgagatcactgctagcacatgcttgggctaaaaattcaacccaatagcttacatttgcatgctgccatgaacactaagagaggtaaccttttacacactgagaatgtacaaagcgtatgtcatctacgaccagcttatttccggccacacctgcaactcaaccgagggcagatcagggtctacgcagcagctcctgcaccgtttgagcgagcctcggttcgctcttgatgccctggatccaccttgcgctgatccggac

SEQ ID NO: 376462 - DNA, 302 bp, Zea mays
ggatactaaagtagagatatattactactgaggtagtaggtgtaattttagtaaaaacatggttgatggcttacactcattacacttgccttttgccacagaatctactgaaaatcaattaatctgtcgttcaaaattatgcttttcaggtatactcataactgagggtaaattagaaggcaacatggaattgctcaggtctgttgcttttagtgatgctaggaattgccatgttgctgttgtgtgtccgtccagtccccacctcttcttgctcctgcctcacctcacatattgctttcagt

SEQ ID NO: 376463 - DNA, 242 bp, Zea mays
ggtaaaaacaaaaagaggcactttgacgatcggggcaaacattatcagtaaattattcggggcaaaccaccacccgcagttaacaagagcggtggaccatataaactagatttcacactccagttggagtttgacccatatgccataacaggcaaaccgtttaagagtttaaatgctttaaccacacttcgactgggagatacttactacacacgcgggaaccacagggggcaccatgtttt

SEQ ID NO: 376464 - DNA, 226 bp, Zea mays
  unsure (1)..(226): unsure at all n locations
ccctncaccccaaacggaataaatatcggggaatatcatacttttctaaacatctctatctataggaagcattaggcactatttataataaagttatgagaaaaaatggaaagaactaattcagaatagttagattataaacatattaaagaaagattcagacataattagacataaaggatattttatggatttacataattccatctaattataacttatcaaa

SEQ ID NO: 376465 - DNA, 241 bp, Zea mays
ggggtgactattccttgagcattaacaaaaattgtatccaatagaccaatactgcacacataatatgataggacgttccagaatttacacaatttatcttgtgctgaaaataagcctccctcataagatcatgtgtataaggggtcttttcaaacaaagagaagcttagaccaaggctgtattacaaggtaaaaactggaaacatgagatattattagcaaaaattcatatttgagggggg

SEQ ID NO: 376466 - DNA, 149 bp, Zea mays
ggcatgggcccatgggttagcgaacccagggaaataaaaaaaacttagataccggaccctttttttacacactttcaccattcaagacatgggtgacgaccgaaaaggggcttataccacaactaggcgagccttttggggatgactcc

SEQ ID NO: 376467 - DNA, 268 bp, Zea mays
acacctaatggatcgtttttggggggacctaccgtatttttcccctacaaaacacacgtttaacccaaaagttactccaacgaaacgagcaaaacatttacaccccaatcagtcactcactcacgccttgggcgtgtcctccctgtttcagctttcttgacacctgcacggttcatttgtcactcaaacactcacatccctcaagctcgggttcaggctcagtactagcaggatgcccccatttcaaacttgtagcatgtccctgtga

SEQ ID NO: 376468 - DNA, 298 bp, Zea mays
tgcacataaaaggtactacactggggcatgttgtggctgtgtatattactagtttcagatgaacacacacaaaattggcactgtgctacgacgactgtattactgctaaccagtatacatacaccgttatttaaacaatgggtaatgaagctccacacatatataaaccgggaaaatgtcgacacctaattaatgatgaacagcaggtgattcatactgatccacttctgtactaagacggcgtcggttacaaggatcacgaattactggattcccaacaagctgcagggcctgatcg

SEQ ID NO: 376469 - DNA, 162 bp, Zea mays
aaaaggggttgggggggtttcaccatacatagcattagtttttacacacgacacgtcgcacattttacaggaaacagggttaggcaagacaaggaacatttgtttgccccaagggggagaatggctttatcaaaacatttaaacaagatgggcatcacaatt

SEQ ID NO: 376470 - DNA, 144 bp, Zea mays
ggacgatcgctgttacattccccgaaccactacaacaatgcttcaaaaattcactcttggggatacgaattttcacccttaacacaactggagcctaccccccaatttttgaggcttggggggaattttaaaaaaaacatccct

SEQ ID NO: 376471 - DNA, 173 bp, Zea mays
gtggggacttaagtcgaattgtctggttttttccaaaagattattctaatacatagaagggtctaacagattgccgaaaaaagctttttatgcattggactgctcattatagggcctactaagccaaagaaacctactttcatcagtatctaggggcatgaacatctcccttt

SEQ ID NO: 376472 - DNA, 231 bp, Zea mays
tatagaactgttcttggtttgaaaagaaagaaaataacaaaactagtactcgtctccggcagatgctacagaactgaagggtacagtcgtacagacgaatactgttttatggtttaaataccgtctaagaaatatacagcaggacgccatcgcataagacactacaaaactgtaaccgaagaggtacacatggttgtgatcctccagatttggatcttgcgaacccatcat

SEQ ID NO: 376473 - DNA, 162 bp, Zea mays
tcactcaaaagtaactcgcatgttctaggcctagggacaattttactgcctaccatctcatcatagagtagataagcccaatcggtctcaccgaccttgcagagaccatggatcagaagggtatttgtataaaagacctaaccctagaccatttctatcacg

SEQ ID NO: 376474 - DNA, 235 bp, Zea mays
aaagcccaaacatacattttcattattcaaacccacattacaaaatcaaacatccgaccatgttatagagagacacttatatataatgatgtaaacttaggagtaaaaagggataggaagacataaaggaacaattaagatcggaacgaacggatacaccatttagctagattactcaacatggcgcaaggaatggcgaggatatggttgccatcaacgacattccctttatttg

SEQ ID NO: 376475 - DNA, 214 bp, Zea mays
taaaaaaaaagggcaaactaaaaaaacctagcgctgggtgactacaagaagacaactcagccccttaaatgtttttagaccatgcgaacatttccggaggagtaattacaggtttggaggactaataaccgttgccagcacgacccacaaaacttggtttttagcctacacaaaacaaaattattttttaaagggcccaaaaatgggggcccct

SEQ ID NO: 376476 - DNA, 318 bp, Zea mays
caccccctctttgcaagggatgctttactacactttggtacacaccatcatgtgacaacaacattacatagctcctagactatttcacaaggctcttacactattttgaaagtgaaacgcacaacatgacaatacccgaaacgtggggctccatatgttttagtctgtatgtctagtctagaacagctaaaataggcagcacgcttttctaacacctcaaaatggtaaaatccacgctcagctcatgtttcctggtaatttccatctccacgtgttaacagatccaattttgccataaaaaaagcgcacatcataaac

SEQ ID NO: 376477 - DNA, 144 bp, Zea mays
tttgccccaaaaaatactttttggaaatttttttacaaaattccacgctttggccggcccatagaaattgggaggaattttgtccacagggttaagaaggtttaaccttacttagaaaacccctcacaaaaaattgttgaccca

SEQ ID NO: 376478 - DNA, 264 bp, Zea mays
cattatgaggtagcaatgcgaccaacaggagtacacatgaatgcatcaattcagaagtgcagcatgcgtgtattttgagtatcagcacatgcatggttacttacaatggcggttggggaacgaccataagaacactgaacatacttgcagagactatcttcatatgacaacagcaggcacactccttttattcgcaaaagccagccaagtattacagtgtcacgtattagaaggacgcactccactcagcagctatacctatat

SEQ ID NO: 376479 - DNA, 290 bp, Zea mays
gtgtctattggggcttataggaggttttataactgacgggccatacatgaacctgctcgaatacacttttccgaatcctgcttaaaataatgcaaggggtgagcgctgccgggcaacgtgtgtcaggggtcaaaggaacaatggaccctgcacatatttatttcatttacaagggtgttacttacatggatacaactgggattagattttacaggttacactagggcgggcagagccaggaatcacatgccaatggctcgggatggggaaagctcaacttttccatccat

SEQ ID NO: 376480 - DNA, 173 bp, Zea mays
ggggggggcccgagcttttccatccaaggtccacaaaaataacggggctaaatgcttcgaaagacaaaacaaaacttttttattcaaggttcagggtacatatccttgaacccatcttaagcatacctagccgatttcaaaaggcaacccccccatcatgggggattggcccc

SEQ ID NO: 376481 - DNA, 309 bp, Zea mays
agaaaaacaaaaatcatttaattggggaacatttaaacagctttgccgaaaaaaacaaaaaaacacacacttcacatcatcctgttcatcacacttcacatcatcctggtcatcacacttcacatcatcctggtcatcacacttcacatcatcatcctggtcatccatgcatacgtcgacacgcacaacacgcacgtcacacaaactccattagcccaaagcagcagctaatgcgtcataattatttttgatttcctttcggatatttttccaaaaatatttgtcccaaatttccgtgacagccttgta

SEQ ID NO: 376482 - DNA, 246 bp, Zea mays
  unsure (1)..(246): unsure at all n locations
aagggcatgaacaaatngnnngaaaggggggcttataaggaaaaccgagcggaatacgttttacatggaaaaacgttgcaccggacccaagataacgacacattacagttgacacggcatatgcaagtcttgctgttcttcttttttgacaaaaacaatcagcaaggagttccttattgaggtaaagagaaggcggtcggcgactagcgtcagtcacccattgttgttccgaaaccgcgccaggac

SEQ ID NO: 376483 - DNA, 431 bp, Zea mays
  unsure (1)..(431): unsure at all n locations
tttnttttttttttgttttnttttttttttttttttttttttttttttgtttttttacgaacagagttcatggttttaaacggatagaagcagatacaaacagggtttatgttttcaaacggatacaaacacataccaacattggtcacaaacggatacaaacagatacaactggtcgcatttagctacattggtcacaaacagaattttcttaaacgactggaaacagaattttgggccgttctactccctttgcacatcacgcttaattttcttcctcggagtaatttttttcgcaagccacttcaaacttttacggggagaactagggggggtttcaacacgaactagttctccatcagggtttatatcttcatgaccacctggtgggatgtcttcctgaagaccggttatgatgtcttcctggggac

SEQ ID NO: 376484 - DNA, 167 bp, Zea mays
aaaggcaacccaatgttcccttggcaaaaaaaataaccagggttccatgggcaaagggttgatttaccctaccagccccaacggcaaaagggtttaaagaaaccaatgttgcccaaggagagtctcactccagccccatgggccatggcccggcccctatataaaag

SEQ ID NO: 376485 - DNA, 260 bp, Zea mays
cggaccacccatggggtattcagacctatcacgaacaattaagtccccgttttgccggagaaaacgcagagtttcaaaccccatttgcaaatttaaaaacaagagttgcctaggagtaactttccgatcagtcagataaaaagggggggggggtgcctacaaataatgccccataaaatacacgaacaggggggaggtttttgagttgggggggggaaaataaacgagatgcctgtacaggggacccaaacaaacacatt

SEQ ID NO: 376486 - DNA, 482 bp, Zea mays
ttccctaaacacactttatttcatggttggaatggagatcacatgaccagaactgctcagaaaaaaaaaacaatattttgagctgagatcgagtgctacatcaacatgatacaatattctagccagactcgacatacgaaaagaaaaaggaaaacttaagcatgacacgctgtagcagtatcaggctacacgttgttcttgcacagggtgtaaaaggtagagccatcaactgtctccatagttagctgattgagtcgcaacagcatcagcaaacaggctcttcctttgcgccccaatcctatctctgcaacacggtcctggttcaaagcaacactcccctgcaacttgtcaccacccaagtatgaatttagtttggatattccctcctgcaactcctcccatgatgctagactcttcatataaggagggagttgctcataatcctcctttgatgcccttatcactccttcaaaagaattacc

SEQ ID NO: 376487 - DNA, 318 bp, Zea mays
ggagaacaacagtgggactgattagggagagccgccggggtaggtacaacagtacacagcagtacagcaaaggtgaggtgagccatagcctgaaaacatctgcaagtcggtcggtgggtctggcgcgtttcactgcaaccgagcgacgagcgccgtgagcgccgacgcgaacaacaagacggtcaccccaccgccaccgccgttccgcccgcctgccggggaggtgaaaaggtagtaaaagttgctgggccgccctgctcccttgcccccctgtcccgctcccgccggcggagacggagagccatacccgccaccggt

SEQ ID NO: 376488 - DNA, 157 bp, Zea mays
aaggggacggctggttttaaaaccttgacaagcaaaacaacaaaggttttactggtaaccccaaattaaaaaattaccaaagctggcgacccacgggggttggattctcctgccctgcagttagagcagctccaaaacccaacattttggcagggct

SEQ ID NO: 376489 - DNA, 211 bp, Zea mays
  unsure (1)..(211): unsure at all n locations
tttntttttttttttcctcntttttttttttttttttttttttaagagggccaaacttcggggcattttcggtaagggacagttcacgatcgcaggctgacagccaccacttcccaggcaagttatgtttccccacgtttataagcaaattcaatgatatgccaacagtttggggaatgaattgagcaggagtgccaatatcaggccctgg

SEQ ID NO: 376490 - DNA, 222 bp, Zea mays
ttccttactcatagccctgagttgttacttcacaataataatgggaaattaacaacggggtcggttcccttgttttcaggtgatggtcaaatagggcacatcttttaacttagctttggcagcattcttctgcgcctccagctttttggatattgggccaatctcagactggtaatagttcaccataatctttctcttcttcttcattggggcagacaccaa

SEQ ID NO: 376491 - DNA, 318 bp, Zea mays
tcctttttttttttttttgttttatttttttttttttttttttttttttttgtgttttaaaaaagccatttgcggcgtttgttattcactaaaaacaaggcacccaaaaacagcccccacgggtttggaaatttgatcacacagggaaagtcaggcaaacccctttttacatacaaaaaaatcggggtaacagggtccaaatatactttgagtatgcccacccccccttcgtttttgtttgctcgttctaacacaaccccaggggcaaaagccgccctgttttgccactacactctccaggggggggaattcctcctt

SEQ ID NO: 376492 - DNA, 277 bp, Zea mays
gggttgggccctaacaagaaccagaaaacataaaaattcagaaccaataataatcctcgaagtacatgttcctcagtttcacatatccaagcattcgggcacactaattgactacaaagtatgcgaaaagcgagaagttaagcaacgggcgaagtccttcggcagcaaaaatcggggtttttaatcccttcgtttaaccacaacattctccaccccaaaagctacctgttattagcgacactgtcatcagcaacaaatcaatcgggttaaggggagc

SEQ ID NO: 376493 - DNA, 280 bp, Zea mays
ggggaaaaccaaacatgacaaattttttttggaggcaattccgttttgcaaagatacatttttccgggggataatccaaacaacagggggggttaaggggcttttttgttatttttgcttaaaacaccaaacgggaagcaaaccatcaaaactgatgccctttcaggacaactgagtaaaaaagccctgcaaacttatttcctaggggggggggagggaaagcacatgtgcacaaagagcgcccaaaggtcgttttttcgttgggggtatcaggcaggtt

SEQ ID NO: 376494 - DNA, 339 bp, Zea mays
aacctattcggtctggaccggatacatttattaaaaacattttctaaatcacatcacataggcttgccaaaattgaccgctcgcctcaagagtagccaccttcagatcagaaccatcaaaatcttgttgatactcgctggggcttcctctacacgcaaagtaataagtcgtgtctctgaaaaatatgaggtagaaatccatcaagggcccaaagccttcgtctaaaacatctagaataaagcctccttaatctccccaactttgcagacatcaccttcgttggtactgcggacagccatgtgattagcctactagctaaccaaccatagcaaattttta

SEQ ID NO: 376495 - DNA, 360 bp, Zea mays
aggtctacaatagtgggtatttactacatcatggagacattttttattcgaaaacgactcaaattacattttttaaagaaattacgtaggacaataattataacatgctatttttctactggcgggcttcttaaggggggaactcctctctggcccattcatcaggaggattttttgctgtcctgcagtcgctcaaatagactcgcatcgaacaggccccggacagtttctcgctgcaacaggccatctttgtcctttgccacactggagagtagatgccattcaccgatagcagcgatccagccgaggaaatcatatatattgcggtttgccttaagcatcgagttcatctcatctttt

SEQ ID NO: 376496 - DNA, 330 bp, Zea mays
gctgggaatggttttggataaacagtgattcatttcaatatttcttcatcttacaatttccgggcaaagaaattttcagactagcgagaaacaacacatttacctttcaaaagagataagttccacaaaacgaatctcggaataatgttgggaaaaggggtactctaaacatagcatttttagtaccaagcaaaccaacctttaaaaatatatccacttcttttccgtaccatgactgggtcactcattgaggggagtcgagttgacgccgatacagaaaaatcatgaccaggatatatttatcacgggctcttcagccattcccggaaa

SEQ ID NO: 376497 - DNA, 371 bp, Zea mays
  unsure (1)..(371): unsure at all n locations
aacttgtgcaaaggaactagaaatatttcttagaggatagaaatgcctgtatgctttcctgtattacagnaaaaactaacgctataacccatttcataagactatagaacataaactttgatattgatctgaacaataaagaccactaaattttgctggtttccccaagtataaagactcagaatttctacacaaaggatatataatacaatttttgtcatcaaggtataagcatataaaaccttatgccacaagaagtgttcagttcagtctccttggctgcagattcaggttaatggtgaaagattaggagtgcagagtgtatgtgtatctataatgctgaatttggcatgtaagaagttggactgaca

SEQ ID NO: 376498 - DNA, 134 bp, Zea mays
tattattaaccttcaaaataggggacaaaacactggggagaccccacccaggcgcatgggggctacaactacaacttccattaccagcatcacacgggtggtcatcacaggacagaacaggggcaacctttacc

SEQ ID NO: 376499 - DNA, 336 bp, Zea mays
aaataaatctcagaaacatgtctctcgtttacaatagcagactggtccatgatgtgtaatctacaaactctaggcgctgcagtagcaagcacaatataaataaaagcagctcaacaaagtcaaattccactttgagaagggattgacagcgatttcatgatcagcacgtatttaacaagtggcaaaatacaatcttttgctagtttaagctcgagtcttaagctaaaacaagggacacatttctacaaaacgttttaagacattcatatggagtttctgcaaatagaaaatccgtcagcagtgtcagctagggcctggaggtttcaattgttagta

SEQ ID NO: 376500 - DNA, 327 bp, Zea mays
  unsure (1)..(327): unsure at all n locations
ccccnntgcctanatttcttnnaaaaacaaatccagaacgggtgccaatttaaaaggaaaggagtgttgtcttatatttctacgccttacaatgctaggaaaaaaaatacttagattatattttaattcgatgcccattgaatgttacattgacataatattgccaatataccataaaaatcatggcttggaatttttctatgaaaaggataaaacataaatagatatacaagatccccattctcatttttaatctgctagtttttttcttccttccgctgcatcgcaggaactcaagcggacacccttgcaaatcttccaaatacc

SEQ ID NO: 376501 - DNA, 356 bp, Zea mays
  unsure (1)..(356): unsure at all n locations
acatctattctttttgggnaatatgtatatgtatagcataggcatgagacctggaaagatgcatatcttgggtacagcaaaatccatcaattcacccacacagaacagaacaggaaatcgtgccacggtacaactttataacagcagcaagctttgctgttccaatcatatttataactgatccacgtactatgaagatgacatatccgttatttataccggtaaacatctgccctcagacgattttttttacaaagagacgaaaacagaagatgaaatccgacttctcctaggccacacgcaccaccattttatcgagccaatacatcaaatcaccgtttggttttttccccttg

SEQ ID NO: 376502 - DNA, 306 bp, Zea mays
actgcatacctgcacaatggacaatcatctgatcactataccatacagaacagcattggccgccgggacaaacgtacacgctgccgaagttcagagctagtatttatgcacctagggtccgtgaaaaaacagaactgccaaaacaagcatgtcgtctaccgtaattcacccagatcgacccgagggcttcttcatacaggacgcaagacgcaaccaactagcctcagtcgacatgcttctgcttcacttggcgggacgcggaataggattggactgccgagctcgacatgctgatggaatgcttcg

SEQ ID NO: 376503 - DNA, 243 bp, Zea mays
  unsure (1)..(243): unsure at all n locations
attaatgacagntacacccagggggttcttaacataggtcttcaactgtagccaaccacctcaccgggccccagcgccatacagcaaagcacagacagaactagcaacgacgtctgtatacaaacgtcacacggccattttcgctacaaccccccctcagcttcccctaaattacgtaacgtaacgtaccgtacccgtgtatcgacagagagaccagaccaccagcaagtgacgacgccgccc

SEQ ID NO: 376504 - DNA, 342 bp, Zea mays
ccttaatcccctttttttttttttttttttttggggtttttttttggggggttttccggtttttttctttccccccccgaaggaaccgaaattgaaaacaaaaaatccgggggccaaattgcaaaccctttggacagaggcccatacccccaccctaacctgaaacacacccccattctgctacatgaatggggccccaagaaggcaacctaaacagaaccctttaaggtacaacggggtaagccctacagggacttacaagaaaattcagcttttgcccagttaagggtccccagctcctaatcaaaaacccaagaaacccagctcaggcgccctttcctt

SEQ ID NO: 376505 - DNA, 193 bp, Zea mays
cattgaaacttaaaaacagagcttgggcggagctgttgagttgttttgtctgctagactgggagacagtgattgcggcaagggggaaggagaaacttccggacggaattttttttcatccaaaaaacacccggcaacggggagcaagatgaattgtttaaagcacttggtttcaccaggccggtaaaccattt

SEQ ID NO: 376506 - DNA, 230 bp, Zea mays
tttcccattttacaaacaattttcaaatgttgaaacaaataaaatccaattggcggaaaatacaatacaaaacaatttgtgatcagtattgacgtcggagataaatcaagaccaacattgtgaaaagactggattagacttggataactgacaaggggggcctcgagtaaaagccgttgacataaccgggaatggattttttgcttttagaaacaacaaagcttttttgg

SEQ ID NO: 376507 - DNA, 272 bp, Zea mays
acgaggggtatatatatctctctccctccaaaacccagatctgaacatcaccattaaatttgtacatgcatcacacgtcatctcccagctagtacctcaaagcagcagcagcagcataacacctcctgcgacaagcgtgcagacgagccaagaagagtaggcagttgccctggtcgccgcgccacggcggtggtggcttctggcgttgaggttacggggatcgacgacccctgcgccgccctgctccggcgtgccgccgctcgggtgcccgc

SEQ ID NO: 376508 - DNA, 140 bp, Zea mays
cgaatagctgctgctctcaatgtttacaacgttcttatctctaatccagtttcgtcagagccacagcaggcgcagtagccaaatacacgtccaagtcctcagcatcgacatcgagggaagcctgctggccatggggccgt

SEQ ID NO: 376509 - DNA, 211 bp, Zea mays
taaagggaacatgtttttttttttttcgaaaataaattggaggggacaacaacgggaaaagcccacattgatcgccaagaccccaacttatttaattttttggggacatagggttaggtaaatacttggtgaactattgattggcctggggatataagcagatccggggggcaaactaacagccttggcaaatttttcccttttgaaacaa

SEQ ID NO: 376510 - DNA, 235 bp, Zea mays
aacaattggggctagtaccatttggcgtccacacatttgggggctagggatcacgagggggggggatccataggggaggaatccccttggtaacgggatggggcccttccaccccctggaacaaccattggtgaccctccttaatgacaaaatccttatgggagggcgatgcgggtgatcctgagctccgggggcccgctgtccctggtccccagcaggcgcagcagttttgccc

SEQ ID NO: 376511 - DNA, 157 bp, Zea mays
ctccttctatgaagacggggcttttgggaaaggatcgccggatactcctaaaaacattccagacaagccactgaacaaaaagataaagtttgaggactctgattcctcagatgatgaggatgaagacaaccctggtgaggaagccgacaatgggaat

SEQ ID NO: 376512 - DNA, 456 bp, Zea mays
cccctccctttttaacactaataaatatgtaatattatggtaaatacgccagacgagcacataaaaaccgccacagtacatatcgaaggggaggtaaggtccggtgagcgtcgctcgtgccgtcggccccgtccagaaattttgattatatactttaggttcgtcatactgcttctaaccacacatgcttcaaaaaaaattaatgggacatgattgattcaagtacatgcaatagcaagaaaaactaatgtgagggaaaatgcagagttacctatgccttcttgttgacccacatcgacgaccaaattccccatagttacagaaaaagatgacatgactccaggtgaagcaacttaatggcttttgtatgatcctggaaagcatcgactgctgctcgcaagccactcgatcttcgcttctttagtagtgtctctaggaacaactccttcagcaccc

SEQ ID NO: 376513 - DNA, 245 bp, Zea mays
aaggccaagtgttttgccaacacgcatatacatataagtttatacatatgcaaaagttctacactacatgtaaatgaaacaaacgaagtacaaaacaacaggacatatatatatatatatatatatatatagactagcccaaagaaagggagaaataaaacgcatgaaaacacagagatcttgtttccgagcagcatcaacacttccatcccagtcacaaaggggcacgacgaaagtagggcttg

SEQ ID NO: 376514 - DNA, 278 bp, Zea mays
aaaaccctcccttttttgttttttttttttttttttttggggtgttttttggggttttccgggtgttttcaaacaaaaccccaaacataaatgaaccggaaaaagaagttttaggggtcaagacccccagctccgggtaccgactttgggggggggggggggcccccccctttttagggtgggaaaccacccggggccatgagaggttcttctggcccggcctggaaaacccccctttttattggggaacccccaaattcccctttcatttggttaaa

SEQ ID NO: 376515 - DNA, 225 bp, Zea mays
aaagccaaagggtgggataaatcaaaactgcaaatttttcaacagtttcagtccagactcgaaagggggaaagaaaaattagatcccgggcgagaccaaacttgttgtaaagataaaagacccgcgcattaatcctgggtggtgccccaccaaatttttccaatcactaagccggtcagtggcccccacatgggttggtggggcaattgccatttgccaaaacct

SEQ ID NO: 376516 - DNA, 375 bp, Zea mays
  unsure (1)..(375): unsure at all n locations
tttnntttttnnnttattttattcttttncnnaaaagggcaaagngtgggtcttgagtacacgcgacgcgaagatatgatgtcatcacacaagtacagtaaagaatgtagcagcagcggttgttactcgctgtacagaaacaagtgtcgatcgaccaagactcgcaagctgaatcaaattgtagatgggaggaaatcagctagtcgctcttcctgaacttgacgccccccttgaggatgcccttgctgtccagcttgctgtactggctctgcaccagccctagcatgttgtacaggaactcgtccacctggtcctgggacctctcgtacagcacaggcaggggtgtgcgcgcacacgaacccgatgtagatgacc

SEQ ID NO: 376517 - DNA, 241 bp, Zea mays
  unsure (1)..(241): unsure at all n locations
tttntttttnnnntattattatcttttcccnnnnggacgcaaccgggggtcattgaatttactgcacagaaaatctaaagacaccagttcccaacattatgcatgaagggagtgaaggccggagattgattgatattctggatcgaccgatcatccgcgcgcagttacgttatttatttgtcattgctgacccccgcaagaaggggctccgtcgtcttgttagcctcccacttgtgcaacc

SEQ ID NO: 376518 - DNA, 345 bp, Zea mays
  unsure (1)..(345): unsure at all n locations
tttnnnnttatttttttattaggccaaaaananncatacaaatgcgaagtacatgcatcaaagaaaaagattccatacagaacccaagtacataaaaagggcaatagacacaaggcactccaaagataaccattccaaagaacatacaagagtgtctcatgtcaaccttaactacaacgtctcaaaaccagatccaaagaagccaaaaatgaacgcaccatctgcggccatacagcttgtaaacaccaccagcaaaccacgatacaccgtagattagaccttgggagcaacaccgcctttgacccataacaaacgaacctttggaatcgtgaagaacatgaaaat

SEQ ID NO: 376519 - DNA, 308 bp, Zea mays
cataacccaacaaaaaccagggttaaccccggccagccagtttgcaaacaaagcagcaatcaagggccaagcaatcttggccagggaattctggctatagaaggacaaacggcaacatttaaacacgattggctctagttctaacaagtctaaaaactgggggagacatgggataaataaaagctgagactatgggccccaacgacagaacacaggcttagggcgtaggctgcctgttctttttctggacaccagactgggcaaccgggaggctggggtacacagagctaagcctaccaagggccgac

SEQ ID NO: 376520 - DNA, 348 bp, Zea mays
  unsure (1)..(348): unsure at all n locations
tttnnnnttatttttttcttttcccnannnnnnnnnntttttgtgttggtttttttttttttttttttaaagggaggggggccccggccccatggaaccccacattattaatatgcttccacagttcacaggtcaccaaaaaaattaaaaaccgggcccctttttaaaaccctttcctgatcttaaagggaaaactattccccgatccagggtttttatgcagcacaaaaaaccatagctgggcccgcaaagaccaaggccgtccctaattttggccgggaaaggacccccctaatttaaggggggaacccccctcgaacaataagcctaattctttgggggcccccc

SEQ ID NO: 376521 - DNA, 303 bp, Zea mays
  unsure (1)..(303): unsure at all n locations
tttttaacctttttncttattatccnnnnnnannnnnttttttgtttggttttttttttgtttttttttccgttaataaaaaggccacccaaaaattgggggggaaattgcaaacaaaaaacaagatgcttggggggaaaaaaggggattggaattgacaacatgttcctggaaaaaaaaccaagacaagggggggggccaaaccaattctgaaaattatactatggccaagggctgggaaaaaagagggaccatttttgggagcccagggctgggaaaaaaaccgggggaattgcaaaaagg

SEQ ID NO: 376522 - DNA, 304 bp, Zea mays
ggagggaacaaacagtatttgctttcaacttacagggttggggggaaccaaatcatcatacaaatgagccctggaattggcgttctaatacgattgggcaggactggcctaaactatgttttttttggaaagattatgcttatatatttcggtatcaacatgaagccataactctgaacttcacttttagcagtctttgggtcctgaagaccagcagccacgcacacatcactaggggtcctaagaaaacctcaaatcataaagaacaaaattcctcgcgggagttagccacttgatctgaaag

SEQ ID NO: 376523 - DNA, 455 bp, Zea mays
acgccactaaaaacgaatcaataaatagatcaatacaatgagtggtgtaccaaatggtattgtatctagatatacattattattgtacaactatcactgcacaaaaatcaaaacaaatcctttgcataagaaacacacatcacaccaactactaatggagttgatctgaaaataaacacgaactgtgcaagagatcagagaactccatgaccttatccccttcgtccgtcccctcgtttccaatcccatctcttcatctctaggtgagtgtgcaaggcgtgttgaatcattgtttcacctgatcgatgctgtgaagtgattgcatctgatgaaagccagcttggggaaactggtgaaaaacctacactactatatacagctcctgaactgcggcctaaccaaactcaagcaagatgatctgtcctcctgtcaatgccatgcatcaagctagcgga

SEQ ID NO: 376524 - DNA, 265 bp, Zea mays
  unsure (1)..(265): unsure at all n locations
tttnttttttttntatantttttttttttttttttttttttttttttggttttttttttttttttttttttttttttttgggggaaaaaaagaggaataacacgggcaatgcccgggacaacctccttgtcacgttacaagcagacagggcacttttagatggggggggaaaccctcaagtttaatttttgggaaaaaaacgtttacagaatggtcgctagcccctccttggcaggaacaggcctgttgccaggaaatgctttgg

SEQ ID NO: 376525 - DNA, 250 bp, Zea mays
  unsure (1)..(250): unsure at all n locations
tttnttttnttatattttttttcccaannntttttttttttgggtttgttttttttttttttgggaaaacatgcttccggaacttggatgggtttctgctatggacaagatatgtcacccacaggcacagttaactccgaccagcaaactcaactggggggggggggttcttaaaacttcacagggatctttttttaaacacatgcccagaatgcatgctaaaacttgaaacaacgggcatgttaattag

SEQ ID NO: 376526 - DNA, 332 bp, Zea mays
cagggcacatgtacattagctaagagctttagatcctttacaagcgaaatacaacaacataatctagctgttccacacaggcccagtgcttctgttcaaacggaaacataatctggccgtgcatctacttaagagctacaggttcctatcacgttacttacacacaaaaaaatgaacggctttaaacaggggtcataccgctcatataaacaactcaaatcagggactggcttcctttggcctctccttggagacaggtgagtcaagtttcttcggagctgcttctttcgtggacttggacgcggcggaggccgtgtcctcctggagccact

SEQ ID NO: 376527 - DNA, 301 bp, Zea mays
  unsure (1)..(301): unsure at all n locations
tttntanctattttcctatttccccnnnnnttttttttttttggtttttttttttttttttttttttttccacacatgaaacaaacatgggctcaccaagggatacgtttataacccatcacacaggaatacttagggtattgggcttttagcttccgccgggcccaatcacagaacttgaatggaaaaggggggaaagaaaaaaaaaggggcgacccctaagggggcccgccattgccgaattgggacttgccggtttgggcccccctcagctgaccaccaaggggggcaggaaaggccc

SEQ ID NO: 376528 - DNA, 373 bp, Zea mays
  unsure (1)..(373): unsure at all n locations
tttnntttttnnnnttttttttattaacacagagcaaaacgccaaaatagaaatacgcccatcggactacaaatggtatttaatactacttgcctaccagctaataaattaattaataataatacgatacaactattacttgctattttattattattattatactatataaatttggttgagaaaattggaggagggagtcagggagatcagctccttccctaaatggatcatcagccaaccttaattaacctactctgcttaatttggctttgtttgcttacatccaccatcttccatacccaaatagcatgcctacttcttctccagcaggtgctgtccgccattgctactggtgctgagccagttggag

SEQ ID NO: 376529 - DNA, 370 bp, Zea mays
  unsure (1)..(370): unsure at all n locations
tttnnnttattattatattttccccnnnnnnnnnnnnntttggggttgttttttttttttttttttttacatcacaactgaaaccagagcactggaacacacttcggacaatataaatcatggggcaagggtgccaaccaatttaagggcccatacctacctacataatttttacacaggtaacatacccagggggggggcatcacccatccttggtattggtgggggcccgccgctaagggtttagggcgatcacttgacccccattaactgggcatttttaaaccaaaccaaacttttaaaagacgcattatcaaattttttttggaaaacctatggtacaacactttttccttccacggattttttt

SEQ ID NO: 376530 - DNA, 498 bp, Zea mays
  unsure (1)..(498): unsure at all n locations
tttntnntttttnttttttgggcgaanagcttactaccgngcagcttgcaagaactgattatgcttacatataagaacctgaccatccagcaggtccaatctgcaaaaggagctttacactgtactctatattcagatagtacatgaagtaaaagcacatgaccatttgactatgtggcaacaacaacacttgactacattgttggcccaaaaacgacaatgttgatattttccttcatgcatgtcatgaggatgtaacaagcttcattttctggaattgtagaatctaggactttgtcaacttgggtgtgcttcatcctgtacataagtttgtggtaaaattaaaatgtatctgctgtttgtcctacttttttataatactctacattttcggtggtgaggatagctcgttcttgtaagctgtgtagtgttcatccgcctcgccacaaattgagaaggatcaaacgtcctgttgcacgagcttgaacgaaagagctg

SEQ ID NO: 376531 - DNA, 274 bp, Zea mays
  unsure (1)..(274): unsure at all n locations
ataatccaancaaaaccacatgattgcatccacacatttgcctgcccgacactcattaactcaatttgttcacgacaaaggccacggatccggattcaaacgaccacagctcccattgctacctcgtcttctgtacatcagagctaacacatgcaagcttgccatgtcatgctgttcagagttttacacagacctattaagctctctcaccatgggcggtgcacctgctggatctatgctttggcagtggttgttggtccggcagtggacatgc

SEQ ID NO: 376532 - DNA, 281 bp, Zea mays
caaacttaagaactgaagccgagtacattcagtagaggtacattcagtagaggcgtcaaggctagatactagatactacctccgttcttaaatatttatcgccgattagtttatttttgaactagaacgcgacaaaaaaaaacaaagggggcattatattctttacaggactatatttctatgcatgccatccatatagtaagcatgtagatgcagcaagggtgagggtaattaggtgggtataagcttggagcgaggcttggagaacgccggagttggat

SEQ ID NO: 376533 - DNA, 165 bp, Zea mays
ttttcaacaacaacaacaacaacaaaaggtcagtccgtgcactggacgattataagggggccagggtgaagtacttgtcgaaaacaacgacaatggaggtgtccggggagctgaggaccctgttggggaggtacccgcgcgcgaaccggagtttgcccgtgccgc

SEQ ID NO: 376534 - DNA, 240 bp, Zea mays
cactattttgcttttctatgagcaacggagccttggaggattctgacgcagcatatattacatccataattccatagctcacggcataagaaaagaacatgaaaaccgaatacagcaaagacattacagactgcactcggtgttcttatcgagtctcgaactgaatagttgaaggcaaaggagcggcaggcggtgaatcgaatggcaggtggaggtgggcgccgcgggagggatcggacg

SEQ ID NO: 376535 - DNA, 112 bp, Zea mays
cccacccagctttgctacctaaagataaaacacagagaattgaactcgaacattgttgcacaacacaacatatattcatgtcgtataaatatagttcttctgtacaagattt

SEQ ID NO: 376536 - DNA, 236 bp, Zea mays
ataaacaggggattttcacaattctgatggatactaggcaaaagctacatattacacagggacaatgaaaaaagtgacttgaagttcgagtttaggacgattcaaacgacagcaagtaggtttacagacacaggacatgctttacagtgccgaagctactgacagatacacaggaggaagaacagacagcaaactaaaggcaaggtataacgcacagagcattaagcaataagcgc

SEQ ID NO: 376537 - DNA, 177 bp, Zea mays
gaccctaataatttgtgaagaaacatttggatcacgatccaatatcaccccccaatatcacacctatctgcaaccgaacagggcctaaaatgagatggaacacagcttaaggaacagcggcctattactatcgccagaacagcccgagatcagttcttaaggaagggcaccagggca

SEQ ID NO: 376538 - DNA, 161 bp, Zea mays
caagcaaacgcatggtaactggaaacatctggttcccagagatttcttcagggtcatgccattcaaaactgagacgagaatgtaaataaatcctgggatggccgtgtcttctatttgcggcgcttgtatcttgctttgctattaaaagcctttgatttttt

SEQ ID NO: 376539 - DNA, 198 bp, Zea mays
tagggagttttatatgcagagcacctaatgttaaaagtacaaatatctgcgaccagtttagatatatcaaaagatactagtttgatgtcataaattttggcgccttttttgtatgaactcgattggacttgaataaagtcccgacttaagacaactttataaaatgacgtaagacgaggccagcaggtcttggaagga

SEQ ID NO: 376540 - DNA, 193 bp, Zea mays
gtcctccaccatccggttttttcaaacaaagaacatgcatgggcaagaaaaggtcagtttcgctcgactgctgactgcaagatgatctgtaccaaccgacctctaatcacgcgatggaatatttaacttgccgattcgacggcggcgggcaatcctggttgtaacagccgtggactgcaactgcaatgggtcc

SEQ ID NO: 376541 - DNA, 220 bp, Zea mays
ttttgtttttttttgtttggttttttttttagggggcaaaaaaagattttttcttaggaagattaaaatgggggggccaccggaaaggtgcaaaaagaccattttttttacgacattaaaaacttggcaaacattacaatgttttcccccgaaagactggctaaaccaagctggtttaaacatttagcctgggtagccgcccccggggatttttcaaacc

SEQ ID NO: 376542 - DNA, 275 bp, Zea mays
gaaggaaaatcacaattttaaactagaattaagcccccaaaatgggtttgcacacaaaagggccacacataacatttttttccataacagaccccaaccgttttacagacataataagcccgccggttgcatttataaagatgccggggatatagtaaaaacgtacataggcggggggggggtttaatttggggggtatccctcccatgaaggttcttgggttagggcaggttccactgaactgagcctgggaaaagtcaaacccagggtttttt

SEQ ID NO: 376543 - DNA, 197 bp, Zea mays
ttttggaagactgccggtttattttttgcttaaaaccatagaacacacataccccctgaaaactagcccaaaggaaaacacatacttcaaacttagaacaaattttgttacggggtattccaccaatgggagggttacctaacacttacaccttggaacggggggtcacccccaaatttttcaaaacaaactggttt

SEQ ID NO: 376544 - DNA, 321 bp, Zea mays
tttttgttttttttttttttttttttttttttttttttccagggggaaaaaaggggttttttaaaaaaaacaaacagctttccaaggatttgtttagttttttttgacaaacgggcggcaccggaccccaggggtttgggggggttttccggttttaaaaacctttgtttaaaacccgggccctttggggaagccaggggatttttttttttttcgccttccttttaaggggccagtttttcccggggcagtttttttggtgcctgaatcggtgaagggggttttgcctgaacccggggaattcccttttccggggggggc

SEQ ID NO: 376545 - DNA, 360 bp, Zea mays
tacaagaacatttttatttggcacattatgcatttcaaaagtcactctacaaaaccgagtaaactatacgatatgccttctacacgagaaaatgactgcttgagcttaataagaaacatggaaccccccgagtttggggagaaggtttcctatcagcctatttgtgatcccagaaaatgggaacctatccattatttattaggggggtctgccatggactgcaccaaaccgtttgtttacaattgccatgctctgggacttgtttgctaaaagaaaacccaggtgacttaccggttttgctactaactatgcaagtcaagccatgcaagaaacgccttatctaccgatgatctgaatcac

SEQ ID NO: 376546 - DNA, 151 bp, Zea mays
tagttgggaacaaattctgccaaagagaaacaaattttgggtggggaaacaaattttgtctaagagaaatgtgcaagagccaatgttatgaaagacataaccgtcttgaccaggtacattcactcactccaattccttgagatttataaat

SEQ ID NO: 376547 - DNA, 242 bp, Zea mays
actatacatgcattggagttcttcctggggagaaagaagccaaaagcgattttgtgacttaacaattgcaagaccaacgcataaaattctcatcaccaaaagatgggaaatcggaaaattatcaagttaagaatcaaaagaactttcgctccacccaacattaacaaaagaaatgcaatattcccaactgaaagctatctatttacattgtacagctgctgctgctgctgctgctgcttctt

SEQ ID NO: 376548 - DNA, 163 bp, Zea mays
ggtaatcaccctcataactttttttttttttgtgtgttttttttgggggaaaaaaacgccttgctaaccaacattgcggaattcgggaaagggaacttgacacacaactaaattcatgcaaccaccttgcaaaagaaagctgggggatgacaacataaataag

SEQ ID NO: 376549 - DNA, 452 bp, Zea mays
  unsure (1)..(452): unsure at all n locations
ttcttttttttttttaaatantcgatatggatcttgattgaagaaatgggcgaaagaaccaatgcaaaaattgctctatgtacagtctgaagctatcctatacctctacaacaaagaattcaaaacaacgcaaacaatcatctacagccacccgttcaatctattcctcgtcactacttgaatcagaatctgcactatccttcatgaagtgcgctggcaggtttggaaatcttggcatgaccctctttcttttgctatctgcttcgggtggtttctgagctggtgctgtttgaccatcggtcgctgacgctgtcgctgctgttgaggccgcagccgctgccacagccgccacggtgggggcagcagctgtgtttggctgcgatgacgacggcgctggtttcttctgctgcactttcctcttgatgtccacacatgcctgatcaaccataccc

SEQ ID NO: 376550 - DNA, 251 bp, Zea mays
gctatatatacagccacctacatatccatggccttgtgaaaaagataaactttcggcagcggccccatccgattgacgggccctaaacataatgccgagctcaaccagcctgctgacttggggcaccaccgggtggacggtatgcagagcggagaagcggtccgcccacgctgccagcagcggagcccgtcggggatggaagcactctatgccccaaacctcctggtttgcgctgacccacccaagcaggc

SEQ ID NO: 376551 - DNA, 266 bp, Zea mays
aaccacaggaatgaattttaagacgtacgagtacgtacgtatacgtatatatgtatacacgatgtgtaatatataatgacacagcagctactagagcagcacatgatggtgatcatcaaccacgcacgtaccggccggtcatcagctagctagcatgccctggccgtcgtcgatcgatcgacgatatgtcctcagaagcacatgtcgaggacgcagcagcagcagatggcggcgcagcattctttccagaaaccgtcgccgccgcg

SEQ ID NO: 376552 - DNA, 294 bp, Zea mays
cgaactcacatacatgttgtacatataaataatcgacgctaaccaggtccgtccaactctgttttgattgatacttaacaaataattattagtcactgctcgatagccatgcagcgcgccatcgatatggatgaaggttgatcatttttttggcgcagcagcagagccactattgcccccggcttccttgccgtccttcttcttggccttggtggacagcttgaggtgcacccccaggtcgccgtcgtggcaggaactctgcagcagcagcgagttgatgatgacctgcacgtt

SEQ ID NO: 376553 - DNA, 267 bp, Zea mays
tccttttttttttttattaagaataatacataaatacacattgacattttggaaatgaaacatatcgtttttttgggggtgggggcaaacaaacaaaaatcagctggttggaccaattcgcactacgcgacagtggtatggatgcacaaggatgcagaagaaacgattaaaagtggaacactgaggaaaaaaaaaaaagaggagtttccagagcacaagtttcaattcagatacagaaagatagatcaccatcccagattaactcca

SEQ ID NO: 376554 - DNA, 213 bp, Zea mays
aaaaaaaccccaatttctgaaaaacatgacacatcccactcttaacaaaccacaaaggctcaaacccccagtcttaacaaacctcaaaagatcagacaagttcttggaagcatgggtcgctcaaaaaaaaccccttttcaaaaaaagaaacctaaaaccttgccaccaacatttttacggggggccccctcaggggccaaaattccagcaaaa

SEQ ID NO: 376555 - DNA, 213 bp, Zea mays
gggcaacgtctcataagaaccggccctgcataaattgaaggaaagaatgatttccattggctaactagctaacttttggaccgtttccgatttttcattcccgacacggaaatgggtttaaaactacccctcaaaaacgggtggccccagcttaagagccatcaccatcactccttgggccttttccccactaccccattttttttcccattt

SEQ ID NO: 376556 - DNA, 236 bp, Zea mays
ggggctgccttggttaaacatcccaaaaaaaaggcccgataatataagggggccaaaaagaatcaccgggcccaagggggctgactgaaaacatgcccaaaggtttggccatccaaaaacgggaattggccggccggaaaatagagaatcaggggattgatcagatgcttcagcacaattttgggaaaacccgtccaaacccccctggggcaaggttttccatcccccaattcccc

SEQ ID NO: 376557 - DNA, 330 bp, Zea mays
agcagaaatccgtcaatttctacatgttaagtcatatgaacacatttatctttctacacacgtaatcttaatgatactcagattctctacgctagattctctcagaaaagcaggtaaaaaaagctgaaccaaacagtataatatgtgtcacgtcatgcggtgccggctatcatgaagctaatccacggaccggacggcctttcatcagaagttgaacaagtgcatctgatctcccggttgccacgctggacgatgatctgcctctttcttccctttcggtatccgcatcaatgtcagcgccagtgaattccctgagcaacatagcagcag

SEQ ID NO: 376558 - DNA, 279 bp, Zea mays
ggatatatagggcattaactatcttgggaaggtgggtaattggttttgttacacaggctggtaagctaatatgaattgcacacgtgcatactatacatacacatacaacggtgttcgctgcaaacctgccagtgccaggcatggggcctttcctgtctactggagcgagaccatttaccaactatagttattcagcaatatgcccaggctaagaaccatagatctcatgctgaataacttcagtggcacgattccggaaaggatatactcctgtagaaa

SEQ ID NO: 376559 - DNA, 218 bp, Zea mays
ggggggaaccgcttaaaactttccatccaacaaagacaaaaatacgggggtaacattgggggctctcacaagatatcactaacatagcttgacaaaaaaatagatggaacacgttgcttgaaaaagggacatcgacgggatgcaaaacaacaacacttcagcagcaccaatggaaggccccttggatgtctaggcttcaagcggacgggatctcgacc

SEQ ID NO: 376560 - DNA, 288 bp, Zea mays
gctaatgcagtgcatagtgcgaaattaatatacaatgttctacacttggattctgaataatcatgaatccacggagtcacagacaggaatgatcgtcagtagtcaaacacttcagggttattgacagtgtgatgcctgtgcacctcatgaaaggtagtagcgccatccttgtgatgatggtgatgccttttgtggatgtccttttcaagcacctcgccttcgtggttcaccttcacttcctcttcctattcatcgaacacttgctgctttgtagggagtggggaaggc

SEQ ID NO: 376561 - DNA, 246 bp, Zea mays
agcggaaagggactttattacatcaagatgtccaagacatccaaagagtttataacatagttattaacataatcaaagtacggaatacaaaacatagcagataaggcattcacaggtagctgactaggggtttgccactaagataactataactcgtcgtagtcctgaaactcctcaaagtcctccatgttgccagcatcctctcctgagcactgaatacaatagggacaacctggggtggtgtgg

SEQ ID NO: 376562 - DNA, 236 bp, Zea mays
ggggtccaaccataaattggttcaaggaactattactctacccaaacaattttaactcttgattacatatccttcagaaaaaagttcaagggcaagctttttatagcaaagaactctactggaaacttatgaaggcaagaacagagagcatttagcagacttcacagaggggagaagaaagagggcaaagctccctaaaaagaatagcgggcgggtggagctcccaaccacgggcg

SEQ ID NO: 376563 - DNA, 424 bp, Zea mays
ggccgatccaagcaagtttacataacttatccaccgcaaaaatatttactagtacagtacactagtccaaagcgaaagcgagagagagaaagggggaaaagataaccagagaccaatacgccaagccctaaaataaaagcgaaggataggccctcgctctcgctcacatgtatcacatcacgaatgagacaatctcggacactctcccaccgtccaccggctccactactccaccacatgttgactggagcgagctcaggccggcggtcggcatccgttctccgcgcgggcgcgaacaaaaattcacttttttcctcggtgatgctacagcacatgcgctgcttaacaacccggaagctaatggcgattaacaaggtagctaatggtagagtagagtagagtagcagcatgcgctaattaatca

SEQ ID NO: 376564 - DNA, 242 bp, Zea mays
aaaaggaaaaaacccgggctggaatttttgcccaatcaatgggggaactggcccaaaacggggtgtttggtgtccccggatcgaccaggggggggctcgttaagcataaaggaccccaggaagctcttgttgggccccatcgggaccggggggtcaggcctcactcggaggcaccccaaatttgggtcccccctgggccggggggcgttttaaacgggcaggggttttttgtaaagctgggg

SEQ ID NO: 376565 - DNA, 167 bp, Zea mays
cctcaaaaagggacagcctcatcacaatgtgtttacccttatatttttctcagttccaaaccactaaagtgtataatctgacaacaacaaaacataatagttcataaactaaatcctaagaagaaagttttttccctgaaaaccctaaaagaagggggggggggggg

SEQ ID NO: 376566 - DNA, 150 bp, Zea mays
agaacaggggacacaccaaaacgacttttttggtcagggggatacacaggcccgaagggcagggaccacgagtttgatacaaagacgagcagagttgcaaaagccatggggatttgttcttcttggatccatccacccctgggggggctg

SEQ ID NO: 376567 - DNA, 262 bp, Zea mays
gatgatctgcctaatattatgccattgacattacacaatcacaacatatatagaaacctaaactaattacaagtgacacctatatatatatctacttcttcagtgtatatacatctacacatgaaaactgcacacccaaacatatccatgcactcttcttaggccaagtattgctggacggacaacaatggtttggccacagccaaacaagcagcctgtacattttacaatcaatgggcgtacaatattaaagcatcatttc

SEQ ID NO: 376568 - DNA, 326 bp, Zea mays
ccccaaaccatctcaacttgatgttaaataagcttttcttcaattgacattattcctaaccgatcgagtatgccatagtttctcgctagctctctaatcttgggggcccaaactaaaataaacaactttgttcgactcggcccaattttaatattataaaagtaaatattcagaactccagctccaaactaacagaaacaactttgttcgcatcgacaaacttaaacaaaaatgcatgttgcacgactacaggtagcgataaatgccatagcacaaatactgatcgccgcataagatagcactacttcgatgggacgaaactttac

SEQ ID NO: 376569 - DNA, 144 bp, Zea mays
aaaacggacgggctatgatcgggctgaagagaaagagatgacggggatcaacgcggttcccgtccccaatggggcggggggggacatcctagtttagggcccctgggctagggtttgcacaccgtttttacgatcacaaacaga

SEQ ID NO: 376570 - DNA, 125 bp, Zea mays
gtccgacccggcgcttgcgcgactggcgggctactgctcgcccaaggggcgcctcatggccagcatgattgtatggcacggggctgccccgtcagcggcttttttcatcctgctcaaaaaggaca

SEQ ID NO: 376571 - DNA, 301 bp, Zea mays
aaaaaaataaacacacaatccaacgagatgagtaatactgcgtgagattctttatataaagctattcctcgcaatacaaggatgcaaataaagattcaccgaataaatttgtatgcaaatggagtgtttctaaaatccataactgatctctattcacactttatttcttaatctgactaatcagccattccataccttcatgcagaccttcttttgatttagctgagcatgcaacgatggaccattgtctatctttaatcaactgaagcgtcaaagtttctgaaatctcatctgcagggag

SEQ ID NO: 376572 - DNA, 287 bp, Zea mays
gctaaaattcggttatttaaacccacgtaaattcacatttttcaggacatgtttcgttccaaaaaaaaggggggctaaaatttcagaaaaaggttttggcccacacacttattaagggcctgattggatcttgatacaaaaacgccggggaccgaccaaaaaagttcctacgtccatgcaaatatgggtggccaaaataagggcctggccggcacacagtatactaagacggggctggaaaaacagatggaacagcaaccgggacggatcagttgggggcgggcttt

SEQ ID NO: 376573 - DNA, 348 bp, Zea mays
ttttttttttttttttttttttttttttttttttttttgggacgtaagagcttatgggcgtatatattgacaggtttcttaactaaaccgctgatatagaaccagacaattttcccatgcacgttacgtacgtgaagggacgttttagagagagagagaaaaaaaccagcaagccgtaaaacttgttaaaaaaagcagaaacactccagcaaccagcatcatataccgtcggacttcaatttcataccgccgcggtatatatagggcacgcgtgcgctagattatactacctccgttaggttatatataacgctggtcaattcaattttaaactaagcagggtcatat

SEQ ID NO: 376574 - DNA, 275 bp, Zea mays
gggagaagcaacaattcatttatggcaggttgtttttggagactggagtacacatgaaacaaacattgtctaaccaatgtctgcgtctttattccatcacacatgaatccttaggttattggagttttagcttccgcctgacacaatcacagaactagaatgtaaaaaggggtaaagaaataaaaaaggacgactcctaatggacccccccattgccgtatggtgacttgccggttggggcccacctgaggtgaccaccaagggggccgggaaag

SEQ ID NO: 376575 - DNA, 306 bp, Zea mays
ggaccggcagtctggtggtcttcaagtagcataaactaagatacatcgatttcgacagagtagacccttcagccagcaacaaccatccggggggtacataaaagtcactacgcttttacaggatttttccaagaacctgacgagcacaggggcagctgggggactgaactagcgagcaaaaatacaggcaggggagcgatgacccctcctcatgcatggctggctgatgcccaccaaaaattcagagggaaatgaatccttccttgaccaaaagggcgaagaggatgacaacaaagcccgccggga

SEQ ID NO: 376576 - DNA, 244 bp, Zea mays
aaaaggcgaaaagtttcccaaaggggactacaaggggccaaatgaactttgtttcagggtattattacaagcgcaggggacacaccacgggaccaccccattttattcaggagactacaggccagggtaccccagataactagattcccatcatttggccctttttacgaacttttcatgcgaaacttccaaaccctaagggagttttcaccatgcggggtcacaatttttttcatcccaaccg

SEQ ID NO: 376577 - DNA, 290 bp, Zea mays
aaaacaaaaaggccccaaaattgggcccatttcgggggaacaaggcccaaaaccccaatggcatgggggctttcgccaaaaaggttgggggcctcgacaaccggggaaaacaaaacaaagggccaatttgttgggaaaaaaaacccgggtaaacacccaaacaaaaatcccgcccaactttggccaagaaactggctagcaacaacccccaagttttgggtctttttttgggccccaagggggggggggggaccacacttttttttggggaagttgacacccctaggggg

SEQ ID NO: 376578 - DNA, 247 bp, Zea mays
gcgggcatgcaccagcggggtcagatcatatatatatcatatcatgagagggaaagatggatatccttaggcaggcacgacatgcaaaatgtgcgtgcaaggacaactgatcatcgaggtgaagcatatacgggcggtccatatgcatcgtcgaggacaacaacagtctgtatttatgaacaagatgtgaagggaaggaagatttacagatcgcgatttgggatttcaatttcgggatgtttggatg

SEQ ID NO: 376579 - DNA, 352 bp, Zea mays
ggcaaaaaataatgattggtacatgggctaaaggcaaacaaacagagagcagagctccaacatgttcctaggggggacaagaacacctaaaaatatcacttaccccttcaattacattacatgactgcaaaatacgcgtataagtgcaaatgtaaaaaaccgcacttctgtaaacaaaacgcacatctggcagtagaacaatccaaaaggaaactatggatcatatccctcctccctagacgtaagtccagggcgcttttttctgctcgaggtgctgcggtttcaccacgaccgaattcacgcagaggccgtctttcgtgtgcgtgcagtctatctgaatcatcgggaacct

SEQ ID NO: 376580 - DNA, 196 bp, Zea mays
aaccccaaaggggggggaaaaataaaaaccattttgacaaaacataagccccaggttacaaagaccagcaatcttgtctacattgacaaataattcaggggaacacaattgggaataaaactttattccccgggagccaaaaaatagcccacgtggtaacaggggaaactgggcatggggggggccaaactttttt

SEQ ID NO: 376581 - DNA, 182 bp, Zea mays
aactcgagaagacgacgcactgattgcggggtatatttccattctttattacgcgcgtattgaacattgtacacatggccgcgacatacagagtgatcaggtgcaattaatccatgccactctgtccccagaaactctgccaggtacagtcaaaggcaccaaaactgatacaatccctgtat

SEQ ID NO: 376582 - DNA, 299 bp, Zea mays
ggaaaaaggcaccagcatggggctcctcgtatattcatcgccccatatatcatatatataactatccctatcacctaactatactgtatacacgtataccgccatgcctatcataaatattttggagttaacaacaacagcctttatccggccctttctctttttcttttcttgggcaaaatatttatttgaatggggctacgtatactaagctaaccctggggggctttttttatgctatggacagttccaaatcaggaggagaggccagcttggtttgtcttgcatctgggcaaaat

SEQ ID NO: 376583 - DNA, 215 bp, Zea mays
aatatggagttcataacttggggatcaattatcattacatggagctcgatcctcgaggcacatcgtcgtcgtagttctcggcgttgacaagatccgtaaccctctccacgaggacttcaaagtcgtcatccgacttgaggaggctcaccctcgtgtaccggctgctagcgtcgtagccagcgccggaacgcgtgatgatcctggccttgagcagc

SEQ ID NO: 376584 - DNA, 149 bp, Zea mays
ggggagggacaaaatctttgttgagaccatccaactttttttaggtctttggcaacaacttaaagggggaaaacgtttccaaaaaaaactttaggggggaaaagcaaggggtttccatatttacatcctactacactggtgctgggggt

SEQ ID NO: 376585 - DNA, 204 bp, Zea mays
aaactctcaagcaaaggtaattaaagtttgcttaggggggggagagtcccaaacacccctttattcgagtattggatttttattctatttaataagataacataacttgatgaggcatttcatcaaatggctacactggcagctaaacggtttgagcctaaaaatttaatgagcttttcaaacgactacactgggaactaaaag

SEQ ID NO: 376586 - DNA, 242 bp, Zea mays
aaggtatctctcgttattattataattaaggtcaaattcaaatgggtaaaaatgaggacactcctatcactgtatataaaatacacgtttgagtacaatacgcaataataagactcaacactatgacctcccatatgaatatgataaaccaacgttttattctgcaacggtgctcaccacctcactgacggaccgagtttagatcttgagggactcgataaacctcgttccacgagaaaact

SEQ ID NO: 376587 - DNA, 348 bp, Zea mays
  unsure (1)..(348): unsure at all n locations
tccttttttttttttttgctangttcctctctaattcatggaaatggtagcatatatatggtatcatcagcgccataaaaccaacagaagcagcaaaaggacatgacatcatcgtcttcaatggacaccaaaccatgtctgcatcatcagttaacttaacacctctctctctctctctccctctaaagatagatataggtagataaagactaataggaactcaaaacagctagtagctctgttacctgaccccaaccgccaaaatctcatctcaatccgatgccaccatttctcttttcttcagggaacaaatcttccaatggatttatctcatgtttttttcctata

SEQ ID NO: 376588 - DNA, 203 bp, Zea mays
acaggagaatatacattggaggggtgggaccaacagatcgtacatatgcaaaacagaggtttacacaattttatacgggagacaacactggttataaagtacaatttggagtatgaggtgggacggtagacagcactatttacaaagtaaaatttaaaggatgaggggtgataggagagctgtcggagataaacgggttcctg

SEQ ID NO: 376589 - DNA, 243 bp, Zea mays
aagaataactttttactcgattttgggggacttggcatgctttgatcacttggggatatccccatatccaggaaacattcatcaaactaaactataacgggtaaaacccattttgattttggattatccaaatccactttcaggtctagggtctggggcctgggggccccccccggcccagaaagaaacaaagcagagaaagggggaaggttttatcctctccaactactggtacttttaaac

SEQ ID NO: 376590 - DNA, 352 bp, Zea mays
gcttcctcaatttattaggactcaaacaattccaataaacaaataaatagtagaaaacaattgtaggggggggcataaataggggaaaaaaagaaaagaaattttaaaaaaaaaggccaataattgtaatagtccaacaatcaaattcaatacaaggggggaagaattgaaatgaatgcagggaataaggcaaaattttaatgattcttaatttttaaatctttttggctaatagggttaataataatccatataaacatttcctatggacataataattgttccaaacacattttgttgaacccgttgttgaggagaataagaagaggaagccataataaaataataataa

SEQ ID NO: 376591 - DNA, 224 bp, Zea mays
ctatctatagaagggcatccccttataaaatatgcttaaattccaattccaaatcccaaaacaaaggtttaaatttctacaagttgatctaacagtccttcctaatacaaaaaactgggcattttgaacttcagggcattttttagatgcaaatgatctcttgggcccccatctagaattcattttttgcaagcttttttagcaaacagcagcactggagattt

SEQ ID NO: 376592 - DNA, 277 bp, Zea mays
aggcaaagaatgaacttctcagcatcttcactaagggggaccttttacaattacacggggccttccagcacccgcccgttttccgcaaagcatgcatcaagaaattgcgaaaacatttacacaagaacccattaacccaacccccctcccaaaaaaaaaactactggtcccccttatctagggaaagagcaggatctggatatatctggaatctggacaaggatggagggcggagcacctatattattaggggctcagatagctccatctcgttgga

SEQ ID NO: 376593 - DNA, 270 bp, Zea mays
aatccgatcgactccatttcaaaaggcaaaaaaaagctatcatatcagccgagcaataattgtatcaattattaaccttcgagcatgcaccgcaaaaaaagggggaaaaagggtccaagcatcagttcatatatctcgctgcctggttctctaccaggcaccagctatcccaaagcatcaaagaaggcatcacaggtggtattgttcgtcatcatcaggcgccttgttccttggacggcgccgggtacttgacggcgttcttgacgatct

SEQ ID NO: 376594 - DNA, 177 bp, Zea mays
ccctccttgggctggacaattgacccggctaaacagggcaacgtttcattttcactttcacagcagctacacagttattgccatgctatgctcctagccacaactcgtgtatgctacgcatggcatggctattacacggcctgaggctgctgctgcacgccatagtccttgagtggg

SEQ ID NO: 376595 - DNA, 137 bp, Zea mays
accgaaccccaacttttaaaaagcaaggtttgggacggcctggttccccacaacattacaaccgggggaaccccgtggggcccccgctcatgggaaaatgataccatcgggtttgggtcatccaaatttttaacggg

SEQ ID NO: 376596 - DNA, 211 bp, Zea mays
aatccataaaattaattatatactctttctacgtcccttcataaaaaagaagaagaaagattacaattctcggaatcaaacgttttttgaacatgagccatagatattaatggggttttctttgaactttgttaaactagtgtacgtatcattttgcagcccacgcagacatggcgtagagtactcgtcccttccacccttgcaggagcca

SEQ ID NO: 376597 - DNA, 269 bp, Zea mays
gggggccccacaatattccattttatttaccaccaaacggggtatcccaagtagcaaaataataatgggttattacatgattaagaatagcaatcttctgcacttggatacaacagattcccctgccttggaacaaaaaatacttcgaattgggggggggccataacataaagtacaattccccccattttaacaaattattgtgcgggtttcaaatgctttgacgatgggattcaattcatgggaataccaccacataagaaaggggg

SEQ ID NO: 376598 - DNA, 306 bp, Zea mays
gacccaaaagccgaaaaacttatgattggctggaattatggaaaaaaaaaccctttgcaagcgggtatgcgtccaacccttgacaacctgggtttattttttcccccctaaaagcttgagtgggatcaccattgcaggttcatcattagggctaaacatcctggtgagaaatattctcaaaatttacagtacacgaacacggcaacactactatacatatgtatggggatctacaaacacttcaaagtatgaacaaaacgcacgccgggctatttaatatatacacggttggtgaaaatgctcccc

SEQ ID NO: 376599 - DNA, 162 bp, Zea mays
acacaaaaaaaccaatggcattgcaagcattaacacaggcttatcagaattcaaacccaatgtatactttgtataggacgctgaaacaaaataatacagtatgggggcatttgggatgatcaccggacgggctttttttttaattgaccgccagcacaaaaa

SEQ ID NO: 376600 - DNA, 149 bp, Zea mays
agggcaaaaatttagagaaaatatattaccttgacaggttaattacaaatgtttagagcaagggtatattacaaggggcaagcattacagggtcgggaacacatttattcccttttgggccaacaaaaacagttcgcaggacttgggat

SEQ ID NO: 376601 - DNA, 192 bp, Zea mays
aaaacagaccccccaataaattttatcccgaataaaaatggggggttgaattattcggtacattacacgttactaaactacatgcttttttgggtacacaaaaaaacactggccttcaactttggttttccgtcctcccccggttatcacaaattacaaagtttaaaatacacttaccgagaagaatttcaa

SEQ ID NO: 376602 - DNA, 238 bp, Zea mays
accaataggatataaaagataatttttcatggggggtttacagtttagctgtgggaccatacacccaagattttgttggaccataacaccattgttatcataaaactgggtagaaaagacttttccagttttcttaacggggagaaaaccaccggggtccatattttaaaataagagttgggggaaactgggtatgagtttgggggtctttttgccccattttttttagcacaatccg

SEQ ID NO: 376603 - DNA, 279 bp, Zea mays
cggccgccctttttttttttcttttttttagtaaaacagcaccggatatatatttaatgactgagccaaacgatacagggacataatcacacacactggcgcaaagagatcacagatgcatggtgtgtaacgatgccatacgattacatgcaccaacacaagcccaacagaaccggcaccaagcatgcatggcggagagccagagtcagaccaaaccatgggtccatcctttatttttggcacgccacaagcacaaaggagacaggaaaaaaaagggga

SEQ ID NO: 376604 - DNA, 288 bp, Zea mays
tttgtttttttttttatattttttttttttttttttttttttttttttggtttttttttttggtttttttttggggggggattaggaaaaccaaaaacatggtttcggccctttttttgcctcagggttcaaccgccaaaaagccccccttggggttttccggagggcccccaaaaaaagggtttgaccagaaaaatcccccaaaaccccctggggccgggggactaactggtcacagggccacccatattggcccccggcttatgggggacagggtttttgcccccc

SEQ ID NO: 376605 - DNA, 153 bp, Zea mays
ggggacattggaacttttggtcccaactttcattggcgaaatgatctccctaccctattcaggggtataaaattgttccccccaaattgattggtttacgaactgaccttacccttgggcccaggccaaaacatagcaaacccaaacccccgg

SEQ ID NO: 376606 - DNA, 246 bp, Zea mays
ggggaaaacccaacccctttttttaacccccaaaaacctccggttggcccccccccaacatggggcaaaccgggttttcaaaagggcccaaagggggtgtttattttgggaaacaaccagtttcccttacccaaaacgggaactgtttcaaggggggggggggggcccttaaaccccccaaaaagaaattaaactttttttcgggttaaaaaccccatggggaccaccctcccccaggtttttttt

SEQ ID NO: 376607 - DNA, 206 bp, Zea mays
ggggagccctctccaagcggggtcccaaaataaaggttaaattccaggtttcaccattttcctgaatgccttgcatcgggttcatatgctataacacagggacctcccattgttgctgcagccttaagagtccagagcaacagaagggcaagaggaaatccaactcatacccaaccgggcagttttttttattacaaaaagggaag

SEQ ID NO: 376608 - DNA, 261 bp, Zea mays
agcttggggttgtcgtttataatataaatttaaatatatttttaatctaaactatcaataaaatgccttatcaagatattttctaacggttctgcaggcctaggattttctggaccacctaataaacctaataacctgctatgccagctccaccaaattaattttttaaagatagatcagtcccaaatagaacctaagcagaacatcaaagcaagtcctccatgctatgacgcttcctctccttgacaaaaccttaaagcc

SEQ ID NO: 376609 - DNA, 277 bp, Zea mays
ggaccaagtcctcctaaattttaacatttcaatgggaatccaagagatgcaatggccagaacacatttacagggggacagacattttccagcctttaattccccacattttcggcctccctgcccttataaacaaccatccattacacaatgccattatacttttcccatttactgtgacaaaaacaagcttactttggtttcaaccaaacaaaatgtagaatgggaaccccaaaaaaaaacccagcaaatcccagtaaattaacgaaccaaaccaa

SEQ ID NO: 376610 - DNA, 361 bp, Zea mays
ggggggaaaacattaacgcttactccctgcaacacaaaagaacaatatgtccatacataggtatttagatagaacaacaaaacaacctataggggtgtaatctagatagctacatgttggtggttccaatactaatggctgatgcataattcgttagcgacgttcatcccgtgcctcatcaacgaaacaagcaaaggctagattgtgggcactggcatagtacccagaacgggcaccctaaggactgatttggtgaccggggatcccgaggggaagaaatcctcttgctattcaaaattgaattgcaagatgattcctccccatggatcccctagggatccctaatcaccaaatcaccaaa

SEQ ID NO: 376611 - DNA, 259 bp, Zea mays
ggcacatcaatcacaaccgtacaatgcagagtaaacatcgccgacgtggacaaattcataggaaccattgacccacagtaggaaataccagacgagtacgtagcacaaatatccagagtggagtacaatctgacgatcaggcagacacatgcagcactatcacatatgattccaattccaccaggcggaaaaatagtaagcaaacgtcagaaaacacaaccggggacggcggggaactcgtcgaagctccacaggctga

SEQ ID NO: 376612 - DNA, 119 bp, Zea mays
ggggggggtttgaattaaacacaaatgtgttttcaatacaaacgcaaggcccaacaggcaggatataatcaccagctgatgcccaacttaagtgaacttgggcttttagttttagcaaa

SEQ ID NO: 376613 - DNA, 433 bp, Zea mays
ggcagcggtcccatatcaccatattcatttattttgcaaggggtcgtctatatgaaccaacgacatatgcatgtcatcatccagtacaagaaattctcaccatcatcatccgactccagttttattaattgaccatacgtacgtacataagcacgacgactgcacaggtacacgagacagctagtagctagtagcatacagtcgtgctcgtgcgcggggcatcgttccatcgtagacagaccgatacgatggagggcgcgtgatccgaatccgaggcaggcatcagtgatgggggtcccctccgttggatgggggaacggtttggcgacagggtaggagttactaccaggcccgccaccgtgatagggactgggaaggtaggggcgcccacgaactgggcatgccccgaccccgacgcacgctggacggtcac

SEQ ID NO: 376614 - DNA, 246 bp, Zea mays
attcggggagggctgtttggggtcttcagaatcaaaaatgacaaaaaatgcaaacaattggaaccctacgccctgggtctacatgtcgtttatgcgaaaacagaggtcaaaaaaggcacttggtaaaggagcattgaaccccaacgatgtcaacttttgaacagcgcaaacgatacagcagtgggtttaattttttccgagactgaccactaaccatgggtggttttgcattgaaaattattaccc

SEQ ID NO: 376615 - DNA, 279 bp, Zea mays
ggggggaaagatttaaaatgtttaatttcaccccccattggagaggaaacttaggggccaacaacagatcagtccccttgacccttgacaggagcttcattggtcctgtttccaggacagcttttttgaacaggtttcaaaaccaataggggggggcttttaccaagcttcaaaccacatcccaaacataatttgaaaaggccaagaggggcccctaccatggcaaaacattcaggtttttggttcataacccttagacgggataacaatttttttccc

SEQ ID NO: 376616 - DNA, 291 bp, Zea mays
ggccggggccagccccagcaacattggggaaaacaaaaactggaactggttttacattggtacaaaatttacagaagtcggggcctcctgcgttttgtaggccgcgggcttggcccccgccaaaaggaattgaacgcccccccagggaacaaaaaaaaataacgggccttataacccttaaaatttttttttcaagttttttttttttatagaaagtaagggtccccaggggctttttaagtttcatgggctcaaatgtgggggggtaaaaataaaatgttacaagccttt

SEQ ID NO: 376617 - DNA, 158 bp, Zea mays
tttttttttttttttttttttttttttttccaaaccaatccatcatcaggcatatgtatatatgcataaaatatttaactgaaactaagtcatatcccaaatcactcactgcagggttactgaaaatagaacaaacatagaaatagttgcaggggtac

SEQ ID NO: 376618 - DNA, 314 bp, Zea mays
aaacaaacacacctggtttcaagcttacatgggaaatattcaaatatgggtgcataaggggttgtttggggcagtaacactcacaaattttactaaacaaaatcgttacaagtactggtttcagtcatggggaagggagcagccatacactttgtccgctttgtttgggggtccaatgaaactatttaaaacatgtttatttcacagaggccggaccagcgcaaacaaggggggaacccatgggaagtcatgagatctgagaaagagggtccttgaaccaagaccaataatttacccgcaggggatcacatttt

SEQ ID NO: 376619 - DNA, 232 bp, Zea mays
gggctccaaaaatctttggagggatgctttttaattatgagcaacgtttttacaaggaataagatgcgaatacatcaaggtaatatcattatttggggccctccaacttatgaatgaataaatagggcaagggggtgaccaccctgcttgaccacaaggggagtctggggaaattcctaagcatgggtacttggtgaggaaacattgatacaggccgggctgggattgggaa

SEQ ID NO: 376620 - DNA, 154 bp, Zea mays
ggtagaccgggaaaagcacatgggtcccggggaaacatgttattacaaaaaaggggggccaggggggccaattttttcaggggtcccactccatgggaaaagtttggaacaaatcccgacaactttaaccaggaggggccctaaatcaggcctt

SEQ ID NO: 376621 - DNA, 185 bp, Zea mays
ggggggaaccaacaacccggttggttttttaagggccaaaatgggtttagcaaaaaggggtcacgggttttaattgccattttttaaaagaaaaaggtttttttaagggggcattggaacaacaattaagaaacagggggggtttacaagggatgataaccattttccggggggggggggaaagg

SEQ ID NO: 376622 - DNA, 323 bp, Zea mays
aaacaaaactttgtttgaaaaaaagttccatgggaagtccccaagggcgaaaagggggtcaacaaagatgttcgaccacaaaacttcttttttcagccccttcttaggcatttatttttttggaaaagtcacttgggaggggctcccctaaaaggccttattttagatcccccaggggttaactcctttggggggctagcttcagggctgctttttttgggatttgtttttttgcacaaacgaagggccctccagccactcatgggggggggcataagttgttccagttccgagctccaccttgggggccttttttgtttttt

SEQ ID NO: 376623 - DNA, 233 bp, Zea mays
aaaaaaaatttggcaggaaaacagggcccggcttttaaggttggtcccgaaaatggacaaagatccaaacttttttttacatactatggggggggggggggtcaacagggacagagaccggccgctggggcccccttttttacaacccaaaggggggggttagttttgggaaaaaggggccgttggaaatatgccaaaatcatctcccaggggggggggcaacaaaaaggggg

SEQ ID NO: 376624 - DNA, 259 bp, Zea mays
ggggggggtgtttattaccacattagtggccagggcattaaacttggaacacaaacttgggacgcaagggtttattttaaaacacattgaccgggttacaaccacgggccattaaaaaacagggcccgaagggggaaactcaaacaaatgccccataagttcagggggacttaactttgggggaacacacaaagggctaaattttgactttttagcccgggccaacagataatactcaaacaaaactttggttttcatg

SEQ ID NO: 376625 - DNA, 375 bp, Zea mays
ggcaaatcaaacccacaaacttaaaacggatgagagcaaaattgttggggaaacaaactccccggtccagttttgatgggtacactcaaccttaatttactggggatggggattacagcacctgggaaaaagaaaaggggcctattgggtttaaaattcaaacaagcgccacccgtaaacaatcaaatcaaaaggttttaggggccatcagagcatccaccttttttttgctaggatgatccggcaggaaccaccgagttgtagggctcgccgagaccataggcgtgcctggggaacgacagcctaatgctcgcaccaccggggccactacctccaggtccagatttgtactctttgcccatttccacgtccggg

SEQ ID NO: 376626 - DNA, 168 bp, Zea mays
agaacacatggtataatagtttataggaattgagctagtacaggcacttctgcatagcatggtattagcaaagtatgtgtgtggacgtataacaaaaaagaaaagaaaatagagaaaagctacatcatcatcctctatagatctttacacttgatatccacgatcatc

SEQ ID NO: 376627 - DNA, 209 bp, Zea mays
gggaaaacgaaccccatccgggggtccaaatggttgggggtctttcctggccccattttgaaattacggggctccatccaaattttggttgccaaagccccaaatttccccgtttaaaacaggttcttagactaaactcaccggtgcatgaaggggtagcagggcaattgttaacccggcacatgaacaagtttttgcaaaaggggggg

SEQ ID NO: 376628 - DNA, 269 bp, Zea mays
aaaaaccgccaaaaaaatgggccccatcaaaataaaggggctgggggctcccacatgtaatagaaggttttttagttcaaaaaatggatccaggttggggaggggttaacccgggcccaataaattttttttttcccggggatggcttttaaaaaaagactggttctttcttccgggggctaaaaagtccatttttttttttggccagtttcctttttttttcagttggccgggaacccacaaaaatttttttgtttttgggggggggg

SEQ ID NO: 376629 - DNA, 308 bp, Zea mays
ccccttcaacattccccagttcattcaaaaccaaacattccatgctcgacaaacacggggggggtccaggtggaacgaaaccaaaaaagaagaacgggttctagctttaacagcatgggcgacggttactgttttaacctgcaacctttacagaccaagcccaaccaaccccagacctttggggggtcaggtcaggtcacgggacctgttgcccccaattgtacctgtccttggggacaaacaccggtttgttgttttgttgggggatgatcacgggctggcccatcgggatgccctggttttggggg

SEQ ID NO: 376630 - DNA, 279 bp, Zea mays
cccccacataaacatataataagggggacaaaccggacaaggactaataaataaacaattccgaatataaccaggccggggtactagggggcaaattggcccacttttacaacaaaaatacgggccagggatctgagtccagtctcgggcgggttcgaagggttccagctttggtttttattccaaacaacagttaaaaaaaaagggccgaaaaaatggcagtttttttttttaagctcctacgggaaaaacgggtccggacataaaagttgggggggg

SEQ ID NO: 376631 - DNA, 341 bp, Zea mays
ccaaaacaagtgtggatagataacaagtatgctttgaagtatgacagggggagatctacttaattcttttatattttggttttgaatctgagtataaaaaagggtgcactataatggaagacagagaattctagtttaaggaaaatcaagttctttttctttttaaacaaaaacccaaaggcgaaaagaaatccaactagacctattttttgtcctgttcggtcgaggccactggagctgcgcattgcttctgatgcggcgaccatggccgaagatcccctgcgactgacgccaacattaactggcaactgcattccgtttttgatgaaactaaatgaatt

SEQ ID NO: 376632 - DNA, 108 bp, Zea mays
agtacatcagcaagcaacatctgaatggaagaggggtcgtttaggatggccggggcgatagacaaacagcctgttgccgggcaggcagacaaacgtaagaggcaccag

SEQ ID NO: 376633 - DNA, 363 bp, Zea mays
cccgaccactatttttaacaggctggttacattttgacttttttgtacataatccatccgtatacatacgtacgtacgtacacggatgggagtcgactttcctaccacaagtcctaactacaacggaagatctgtttttaacaatttccacagaaacattaactaaataagaaaaaaaaacttttgcccaaacaagagggaaaaaagctacttatttatgctacaaacaaaaggaaaaaaacgagcagtacgcacaccaaccacgagtttgcagcaaacagttagcgtacgcggcacgggggcccgcgggtcagcggtcatcggggaagcactcaagccagcggttacgggggggcgccccaa

SEQ ID NO: 376634 - DNA, 147 bp, Zea mays
aaaaccgacaaatgaattaactggataaagctccaaaagcggaaccatgatacaggccattggaaaccgttttaattattaatacgggggttcaaaggccaatagggaataagggttaaagatttgaaaagacccgaaccccagaaa

SEQ ID NO: 376635 - DNA, 254 bp, Zea mays
gatcctctagaagcgccgcccttttttttttttttttttattttttttttttttttttttttttttttggccaaacaaaagtatgggggatttctggggcaatggagttcttgtttcagtttccctggggctcatgcttctgctacaccaagtaaaaaaaaaagagcaggcccaaggaagagggaaagcaggcttgatgtgctctgcttgcagctacatcccttttcactacagatttcgacctgggtttccat

SEQ ID NO: 376636 - DNA, 297 bp, Zea mays
ggggaagataccatgtttctttttaagatcctttttatttttaatcccccacaaaccctttttctctttttttctggcaggttctagaacgggcccagattctaaaaaacagtcaacacctaccccattcttgagggcaacccacaaagcaacagacattccctttttttggacctaagtgcaaactggttcccaaaatctcagctgcagaataataggcaaaagaagaggggaaaaaggggcccgacaaaagaaaagaaacgaccctccaatatgggggaaaaacagacaaggggg

SEQ ID NO: 376637 - DNA, 276 bp, Zea mays
aagggacagggtgaattgaaaatttataagaagctatctgtttttccagtggatcctacaagttctgtccgaaaggtttgcttgatttgatcctactcctacctaacactataccagtaatcgtgtatgtttctgtgcacatcctatacatccagtgactacttggtctactagtagccactgcgtggtcgacggtgccttcccccgttcctccggtcgccgccagtggcatagtcatcggtgaagcttggcctctccgaacgttcaccttggaac

SEQ ID NO: 376638 - DNA, 203 bp, Zea mays
ctcttattctttaagggcttcgattgggaaattataaaattcgtgagctagtggcactgaagttacaatattgccagacggcaacaagataccttttattattttaatttagatggcagatcatgcctgccccttcccacccacttcttcacatgtccaatcgtttgatatctactactggtatggatatggatcgatcaatc

SEQ ID NO: 376639 - DNA, 314 bp, Zea mays
ccttggaaacgaaagatgttatacagcccgttgttccaaacgattttaatcaattttccccctcacgcgtagacgctaactttttgaaccagtcctagtaagggcccaaagggtaccccaagtttgggggctggtttggggcccagtgaattgaaccccatgacccccttaaatttacggattagttgggcacccccattttttaaagagattttttttttttaggggaaaataaactttttttttttgaaaaaataggaaccccctgtaaaaagggggtggccaaactagcctaaaacaataaattatcccag

SEQ ID NO: 376640 - DNA, 218 bp, Zea mays
ggggggctggcccaaaagagctccacgcttacattttagcattagcaaagtaccacattattttggactttaaaaaacgcccttgggcttgacaatgatcttcttggagcaaaaaaataagccaaacggtaaaaagaagaaacattttaacagcacagcaggggttccactgcatgatggacatatctcgacaggttgcttttgggctcttaacctat

SEQ ID NO: 376641 - DNA, 304 bp, Zea mays
aacaccatcaacactcatctcgataacatgaatagatgacttgtcctagcaaaacatgtagccggagaaaagaaaacatactgctgcacacccacgcatgcgaacaatctacagtatcaaacaattccatgatcgacagcacctactaaagacccttataataaaagggtgccactcagaatgtgatcccaggtcgctcttcacaccattgtcaatccagtgtctgaacaaactgaaatattcggagcgctaaagcataagctttccagggatcttgggcattaaatctgtcaataacactttt

SEQ ID NO: 376642 - DNA, 201 bp, Zea mays
gtcaaggcaacctccgtccgtgggttaaaattaaattttcttacaaataattacatcgccaatccatgaaaatcagttggcataaaataaaccaatagagtatttaagcgaagaatttaattaggcttgcagacaacaggcaaaccaagatagcacgaaaggaaggctttgttaaaaccaaccaaccattcattccaccca

SEQ ID NO: 376643 - DNA, 155 bp, Zea mays
gttcttaaaattactacatgtttgatgccaatttgggtgaatgtacacgcctcggaggagacataactcaagacatatgcctttatatcactgatgacatatacacacatgcaggccagggcctcagaggatgccaaatgcaacgatttgggagc

SEQ ID NO: 376644 - DNA, 319 bp, Zea mays
attactatggatgcgtgtttttttcacgcacttacgaaaacactatcatcaaatgcgtggttaggatcagtaaactggaaaagttgatcctgtacctttattttacaggtgaagggaatcgttgctcgtaaccctcgaagaaaacgccgggctattagctactatctaacaatgtactactccctccgtttctttttattagtcgctggattttgcactatccagcgactaataaaaagatccagcgactaataaaaagaaacgaagggagtacatgcatgggcattcggaaatctgtcagggtctcatggatcagtat

SEQ ID NO: 376645 - DNA, 226 bp, Zea mays
ggggacgaagcttctaacagtaattaatttatcactggtccgaccatgaacgaacgaacaagtggttaattacagggggggcagcaatgatcctgtacaaaaatgcgtcgtcgtcgcccggcccgagatggattttcgtttgccccttggggtacacgtgatgaagtgttggacctaacacacagtttcgacggatcgggtccgtgctcccgggatttttggtcct

SEQ ID NO: 376646 - DNA, 304 bp, Zea mays
ccgcgggaaacccaaaatagttcagcccaaaatttcggcccatttttttgggctcccgcggaaattctacatatgggaaatcccaaggggaaatcccacccctgggttaacgaccacaattatgatgggggtttctgggcaaacctctgcagggccttggggagttcacctatccgttgtttttgggcaggccgcccatccaccttatcagattgctccaggaggggcctttgggccttgaaaacgttttccttttttttttgggctcgcttgctcggttggctcctgccctgggtcttttttt

SEQ ID NO: 376647 - DNA, 256 bp, Zea mays
aaaagcccccgggcaggcccactgaaaaaacaggggttcatgggaaaaacaacttcggcaaggaagaggtttagcaattcccggtctaaaaatttaaaattggaatttttaaaaaacctggggggccaactttttgttttcatggaacaaaattgggcccctaacaaaacgagggggctggcatcacaggatcccttttccttttggggggccccgcctccaccagaagccttttttggggttttttttttccccc

SEQ ID NO: 376648 - DNA, 273 bp, Zea mays
ggccggaaaaggcccggcccaaaaaaacgggaggttaataagggaaaaaaaaaaaaggggtaaaatacaaaccgggcccagggcccaggggaaaaattggggcattcgcccccaaaaaaagaaaagccccaaaaaacctgggccggccccaaaccaaaggggggcctggacggcccccaagtaaaaacggggcaaccggggtggggcccgggctagccttaaacctaaagggcagaaacccccgggggacagaagatcccccccagggggggg

SEQ ID NO: 376649 - DNA, 309 bp, Zea mays
aaagcccaaagcagcgggcagaattggaccacaacccattcatgggcggaaaaaacacccgaatggaaaaaagttaaggacaaatgccccaaaatggccttcaaaaaaaaaaggggccaaaaacccaaatggcaaacttttaaaaaggcacccagagacgggccccctggttgtcttgatgggaaaagaccggacgggggcaatatcaaagcccccaaggggtttttaaacgaaagcgggggagggagggggtctggtccccctcccagggggctcccctggggggcctgttttggggggggggggggc

SEQ ID NO: 376650 - DNA, 278 bp, Zea mays
aaaatcaaaacagaacaacttcactgggaactaacgcattaggcgctcgacgacgacgaccgtagtagctagttaagaccagatgcatgcatgcatggtaaatcggggctgtaggtaagctacatactttctgttctgggggcgatgacggcaacaacagaaaaaaaaaggggaaggggggggtcgtttgttacaaacaagcagtaccgggcaatctctggagttgactgcccaacaattggccatgatcgctatagcttccacgcaaaacttgggcc

SEQ ID NO: 376651 - DNA, 345 bp, Zea mays
ctaacgaacctaattgtatggctgttatagagatcatatatttatgtacgaaataaagcattaaaattagattttttttttatgtatacaacagttaatagatacgtttcctaatttcccgtgcatgcaaatgaaaataaactacgtgcatacaaggaatgagacgcatgcgcgagaggggctttatttctctgataccactgtcacacacgtaactcaccggcgagatcacccgagagcgtgagcagccacagtagagatcgagagggggataggatctcagaatagcttaaggaggaagaaggtgctcttccgctccctctgttttctcttctttttaataat

SEQ ID NO: 376652 - DNA, 399 bp, Zea mays
aaggcaaacattccatgtaattaaacagatataaacaccaaattctttgggttttatcaagattctagcaaggttgttttgtgcaaatatactctaaaataagtaatacaagtcattaattttagcgcttcaagtttttttgcaactacgattgacaaggtaaagcatgggagcgctaaaaaaggattaacctacaaaagatagcagttctcaacctataccttaaaattcatgtgcacatgccacctactgaagtaaagagcacctacactcttatatgtccaaatcatcatctggatcttcatccgagtcaggttgctcgtcatctgaatcacggaagtaatgtatttcaccctttgcagttccagatttgggattttttacttcatccacaagggg

SEQ ID NO: 376653 - DNA, 326 bp, Zea mays
gccgccctctttttttttttttttattttatgcaatacagctcacatttttttccaggggtcatgaataatgtcacatatttctgtaagtaggcggcggcttcccaccacacagacacagacgatgcatgcaaatagagcccccactccccagactcatctagtcatctgttctctccgatcagcagctggtgtcgagcatggcctcgaggaaggcggcgacgcggtccggggtgacgcactgcgtgatgagccgcgcccctggcttgtgggcccagggcttcacgaggatgcacgtggcgatgtagtccaggtttgtcagcggca

SEQ ID NO: 376654 - DNA, 274 bp, Zea mays
ggggggaacatgttgccacaaatttttcaggtccaacataacttacatccaaataaatcccaattaaattccaccccgttggggcagcccgtccatttttatgggaatgggaaataacttaagaccaggcggggtttaacttaaaacgcaggaacgggctcccaagggctgaacaactgtcctgatgactcaatttttaggccgccgctgagtcccagttttatcctttctttttgaagacaagcctgctcaaaaggttagcacggggcttttt

SEQ ID NO: 376655 - DNA, 327 bp, Zea mays
ctataagtcgacatatgtatttattcaaagggcgggggtgttgtggatacaacagcgttcaagtgagttatgcatgcattgaatgatggaatgcatgcatgccctagcttgcattgatgtcacagacgcaacttgatgtgttctatacaaaatacccagatgcatgcaagtagaactacatgctcactctcttaataatccacagtgaattaattggttctgcatgcacagtgatatgcatcatgcatattggtcccaacagttcattagttagctgatggtcgatggagctcgctcaagctagggcgctctgatgaagcaaccata

SEQ ID NO: 376656 - DNA, 217 bp, Zea mays
ataactagtttatatccttgctgcggtggttgaaattgataccaatatacaaagtacagtttgaggtcatggagcattggagctcgtgatgactacgaaggcaatgctttcaggagctacagtaacacggttgacaaataaatattctagctgccaaccacagttactattttccgcttacgatggaaaattgggcacagacaaattccatttaggg

SEQ ID NO: 376657 - DNA, 276 bp, Zea mays
accccgggcccattttgattccctgatatggaaggcatgttttctcttccatacaagttccaaacagggtctagattaccttctgatcaatggaaatggtgaaatcaggtagtagacgtggtttacatgcagatacaagaaaacgatttcgtagttctctgaacgcacatgatctccattggtaagactgaaatggcacagaaatattttgtgcaagaaggaagattaattattcttctgggggtatgtatttttgctcagggattaatcaatact

SEQ ID NO: 376658 - DNA, 239 bp, Zea mays
cgtgggtaagctgggaaaactttttggggtattcattcggacaaacatgcgggcatcaaaaaagggggggaattatgacacgaaggaaacggggcctaaaaaaaggtctccaggtggatcccaacgggatgcctacattatggccaaaaaaatgaccccagcaacccattcaagacgaaatcaaggggggggggccggggaagccccaacaccacacatgggaagaacgggcccacaac

SEQ ID NO: 376659 - DNA, 207 bp, Zea mays
ggggggtggaaccaaaaactttactatccgaccgggttttccttgtccgttttttaacagcccggaaaattttcccaaaccctttttccaatttttgccattgttcccacagttccaagaggggcaaattcagcaatcagtttgggctacaatcctgtttacatgccccccacccctaccaaaatatttttttttatgggctagctt

SEQ ID NO: 376660 - DNA, 93 bp, Zea mays subsp. mexicana
ttgctggacctcagcgccctgatgagcaagggtcgggcattgttgcagagggcagcgtaaatgaggcccaggctatcaatgaactcacccact

SEQ ID NO: 376661 - DNA, 230 bp, Zea mays subsp. mexicana
ctgtcggttacggtggtggtggaggctatggtggtggtggcggcggctacggtggatacggtggcggtgactatggtggcaacagcaacaggggtggtggtggtgattatggagttgctggaggaggtggatgcacctctactgatgttggtagtgtaagtatttttaccagttgctatgattatgattttgctttatggtgtaatcagtgatatgcttcttagtgcttc

SEQ ID NO: 376662 - DNA, 335 bp, Zea mays subsp. mexicana
ttttgtgcgggctgctacccgccccctgcagggaggtcatctggtgcatcaccgggaccacacgtgcccatgctgacctcagacgctcgtatgatgagctagcatccggccggcctgcatgcatgagcagctggccacgcatggactacgccacgggtcactgaacgaaatctaccggctgactttactgtctgacgaggctctgtctcagcagcaagccctactacccggccgggactatgggcgtattaacagctgactctgggtctgatgcgcacgctgaaggacacgtaccagctggagcctgccagctcacatgcctcgtggggactcga

SEQ ID NO: 376663 - DNA, 345 bp, Zea mays subsp. mexicana
gttgctgggcctcaccgtcaaccgcacccgcgcgctgggcctccccgacgcgtgcaaggtcacgacgcccgacgtcagcaactgcaagggcggcgccgcgggagcgcctgtgacgacgcccgcggggcagacggcgccggccacggggtctaagacgacgcccgccacgtcgtccgtgcccggtgccgccgcgtcgccgccgggctcggctggccgtctcgtcgccggcttcttcgtcgccgcggccgtcgttgccgccttcaccgcgtgatccgacgctagcttcggtacccttttgtgcgcgtaggaatcgcagcggattttgtgttgtttgtttcatcggtg

SEQ ID NO: 376664 - DNA, 378 bp, Zea mays subsp. mexicana
ttttattgcatggtctgatagactctgctcttagctggatggatacaccgggagggggtgctgggtcagcatgacatcggctggcgaggacaggagcagggttatctcatctgtctcattacggagcagaacatcggctggcgagcgcgggagcaggagaaattctttgggatcactaaggtgcatttggaacagaaagctcagggtcaccagccatcatcccttcaagctgagaactgaccaaaggtgaaagtttagggaacagtcattcgttcagaaggagcatgatatgctctgtaaggatgagtataaacgtatttatattgcacaaggattgccatggactaccgatgaacccgagtgtttgataaagcctgc

SEQ ID NO: 376665 - DNA, 516 bp, Zea mays subsp. mexicana
ttggatgcaggcctctaggtggtaggtggagctgctggttcctttctaatcctaatttccatattgttaaatcaacccgcatcatttgctatgctacttccattccaaattatatatcactttagcttttgtcctaaatcatttttaaaaaaacttttacttagttataaaaaaatacaccatctataacatcaattttgtttctttgggccttatttgctagagctcttagagctgattctctgctgaatccagcaggagctctgtcaaacagtttttcagagggaagcgattatttgctgattgtgtgaaacgattctctgaaatgaattaagaggctgggagttgaaaaaagtagctctcctgattgtgtgaagtgattgtccatcgtgattttgagagttcatgctaaagaatcaaagagaatcatttttagccacaaaaccactgtctcagaaaatcaacttccatagagaatcagaatcaaatgaagctatactgaacagtcccttaaat

SEQ ID NO: 376666 - DNA, 467 bp, Zea mays subsp. mexicana
ttcgtttagaactaggagcacatacccttgtctgctctgcctttatataatgatggtgagggacagcgccaatatcttccccaggcctggacggtctctgtttaaaacccattatctgttaggacaaaggttcgcaccatcaaggtaggtcacctcttgttgtgcaagggtaaataacaactgtaggttctttggttagttgtagatgccatctttagaagtcttaacaggtgtatattttgtatatagatcattacagcttgacaaatataacttagaaaatgatttgcgattaagtgagtagtttttgtgtttaatatagatgtttatgttttgctgtatgaactaataggtgtcccattttttattaataatatttaccaagatttttcttttgtatttcttgccatcccatggaagctgagctaactcaatcggctaagggtggggatgtacactcagatcac

SEQ ID NO: 376667 - DNA, 514 bp, Zea mays subsp. mexicana
tttatatctaaactttgaaaagttctagaatgtcaaatttcaagccaaatagtcgagtccgtaaggtatattccaattcctccagaacgaaaggatccaaacaggccgttaagagtttatatatttcagatttaagttccatttcatccacgatagtttgtttcttcttaactcctgatacaaatggagaggcgttaacttggtatgcttaattgtgcaggttgaaatgctgaagaagcaaaaggatgaggtaaggaccttccatttgaggaaactactgctgttaagatttttcatttctgtagaagctttaccaagttctctttagactctgcctcatcactattgcatgttttcttgatgttggggaaggaggcgggggctgatgataatgatatgcttctgttaagcaacaacttttctatgttggtttaatcctttccatggaactttcacagatccagcctcgcagcatttcagtggggctctttctagttcctactttcccatgata

SEQ ID NO: 376668 - DNA, 520 bp, Zea mays subsp. mexicana
ctttcagaactatgctgaaacatggaaagaagggttctagctgcagtatcagctgtggtgccaccatcgtcgaccttacattgaagcatgcttaactcctgaatatctgatgctccattgtgggatgtcccaagtcttggatggaaattgttatcaagaagaggagatccagggtctaaaaactccttgttaatggttccaggctgtggcgagtgagctttatcgataccattagctgtcgggactgtgagaagcacgtgactgtcatcctgcttgtgtgccaatacactatcatgtccaagaaccacatgtttggtggacgtttctgcaagcaggccatttttcgtggagaaagaatgatcgggtgctgttcctttacttacaccattatttacaaccttatctctataatcgttgatttgtgatgccatgttggtgttttcaggtgacacgttcaggtcataagggaacttctgtggactgacgattagttaccacatcccttgactgtctgcagctg

SEQ ID NO: 376669 - DNA, 293 bp, Zea mays subsp. mexicana
tcggtatgaatgcgctcagaaggtcgatctaccggtcggtgcacgagagatctgtactggtagggaagacgagcatatcaggaaggtggacacctgaccatggaagtaactaaggaggctgaccagacctgggctgacagaaggatgccaaaccacaagacatcagttctatcggtctgatagacaataaagccgatggcgaccagtgtgtgttagtggacagagataaaagcatatcattcgggcgtcatgcgacggagaacaatgctggtgatcttactgatgggctgaca

SEQ ID NO: 376670 - DNA, 410 bp, Zea mays subsp. mexicana
tctatataggctgaggacacgcctggggttattgataatcgatgttagtttttattatatctgcggtgcattaatgttctttgctttgttgggactatcgggatgcttcataacctgttatgaccgaagagtacaggaacgacctggctcagccttgtcgagaattatgtctttgttgctgtcagccagggatgtgtgcggattgccacctacctgggacgctgagcatgtggactgactgcactacctgcttcgaaggctgagctaccacagccggtgagtggtgtgaaagtttggtaagtgctgaacaagccagtctaccacttcttctgatcatgggggtcattgtgctggggcttttcacggtcatcggtctgtaccgcattgtactgcttctacatcgtggtttg

SEQ ID NO: 376671 - DNA, 454 bp, Zea mays subsp. mexicana
gtgggttggcttctcctccccctccggttcgggttcgggttcgtgaggttctccggggttcgggttcgtgggtgagcggatcgagatggcggcgtcggatgttgagtaccgctgcttcgtcggcggcctcgcctgggccacggacgaccactccctccacaacgccttcagcacctacggcgaggtcctcgagtccaagatcatcctcgatcgggagacgcagaggtcccgcggcttcggcttcgtcaccttctccacggaggaggcgatgcggaacgccatcgagggcatgaacggcaaggagctggacggccgcaacatcaccgtcaacgaggcccagtcccgcggcggccgtggaggcggcggcggcgggtacggtggtggccgtggaggcggcggctacggcggtggcgggcgccgtgatggcggcggcggctacggcggtggcggcggc

SEQ ID NO: 376672 - DNA, 514 bp, Zea mays subsp. mexicana
agctggccgcccgccggaccggcccggcctgtactggctcgacccacccacgcgttcgttgagggcgaggcggcggattcgtcactccgttcttctccgctgatctggaggaaggaggcgaggggagttgcaaatccatcaatggccactccaaccacctattcagttcgcatatcctcggagacccacaagattgaagcctgggtggtgtctgacgaagctttggccaggcaactgcaggaggaggagaacacgcgtgacgctgctgccgacaccagagaagtcgccggcaatgtacccttggagtcatcgtcaccggctgttgagtacaggtctgcacagaatgcagctcaggttgcacgggaggacaatgtggacccagataatatgtcatatgagcaactacaagcattaggggaagcagtaggaactcagtccagagggttatctgatgagctgatatcttatttggagccatttaggaacaagtgcactttcttctccaggaaaaaga

SEQ ID NO: 376673 - DNA, 462 bp, Zea mays subsp. mexicana
ttttgcttttgtagtgcgttatctttgcagattccttttgtcgtcacagattaaaggcatacataagctgatccagcaggtcatggcaaccaggagttatcccatgagagcagaaaataatgtctacatctagatgtctatacacatggtgcattttttggctaagaaaaatgtataaccgtctctagagagtgctaccctgtgaatgtgatgtacatgtgtttgcaagtacttgtatgaaagtgtagaagtttacaggcagcattacactcatgccaccagcatttgagtgtcagaggggttgagatctaaaggcatagtatctgttctgcagatgggtaagaaagggctgatgggaggcaaggacttctaccatgtggaagtacagtcaggatatgaccaagctttcatcattggggtgatggcaattcttgacagcatacatggagaatccactagatg

SEQ ID NO: 376674 - DNA, 276 bp, Zea mays subsp. mexicana
ccctcccgtccgtataacgctcaggagggtcacgtaggcggagcttattttaaacaacctttgtttttataccctgcacatttcagagggcatgctcttttctttgggtacgaaggaagatgtttgctccttactaattttgattctaagtcttgcttttgcagtaatactttgcgctggtgcccttctacattcatcgtctttatcacttatttcctcggttggcaaccttgcaacttttctttgcatttaatcgtcctgtttggtggaacagca

SEQ ID NO: 376675 - DNA, 393 bp, Zea mays subsp. mexicana
tcttttggcttctcctccccctccggttcgggttcgggttcgtgaggttctccggggttcgggttcgtgggtgagcggatcgagatggcggcgtcggatgttgagtaccgctgcttcgtcggcggcctcgcctgggccacggacgaccactccctccacaacgccttcagcacctacggcgaggtcctcgagtccaagatcatcctcgatcgggagacgcagaggtcccgcggcttcggcttcgtcaccttctccacggaggaggcgatgcggaacgccatcgagggcatgaacggcaaggagctggacggccgcaacatcaccgtcaacgaggcccagtcccgcggcggtcgtggaggcggcggtggcgggtacggcggtggccgtggaggc

SEQ ID NO: 376676 - DNA, 443 bp, Zea mays subsp. mexicana
ttttatatatgcgtgtatatagctggactgggccctatgccgagcgcctactgcccttctataacctgctgaccttatctgttggttatcgattggaataggggagatcttgtttggttatgcttttatataccatgattaaataatctactatttccatgcaacacctattgctttcatggtatcatgagtcttgggtcaatatatatgtgtctacatagcgagcatggacctgtgctgagcacctcctatttcttgctgggttatggttatatcaacagagaccttctcctctgttgctgatgattatgaataagaataagggagatcttgttgggttatgtttctataaacccaagatctgctccagactacatatacatgtacgcctgtaccttgattaatcaatctactatttccacgcattacacaatccctattac

SEQ ID NO: 376677 - DNA, 562 bp, Zea mays subsp. mexicana
  unsure (1)..(562): unsure at all n locations
ttgagaatcttggtgctgtgagaaaaaggaagatagtgtcatcaaggaggaaattagctgaagttaatttgccaacagaggagggtgtaccgaatgctgtccctgacttggactttccttgtgcaatttctgaagaaagagctgttgatgttggaaatatggataaaggcagaagaaaatcaactccgagacccaagcagataaacatgcctgaagaggatgctgataaaaactccacattcacacgacttgtcaattgcctgtcgtttgcccgtatgaaaggaatcgacaggaacaaaagataattgaagttgagaaaccgtcgcttgaaaagggtttagtttcacctgtgatgatggttttgcgcgtggaggttgcagtcagtacgcgtggaatgcccaaaggatgacgctttntaagctggagtgtcatcaagcacattgccttgtgtgtgagcagctccacagtagattcccttacacaagggatgttttttttagacagaaccagngtcatctggatgtcatcttgtgattcgaaaactggcaccacatatacagag

SEQ ID NO: 376678 - DNA, 518 bp, Zea mays subsp. mexicana
ttggacgcgtggggttttttttccaaaacaagaaatagttgcaattttatgtggaccttcacataattgctttgttaaactgaataggctagggtatactcctatatatgcaagtcacccttatttcatctgtatttttgttctatataggcatatatttcgtctaacaccttgtctcaaatcaactgcgctctacacagccatgcatatataactattacattttagtttggaatctgaaaaaaacctattttttcactatcattatttgctctcatgattaatatgatcatgttattcatttataccgtatataattatgatagctaagtctttgcatgatttgtataattgtttccagtgctcctatttgtatatatatggtctataaggagagggggttacattaatttgtactataaggtgttttacaaaatggattttctcctaataatgtttggatttctgtccatctgaattcgagataaggcataccaaacatttacactgtggatcac

SEQ ID NO: 376679 - DNA, 514 bp, Zea mays subsp. mexicana
  unsure (1)..(514): unsure at all n locations
ctaagatcttggttctgcaaaatgttgtgcaaactgcaaagctgttgcaatttttgttgatttccctttcagacatcaaaacaactgtgcataaacagtctacttctacaccagtgcttccttcaaacctttttccagtatcatcaactgtcatgtgtttgcctttaacttgttagaagcgacaagtaaaaaacgtgcatgcctaatcaaagatcacatttacagcataactgtctgttttgaactatagtttggcttatacaaggagtcaaaactgaaatactcccattgtctaaaatgtaggacatttttgttttttatgaactcagtttcctaattttgaccaagttaatgaaaaatgcatcaccatctataacattaaattagttntattaaatccaccatgaaatgtctggacagtgcatttatttcggattgaaatgataattatgtggtttaaggatgcatgcaaacagactttttttagatttgtcttgtgaaaacaacagcagta

SEQ ID NO: 376680 - DNA, 367 bp, Zea mays subsp. mexicana
gttgatctgcgctcccagactcgtgatggacaaggatcgccagggagctgcacaaaagcgccaggcggttgtcaggcttcatgaagccaggccgaagaggcagcggggggctgcgaaggctgtggcccccggcggaggcaagccgccgctggcggcgaagtcgggcgtccctgcatctagcaaggcgccggaggcagcggcaggcgccggaggctccaaatcgacgaaggctgtgccgccgtccagcagagtgccggaggtcgcgaaggtggcccgagtgttgccgtcggcaggcaagcgcgtcgccgacttcaccaccgatattagtgtggacgactatcttggtgagcgaggtttcgaggatctg

SEQ ID NO: 376681 - DNA, 399 bp, Zea mays subsp. mexicana
tcttctccaacagcacgacgcaaccgaccccaccttccctttacgcgaagaagcatcaccgcgagacgcgagtcgtcctcctctctgtcttcgctcggcgatctatcaaggagggtgagggggagatggcggagaatccgcagctgtttgggaacgggatgccggtgccgttctacggcgagatgttcgttctcgtccgcgacggcgtcgagttccacgtcgacaagatcccgtcagctcctggaggtcatgtgaaaacaaaaggcacaatttacctgtccaatataaggatggtgtttgttgccagcaagcctgttggcaacttctttgcttttgatatgccactgttgtttgtgcatggtgagaagttcaatcagcccatatttcactgcaacaaca

SEQ ID NO: 376682 - DNA, 393 bp, Zea mays subsp. mexicana
ttccctgcagaatgggaccatacatatattaacactccctgcctaataatagttggaatgcttctaaaggggggttccaggtttagtctgttactcctagcctctcaagttaagcagtctactattagtcttgtactgttcttcccgtgccatttaagaaagtaggctattgttggcctcttaaagtgggtaagtattagtgacaaactttgaaggtagagatcgacaaagttgttgctatctctgcgttgagctacacatagtcacgcaatgtcataaatgcttgtttctatttgagttcaaggtttgtggttcagagagtattgcatggggggatggccgcatgggactttggtggtatgcatgcatttatctaaatagaaaactgggttg

SEQ ID NO: 376683 - DNA, 431 bp, Zea mays subsp. mexicana
  unsure (1)..(431): unsure at all n locations
tttgtcccgaggcgtcctgtccgcttgtggcggtgtagcaatgcaaagctccaagcgcaaggagacggggggatggagcaaacggtgaagcggccgacctcgtgctcccagccgtttccttcttcttccatgccgcgcgctccctcggcgcggggagagatcatcggtgggccgcttgcttgctcagcttcccttgccattcccacccaaccgcgtcgacccgccctagctgcgtgcggtggcgtgacggcggacgccgacgccgggctagctccacctccacgtcgtctcgggtggccctggcagccacgcccacgctggtgatcactctgggacgaacgcagaggggattntggttttggtttggtctttcttttacgcactttgcggagtgcggagagcaggagcaatggtgacttgaatgaggggct

SEQ ID NO: 376684 - DNA, 535 bp, Zea mays subsp. mexicana
  unsure (1)..(535): unsure at all n locations
tctacgcgtccgcaacttctcagcctgaaggacttcctgcacagtatatttccagcctgctaatcacacatctgtgttattaggcgcttttgtccacttacaattcacattactgtttccttagatatcctccatctgggaaaaactgtgtcaagttgtcaatttttgtttagattgtgaagttatttgaaacataaatcatgcaaccttgcagaaatgaccatagcttgcaggaacagaacctccaatctcttaatataaatttaatacgaccgaataggtaaaatactgtgagttaagcctaactatagtggcgcataaaaagttgggaccccgccccaacccacccacagaaatttgggaatacaataagtatgtgaagatagatttgttacatttagtaattctgctaacaaaaactgaatttattttttcctttttgctagggcacctaacacacatgacaatgcggcatcaaatcttctgtctggaaggaatngtgacacaataattaaccagctaatggagatgggtg

SEQ ID NO: 376685 - DNA, 539 bp, Zea mays subsp. mexicana
  unsure (1)..(539): unsure at all n locations
gcacgaacggccacaaaggtcgtcgccgccactaacgaaggaagaagaggtcgctcctcagctcctcgctaaccctctgctcttcggtaaaaaaattttgtacaacatgtttgacttacttggcccataatttgttgcgggtgtgacctctgctcttcggtaaaacttttatgtacaacatgttcgacttactcaggcccataatttgtttgatagagtgacacaattacaaccatgctccgaagttctcagtttcttggcgcttgaattttaaggtactactgctatattgtttttataatattattgagtttaaagttgatactacaaaagtatctgcttgagactgggtttcattgggagttaggtgatgatggttgttcttggtctatccagtggcccttttagatgccgcatttngtgtttgtatatttatttctctagctaagaccattggtaaacttcaggtgaacaaaacctcttctttggatcctttattagttctcatacaagatcagtattgctacactctatacttt

SEQ ID NO: 376686 - DNA, 552 bp, Zea mays subsp. mexicana
tcctacgcgtccgaaaatatgccttcatttgtttgataagaaactcacttcccatgttatcataattattagaagaaattctttctgctaagttgtagtactaatatcctgatagtgtgtatccccattaaacatggaagattctttttttttactttcctgtttcgcattcagaaatttgttctttgtaggtacaattggactggatttggtaaaaccacttagattaacgggataagggatttttttaattaggcataaattgaggtttttttagttaggcataaattggattcaaatcttgggtccgccaccgatggttcgtaaagataaacataggagcttaatgttttattttgttcacaggtcaaagcaattggaagcctctctttttggtaggaatctatagataaatgcactattgaaattgatgcttagtcacacctgtagtctgctcctcaggttttgctggtctcacgcttcttatcataggtgacgagagcaaagtcaagaaggaaatacttggccccttgccccctcctcgcaaggttg

SEQ ID NO: 376687 - DNA, 519 bp, Zea mays subsp. mexicana
tcggatcgatctgacgatatcaatcaatcactggggaagtaggaacgatcagagtcacgatcgactcgcaatggctgctctgaagattgccgctgtgtgcgtgctgctcctgtttgtcggctcagacctggcgcgctgcgttgcgtcgtcatccccaggtgacgaggatcaggccgcggccggcgcgctcctgcgggagttcctggagctcgagctgagccttcttgctgaacagcacggcggcgttggcgagttctgcccgcccgcgtgccagaactgcctcataatctgcgggatcacgtgtgtgctcaaccccaatcccgccacctgcttcgtcaactgcaccaccgccaacggttgcttcagcaagacgctgccggtcgcataagcctgcatctgcattgcatgctttgggtcagccatgtgtgcttatctcgatctcagattgattaatggtaccgcgtgattgtgtcttattagtatgtgatctgtactgcgtgtttggtacaagaacctgct

SEQ ID NO: 376688 - DNA, 572 bp, Zea mays subsp. mexicana
ttttgcctacacgatttggaattagctgcatgggaaggtgaaccattaagcaataagattagttatgcttgagttaatggctacattgctctaatttgttgcttctcatcttttcatctattgaaaatatgcagctgcttaatggccgtgattgaagaactaactcaatccctctgaaaagtagttgcgattttgtgtttgtgactctctgagttattccctgaatatgtgcaagtatagattctgaatctgtttgtagataggtgtaccttgatatggtatttagcaatgctactcattctacaagatttattttgcattgttcccagccatctatataccttttctttggatgactatgtaaagtcacaagtcaacttttatccatcattctagaatcataatagtttctattgcttagtttgatacacgtagaagatctagtaacaaatagtagattcctaaattccattactttgcattgtttcccgccatctataaaccttttctttggatgactatgcaaagtcacaagtcaacttttattcaatatacagaccaactttaacaca

SEQ ID NO: 376689 - DNA, 417 bp, Zea mays subsp. mexicana
tctctcacgcgtccggttctagatcgcgagcggccgtccgcgatctagcggacgcgtgggggcgcctacaggggcacgagcggcggcaaggcgatgctcatcagcggctacagtgacggtaaatgccaagttccagtcgtggccagtgcgcagaaaccggaggcctgcgcgaccatgggggccatgacgcacagcttcatcacggcggtggaacgcgagctcgagggtgtcacctacggccgcctgctcacctccatgaaggccatcatgaccaacttcggtggctgcgccgtgcagggtccttattggcgccggcgtggccgcccgtaaggtcgccaacttcagcggtgtggaggaacccaacctgtcctccttggataagttcgacatttaccgcatggcctttggggctgaaac

SEQ ID NO: 376690 - DNA, 303 bp, Zea mays subsp. mexicana
ctctaaaagactggatacagaacgaggaaaacaaacacccgaaaagaaaggaagaagaggagaagaacaccaaacaagcagaacttttttttgagaactccataggctgtggaattgtctccaggaatcccctctgggtttgacgagattcatacatagaaatacttcttgattttccccctttcttttgctcaagaatttacctgtacaggcgaaaccgcttctttgttcccttttttttctgtgtttgttttattgggattttcctctggtccgttctttttaacctgtgaggtggtgaga

SEQ ID NO: 376691 - DNA, 251 bp, Zea mays subsp. mexicana
tcgatctttccaaacgattccaagtaactttaattgtcaccatataaatttaaaacgaagtttacaacttgctgtaatcgttttggcatttgctttatatgcaaatgcacacgttgatgttgatatagcaaaacaacacttaggagttggatcacatggcccagctcttgtaaacacacatggtggatatggcggctggggatggggaggtgatgtacactaaggctacagagtaggatacccatatggtg

SEQ ID NO: 376692 - DNA, 497 bp, Zea mays subsp. mexicana
cttcgacatatttgattggtccatccctcacgatctgatggcgaagttctctgcaatcaaacaggttaggctgctaaaagtcgagtttgtagttcacccgaacagtggatacaataccttggaggatctttgggacggtgaagtggaatacgaggacgaaagaacagagaatcaggaccattctgatttcttgagatgcttttcgtgaacagtcgagaatatcgccttcttcgcatggagaaacccctgaggaataatggcctctctgctgctcctcttatatgtatgtagagttgttgtgtttcaataagattatccacatgtgattgctgcttgcttaacaaatactcagaatatagctacaaggtgttatcgtagtcaactatatttgtgtttgtctattcaggctctgaatacagggaaaaaaataaaaaaaataaagcaaatacatgaaatggcattgtattcaaatggaagatgtttggagtctagttttt

SEQ ID NO: 376693 - DNA, 447 bp, Zea mays subsp. mexicana
gttggcttctcctccccctccggttcgggttcgggttcgtgaggttctccggggttcggtttcgtgggtgagcggatcgagatggcggcgtcggatgttgagtaccgctgcttcgtcggcggcctcgcctgggccacggacgaccactccctccacaacgccttcagcacctacggcgaggtcctcgagtccaagatcatcctcgatcgggagacgcagaggtcccgcggcttcggcttcgtcaccttctccacggaggaggcgatgcggaacgccatcgagggcatgaacggcaaggagctggacggtcgcaacatcaccgtcaacgaggcccagtcccgcggcggccgtggaggcggcggcggcggcgggtacggtggtggccgtggaggcggcggctaccgcggtggcgggcgccgtgatggccgcggcggctaccgcggtggc

SEQ ID NO: 376694 - DNA, 497 bp, Zea mays subsp. mexicana
  unsure (1)..(497): unsure at all n locations
catgcttaggtgggtggtctctcaacttgaggctctaccaactgagccgttgctcgattcccgatggttaatgaaaatttaagcagtatgtgagggagcttttgttgatggagaaatttggtggtttgctgaacaagcatgaagttgtcttgtgcatcttcctttgaagaaggcactttggttcagagctattagaatgtccagcttctctgcgagacggttggctaagatcttggcaacaagcttcgcaaaactgtggatcaagctaattggatggaaatctttaacttgatcagcatcttcactttttggaatgagagtgaggaaggctgaattaagcatccaactatccaaggattccgaactttatcacactagaaagccactagggctgccaaaacatctgacttaataataggacagcagcatattaacttatgtggtagcttttaccaaatgtcgcttgactttgnttaatttttatgttaatctatgac

SEQ ID NO: 376695 - DNA, 429 bp, Zea mays subsp. mexicana
ttttgaacccatgatctaactattttgctgctacagccttttaaatatgttaaacacattcgtaggctaaggcagatgatgcccacttcattctaattcaaacaatctttctgggaaggatttttttcctagttcacggggtattcacttattccgctgacacccctgagttttttttccttccaagctagtacagaaatactttgccctccattactcttcgtatactcatgaccatgactttccttctggtatagcctctaatggacaatttggaagctcaaacttatgagacatttgagaaggatgttgagaagtacactcaagttactgctatatgacgtgaatatgcctttttgtttatatattataccctgtgaagtagctcctttttttcacatttatttgaatatatgaatgtaaaattta

SEQ ID NO: 376696 - DNA, 359 bp, Zea mays subsp. mexicana
ttttccagttgattgcccgtgaacatggatacggacaggcttatagcacagtgcatctaaggtacatttaagggcccagctgaagcattagttgaagccgaccatttggtccagaaggagcttgtgccgagatgtattgcagaaacacgaggagctgaaacgattgccaacactctaatcacatatagaatgatggtgcaaatgatagctaggaaagaaaacgtgaggatcgacgaaagactgtggagcttgtcgtcgagatggaagcctgctacctaacactggagttgttccgtaagctcactaccgaaccagataaagcagctgacaagaacacttcgaacgagagatatgtatca

SEQ ID NO: 376697 - DNA, 445 bp, Zea mays subsp. mexicana
cgcgcaccatggaggtccttagggagcgcttcgtcgacgtcttctacgttccagggaaccacgacctctggctgcgccgcgagggcggtctctatatggattcgctggagaaactgactgcattgcttgatgcatgtagtgagctgggtgtggatacaggcccaagaacgataggtgacttgggacccataccattgttcttatggcaccacatgagttctgtccaggacagggatggtaaccgctggcttgccccttggctagaaatggcttgtaaagactatgatgcttgtcaatggccttcagacctgacaaatgatgaggaggcttttgctctttactttgacaagttttatgacaagaatcatgatgctattgaagaagtgataaggtacaggccccattttttaaccgtttcacacttttgacccatggcaagagtttg

SEQ ID NO: 376698 - DNA, 369 bp, Zea mays subsp. mexicana
cacgcgaggtgtctggcgggatgtacgaggggcattacaatggggtgctccctggatgaccgactggcgaccatagctctgaccatgacttccgcgtaacttttccagcatcgctgtgtgcattgcagctcgctatgcaaaatgctaggaaagatataacgaaggctagaagagacgaagctgaatcgcaggctcactagcaaggctctaaacagggatttgaacgccgtattaatagtatgatacgtactgtttaggggactgctgaggcggaagatgacacggtcaaggccctcgtcacggaggttgaccgcgaggcacttgatctgacacatgatccgaacctttttgccacactttgcaaggaag

SEQ ID NO: 376699 - DNA, 371 bp, Zea mays subsp. mexicana
  unsure (1)..(371): unsure at all n locations
cttctgtcagaatagaagtcactggagatgatttttgagaagcttcaaaggtgtgtgtttcacatatttatctcaaacacggtcatcgcgcgcacatgcagtatctactttgccttcctcctgctccttgacccacggtcaagggaaatttcttgcagaggtcggatttttatgggatctggccgctcgcgtgtcctgcaatttcttgccatgtaagagtgactggctcattttcctcctcgaatgcatcanggaagcgtgcgggtaatgcttctgtatttcaatctgatccatgcaaaccattgtgatcgatgatgcccttaattccgatttttcagctttatgaaataatcatatatatatatgctcat

SEQ ID NO: 376700 - DNA, 413 bp, Zea mays subsp. mexicana
tctagatcgcgagcggccggccctttttttttttttttttttttttttttttttttttttttttttttttttttttttttttttgggggggggacaaacgattttatttttttttaatcacaatctgggattccctcccacaacccggacatgaggaagggcttcttaaactattgccggcccttaccctttttggaatggtcaaactgactggctagcaacatactacaggttcacaataaaaacatgggttttatttaaggtacaataaagtgcaaattttagttttcctccctcgagggtgagcaaagcacacggatttaaactttttcttaacaatacacggatagatatggagctttcattaggatttaatcctgccagtaacaaaggggggggggatcactttactt

SEQ ID NO: 376701 - DNA, 82 bp, Zea mays subsp. mexicana
gttttaggacggcatccgggtcgtctctgcagagaaaagaatcgacctcacgggtcccatcgtcaaagtcttcctaacattg

SEQ ID NO: 376702 - DNA, 481 bp, Zea mays subsp. mexicana
cggtcgcgtgggtctacggccacctctccagcaccgactgcacggccacatcgatgaggcttacctgggtgagcggcgacgggaggccgcagcaggttcagtacggaggaggcaagtccgctacttctcaagtggcaacgttcacgcggaatgatatgtgcagtaagttgtggtctcatccgtttatcacagagaccagactccagacgttactaagggaaacgtgactgtgttttattctggaattgcttcgacgaacttatctcgatgcaggtagccccttgttaccaagccctgccaaggatttcgggtggcatgaccctggctacatccacacggtcgggatgaccgggctgcagccttctcagtcctacacctaccgttacggaagtgattccgtgggctggagtgacacatacacattcagaatgccaccagctgcaggctccgacgagacatcatttgtgatctacggtgatat

SEQ ID NO: 376703 - DNA, 330 bp, Zea mays subsp. mexicana
gggtcgccgccgacaagagtgttgccatcggcggcaacagcagcaaggacgaggtctacctcaccgcgctgctgcagaagtccttcagttaggcagtgaacatcggggaaatgacacggaattcatccatcagccgaagatcttcttcgaagcaatacagtgctagtgcgatgcctgcagactcgcagcaatcagcttgtgttatcccactcgtagaatttctgctgcaatgcgtatgcgtgcaacaatgtaagcaaatggaacttagtctactctaacagatccctcactcgcattctctatcttatcctctattttaaacttctcttc

SEQ ID NO: 376704 - DNA, 362 bp, Zea mays subsp. mexicana
tcatgcgcttttgtttttatcatggaaaaacaccgatcaatgggggggtttaattaagacacatgcctgaaacctctcaaacatcctgcctatcatgctgctgcgtttgcaaaagaatgatgagactcgctttttcaattcctccagctggagcttctattataattgcttcaatccataaactgcatgggagacacccctaagttaattttttggcccattggaaggttgaagagagtgatagcaatgccacatagagaatgctagtcaacactaacaaagaattggtttctgatccttttaaaccagaaagaggcataccctgccaagtcaggtgcaatgcaaacttttatgtgggaaat

SEQ ID NO: 376705 - DNA, 492 bp, Zea mays subsp. mexicana
ggagtgctccctccacttggtgctccgcctcaggggtggcatgcagatctttgtgaagacattgactggcaagaccatcaccttggaggtggagtcgtctgacacaatcgataatgtcaaagccaagatccaggacaaggagggcattccaccggaccagcagcgcctgatctttgctggcaagcagctggaggatggccgtaccctcgccgactacaacatccagaaggagagcaccctccacctggtgctccgcttgcgaggtggtatgcagatctttgtgaagaccttgactggcaagaccataaccctggaggttgagagctccgacaccatcgacaacgtgaaggcgaagatccaggacaaagagggcatactcccagaccagcagcgtatgatcttcgccggcaagcagctggaggatggccgtaccctagcagactacaacatccagaaggagagcactcttcacctggtgctccgtctccgggt

SEQ ID NO: 376706 - DNA, 519 bp, Zea mays subsp. mexicana
  unsure (1)..(519): unsure at all n locations
tttctttcaatactgtaacattcagtttcctttattgtattaacaattcacaaggtcacaccgtctgtaatgtttaccaaaaaaaaacagctaaatcttggttttcccccaatgtttctgctatctaggcaggtttaattcagtttcatattgtatccaataagattgtagtctattttaccacaaggatggaaagttgtaattcctgacaggttctgggtcagttgttattcttctgtgtttggattttcatttgggggtcatggtatttggagttattaaagaaattgttcagaactgacagctgagaaacatcgatcacacagattgaaatgagcaaaggacacatgcagtgatttcgtccttttccagttgacaaggtggtccatcattgcagcaatattgctgtcctatgctcttagcattcgtgctgttgtattgtgcaacaacggcaaggctgaatatgcangtggctcttattgccctgcctcatggtctccatctgtgcctttttttttt

SEQ ID NO: 376707 - DNA, 100 bp, Zea mays subsp. mexicana
ttttatctcgggctctagatggggcgccaggggggtgccgtcttgaccgtcacctgagctgtacacgacaggctcagcggtctgtcagacgacacctccg

SEQ ID NO: 376708 - DNA, 406 bp, Zea mays subsp. mexicana
gcgatctaatttctaggagcagtacccgaaagcaggggcgagggatttggggtctgacgtgatggtgtccttgcttcactggtgtatagcttgtgatgggtagtgaagaaggtcaccgggggcaggtgatgtctcatgcaaggattaattgggcgcttgagcaccatggtgccaaccaattgcttgccgttgatatgctcaccgtggatccgcccttcggcgcggatagctcctatcggcgcgcctgctgctgcgaggttacgagaatttgaagatcattctggtacctggaactctcgagtgtcaggtcaagaacatgtaccattggatgaagcgcattgaaagaagatttgatgagtttcgtgagtggtctaatccatcgtttccattcaactatgggtgctaa

SEQ ID NO: 376709 - DNA, 490 bp, Zea mays subsp. mexicana
cgtttagttcaatccagcatagaagatgggctgctgtaagttgatcttctggtcacttttgatcggggccgccgctttcgtcgctcaaaggttcttcttctgttgcaaccaggccggaattcaagttttgatttcactcaagactactactggggcagtcaagcatggtccataggaaaccccgattccgaaagacattgtcaaaattccgccattccaagtcgcttttaagccggaagatgtggtcatttcaaagctcgccttgctaacaccaagtacgtgcacgaatattagaatgtaaactcgttcgaacaaggatttccttccacttcacttcgtaaagttgtcgattcatttccaaaacaaggtcgatttcaaccaaacttcaaaagaaatgaatcggtacccgcaattccctactcaagtcgaaggaatcgacttgcatttcatttacatcaagcctgaaacacccgtcaaaggtcgtttacca

SEQ ID NO: 376710 - DNA, 96 bp, Zea mays subsp. mexicana
tcgtcctaacccaagcacactcaaacagacaggaagcccgccgaacatcacaaggctgcgaacctcctagaagctcgaggagatgctctccaagct

SEQ ID NO: 376711 - DNA, 443 bp, Zea mays subsp. mexicana
ccttctttagccgtgactgattatacgtataattgtttattaccaacagcaaccatgcagcatacgaatcatcgttattaagctatatatgtataatatccagcatgtcttgttaattactagtatgtgctagtaagtggtgcgtgctcgctcttccatcgctgtcgtcgtgtcatctgctattgttcgtcatatatatatgtccatgtgagctagctagtgtatcacgcggaggaggccggttcagctagccatcagactgcaatgcacttgtgacttctctgtttagtcctctctcgcgcgcttgggttttggttcggtgaagtaaactaaacatgcatatatatgtgtaaacattcaaattcaagtgtttgcatgcatgccaataatgaaagttaagaagaagactccctgtttatgataagatgttgttgtaccgattt

SEQ ID NO: 376712 - DNA, 354 bp, Zea mays subsp. mexicana
ttctgttgatagggtacgaaggaagatgcgggggggctataaatgtagaagccagctatcgcaatgcaccagaggtaaggcgctggcgcctttatccaaagcgggatgacaggacctatatggggggttggccccctcgcggcaacagtagaaaaaatggactgcaggtggaacagcatagacatcaaggacggaagtagagaggaggcgcggcaaggtcaacgccagagatcaaaaaagcgatggaggaacacgatgcaacccttctaagaactactcataactcatgaacgagcgggcacatcaagaacagaggcagcacacctgacccaatccatttcagctcccctggaa

SEQ ID NO: 376713 - DNA, 433 bp, Zea mays subsp. mexicana
gggaccgaaccggaagacccgggccgacccacgcgaccggctgtttttacacgaaacagcagaccggaaactgggggggcaataaaagcgccaagaacccctacaacaccacacggcaagggcaacaagggcaggctaaaccgccagccgaccgacagcgaaggcaacaaggccaaggccaccgccaagaagggaaagcccgaccacaagaagaagggcaagcacgccagaaaagaacgccagagcaagccggggcgaccgaaggacggagccaacaagcacttcgaagaaaaggcaggagacaacgagaaccccaagggcagagaaagaaaggaaccagcaaacacaggacctaaaaggaaaggaagtgcgccgaacccataggcccaagaaccgacaaagcaacaaaaggccaaaggaccgaaacccaccc

SEQ ID NO: 376714 - DNA, 308 bp, Zea mays subsp. mexicana
accgacagtctttaaggcacacggcgggggaaaaacagcggaggtacttatgaggaaagacacgaagacctcagctgcggaagctggtggcgcaactgaccaatgggcacagatagaaacagcagaataccacaagcagaacaaggaacacaacgagcagacagctgcaacagaccaaaccagcaccggtggaccaaatgcgaactgtccaacaacaaaaaagagacgcacccgacgaccccgaagagcacatatcagaagacccagcaggaaacattgcgccagcaaagcgcgccgacaaaaacaag

SEQ ID NO: 376715 - DNA, 433 bp, Zea mays subsp. mexicana
  unsure (1)..(433): unsure at all n locations
gttttcttttgtcttcaccttgtcagatgtgacaacacggtcatccacaatgtgtcgatctttgcagattctaaaactcccatcaatgatggcattgacattgaggattctcacaacactgtcataactgattgccacatagacactggagacgatgctataagcccaaagttgacaactggaccagcttatcgcttgacggcaacaaactgttggatgcggactaaatcttgagctatcaagtttggaagtgcaagcttcttcgacttcaaaagactggtttttgacaacatttcaatagttgattcacatgtgagnacttgggatgcagatcccggatggagggaatgtgaatgatgcggtggtttcaaacattaaaatgaggccaggttctaccattccttaatggggggaagagccgaaccaatccatt

SEQ ID NO: 376716 - DNA, 110 bp, Zea mays subsp. mexicana
aactctttttgcaggaacaacccgataagaagagggcggggagaccaaaaaagcgagagagatagcaaagaaccaagcagactgaccgcaagtgacacggaagggaaggc

SEQ ID NO: 376717 - DNA, 233 bp, Zea mays subsp. mexicana
tgctcgtttgagcggaacccgcagccccaccggggaggggcacgtttaaacacagggtctacgtgtccttccaaacactagcgcaagctggacgtggataaaaccaatcagagctgctacggggagaccaagtcgaccgacctgacaactgacagggcccatcgaacggaactgcccactcaaaaaggaaggaccagcacacgatgtgcagaggtcatactctggcttcagaa

SEQ ID NO: 376718 - DNA, 546 bp, Zea mays subsp. mexicana
ttttggtatgttgttccttcccactaagctgacttagttgctgttagccaatgttgtttgtggattttccacgcccaaaccacccaaaccaagtctgagacagaaaaaaaggatttccattatgttcacttgcacaagatctgtttattctgttgaaatagtttcataagtcatatcacgcttttaaaatgaatttcttttatagtttaaaatgtgataatcagacatttttagcttaattgcactatgatatatcatttgatcagctatattcctggtatgtttaagtgtatcctttttttttggtttaagcaaatttaccacacactaatcaaaagattcaaaacgatcttttgtgttttgtaggaaccaaataagattgatggttggttgaaacgcttgccattaacgtttcagtgtttagatacgggaggtttgtacctccttgatgatggcttcactttcttagtgtggttaggaaggatgctcccacctgaacttgtgaacaacattctttgagtgagcttggcaaactttcctgaccta

SEQ ID NO: 376719 - DNA, 537 bp, Zea mays subsp. mexicana
  unsure (1)..(537): unsure at all n locations
tgttctgaattcgattttaattagaatttgttacgatcgattgatcgattgatcgattggcgagtgcatattcgatcgattcgtttgtgttcgtctcccggaatctaatctcgtctaattgattcacattctttcaatcgaacgatcgattcgattcttttgtttccgattcattcgatcttctgccaccgattcttttcaatcaattagttttcaatcgatcgctttgcaatgaatcgatcgattcttcttcttctttccttcgtttgtttgctcaaatcgattcaatcggttccgatcgattatctgttcgatgagatcaccaacttcgtttggagtgactttgcagcagatccactgtccaaatgtcaacctgaccttgatttaactaccgaacaattgattcgttaccatggtttcgattcggaagctcattccgtgatcaccagtgattgttacaatcttaccatttatcgaattgtggtaccaggagcagctgtttccgagtatcgaccggttctgattcaacacngactg

SEQ ID NO: 376720 - DNA, 565 bp, Zea mays subsp. mexicana
tgctgtttagtacataattctagatttacagacttacttgataacctgatataaaggtcacggccaagcttacttttttggatcaacttgtatgtgttgtgctacttattgtcgtattagccgcattgggcctgcagttcaggggttctacctggcaagcgttgactgtaggtgtagcaccgagatgtttatggggttcgcggtggtttgtttaccaaatccagaatcactctgatactgaaggtattatccagcataacctgttagtccaaacattatcagcacatatgtgttgcattgacatgtgcggagcagccacacaggtagacatatctatctaatagtaaatatgacatataacaaaataatataacttttcaacaaacacaccacactactcataagtctcatacatattgattgaagttcattgtttatatattagtacatcataaattttaaaaaacattacaataatacaagggtttgggtaattcgggaaaatcgggtacctagactcagaacccgaatatctaaacttaaatcgggttttcaaacttgctat

SEQ ID NO: 376721 - DNA, 83 bp, Zea mays subsp. mexicana
gaggaagaactcgagtccaagacttggagggcccgttttaagagaagcggacctgacctacagaaggggaaagagcaaagaac

SEQ ID NO: 376722 - DNA, 150 bp, Zea mays subsp. mexicana
gggaaagcaggaacgcgggcaggaaccggaacggaaaccccgggacgacccacgcgaccgtcgtgcaagacaagggagaaaaagcaagagggggggagggacaaaaaggacacggagaacacacaggacaaaaagcgaccaggacgcccg

SEQ ID NO: 376723 - DNA, 75 bp, Zea mays subsp. mexicana
cccgggggaaccgaaccggaaaccccgggccgacccacgcggcctgaattacaacacaccgagcacgaggaggac

SEQ ID NO: 376724 - DNA, 484 bp, Zea mays subsp. mexicana
cgctttttgcgagatatccttcccctgcggcctaccctggctccgcttcttcatcgacgacgttgaggatcctgttcctaatgaccccccacagttgctcccgaaaagaacttaccagcccagaacaagaaaacggaaaagaacccatggatttcttacacgtgaagtcgaccaagggtgggcgcaaggtgattgcccggagaatcgacaaaggcaggcacagcatgtcagtttagctagatctcgctcgtagcagccctggatgttttctgtaacacagactcgtattgtgttctttctatggttagcactctgctgaaggtgagcccccgcgcaagcagcagtccatgtatggatctttatcgtgaaacatctattagtggggcttaagtcctggccatctgtaggatatgccttcttgcattttatgttgcgacgctgtgtgcctgcgggtgatgatgctatcatgaggcttgttggactt

SEQ ID NO: 376725 - DNA, 465 bp, Zea mays subsp. mexicana
ctgtcttctcctccccctcttaccaagtcctcttcgggttagggttacttagggttttgtggaggggcgatggcggcggctgatgtggagtaccgttgcttcgtcggcgggcttgcctgggccaccagcaacgagtcgctggagaatgccttcgcctcctacggcgagatcctcgactccaaggtcatcaccgaccgggagacggggaggtctcgcggcttcggcttcgttaccttctcctccgagaactccatgctcgacgctatcgagaacatgaacggcaaggagctcgacggccgtaacatcaccgttaaccaggcccagtcccgtggcggcggcggcggcggctgcggcggtggctacggcggcggtcgcggcggcggcggctatggtggcgggcgccgtgacggcggttatggcggcggtggcggctacggcggtcggcgcgagggtggtggcggcggc

SEQ ID NO: 376726 - DNA, 309 bp, Zea mays subsp. mexicana
cttttcttccggccaagttccaccgatcccaaatctacgacttgagcaaaaaccacagctatggcacgactcatatgctggggcaacggtcgttctgatgaccaaacggatggtcccgccttggaccgcagaaagacatgatcggatgtgcatggtgtcactgggacaacatgccgctctatggatatcgctggatcctatttgaagaggacataccatacgtcttatgtaatctaccccgcactgacgattgccttccatggaagctctgccggtacaagaacgccatcgacgcgagggataggaact

SEQ ID NO: 376727 - DNA, 565 bp, Zea mays subsp. mexicana
cggacgcgtgggattaaatatcttttatggaagaaaaatatatatgcttatattcttttcttatgcagttaaccagaacttccagattgcaagtacaatctctggcatctcatgcatgttacccctgaatggctaaacaatcactcctctggacttcttgtcaataacatctgcatatttggtattgaattcatcaaagttgtcgctatcaaagccatcttgcatcctaaactactttcaattccttggagattatgctccatatgttatagcataggagcgagatgacgctatcgatctggatgaatggcgagctcaacgatctagagtcaaatctggtggggaagaagactggtcggtcgttacctgcgacaatgctggctgcagagctgatcgtgccaccagcacaagagatcaaggagttctttgccatcaccgaagcgtctaggacaaatgtttcgcttccaattgtctggcgtttctctggtactgcagatctcggaagggatggcaatgtcatggattcagaaggcaacacacctctgcatcttgcaatcaagaatgc

SEQ ID NO: 376728 - DNA, 490 bp, Zea mays subsp. mexicana
  unsure (1)..(490): unsure at all n locations
cccacgcgtccgcccacgcgtccggcgctgcgcctggcggcgaagatgcacgagacgcgttactttacgttgcgcgacatggcgtcggcaatggggctgcccagcacggacgcagcactgtccctccacgcgacgtgcgagtggaagcttgcagccgcgctcggctttgacgcgcttgtcagcgagcacgagtttcatgcgacgatgacgcttgtcgattctttctgagatgcaatggcaaaacacgatcccggagtctttcactttttgttcactatttgagattgagaacanatcttggtggtacagcgctgacgggtttacggtcgcaaaatttcgacctttttcttgggaccaggcaacacgaaaacaaaaaaagaggatgaggctgaaaaactttcttgtgttgggcttaaaatggaaagtggaaaaccttttgcattaatattttgggggtgctttgagagcacatgttcagtgggtaaccttt

SEQ ID NO: 376729 - DNA, 538 bp, Zea mays subsp. mexicana
ggaatgtgttgtcaacaatatcgtcgatcaggcaattctcgataacaattttagttacaacggagttcgactttgcttgcatttggttaagaatttaaccgcaacaagttcgaaaggtccattcaaaactttgctggttaaacgttgtcaacgtgaacatgctcgtcgagttgctttggcaaccgcaaccgatcgaggcacttttacgtggattaacattgttcatcgccgatttgtgcactaaattaaatgaaccagaaattttggctgccgtgccagatttgttacaaagtttgttgggacaatcgtcggtggaaaacatcaagacttcttgtcaggttttgaagttgtgtggattttatgtggactcgtatttgaatcaaacctcgtcgaaggcaatggatgaacttttcgaaaaacttaatcaaattaagtccagtattgagaattcgggtgttcaagcattgatcaaatcagtagaagatgctcgagaacgtaaatggtattccaactcaacaccagttgcttgtaacggaac

SEQ ID NO: 376730 - DNA, 469 bp, Zea mays subsp. mexicana
  unsure (1)..(469): unsure at all n locations
ggcgcattctgtggaaggccgaggcagtgggaccggatggaaaggagttggattggagtaagattgcctgggtggtggcgtatatgcgccgggtgacggcgcagctggggaggatggaagaggcggatatcgtgatggaattgagtggggcgatgggaaccgagtcgaagatttttggctattcgcctttggatcgaaagatggtagaggggatgaagtgaggggatttttggaagagagagagagagatttcatcaagagacggtcagggaggggacgcacggtttcttgatggcctagccatctttgaaagagggaatctctcggtggtgtgcatgtaattgtactctatagatctattgtttctggtgttttttttgtatgattagggagggatttgttctccattctttttcttttctctgaannaaaaaaaaaaacaacctcccatattattcactatttcaaa

SEQ ID NO: 376731 - DNA, 459 bp, Zea mays subsp. mexicana
cttttgtcttgggagagttgtttacagcaaactgaacaacatgctgttggaaatggacaaagttgagaccgcatataatttgttcaaaaaagtcaaacatgcacgctcacttacgaattcacgcaattattgccgtgctaatggttggcattcatgagcataaccagtttgtctgcagaagagccatggagtccattcggcatcggggaacgctgtttacgtgcacccaggtcgtcctccaaccaacatctagcaattcaagttggcagaacggcgatagaggatgtgagctacaacacttgaaggtcaaagtgacatctggtgatgatgctcaatgtaatcttctatatggacactttgtacgcatgaggaaaaattatgctgcactaatattcaagggagaaagctcgtggatgccagtaggtcttttgtatactgctcgctcaacacatgtcatgt

SEQ ID NO: 376732 - DNA, 511 bp, Zea mays subsp. mexicana
catcttgtcacataatacagtgcaatacatgggttccacagactgcaagtcatggagtaccacagtggggatatggtaatgtcatggtcaatcctccaggaaccgtagacatgccgaatggaaatattcaggattatcaagctgggcattcttctattcatgggccactacctcatttctgccagattcctttgcgtagtatgcaagtacctcaaatacaagtaccccatcaacagttcatcggtaacaatgtggtgcatggtttaaatccttcagccgcaggccttccgttagatccaagaatgctggctttcccattcaatgatgagcacacttttgggcatcaagtgcatccacctctgataaaccaagccaacaatggggctttaagaattctgccatatcagaatgctacagtgatggatcattcaaggatttatgaagcaggacatgttattgatgaacatagagatatgcgtttagatgtggataacatgacttatgaggagct

SEQ ID NO: 376733 - DNA, 498 bp, Zea mays subsp. mexicana
tctttatcgcgggcggccgctcgcgatctagctcaacttgatgaattgcttaaagaagctagtaagcaggtatgtcaatatgaaggaaatgtagcagaattttagagttaacaaagagaatttaacttaccatgtgaccagaaattgtacaagtggcttaattgtatggatcctgtagttatgcaaaggatacagtccaaaaattagtacaatcagaggaacgaaatcctcttttgattttgcatgtgctgttatttcaagtataaattattgactattagcagtttggtttgtgatgtatttttttttatatacaattgatgttagtatgagcatctgctgactatgactaaagtcaaatggtgacttctcttaccagtcaactattctgtctctaaacattttctgttttcgttattggtgaggaaggtccgaaatccagacaatgggacacagagtctctatgatttgtggatgtcttctaacagttctcctttg

SEQ ID NO: 376734 - DNA, 201 bp, Zea mays subsp. mexicana
gctttatttcacataactgaaccaagaaagcatcggagggtatattttgaaacacccgtcagtttaaacaaacaaagcaaaaaagcaagctagcttatcggcgcggtgggaataaaaaaaaaaggtactcagtgccccacgtatttgacgcaagactgaaaataagtggcacataccagcgctcttcgctctgccattgag

SEQ ID NO: 376735 - DNA, 363 bp, Zea mays subsp. mexicana
tttgctagttacctgggagaacagatcacgggatgaggatcctttggaacacgcacatcttgaagaagctcgccaagatgggcatcgacccagccacgcaccagcctttagccaactcgaaggcggctgcttcctcgcagtccactgttacagatgaatttgctaaaaccagcaacaccagagaggagctgagcttgaagaatgatggtagcccgagggaggctccactgtccactgattcgtcggagccaccaagctggccatagtcaggctcagggagcaacgtctgtgatcaaagctctgaactgctggagaactggctctcggagactggcctgtccatggatgagccatggccggacc

SEQ ID NO: 376736 - DNA, 193 bp, Zea mays subsp. mexicana
acccggcctgtgtttccatacttcaaccatggcggcatggggggcttcatgttcagcaacctgtcttcacataacaaataaggcaaccagggagctagcttattggcagcggtgggaataaactaaaaaggtactcagtgccccacgtatttgacgtatgtctgtaaataagtggcacattcgagcgctcttc

SEQ ID NO: 376737 - DNA, 491 bp, Zea mays subsp. mexicana
cctttgcatggagaagctcgagagcgagctcaatggatacagggtgcggaaatcctaccccttgtacccttcctcagagtacctggctacctgctgtgtaacggcgtgatgtttccttgtgcgtgattgcggttgatttacttggtttgtcaacactagtcacagtaacgacttactgtgtgtttagtgtagtttactgaccactgggctgatccctgcgaattcgttggtacttttatgagtcctaagtcttgatgattatttgcaaacatcacattgcttgtacgtttgtgctttgctaacctgtgattacaatagatttcgtggctatatttactactgggcatataaaacaatttatttatagtttcccacatatgagacttgttgtgatttccgctatatgttttattttgtggctttagttgggcatatttcctattctaaagtgacaagtgcttatcaatgaaaatgccattctgcatttagtc

SEQ ID NO: 376738 - DNA, 477 bp, Zea mays subsp. mexicana
  unsure (1)..(477): unsure at all n locations
cttggctccagcttgtacctccgactagaactttaggatcaagccgcagtggcttttaatggaaggccaagtattttatccctatgtggaatcttgtgcctcattcgctttacttacactacactttgcattcatccataatgctttgaatttctgttctcctacttggattcatttggctatcttaagaaagcagaattgctggtaaaactatacctacattgaagcaggaggcatattcatattataaaaaaagtgtcggcattagcaaacttttgaccacacaacactgggttgcatacaaattctctcacctagcaccaaattctcctttctgtcaatcagtccaacctaagagcacaatgcaatcaatttatgtttttatcaacaccctaaccaattagaattagtgctacattttctaaaagatcaattgctcatttactnagctaaataagtaggaattagcactacatt

SEQ ID NO: 376739 - DNA, 452 bp, Zea mays subsp. mexicana
tttttgttttataacatttgtcgactttgatgactagccctagatcccaagttatcacattacctttttatttgtactgtatttccttatagtcttaaatcacaccactgaatcatgtagtttcctaggtttagggctgcagtggggcatagttagtaggtggtacacaagaatttctggtgttcttttgtgtgccagttcactgaattttgattgattgttttggggtgtcagttatcgggaaggtgaaggatttcttgggggagattgcaagggccaaccagaagttgcagcttgatgcacagaacaagcctcctgtggagtacgatattgaagcccttactgggaacgaggaggaatacattgagatggatctgcttctaggtgtcgctgatcttcattcagagcaggctgtggaggcagctgaagcaacaataaacggccgccagact

SEQ ID NO: 376740 - DNA, 499 bp, Zea mays subsp. mexicana
tgttcgcgtgggctactccccgttcttcacgtgacaaccaataggcgaatgaggaagctaatacaccattaaataagaaatctctagaatctgctctgcatgatccgattgagctgcccaattctgctgaaacccctgctggaccaaggaaaatgtgcctggcggacagaaatgataatttggtggctactgcaccggttgtttcccatatacctttccagggacatgctgctggtgtagctaagcttgatccttcagctgctgctttagcccacttcgttaatccccagaatggaaatgacgactgcaacaattttatgtgtgatttcacccccattctaccgtttgaaaatgcattcttcatgggtacacaacaagaagcttttggttttgatggaaaagggatcatgaaatattctgatgccctggatgctttcttgaaccaaacacttgttgatatccatgaacattcattgacaacatcaaaggtcagtatgat

SEQ ID NO: 376741 - DNA, 436 bp, Zea mays subsp. mexicana
ctttgccaccttcgcgcgccccacggcgctcagcggagggatctagctcccggacgcgctccgcctacgttaccgcgttcaggacttcaccaaggaggaacaggatgagatgtatgtcttctcgacaagccagaagcgggtctcggttgaatttgttggcacagacaaagttcaggagaagctcaacaacttcaatgagttggccagtgcatccgtttcttacatgggagtgagctcaattggagcgcccaatgaactaaacagtttggttccaaatctcaaacttcttgacttaactggaaatctgttctcacagtggcaagtaagaattcccacagaatggttcttgttacttcaatttgctatacttagtcacttacaattggtgtgactttatataacatcaaagcaacaagagaaagtcttggtggtacta

SEQ ID NO: 376742 - DNA, 510 bp, Zea mays subsp. mexicana
  unsure (1)..(510): unsure at all n locations
cgctgcagcagcccgatcaccagccgccggcccatggcagcgctgctgggcgcggcattgctgccgccgcggcaggtgcaacgcagcaccagcaccagcagcaggccggcgggagcagcggcgcggcacagcatgaagctggcggcggcggcgcggggaacccctacttcctggacgaggaggcgctgttcgagacgccgcagtacctgcgcaacatggccgcggggatgatgatgagccccccgaggttcggccgcaactcgtcggacgactcgccggaccacccgtcgtcgtcggatgccggcgacagcctctggaactaccgggacccgtagatcgaaccgggctgccggtaatggatcggaggtagtaacaccaataatggatgtggcgatgaaactaatgagctctactctactactactattggtgcctgcaggacgctagctgcaagctgctgctgctattgctacttctactgaacctggaagctgngagtgatatggggag

SEQ ID NO: 376743 - DNA, 416 bp, Zea mays subsp. mexicana
tttggatcctaatataatatcgacggcctaagtttatgtgagctatcactctatttctgagctttcaattttgcagattcctattaggccctgtttggaagtgtggtatttttgcagttttaaaataatactatggtatttgatgatactatagtattcaaacttaaaaggtgtttggtttgtacaggcaaaacacagttttaaataccatggtttatccaaaactgtggtatttttggagtttttgaaactctactcgggacctcagttttcttctcttctctctacgtatactttgtttttccaatggaaccaaacatatcttggttttgagcaatactgtggttttactgtggtaaagtaataccatagtatttgtgtcatgtacaaattgaaactatggtatcttaaaaata

SEQ ID NO: 376744 - DNA, 422 bp, Zea mays subsp. mexicana
gttttatttgactctggacactacaccagaagagggacattgtgcactggaagtgtggtttgttttgtggaacgaaagaggacataacttctattgtccctgctgggagagtattattcatcgggtactattaccaatttttgaacatgcaccgcatgctcggagggatggactttcttcgtttggggatgataggcttcgtgatactagcattcattcactgcagttaatccgcaaccttctcaatacactccataaggaggtatacttaatgcttgcacctcttcatagtttgctgtttgaatgagctaaaaaaacagaccaaactgtcgattcaattgctcctggcgccttagtccatctgattgaagtttgtggacacccagttcactgatggtcattggaattcattattaaagagt

SEQ ID NO: 376745 - DNA, 512 bp, Zea mays subsp. mexicana
gctgtgggcgacgagagcgcgggcggcggcggaggaggaggcgggcgcgggttcatcgacttcttcgcgcgcgccgacgccgccgggcgaaggcgccgcgctctgtcgcccgccgtgtcgagccggtggattgcggacgcgtcgccccagccggagcaggaggtcaccagcagaggcccgtgacgtgtcaagggccggccggctggctggcgtgaagcgatcaagcaaggctggcatgaagcgatcaagcaaggtagagaaagagggaagctttggttgcatttgcagtggccaatgaggggtccagtacagtaggtaggagcaaagtgaatttcgtttagcaacgcgagagagaggcccgatagtcagtcagtcagtcaaccagtgcagtatcagttgttgagcgtagatggtgaaactaatgtagcagctcagttgtactcctcccaactactcttttcgtttttttttaatggcgctggataggttaagtttacactattcagctttaa

SEQ ID NO: 376746 - DNA, 152 bp, Zea mays subsp. mexicana
cacgctgtcacacatgcccacctgggaccatgcgagaggggtacagcactaagctaccagttactggggccatataatacataatcatgcaatgactgtgagctacatgcagatcttgaactgacaacgccaggcagcaatgtgtgcacata

SEQ ID NO: 376747 - DNA, 523 bp, Zea mays subsp. mexicana
tttgcttatgcagatgctattgtcaacagctttttaaaagatgactacaatgtggaacaggaactgacaattgtacgtaattgatagaccctaaataaagttaaatgtgcaatgttagaaggcatcaaaacgagaccgacaactgtgggacctagtaagacaggcgcttgcattggtgtagacatgggaccatatcaagattatgccatacgtggacttggtggcattcctggcaatggtgaggaagctgaaggtctaagatgacgatgtgaaatagctaaactggaatatgcaactgcatgggtgaaacatacggagggctatatttatgatggactgtgggagtgactacgaacagatcaccatgactgtggcagtacagctctgtgggaggggaatccaggatttggtattggatttgcatactgactttacttcaacactgacctaggtcagatccgtgccgacttacgctatgaatgcatataactgaaaaccaatttttttggatcaacagtaaccg

SEQ ID NO: 376748 - DNA, 420 bp, Zea mays subsp. mexicana
cttttttttatttgggtgagaattaagcactgggttgtaccaataaacactgaaacagtacttgatactgaactgaatcgcgtgctagttgtattattggtggcagtattccagttttcaagaaaaaaaaaaaaaaaaaaaaaaaaaaaaaaaaaaaaaaaaaaaaaaaaaaaaaaaaaaaaaaaaaaaaaaaaaaaaaaaaaaaaaaaaaaaaaaaaaaaaaaaaaaaaaaaaaaaaaagggggggccctttttaaggaccaaagtttactaccccggtgtatgaaaaataaaatttttttattggggcaacaaaaaaaaaataaagggccgatgttaaaaaaacatttactgggaaaaacccttgggtacaccaaacaaaagttctttgaaaaaaaatccttttttcacattggggtt

SEQ ID NO: 376749 - DNA, 535 bp, Zea mays subsp. mexicana
ttggacgcgtgggcgatctcctgcgctggctgccaccgcgcgcgaacgagctatttctcctctccccggccggcctccaaggtaatatattttaattatatcgtcatccattcaactccacacgggctagcaggacgcccggcctcgtccccgtccgtgtcgtccatggacggcaccaccgtgtgctccatgtgcggcgacgtcgggttccccgacaagctcttccgctgcgcccgctgccgccgccgcttccagcactcctactgcaccaactactacggcgacgcggccccggcgcaggcgggcgccggcgtgtgcgactggtgcctcagcgacgacgtcgtcagcgggaagaagcggcagtactcttctgcgtcaggatgcagaaagcggcatccccaggtggaagaagaagcagacaggagcacgcagcagccggcgttcccgcccagcagtcggtgcagcaagggcgccggcaaggtcaccggcagcgagcaggccgagggtggccggatgccccgcatgtacaagcttc

SEQ ID NO: 376750 - DNA, 232 bp, Zea mays subsp. mexicana
gctgctcaacgaccccgagctccgaaggccgtatcaaaaggcgaggccctcttttatagtgaccgacatggcgctgacaaatcatgggaccgtcgattacctccacctataagatctgttatcgatgggaatggtggaactggcaaaacctacatcagtgaagaggcatctaactggagagatcgagagcgaaatacgatccaaccaccggtgtggtatttcattccgtgga

SEQ ID NO: 376751 - DNA, 360 bp, Zea mays subsp. mexicana
gtctttttcttcttgtgacaccagccacaggcccactgaatctgactctattcagtcggtaaagaacatcctacgacggaaggggacaatgggattcacaacacggtttagtgaggaaatgggatagagcaagactaaccctgacctagggtgcttggactaaacggagaaaaagcacagatgaagtgatatactaacatggggggcttgcatgctcacagagacgaaatgaaaaaagcacatgatctttcgttaacacacgctgagctatctggagacacatgcctaccgctctcaaagagcaggtatactgtactgaagaacccaaaacagcaaaaactctacgcggacaggctggtg

SEQ ID NO: 376752 - DNA, 492 bp, Zea mays subsp. mexicana
ggtgaactccgtagtgccagagccctacagggatgagatcttccatattccacaagcacatcaatattgccgaggagatttctggacatgggatcccatgaccaccacccctactggtctgtgagtttttgacagcatcctcattgcttcaagctccaatttatcccatcatggatctgtgttgcaatttggcatgtattatgattaactagcatatatggcttctgtgtttcctgttgcctggatgtttcgggtagcataaacatttgatgtgctttgctcacagcagctctcagatcaactaatgttatgttgccactgtactgcactgttcttattcatgagctgctgttgtgcatcctaccaggaagtgtatactggaaggcaactgcctacgctataattgtagtatcgcatacggtgcactggatcttcacttatctatattacactgatgttgcatcattagatgcagtcctagcaacgtaccta

SEQ ID NO: 376753 - DNA, 499 bp, Zea mays subsp. mexicana
gtaattagcttgatccactgcagtttgcaagacaggcagtttttttttcctaatggatatcactgcttcagaaacaaaacggcgggtcaaaagaaattgtgaccgcctcagatttttgttcgaaatttacagagtggaaatccttgatttggcggcagaattcgtgagacacattataaataaatgctcaggttctaataactagtacaacgaaaggtggaccggatgagcagacacctaaccagcctactagtcaaagtgtatttactgctctgctcaggcagcatgcaagcaggaagaggacgcgaacgaacgattggtttcacttttcaaagcgcggcgaccggaccgacggaacctcggaaccgcgtgtggcgacgccgagcaggccgggccgggtaggtagccgaatatttcagtacatggacgacatggtggtaccgatgaggagctgacaagtgacaacccaaaagcgcgaaagatggcggcgtcatgtgac

SEQ ID NO: 376754 - DNA, 414 bp, Zea mays subsp. mexicana
ctagatccatcatcttcttcctgcttatatatataatataatatactttattgtctttaatttcttttttcttcatcattagtattattatctgtttattctcccaatacaaaatcacatgcgcaagatatgctgtggcccttcggccgtcgtcatcttctcacagtattattatcaattataataataataataactataatgatgtgattcacgagatatatagatgtggatggagatctaccaacctattcaacgctttcattccagttgaccaattaaattagtggcttggtccatcaccgacatgtttactaataatacggaagaacataatcttttttaaccaggcaaaaggatcacaaattattactgcaccccaatatacagtccaatactagcacggcattcact

SEQ ID NO: 376755 - DNA, 79 bp, Zea mays subsp. mexicana
ttgatattcacagagaaaaggatgaggacaccgggggggtatgacccgccaatggagaagattgttgcagcaacccgaa

SEQ ID NO: 376756 - DNA, 106 bp, Zea mays subsp. mexicana
cagggagagagagagaagttggagaccctttagaggctgccgccgtggttactccagcaccgaagagcatgccacagataaggagggagagggggatggtcggaag

SEQ ID NO: 376757 - DNA, 362 bp, Zea mays subsp. mexicana
ggaatgattgtggcgggggagcgcgtgcaaccaggcgctgttgtcccgattgtacctgaggatctcgccctatcaggaacatgactgaggaagacttctgtgccttcaccctgctatgcggcattgaactcagccagtctgaggtgacatgctttgaagaaccagggcatcagattgtttcagaaatgggacgtgccgcgtagttactaggctttagagcgcgtttgacaaagttaacactggatcgccgtgacggtttgcctcctaactggatttgctcctccactgacgatcgcatggtgccccaaaaggaactatatcaaaagcatgataatacacctgaagatcgtactcacgatatg

SEQ ID NO: 376758 - DNA, 548 bp, Zea mays subsp. mexicana
ggagtaataccccaaaggtatgggatgactttgagcctgtgtacacgattaaatgagtatggcaatgatcacttgcttagaaatgttgtttttcctatgaagtctaaattccttaagtactggagggatattccaatgttatatgcttttgctttcatattggaccctagagcaaagattagaggttttcataataatctgaggatattgtctggtctcactggtactgactactcaactttctattctaatgtgaaatctgaactgagtgtaatgtttacaaaatatgatgataagtttggtgcagttaaactgtagaggcccactcctacaacatctattactagtaagaggaaacaacagtggagctggatctatggatctgaaaatgagtatactcctcctaacttgtctaggggaacattagcatctgaattgctaccgacagcaagctctgatgcatgcataagttctgtagactcagaactgtcctcctaccttgacagtgacactctttaaaagtttgatgatgatttcaaccccttaaa

SEQ ID NO: 376759 - DNA, 189 bp, Zea mays subsp. mexicana
atcagtcgttcgacaaaccgggagtaaacaggcactggggaagtccttcaataagcactcgatttcccacgcgggcggtgatgaacgatgagacgagaagggtgacgtgctgacggacgttccccaggagacgacgacgttgactaaggccctggatgagtgtcgcgtgaagagaccaacactgggggc

SEQ ID NO: 376760 - DNA, 357 bp, Zea mays subsp. mexicana
tcctccccctccggttcgggttcgggttcgtgaggttctccggggttcgggttcgtgggtgagcggatcgagatggcggcgtcggatgttgagtaccgctgcttcgtcggcggcctcgcctgggccacggacgaccactccctccacaacgccttcagcacctacggcgaggtcctcgagtccaagatcatcctcgatcgggagacgcagaggtcccgcggcttcggcttcgtcaccttctccacggaggaggcgatgcggaacgccatcgagggcatgaacggcaaggagctggacggccgcaacatcaccgtcaacgaggcccagtcccgcggcggccgtggaggcggcggcggc

SEQ ID NO: 376761 - DNA, 380 bp, Zea mays subsp. mexicana
atagctatattggtttaatcacaaatacatgatcttcatatgactcccctaagaatgatcacttacaactaatcgtgatgctataaggacgcacttacagatttttccgtaaacaacgagcatcctagttgtgttttttaccagtaggtgctgctactcctgtcatacttcaaccatttgtattcacatggtcttaatggtttgatgacagctaacctgttgttttgttcttatctaaaacacagtcacgcttttgtcttgtaatcgtatttttctgacacttgtgaacttggttgctcagcttcatgttgcctcaaaaaaaaaaaaagacgggaacatctgccttaaggtcttaaccaaaatgttcttaaacatgtcaa

SEQ ID NO: 376762 - DNA, 506 bp, Zea mays subsp. mexicana
cacgcgtccgaatttcttctcaaaggaaatgttggatagcaaggttgagataaatgaacagaactgtgacatcaatacagaaaatgtggcatttgttgcaatcacagaaccattggatgtgccctcgcaggctgatacagttgaggaatctattaatgatggaagttgggtgaatagacaaaacaatggttctaatttgaatgcaatgccttatgccatgaacgttgaacctttggatcctcctaagccttctacagtttctgaacctgttgatagtggagttcaggtgaatgaagatagacctttcatatcccttggtggagtttctttgagcaaggaatgctagctcttgtaagaatggtacttttgaggtatgccttggtaatgttgccgctgaaaaactgtcttttgagagaacttggctggagctggtaaaaacttggaaaatatcagtcagcttctagggaagaaagttcttggaggtgatgccgacaaaaaattttttt

SEQ ID NO: 376763 - DNA, 535 bp, Zea mays subsp. mexicana
gctgtatcgttcggtcttccaccccctttcccctctttgtcgatctcaccaccgtgccgaccccgatggcctccgccgcctcatcggccgccgccgctggcaaatcgctgttccaggggttccgcaggttcctcaaaaagccgtgggagatcacgggcccctgcgcctcgcccgagtaccgcagcgcgctgcctggcgcgctcgagtaccgcgtcaagtgcccggccaccgtgcgcgacgaccgcgacaaggccatcgtgcccacatccgatccggagacagtctacgacatcaagtacttcacccgcgatcgccgccggaaccgtccgcccgtgcgccgcaccctgctccgcaagcccgacctcgagcgctacatggtcaccaagcagtttgaccccaccaaggactttcccgtgccatacgtcaacaccactgtcgaggaggacgacaacacggtcggcgggggctaccagaaatgatccaggagctttgccttgcattcaagtagggggaaacataatgcttgattagaatt

SEQ ID NO: 376764 - DNA, 387 bp, Zea mays subsp. mexicana
ctttcactgacagctttctacttgcattggttgtgtatagggtaatgatgatagatacttggtggcctgaagatatggtcaggatcatgggagaggtgcaggatgggtctgatactactcttaatcatgcataaagctcgggatggtggcattgtgggattcactataagatgctccaatacccgcatatattctactggtgctcgatgtgttcgtgcagatgtaacattcaactcatcaagcgtttcagaagtacttccctcatggaacatgctatcatgaggctgatatgaagactgcaagaagcaacgctatgtctgataactagcctccaggctttttggccacttcttcagacacttattgtatatcaaactgctgccaatc

SEQ ID NO: 376765 - DNA, 335 bp, Zea mays subsp. mexicana
cttgtctatgaggacgcaggagacttcactgttaaagaaaggctgaaaactagcattcatatgaacctacttttttattcaattgtgggagccattggccttattggtctcatactactcttaatcatgcataaagcttgggatggtggtatcgtgggattcgccatgacatgctgaaataccctggtatggacgactggtgcgtaagttcgtgagtccgggttatgcgatcatccaagaaacatttgggctaatgcatactgttgtaaccggcgaaaaggacattcgcataatgatagcgagatgggtgaaaagcttgataacgcccatcaaga

SEQ ID NO: 376766 - DNA, 417 bp, Zea mays subsp. mexicana
ctctgccactcctcgcccaaagcgccagaggcgcagcccgagccacaggttgcctcctcgtggcctcgtccttctcgttcaagacgaaaccgtacgcgagcgagctggtgagggaggaagagcagggaggtgggatcaggccggctccatggacgccacgctcctgctactgcccgtcaactgcacggacgctgccagcgggcggctgcggcctagactgcctgtaggcccacatgtggcttcccctggcccctccgcgcggccaaggacctccatccgggcctcagccgtgtccgctgcccttgccgatcagtggcctccagcaacacgcttatcgtgtccggtcaatgcactggagggcctaggttggtgatgttttgaccaacagggaagagtgccatgttgtgaaaccaacat

SEQ ID NO: 376767 - DNA, 192 bp, Zea mays subsp. mexicana
gaggacaacgacgatgactactatttggccatcttcgagccgccttccaggtctcgtctggggggacgcccaccgagacgcttgcaaggatcagctcgacgcgcccgcactggaagagggaatctagagtcaagaagatggccctgatgatgaggttgtctgtgacgctgatgaggaccatgaggaaaaagc

SEQ ID NO: 376768 - DNA, 486 bp, Zea mays subsp. mexicana
gttttgtgtgcacgtggtcgtggtgcattggtctggtacaacgccaaggcgcacaacgtggtgcccgtgtgcgctgtgtggaacaggtcgggcagtgcgcccaatggcgtgtgggcgctcaccaccgagatcgaccgtttcacgctgaagcgcgtctccaactactttatatgctgattcccaggccactgccaggccggcatgaagatcgctgtaaccgccgcgtgaggcccatgtgcgatcagacgcgccggcgacgacgaccgacggacacacgggctcgatcggtggacagattattattatttatatttgcctgtacaaagtcaaagcgtttcgtgcttaacctgcgtgtcggttgctaggcggagataggtgtgtggagaccgtccggcactattgagaactatatggaatgatagtgtactcactacgtactgacgttgatgagttttggttgatgtggagaacaatcaatgcatgttg

SEQ ID NO: 376769 - DNA, 520 bp, Zea mays subsp. mexicana
cgaacgggaggtcgttgctggggtcgggagctcggggggcagcggcgaggacactggagagctgctacgaggaggcgacgggaacatggcggcgaggagactgcagatctgctgctgcttgctgtagcatgtgatgagggtgaaaaaagatctattcatctatttaaatgaatgggagaacttgacaggtgtttgaggaaatatatgtcatgtgataaaaaaaatacgaactttagtttctagtatacgttcacaataattgcagatatttgttttcataattaatataagttcacagaactttcatagtgaataatgttaattacgtttgtttttcatgaaaaatagaattaaaattttgtttctatgcgaaatggagaataaagaaattagtttatacaatcggttattactgtagatatagaggaccaaatttagagtacgttgctgaagatgaaaaagatttagaggaccgaatcttctagaggatgctgtatggacagagaatattcctttatag

SEQ ID NO: 376770 - DNA, 340 bp, Zea mays subsp. mexicana
cttgttgtgtctacaccccggcacctgtaacagagggaaccgtcgtgatccatgccgctgagcatctagaaaattatgctaagaccaaggaagctatggtggaagagcttatcaaagcgtgcactaactctggtgccaaggttacagccagtgcagcgtgcagtgggtgacatgagacttcattttgtggaacgtaataaggtgacaggagatgaaaatgagctcgaagttagaactaagaagggtctgacgaactactgtggctggagaaattgagaagcttagccgaccctatgcggaccaactagggtacggtgattctgtctctgcagactaaatt

SEQ ID NO: 376771 - DNA, 543 bp, Zea mays subsp. mexicana
agttgctgcagtgccaattacatctgttcctccatgcaagcaactggctaatcaaaacgagtttactgaaaagaattatgttgatgagtttcagaaagattcagaatctcgaaatgtaaccaaggagttaccaggtaagttttgctggattggtgttctgttgtgtttcagatcattgacttgaatctcgaaactgttttgtcccgcagactgtatctcccgtctgatttttcaatctcatgagtcttaatgacttccatattaatgcttgtaaatttgtccttatgtaatgaaagctggaaaaaacaaacattgttcttgtggatggagttgtcaaggattctccaggtcaaatctagtttaggggaaaggcaacagcttaatgatcaagtgacagatgtggttacagaatcttctggtaagatctagaattctatgtttgaagtataataattggcatagtgcatgtagaccgaagtcttcatagctctttctcctggcaggtcaaattcagaatactgatgcaacagtgtctgataaaat

SEQ ID NO: 376772 - DNA, 402 bp, Zea mays subsp. mexicana
gggccagtactgcggcgcctgcgtctggaagggcgactacgtcatctcggctaagcgcgtcctgaaccacatctacgagtgctctccctcgggcggctgctgcgactatggcaagtccagcgactgcaataccggccacggccgctgcggaccttactaaaggttcttcgcttgcgaaacctaagcgggacgtgggctgtggagcttggcatggatgagcaagaaccaacttggaggtatgagatgggacgccttcgttacaaccattgttgggaaagagcagattttgtatccttcatcacacattcccttacctgggagctagcgctagcctcaactccaggcacaaaggccattaaacacaatgccgaatctggtgatccagaaaaaaaatggaatatt

SEQ ID NO: 376773 - DNA, 420 bp, Zea mays subsp. mexicana
ctgcattgctgctgcagaagggcacttcatggactaccggatggcttatgtggcagcacttctagtgagcatggcatggacaatgcaggtgctgagatacattgtctatgtggcagtggcaaaactggcacatggacgtctcacctatgggattcacgtcctgggcggtgctgtggaagcattctgtgacacgatatttggaccagcctttggagacatatgcatgggtgcaatggctgtgccggtgaactcagcggtgcggggattggctcgagcaatgaaaacggcggctgggggcaacgacgagttcattctgtcaggacagggctgctgctttgctgtatcagagaagatgctgggacgtgctaaccgttgtggttttgtgcacgtggtggcgccggggaaggcattctgtgtggc

SEQ ID NO: 376774 - DNA, 301 bp, Zea mays subsp. mexicana
tgttctcaatgcgagcaagcgcgaggtggcactggcttagcttcgcatacacagatggctaacaagcgtcagcgggaagagcggaagcgctaccagtaggctgacccagacctatttcctctgcaatccaccccttgtaacgacggtaccattagcatgagcacgaagaagcagaatgagagcatgttcaagaaggcaaataagggctgcacgcgaggggctaagcaccctctacgggatcccaggatgcgacccgatgaaacgctgatttatccagaagttcaccgaccacggctgcaat

SEQ ID NO: 376775 - DNA, 497 bp, Zea mays subsp. mexicana
taatttattcctcgtgtccctgagtctgtcacgctaaccctgtcttgatgatggtgctcaatctgcaactgtggttatccttcagttaagggtgccatgctgcatgttcttgctggtcactttgagcctgcaatgccaagttcttcaaatacttgcgttcatgtcccatcatttgcaactttacctccacagtacagacaattttggcaaacaagacaatgtcgttacagtgcccctacttactcgaccctaaaactgttcaagaaattttacagccttctatttagtaagttaattattttcctctgtcctttttatatctatcaatggaaaaaaaaggtttgtttaatacatgtacagagcctgttgatgatctctagtaggttcttggaagtttgggtgctcttatgactgggctgaaggatatcataagctcttaaggtttttcactagagtgacatgtgatcccttgactatatgctagatattttgatggt

SEQ ID NO: 376776 - DNA, 546 bp, Zea mays subsp. mexicana
  unsure (1)..(546): unsure at all n locations
cggacgcgtgggctgcttaaccaaagcggtctagagcaaattgaactgatggataagaagaccaaggttatagtttgtgttgctgctgcacataagttactgtcaatgatggctatgattattcattctagaaaaagaaaacgaaatgcaaggaggacagggattacctatgcaccaatgcatgaaagggatagaattagaattgaatatctcaacacaaagatttggagggatgacacaacatgtataaacatgattagaatgaaaaggggttgtttctttcacctaactaaacattttagagagcgtggtttacttcaggacactatgcatatgtgtgttgaacaacaagtggccatgtttctaaatacaattgggcataaccttagaaataggttgattggcacgaattttggtagatctggngaaacagttagtcgttgtttcaataaagttcttcgtgcaattggtgagctacgaggggaactaattaggccaccttcattggacactgcaaccaagatatcagggaactacagatgggat

SEQ ID NO: 376777 - DNA, 402 bp, Zea mays subsp. mexicana
ggttctggtgcggcagatggcgctcgtaccaggatctgtcgagcggagctccataactcgagaccgcgtgagcgtcacgaccgtcctctgagattcgcctgtcgcctgtgccctgtctcctactcgggtagcatgaatgatgatgaactgtcaagcatagcctctaagctgtatcatcctctatctggttctgtctgtactaggatcgtggaaacagaggatgaagcgcacacaacacgctggatcctgaacagactaatgggctgggagcagtcatggctcgcatgacttagggtgtgccatggtccacgtggacccagtggtgggttcgcccctgcttagaagccatgggcattagctctagtgaatacactattcttagagattgatgacacaaacccc

SEQ ID NO: 376778 - DNA, 157 bp, Zea mays subsp. mexicana
gcacgcctgaccggaccggaacggaatgggtcggacccaacccacgcgttttatttgttataagggggatgacccaaggaggcgaaggattcctgtttgagtgtacccggatcaacggggtggtgctagaggccttaagggtcactcatgtaaggtg

SEQ ID NO: 376779 - DNA, 400 bp, Zea mays subsp. mexicana
acgcggccttccttatgattgcaacggcattgactgctgcatgttctatcaggggctggacagagtggactgcctgctgccaaaacaggaccaggcgcttaccggcgaggtttttgagaacacacaaacatctcatgcagggatgaggacgggctccacagggacacgcagaatagaggctgaggtatctcaggagtacgacaagaagcacatgactactgtgcactgctagtgtggggaaccaacaagatcatttcaaggctgtgaaccctggttaaactactgatacgatggctatgaagtcccttgaacagtagggctgcatcatgcacacaactggtgctacacttcgtgaagtgtcctactatgccatcagtggggacatcagcaagatcttcct

SEQ ID NO: 376780 - DNA, 130 bp, Zea mays subsp. mexicana
aagctgcgccgcctgaccacccggacataccgccggttcgacccacccgttttttctccgaccgcagttcgagtcacagagcatctattgatgcgccgctcgaggagctctgtgacgaggacaagatcac

SEQ ID NO: 376781 - DNA, 458 bp, Zea mays subsp. mexicana
  unsure (1)..(458): unsure at all n locations
ccgtatctcggcgcagcaagtagtcaggcaagtctccatttccagatctcaacacaggcaagtttccagttccctggtcggctggtccttggtcctcggcggatccggatctcaacacaggtacaggtatcgtgtatacatgtatcatcgtgtagtattccatgtactgagtattatgtttatcaattataaattagtatgtactgagtatactagtattccatggcatacatgtatcaggctctctcctatctagaaaaaaaagattaggacatttcaactcgtattatgtttatcaattataaattagttcatgttttctcagtgttcatgtactgtggtcagaaggctcttgtagatttgtttgtgtttagcaattagtccttattgcanngtgattacatggnttgngtttgggagcacttcacanggtatgaggtagaggttcaggaagctga

SEQ ID NO: 376782 - DNA, 449 bp, Zea mays subsp. mexicana
tcttttggtgagaaggctatgactgaactgaagaagtattatgccattttcgatgagaagtgcctatcgaagattccaaagggcccccttaaggataagaagcactagattggtagtaaggtatttgctatgaatcaacatctacattatgtcactagctgtcacctctttctctgaaggatggtgcttggtcctggtctctagttgatagtatataatctgtatgggcaactttggtgtgactgacagtctgctgaaaactgttgatcttgtttttggtttcaaaaaaaaaaaaaaaaaaaaaaaaaaaaaaaaaaaaaaaaaaaaaaaaaaaaaaaaaaaataaaaaaaaatataaaaaaaaaaaaataaaaaacaaaaaaaaaaaaacaaaaaaattataccaataggggggccccctttaaaagaaccaaattttccctccccgg

SEQ ID NO: 376783 - DNA, 160 bp, Zea mays subsp. mexicana
accgaacgctggaggctaacacatcaaaacgttcagaatacgagccggatcacaaactcgatctaggcaggaaaacccgagcgtaccgtgggccggccacagaggctgaaacggaggccgacgcacgcaaagacgaaatgctcctgcttgtacaggccct

SEQ ID NO: 376784 - DNA, 438 bp, Zea mays subsp. mexicana
tttgtttcaggcgcccgtccagctgaacctcccggcccgtccgtggttcgccgccggccccgtccagcagctagtgagctaactgatgctgtaccagtggttcctggttcatggattcatctcagtgcaagaacagagcaacaagatgcgcatcatcaaacacacacgcgcgcgcacgcgcgtgcgctggaccaagaaatgcgtgtgacgagctcgagggcatcgtcatctggatgttctctggttcgcatggaaactgttcctccatggtcgctagtgtggtggcttgtgaattgtgatgtgtagaaccagaatgaatcgtgtttgcggcgtcattgcattggattcggacgagttgaaatcggaagcttctctgtgagagacgctggtggtactggacctggtgcaagtttgcatcagcaagtctccgatggatat

SEQ ID NO: 376785 - DNA, 481 bp, Zea mays subsp. mexicana
tgtcagttgagtccaacgaggagaggataatgagcaaggtgtcacaggtggagagggccatgagccacctgctcatgggacgcggctgacgaaggatccatctgttcgtcgtgtttcccttaccatgatgcttcctattgccttcgtttttttcttttgatgatggtcgtatgtgtgtttttgcatagctgttgagtttcacctaccgcccatctgctctctgttgttgtacaattagggattttagggtaagcagttgtaatctgtcatcttgctcggatgccaggttactaagacatcgatggcatcctcatggaggatgagcctattttagttgttttccaagtaactgcaaatggtgttggcctgctagatcctggtactgaaagtaactatgtaagtctctgaggatttgatccagtccacagtcaatttgatcagggcgagtcccctcgagcgcacgaaagcaaacctgcagcgc

SEQ ID NO: 376786 - DNA, 210 bp, Zea mays subsp. mexicana
gcctgcacgcgccgggactgactggccggaccgacgcacgcgttttattttgagtgccagggaccgacacacaaccaccagcgctcttctgcactccctcacgccgtatgttgcgaccaagaagtcggtcccactctctgctagcgaggcggcagctggacatgaaggataggttcaaggagtgggcccacgcggccattaggcacctag

SEQ ID NO: 376787 - DNA, 255 bp, Zea mays subsp. mexicana
cacaggtggcgcagccgaccaggggaggttctcgaggaattacggggatttctccctgggccacaggaccgggctcgagacgctcagggacgccgagggcaagctgaacaacatcgcagtacaatagtgatgcaattaggaacgatgagaaagactccaaacctgctgctggccaaagttggcgagccccatacacatggagccaatgcggatatggtaacaggctgcagcctgaaccacaggtcgtgctatcct

SEQ ID NO: 376788 - DNA, 188 bp, Zea mays subsp. mexicana
gtgttttgctgctctccaaccccgagctccgaaggccgcagcatcaggcgcggcccccccccctcgcgtgtgaccgagatggcgctgccgaatcaggggaccgttgattaccccagcttcaagctcgtcatcgtcggcgatggtggaactggtaaaactacatttgtgaagaggcatctcactggaga

SEQ ID NO: 376789 - DNA, 575 bp, Zea mays subsp. mexicana
cgcttcctcgcctaccccgtcacgggggcacctgcgcttccgcgccgcgcgccctctgccccgccccgcccggagaatttgttgccaatctatcaactcagctaatgtgttgggagcttcttcaacgacatctgatgaggcagtcccagtcccagttgtccagatagatcaggactcagaccgtgatgcgaccattgtgcagctaagttttggagatcgtttgggggcgctacttgacacggtatatattttacatgcgccactgatgctgtctttacattgttgctgctcaaaattgtgatgtttaagtttttgccatatctgccaattatttttcctggtattcactgtttgcagatgaaagcactcaaggaccttggccttgatgtcacataagggaagtgtgacaactgactcagctgtcacacaaacaaagttccacatcatgcgatttgggcgcaaggttgaggaccctgacatgttagaaaggattcggcttaccatcattaacaaccttcttcagtaccatcctgaatcaagtgagaagttagccattgggtgattttttgggataa

SEQ ID NO: 376790 - DNA, 363 bp, Zea mays subsp. mexicana
ccctttctccggttctagatcgcgagcggccgctcgcgatctagacgctttaaagactgcccactatgtggtgctgatatagagggtattgagcctgatgcggaacttcaagctcttgttgaccgcttcattgatggtcatgccagaatcaagcgatcacatgctgcaggggatgtggaagcagcagatggcaagaacaaagtcatatatgaggatgtttccatggagagaggggcttttctggtgcagcaagctatgagggctttttgtgcccgaaacattgaaagtgcaaagtcaaggctcactatgtgtgcagacgacattagggaggagttaaaatcttcagaagataacttaaaccta

SEQ ID NO: 376791 - DNA, 554 bp, Zea mays subsp. mexicana
  unsure (1)..(554): unsure at all n locations
ttgtgttaggttgctaggtttactactaaatgcatatccatgtcttttcatttcagcatctatgttattgacttagaatcagttcatggcacatttatcgaaaatgagagattaacaaaagacaatgttgttgaacttgaagttggacagtgacttttgcgaaagaacatagctgctctattcccaactcctagccttttatatcagataagctacaagaggtccttaaaagagtgaagagcgcaataatacctggaatctacagtgacctttgtggggattctgtccagcaaaagtggggtcatcttgggcatacaaatgattacttgtctggtgactcgtgattcagagttgacagtggatacaaacaaatatattcttcagaattttgtagtagagttgtttcaattagtagatgttttttgcattagtttataaatgattgtaccctactgcaaatcaaggtatgcacccttgaaattggcgacttcatagctgtttgaactngacatttttgctataacaacttttttcttaatcacactgatatattt

SEQ ID NO: 376792 - DNA, 481 bp, Zea mays subsp. mexicana
gattcatgtcaggatcttcggcgacgacgaaaaaaacatgcgataaatgcgacgacgaagtaacgtctcgatgtagtacgtgttcgcgtgaattctgtaagtttcacaccaaggcgcatttaaaatcgaaaaaaacgagcgaccacaaaattgaatcactcgattcgaaaactgacacatcgacaaaaaatgaacacacgaaatgcaaaatacatcgcgacatggttgtcgatttgtattgtcacgaatgtaaagcaattttgtgtcgaaaatgcgaagtcgaccacgaatcttcgtgtaaacaaaggcctgattatttgcgcaacgctgcggacgctttattaaaggacgttaacgatttattgaatcaaacgaaacacacacacaccgaattttcacgaattgtgaatctttccgctttaaaacaagccattaatcgggcacagcaattaaggcgcgaggctggcgaacaagcgacaaa

SEQ ID NO: 376793 - DNA, 410 bp, Zea mays subsp. mexicana
  unsure (1)..(410): unsure at all n locations
atataattttataatnaaaaaagaaagaaaagagaaaaaaaaagaaaaattatttttataaaaaaaaaataaaaaatacacccaaaaaaaaaaaaacaaaacattcatattttatctttttttctattgggggcgcccttttttggggtcccaggtttcctcccccgggcttccgacgccttacttttttttttgggccccctatttttctttcccgggcccttttttccccccctccgtttctggaaaacccctgggtttcccccattttttccccttgcagcccttcccctttttgccgattggcttttttccaaagggccccccccctttcgccttttccaacatttcccccccctctatggcttttgggcccccccctttttgggcctttttacccggggggtggg

SEQ ID NO: 376794 - DNA, 107 bp, Zea mays subsp. mexicana
tttgctatctagcagtgtagatcgctgaagctaggcagatttcttttaggctcgctctaacaatatcctgtgaaaggcaaatcttgctattggagggacggggacaa

SEQ ID NO: 376795 - DNA, 532 bp, Zea mays subsp. mexicana
catagtagtaagcattcatgttttatcccaaaatacttaccttcttgacctttctcttttttcctaagcatctctctctctctcttcttttcacactggtaaacgtgctcaactctaaaacgtcctctattttgggactgagtgcataaatgatacaaatgtatctagaaaagtcgaaacctcttatagtttggtatagaagggagtatttgtttagatgtcattacatagcattttgcatgatataggatggtagctctttgaactgctcatatacaagagatgtttcctcatttccttgctgctcattgacacaccacttatatttgatgaagggactaaccaatgagttcatgacatgtggcctcacggcgcacatggcagattcacatcgttggttcttataaccatttaatacaatgttcacgcctgaggttgtcttgtcatagttgatgttttccataaatccacaataccaaaacaatggcgaatcttatcccagatgtaacacattagtctggccagctcatct

SEQ ID NO: 376796 - DNA, 258 bp, Zea mays subsp. mexicana
ggaaagctggatacgcctgccggtatccgggccggaattccgagagttcgagccacgcgccacgcgtccgcctaccgcgcacgcaaaaagtacaggatactatccttctgaaaacccatcttttaatatcccagtcccagtccatatcacaaacccatggtgcatccaaagttccaaacgtcacccttagtgtttgttcctcccccatcattttgttgctgatgttcctactccaggtgcaataataagggggtgttt

SEQ ID NO: 376797 - DNA, 382 bp, Zea mays subsp. mexicana
gtctccggttgggcatgcggtggtctgcgcgcgccccgggcgcaatccaggagctgatgctgcaggttcaaaagaatggaaactggctttccacagttatagagactctaccatcagctacttcatactcaccaaatggagaactgcgacctatattacaataaatgcggattcttgttggacaaccactaaagcagcctccaaattacattagtggggatttcatgattcctgagatggcaggtgctgattcaacacccgactttggatttgaatcattttttgaagataaacattgctgcaagggtttgagtggatttctaatatatgggaccggcgagaacgtaactgttcgtaaagaggtccacgttaggactcggag

SEQ ID NO: 376798 - DNA, 306 bp, Zea mays subsp. mexicana
gtttcacgtttgacctccggcgcgcggggcgcgccctagtcacaaacttaacgctgaaccccctacttcaaaggtgcctcagccccctgcagagacccatgggaagggtccattatagggaagggaagacaaagcctgccagcgatgggcatcttcaacgtcgccgtaaaatgctagatcgagcccaagactggccggtgtctcaagaagaggaagcagttccagacggtgcgaaataatagatcgctgaacagcaaagggagcaagcgcaaggtgaattcggaagtgttgggaatcttgggcggg

SEQ ID NO: 376799 - DNA, 429 bp, Zea mays subsp. mexicana
gtttcccgtttgacctccggcgcgcggcgcacgccctgctcacaatctttgcgatgacggtcctgctgtctaggggcatcacggccctgcaaagcaccatgagcggggactcctatcgatgctccaccacaaaatttcgcacgaatcatacactgctgccttgctggaaactgccctcctcgaggcacaatcgcactttgctgcactggttgacatgctagagactatttgttcagagtgatcatgcacaacgcacgctcatagagagggaaatgtttgtccgagaggcactcaatgtatgttgcatgagagattctcagacagcagtagatagacccgagacatataaacagtggcaggtgaggaacctcaggacttgatttgtgcagtctcccttaaaccaagaaattatgatgaaagccatggaca

SEQ ID NO: 376800 - DNA, 170 bp, Zea mays subsp. mexicana
gtttcatgtagtatctgcggtggtctgagggcgacttaaacagaacgttgtaattgactgtgactcgcaagatcttgctcatgctcataacttgagtaattaactggttgaggaatatgtagaccaagacaccattattgaggatcggaaagcttctgaatttctggaag

SEQ ID NO: 376801 - DNA, 448 bp, Zea mays subsp. mexicana
tttcttgttagggacgcggcccaactatgctctgagggtgagggtgcccaggtcgaagtctatcacctccgggaagaggagacctaacttcagggggccctttgtgaggtgagtctccgggttagggaggccgagtcgtcccttggtgaggccaatgtccacctagagagggaggatgcggagctttcgcgagagtgtgacactactagaggtaggtcttttccgtactcttatgccttctgttgttggttgcttttgccttccctcctcctcagagctccggaggatgttttctcgggccgatggggccaagaaaacagcggaggaggtgaaagcagcagttgaggcccgggtgcgtcaactttcgcttgctcgcgatggcgccattgctacgtcgaccgaggcggcgatcgtgctctctgagcgaagcgccgagctccaggagctc

SEQ ID NO: 376802 - DNA, 150 bp, Zea mays subsp. mexicana
gtttcatgttggacctccggtgctcggggcacgccctagtcaaactcttaaagatgaaggacctgctgcataggtgcctcacgaccctggaatgaattataagcaagaacaagtatatgtaagacactacaaaagtttacacaaaccaaa

SEQ ID NO: 376803 - DNA, 123 bp, Zea mays subsp. mexicana
ctcacattttggacctccaatgctcggcgcacgacctggtcacaatctttaagatgaagcttcacctgcaaagggccctgaggagccgtaagagaattattggcggggacacgtatatgtaag

SEQ ID NO: 376804 - DNA, 219 bp, Zea mays subsp. mexicana
gtttcacgttggaccaccggtcctctgcgcacgccctggtcaaagtcctgaagctgaacctccagctgtaaaagtgcatcaagaccctggagcgcatcatgggaaggaacaagtatctgtaagacaggacaaaggtagacaagcaccgactgctgctgccatactgcaacaatgcagacctgacacctactacaaccgcatggcggacaggctccggag

SEQ ID NO: 376805 - DNA, 176 bp, Zea mays subsp. mexicana
gtctgacgtggggacaaagttcgctgggggggggtaaattcaaacgccttaggttgatactccacgggaataagagaagtaccatcagttagcgcattgtgaggtgagattgcgatctatggtggccgaaaacttcctctacaaaaagaatgctcctgtaatgatggaagattcca

SEQ ID NO: 376806 - DNA, 169 bp, Zea mays subsp. mexicana
gtttcacgtaggaccaccagtgctctgggcgcggcatgttcccaaagctaaagctgacacttcaggtgtaaaggtgcctcacgacccggaaaaccattatgggcatgaactcgaatatgtaatggtcgacaaaattatacaagaatccaatgctccaccaatactggaa

SEQ ID NO: 376807 - DNA, 252 bp, Zea mays subsp. mexicana
acggtctcatgttcgctcaccggtgcggtgggcacgccatgttcgcaatcttcacgatgatcctcaagccgcataagaggatcgccgccttactacgaaagcttggcatggtcaagtattggttcgacaccacaaaggtttacacgatctagatgctcaactcatgccagaacatgcgaaagctactgctggtgagatgcatgattatcaggccacatataacccactctatgcacagagcattgatggccc

SEQ ID NO: 376808 - DNA, 171 bp, Zea mays subsp. mexicana
gtttcccgttggaactgcagtgccctgcgcacgccatggtcgtactctttaagctgaacctcctcttgtataggtgcctcacgactctgatgagaatcattggcaggaactgttatttataagacagtacaaaagaatgcactcatcgacggctactgtcatactggaaca

SEQ ID NO: 376809 - DNA, 169 bp, Zea mays subsp. mexicana
gtctcacgttggaccaccagtgctctgcgcacgccctcctcacaaacttaaagatgaacctcctcctgtataagtgcctcacgaccctagaacgaactatgagcgggaccagttatctatgcccctggacaaaattatacacgcatccacggctgctgccatactggaa

SEQ ID NO: 376810 - DNA, 163 bp, Zea mays subsp. mexicana
gtttcacgttggaccaccagtcctctgtgcacgccatagtcacaaacttaaagatgaacctcctcctgcataagtgcctcacgaccctgaaaagcattatgagcaggaacaggaatatgtaacccagaacaaaattatacacgaatcgactgctgctgccata

SEQ ID NO: 376811 - DNA, 288 bp, Zea mays subsp. mexicana
tttacacggtaggacaccggctctcagagcgaggctgggtcgaccactggaagttgaagttacatcatgggcaggggatcatgaccggaaagagaaaggttagtggcttcaagtatcgatccatactattcctcgacgcatcaaagatggacggctcagcgtacgaggcatgaatctagcgctagcacagcaagaggttgtgacaagggggatgatgtgagcacatggaaagggtaataagtgaagaggggctggatagcccccaaagataatggatttgttgagaat

SEQ ID NO: 376812 - DNA, 261 bp, Zea mays subsp. mexicana
ttttcacgtggggcctccggtcatcagcgctcgccatgttcgaccagtggtggttgctgctacatcaggagcaggggatcatgacgggaaaccgcattgtgggcgggatctgggatggatccatccagacattgtccataaaaaatggacggctcctgccatacaatatgaaccttgagagaacacagatcaaaaggtatggcggtcagtatagatccaacaaatggacagagatatctgtcatgacggatggatagcact

SEQ ID NO: 376813 - DNA, 361 bp, Zea mays subsp. mexicana
cttgaccgctgtcatcagacgcctcgcgtgcgtcaccagagatatgtccacactgtgcaatgaagaacctctttagctgagcataggtccttcaatgctgggtcctttagaatacaaagcatgctgaatgatgacggcactatgtaggcttggtctacgttgagacaatgaggagacttgggccacgcctgttgggtgagatggccttgcttggctgcatctataccggagaagggatcgctgtttcactgctcagaatagtctcatgcttgtcgatggacacgtggacaggcacgagaccttcttattggatcagtttcagaccacatttgatggtaaaggcccagacttggttacgaag

SEQ ID NO: 376814 - DNA, 150 bp, Zea mays subsp. mexicana
gtttcctgttgtatctcctgtctactgtgcgcgccatgttcaaaatctttacgctgatcgtccacgtatatagctgcaactggggtctttaaagaatgaggggcacaaagtggtttcagatgagactcacacacctttttacaagaatag

SEQ ID NO: 376815 - DNA, 173 bp, Zea mays subsp. mexicana
gtttcacgttggaccaccggtgctctgcgcacgccatagtcacaaacttgaagctgaacgtcctcctatataagtgcatgacgaccctgcaaagaatgatgagcaagaacaagtatctgtaacccaggacaacgttatacaagaatccactgctacagccatacaggaaaatg

SEQ ID NO: 376816 - DNA, 163 bp, Zea mays subsp. mexicana
gtttcacgttggaccaccagtgcactgggcacgccatagtcccaaacttaaagctgaacctcatcctgtataagtgcctcacgaccctgcagagaaccatgagcaggaacaggaatctgtaacacaggacaaaagtattcacgaatcaactgctgctgccata

SEQ ID NO: 376817 - DNA, 133 bp, Zea mays subsp. mexicana
ttctcacctgggaccaccggtgcactgcgcacaccatcctcaaaaacttaaagatgattgtacaggtataaaagtgaatcacgaccctgaagagagcccttagccggacctataatatgtaacacagaacaaa

SEQ ID NO: 376818 - DNA, 162 bp, Zea mays subsp. mexicana
ctttcacgtcggaccatcggtgcacggcgcgcggcatgttcaaaccctttaagctgaatctaaacctgcaaaggtcgctcaggaccctgatgtgcattatgggcgtgaactgtaatatatccctcaggacaacattagtcacgaatcgactgctcctgcctt

SEQ ID NO: 376819 - DNA, 459 bp, Zea mays subsp. mexicana
ctttaacgttggaagccagcagaaatcccatgaggtccgtcaaatgttgggattaccatttgtgtgcatattgtggagtgggttaagttataatctacctgaatatagagtattttttatcaacatgattcatgagccccttactcgttaattaactaagtttgtgctccatgtgagcttagtacttcttgcggtcggtatatattcgagaacggaggtagtatttaatacaataatacaacacaacgacatcaaagccttttatgtttctttttttttccttctattttggagctacgtaccgtataaacaacatgctcacttatgataaagttggttgggacaccaaacattcaagattcagttcaatataggtgacccatgaccatgtggttgtgtaggttacaaactatgataccgacaccaatacaacatgcactctacttgcaaactactttt

SEQ ID NO: 376820 - DNA, 309 bp, Zea mays subsp. mexicana
gtttcacgttgggtctgcaggccaataagcactccaacgtaacagtctcagaggtgccgttacgctttaagaggtgcataaggagcctgcagacagaggtgagcaggaacaggtcaatctggaaccagctataaagagcgccgaagtgacagctgcacacataaagccaaatcccaagcttaggcatactcagcctgataatggtctgagcacgatcaagccatcgttggatgacaagatgtacatcccgtgaacagactctaacggacagaaagtagttctgaaagcagtgacatccccagatggaag

SEQ ID NO: 376821 - DNA, 148 bp, Zea mays subsp. mexicana
ctttcatgttggatctccggtccaatgcgcgcgccatgttcaaaaacttttagatgaccgtgaacctgtataggtgcatcaggacccttgaaagaattatgagcaagaacgtgtatctatgagacaacacaaaatttttcaagcatcg

SEQ ID NO: 376822 - DNA, 96 bp, Zea mays subsp. mexicana
gtttcacgtgggagccccaaggtgcggagaaggcgcaaatcagaaaggtcttgctgagggtgacctggctaaggggcatgaagcgtgtgaaatgaa

SEQ ID NO: 376823 - DNA, 135 bp, Zea mays subsp. mexicana
cttacgcgtccggttgaaatgtggaatggattatgaatcaagtttagttaagttgtacagtgctgttaactatttgtacttttgaacggctatttgtacttcgttggaacaataatacagtggtgatattggcgg

SEQ ID NO: 376824 - DNA, 298 bp, Zea mays subsp. mexicana
  unsure (1)..(298): unsure at all n locations
ctgccggtatccgggtcggaattccgaggttcgtgccacgccgccacgcttancggttctgtacgagggtgagttattgtcgaagataggtgggtggataaaaggttaacaaagccatagttggtcgaaggattctcctcataagagatggtccggatgcatacatcacgcgactgattacacttatgcgaattcatagatagatggtgaattaacctatttgtccgactagatagctaactgtatgggaaatgaaaggccagaaacatgacacccgagtaaactacatatcgctata

SEQ ID NO: 376825 - DNA, 434 bp, Zea mays subsp. mexicana
tgtgaatatagctctacatggacgcctgccagtagagaaagatgcgtgctttcgtgcctctgtgctgaattatttacccagacgtgataccgtcgaaggaataagcaggcgcccgttgatgccttcatcatgccatcgcaggagaataagcattagtatctttctctatacttgtggttgacatgcagatgctggctgttaaaagaataaattgagtatttgaaaaacggaagaagaaaaaatgatcgtactgtgccatgcagatccaagttgccaggatacagtgcagagtccctgaatatggatggacaacccaaaaggtcttccagttcctgaatttcgtggtcaatgggggtatactatacagttcaatccttgttgcagaaaagacatcacatatgctctccttcttgctcatctgtctgctgtttact

SEQ ID NO: 376826 - DNA, 511 bp, Zea mays subsp. mexicana
gcgctttcgacttcaccatccccatcgagatgcctcacttctcgctcggtcaggacacttcggcggcgtcctcgtctggcgccggggactacagcctcagtttttccatgtcctcgggtttcttgggtgccaatagggggacccttcagtccaattcgcagtcgaacttctcaggcgatcaacaccagcagctccagaggctggacggcccgctcttgtttggccacgcccacgccgcggcggcgatgcatcccgcatccgataaccagctgaccgcatcggcggcgttacagctctggtacgggctccggcactccggcatgaaggagaagggcaggagctgattgcacattcttcaatagaaaaccgaagacgacgtccaattgctgggggccgttccggcaagaattctcttgtggagctgctaccattttgttgcggtgacgacttgtcagatcgccgcacgcaaggctgctatggtcaccgtatcaaccatccatcagcgatagct

SEQ ID NO: 376827 - DNA, 293 bp, Zea mays subsp. mexicana
gtaaggagttcatctctccagatcaaattccttcagatggaaaaagttctgacgctgacttttctgcactcagaaatgctgtactctgtgataaaaaaataatcgacaataagataagatacgcactgaagtttcccaaccaaaagcatcttcctgtccgtctgacaaaaaatatcttggaagcagaaagtgatcaggatgaaattagaaaaatgtggttttctgaaaaccacgtgccattgtacatgttacgggaatttgagcagcatgctgaggctagctccttgcctact

SEQ ID NO: 376828 - DNA, 376 bp, Zea mays subsp. mexicana
gacccacgcgttactgtttggagttgcaaaacatgcactatgaaggagacggttgcaagattgcccgactctccttcgcatctgattgagcgagtgaggaagatagcgctcgtctcaacaattgtgatactcgggaccggtaataatatatggcggcctttgttacctgaccaaagaatcatatcatcagtagtgtctgatgacggacataaaccaccctgcctttgatacaactgggtacaacagcgagattatttcttagacatgcaaaggattcttgggttatattgcaacacatattgggcgagcgctaccctggtgtgatgctaataaccagttggcaattgggccggggtgtaggatataaaaaagcact

SEQ ID NO: 376829 - DNA, 285 bp, Zea mays subsp. mexicana
agacccacccgtatcacattgacctactcgaacgagggcgctctgaccgagggcccatggctcgaccttgatggatactactggaagcgctggcccgcacatggtctcataaacgatacccaatttgataaaatgtccaagcgatgctatgacacaggacatttgtcagacacagctaagcatgtatgaaggcttaacggtcatgaggcaagaaaagtaatgatgaaacacgataatagaatacctcatactcatactggagaacttcacctcacttatattgga

SEQ ID NO: 376830 - DNA, 422 bp, Zea mays subsp. mexicana
cacccgatcgttttatgtgagataaaacactaaagcggctgttggggtggtcaggatagtactactgggacaccttcgggtgccggtggtacaccctgcacctgaagccgcgaccatccctcccgcaagacggcttccgtctagagcactgacacaaaggttgcctatctcaacaggggcaacttcaactgcctctggtggtgaactggcaagatccttcatattggggtagactgaatggcactcacagaaggttattgctagattgacaaaggacttgatggttctctcactgtatctagacaagacagttcagcagaataaagagtctctagacttcatgaaaacaaaggagtcgaccactatctctcatggacagagggtgcctgaacttagtataaagctgtatgcagagcgtattt

SEQ ID NO: 376831 - DNA, 401 bp, Zea mays subsp. mexicana
acgacattgagctccgcgaacgcgggccatctgacctagggaccatggctctaccttgatggatactacgggaaaggctggcccgcacatggactcaaacgcatgcaattgatagaacgctaagcgagctatgaacagcacatgtgttactacaaggcgtggcatgattgaaggactatatgtttaagacgcatgataggtattgaggacaacaagtataaaaatgcttcatacatcttctagtgatgctcacctaaatgatcctgaacatatgcgattgacattaattgtaatagcttgaaggaccatgggaaaagaaaaatatttgagtactgtgatgatgcatctgttacactcggtggttgagcggatttcacactcgttttctgtacatcatgggg

SEQ ID NO: 376832 - DNA, 70 bp, Zea mays subsp. mexicana
ttcgtttaatggaacacccctatatgcagcgggtgatggttcttgtggatttgcataacgggcgccttat

SEQ ID NO: 376833 - DNA, 397 bp, Zea mays subsp. mexicana
tcggcctcgtcgacgtcacctactaggcgctgcggagcctagtaggcaactgcccggcgcttgagctgatcagcctgaggcgctgctggatcttcggcaacctaagcgtgctcaagatggaccagatctttctgacgagggcggccttccacgactagaaacaactcttgatctacgcgtcggacagacgatctgcgaccccactgtagcgttgtgacgaaaggctgcccccgccgggccaactgaccgtgatgtctgtagcgtgagattatttagtgacgaccgaaggacttcagctgcaacgcagcttggaacggttgtgtgatccctcccagaaatagaggacaatgtaaaagagtgtagtcgtacacgtgtaggatcatgcttcaatgtaaat

SEQ ID NO: 376834 - DNA, 457 bp, Zea mays subsp. mexicana
gcacgagttccgcctcctccccgccggcctccacccctatggctgcgccgccggcgccggcgccgacgcgcctccgcccactaatgtgagctcccacggcggcgacgcggcggccgactgggtggtctgccgcattttcaggagggccaggccggcccaccgcgcccgccttggtggcgccagggaggaactagaagaggagcaggcggaggaggagagcccgtcgtccccgtcgtcctgcgtcaccgacgcctccgagaccctcgaccaggaagaggatgacggcgacgaagggagcagcagcagcagcgtcgtctcctctaactgagactgagtagaagagttggctagccccctgtcgatcagatcgcgggcgccatgttctaattgccgtagaagcctcatcatcagtacctagttgcaaatcaatagagagacaagaagatcgggctccaac

SEQ ID NO: 376835 - DNA, 497 bp, Zea mays subsp. mexicana
gtctcgcggaccaatcagctagagagctgagtgatgtctcgcaagcgatcaggtctttctttcaccctttcctctctcctgcattggattggaaaccggctgaggacgccgtagcgattagggagtgctagcattgtacgtgtaatggttggagagtgcttgacagcctcatgagatcggatcggaggccctcattccacgcactggtgacgaagagctcgcttggtgcccctagctagctagtggcgaagcaaggaagctagccagccaagatcctgcttgtgagaaaaaaaggagtagatccagtaatttcaagaatctggtcaacatacctacggcaagatggctgatattgtaatccgcgacctggagagggtagtcaaagtcgcacttgcgatcaagaaggccgtggaaacagctaagcagaacaaggaggattgcgttagatcggtgagcgtgcagctgaagtcagtactcatatgaagcggctgaaggag

SEQ ID NO: 376836 - DNA, 253 bp, Zea mays subsp. mexicana
ctttttttttggacttttggtgacacaatgttgtcccatcatgactgccaatgtaaagtctacatgactgagcatcaattcagtgtcacaatatattaattaggtcccggaacctggatcaaagtgtggtataggtgacactgaattgatgctcagttagcggacttttggtgacacaatgttgtcccatcatgactgccaatgtaaagtgtacatgactacatagctacattgttggttcagatttgcatgc

SEQ ID NO: 376837 - DNA, 279 bp, Zea mays subsp. mexicana
ctgttttctatcctactgactctaactatcctcgcggtggggtgctttgcaaagaacaccaggatcttctcagcagatcttctgttttttttggtaaggaagaagctgcctggaagatggaagaaattctgctctctccgccttgttcgaaactaacttttctatgccgactctttgttgcatatctggcatataccatagttcatatcccgcggatatgtccaggcttttatggtcatctagcgcttctgcattggatctagtgcccttaggcaggta

SEQ ID NO: 376838 - DNA, 488 bp, Zea mays subsp. mexicana
tttccctcgcgtccggcgaggtgttctggccgaggtacttttaccgcgtccataagctgaagcagcaggaggacgccagagcgaagctcgtgcagcgtgtgattgcgcaggaggaggacgaggacttgagctgggaggtcgatgacgacgaagaggaagaggaagagcagcagaaagacagcacggaggagctagcagaacagaggcaagagccgatcaaagaagaagtcagacaggatatggctgagaaagaaaatgtggagataattgtagaagaaagtggagttgagacggtggaagaggcgcctggtttggtgaaggaagagaagaatgccgcagagccgcagccaattgttctcggtagctctttggtggtagtggacaaggaggaggaacgggaaaatgctgatgagccacaaccagcggttctcggtagccctttggttgtggtgggtgagggtgagaatgcagagcccttcaagtcgaat

SEQ ID NO: 376839 - DNA, 299 bp, Zea mays subsp. mexicana
ctctcctcctgcctccctccccctttgcgagcgagggtgaggtgatcgagatggcctcagcctcacaccaatccgagcccctcgactccgctgccaccagagacaccgacgtcccctcagataacatcccagatttaccatgccccccctatcatatccgggcgcaaacctggtcaactcccagccgagaagcgcaggaccctcagctgcccacaagccgagacgaggatttgactgcgaaggaggggatctctgtcgcaatggagctctctgcattatgcagcttgcattccctgacg

SEQ ID NO: 376840 - DNA, 218 bp, Zea mays subsp. mexicana
ctcccgttggaccgacgctaggggggacttgttatgaaaatgcagcacattcaccgtcggctgaatcacccatgctcgatcttgtgtccagggagggggcagttgtataggcaataggcacgatcccttatgcaaggtctgaccgtgcagatgattggcttgcagacctgtatcttttaagttgggcatgcttttctcatgcgacatggaccaatgac

SEQ ID NO: 376841 - DNA, 198 bp, Zea mays subsp. mexicana
agaatgttttgactgacgtcaaggaaacagcccaggggagcattgacctcggaggggcgtacggagcccctccggccctggcttcaccaagcctggggcactaggattcatagaatcttatgagcttaggagaacatcggtcccaaggatgaagacgtacaaggattataagccctaatacgcgatgatgccagatac

SEQ ID NO: 376842 - DNA, 485 bp, Zea mays subsp. mexicana
aagaaatgttggtgtgctgaccgttcatcatgctggggtgggttaatatgccaaggccgtgtttgactagaggaccttgcaccattagctatggaaaagattgaagcacttggcattgagggtttgaggatacaatctggcatgtcagaagaagaggcaccctccaatatcagtgcaaagcctattggggaattttcatctctgcaaggaaagtgtgcagagaatacctggtcccttggtttagagggaactgcagggttgcagcttctggatgttaagcagagtggagaagaagttgatggattaatgggcttatccatcactctagatgagtggatgaggcttgattctggggtagtggacgaagaagagcagtacagtgaccggacatcaaagatacttgctgctcaccatgcaaaatccatggagttagttgctgagaatcggaatggggacagaaagaacaggagatctggtagaagatg

SEQ ID NO: 376843 - DNA, 344 bp, Zea mays subsp. mexicana
tttttgcgtccgcttaaactgcctgtgcaccggggggctcaatttgacgggtttccgtgtcatatcaaggactagtgcgctgacggctcgagctactggagtcgagagggattggaccgcaaccttgctgtcagctgccatctttgctatacacagcttaccttcataaacatacttccatatgccataaccatagcctgtcgttgttgctaataacacctacaagctcaaggtaaaaccccaagcgaacccacaggaaggcaaccagaacaagggcctctcaggaagcactcaagatgtggaggtatcagtgaacccagcaaaaagaaactccgcagcaccca

SEQ ID NO: 376844 - DNA, 570 bp, Zea mays subsp. mexicana
  unsure (1)..(570): unsure at all n locations
aattatggggagagggagaacccctacctgtggcaggcttaacggattttcttctttgctcagccctgctggtggagacctctatttatagctataatccagccatatttctaaggatagcaactaacagatctattcctatctctagtgcttatctccttaacatatttatccctatctctagtgcttatctccttaacagatttattcctatctctagtgctggattaattttataggtggattgtgatgaaatcgctatatggaaataaatttggtaaatctatgtatcagatggccctggttgatctttattaggcttgttattcatgttcttctattttcccaggattcatctgtccctagctcaattgggatggccagatatgcgaataccaatcttatacaccttatcatggccagatagaatctattgctaaggtcatgtggcaccggctagatatttgcagcatgacatcttcacaactcctaggctacttttacatgtatatnagtttcttgcattattttcctatggntattctcatccctcccatgtgttcttttcaa

SEQ ID NO: 376845 - DNA, 476 bp, Zea mays subsp. mexicana
ttatcagatcagggatgctggtgccattcagcagggggcaggggctgtcgacgacgacgacgatgacgacaacgccaccatccaagagtggcaggattaccagaaaggcggcgcggttcgggcccaagagcacggtgacatcactggcgccgccgtccacagtcggcggctccgctctcgcgctgcactacgcgaacgtcgtcatcatcatcgagaagctgctccggtacccgcacctcgtcggcgaggaggcgcgggacgacctgtaccagatgctgccgtcgagcctgaaggcggcgctgcggaggagcctgaagacgcacgcgaagagcgtggcgatctacgacgcgttcctggcgcacgactggcgggaggcgctggagaagacgctggcgtggctggctccgatggcgcacgacacggtccggtggcaggccgagaggaacttcgagcagcagcagatcgtgatgaagggg

SEQ ID NO: 376846 - DNA, 311 bp, Zea mays subsp. mexicana
ggctttgttgtgggtggggctgagtaggacgagctcgatatgcattaaaagtagttcaggggggatactcatgagcgtgcattggtcaacaagcattactgcacacagatgctggggccggtggtgatcacatgagcagaatctgctgactcctattatagctagtcaaaggactgagacgtgcatctttctgtaaagcactactgtgcggagggtcatctggtgtgcaagggtgttctctttgttgctaacagggtcctgtcagagctgtgtgactccactcatgaagcacaacaacatctagctctatg

SEQ ID NO: 376847 - DNA, 337 bp, Zea mays subsp. mexicana
acgcgcgcgtcttatctggtgtaacaaaacaaaggaccgttaagccataaatagcaggtggaggatcatagctgcctaacaagcgcgataagtggctgcatgcttgatgtggacaatgcacgagagcgctggagctgtatatgaagacatgttacagctactggagaaggctctggatgacaactgttatcatggcctacgagctagcattgagtcagtgagaaatgaactgaagtcaatgcaccaagatcataggcacattggagatcttaagcacactgtataagctgtcaaaggactaaaacacgtatgaacaacaatcctatatgctgaactc

SEQ ID NO: 376848 - DNA, 367 bp, Zea mays subsp. mexicana
gcgattggaccggaacggactaacggcccggcggtctggtgttgatcattgtgaggacatgcccactccaatccatctgcccatggtgcgagtgagcgcatcttcctcgagagatgctgtcaatctgacagagcagagcgagaatgatgaatgaccaacctgacagggcgatgcaacatataagatccaaagtttggcccaagatcctcaacgcaccatatgtgtgtgggatgaccacttggaccgctatagctgtgctagctcctgacatggagactcatagcacatgctggcagttgctgcctgtggaagccgtttcctgaatcatcaggtgtgcgagcatgaaactgatagtggatcaagctct

SEQ ID NO: 376849 - DNA, 362 bp, Zea mays subsp. mexicana
gcctttacggccccttttcttctcgaggtcggaggggatgcatccccagagccagagcagctgcctgcagcgcctgcaacacgaagagaagcggatagtgcgggtgctggtaatggcggaagcggtgatggcggaacttgcggatcactctaacgtccttcatacctatgcaggctgcgcgcactgacgctagctcgtgagcctggtgagagaaattaaaacgaccctgcgtgaggagatactaagcgctggggagtaccgtgcatcacagaagagtgaatacagtgcagggagcgctaatgagatatgttgcaagaaggtgcagtgtgtgctcgagaagatggctacaatgcaacacactc

SEQ ID NO: 376850 - DNA, 350 bp, Zea mays subsp. mexicana
tttttcccgtatattttcacaatcgaagctcatgggggaagtcgtttactcttgcggtggaacagtccaacttggtatggagcaggctatcgtatctgaacggctggtccagggaccaagggcatgtgagcttactggcagatctaccagaggtcgtttaaaggggggcagaagaggataagttttaggagacttgaccattgcagccatctggaaggagaatagagaattgcagaattgccggccaagactagtggtagcaacggcaagaggtggcgttagaataaaagaaggtctcacctaggggataacttcaccctgatgcaggctattgggtgataggctgattt

SEQ ID NO: 376851 - DNA, 83 bp, Zea mays subsp. mexicana
cattttatatctttgcgtcacctactcggagctgggggctttttaaaaccagcatacctgctggagcatgcatcttgcggttt

SEQ ID NO: 376852 - DNA, 111 bp, Zea mays subsp. mexicana
gggggccccggcccggaatcccgggggagacacacgcgcgcgctttttcggaggtagaccaacatagggataaagggggccatttaaaaacctttatgccattacaacacc

SEQ ID NO: 376853 - DNA, 226 bp, Zea mays subsp. mexicana
ctttttcgtagggtcaatagcatatggaagatggggctttttttaagtattgtggaataggacatcactgaattgatcgctgtacagacactgtggctttgaacctagttcatgagactggtatctctagttcacgttgataagacactgtatgaacccgctctaaactacaagtggaatacgggtcattgcatcctgaaaaagccagtataacttgatagctcac

SEQ ID NO: 376854 - DNA, 179 bp, Zea mays subsp. mexicana
cgtacggggagtgctatagggaagatggggatgatttaaaggattgtagaccaggacctcaccgtatgaatctgtttactgaagatgtggtctttgactcagtgtctcgtgacgggtgatgctagttaaagtttacaagactgcgtataaacccgatcacaacttcaatcggaaaacgg

SEQ ID NO: 376855 - DNA, 427 bp, Zea mays subsp. mexicana
atatgtttttgctaattttatggatctgcgcaaaacggtgcatacggaatctgtgcatggtatgatggtcccacagggtaagcaaggacaccgttcctctagcgagctccgttataggttggtgatcaagggaagatatgtttttaaaaactagggacaaatgatagaggagatacatcaatgattatgtaatggtgcaatgttatagaaacaggctcttgatagctaattttgctgcaatggaaaaatgatattgagtgatgccttaacctgcgaacagtgaggatcttcacgtgtttcgcaatgccaaggatgatctgattcgttgcgcaagctggatgccacctggtcaaagatattacatgggaggctgctctgttttgaccgtgtatgtgtcgccatcttattctcatgatcctactgcagc

SEQ ID NO: 376856 - DNA, 75 bp, Zea mays subsp. mexicana
cacacaggtagctcgatttgctaaaagggggcgattttaaggatcgtgcacgttgaagacacccaatgaatgttt

SEQ ID NO: 376857 - DNA, 114 bp, Zea mays subsp. mexicana
cgtaggtgccgtcccatttggtaaaagggggtgatttaaaggatcgtcaagatcgacgaccccgtatggatgtgttgagtttagttctggttatggacaagcgtcttgtgtctg

SEQ ID NO: 376858 - DNA, 356 bp, Zea mays subsp. mexicana
ttcatcacatgggagcagctgtatgtgtactggatatgcccctttattggggccatgcttgctggatggatatttagggcggtgttcctaccaccggcacctaagcccaagaccaagaaagcatgattactcgtttatggatgctggtttagaagaaataagaaaacagaggaaggtcacataagctcatgtgctgtacttgatttcctcaacttcccacaaactgggtgttgtgctctgttacttatttctcatcaataatttatgtgtacttgtaattttgggctaaaaaaaagaactgtagttataaaaccaatataattaaaaaaacttttgtaattaatatacattaattc

SEQ ID NO: 376859 - DNA, 347 bp, Zea mays subsp. mexicana
tctttgttggaggaggattcatacagttatggctaccaggtgattcaatatgggtcataggtgcagaaagctaagcatctgcaccgggacattgacaccaaccctgctaactttgactgcacactgagacctgacgatatgtgatcatgatcttgaaaggatgaccttagaaactgattttatgactgaatctgttggcacaagatccggtaaaggaccaacagttcagctgagaaaatttaaatatactggtagcatctaggagtgatctgccacatgtcttatgatgacagcagctgggccctcattgcaagctttctgtaagagactatggacatcacatgcgt

SEQ ID NO: 376860 - DNA, 372 bp, Zea mays subsp. mexicana
  unsure (1)..(372): unsure at all n locations
gttggttcaggcgagcaacctccggcgatgcgacgctgccggcgtcgaggtgccactgcggacgtcgctgtcacgggcgggcgcattcgcatgatccatcatcctgccagcaacgatccatcatccacctctcctaccgtttatgttcttgatttcttgtttttgtttctaagaaaataaaggagagcatcagtttgcattggcgtaatttttttctatagacgagggagtgcaagaacacaaatcactgtcaacactcaatgcatcaccacctcaaaaagtatttttaattttattaagttataagttttgtaacctagcatgtgatgatataataagaaattgaccacgtgcatttgcgcactgttnntt

SEQ ID NO: 376861 - DNA, 468 bp, Zea mays subsp. mexicana
ccctctcgtccggccggagcagtccaatgtccacgacgcacgctatgtgttcgacgggaggattgaccagagttcatcctcgttcttcatccgtgacaccgcaagtttttgcacgaccatgaggttatgttcttacttgggtgttttgtttctcggcgtcgcttataagaaattaatcatgtgtatatttatgtgtggttgtgtggagcgaatccctgatgttgggtgaaagcaagcgagatccgggtggggcttgacaggtgtccgatagaaagactgaacccaaagccatcgtcgtgtttgtggacaccgctttgagtttagtcgtggtacgctagatgattatgcgagctgaatgacatggatcacagcgaaccatgagatggtattggaggattaaatttgtagatgcatcatgccagcgccagaatggaagatacttaccatgtggtcgacaattaacaacac

SEQ ID NO: 376862 - DNA, 571 bp, Zea mays subsp. mexicana
  unsure (1)..(571): unsure at all n locations
ggattctcgctttgttttaaatttggagactacctgcataatatgccgctgaaccatattttgtcttgactttaatttctattttttctgcattatttattgtcgcatatgcatctgactgaatctaatttttagtaatttcacataactgtcatttggttgatggtattggaggttatgggtaatcatgttggtgttacagttggtggtgcgaatgggcattattgtttcctttgttagcagatgtagagttcctctgattttaattgctagattttacatttatttttagaattttagaaatttgtatggctaactaacacctatgtagcaagtgttacagggatgttagtaacccattttttgttgccgctagcttgtagtattttttatactccaaaagttctttntacctctaccctgttagttgctggtattttatctgtcaaagcttagctcgagtttcaatcgtatgtagtcctgaatttgcaaccaattacaaacccatgcanaaaagatgttcaccggacactacttatttatttcataatctgtctttctagtgcatact

SEQ ID NO: 376863 - DNA, 526 bp, Zea mays subsp. mexicana
cgtgcgctccgcaggccgggcctcgccagagatcatcgccgaggaagacgagaaatcgtgcaagagcaacgccgcactggaagccgacatcgagcagatcaaggccaccgtgctgtctctccacaccgacctcacaaagctaagagaatccaccttgtccatggcagacgcacattcccagatactagccgagatccacgcaaagctcgacggcgtcacgccgcggcgacagacgaacttcgaaccaaggtctgagctgctgctgaagaaggccaccagaggaggcagcagcaacagttcttcgtcttccaaggagcagagctaccaataccagtggcaggctgacgtgctgatgaaccatttcattgaggtgcctcttgattttgggcttggccgtcgcgattagaaaagttttgatcaactcctaacgtgtaagcaatgccatggtcagttctgtcagtgcaaaatttggttttgctggttttattagctcttatttaatcaggcattgtaataataatatata

SEQ ID NO: 376864 - DNA, 544 bp, Zea mays subsp. mexicana
tggtggcttcatacgtgctcctgcctggcgtcgccgctgtcttccagaggcggcgagcctgaaaaggcgaggcctttgctcgcggagaggtaccgggacggtgtcgtcaagagatatatttcggatggcagttctaagctgcaacttcgtttggagaaacatgaatctccagtgaacggtgtggaagatgagaatgcagattctttgatcccacaggctattttggactttgtgcttccagctgggtttccagggtctgtttcagcggactacctggactacatgctgttgcagttcccaacaaatgtgacaggttggatctggcatgtattggtaacatctagtcttttgaaggctgtaggtgtagggtcctatacaggaacttctgcagctgcatctgctgctgctatcagaacttagctgttacgatgatgtatgggacgcagtcttaggtggacgctttggagcacttttcgatgatgacccatagaagaggaggatgtatgcacatttcattggaagtgctggaagcatatttgagctt

SEQ ID NO: 376865 - DNA, 456 bp, Zea mays subsp. mexicana
ggtaactcccctgaaatgttcgatgggtttcaagcttacttgtctacttgcgcctcatccaaagtacgtgaagtaggtgaacaattacctgacaaaattcagctggcagaagtcccacggcattcctcatggccactgcaatttaatgaagtaaatccaactgaagataatattgctctttttttctttgctaaagatgttgaaagttatgaaagggcatatggtaaactcttggataacatgcttcttggtgatttgtctcttaaagcaaatattggtggcactgaacttctcattttcccatccaataaattgccagagaggattcaacgtaagtttatctttgctaatgttgctgtctcgtggcaggatttggttcgtgcctccttttaatggattctttatgacattttacaggttggaatggtttacctttcttttggggcattttttatg

SEQ ID NO: 376866 - DNA, 492 bp, Zea mays subsp. mexicana
  unsure (1)..(492): unsure at all n locations
ggaaatgtctaccttgttcctaccacttctaactccaggcagttatctgacatgaatgagcacatgggaagacgaacagtcggcggcctcctcttcaccaagggaggatcaattcttctcttcagagaggacggttcgcgcccgagggccaagaacttttgttcgcgccatggctgcagtggtcatccttctgttggcaaagccaaaggtaaggaggcgcacaggacagcggtgcccaatgaatcaacaccggctaccctacggagaccaaagatttgtaggaatcccgacagaatgccaccacatggaagcagtgctccaggcagcatcagcaaggatgcaggaggctcttgtagcgaaaccggcaacaggtcaagagacactcccggtcccgggcgtcatctactggctcggctcaaggagagggtcaacacatcaaggaaacgatcattgaacagggagaanccgccacagtcaccgagtgcattcact

SEQ ID NO: 376867 - DNA, 477 bp, Zea mays subsp. mexicana
ctgtttgaggtgtccaggtcttcgtcttgtcattcaccagcgacgagactcaccagatctgaccaatttacaagggtttgcattgatcagtatggtgactgaaaatgcagatgaagaacatgacactggtccagaaaataagttaagacacaattttcgattgggagatataacatgggttaagtacaatggctcttcatggtggccatcccaggtcattgatgaatcatgtgttggtagcaagcctaagaagaaagacaagtatgattgcctagttcggctctatggaacttgtcaatatttatatgtagacccttggaagtctaactcagaatttgaaatgatgctgaagcaagaaaacaagagcgcaatggaagcattccgtgaggtgcttgagaaggagctctctggcgttaacttgcgcagtgattatgaggatggttatgaagaggaagatgtcaactcaaaaggcggtga

SEQ ID NO: 376868 - DNA, 192 bp, Zea mays subsp. mexicana
tcgtttctaagataggctagggttctaccaggtaggggttatggctgcctgcaggtgccatctaaaccaggtggtggggcacgcgctcccaatgtccgatgatgagcaccccaagatctaccgcatgacggtttgttctgctaacgaggtccgagccatgagcaagatgaggagacactgtcggaagttgaa

SEQ ID NO: 376869 - DNA, 467 bp, Zea mays subsp. mexicana
cttcacgcgtccgctctgtcggcctcgtcaagttttaaaatgtcacatgctagcagctcctacgatggaggacacagatggccttgttatggaccagtgccgctcactcgctgtcccgagtgcgaacggttggagccgctcgtgaggcttagatcgaagaggtcagagaacagcaattttggccgagagtttgtcaagtgtgaaagcaagccatgccctgcgaaggctcttagaaagtgcagctttttcatgtggttggatgactacatcaatatgatcgaaggggcaaagttgatgggcgatctagagaagatgatggcatccaaatttgggacagatgtcactgcaaactcagatgtgttagctgaattgaagaaaatgaatgacaacatgtgcaaaattattgatctgaaactgaaacacaattatatgcttggaatcttttatgttggaatgattcttattgc

SEQ ID NO: 376870 - DNA, 431 bp, Zea mays subsp. mexicana
cttgagcgagtcgtcgcggtcgtacacgccgttgatctccgaccacgcgatgtcgtctccgaggcgcagctgcgtcgactccggcgggtcgccaccgaggtggtctcgcgaggcggccatggcaaggagacgctgaagagagagagaagcgcgcacgcgatggaggagttcggagttttgcacgcgccttgcctccgttttccagcgtgcgcaacgcatggttgactcgttggggtcgccacgtggattctttatatttacggttcctactacactatagcatagcatagaggcggagacgaaggaagatgtgtctcatggtctctatttgacaactataaaggtactccttctaaattgtagtatgtctcatgtgtctcatggtctctattcggaagatgtacatggcataatttaatgtcttttgttac

SEQ ID NO: 376871 - DNA, 349 bp, Zea mays subsp. mexicana
gttactttgacgaggaggatatcatactttgagcctggggagtcttatgagtagagcgggcatgggctgtgctacacctgcggtctgcagcgccaaacaggagccttctgtacacacagtccaataagctcgtatctgcagacggtgagccggaggatacgcgtatattccatctgtgcgttaatccatgcttgtgttatctcactctttttagaatgaatcggctgcacatgagagactgtcacaacgtcgaagctgaatttgattgaaagcaaccttgtatttggtaaaatcttccaagagattattacactggggatccccgagggtttggggtttgaccaaaatt

SEQ ID NO: 376872 - DNA, 295 bp, Zea mays subsp. mexicana
tcgttttataagaaacaaccccatatacgggcacggggtgatttatactgaaaaaatctatctctgtgctagagtggagcacgctgaagctagccataggagagcgctcataaaatgttgacaagacgtactctgtatatttaccacgaccattgcgcgttttgcaacctgtacaaggatcactagcaggccgagctcaccagggaccgtacctaactagatgggcgggaagcgagcttgctggcagtgaactgaaccacagacacggggcagcacgccctggaccgaacatatt

SEQ ID NO: 376873 - DNA, 522 bp, Zea mays subsp. mexicana
gtcaaacggagagagaagtcagtgaaaaactggatggttgagagtgacactgaggatgaagatgaggatcaattggatgtaaggctttcatcattattctctctttttatttttccaatcctagcaatatcttcagcattttgtatagattataggatacaattaaacagaactaaaagtatgcagtacgtcaggtagtgaagctggaatttctgttagatgtgaaagggcaaataactaagtatctagagacacttcagaatattcagcaagttctttgttgtgataaggcttttatggccaatctctctttttcgctctgtctcagttatatcaaattaatctgtaattattgtatagaaaaaaatggttaacaatttgaagtaggggatatctttagaattgcagctaaaatttctgttagacgagaaagggaaagtaactcagtatctagagcacagaaaactcagtaatgatataactttttcagcaaatttcctgcctgaattaggatcctgtttc

SEQ ID NO: 376874 - DNA, 422 bp, Zea mays subsp. mexicana
tcgttccggctgcacgcagcatctgaagacatccatctatatcttcgtgttggcggcagtggtcctgtccactgaggtctttctggctgcggtgttccttgtgatccatgtgagaaaaaaagacgacaatgctaacagcaccagcagatcaatagcaagagaggcacctggggaagaagaagaggaaaaagaagaacacgaacaagaagccaatgctggtgctggggtgccaaatgccatggggggcgagcaaagaggtccccaaggagccaaagctcgccgaaaagaaaaaagggcacatgccaagcgcaagcctctgatgctgcttggaatcctcgtggcgagcgtgacctaccaagccggactggctccgccggactgagcgtggcaattcaacgacggcacccacaccgttggcgacc

SEQ ID NO: 376875 - DNA, 202 bp, Zea mays subsp. mexicana
tcgtttcggactcgcttaaagctcctcatctggcgcattgaggtcacctgaggtatctgcccaccaacaaacaccctaaatccgtatgttctagactctctccgacgttactttcgaatatcacagagacaatggataaggcacttgcttgtgctcgtctgcactcatgtcaagggcacctttttcttttcacattatggac

SEQ ID NO: 376876 - DNA, 331 bp, Zea mays subsp. mexicana
tcgctagcggaccaccaggcccacccgccccgggggggttcttttaaatgcctacaccgtcaaacccgcagcctgagtctagccgggcgcgaatgaagggcaactggcacgaagagcaccgggcggccaaaggcagctgtcgattgcaagcccaagcacccagagtgccaccgtaccccaaagccagcagaacaggaggtctggcagtgtggagagaactggccctaagccaggcggactaaggggccttaactgcaacctggggaaaaaggaactagactgcgctctaaacgagatcacccttggcgacgatgaagacctaacacccaaa

SEQ ID NO: 376877 - DNA, 518 bp, Zea mays subsp. mexicana
tcgttcacgcgtccgcttttgtttaagatataattttgtatcatgacctcttatagattgtaggaggggagttttcaaacacgtactaaataatttgttttgctattgatcagaaattagaatctttttgttagttagttctttaagttgttttaaccaagtatgtcatatccactgtttctgatgtgtgtgtgtgtatttctggattctatatatatttctaagaaatacctgtgatcgtccctaactgagcaatttatcaataactgaaaaaacgtaaacaaattaagtcttaaattttaaaatagatttttttacaaatccaaatgctacgtctacgtgcaataaattggagcaatcaacatctaaattgataactacttattcttatttgtttccatccattcataatgtgttttatcatgagaataaaattttgggaaatcatgagaactactcagccctgtttcaggatccactctttgatgagatagccctatgaactagtaaagctagta

SEQ ID NO: 376878 - DNA, 198 bp, Zea mays subsp. mexicana
ccggacctgccgtcccggcccagcccacgcgtctggttactcggggtgtggggcacctcatgaccgggcgagggtcgctgctcagtacgattgtcactggcccaggggaggcgatcgtgctgatcacagactcagagcctgtgcagctgcaggatacgtctgtggtgataagggtgcatgctaatgaccatttccaac

SEQ ID NO: 376879 - DNA, 408 bp, Zea mays subsp. mexicana
cgtaccggaattgccggcccggcccaccccaccctttgttttaagtcctgcatcaccaggaggctctatgagatgttgttcatgctgctgcgaaatataatgatatgtacacaagggtatgttctactcctggtgtgaaagtgtccagatcacacaggtacctgtaacataccacgggagagatagttgggaaaaagatagatgccaaatctacacaagatccaaatgttgtgcacatggatttatatcaggactactggtgcggtgtaatgatgtaacacctaacggtgcacataaggatttatatcaactgccctgctcaggtgaatggagtcgcctatgagacacagcatgtgagtgataagactaattcggccctgactggtctgatggatgcagcctgaacat

SEQ ID NO: 376880 - DNA, 198 bp, Zea mays subsp. mexicana
gtaccggacctgcatggccggcccaagccacccgttcatttctgcgcctggtcagctgccgcaagggcggggggaactttatattaaggaggatcttgaacaccaacacgggggccgagctcatcttagggtgctgagagacggtgacaaacacaagtgtgagcggcaatacatgggtgatgactaggaccatttgaa

SEQ ID NO: 376881 - DNA, 295 bp, Zea mays subsp. mexicana
ctttaacctacgctacgactccgcaaatgcttaactcatttttcgggtggcgcacgcactatccatcatgaccgaacttttagtcttaaaaacttatgatcagactattaattttccaaatctaagttcactgtatgtccaaagtcctaaagactacgtctgtcgagaagactttccacaataacgcttagacaccacatcatagacaactactgtgccctcgccattatgaatcctgtactcatgctgctcttccgatggcaagctcaaccttcattgttccgtgcctttgttc

SEQ ID NO: 376882 - DNA, 311 bp, Zea mays subsp. mexicana
tctttcacctacgccacggcctcggatatgattaactcatttatcgggtggcgcacgctctctagatcgtgtccaaacttccagtctgaaacacttaagctcagactttcaactgcccaaaccccaggtgacggtttgtccgacggcctaaacactccttcttctgaatacacataccacaatcgcgcttagacaacacatcatcgcaactacggtgctcctgccatattgacccatgcactgatgttactcatccgtacgaatgctaagcgttcatacactcttgccattgttcatttaatacagactgt

SEQ ID NO: 376883 - DNA, 435 bp, Zea mays subsp. mexicana
tcttacgcgtgcgcctgtgtctaggctgggagcaaagcaaagagagagagaggaaagctagctagctagcatggagagtgccatccagaaagtcgcagccgctgtgtacgcgctgctgcttctccagctgatggtagctccgacgacggatacagcccgactcctgcatgcggatacctcccccgcgtttggactcgacatcatcgcgagggagtttggccatccacatggagccatgtactgtggtgaatcatgtgtactcataccatgcgatccgccactcttgggatgcctatgtgaaaacaaactctgcgagaaacaaactcgggacgccggttcgtttagggagacgaggccatatatctctgatctctggctcgaaaattgcgtggcataagttgctgatctcatgaagaaccagctcgtgctttgaac

SEQ ID NO: 376884 - DNA, 163 bp, Zea mays subsp. mexicana
cctatttctcctcgacgccggcctaggtgatgagcacacctttgggggggagcacccagtttatttggtgacatacatagtggtctcaaaaacctcagatgcgacttgcatgctccgaagcccaattggacgatgcttccaacggtgaaaggacaaatccttc

SEQ ID NO: 376885 - DNA, 479 bp, Zea mays subsp. mexicana
cttatttgtccggcaccgttgactgcgacctgggggggcagaggaagaagcagatgctctccgagatccaagccgccgttgaggaagctgaatagatgattcggaagatggacctggaagcaaggagcctacaggctagcatgaaggctgggttgcttgcaaagctgagggagtataaaaatgacctgaacaacttcaagagtgagttcatgaggatatctgcgcccaatgccaggcaggctacccgggaggagctactggagtctgctatggctgagactatcgctgagactactgaacagaggagaacattgatgataacaactgagagactgaatcaattcactgacagaattaaagatagcctgagaactatggtggtgacagaagagcttgttgactagattcttcaagacctgcaccaactgatgcaggcactactacatgctcatgcgactttggaccgcgttgatgataac

SEQ ID NO: 376886 - DNA, 160 bp, Zea mays subsp. mexicana
gtttattgtagccgaaggcatacaaaatgaataaatgatgaggtgaggagaggatgtattttatatcatgaccttactttgaggctgaaaaagtcaagagaagactttaatgtggcaaaatccaagataacggtctgtgcgaaggtgtaaatactaatgc

SEQ ID NO: 376887 - DNA, 202 bp, Zea mays subsp. mexicana
gtctaatctactataggacttaggatatgaagaaatgttttttagggtggcggatgatgattatagcgtgtctaaagttttagtctgaaaaagttatgagaagactttaaagttgtaaaatctaagataacggtaagtccgatgacctatacactacttctttttaatcgacttagctcaatagcgatgagacaagacatca

SEQ ID NO: 376888 - DNA, 322 bp, Zea mays subsp. mexicana
gtttaatctgcaaaaggacctaaggttcgaaggacagtattaaagggagtcgtacgatgtctacagaacgcctaaagtcctagacacaaaaacttaatagaagacttccaacatccaaaaaccaagttcacggctcgacctacgacgaaaagactaatgcagcataaagcatttatctgaacaatgattacacactacatgatggcgagctgctgtcgaacagcatatacaattatataacgatgaagattgacgacacgaatacggagagtagagtgattcatgacattgatcattgcatacatttagaggactataaaaa

SEQ ID NO: 376889 - DNA, 179 bp, Zea mays subsp. mexicana
ttttgacgtacataaaggcctaggattggatgaaacgtattaggaagtggaggatgattactatataatgtatgtagtggaagagacaaactctgatgagatgactgcaaagtgatacaaaaccagttgatgattaatccgaaggcctgaacacgactgctattgaatgcacgtagctc

SEQ ID NO: 376890 - DNA, 244 bp, Zea mays subsp. mexicana
gtttttcttaattgagggcttgggatatgaagggaggatgttattgatgggtgattttctttatagcgatacttaaggtttggagttaaaaagtgaagatctgacttttatgtaggaaaataaaagaggacaatgagttcaacgatgtagagactaaagctttttagaagaacttgctgataaaggaatagttaatacatgatgataattagggggcaccccccagtattagtaatgaactgat

SEQ ID NO: 376891 - DNA, 226 bp, Zea mays subsp. mexicana
aatcgaggacacgcgagatgatgaacggatgttttggatggcggatgcagtatattacgtgacttaactgtaggacataataagacaagataagacttgcttattttcaaaccaaagatgactgttagcgcaatgatgtacagactattgcttctaaagaggacttgttgaacaacgagtagatactaccacatgtttgatacggggtgccgaccaatatgaataa

SEQ ID NO: 376892 - DNA, 241 bp, Zea mays subsp. mexicana
gctgctggtgccgctccgttatcgccgcgacccacgcgtccgcttctttgatgttcacgaattggcagcattctcttcagcatatgctgaactagagtcggcatactctgtattgaatgggctcatcgggacataagaggatgacatttctgcttgagtcctacatgactctaacatcattgcaatggccgactgactacggctatgatattaaccgtgcagccaagagcttagattttac

SEQ ID NO: 376893 - DNA, 247 bp, Zea mays subsp. mexicana
gtttaattcaataaaggactcatgatttgaaggaatgatttagagggtagagcacgttgtttatagcgtgcctaaactttaagtttgaaaaagtcaagataagacttatagaatgtaaaaactaagttgactataagtacaatggcgtaaagactatttcatttataaagaaattgcacaagaacgatgagacaccacatgactagaagatacggtgccatcgccattaagaataatgaaatgatgt

SEQ ID NO: 376894 - DNA, 245 bp, Zea mays subsp. mexicana
gtctagtataatcaagggcttatggagtgatgggatgttttaaagggtatattactttttttatatcgtttcgaacgttttagtgttaaaaagtgaagagaagacttttatattgtaaaaaccaagttaacggtttgtccaacggcctagagactaatgcattctaatcgacgtagcccaaaaacgattagacacaacatgaacttaatatacgtgacgcgcgccattaaaaattatgtattgat

SEQ ID NO: 376895 - DNA, 215 bp, Zea mays subsp. mexicana
gtcttacctagtacaagacccagggggagatgggctgttttaaagggtatatttctgttttctatagcgtcactgaagtgtaagattgaaaaagtggtgatatgagttacagattgcaaaaacgaagacaacggcaggtccgatggcctgtacactactgctgatgaatcgatctagcccaataccgatgagatatcacatccatgtgagaacgt

SEQ ID NO: 376896 - DNA, 177 bp, Zea mays subsp. mexicana
gacgacgcccgaaatgaagaacggatgttttaaatggcataagtcttttattacgtcacttaaggtcaggtcagaataagtgaagaggagactgctatgatgtcaaaccaaacatgacaacaagttcaacgatgaacggactaatactgctaaatagaagtagcagaataacgcata

SEQ ID NO: 376897 - DNA, 231 bp, Zea mays subsp. mexicana
cggacagtgaaccggggcgaccgaccgcggccggttgataatcccagacgacgcccgagaggaagaggggatgttttgaaaggcagatgccgtttacaacagaacagcaggaggagaggagaaaaaacaggaagagacgagtaaaaggccacaaacaagaagacaacgagtgcaacgacgaagggacgacggctgctgaggagaacaagcagacacaaccaagaggcaaca

SEQ ID NO: 376898 - DNA, 223 bp, Zea mays subsp. mexicana
atggtcgaggccttggggtatgattaaatgatgtgttgggtggcggacgtattttatagcgtgactaaagtttaggtctgaaaaagttaagataagactgttaatttgcaaaatcaaatttgacagaaagtccaaagatgtaaagactatttctgtttaatcgactttgcagaacaacgattagacaacacatgatcgttaatacggtgagatgaccaatatg

SEQ ID NO: 376899 - DNA, 170 bp, Zea mays subsp. mexicana
gttttgtctgatagaaggcttgggagttgatgggcggatgtgttaggtggcatatgcggtttatagcaaaccgaaccgtttggggtaaaggagtgaagataagactggaacatgagcataacctagacaacggtaagtccaagggcctgaatactgcttcagcttaaatg

SEQ ID NO: 376900 - DNA, 69 bp, Zea mays subsp. mexicana
ttggtcatacccacaccaggcgctgagaagcggggggatgttgtgatcggtgacgcctgaacattttca

SEQ ID NO: 376901 - DNA, 194 bp, Zea mays subsp. mexicana
gtttaacctaataaaggacttgggaaatgatgaaatgatgtaaggggtggcagacgaagtttagagcgttacggaactttaagtctgaaaaacttaagaaaagacttatatattgtaaaacctaagttaactgaaagtccaaagacctaaagactatttctttttaatctgaatttgctcaagaacgattagat

SEQ ID NO: 376902 - DNA, 201 bp, Zea mays subsp. mexicana
gtctaacctagctgaaggcccatgggcctattgactgatgcacggggtagcacacgattactatagcgtttcggtactcgaagattcaaaaggttaagagacaacttgcacatcacaaaaacgaagttcacgacacgtccaatgccctgaccactactgctgttgagacgacttagcacaataacgatgagacaccacctg

SEQ ID NO: 376903 - DNA, 210 bp, Zea mays subsp. mexicana
gtgatcataatataggacgtaagatatgatgaacggatgtttgggatggcagacgtagtttatagcgttacataagtttaggtctttaaaagttattataagacttattagatgtaaaaacaaatatgataacaagtacaacgatgtaggtactattactgcttaaaagaagtagtagaacaacggtgagacacgacctcatggtaatta

SEQ ID NO: 376904 - DNA, 207 bp, Zea mays subsp. mexicana
gttgatcttacccgagggcattggatatgattgaaggatgtatgtgatggctgaagaagtttattgcgagacataaggtgaagtcagaaaaagataatattagactgtttgaaagcaaaaactaagttgataacgagagaaacgatgtagacactaatgctgctatggagaagtaactgcataacggagatgctaaacatcattgag

SEQ ID NO: 376905 - DNA, 231 bp, Zea mays subsp. mexicana
acagtagaggccacacggaatgaaaagcggatttattgggaggcgtttgctgattacagcgtatcgataagtggagagacaaacgccccagagaagacatggtagaggcaaaacacaagctgactacacgagaaagggtgtacacacgaacgctgtttaatataaattgctagtgcactcatagacgttacagacacggcaatactgcggatcgatcaataggcaacatga

SEQ ID NO: 376906 - DNA, 162 bp, Zea mays subsp. mexicana
gttattttgagtccaagacatggggaatgatgatatgatatgttgggtggcggatgatttttatagcgttacaaaactttaagggtgaaaaagttaagagaagacttcaagactgctaaaacctaagatgacggaaagtacaatggcgtatgcactaatgct

SEQ ID NO: 376907 - DNA, 65 bp, Zea mays subsp. mexicana
tgatcgcatgatagagggcacgcgaaccggagggatgttgtttagggtggcgaacgttgactata

SEQ ID NO: 376908 - DNA, 197 bp, Zea mays subsp. mexicana
ttggtctaatatggtaaagggctcgggaaatgatgaaatgttgttaggggtagcggacgaagattagagcattccataacgttaagtctgaaaaaattaataaaagactttcttgatgcaaaaactaagataacggcaagtccaaaggcctaaacactaattcattttaaaatgacttagcagaagaaggattagat

SEQ ID NO: 376909 - DNA, 237 bp, Zea mays subsp. mexicana
ttggtcttacctaggaaaaggcttatgagagggtggaatgttaaaaggggtagaagatgattattctatagttcctaaaatcgaagatagtaaaagttgctagtagagtttcatattacaaaaactaagtggattacaaggataaaggccagacgacgactgctgttgtgtctgacggagcacaataacgatgagataccacctgcagtgtattatagtgggagcgacatatataat

SEQ ID NO: 376910 - DNA, 181 bp, Zea mays subsp. mexicana
cggaactggctggaccgacccacgcgtttcgttacaaccgacaccacgcgctatgaagggcggatgtttgggaaggcagaagcagtttatatcgcgaccgacggacaggacagaatgagctaagaaaagactactagatagttaaacaaaatatgaaaacaagtactaagatggaggtact

SEQ ID NO: 376911 - DNA, 227 bp, Zea mays subsp. mexicana
gctagatgccctccaatgtgaaggacggttcatttggaaggaggaagctgtttcctgcgttgctaactgcaaggacgataatcatcgtgagaagacttgctatacatcacatcgaggatgacaatcagaagatggacgcggccactacctctgctaaggagactttgctcaacaactatgatacaataccactgcgcaagtacgatagctggagcagtattaataat

SEQ ID NO: 376912 - DNA, 182 bp, Zea mays subsp. mexicana
aaggatatagcaacaatggtttatgactagccatgtctgtaaggatggctgacgcttagaatccatgagcgattgttgtcactagctgcgacgtgactatatatctcatgtgggcgatcagccctccaaaccatggcaagaacatggccggctgtctaaaggactccaggcgaactggcgcc

SEQ ID NO: 376913 - DNA, 198 bp, Zea mays subsp. mexicana
gttatttatgatataaggcacgcgaaatgaataaatgatgttagggatggcggacatattttagagcgtaacaaacatttaggtcagtaaaagttaagataagactatctaaatgtaaaatccaaaatgataacaagatcaatggccgaagtactaatgatgctataaagaatttactgtacaggggaaagataatac

SEQ ID NO: 376914 - DNA, 199 bp, Zea mays subsp. mexicana
gttatttacgatagaagactcaggaaatgatgaacggatcttatggctgtcgcacgtattttatagcgccacacacgggtaggtcaaaaaaagttgagaaaagactgatttgttacaaaatccaacttgacggcatgatcaaacgccgaaacactaactcggctataaggaattggctgagcaaggcatagactataca

SEQ ID NO: 376915 - DNA, 227 bp, Zea mays subsp. mexicana
gctagatacactccactgtgcagttcggttcattcagcaggaggaagctgtttcctgcgttgctaattgctatgatgatgctgaacgtgaatagacttgctggacatcacaacgaggaagaggatcagaaggaggatgtggggactactactgctgaggcgactttgctacacaatgattaggcaataccacagcccaaatatgatagctggagcagtattagtaat

SEQ ID NO: 376916 - DNA, 215 bp, Zea mays subsp. mexicana
tggtttaacacgcaacaagcattgacaaattgtggggtttttttaaaggaaggtctcgtttgatacgactcaaagatgtgacgctgcttcaatgggcgtggacaaacagacaagccgcacaaaagaacagaaggaaccgtgcaacgatcaagacatgatatggctgatatggatgctactcaaacaggctgtgatcgtggcgaggatttttcccc

SEQ ID NO: 376917 - DNA, 314 bp, Zea mays subsp. mexicana
cgcgcgagtgccattcgttgatgggcgtggccaagagctaagaccctagcttttgttgaatctcacggtcgcgctctccttcctctccacactctgtctcagcaccgtcccgcactctcgctctcaacgccaccatcgccgctgacgaggcctcgtctccatcggtccctgttcttcccaccggcagtatgacagatggaccccatgtctccggcagagagaatggcgaggcaaagcataggtaggcactgaacggacccgacatagcccgatccagttaattggcgttgcgctcgttctccctgttcagatct

SEQ ID NO: 376918 - DNA, 430 bp, Zea mays subsp. mexicana
cggccttcactggctggacccacgcatgcgtttggttgctcgcagcagtaccgtgcgctcactgggggtgaactataaaacagatgcgtatgccaccaacatgatgggtgctgatgacccacccctggttcggtatatcacactctctgccatgtgccttcaggctatgatcactgctgaggtgcttgagcagatgatggatgttcaaaacaggcccaccggctactagggggagtgatccccgatatctgcacataatgccagtgaggttaccctgcaggaggtcctggcatgggctatggcttgattctctagttcagattactgcacggaggggaacatccgtgaagataactgatcgactgtatcatcacgatgacagctttaaagcgatgttacacactatagggcatgcagaagaacttgttga

SEQ ID NO: 376919 - DNA, 237 bp, Zea mays subsp. mexicana
cccacgcgtgccattcgttgttgggcgtggccaagagctaacaccgtggcttttgttgaatatcacgttcgttctctccctcctatgcacactgtgtctcaccaccgccccggactttctctcacaaccccaccattgttgctggccaagactagtcctcatgaggtcctggagcaaccgccgaatgtacaacacaagaactcgatctattctgcagagagaatgcccagcaacagc

SEQ ID NO: 376920 - DNA, 221 bp, Zea mays subsp. mexicana
tcggtttaacacagtaaacgacacctaaaatgaagggcttttctgaaggatagcgttcttttaatcgagcgttccaaaccgttaagtcttaaaaagctacgataagactgtcaagctccaaaaccctaatgaacggctcgtccaaagatcaaaccacgatctcactgtagacgacttaacacatgcacccaaagactccgccagatatgtaagtacggtac

SEQ ID NO: 376921 - DNA, 175 bp, Zea mays subsp. mexicana
gtttatctctctatatggcacttttagtgaagggcggatctgttgaatatagatctaccaatcgaacgacccggatccttacgtcgcgatggacgaagttgtggcagatcttatgtaaaaacctactgtacaacaggtgctagctcgggacggcaaccggggttttattgaaatg

SEQ ID NO: 376922 - DNA, 525 bp, Zea mays subsp. mexicana
  unsure (1)..(525): unsure at all n locations
cccacgcgtccgcgtagattcaaatggttggagagcatcttctgcaccacgcatctgttggcctcccccaccagctgaatctgagagcaatgggtacttgcgtgtccggtgcaacggcggcttgacccaacaacgcagtgcagtatgactaatataaaaaactgtctctaaagtagcatagttcaccatgcaagttttgtgtattcatggcaacatagctgagagatttaagattacttctgccttgattttgtagatatgtaatgctgttgtcgtagcacgaatcatgaatgctacactagtgctgccagagttagacacaaattcattttggcacgataggagtgggntttgtagatatatttgatgttccccacttcatcaacacattgaaatatgatgttcgaattgacatgagcattccaaaaatcactgcacaaggaaagaccaagaagctcaaagcatataagattttacctcctagagagtcacccggtacttggtacagaacaactgcttggagag

SEQ ID NO: 376923 - DNA, 419 bp, Zea mays subsp. mexicana
tcccggagctcgacgccacgcgatccggttattactggaactttcttggtacagcgggcagagccataattacgggaccgaatgacatcagatgagctggctgggggtgactccgcccacaggaggaacatcatgtgctatggggcaccaatctacttaggttatgggtatgcctacccgatgccacaccctgacatgtacactgctgcgtatggcacgtacccgctatatggcatccagcagctagtgagctagagagctgccctacgacgtgaccgctgtgaccggaaacaatggttttgggccagggagcatagtacttgtctggtgagaaagagcctttatatggctggcctaagaagttagcgagatctgttgatgcatcattatccgtatggcgactgacactgatgcgtgtg

SEQ ID NO: 376924 - DNA, 454 bp, Zea mays subsp. mexicana
cccatctctcccaaacccggtggttccaaccaccgtaccagctatttctgcagtcccagttaccctgccaccaatgccctcgattcccactaccttgccatccattccaactacgattccaacaacaatccctaccattcccggactccaggtgcctccattcaccgccccatccccacaaaccaccaacccttgaagttcgatgtagcaggagacttttctttacatgctgttagtcaggagtttggttcatcgtatatggtcgttttcagtgtgcgtgccatgtttgttctgctactttggtgatactggctagcatgtggtgtgcttgtgcttgcagccagtctattgtaccactttgttttgctgttattgaagtattacttggtctttttccctacaatataccaagagacacttcccttaggtgctggatagacatggtcgcaagtat

SEQ ID NO: 376925 - DNA, 274 bp, Zea mays subsp. mexicana
gtgaattttttaaagaatgacaggtggagccctccgatatatacctgttcggaggcaaagttcatggagagcatgagaggtttggtgagaggattatgatgtgtacctaattagtagtaacagtagtagtagacactacatcgaggttactttttgtgcactgattgacatgaatgggtgtaaacaaattattactgtatctcatatttaagtattatttacctggctgaacaccacacgacaatgttcagcctcagacttcaagtcatgagat

SEQ ID NO: 376926 - DNA, 512 bp, Zea mays subsp. mexicana
cttatataccaacctttcagctctttgaacactttaacaaaaacaaactcaccactctaaatccaaaatgaagtcaaccaactcctcaactagtttattgctttgcttatttattgtactgttcgcagtacttgtcaactcagcaaacgttggaatccctattccacttcctccttgtgacagctctaaccactcaaatgcttgtgtctgggacagcgtcaacaagaactctgacaccgttcgacttgttctcattgacgtcgttggttcagttcttgacaaaaacttattagaccttgttgccaaagttcaactcttaggcatcaacgttctcgccaaaatcaaagtccgccaagcccaaagatctttaattgatgttaaagccgacattgaccttgctctgaagttataccacattgacggtgttttctatgacgagggtgccttagtgtgctctccttattttgacgacctctacgcacacgttaaattgaagttaggaggtttagtca

SEQ ID NO: 376927 - DNA, 330 bp, Zea mays subsp. mexicana
accgacccacgcgatcgtttattttctcctttgctgccaacgaatgctatgaccaactggagagtgctaagaatgtggcatggatgggcagatgcttgtgtgtatacatcagccacaacatttcgcatggtgtactgaacgggagcaagctacacaatgcctcgaatgtgtatcatttgctcacaaccaacgtcagattgcagaacaagacagtcatgcatgctgagaattgcaccatgtatttggctataattcggccaataggatccattctgggtattgtactccagcatggtgagctgtactacagatgcgtcagcagctcgttga

SEQ ID NO: 376928 - DNA, 383 bp, Zea mays subsp. mexicana
cggccggaatgccgggacgaccccgcgtccgcttctgtagacatcccgcggctgacgcctgagtgcctcgaccatagcgtcctcgaatcgggctcatgcatcggacatatggagcacgatgaggaggcgaccgctcgtagcaaagatactaggagtgtgatgtgtgtactgagcgcagaaggtgaaccatagtctggacctggagcatgtgagcaacagacccgagagtgataaggcagaacactttactgtttttaaccatacatctttgaaaactaaattgatacactactgaaagatgctagacacgtcgtgggaaactagcgctacatgacgtctaacaaaagaatgcatgcatgggagtacttcaagaagatatatga

SEQ ID NO: 376929 - DNA, 371 bp, Zea mays subsp. mexicana
gtttgttaaggaaagcgggaagggaggcgagagagggagacagggaaagctctctttctactccttctcctgtggaattcagtcatttgtccctgcagtgctcgcacgggttgccacgtgattcgagagcggaaagaggacgagcatgacacggacggcgaaggaccagaggaacccgatgtgggaggtcgcgctgggtaccagaaacagaagcgtcttagacagaacactcacaaagaacaaacatcaactgccggactccgactacagcgtcctaaaaccggctcaaaacaaggaagaactacgaagactgactggccatatcgagaactatactatcgactacaccctaccagtggtggtacggtatt

SEQ ID NO: 376930 - DNA, 268 bp, Zea mays subsp. mexicana
  unsure (1)..(268): unsure at all n locations
ggtttttccaacataagggaaccgtggttccaaacagttgatgcagactatcacggaccgcgcgactgacggaggcgatggaagcgccgagaccttggagagagctatagttctacagcaggatcggaggactgaggtactcattgatagcgtcctccgttctggcggaggcgacgaaagccttangaattaacgacagacgcatgtgttggatttagacatactgaggttaatgaacgtggcagaggaacattagcacgcttagtgg

SEQ ID NO: 376931 - DNA, 401 bp, Zea mays subsp. mexicana
ctcttttaggcggcgggggcggggagccagaggtgactgtgaaatctatcttcatataccctattaagacctgcaggggggttgccgtggcacaggcgcccattgcctgcactgagctaagagtagatctggtagcaatgagggcgaacgccaaacgatgatcgtacacgcagagggtggaaccaaagcttgctctggataggccggatctctctcgtatgtctaaccttacaactggtggttaatgctcgactaccacttggatatgagagaaccagcattggacacactggctagactgtcttataacagaacaatacattcatgaggatatctcagcatgtgatatgcgagagtaaacttatgaggaaaatgcattagcggctcttaaacttggcact

SEQ ID NO: 376932 - DNA, 222 bp, Zea mays subsp. mexicana
attgatgcacgcgttgggaatgatccatggacaagggaatgacgggggcttggtgaagtatccatggctgcaggaaaagattcacatggctgcattaaatatctggaccgatctgcggtgcaaggtccgtgcataactggtgagaacgtacgcacatgagattggaagcgtctaacttttttattgaactaggcttctaactgatactgataacattattta

SEQ ID NO: 376933 - DNA, 303 bp, Zea mays subsp. mexicana
gcatgaagcgggagacgagtgcctgattggtccatgtcaaccacaagtcccactctctgagcgtgagcccgaagcgggacacctaagagcacggcactatcttggatagggtgattatgaagactatcgtgtaccgctaaggcttgtcactgcctgtaaatgcagccagtgtgcaacggaccgaagatttgttcagggagaacacttgacgggtgtgcatgcatacgatgacacaaaactgattgagactgactggagcatgatgcgtaatcaggctgctgcaaacatgaagagacatgcata

SEQ ID NO: 376934 - DNA, 217 bp, Zea mays subsp. mexicana
ctcgtttttttatgcatgaaacggttggcgaatgccagattggtacgtgacaacaacaagacccattcgctcagcgggagtcccaaacgggacgcgaagagcacggcactatgtttagatggtaggattctcaatattgtcgtgtaccgatcaggtgtatcatatcctgagacagccgccagtgttcaaagaaccgcagattcatacaaggctaaca

SEQ ID NO: 376935 - DNA, 545 bp, Zea mays subsp. mexicana
gcggttcttcttcccaaaaggaagaatgacctcatggccggcgagaattcttgccgtgggcctcgtggtccaacgtcttacgaacttcagactacccaagaaactcttgtcaaaggaggagctgtgatgtcagctccgttccaaattaaatcaattaccatacaaacctcgagcacctcgtcaccctcttggccccgatgacctggtcagttaacaacgtcccccttatccggtgcccgttatgctctctcccgacggagaagcacggcggcgtagagcggaagagcgtctaattttggctcatcctgaacaaaacatgtttgcggttgctgcgtcaacgcagcccaacaccaccccgaaacctatgccgtatcccaccatacttccctaaaacctcatataagccagcagtctgcgagacccatccgagtacgtacgtactcgtctcggctgccggttcagtactgaaccggcaggtcacccgtgcagacgtcgaacgttgacgatgccgcgtggccgtcgccatcaaatcaaatacccataca

SEQ ID NO: 376936 - DNA, 485 bp, Zea mays subsp. mexicana
ttggaaatggttgttttgatgaaacagagattggatgtgcatttcatcgccatgtgagctacgtcataacaaatgaagaagtcaagatgttgatgaagaagaactacaaatttaaatgggaaatgcctgctgtgggcattccaaggtccaaatgggttggaacaggtgaaaaagtgcaggaagcatgtgatgatcatcttcatgatgtcaaaggaaagttgagagaccattggcaacatacactgtccgatcatttaaattctcgaatgagcttttactctctttgtaacagttatcgtgacataatgcattgcaataagaagccattttatctgaaaagtaacggtcctgattctagtaccatggacgcatatcttatgcatgctttgaatcatgtgcataggacgcgagatgttgtaattagaaatgacgcaaagcttaagaatgacactgacagagatatacggatgataagacataccttg

SEQ ID NO: 376937 - DNA, 506 bp, Zea mays subsp. mexicana
  unsure (1)..(506): unsure at all n locations
cttggtgatagatgcaagtttgcacatggcgttgaagaccttcgacaaaaaccaatagatacccgatcaagaaatagcgggaattcacattcaaatcgatctcatggtaattatggaaatcagaatacctcaatgatacctgctccgcactccggctataatcaatatttcagtaatcagccttaccctgctccaactttctcctatcctatgccatcaatacctatgtcgcagggtttccagactccaccaatgatgggaggttatttcatgcaagggccaggacagaattatcctggatatcagaatcaataatgtacaagtgatagtttctaaaaagttttttacaaacatgattagaatgatactttggagttgtctttggttttaaatatactgattactatggtgcatatattggttttatcattatcaacttgtccttcaaacaaactacaaaaattcattaaaaagtaaaagtattttgattcaacttttatanatag

SEQ ID NO: 376938 - DNA, 516 bp, Zea mays subsp. mexicana
agcgcctcatcttcgccggcaagcagctggaggatggccgcaccctggcggattacaacatccagaaggagagcactctccacctggtgctccgcctcaggggtggcatgcagatttttgtgaagacattgactggcaagaccatcaccttggaggtggagagctctgacaccattgacaatgtgaaggccaagatccaggacaaggagggcattcccccagaccagcagcgtctgatctttgcgggcaagcagctggaggatggccgcactctcgcggactacaacatccagaaggagagcacccttcaccttgttctccgcctcaggggtggtatgcagatctttgtaaagaccctgactggaaaaaccataaccctggaggttgagagctcggacaccatcgacaatgtgaaggcgaagatccaggacaaggagggcatccccccggaccagcagcgtctgatcttcgccggcaaacagctggaggatgggcgcaccctagcagactacaaca

SEQ ID NO: 376939 - DNA, 519 bp, Zea mays subsp. mexicana
ttacgttctagcggcggcaattcagtgaaccgggttaggttcttaattcagtgtggatttctcttcccattgttgtaagttgcaattgttcagcgagcaatgttcttgtgcagttttcagcggtccactgaccaagctatttacccttccttccattgacaaccagagaaaatgagcatcctgtgtgatccacagtccatcatcaaaatccgacacaaaccattggtctgctcccttgattacgtaaacaacgtggacttggaatattgatttggagttaaacaagtgataggccttagtggctgcggcttaaatccatcggcatcggctcacattattttgtctctatggattgcagctgcattagtccgaacggctttaatccagccatgtctcttcggtgacactagctgaaaagattgcattgctcggctattattggcaactgcaagcttaattcccaaccatggcctgctgatagtaggtgacaaggttgtttggacggcgacgttcacatgc

SEQ ID NO: 376940 - DNA, 216 bp, Zea mays subsp. mexicana
aaaagtgaatccaccaaaaagtaccatgccatgagatgagcaaggatcaaatgtgcaaagtgggcacagtggtgctgttactgatgtataagtcggaggggccagcaaggagaaagtcattgagattatctttatgaacaagtgcacgcacagccacacaggggaaataagttcaaatgaaccaaaaggatccttttataacggccactttgcaag

SEQ ID NO: 376941 - DNA, 454 bp, Zea mays subsp. mexicana
cgcatttccggatgctgattgagaccttgctacagaaagacgatgcacgcgtgtggaatgtcttcactcgtgtcgctggccttccagagctcgaggtattgagggatggcattgtgatgttcatcaagcagcatgtgatcgccgaggactcagggaaggacttggttagcaaattcaagattgcgaagaaggcgctcgacaatactgccggagttctgatgtaactctgtccttgtcgaacattctgggcatcttcaagcgaaacaaagttattagaacattctgctggagtcctctgttcttgttttgcgtggtccttcagaggataaaccaaccaattctgtagagaacggttgtggtagattgatgccttgttattagaatgcttctccaagagacctttcatgggttttgaatgcctacccaaaaaaaaggctttgatgcacatgaagat

SEQ ID NO: 376942 - DNA, 513 bp, Zea mays subsp. mexicana
cgagaacaggaatgcaaataagggtgatgtcgagccaaagaataatgcgaaaaacgtccccagcaccaacaacccgtctgctgaacgtctgccgaacaaagagagctccaacaacagcgcggtcccaaggcaagatcaaacatcagacggcgattcaggatacagcagggacactcggtctcctaagcgcgacaccaccgtcagcgcaccatcagatgggagcccatcgagtgacaccctcaacagcaaggcgtccggctggagctcgtcacggttccacgactgcacggacagacagcttgatgacacaccggcgccatgcagcatcgcggacatagagagtgtcctgcaggcgctgcaacgcgccaggatatccctgagcgccaagctgagcaagccagtcccccccagccaggtgacgctggcgctcccggcgccctgagacgagcacagagagtacgacgacgacgacctgccgaccgacgacggctcgtacggtgatgaaaagctgag

SEQ ID NO: 376943 - DNA, 396 bp, Zea mays subsp. mexicana
cgcatttcttgctgctgactgagacctcgctccagaaaggcgatgctttcgtgtgattggtgtttactcgtgtcactggccttccagagctcgaggtattgacggatggtatagggacgttcataaagcagcttgtgatcgcccaggacccatggatggacttgtgtagcaaatggaagattgcgaaaactgcgcttgacaatactgccggagtattgatgtagctatgaccgtgacgaacattatgggcatcttcaagccaaacaaatttatcagaacattgaggtggattcctctggccttgttttgcatgtccctgtaaaggatattccaaccaactcctgaatagaacggttgtggtagatagattccctgctataaaaatgccccttcaaa

SEQ ID NO: 376944 - DNA, 125 bp, Zea mays subsp. mexicana
aacccattaaataaatccagataacgagggcaccttttaacgtacaataacccctaggatagccctaacaacagcgaaataaactggaaaaagaaggagggaagcatgtacatgtaagatggaac

SEQ ID NO: 376945 - DNA, 439 bp, Zea mays subsp. mexicana
cagcatccgttggtgaaggcgaagtaggcaggctcgggttctaggggcgaccttgctggcccggtatggaccagaggaaggccatcttccgcgcgaagctccgcgagacgaaggagaagcaacagcggcgcatcgaccccgcgctcgtcaggtataacgaatttgaccagcccatatgcagagtatgcaatattacactgaagtctgaagcactttggcctgcacaccaagtgtcacggaagcatcatgaagcaaaagccgccgctgctgataaggctacaacacttacagggtctagaggcagcaatgcaaagctagagcaaccattggagcctcaggaacgaaaatcatccacactacctaccaagtttttgataatcagggagctaaagggaaaagtgatgatactatatctgagggaagtctgtgcgccatgaag

SEQ ID NO: 376946 - DNA, 404 bp, Zea mays subsp. mexicana
cccacgcgtccggtccatggcaatggcattgaggagggcagcaggaaggatttgaggagcagggggctgtgcctggtgccagtgtcgtgcacgtcgcacctcgccgacgacaacggcccctccgacttctgggcggtgtccgcggcgccgtccccgcctcctccgcctccgccattcgccggcatcatctggcgatagagtcgtccagaccggcgtcgatccacccataagtcgcatgcattattcatgcatgcatgacgtaaatatatacatatatatagtttcatgcatcactataccattggtttttttttaaaaaaaaatgtttggttgcttgccagggttgctagcttgctataagctttgtttaaccgatgagctgaagtatccatcgagcatggagc

SEQ ID NO: 376947 - DNA, 364 bp, Zea mays subsp. mexicana
cccctgttgttgattacgctgctatcaatgctccatgggatgctgtggaaaccattgcggccgtcaaaactgacagcagctggtgaggctagagctaatatagtctctcaaatccctgctgagcaccacaaaaagaactacactgccttaactgatgccatcacacgcactgctggggacatacagaatctaagggctcaagaagacagcaaggtgaaccaaaccattcttatgactacagcagatgctgcttatatgaaccacatgcgctacaagatcatcaactaggcccctcgcccaataaaggatagggactgagattacacgctggctctccttgaagcaggaggcgactgaccctatg

SEQ ID NO: 376948 - DNA, 288 bp, Zea mays subsp. mexicana
gacattcattaatcttaatcatcagatatattaccaggtgggtgttttctatgatcagtctgaggttattattgagccggaaagatcccgaacacccaaagtattcctttggtgcctaaagcactgaatatggaaaagaccatcatatttgggcatttatgaaggttgtggcccctgacaacaaattactactattgtgaaaatttcttctcttcctcaaggaatataaggtgcttacagggacacaggaaattgcttccgtttgtcaagcctattgacaaatattga

SEQ ID NO: 376949 - DNA, 566 bp, Zea mays subsp. mexicana
ccttgctcctttacagctaggaagggatgctacaaatgcttattggatccaaatgaccgagatggtcagttctatggttgtccaggagacagttagccaaattctatccggtctggttcacagctacgagggcaaagaagactcaaatccaaatgataacttggagaggcttgagatggcgcatatcaagctggaggcagctcttgaaacatgcagcaagtggcacgtcactgatttgtcattgctgcgcattgctgcgttggcgcaagaagctgaagcgagctgctaaagagtgtgatgacacgctatataaatacaagaagatgatcctcgaagatgagcagatggaacaggaggttaggaattcttactttccaagacgaatagcacatgctaccaaatcctttattttctctggctttggccgcaacagctttgagtccagcagatctgctgttagaagatttgagtggtttgcagacagtgctagtgagcttctgagattcatagagcttggtggcacaccttgctgtcacatgccattcaactctttttgccagcacctt

SEQ ID NO: 376950 - DNA, 603 bp, Zea mays subsp. mexicana
  unsure (1)..(603): unsure at all n locations
ctcggttcaagtcgaattgtgttcaaattggatatctggcaggtcagctggcaatcgaacatgtacttcaacttctactcaagtgtgttgctcgctctgagcttatctttgaacgttctcgctgatacaacgccgaatccggtcgatggtaaacaaacaagattaaccacaatcaattgtaattaattaactcgattccatttgttcgttcgacaagtgaaagcgatcgttttcgacgaggatcgctacgacaacttcgtgatgaatgtggtgatgccttttcaaaattcgttgttcgtctcgtccactcgagaaaacatgactgtcctggatgttctgcacacgtccaggaacggacgattccacacaatcatctatcacatcaacaaccgaatctttgcctaccagaacatcaatggactcaaactctgcatgttgcaatcattcgaccaagaaagtcacgaaatggaagaaaccaagaaaaacttctttcaaacattccgagaattcacgaaaaaagattntgaaggtgacaagcttgacgtgaatggattgagaggcactcgaatcctgagattcaaagcgaccaacattgacatggat

SEQ ID NO: 376951 - DNA, 482 bp, Zea mays subsp. mexicana
gttgtttgtgattgtcaagctcgggttggcctgggtcctgttctacctgaagccgctgctgcttgcgctcgtggggctgatcaagtcgctcgacaaggtcgttgccggtgtcttgatcctggtcaagagcctgctgtcgacggtgctgggggctgttgctgcgttgctgctcgaccttatcttttaaggggcgcgctccttcgagagagttggcgatgctggggtgagactcccaaggttaggaatgggagcggcaagtgttgttttcttttgaagaatgagtggaggagtagtaagtgatggcaagaggttgtgcatcggtctgtcgtttctgtcttgcgttgcttggagttgctgtgtgcaaggggatgtctgtgtgtcaatcatccggcaaagcagcgatgcttgtctactacctggtagcataatcggaatcctgtactctcattaactcaaaaaaagttttcctcataatatttaaa

SEQ ID NO: 376952 - DNA, 579 bp, Zea mays subsp. mexicana
aaaaagtcagattccgctgataaatgacatctttcagataaataaatgctaacccatgacatttttggctacagatagagcctatattacaagctactgcatacccaaaatgactctagcttcctcatcgactcttaatgatctttgtatgcacaatctttttattcaaaggaggctgctgtggattcaacacataaaccatgagttcttttagcagcatccattatctcacaattgcagactgtaatttgcacgatttagggggtaaaacttaacttgcaggctatggtatccatcttcgtttagctttgttcaatactctccacatgtgaacgaaagtagttctctcttggcaactgcagaaggttctcagctgagcatctgggacctaagaatgaataacaatgggggatgcgtacagcgcattactggatcagttggagacattatatactccacatgtagctcaccttcaggactgattgctagtggtggaactgatcgtgctgtcaccatctatgatcctcgcaggtggtctgctctgtcaagatgggtgggctgctccaagttgagattaca

SEQ ID NO: 376953 - DNA, 192 bp, Zea mays subsp. mexicana
gcgactattattccacctgatgctgcttagcccgcagggttcgcttgccacgacggaggccagatccaacccctgggcgtccgtcatccttgcatgtcccgacctccctcttaggaacacgagcaccgaaatgtgcccataatttccgacaaccctgcccctagcttactttaactccaccaccaggcgatg

SEQ ID NO: 376954 - DNA, 454 bp, Zea mays subsp. mexicana
ctgtttattagcagcctgactgtggagacctgatcagagggtggtgagtggtgacctacgggctacggctacgcacattaatctagcagtggtcagtggatgcaagccccagtcccagcctcgccgccaagaaacacaaagtcgtgcctgctgcttttggttctgggagctaagataacggagggaagtgacaaacaattaaattatatgtagcggctgctgcttcggcctgcaaattttgttgcgctaacggccatggacatgcatgggcaccatcccctgtgttcgataatcgtgcggaaggggaaaagaagaagaagctgtagataaaaaaaaggacaggcggctaattgttaatttccgcatggcttaagtctggcaacgacctgctggctcaatcaaaaacctgtgacggacagacggatggatcaactgatgatgatgttggtttggc

SEQ ID NO: 376955 - DNA, 497 bp, Zea mays subsp. mexicana
ctcttgcttctctctaccaattctggcggggtgttttattatgatatataagagtgtgcttgaactcctctagtctctcatatactctggctcgtaggactcctcatacaggcatgggcctttggtcgttatggtcaacattccaactttgactgcttgccaaccgatcgcctatttacagctgttagtcaaggcttgggtattcggcaaatttgactgtgcagcatcatacaacaatgaggaggaggtgggcctggctttgaagaaattatttgaagatggtgtggtaacgcgtgatgatttgtttatcacctcttaagctatgggctgctaatcatgcacctgaagatgtggcagagggaaccgacaccacacttcaagatttgcagcttgactacttggacttgtaccttatccatggaccaatccgcatcaaataaggaactagcacgatgactcctgaaaactttcttcctacagatatccctgctacatgg

SEQ ID NO: 376956 - DNA, 483 bp, Zea mays subsp. mexicana
ttcggtatggaggtggccatcgccgccgctgcggtcggcgccatgggcacggggaaccgcgtcctctacaagctcgcgctcgtgccgctccgggagtaccccttcttcctggcgcagttcgccacgttcggatatgtagttgtctatttctcgatcctgtatcttcgatatcaagcgggcattgtcaccgatgagatgctgtctctaccacagaaaccttttctagttgtaggactcttagaggcttttgcagcagcagcaggaatggcagctggagacttatcttgtctggcagcttcttctatctgctattttcttgaagaggcgctatagaattaatgagatagcaggatgctttctagtgaccgttggtgtcataataactgtagcaagtggatctggtactagtgcttcatttaaaagtactggaattttatggccactgctaatgataatatcgttctttctccaagctgctgacac

SEQ ID NO: 376957 - DNA, 367 bp, Zea mays subsp. mexicana
ttcttccaccaccaccaccacgcggactacggggagggcggacttatcagctggtgggggatgtcaatgtggaactagcagagcaatcttcccgcgaggaccgaccgcacaaatctcgtgccaaacagaaaaaaaatatcatagtacatgccgtaattttgtttgtgcagcgacgctgcaaatggctgtattggaggaagtgtatgcaagcatggcagtagtagcagtagggagtagaattgggtaattaatatcgctaaccccaaacgctggtggactggtgcgaacgaataagtgcatcgacccatccgggcaagaacggaccacagttcttacgcatatatgtatagctggctgtcgatctata

SEQ ID NO: 376958 - DNA, 208 bp, Zea mays subsp. mexicana
tgttttttcctcccaccatggcgcaactactgggggggttggcatcgcacgcgctgcgcgcaacgcatacggatctactggagctgtcctccctcgtgatgctatggcactattgaacttccatagacgtgaggattcctaacccgattacagaggatgtggagaagtaacagcttgccaaggatctcgtaaactattggtatgctgt

SEQ ID NO: 376959 - DNA, 124 bp, Zea mays subsp. mexicana
tttgtttatctgacgctcagacctacaaaaaggggggggtttaacacctaccgtggttctccaaccggccatatattagccgattctctttcccatcatgagcattacctaccttgcctccttt

SEQ ID NO: 376960 - DNA, 529 bp, Zea mays subsp. mexicana
tttctcttgttgaataatcaacaagttttcatttgaatgtaattaattttttgcttttgttgtgtgttttatttcggcgacaatgtttcgtcaaataaatcaaattattttggtttgtgctgtttttgctgctgctaattgctttccagatggtggaccagctgacacgtgtgttaaacctgaaagatttaatcaaccaaatcatggacaagcaagaactcaaccattaaatacgctaccatttgatgtaattgccaccactgatcaatatcaacctggacaacaaatccaagtgacaattcgtggtcgtgactatttccgtggattctttattcaagctcgtgatgctgaaacaaatgaatggattggatcatggcaagatagtcaacatacaaaaacaattccagaatgtgcttcaattactcatgcagataacagagataaggaaggagcaaatcttatttggaatgcaccacaacataaaagtggtcgagtttatttcacccgatccgttgttaaaaattattca

SEQ ID NO: 376961 - DNA, 66 bp, Zea mays subsp. mexicana
tcggtttctgcatatgtcaccacaagaaataaaggaggggcgtatttaaaactcactgggggttac

SEQ ID NO: 376962 - DNA, 266 bp, Zea mays subsp. mexicana
ttttattctagggccatgagcaaaaaaacagggggggcttatttcataataggagggatgtgcagaacaggatctaatccagttttctttccacaagcaaaaatctcaccttagtacatcggggaaaccttagcaggcccaattgcttatgatgaatcgaaagctgtaacagcctacgacaagtcattgaacacaacctttgacaataacactgatgtgcatcaatagcgctaaactaaatagacttatttggatgcttagctatt

SEQ ID NO: 376963 - DNA, 140 bp, Zea mays subsp. mexicana
gtctattcttctgccattgccgcaactccaagcggggggggcatcttataagctgcacggggggcaaaaaaaccacctgcataagtcctccataaggaagaaatatcacaaccccacctccactaaacatgaagttccct

SEQ ID NO: 376964 - DNA, 106 bp, Zea mays subsp. mexicana
tgctctatccttcctctaataccgccaaaagaggcggggttcatttaaaatgaggtgcggtttcagaaaactcacccactacaccaatcctccaacaagacgaatt

SEQ ID NO: 376965 - DNA, 331 bp, Zea mays subsp. mexicana
tctgtttttccttctcttaaaaccacacttaggggaggggttgacatgacttgaggtacgcaaagacacaactcccataatgaacaagttcttcaacaggacgaactccacatgtttgatgttcgtgagtaatatactgtgaatccttacataccggttctcactgtgatgatcgatcctgcaccagactgttttaataacccatggaatgaggattcctgatgttatattattgcatattcttttgtgcataatcgagatgcttttatgccttacatcgggaatggcccacagaccaatatgaaaaatcaggcgtctatgtgatctcccc

SEQ ID NO: 376966 - DNA, 107 bp, Zea mays subsp. mexicana
tcgctctaaccttctgccattccaaaagaacgagaagggttccttttgatccgcggtggggccaccaacaccgcacttagcgtcgatctttcccaataggagcaaat

SEQ ID NO: 376967 - DNA, 552 bp, Zea mays subsp. mexicana
  unsure (1)..(552): unsure at all n locations
caattttgtttagttacaatgactatagcatgacctttaatatcatgccctcaagcactcagttttttaacatatggatatgtgtggacacaatagcaattagttttattgtctatcccaattaaagaatggccacaatgtagcatttgattgacatacacctctaatgtatcgtacataagtaagattacgtgaatacaacagcagtttgtttcattatctgaatttatttattaagaatgaccataaaaaagggtgtttcgttacctatatatatgaacacatacttcactatatacaaattgaaaccaagtgtaactcggcatattgtttctaaaaacactaaccgttagtttatgtgatgttcatcctctntgagatttcatcagactgcgtttctaacaatggacaaaaaaaggaataactaatgagttcaaacaatactattatgtccttcactaggaaactggtcagtatatagtttgcctcctttatatataatatacatttaacaatgtattttatagcttctttcttcgatatttacaagct

SEQ ID NO: 376968 - DNA, 469 bp, Zea mays subsp. mexicana
gtttttgcttctgctaagggctcggttcctagacttgggggttggcttgatgcactacacattgctatgtctatactgttgcttggactttagaagagtgaaaccgttgtacttttggtgccatgcagttatacaccttcctcgggacagctatcgtcacactctgtttattgcctcactcgatagccttcttcagtgatatcgagatcccaggaagtcctgcatcacttgcaaccacatgtatcacgtttgggaatcgcattacaggtatataaaacattggtatgtatgattcttgaaataccacctaaattgatcttgccatgtcgaatctggccatttccttgagcgtttgtggttctatgattatgcatacttcacttggctcgagtaattcaacgacaatccgatgcttatgagaagaatacaactccacattggatatatgatcttggacgtaagaggaatt

SEQ ID NO: 376969 - DNA, 193 bp, Zea mays subsp. mexicana
gtttttgcttctgctaatgccgcaaatactagcggggggggtatgctacgtgctgcactctgagcatagggactacgggcagatgtccttcagaaggcagagatggttcaactcttattgcactaccatgaggtgcgcacatgtagatatggatcatctgatctctgaataatcgttcgaaaaattttttaat

SEQ ID NO: 376970 - DNA, 193 bp, Zea mays subsp. mexicana
tgttttttcttctgctattaccgcaactaggggggtttttcaaatcccacggggtgcacccatcacacagtcattactttccaatgtcctccaaaaagcagaattagtcctattcatttttccctaacatgaagaacgcctactacatatagagtctctcactctgaataacctttagaataattttttaatt

SEQ ID NO: 376971 - DNA, 200 bp, Zea mays subsp. mexicana
gtctattcttctgctagagccgctaatagaggcggggttaaaatgctacggggtgcacccacagccaagtcaactgctgcaaatgttctctaacaaggagagataatcctttactttttccagtggctatggagagcagcttatttgattacagatcatctaactttgaatcttctttcgatcgatcttttaattaagtg

SEQ ID NO: 376972 - DNA, 468 bp, Zea mays subsp. mexicana
  unsure (1)..(468): unsure at all n locations
ttttctttccttccgctggctctaccctcaggggtaatgtaaagccctcaagcggtcagttttttaccacagggccatgggtggacgcactaccacatagtcttattggctatcccaattcaaaacggccacaatgtaacatttgattgacatacacctcgaacgtcgtcctacagtggggagagtacgtgaatacaacaggtctttaggaactcttgggactttcattattaacaatgaccataaagaaggacgtttcgctacctatatatatgaaacnccttctctcatagatacaaagtgaaacccaatcgaatctgggattattggatttaaaacactaaccggcaggttatggggatggtccacctgtgtgggacttcaatccaccgggattcttacaatggcccaaaaaaggaattacctatgagttcaaacaatactattatgtccttcgcgcagaaactg

SEQ ID NO: 376973 - DNA, 318 bp, Zea mays subsp. mexicana
tcgatcttacactctgccaataccacaaaaccaaagggggtgcttttaatccatcttgcagcttccaccaccacaactagcgtcgatttatcctaccaagagcatatattccttcactatatttagatctgacaagtttatccttcctcgtttatacgtcatcacagactgtcacagctgtcgatgggcatattaatgctatactcaaccagaaattttagtatgaaaaataaacgacctgactctttgggtaagcacattgcctacctacctcatactgaaaccctgccacagagttatatattcaacgttaaccaa

SEQ ID NO: 376974 - DNA, 439 bp, Zea mays subsp. mexicana
ttttggttcttattgtatttttacttttttgaagaaagggtctgcttgctacttaagatattttttattcatacatgtttgtgcccaagaaaacaggtatgcgagttgtttggttgagaaaaggaatggatgcaggcaaataaaatggtaacccaaatatttctggcttctgcttttggagtatagggatagggtgtgttctgtgaacctggtgttactaaaatcatgtcaaacgggccggctatctaactggttaggtggactcaagtagcatcccgggtcctgggttcaactctccgcgggagcaaatttaaactggtctaagtcagaagacaacctcgtcactgatttgagtcatgcgctcatgcgtgtaatcacctgagtcgctttcaacatgatgcacatggtcgtaactcgcaagcatgtgtcctgggacctg

SEQ ID NO: 376975 - DNA, 174 bp, Zea mays subsp. mexicana
tcggttatatctgctcctatggccgctacaaggggcggggtggataatacagggggtgcacgtatagtccattaaattgctgcagatgccttctacaaacatgagatgtctgtattacaagcctgaaactcaaagtcgacccacaagtgtatacattctgaaacataaaatctc

SEQ ID NO: 376976 - DNA, 97 bp, Zea mays subsp. mexicana
tcggttatagcttctacgctcctcatctcgcgcaggggggtgccgattgttatctctgctcactgaggcaagacaactggggcccatgccccccaca

SEQ ID NO: 376977 - DNA, 374 bp, Zea mays subsp. mexicana
tcgatctaagcttcggctacaacaaaagaacgaggaggggtcattttgaaccgcggagcagttaccaccacggcaactatggccgattctccctgccaagagcaactcatcctgcaactcctcaagaacgagaaagcaggctgcctagcctaagcgatagcgcacacagcctaatctggggagggacacacgagctctgacagcatcaagaaccttgggatgaacatgaagggcttcggccttccaccaaagacatcatgcacaaaagaaatacttaagggtggacagagggatacaaatatcagtctaaacaactaggttggatgccacaacgagccatcaggagcatataagagtgaagtgtcaaaaagggg

SEQ ID NO: 376978 - DNA, 467 bp, Zea mays subsp. mexicana
tttttcttttcctggggatgaccctaataaggggagtggcttaaaacggcacggggggctaactccggcgattcgacaaatccccatccagcccaagaggcggtcttcgatagcacaacttccatctgtgagagagcatctttctgtgctaaacgaaaagagagcagcgtctccactgtcgcaagctaacatgccaagaagatcagctctgacctttggtttgaacttgggtccagtaacacccctggcaggacatggtggacctgttgcgccaccccaaacggagcatagttcatgagatttgctctaggaagcagtagcagcaagttcacgagcccttccttcgaatgtcacccccgcagcggaagatgggaatgggcaccggcgggaggtcctccaaacgcagccaagcttggcttcagcattcataaaagagttacgcctggacaatgttcggcaaaacctgg

SEQ ID NO: 376979 - DNA, 364 bp, Zea mays subsp. mexicana
  unsure (1)..(364): unsure at all n locations
gtaagtcacctgtggcgaaggatgtggacttgagatgctctatgctaagttaactgcattgtgagctggaatagttggtacttctttaagactaattagcttgcaagaatgcaggacggaagctcctcaagagcgctggggtgcccatggaagacaagaactagccgactttcttcccaatcatccaccatgatatagccaacgagataccaacagacgctcagaagtggcagtatctacgcgtacgggagctgcaccacccatgaccactgngatcatgctagtggcaatgaaaaaatgaagctgcaagtgccaaggataaaagtattctgaagatccctggacaatgtgaaaggctgcactg

SEQ ID NO: 376980 - DNA, 416 bp, Zea mays subsp. mexicana
  unsure (1)..(416): unsure at all n locations
ctaaaaactctcaacaaactactaactgataaccttattagataatctcaactatctcctagataatctcaactaatcttatcctttgacctgcgctccttgctgcagcccccttgggccctgacaggtcctgacagggagggagggtaataggcatttgagggtgtagggagcctttgggagacttttattgcttactctacaagtttgttgtagcttaaaaagggagaaaataaggagacatctgaaattgcttgaaaggttgacaaaaggccacccaaaagatggctctcaaatgtacccgtgggtctgttgccacaagcttggatcttaatccatacttaacagttgccaatgttcaagccctggttcgtagcctcacgactggagaaactaaccaccatcctacangcatg

SEQ ID NO: 376981 - DNA, 439 bp, Zea mays subsp. mexicana
gtttgttcgcagtgttctttcagacgtttgctcactggccttggcaagttccagtaagtctgcatgatgagctaactacctgcttgcattcggagggacgtctcatgcctatagtgatgccttgtaccccgccagagttttgtgcgtccactgtgacaaaaggcagcttaaaaaaaataagagaggaacttacacgtggctatgttttgacaaggtccattcaaatttcagtgtgcacaatcatttggaagtgagattgcagttttattctgggaaattggttggtggcaaggggatccagcttctatttgcaagatccattgaggcatgatttccagtggagctggctttttgaacccttcccatatgatcagaaatatcagcagtttctccgcattgctttacgtgcgccaactattgctgaactaggaaactgggc

SEQ ID NO: 376982 - DNA, 270 bp, Zea mays subsp. mexicana
tgttccaaggccgtctaagttgatagacaggagattttgacaacgcccgggtctatgacccccactcgtctataactgctgaaccagcgacagaacgactatctacgttgtgtaaagctgacggtgggcctgacatgctagcaaacatttggatggctgatgaagtggagttgggaagcagtacatgacacgaagtgactactaaaacactagaactggtgtacatcgtgtccttggaaaaactgacgaaacatggtggagatattaggc

SEQ ID NO: 376983 - DNA, 439 bp, Zea mays subsp. mexicana
tcgtattaatgcaacacgagtatgacacgactagatggaaaatacttgatatgattatatggtgtattcggtgctgataaggtgtacacaggcagccttacccttgcatttttctgcatggaggctgaacggaccatttttttaatgaaaaaacacattattccaaggcagctaactggcgactcatccctggctcccactaaacaccatagtgcccttcctacaaaatttgtcagaggacaagttgcgtgctaaggtgcaatcccattaaacacacatataggcgctctgatactatacttggtcacaagacaaaaccctggggcccctttttttgatttttaatttctacaaaagctttcctcttatttcccatttctgctttccctatctaatttgatatccttacatctaccacattaatgttacaacctcaaat

SEQ ID NO: 376984 - DNA, 427 bp, Zea mays subsp. mexicana
ttcacgtttgcggcaatatctggtcaaagtggtggccaccacatggacaggggcaatcatggttaccgcgggggttatggtggcgttgcaaggttgtaggatgcaaggggtctcaaccagtctatttcatcaggcagaggtggagatggtggtgcactcatggtgaacctgaacaggatgggtagagtttagaagtgataattttcagctcgagtaagcctgaaaatttcctaaaagccaaggtttgaaacactgctttttacataggtctctgctctgggcttagccattcacctgttacctacatttcgctgtaacctttctatttaaagggcttggaaattgaactcagagtttggtactggtttgcgagaatgtgacgaagtattcgatccatatttgatctctatctgtgacactagctatt

SEQ ID NO: 376985 - DNA, 474 bp, Zea mays subsp. mexicana
  unsure (1)..(474): unsure at all n locations
tgatgctcgagctgacccttgtgctcttcgtgcttagcaagaccgttgtgatcccggccaagacactggtgcacagttacatcggctacccatgattacgaccgttgcgaatctgctggcattgaagcgttcaggttcaggttcagttaggcgatgggatttgatgacaggcaggttgccggggtttgcacgctacggtgaatgaaactggtaggaatggtgggtctccctcaagcgcagatcatatgcgctggcaatccaagcatgccgcaagttgaaggcaggctgatggctagggtcgtgacgtgtacagtttttttgggaaaaaaatcgctacagccggttgcagaaagcggtcctgcaggttgcaaagcagggtggttcagatttacacttctgcaccaatcaatgatcaacgattgtttttcactgcagncagttgaagaagatttctcccgtacatatactactaat

SEQ ID NO: 376986 - DNA, 384 bp, Zea mays subsp. mexicana
tcgcttctcctccccctccggttcgggttcgggttcgggttcgtgaggttctccggggttcggtttcgtgggtgagcggatcgagatggcggcgtcggatgttgagtaccgctgcttcgtcggcggcctcgcctgggccacggacgaccactccctccacaacgccttcagcacctacggcgaggtcctcgagtccaagatcatcctcgatcgggagacgcagaggtcccgcggcttcggcttcgtcaccttctccacggaggaggcgatgcggaacgccatcgagggcatgaacggcaaggagctggacggccgtaacatcaccgtcaacgaggcccagtcccgcggcggccgtggaggccgcggcggtgggtacagtggtgg

SEQ ID NO: 376987 - DNA, 264 bp, Zea mays subsp. mexicana
tgatgaggagctacacacacacaatgtcgagcatggctgccatgcgctcgaaggcaataagatgcgactacaaaccagcccctaaatctgcaaaggctaaaatcgatcaggtgcacgaccacgctggaaagggtgcaagtgccgggctaaatgaccatcctgatagaaaccttttttgcgcaatgggaactaaaggtattgcaactgtcccgcatgcgtgatttgatactaagtctggtgacttaggcaaatatcactacatac

SEQ ID NO: 376988 - DNA, 234 bp, Zea mays subsp. mexicana
ctggtcgcccgcccggaccgacccggaactgacattgccggcccacgcgtccgtttcgtttcaccctgttcatcaactggcactgcagcgttaagaaggaggacccggccgtcaagtggcaccccggtaagcgcagccgtggccagttcggcaggcgcttctgaatgccagagaacgccacggttgctcacgcgaagggaggcctgcagatgggcttggtcaccagtgacatgg

SEQ ID NO: 376989 - DNA, 463 bp, Zea mays subsp. mexicana
ttttcaggtttaacgggactgttgggtcgtgggcctcacgttcatgtctggcgctgggcattttggaagcggtgatgacgatgacatatatgatgacctgagttattacttgaaccaggcttttatgctcactccggagccatggagtggtgcctatactggtggttttgaggattcttttgtgtgtggaggcctctcaggtgctggaggcatggaacagttatcacggttgcctcctagtatgtcctactctattggggtcatggaggacccatataggttttgtcacccagctttgccatgctgtgataatatggttgaggaggacccatctagcttttgtaacccagcttttgcatgcttggatatggttggtgttgctcctgtccaggagggaaaatgatcacatgaagcgatgggtgttggtttgagcctattttggcttacgtgacatactttttgt

SEQ ID NO: 376990 - DNA, 415 bp, Zea mays subsp. mexicana
gcgttcactttactggttgcctgaagttgcgcttgctgctgcgcggaggtaggtgatgcgatcgtaggggaatcaagaacgagaggatgaaataagggccgggccaattacttcaaagcccttatttacaaaaaaatagagtttactaaaactttttttagatcagtggtcacaattttttttttgaaacagaaatagtagaagttgcctttctttaaagaaagaaaggagttatagaacaagaatcacagatcatagatcacacaagcacatatcctgcttgaaaagactcaccagaaaactaatagcatgtttggttagagaaatgagattagtcatcatttctctcatttctcactttcttattttggttttggggattattaatgatatggacaaataattaatatgacga

SEQ ID NO: 376991 - DNA, 430 bp, Zea mays subsp. mexicana
ttggattcacctggtactggttttctgtttaattattattcaaactctactagctgtactctgtacacagactgctatggagcttgatgaggaggagaaagctatcactattcactccgtccacaaatgttggtcacgtttggaggagtcaaacatttttaactttgactatatttatataaaactatttatatttatattacataataagtatcattagatagatctttaagtctattttgtagtaaaatatttgaagatataattattgctaatataatttataaatgtagtcaaacttttatgaataccgacaaacatttgtggacgaatagtgatctgtgttcttgtaccgattcagtaacttactagtgattagtgccatctggtgttaatttcctccgaccttggaatagaatatagtagtatt

SEQ ID NO: 376992 - DNA, 490 bp, Zea mays subsp. mexicana
ggtaccggaccgcagttccgggctagacctacgcccacgcgttctacaaaggccaatgaaatgaaggatggaatcgtccttttaagtattgcgacgcaagtgttgatgtaatgggagccaacgcttgtccaccctgttatttccaatacatcacttaatactcccatgttgaccctggtacagctgtattcctacatcttaattaaccaaagaatctgaagttgtttagtatactaatcagcttaggtttcctgtacctgctcatttgtgacacccacagaggatggctactagccctctgtgcctccaaaatccagttacgtgctcatatatcatgtcttcggtgttgactgcctttcagggaaatagcagctgaaactatctacaaggaaagatgcatcactgtagacaatggggatagttggaccaagtacatgtccatttctggttcttcagaggacgagcatgacattattaccctgcagtacac

SEQ ID NO: 376993 - DNA, 347 bp, Zea mays subsp. mexicana
tttttctttctgatcgcaaaagaagacctactgcctgggacattttacttaagctcgtggaaggaaccaaattgggccctacaccatcctgagaaaatattacttacagatattggtaagccacagatgttttcatttgaactccctgaatgacatgacataaagctttagttcgggacgcctgtgtgggacaggtggatttggaaatgttcatgaggagataccacatgggaactatggtagcgagggccgggaagaggcttaaagaaaaaatagggattttacccaaaacagttacagaatgagggccataatctgagcagaatcaaccacacgaatattcgtac

SEQ ID NO: 376994 - DNA, 336 bp, Zea mays subsp. mexicana
tcggtttatcttcattagcagactactgcacatactatgttgcttattctgatggttcatgcactgatgtaaatagtgcgcgggcgcctgacagaatgttaggtgaagtgcgaggaagtaattcaaggtgcatggcctcaacactagtgcgaactgggtttgtacggggatctatgacccaaggaaatggctgttatcagcaccgttgcacgaacaactcactagaggttgctgttgatgggatctggaagtcatgtccgcaatctggtgggcctgttcagtttccaggattcaacggggaattaatttggtcgatgtattcatgagttgtgtact

SEQ ID NO: 376995 - DNA, 195 bp, Zea mays subsp. mexicana
cttttactttttcctacgacgccggtgagggtacgtcgtgtgtccaaaaggggaaggagagggaggaggacgtcgcctacagcaggagccaaggagtcaacaacatgaggacggggtcgaggcggccgaccgaaaactggatttgggtgacctttacggcgcggcggtggggtggttagaggcgctaaccatttt

SEQ ID NO: 376996 - DNA, 441 bp, Zea mays subsp. mexicana
gttctagaatgcgagcggccgccctttaatatttgttcttggtttttcttgctcctgtttctcccttttcctttttttgttttttagatgtaaattttctctttttttttcgggaaaaaaggcccatttttcccccaggggggggggtttttcccgccccctattttcggggacttttgggagggaagaggccccagggggcccgggattttgggcgccaggggggggggcccctagggggcccctgggacaacaagggcgcgccaaaagggggttctaagggacaccccttggacgggtatgggggccccccctggacccccccggggggttggccaaggccccaccctggggggtggctatggccccgggggggtttgaccccgggtccttcgggcggtgggggaaagaatgactgggcccagggccttgggggccccc

SEQ ID NO: 376997 - DNA, 387 bp, Zea mays subsp. mexicana
catttggattttcctcttccaccgctacaagcaccagtgttgttgttgctgttggtaggagcgaccccgctagcgtgacatggacaaagcatcctttggtgccaggttcgattaggtttctacgacttatctggtctcaaggttcttcatggccttgactctcaaagatcagagtattcttgtcaatggggatatcaatgaaggcttgcttcgccttgtcacaagctttatcgtttaaggaaagaatatgaatacacatttgaaagcatgagaccagtatcttgctaggttagggacccaggggctacacattttattactgaaaacacatgagcagtttatgaggttgtcaagtttttatttcaatgcaaattcagctggacaaca

SEQ ID NO: 376998 - DNA, 421 bp, Zea mays subsp. mexicana
ctacgtgcctatggatcgaaggctcccgtccccaaggtcacgctcgtcagcgaggccttgacggttttccttgaacaagactctagatgcaatcggaggtattatgaggttccgccggcgtctcgttagtcgttaccgtgcgtcgactggcacaagtgaaccacgatctgcatctcagtcgtctccgcaagcaccatcgcttatcatggatgcctacaggctttaagacggttaaagaaagcccgcccagacgacagacaagagaagaacacaacagaagtaccctgtagtacaagaagtgtcaatctgggtgctgaatctcattgtcttgactccatttcaggaaacacagataacttcatcaatcgaaggaaactaaaaatgaagatagatgagctagatgcaaaaaatgtgcaagact

SEQ ID NO: 376999 - DNA, 553 bp, Zea mays subsp. mexicana
gggttatcagcctccagcgccagagtacttcatgacgcccaatgtaatacttttcctacctaaattacatatcatgatgtgttcttgtttagattataaaaaggcttgtgctgcagggtaatcaattggcccagatgacagtaaacacatcaattcaagctattggaaatacaacaaccttcattcctggtggaccagttaatggacaagctgcagttaattttgttacttcaatgccggcagaatttggaaatactagcgtatttatggcgcaagcttctaatggtaattaccagtttcggccaactggtgtaccttttcagcaagggaatttcagtgcctttccatctgcacaaacacctccagttcatccccattctcgtatggcacacatgaatcccatgggccaacaagctgttgcaccttcacacaatccttatgctgcacagtccttttcaaacagtcagagccattatccatctgaagaacattggcggatggcatctggtaacttcagtccagatgaccaggataattggatagcaagtggcag

SEQ ID NO: 377000 - DNA, 150 bp, Zea mays subsp. mexicana
ttgatgtcgcgtagctcaaatgctgccgtgtagaacgggtcaaattacacgcacaggtcggtcgcaagcgaacctgtagtcatggtgtctacgcaaggcgactccaaggaaaagaaaggtgcgtacggttgcatggcatgctcccccagt

SEQ ID NO: 377001 - DNA, 424 bp, Zea mays subsp. mexicana
ccttctctgctcatttcttgcatctccgtctcgattcggtccctgcgtcgatttactgcaggaagttgcgccaccgacgtgactgagctatagcactgatgggtgacgagggcttggacccgattatgcacgtttagtacctcttcagttcctgcatgccttagcgatatgaaccctggtggatcgcgattatatggtttatgggctacgggatgtgtcaaatggccttttgcagctggtttagggaaaagtagctgttatccttctatgctatacaaagagaatgtcgtgatgtgcttatggagcctgagccacttcgttttttttatttctttcggtgctggcttgtgttgggtgtcagcaacattgggtgtagaaaagcactacgtgtatactgctgcagcgattgtgtatcttcttaaag

SEQ ID NO: 377002 - DNA, 404 bp, Zea mays subsp. mexicana
gttggtgctgagccagatgaaggatgcggaatagcaagataaataaggtggagaaagaacagaatgctgctatgaaagcactgaagaagcaggagaagcgcaccaaggagactgccatcatgatgatgaagtgtgaagaagatgagtcatctgagtcgagcgagagcgattgtgaggacgaggcaaccatgaatgtcgagcagggcttggtgatctcaacagcggttcccgaggttgttgcatcaagcatctcagctgtccccacgatggagtgtgataaggctgcagtgaaggccatgaagaaaatggagaaggaacaaatgaaggccatgaagaagacggagaaggaacagaagaaggctgcgaagaaagccatgaagatggagaaagaagcacagaagatg

SEQ ID NO: 377003 - DNA, 331 bp, Zea mays subsp. mexicana
  unsure (1)..(331): unsure at all n locations
accataactagcacaattctttcatcctcatctgtggcagactatagcgtgcggatcggagatggcgacaagcgggtggaggaggagagcggatttatnacatggactcanaggatgaacaatggctcattcagttgtatcatgcaaattcagattcaaacagctgttaaaggaattatctctcttactaagactttgaaaggataataagcatatttgaaaaggatgtctacaacaatgcctaaggaaaaaatgatttgagtgagtttttttatagatatgctgttttaggaaagggtgattacctgcatgctgtgtataaatattggtc

SEQ ID NO: 377004 - DNA, 319 bp, Zea mays subsp. mexicana
gcgtcgctccctctcctgtctccccctcccgctctgtctcgtggagacgactgggccggcgtcgcagctgccctacacggctacgcccaggtcttgttcgggcccttagccgtgacgagcaccaccagggagtctaagaggctaaccttctggctggaaccgatggacttcgaaggctatggcttccgtggaagtactttccagcagacatacagctggtatgatgcgcccgtcatcgacaagcgacaacatgacgccgtggactaactgatgatgacaccctcagctctagctcgccagggaaccttgcagaacgaat

SEQ ID NO: 377005 - DNA, 305 bp, Zea mays subsp. mexicana
gtctatctaccgtgacgcgcctcgcaagctccctggggctgaccatcagacgaggcgcgagcaggcagtgagccaccttgccatcttgcccgcatccgcagaggtggccagggaggcggacgaggagatgacccgtggccgatccggacccggatcgctatataccggacagcgacagaaaggctgtggcgactactacaagagggtaatcagcatatttcaaaaggatgcctacaacaatgcccaagggaaaaatgatttgagtgacgtgtaatatagatatgctgctttaggaaaggatgata

SEQ ID NO: 377006 - DNA, 344 bp, Zea mays subsp. mexicana
  unsure (1)..(344): unsure at all n locations
aaatanggtggtggccgcggccgagaccgtaattgttctgatatgaagtgctatgagggcggtcaacnaggccacttaggacctgaatgacgctcacggatagaaaccggagggctgggaagcggaaggcgacaaagccccagtcctagatatgcccaccgcagccaaacttgcacccggagcccaagacatcctcagagcccacgctatgggaaaaagagctccaaacaacgagatcaatatcctaggaacctacaataccgacatgtccacacgcgcagctcctgcccacccggtcaatcaggatttcctcactggcaccaccccttacgaacaacttcatc

SEQ ID NO: 377007 - DNA, 436 bp, Zea mays subsp. mexicana
attattatgcgttaggcgcggcgccactgtcgggtcggatccggcggagtcccatgtcgcctctcgccgcttccctacccctccaaagtacccctctaaaggtatcgctcggccgactcttgcgtgaagtcgtcggagcaaactatctatcagtagtactagcagtgtcgtttcgttttggtctgtcgtggtggtaagaaatgcaagtagtaggtgtgaatctctctcgggagcagcaccaggatctttccgtttgaatcagggtgaaggcaggcatgggcatggatgactctgccggacctatctgtcatgaactatctatattatatcattatcaatggtatgcaatgagtctttagcattgagctctgggacaaagaccatgtgctggaagatggtcaacaagactaaggataagttaaaccaagttggggtg

SEQ ID NO: 377008 - DNA, 424 bp, Zea mays subsp. mexicana
tgtttatggtcgcaaacgtattgtcaagtatggtggcgatgctgccggtttccgggcttccatttcaaccaacgaaccaggaactgaatctaaagcaccagccgatgtgtacatgtctgctccggctgctccggcttatgctccagctccagcaccagcatatgctccagcgcctgctcctgcttatgccccagcaccagctccagcatatgcaccagcccgatcttatgcaccagctcaatcgtatggaccagctccaccaatgccgccaatgccaccaatgccaaaattatctgctccagcttatgctccagcagctccggcttatgctccagctcctgctcgatcatatgctccggctgcatcatatgctccagctccatcatatgctccaggtcgatcatatgcttcagcaccatcttat

SEQ ID NO: 377009 - DNA, 446 bp, Zea mays subsp. mexicana
  unsure (1)..(446): unsure at all n locations
tcggtcncaacaacaacaacaaagccttttagggtcaagtaagttgaggtaggctagaaaaatattatacaacctcccattttaataagacatccataccaaaatttatgtttcatacaaataccagactatagcttgtataagtttagctactctgtacttccccctttcttgtatagcaactaccaagagaacaaattcagcagacatgagtgaaagtactgaataatcctaagtatgaagggtcaacttctttcatggatggagaaggattgcatttgttcaaaatacatgctatggaccaactgttcaaaattgaattttatttctaacataacatgtggccacatacccttttcagccatgtctactttgacaaagtccatgtgctggaagatggtcaacaagactaaggataagttaaaccaagttggtatggtcatata

SEQ ID NO: 377010 - DNA, 245 bp, Zea mays subsp. mexicana
gttgatggggctggtgtggcgcgcgcgcaccagggcgctggtgatgacgcccgagcagatcaccaagctgctgttcgccgtggacgggcggcgccggatagcgccgacgctacagcggggctactctcgcaacggcatcgtgctaaccaacccccttgccacagacggcgagctgctgtccgcgcccgtgtagagagcggaggtgctggtgcaggacgccatgcggatggaaaccgacgactaca

SEQ ID NO: 377011 - DNA, 72 bp, Zea mays subsp. mexicana
tttattatttgctgttgaagctaacctatcggggggttatttttgagatcgatgggtacacgataacgctat

SEQ ID NO: 377012 - DNA, 138 bp, Zea mays subsp. mexicana
accgcgccggaattccctggaccgacccacgccttcagtgatgtacaggccaggctacaaacctttggggtgtttttttacgataatggggctgaacccacccgacttctacatctacgaattgcaatcctatcttat

SEQ ID NO: 377013 - DNA, 250 bp, Zea mays subsp. mexicana
tcgtcgcatccaactctacctgcctctctctgtggtcttttttaaaatccagggccgcatccaacactgccacgacatccaaaaattccaacccccaccaatttatcatagcctactccgcccatctaaacactcctccaagatcgagctaactcagaggttaaatattgccaaaactgtaattttcaaggagctaacatccttattacccattcataagctacatcaggactccatctcccataaggaa

SEQ ID NO: 377014 - DNA, 254 bp, Zea mays subsp. mexicana
tgtacatattttcccttgattagccgttaccatgtggtgggggacaacaaggtaacctatggggataccactgctcaattctatcccttccctgtgctaataactattgagacacacgactgaaaagggtagacctgctgcgagagggagacactgagccagaggatggcttgctcggtttatcacccaccctactcatgtgggtgtctgctgcactggatattatcttttatagacatgacatggggaggata

SEQ ID NO: 377015 - DNA, 422 bp, Zea mays subsp. mexicana
cttggtagcgcttcgccgccgtcttctacggtccggggtaccacgacctctgggtgcgccacaagggcggcctctatatggattcgctggagaaactgactgcattgcttgatgcatgtagcgagctgggtgtggatacaggcccaagaacgataggcgacttgggaatcataccattgctctcatgggaccacaagagttttgacaaggagaaggatgttaacagtgcgcgtgtcccttcactagaaatggcttgtaaagactttcatgcttgccaatggccttcagacctgacaaatgatgatgaggctcttgctctttactttgacaagttgaatgacaagaatcatgatgctattgaagaagtgaaaagtagcagcacacatatattaacgatttcacactttgtaccaacgcaagag

SEQ ID NO: 377016 - DNA, 399 bp, Zea mays subsp. mexicana
ttgtccgatcatggtgaagggcggcagcacgacggaggcggtggtaggccatacggctggctctgcagttgatggcagatacaccgacggccatggcctgccgctcaccgcgcggagcctcaccggatggctccctcgccacgaggcccaaagcgactatactaccagccacgctgcgctacacgggggagacacgcaaatacattacctgcctcagtcgtgcttgatcctgtaactataactgatcgaggatgctacatcatatctactactgctggtgcttgagggcatactgcacgagaatgaagccactacgatctgacacaggatgcgcctgccgaggacgtacgtgcgtacgtatatatatacgctacctcgtgagctgttgtacgagtgata

SEQ ID NO: 377017 - DNA, 438 bp, Zea mays subsp. mexicana
tcgtgattcggggaattcgcgcctcatccgatcgtcaccggccgccgaagcgcaagaaacagcggccgggttaggactctggaggatacggcggctcggcggattcaggaagtgaggatattttcttggatttctgttcttgattgaggagaggatcttgtattagctactgcgttattcactggatgttggcaatggggtcagaagagtgggagctctatccttcttccgacatcggttcgcaggtcatagaatacagacctgtgtctgaagacagcgatgacgatcagaatggggatgtggcagtgtcgctggatgttgctctccctgatgatcttctggagaaggttctttccttcttgcctgttgcaagtatcataagatctgggtctgtttgcaaaaggtggcatgagattgtgcatgcccggaggcacgcat

SEQ ID NO: 377018 - DNA, 427 bp, Zea mays subsp. mexicana
ttattcttcgccgactgctggagtctccctgtctcgatcattcaaaggccccagctggctgcgcagtattttgagacttgcaacgcaagtatgctctcatccctagatgctccttaatttgttactgccctattcgtgagataggatagaatgtcaagactcaaggtactagctaggtacgtataagaaactaactagccctcttcaacaagcatgccgtctatttttttcgatcctgatcagctgaactctgtctggagccatactggctgaagcctgaagctgaccactttgcaattttcaacaagccttttggtgatcgattctcaatacccgaattgtcgattcttaatggttgtaacactagctcggctctcattctgtaccaaccgcaatgttaaaaaccctatagcaccgcaccgaattc

SEQ ID NO: 377019 - DNA, 215 bp, Zea mays subsp. mexicana
gcgtgcacagtaccagcacagggtgggcttttttagtggaaagggggggtaccccctatactgcccgttggaggatagaacaaaatcgtgccgcactaccggcaggttttctgggctaacgtggagttcatcggcataggtttctctagcacgaatggtgtgaagttatttcacttaacctttacaaggcaacaaggcacccgtatactggttag

SEQ ID NO: 377020 - DNA, 284 bp, Zea mays subsp. mexicana
tctttaagaagctcacggttcagttgtttctgtcacagacttgaaatgcaaagagtgtggctgcgatgaaaatggcggcgctgaaacagaggagatagatcaagcaaacacagaagctgaagagagttctaaatgtggagatctaatggaagaaaaggaggatgcatcctgcagagatctagtccgagtagaggaagcacacattgcttggacaaatgctgggtaggaggttcctttgggtgatgatacagagacggaaatccaagggccggacatggtggtca

SEQ ID NO: 377021 - DNA, 437 bp, Zea mays subsp. mexicana
ttcttttgctattggcacaggaacatgggaccaaagtttaggtgccctggttagattcaccatttactaattttcatttgtcttatggatcaatgttcttgtactcatagtgcatgatcttgtcagaaacaatagttgtagcttcttctaggcgtggagcctgaatattcttatacagagtttgaattgacatgtgatgtaattcttaaatcacttcccagagaagagacaggccacaaacaatgctctagtgtcggtggtgcacaggaagcttgggaccagcccagggcgacagggtctgcacggttcagttttccatagccaaaaccaagccagtggaagacatacccttagttatgcaattatgcaattgcagatgcatgttaaagctactactatgtatcgtgtacttccatgctgatttcttatagaatacc

SEQ ID NO: 377022 - DNA, 429 bp, Zea mays subsp. mexicana
gttacctatgcttagcaggggccattggacactctatgtgatcaatctacaccaccgggttatccacattttagattcgaatccctatggtatacaacttggtggcaccgaatggaaggactatcattatgatccaatttatttaggtggcaggaaattcccatgggctagggcgataatgagtaggctgagcaaagcgttacaacacgtttgccccaacgctgaatttcctaagtttggtaattttccaatggatatgccatctaactgcccaacaatgaggacagggtcaaatgactgcggattttttgcgatgagttacatgaaatcttacgatcacaatgcaggtgtcatatcttctttcaatcaaccagacaattcccgagatctacgtgctcatgcccttcatcaactcacattccatcgcat

SEQ ID NO: 377023 - DNA, 439 bp, Zea mays subsp. mexicana
tctttcgcgagcgagcgaccttcctttttttgtgtgagcgaccaacacatacggggcccatggcaaggcaacctctgggatgacttacagctctagcaaactgcatgcacgccacgcacccaggcccaggagacagacctttctttctatatatatatacaagctcgtctcttgtctgcatgcagcagaactggaagctcaccgagatagcgagatacggagtctggcttatggactcatgaatactcccatcatgtgattccatccgagggtgtgaattgacaaggatagacactaccagagagctccagtttgtatatttggcacgtgtggatctaacctaaaataaaaagcagggactagaaagtaattcctagaaaccaaacacccgctaaataagctgcaaactaagacgctctgactttctttttgtacataa

SEQ ID NO: 377024 - DNA, 326 bp, Zea mays subsp. mexicana
ttgtccactcggtcctgcttggttaggcggagggggcttttaccaaacacacaggggtatcacacgacgcacgataggcgcgcctgaacaggaggctgtacacgcccacagatgcagggcctcatgaagacagggagagaaaaaacagccaccgccacgaggagccctcagtataccatggagagggccagatgcacagtccacagcgcggcccaccttccagcatagatcactggcctcggcagaagcactggagtgctatctggcaagctgacgccctgagaatgaactagccacgaggagcaggctcctcaaaaatgaagcgc

SEQ ID NO: 377025 - DNA, 189 bp, Zea mays subsp. mexicana
tgctgcgcgtgccgcactctaagcccgatggggactttgttatgcagatgggggtgcacaccaagccccatctcgagtttcagcaccatatgctggaagtcaggcgactgcttcgctgagaagctccaaaacctgatgcagcccctgtgacgtaacttatatatggagttccttatagcgcatcatgct

SEQ ID NO: 377026 - DNA, 515 bp, Zea mays subsp. mexicana
attgaagcagccaaaacctgctagaagcctattttttctttttccaccgttcccaaagctacgccttgagcaaaaaccacaggtataggcatggcaaaggcaggggcaacggccgtgctggggaccgtactggaggccctggcggcgaccgccgagatggcgcacggggtgtgcaacctgtggagcgccggcatccgtgcgtgccagcccgcggaaggcatccgcaacccgacagaccagccgtcgtctgagtgctgcgccgcgctggcggaggccgacctggcatgtctctgccggtacaagaacgccgccggcgtgtgggtgaggttctacaggatcgacatcaaccgcgccatggggctgccgggcaagtgcggccttgccatgccggccaactgctgatgtcacactgcaactgcatgcatgccgtgctgcgtgcgcagctaagtttacactacatgcgcgtcaaggcgtatgttctactgctatatagctacgacatctatgcaataaac

SEQ ID NO: 377027 - DNA, 308 bp, Zea mays subsp. mexicana
gtcgttttttttttgttcaacgcggtcgtggtggccgccgacgcggcagcggacgccgggagcgcggagttcagcgacgaggagaacccgtatgagctcctgggcatgatgccggttgataggtcggatgacatgaaaatggactacaagaagaagcgcaaggacacccaggagactggagacgacaagttccttgacaagttggacagggcctatgacactgtcatgatgcatgagatacagcatcagatgaagggtgtcacatacggatctgctcaggtgtccaaggatatgaagtatgctgacaa

SEQ ID NO: 377028 - DNA, 450 bp, Zea mays subsp. mexicana
cttggcttctcctccccctccggttcgggttgtggtttttgaggttctccggggttcgggcccgtgggccagcggatcgagatggcggcgtcggatgttgagtaccgctgcttcgtcggcggcctcgcctgggccacggacgaccactccctccacaacgccttcagcacctacggcgaggtcctcgagtccaagatcatcctcgatcgggagacgcagaggtcccgcggcttcggcttcgtcaccttctccacggaggaggcgatgcggaacgccatcgagggcatgaacggcaaggagctggacggccgcaacatcaccgtcaacgaggcccagtcccgcggcggccgtggaggcggcggcggcgggtacggtggtggccgtggaggcggcggctaccgcggtggcggtcgccgtgatggcggcggcggctaccgcggtggcggcggc

SEQ ID NO: 377029 - DNA, 552 bp, Zea mays subsp. mexicana
  unsure (1)..(552): unsure at all n locations
ttaacttctgcatattatgcgggtaaggcttgtttcttttagatacccttcctcagaccccgcacaatgcgctacgacactggataagccctttataataagggggaattccaggcaagcatgaattcaatgctggtgcaacaacatccccattcacggaatctagaatttctgaagtttatgcagcactcaaaaaggaaagagacaagctgccttgccaagtgaatgatccaagacagacacatccttaaattagacattgctaaggcttatatttgtgagcattactacatatggctaaagttaaacaatctgcgttgtttgcttttgccaatgcattgtgctctatgctcaatatttttatgattttgaatgagatttcaatatatggctaatggacacttgcatcacanattcttgaaattcaactgctattttctatatttgaatgtttatatatatgggggggtcttatgatcagtcattttcattcttgaaaaccacatatctttctttttctgagagcaattggctagatgcttgttattctgg

SEQ ID NO: 377030 - DNA, 301 bp, Zea mays subsp. mexicana
agagggcaagagggagggtggggcaagaaaagaggagggggaggggccccccaaacacacaaaaagagaggaaagcggtcaagcacgcggagaaagagagctggatagagagagggacacagagacggagggagagggacgagaggacacgacgaagaccctggggcagctgaagaagcggtgagcacagggaaaggaagccagtggagcggaacaacaaacaggagatgggggaagctcagagacccacgggaacaaggagaacggaccagacaagcagacgaagagaaaacaaggacaa

SEQ ID NO: 377031 - DNA, 426 bp, Zea mays subsp. mexicana
actggtttcgggttcgtgaggctctccggggttttttttcttgggtgagcggatcgagacccccgcgtcccatgttgagtaccgctgcttcgtcggcggcctcgcctgggccacggacgaccactccctccacaacgccttcagcacctacggcgaggtcctcgagtccaagatcatcctcgatcgggagacgcagaggtcccgcggcttcggcttcgtcaccttctccacggaggaggcgatgcggaacgccatcgagggcatgaacggcaaggagctggacggccgtaacatcaccgtcaacgaggcccagtcccgcggcggccgtggaggcggcggcggtgggtacagtggtggccgtggaggcggcggctaccgcggcggcgggcgccgtgatggcggcggcggctaccgcggtggaggcgg

SEQ ID NO: 377032 - DNA, 312 bp, Zea mays subsp. mexicana
cccatgacagtttctcagtttctaaacttaggttcacttggattatctctggggaagttttatgtgcttgtttctagtaggcaaataattttgtttaccaacatattttctttgactgttaagattaactggaagaaagactgaaaacttattaaatggcacatgcagtacttcacatattttaaccaatattaatacatgtcaaagagaggaaagaaatgtcctgacttttctagatacatagcttttgttacgcacctagatataggttgtctagaaaagctaaacaacttacaatttgaaatggatata

SEQ ID NO: 377033 - DNA, 482 bp, Zea mays subsp. mexicana
  unsure (1)..(482): unsure at all n locations
acttttcctcccctggaggacagagaagcgtgattctcattgctcatgggtttcgatttctccccgggaggcgtaataccaactgaagaaacactaaggttatcatcactggaaaaaaaggctgtgaatgatatgtttgtcattctttcggatgtgtggctggacaatcctgagactatggagaagttggctgttgttcttgacgggtatgatagtggggacagttgtgccttccctctttgttttaatgggcaatttctgctcccggccttgcaatctagcgttcaattcatttgaagaactcagatttcagttcggaaagcttggcgagatgattgcagctcgatctagattaaaggaacatagtcgtttcttattcattcctggacctgatgatgcaggtccttctaaagccctcccaagntgtgcacttccaaaatatctaattgaagaacttcagaagcacataccaaattcaatct

SEQ ID NO: 377034 - DNA, 427 bp, Zea mays subsp. mexicana
gggttcggtggcgtcggaggcggagctggcgctgtgttgttttgatggcgtgggcagagggccccctgcacgcgcgtccggccgccacgctgctgccctacgccgcgcggctcggcgccgcgctcgcgtgggcgccgctcgtgctgggccgccacgccgcggcgcgcgcgggcctcgcctgctgcgccgccatggccgtgggcgccgtggcgtgcgcgcgcggcttcggcgccgtcaaccctgtggctggcgacctcgccaagcccgccgtcgcctgggccgtcatcctcgccgtcgtcaactacaagatgctctgagctcccgagaacacgcgcgcgctgttcgtgttcgatcctcggcagccaggcccctggctatttgttgtgaacatgtaataatgcgttggtttgtgtacagtatacgttct

SEQ ID NO: 377035 - DNA, 414 bp, Zea mays subsp. mexicana
cctgagctgccaaagcatgagctgccacctctattctgatctctgagttgccattgccaccaaccgccgagagccactacccggagccagggatggccaagccgtgatcggcctaacactacccggaggccggccggagttagagatgatcacgatgtgatcggcctgcattagtgaacacttcatgtatatgtatttacgtacgtatgctttatactttgatgtctgcatgcgatgttgtggacgtgccccatgcatgcacacaactcgctaggagcgtgatgatgtttgcagctattgcagtagtgtatttgtattccctttgtatgtatgcgtctgtacttttggttataatgtctatacagagtatatccatgtatcatacaggtttcatttatttatcttgggttaatt

SEQ ID NO: 377036 - DNA, 87 bp, Zea mays subsp. mexicana
  unsure (1)..(87): unsure at all n locations
atgncagggaaccgggcagaagggggtgctgttttattttcgtcttctgttgatcaaatacccgggaaacacatgttggatgtgtgc

SEQ ID NO: 377037 - DNA, 449 bp, Zea mays subsp. mexicana
  unsure (1)..(449): unsure at all n locations
agtggagatctaggaggaggtcgcggtgccgtttctcctttttngcgcagcagcacctcattcccccatgccatcgatcccggcctccgtgactccgtcgaccccaaccatcgtcgcacggagatgtgccctgggcctacgctcctgctgaccaagctactgaaatgtgctctttgctatttcacaaaagaggcaaaaacaaaagccgataacagaaaacctaatcccccaaaccccaatccatctcgagttgctatttaatgtttctgttcttcccctccgatctgatgtctctagctcctcttcccgtggcgatcgagttgctatttaattgcctctgttttctccttcgacaactgtccaataccttctcccttaggcctggcacggtcttggttggtactgcgtcacatagctcctttgtataggtgtgcttanctcgtacagct

SEQ ID NO: 377038 - DNA, 334 bp, Zea mays subsp. mexicana
  unsure (1)..(334): unsure at all n locations
agagaagnnagaagaaagaaggaaggaaagggagagcaaagaaagaacaaggaaagaagagggaaagagcgaaaaaggagaacagcaaagggaagagacagaaaaagcgaaaaaaggaagaagagaaagagaagaggagaaaagggaaagaaaaaagaagaaaaaaggaaggggagaggaaaagaagaaaaagaaagggaaggaggaaaaggggggggaaggaaaagaagaacaaaaaagaaaggaaaaaaaacaggaaagaagaagacaaaggaaagaaaaagaaaggaaaggaagaaaaaaaaaaaaaagaaaaaaaaagaaaagagaagag

SEQ ID NO: 377039 - DNA, 506 bp, Zea mays subsp. mexicana
actagattaagcctagagaatgctagtgatatttttattttgccagaaagaaagatactgcccccccctccctcagctgtgggtataacccacgacaaggaatgcaacactgatgccttccgtcacgccaaccaccacgaatcactaatacagatgtcagcggcatgcgctgaagttcttgttagagaggaggagaagataatttgtacagttgatacagtggaattttgtcagctacccactgaagcttataatctacttaagcaatcaggattaaatactccagaggcagcaccttgtaggtcaaggaacctgcgcactgaagcaagacgcggtgatgctctttcttccactaccaaattggagaaaataatggcaggtactgcagcgaagaagggatctcaactaaagaagtcaattcaaagcagcatagggagattgattcatggtactgaaagaaggaacgcgcagcattcagcacaagggactccaactaaaatcatagc

SEQ ID NO: 377040 - DNA, 520 bp, Zea mays subsp. mexicana
  unsure (1)..(520): unsure at all n locations
gctcggccggcggctacctgatccatctgaatttgcattttggccttataaaatactactgcccttgccttctgcgagtcaccaggcccggctgactggctgagttgttgccgttattacagaccgccgtgatttacctgatcacatatactaataacttctttcttcctgtggcagatttgacttcatatacggcgtgcctttttaccagcgtgggttgacaggaaaagttgcgtgtccggtgttttccaaagaagctgaatgccttcaggattttcaattgaagtcaaattccagaggaacctgccgggagagcatagcagggtgactccgggactctctgctacctgcactgcagccaggcagattggagattggggctggaagcacgggacgacaggaggacgcagaagaagccacggngacccacggcaacggcatgcgcgtgtacgtccaaccccatgcgatcggtctcggtcagcgcgctcactgcgttgcacttgcacgactggatgaaagg

SEQ ID NO: 377041 - DNA, 353 bp, Zea mays subsp. mexicana
  unsure (1)..(353): unsure at all n locations
ttttcgaccacgcgcccggtggcacgaggtcggcgacaagaggcctgtttattgttttggcggncttggcggcggctccccaggccccggctccgagtacggccacgagggccgcccgcaccacggcggcggcggatcccagtacggacacgagacacgcccgcaccacggcggtggaggaggaacacccgctgagagggattaggcttacaggacccaatgagaggatgggtgggcagaaactgcagtcaccgccacagggggaatgacttgaatcgagcgaacggaccgagaagactacccaggcacatggacaaaggcaattgcatatgaaacagcaggaattaaattat

SEQ ID NO: 377042 - DNA, 311 bp, Zea mays subsp. mexicana
ataaaaaaaaaaaaaaaaaaaaaaaaaaaatggtgtaaaataaaaaaaaaaaaaaaaaaaggcacaaggacacaaaaaaaaaaaggaacaaagaaaaaaagggcggggaagcaacaaaaaaaagccaaaaaaggggaaccaaaaaaaaaggaaaggggacgaagacgaaaaaggaagcgacgggaaaaacccgggaggaacaaaaccaaaagggggagaaacaaaaagccccgagggcagagggggaaaaagcaaaaaggcccgaaccgaagggcgatacaaaaagaagggcagccagaaaggcgaaggga

SEQ ID NO: 377043 - DNA, 334 bp, Zea mays subsp. mexicana
  unsure (1)..(334): unsure at all n locations
aaagaagggggaggggccccaagcaaaaaagggggangaagggggagagagagagaagggangagggaggggggggggagagaggcatcagaaaaggagggggggggagagaaggagggcggagagagaagggggaagagaggaggaaaagggggaggagagacaaggggggaggaggcaaaagaaaaagaaaaggagggaagagagagaagcaaagggaggaggggggcagaccaggggggagagtggaggcaaaagaagggggaagaggagggggggagggggataggagaaagaagggaggaggtggagggggggaggaaaggaaagagaa

SEQ ID NO: 377044 - DNA, 190 bp, Zea mays subsp. mexicana
gtgttatacctaggataaaggcaggaaggggtctaatgaggaacaagaccagaatgaatgtgaaggagatttatatgaagaggaagaagctggacaccgcggaaagcgaatgagaaaataatgggaagatcaagaaggaggaaaagaagaggcaaagggtcaaaacagctaatgacaggggagaaaggaa

SEQ ID NO: 377045 - DNA, 140 bp, Zea mays subsp. mexicana
gtacgagttttgcacgatctattgagtatagccttagggcatatactggctatttttttattactactgtcaccatgagtggagggaaaacaatgatgtgttgttacataaaaacagacagacgtagatatttaagtgtt

SEQ ID NO: 377046 - DNA, 365 bp, Zea mays subsp. mexicana
tattgttatccatttgaatatggagtttttaatttatagagctagaacaaacaatctcccgggacacaccatgttatattcctatgagcttgagatgcaaattggtactgtttcagctcacatggtcatttagcatattttcaaaattcaaactaactagaccaacctaggaggtttattatgttttctatcaatgtatatcttttctgttcgttcgtactttacctttcatttttccctatgattgctgattggtttttaactttgctgttgaccagctatatggcaaatacccaagcgtgcatgtatatgcatatggaccacttccttgtgtggactttgttatagcggatgcatgttcgcat

SEQ ID NO: 377047 - DNA, 326 bp, Zea mays subsp. mexicana
  unsure (1)..(326): unsure at all n locations
actgngagtacgctacagaagctggttccttttttatttatgtaccattgtttgtgccacctatgtccgtgcgggaaagccgtcgtccgatctgctggagcgtatgaaggaagacggccttgaggctgacgaggaaacagagagaatcctcgggggagaatgcgagcgagtagacatgcacccgttgtcgatcactaagtaatcacttttctctgttcatctgttcctttgttcttgaattcttctcattagttgaagccatggccactgcttacataagtaagacagcacggtcctttcttgtgggctgcgtgcgtagttcctcc

SEQ ID NO: 377048 - DNA, 263 bp, Zea mays subsp. mexicana
  unsure (1)..(263): unsure at all n locations
aaaagatataggangacagaaaagttgcaatccgggacttgggagcggtctggtgaaaagattcaatattcgaaggaataccagccgaagggattatggtggagtaattatggatgacggatgtggcagggagtttgatggagatgcagatgacacgtctcggttagtatggaacttttgggaagacagaagtaatttaggagggaataaaagattatggactggaaagagtggtgatgaaggagaagaaagtggaggggcag

SEQ ID NO: 377049 - DNA, 559 bp, Zea mays subsp. mexicana
tttagggatcggcgccggcgtcggcggtggtgtttctttctcagggtccgggttctacccgcgctcaccgtccgggtcatggtcaggctcgggctcggggtctggcgctccaggctcatcggctggctcttacgctgagtcaggatccgggtcgaacgcagggcccggtggtgcaggagcaggatcctacgcgggctcgagagctggctcttacgcaggctctagctctggaggagcaggatcggatgcaggctctgacgccggctcgtacgctggcccgcacggcggctcgggtgcaggttcctacgcagggtcccatgccggatcctacgctggcagcggacatggcaagtgagcgcgagagcttacttatcggtgccgcgcagcacgaaacagaccttcactacgatgttgctactgtgtgtcatcatcatgtatattattcggtcctatggcacttgcactggtgtacgagagcagccacaaataaggtgccagagcaaccatggccatatatatatatatatatatatatatctatatatatatatatattata

SEQ ID NO: 377050 - DNA, 434 bp, Zea mays subsp. mexicana
  unsure (1)..(434): unsure at all n locations
ggaccggccgaattccttttcgtcacgcgccgtttataccactagcggaggcagagctgtttatttcataccaaggaaggggccagngaccaggaggatatgtaccaccgtggaagtttaggagagagaggacctttgccgcaaggaagggtgctcgcatatcactgggagccccgggatatctcgcacgaaggagagagacatttctcctaaggaagagtacaaaggaaggagcctcaaaacaggtgaggaaatctggactgatgacagcagaagaagttaaagaggacataagaaagattaaggaggctgagatgattaatgtttgcatcacaagatccttttctggttgggaaaggggcaatgggcagtattcagagataaggaaggaaggacgaataagtgaagaagaaatgcgcaaggcaaaggaacct

SEQ ID NO: 377051 - DNA, 289 bp, Zea mays subsp. mexicana
ttcttatgctatcgcagcccctccgggggcgtggtttacttctaacatccatgccgcatccgccccagcacaccagacaaattgatagttttcatcttctctatatgtgctgacatttaatttttgatagattggggagttaagaagtggggctccaagactaggtgaactgaacgatggtgggcgtcaacgacacaacaaaggaggtgccgatgttattaggactagtgagacccaggtcacaccgattgatgaaggaatgggaggacgggcacctcgtatggagaaa

SEQ ID NO: 377052 - DNA, 508 bp, Zea mays subsp. mexicana
tccttgtcggttcaaggcgtccttcctatttcatgctctaggctttcgagccgggttttgttttggaagcctgacgcggtagcgcaatcgaccattccggtggcggcggcgctgccgcctcctcgccgagggcagcgaggaaggcgtcgccttctccggtgttcctgggaaccgcgctgtttgttctagggtttgtgtccctctttacgggacacgtggtcaccgacgctgactgggcgcggatccgcagtcgatggcgacccaaacaggtaatttgttgcagacttgactgctgtactgtctaattccacaaattttgtcgttgcgtggtctcttccgtgttatagcctgatagaagtgaaagaagaaagttctttttgagccgcttggggaacaatttgaggaattgagtgcaagagtttagtattttctggcattgccaagtttcactaggaacgtcgtttaaattgtatttttggtatgccttaaatgctctctatactgtttt

SEQ ID NO: 377053 - DNA, 349 bp, Zea mays subsp. mexicana
  unsure (1)..(349): unsure at all n locations
tgaggccgaggaggaagaggagaggaggaggttataaagaggaagaagagaaatnaaaaagtgtggggaggaagaggaagaagtgaaaaggagagggggaaagagaggaaaaaagaagaaaaagatagaggtaagggaaaagggggaaangaagagaaaagagaagaaaaagaagaaaggaaaaaagggaaagagtaaaagaagagagagtagaaaaaaaagtagagaaaaaaaggagaaaagaaaaagaaaggaaaagagagggaaagaaaaaaggaggagaaaaaaggagggataggaaggaaaaagagggaataaaaggaaggagaaaaaaaaaagaggaagaaaa

SEQ ID NO: 377054 - DNA, 508 bp, Zea mays subsp. mexicana
atttgcatgattttatacatccaaatgattcagtggtacacactgttatatcaaagatgaagcaaaaagttactgtggagattagcaagatagatgctcagattatgcgaaatttatctgtgatgcggcatctagagcacaagcttggacctgcttctgctcttgattatcgaatgattcttttaccccttatgagatcgttcttacaaagccatttgggagagctggtggataaggatgccaaagagagatctgatgctgcaagggaagccttcctggctgaactctccttggatgctaagaagaatgcaagcaaaggggctgatatgaaacaatcccatgaaaaatcaaaggataaaaagaagttcaaggattctcgaaaatcaaaggagctcaaggattcaagctggagcaaccagtctctcattcaccaggacagtaccgatgagggaacatcagagacatctcaaatgcttgctgattgtgatgatcttgtgtgcaaatgctc

SEQ ID NO: 377055 - DNA, 390 bp, Zea mays subsp. mexicana
taatacagaaaagacaaagtttactcttttctggatcatatgttttgtgctacttattgccattcacgggttcaacctgacaagcgctggctgcagcagcgaggtgtttgtaggtttcgcggtgattcgtctacccaaatctggaaccgtactgatactgaagaccgtactgatactgaaagcattatccggcgtagactgttaattcaaacattattacacgaatgcataaggctgagcacggcttttgggcttgaactcgttagactgccagcaaatagcaaatcgcatgaatcaacggtttgtactttacatagtggacttttggattatttgtacagtaaagtttaaaatttgccctggggattgtactttttatatagtagacta

SEQ ID NO: 377056 - DNA, 489 bp, Zea mays subsp. mexicana
  unsure (1)..(489): unsure at all n locations
taagaaacctagccagaaattcgnccaggataggggctgtatcgnaaggagcagtcgacccgcactgcacaggagccgagcaaactatcggcagaagaggtcaagggttggcgggccgactccggaactgggagaaaccaccccgagggaagcccttaaaggccgaagccaagaagaaaaggccggcccggaaccaaccgaaaagagaagagcaacaaaaggacaggactcagagcaccaagaataggaaagagcaaagaccataacaattaacttcaagatgcttgaagtgaggactgcaagaaggccggctctcgccgacatctctgggggtgggttctttatcaggacagtagaatcgccaggagctgggctggtgaatggtgctgtcaagcggccggctcgggagattctgtcaccttcaagcaacaaggagaatgtgccaccagtgggagctttgagggctacaccaaaaagaagacccccttg

SEQ ID NO: 377057 - DNA, 365 bp, Zea mays subsp. mexicana
  unsure (1)..(365): unsure at all n locations
nnttttaggcccaggggagggcgggaaccaggagtgaacattgaaannagaggccggtgcccacgcaccacaaaggaagaaggactggcgcccacgcggagggggaacactgcacagggaacaacaaaccacacaacccaggcccagaaagccgaaaggagggagagctcaacgaggcagcagaaactcaagaaggaaacgaacgggagtgggaagaggagagcgggcaaaccaagacagcgagggagcagagggggcacaacgaccagatgaagcgcaaccaaccaggaccaacggaagaacaaggggagatacaagccggcagggctgccaagggaggacacccaagggagaccaggcgcagg

SEQ ID NO: 377058 - DNA, 378 bp, Zea mays subsp. mexicana
  unsure (1)..(378): unsure at all n locations
cggaannaatgggaagacccacgcgagaaaaaaaacccccccgccagcgccgcaccggggttgaataacaccaacggggcgggaagggcaccaaaccacaggngaacggaccgaagaaggaagacgacgaaaaaccggagaggatgtcaagcacaagagcacaaaggacgcatgccagcagacccgtaagaaggaaggccacaagcgccagaacaagggagcaggcgcaaacaaacaacgcgccaacgaaggagcaggagagcaaacgggcaacaaccagatcaagaaccacggatacggaaagaagaacggcaccggcggagccaaaaaggagaaaaaagaagacgaacaagaacagcgcgctcccgggccagccca

SEQ ID NO: 377059 - DNA, 291 bp, Zea mays subsp. mexicana
ataacgcgtccggcggcggtggcgtggcggtgggccttttcagcccggtctggcagatcccccgaccggctaccaagcctgcacccgtcccttcagcctcagagccgtttaccgacaggccggcgccgccgtcgccgtggcacaaggagaaaccggccagcgctgctcggaagcctggactgggcagtggcgtccgcgggctgaacttgagcgtgaacttctgcatcgggtaccggaaccaggtcagttgccggcgcgcggacgtcggcaccgcccgcggacccgggcccg

SEQ ID NO: 377060 - DNA, 508 bp, Zea mays subsp. mexicana
acttctctctgctttttctatatctgaacgcgagggaggtttccagaacaacattacaatatcactttgagaactatcttgaagatttagttgtataatgctttggcttggaaattgggtactacaaaactaatttttgcagaggatctaatcagaactttcatgaaactagaaagggataagttggatatttccttttcttccaatgccattccttactctatttcaacctcctatgtttcaagcataagtgagataaaatttacatttcccctatttcaggactggtttaatattttcaactctatttactagtggaatggggttttctaagcgctttatctcctaactacttatgcttggtggctcttcggtttctcgttggagtagagtggggttggcagccatgtgtttaatttttggtttttggaggtttgttcctgcacaaaattgtggtacttggatggttattttctccttttttggactcttggcacgatcttggaag

SEQ ID NO: 377061 - DNA, 478 bp, Zea mays subsp. mexicana
  unsure (1)..(478): unsure at all n locations
gggttgacccacgcganattaactcgcaggcgaaaaagacangaacagggtttattttttatgctcatccaggatggttttgagttgcataggtaagatttcttttatgagggctttttaccaacataaccaataagggcacataacctggatcatttttctttttacatatttgatctgtcttctccgtgctggttaagcacaacaattggatatcaatctcaaaactacaagcactatagtcgttagttaaagtaaaattttgtcagtgggaatatattattatgaaacaacaacttcaatttggtatatatttaactgaaacagtaagtgtgtttaactctaataaaccaacttgggtcctgatatgtatatggatgcgtggcgttttttgaactgatatcatcatcttggcagttttcttcaggggtttcttggttcgtttgggttctatttgacatgaagaataaacttgttt

SEQ ID NO: 377062 - DNA, 475 bp, Zea mays subsp. mexicana
  unsure (1)..(475): unsure at all n locations
ataaacgtcagatcttgaccgaaaaaaagagtgagattgtagtcatcaggcgtcaggtgccttggattttgatcggttgagactgtgatcgtgaggtgttagatttcagttgagcacgtttcgttcacttttcttggtgatctacttaacctgctcagttgagactgtttttccccctcgcatatggtgtcctggtcatcttttacatcaataggccggtggcaatttcggttgccgaaatggacgttgagtatgagttttcaattgtagattatccactgctgcgttgagcatctngggtgggttttgcaccttttgatgtagcaggagggttttgtttcaattctgtacttatgggagagnaggtttttggtttcaaatttgcagtatgagcaagcgacaatgtacttattctgtacaattttagacggtgtgttatttctgtaaactgagacccctaaagattgtttataat

SEQ ID NO: 377063 - DNA, 415 bp, Zea mays subsp. mexicana
  unsure (1)..(415): unsure at all n locations
atacgcctattattcggnttcggtctccacgccgccacttgtcaagacggtctctccgccacttcatgcggagaagctctcccgaccctcgctggtccagtcgcaccctcggcaacccctcaggaacggccctggtccaggtaccgccgcagcccgtcaagtctctctcaacgccgctgcaggcaccaaacctctcttccggctccttgccatcggttcaggtgccgccgttgcagttcgcgaaggtgtcggcagggtcggacggatcgctgctagcgttcttctggaccgcggttgcacacgtgcaaaaaggtgaggtgggaagagaatccttgttcaacgctctgatttattttattnaatgggttgtgactttgaattttgatctgtgagcaaaatattttcctggtttagc

SEQ ID NO: 377064 - DNA, 485 bp, Zea mays subsp. mexicana
  unsure (1)..(485): unsure at all n locations
aatacttgcccttttccagagcaccccctccagttttccttcgacggccatgggtcaagccccgggcaatctccaagataggcttcaaggtacccgcccctcaactcaatcgtgtggattcccatcttattcgcagcgatcgtccccagtctcgcgaacagtcgaatcgctagagatgaaggacgaatcgattcggtgcagggcggcggtggaaggagcaccaggtgaggaagatcaccgacaaggtgttcgaccgcctcacggaggacgcccagaagcgcgacaaggaggccctcagattcgaggaggtctacatcgccgtcctctgcgtctacaagtacagaagcgaagcgggccgtatgctacctcgtaacactctgcagttttcatctgtttctgactgattgttgccgttcttgtcggtggcagtgacatcaacaagtacttgccggngccgcaccacgaccccccgtccaaggagaagc

SEQ ID NO: 377065 - DNA, 487 bp, Zea mays subsp. mexicana
gtaccgcccggaatgaatggctggaccgacccagcgcgtccggtgactttggcgccacctgcttagactagggctcatgcgggagcaaaaatgtggcgctgtcgatggccagctcgacgcacataatttggccacccaacataattggcggagttgacaggaaaatgcccgaaggaaggatagtgccactgtgacctgataggctggtcatcctgcattccttttctaatgactggtgaggatagcaatatgaaactggactggctgaagcctcaagatggactccactgttacgtgtgggagggcagagaaactgatgataactttgtatctgattatcattcttcctgtcagaaacaattgtaggattgcttgagaaaagaaccaattataggcaatgtctggtgagaacctttgctgttagcagttttcgaatcctttatgctattgagatgtatgatgcaacactggaattttccattcaatc

SEQ ID NO: 377066 - DNA, 273 bp, Zea mays subsp. mexicana
gccatgttatttgttgtatggcgtatgaatccgagagtatttgttgaaaaacagagatgaacgcctgcctagctcaactagcttgtagttcatgaggcgtttgatgcaaacccaactcaaagtacgaagttttcctatcgtctttagctttcttgtatttttattttttggttgggtatgctagtgaactctagtgacttcgtatgctaacgatgtgtaacacccactttgtaatttgctagaaagaataccaaaagagaaacaatttctcct

SEQ ID NO: 377067 - DNA, 516 bp, Zea mays subsp. mexicana
aaacatgttattggtaagaaagtcaggtatgcagcaaaatgtcactactgcaaatcacagttaactgctaagggtggtacaggtcatttgcatcgacatcgtattgcttgtgcatctaaagctgagcgtgcaagtaggccacaatctttacttcagtttaatggtgatggttctgtgcgttcatgggattataatgctgctactgctcgtactgaaatgtgccgtttgattgctactttagatcttcctttgggttttggtggtcatcctgcttttgagcgctacattagacgctctcataatcctaggttccgttctgtgtgtagacagacaacgactagagatcttgttaagtgtttcaagcaccgtcgtaccgcgttgattgatctattgcaatctagtgtgacatctgttgcacttcacatctgatatatggtctggtaatgcgaatgaagattatattagtgtttgtgcccattttttaatgttgattggttgttagagaaaagggtcatt

SEQ ID NO: 377068 - DNA, 366 bp, Zea mays subsp. mexicana
gttactggatctcatgtagaagccattccatccttaggcaaatccgaaggggttgttgcacttctggctgctcttgtagcaattagttagctgaaaaggtctgcttttctgccaaaaagacctttggacgatattatgtatacatcataggagcctacactatacgtaattagctcgttagtgaagccgcttacatggcagggattgaagaacctgtcttatccctccgaaaaggaaaatgacaatcataatgcgtcatcttttggatgctcgcagaatttgctggctataatcttgaatctataggacccttaatagcgtatttttaaagacagacaaagacccatgcttttatagaacttgcac

SEQ ID NO: 377069 - DNA, 480 bp, Zea mays subsp. mexicana
tgataccggctagaaggcctccgccaatgggccagcggtacgacccagagccatgctggaggcagtcccggccgtcgtaggaactgagcaccgggcagacaaaggagcagttcgttgcggagatgcttgccagaccctcgagcgtggagtcgggccccgggagaccgcaagcgaggcctaggcagcagcaccaggacaccccagcagctcaagccaggccgcagccggctgcgtccgaggtgagcgtattgtgcctccgacgataaaaaccgtacgtgctgatccgaatctgatcgccgagaagtctggttgtctgagtttcgctcgatctgtctgagaaaccggcggcttaactcgacgcgaactttgtgcgagcgaagcttgagctcgcgaagaacgccaagctcgaggcgaccaaaaagaagcttcaggaaggggaccaagaatccgataacggatgcgtgctgctgctgctgctat

SEQ ID NO: 377070 - DNA, 155 bp, Zea mays subsp. mexicana
ttcataaacatgaatggtgatttggatgaaagggggacctgtgatgacaatttcattgtgtctgacacattgttggtaaaaaaatgtaaattgcttcagcccatgagctgcaagattgattgaattgagttaagaaaaaaacttgtgttgcgatc

SEQ ID NO: 377071 - DNA, 278 bp, Zea mays subsp. mexicana
caatcgggcaagcacacgttggagccgtgtggacgtatcatcggacgcagtgccaggcaccaactgtggacggcggacgcaacgaatgcatcatcattaataacagtagcaggggctggtgcttcaccgggatgtgtcgatcaacaaggtcaaggcgtgccattaaaagctgatgtacttaaaagaggagtactaacgcgcctgctccgacatgcttttgctcgtctgtagcgtcagcgctccctggattggatggtgataaaaatacttttggttac

SEQ ID NO: 377072 - DNA, 383 bp, Zea mays subsp. mexicana
gtactcgtgggctcgcacccattgacggggggggtccttgcatcactgctctttgtagagtctataggcgcgataggagttggaggacttcttgttgggcgttccaggggcttcttgcttttggaggttccagcactgccagttgaaggaaatgacacaacaatctggggaagcggggaatcgttgatgttcctctcagctcaaagcatggcagtcggaactatcatggaccgctgggtgtcaaagtactctgatccaattatggcaacaggatgggtatattatccatagaggaataagcattcatgttatgtcttagcttgcgtcatatgcaccaaagcgctgatgtgctatcgggtatattgattcaaacttagcctttc

SEQ ID NO: 377073 - DNA, 396 bp, Zea mays subsp. mexicana
ttgtaaaatgccatttgctaatgtccaaccgtgggatgataccaaattaagcgttgttcctcagttctttagacatcctgttcaggtagttagagagaacttcggttcaaaacaaggggctggtaatatttccccagttggtgcagccagatttcgcaagatcacaagggcaaccacagtggcaggggctgtttccccacatgcaacagaagccaggcaaggatgtactccgcccggacttgaacatcgggttcccatctccaggttcaccaccagctcgacaatcgtccggcatcaatttggaagcacagcaaccagacctcgctctgcagttatgatctgggaatagacaatgaaaactttataccgccaggccatgatttatgctataatctt

SEQ ID NO: 377074 - DNA, 199 bp, Zea mays subsp. mexicana
tttgtatatcacgctgatctgccttcagcctgcggggttttttgaaaacgcgctgttgtacgacaacagcacctaccgcaacccatgggatgcaggctagcaagcacaagcaccaaccattatgttgaagagtatcatagctaataacctttacggcctaattggagtcatcggtcacgatgactgggaatcccttgtg

SEQ ID NO: 377075 - DNA, 542 bp, Zea mays subsp. mexicana
tcgttaagcccagcgggaacggcatggggatcaggggtggcggcacgacgacggccatcagagctctaagggtcgcagtgatagggacgggggcaaaatggactactcgcggctcataaaaggatatgataaaatgactccagctgagagagttaaagcaaagatgaagtttcagctttcagagacagctgcaaaagattccactcttggaactgcaactgtggggtgggaaagatttcaatttaataaggatgctccacttgatgaagataatgacgatgttgaagttgctaatgatgatgcttcactggtgaagaatattggaaagagcttccggctttctgctgtggagtcaaagcgcgaagataaaatcagagatgcgcatgatgaggctatattttggtgtacctacaacttcatttgttgatgttgaaattggtggggaccgagcctaaaaccaatcatgaagacgggatagttgaaaacacagaatctgatgacctagcagctccttatcagcgataagttctggccatgcaaaa

SEQ ID NO: 377076 - DNA, 461 bp, Zea mays subsp. mexicana
tcttccgatcctgcgggtctctactctgcactgggggattcgattcaaccgacccagtaggcgggaaatggcgaacggtggggccgaggcatcgccggtgcgggccccggcggcgcgccggctccagggacccgttcctcatcgtgtgccgcttattcggcgttgtcacggccgccgccgagctgctctgcgtcgacgtcaacgttctctccgcggtctactccttccgcggcggagctgacatcatcggcggagtgttccggtgctacgcggcggtgttcttcgtcttcgatgccgttctcgagaccgagtgggcacccgacatcaggctctggaagatatttgagtacttggcggcaaggggaatgctgcagatcttttgtgctatcatgaccaaggcgtacccaaatgttgagaggagcgagctgatcttgatcaggagatcgctgcctacatgcttc

SEQ ID NO: 377077 - DNA, 384 bp, Zea mays subsp. mexicana
tcatcaagcctttttcgagacaatagtggtgctgatgcttatggacgccaacagcattaatacattttggataataaatcaactaataaacataaaaatcagtatgtaacaccagaaaaggcttcggcaccctcagcaacactcgagtcagatccattacctctcgtatggggaaaacaacgagatcacccgttaagtgtcgaagagtggacatctttcttagatcgtgaaggtaggattatggatttaaaggtaatgaggaaaatggttttatatggggacgcccccccccccccccccccccccccccggtaaatatagtcccatgggatagtatttgtgtttattttatgtttggtcggtccccccccccccccccccctt

SEQ ID NO: 377078 - DNA, 488 bp, Zea mays subsp. mexicana
tcgtccacgcgtccggtgttcttctacatcacaggacaaccaataataatcctcctgtaacatttgcaattgcggcatgtgaaaatcaaaatgtaaatgtcacagttttgcctgtttttgggctttctggagaaagttctgttactgctaggggaatgtggggcacaatggttcaggtgattttacttttttcctttctttgtttttccctgcatgtaattccgtgttttagatgagattattgtatgcatagaaggcaaatcttctgtggaactgttttgaaataaccaaatgtttgccattttgatgactgagggtgcatatcataccatctgaatgtttaattgtttaaaggatggttcctttgatcgagataatctcaatactggtcctagcatgccttctttgctgggggatacaatttgtgcagcagtttctgcttccaccttggttgaaccacatgaagatgtgcagttgtatttgcattg

SEQ ID NO: 377079 - DNA, 185 bp, Zea mays subsp. mexicana
gctacttggcaaagacatttgggcacggagaaaggggttgtgtgtagccgtatcggagaaggatcgtatccgaataataacatcatcctatatttaactctgtttcctcagataatcccgataatccccgtgtacagatcaacacccctgagcatattcttaattggtcagagggaggatgcttt

SEQ ID NO: 377080 - DNA, 453 bp, Zea mays subsp. mexicana
cacgagtcctttatttcattagatgttcatatcggcgtgaaaacagctctctatgagacccgtggggctgcacggtccttcctggagactgtagacctcatggtggttaatacacttctgtccgcgtgatacgagagttggctccaacaccgtcctgtgtttctacagaggggcatctaccatgcctacatgcaacataagcacgggcggccgaccctcaagctgtcatcagactcgtcatcatcagcagttcggtcagacgaacgttcatcctctgatacaagtgacaacaagaagctcttcgccatagtccatcctatgctggtgtacaccggcttgattgagcagctacaacagttcttcaagaagggcaaatcgtgcagcttgatcaagacggacgagaaagatgaatcctctgccagcctccagcaatgggagatccagatgaaagag

SEQ ID NO: 377081 - DNA, 461 bp, Zea mays subsp. mexicana
ttttaatggacacggtgacctcgctaaagaactgtacaaacgcagccaagcccctgtgcaggaatggaacgaagcgcagttgagtgaatacattttctttgagttacctttgctcaaaccatcacgacgattggatttgatgcaccgatttttcgtgtaccgtgttgatggtgcgcagttaccgcaagtgtcaaatgagatcttagcaggaatgggcatcaatgatccccaatacagagaattattgttgaaaatcttcgaaaagcttctcaaagaaggcccagatgtcttcacaccacccgtcaccaccactcaagctcaaccaacctcagtcacggagcaacccacccagcaacagcagcagcaagcgccacaacaacctgacttggcaaaggatgttcccactcttcgtgacagagtgcaacccgagctttgaatgacaaaataaaattcctgaacac

SEQ ID NO: 377082 - DNA, 411 bp, Zea mays subsp. mexicana
tccgttctcaccgtggaacgcctcaacctcggactcatcggggacgaggagccggtgatggagagggtcgagtccgggagagccctccgcgagaaggtgttcgagcggctcagcaaagaagccgccgttcccagcgacaccgccgcatccgccaacgttgagggagcggcccccgccccggatgttggatgggtctccgacctcatcaactgagggaactcgtggaactaccagctcagaagttcagggggggaataacaaaaaaaagtaggaagatttttaattttttagtttttttacaaatattttcctggtccttgtacagatgttcctgctttgtgaatagtcttggatggctgtcgaagggaggggagacagggaatggctgatttgtatgaggcttcagatgat

SEQ ID NO: 377083 - DNA, 279 bp, Zea mays subsp. mexicana
tctttggagaacaatggaagcactgaagatatggggacctagacctttgcctgtggcggtggttcacacaattgcaaatctacttcttaagctagacaaagctcaacgccttgctgcgaatattagggaaggcaaggagggtgatggtggcgacctcaagctcttgccaattgagcatggatcttgattgcacagacacatttggagacgtgacattcgcatgtcgctactgtgcccaatcccgggagccccataacgatgaaaccaactgcatacatc

SEQ ID NO: 377084 - DNA, 293 bp, Zea mays subsp. mexicana
tcgtagcccacagagctacgcagccagataggggggaaggttaaaccgaaacgggggttgcacaaacaaatcgaggagacgagtgcatcagaaggggagggaaggggagctgtacgacagcaaccacccggacaaggaaggacttagccaactcatgggaccgggcagcccacgcactcactgaggggggaaggtccgcaactcatgccaaaagaaggagcatgtgggactaccagacgggtacttgaggagcggtatgaccgaggctacgccagaagaaatgagagaatcga

SEQ ID NO: 377085 - DNA, 455 bp, Zea mays subsp. mexicana
tcgtatattgtaatgctgcttatgatatacactagagatgcttaattcggtaggatatctctcatttttgtaataatggtagatttatttttgtaatatctgcgcccgtcccaccgcaagggggtaagccaacttccagctttttttagggtcatcatgttgatatcgcggctgttagtacttgttggattaggtgttagttttgaccatagccaagcttttgattcatcataatctgatcccattaccaatttctcttcctatgtgtacatgttcacccttcaaccaatgctcctggaaatggtctaaacttccattttggacatttgtagcggttgggcaatatatgtagttatcacaggaattctccctgcaagatgatttccatgatataccatcatccatgtcaccggattcagtgaagcagggacattttgatccttctatcttcacct

SEQ ID NO: 377086 - DNA, 446 bp, Zea mays subsp. mexicana
ttctcgcgtccgctcatgtgaatgcagctatgtagattggtttcaaagctttatattcctattttccatgcatgttgtcaccttgtaaaatatgtgacctgagaaaggccatattatcatgtagtaaatacatcgttcctattaatacaaatccgagtcccagtagaaactccatttcagattgtcgcaatgttgtagcatacatattgactagtcaggccattggatttttgcgtgagctccttgagtgccacatcttgaacagttccatgtactagttgcttctactttcaaaatcttaaattgtgcatccaccttgccaagcaacagagctaaagtaaatggcagagcatctcccgttagtggtagaaaaatcataacacattgcaacatacacctcgatcacttaccataattccttgatgttccaacctatttgtacgtgt

SEQ ID NO: 377087 - DNA, 272 bp, Zea mays subsp. mexicana
tgaggagagctaccttgacaaaggcggatttatatggtgtgtcggtggaaacaccagatactcactttgaggacgccgcgagggagatcacgctattggacacacgcttggctgaacaagccttgcagcaaggatccggctgacacaaccaaggattaccgtggcggttatggggaaagatgaagaggaaccacaggaaccagcagtaacacatgtgcagagcgaccacgtccagactgctgaatccagcatgttcaaatgctgatacggct

SEQ ID NO: 377088 - DNA, 259 bp, Zea mays subsp. mexicana
tggtttcgtgggcggacgcgtgggctgccagttggggttcttttgctgccgctcctggtacctaagcacaggaatgcgattcagggcttagttctctcacctatgggataatggacttttcctgttttgaaaaccaatgtactgtacccccttcatgttaaatttttagtacaatttgtggttcgttcttactcctgtcatccagtcagtgctgtgaaatcgttgtctgacttaattaatgttgctatgctaagttacg

SEQ ID NO: 377089 - DNA, 315 bp, Zea mays subsp. mexicana
tgtccttgaagaaatcgatatctgacttgctcgattaggttattgagtagtgtgagatccatcatgtttccgtgcaacgcatgtgctgcctttttttttgcattctgctaaagaatacggcgggataataatgtgtcctagtcttgtaatgaactactagtgtctttgcatttggactggttcgcttgtgagtcatagagattgctgaactcgtgagtcatggaaaaataaaaaaggaaaaaatagactggactaaagggtgaacccagtgatgacttacttcttccccaatttatttacaagatgacatggggc

SEQ ID NO: 377090 - DNA, 277 bp, Zea mays subsp. mexicana
cggcaccgacccgtacttacttcctcgacccacccacgcgtttgttttctactcgttgagcacctaccaaggcctggtttcattcaattctggcggcatcaacaccaggaaaaacaagcctagctttcattgggatgtacacacaaaatgcaaaatatcctctgcaacacgcacgctgcatactccactgaagggaaataatagtcaatatgattggcaggagctcaatactattacaactgtatagttcatggcctccagtgctgctattcacttg

SEQ ID NO: 377091 - DNA, 165 bp, Zea mays subsp. mexicana
taataattctggcaacatgatccacagccgaccgggcagttgttagattggcagcaacatgtacagaagcagcggtcggacaagactcttcatgatgaagatcatgcagcggctagacaggaaacagtctgctgtgtaccataacatacaaggagagcaacaata

SEQ ID NO: 377092 - DNA, 337 bp, Zea mays subsp. mexicana
gccagtcgctgtcctccgagtgaccgggccgctgcatcgagcgctcgtcggaccgagcaggcaagcagctgcgtgttttgcgacgtcccaagtaggcgagcagacagggtcattagaggcgtgcgcgcgactttcggcagagcacctgcatctgtaccacaccgatccgagggtgccatccatggcgactcgagccggacgaccgaccacatgggtacctgctcttctgctcctactggtcttaccgtttctgctgcgaggagttcttatgtcgcgagccgtggacaccgaatgcaggagtctgccgttgtccggcacgcagagccttttgtccaag

SEQ ID NO: 377093 - DNA, 444 bp, Zea mays subsp. mexicana
gctgatctttgagaaaaccctgaccggcaggactatcaccctcgaggtggagtcttatgacaccattgacaacgttaaggccaagatccaggacacggagggcatccccccagaccagcagcggctcatcttcggtggcaaacagcttgaggacggtcgcacgcttgctgactacaacatccagaaggagagcaccctccaccttgtgctccgactcaggggaggcatgcagatctttgtgaaaaccctgaccggcaagactatcaccctcgaggtggagtcctctgacaccattgacaacgtgaaggccaagatccaggacaaggagggcatccctccagaccagcagtggcttatctttgctgggaagcagcttgaggacgggcgcacgcttgccgactacaacatccagaaggagagcaccctccacttggtgctgcgcct

SEQ ID NO: 377094 - DNA, 442 bp, Zea mays subsp. mexicana
tcttggaacagcaaaacctctggggagaaaaagaaagtgcaagagaagtcagcaggaaaaacaacagagaaagctccagagaaaattgcagacaaggaatcagagtgcgatatcagtatcctgaatatacaggttggccttatccgtaaagcatggaagcatccatctgctgacaggtgctgtattttcactcttctgcaacacttagaatttctctgtattttcactcttctgcaacacttagaatttctctcagtgcttatgttatagtattcaacctaacgttctgattgatgaccgaccagccttttagttgaggagatagatttgggagatggtaatgtgcgtcaagttgttagtggccttgcatagtattgcagcccagatgatcttactgtgagtagttagctgcaagaaggaactcacattgtttttgaccatt

SEQ ID NO: 377095 - DNA, 346 bp, Zea mays subsp. mexicana
ctttgtgttggtcgaatgcggcacagaccctgtcagttcttattacaaagggaatgtgggctcaaccacacacactcatcatcatatcatatgaaatgaacgatacagcctaggttcaggacattgtaccaaatagctacttgcaataaaaacggcgggtgtggatcttagcgctagctggcatggagccgatccagactgctgagagatccaataacgtaggccctcaccctgagcaagcgacagcatgctctgtacctacactgggctgcccactgtctcagagccaccaactgaggatgccaggacaccacccaattccacacccatacgatgctactctaac

SEQ ID NO: 377096 - DNA, 272 bp, Zea mays subsp. mexicana
gctaattatagcccacttattccgggaaaaagagtgttttctggtccagttgccgtttccgaatctcgagccgacacggctatgggtcttagaccggatcggtggaagaaggagacatcagcataaaggtccgcctccgacttgtttacccatggggctacagggtcctatctcgaggaagtagacgtggccctggccggcggaactagccagaggggcctcctacgatgcccacgcgctccctctgaggacgtccacgtgcatccgagctg

SEQ ID NO: 377097 - DNA, 226 bp, Zea mays subsp. mexicana
tcgtttcatggtcaccgtcaggttgaagggtttagtcttattgacggagcacacgacttcctccctcaacgacagcatcagggacgacccgcgcctcgccaagctaccgataagcagtagcaggcgcaactactccattgacggacacacgttgatcttgctggtggaccacggatctaggcatctagggcatgaggctgacactgactctcggaggggtccctac

SEQ ID NO: 377098 - DNA, 441 bp, Zea mays subsp. mexicana
tgttttttacagggttcgcccccgagcgccgcaccatgctaattcatgcaggtagcaggccggcgaatagcaattccttggtttttcttctaactgtctttgatttgttcatggtactgaactcacaccagatgtctcccaatcttttgattatgacactctgagagcactggatgctgacaatagcctgcatgctccttctatgagtgaagaagaaataaattctcttcctgtcttcaaatataaagtccaggcacagcagggaaatgcccctgcccgataaagtgatgaggcattgcagctatcggtttcttcaactggctccggcaatgagaaacagcaggacggtttaaaagcacatggaactggcaaaactccacaggatgcactaacattgagtgtttgcttatagcaagccatggtgggtgatctgttgagaag

SEQ ID NO: 377099 - DNA, 330 bp, Zea mays subsp. mexicana
tggtaattaggcgtagggcacgccgacgactagttgtgttttttgtgcatgccgcggctggaacgacaaggcctaaaaattagagactgctgccgctgacaacttgcatgcgccacgtaaataagaccgatacaccagaggcaatgcaaagtataatgccacaggtgctggagacgaggaacaacccacactagatataccgcatgactatcgatgaagcaagcaatgatgctagaaccatgcaatcgagaccttaatcaccggcccaaagccatcttacagaagatcatttaaccagagcccaaacctacaccagaaccatagaagcca

SEQ ID NO: 377100 - DNA, 434 bp, Zea mays subsp. mexicana
gctggctcacgcgtccggtgagcctagggcgtggggacatgttgactaggtcttcggttagcacggagggaccacggtcctacttacaaggtaactgctgtctgatgcagagtataacaagcatagccatcggggggtacatcaatattgaagtctgaatgggagaatactgctggacaagagtggtgtgctgactcgacccgctttactacgggaagaactgttcgatgcagtagatgactatgatatagcactgacctaaattatcagccctctacatatttagtggaaggagacttgcactcattggaagtactggtcatgtattggctctaggcagactataagtgctgctccacatgataatcgaagtgtatcctcgcaggatgcgcacgactacgcaaagaagaacattatgtttttcagtgagacgt

SEQ ID NO: 377101 - DNA, 346 bp, Zea mays subsp. mexicana
ttgttaagcgccagcgacgcggggcaccggagtggatataaatccgccgggcatgggcgccctcctacccgctgtagtccaccctgttaggatgccggcagtgcttgagcgcctggtgtgtcaacgcccacgcggctgcgagacgaccagggaggaggggagcagaggacggagacaaccgggagccgcagctgcctgctcgacgggcctggaggagcgatcacttctactgtctaccgacgacagttgcgaactccaactggagctgggtccccagagactgggggcggaggcagcagcagctcgatgcggaacatgaggaggacgactggctgcttggaaagcg

SEQ ID NO: 377102 - DNA, 449 bp, Zea mays subsp. mexicana
ttttctcaaacctacaccacagccagacccaaaacctggacccaaacctacaccacaaccacagccagacccaaaacccacaccacaaccaggcccagagccgaaacccaagccagcaccacagcctgaaccaaaacccacgccgcaaccagatccgaaacccgagccaaaaccaacaccacaaccacccttcccacatcccgagcctcaaccagatcccaaaccccaacctgaaccatccaaaccagaccctaaactccaacccgaaccatccaagccagacccccagccagagcccaaacctacaccagagccattgaagccgaagccatcgtcgtctcttccaccaccatttggcacggtcgtcgtggaagggaactgagaggagcatagtggaaccgatcatcatcgtgcatgccatctatagctttttggctatgattgataag

SEQ ID NO: 377103 - DNA, 335 bp, Zea mays subsp. mexicana
ttcgtaaggaggagtgcagagaacaggacattgaattaccagaggtacttgttggaagctcagactcttaagataatggcatggagagagcgcacacgatggaaagagagatggaagaagacaagacagtggggcacgaccaagcctgattactgaggagatgtaactggagctgtgctgcctcacacaaggatggtgatgatttctggagtcgaagaggcatacctggactgaggatatcaggacttgtgacttcttgaccggtttaagctagtacaacagttatctgaaccagggccgaaaggaccaccgctgtccctcaaaagccttagaac

SEQ ID NO: 377104 - DNA, 405 bp, Zea mays subsp. mexicana
ttctccaccacttcttcaaccaccacaagaaggacgaggagcagcccgccggcgagtacgggtactccgagaccgaggtggtcaccgccaccggcgagggcgagtacgagaggtacaagaaggaggagaaggagcacaagcacaagcagcacctcggcgaggccggcgccatcgccgccggcgccttcgcactctacgagaagcacgaggcgaagaaggaccccgagcacgcgcacaggcacaagatcacggaggaggtcgctgccgctgcggccgtcggcgccggcggctacgtattccacgagcaccacgagaagaagaaggaccactaggacgcctaggaggccagcggcgagaagaagcaccaccagctctttcgctgaccgtagaacccgccggctcgcg

SEQ ID NO: 377105 - DNA, 356 bp, Zea mays subsp. mexicana
agccgcggcgttattgccgggacccacgcgtccttcgttcactcgtccgagcacgcgtgcaaggcttgctgtgcgttaaggacggctgatgcggagtgcacaagtacgcttttcacagagaggtgatggtccgactactttgactggaagactctctggcctcaaggcaggtcttcatggacttcatgggcacgctcttggagacgacacgcgcggttgcatggcgcattggccacacttaagttctgatgggaaggatcatgtccaaccctgagattggacccgcactggctgatgacattggcaatgtcacagctggagcagatggagtagtgactgagacccatactgagaga

SEQ ID NO: 377106 - DNA, 299 bp, Zea mays subsp. mexicana
tcgttcacgcgggctctacatggcccatggggggctgatggtgaaggacaggctgatcgggaagatcaaggacgaacccagctagccaatcatcgggttctacaacagacggtgacactcccagggtgtcatgtggatccttagtggcggcatgagcaagctaggaaggaggacgctacatgtatcgaaccagactgagtgcaagggcagaggttgcagtggcagccgcagaataagcctacttgggttggcccttgctgcacacgattgcatggtgacacagaccacacggaggatca

SEQ ID NO: 377107 - DNA, 410 bp, Zea mays subsp. mexicana
ttgttcactgcaagaatacatgacagatgttcttcccaggcttttgaccatgctaacagtgaattaaaaggatgcaacatgttatccaatactattctttcacaacagagttccaatcctcaggtgcatcatgaggatcctcaggtgtgtcatgagcaagagaggaaggaggttgccacctcttcagaacctggctgtgagcaaggtcagaggatgcagtggcagtcgcaaaataagccaatgatggaaggacctcatgacaatggattatgtggtgacacaaaccagttggaggaacaaaaaagtggctttggaattagcgactgctggaggtatgttttggatggacaaatgcacttgcctgatgtacaggagggtgctggaattgggacatgcatccgtgatgctct

SEQ ID NO: 377108 - DNA, 91 bp, Zea mays subsp. mexicana
  unsure (1)..(91): unsure at all n locations
tgnataagcctacccaactcacatgacggggggattttttcaaatgaaaggtttgtaagccaccatacgagacctatagttggattctaaa

SEQ ID NO: 377109 - DNA, 256 bp, Zea mays subsp. mexicana
aaacccaaccatggccgcggtcgtgtggtatttctcgaccgttgcggctatcaatggagaaacagctgatgagccaaatgctgaactggtgatatcatatgagaccggcaacttttagtattgtaagactggaacttgagttctccaaaagcaatgaactacatatggtgcatgtcttacgagtttcagcacttatgttaagagtggtgtttccgcccatgaatcagataccttaaaacaaggctttaatatcaaa

SEQ ID NO: 377110 - DNA, 449 bp, Zea mays subsp. mexicana
taagaaggtatcaatggcatatttgataactgaaaatattctccacctgcagtaaaatagtaaaggaaggccctgaatgcccaaaattggccacagtatttcacctcaggtctacccactctgttatagtactatccacactcaatagcccatcttaccaactttgactggtttagttgtccctcctgttagcttaacaattctgttgagtgttgactcctcccatgaattagtcacctaaaaaaaggtagttaacaggtgaataagtgggttgaagaggataataattacctcaattatatttctgctttcataacttagtttactactttgtatcaggtcaactttcagcctctgtatacaacgcaattgaccaagagcgaggatgagtagaagaggatgatcctgggagcacgaggacgaagccgctgccaaaacagaaggcactg

SEQ ID NO: 377111 - DNA, 340 bp, Zea mays subsp. mexicana
gtattacaacgttctcttcctcgcgcccactggtaccgtcgtgctgctcggcctgcatgcgcagctctgcgagctgctgcggaaggacgctggcgtcgaggtccccgacgcgttccggcccgaccactggctaccgcggtgcgccgccgccgtcgacgtgccccgcggccgcatggcggaggccttctgcgtgctccgagagctcaagctgcttcccgtctccgggtaccggatggacattgcgcttcgcgaggtcggggccaccgatagggagctcgcggcctacccgctcggcggtggcagcagcgcttgagcggactgagaggacccgctgaatttt

SEQ ID NO: 377112 - DNA, 272 bp, Zea mays subsp. mexicana
gccgcggcggacccggtgggacccacgcggccgttgtcttctgccacaaccccgctcccggaggggtgggtttatatcgatcgacggagctgaggcgccggcagctgctgcaaagacgtccggtgaggcaatcccagcccaggacgaccagagagaacaagactgacaccgagatgcaaccattgtgcaggtcagatctgaagaacggtagggggcattacgtgacacgaggaaagctctcaaggaccaggaccctgcatgcacaaaaggaa

SEQ ID NO: 377113 - DNA, 143 bp, Zea mays subsp. mexicana
agccgcgccagaactgcttggacgaaccccgcgtgtgttatggaaggacacgcccggcggcaccggggggtgattattgaaacgggcgcggatggcaggcccaccccagggcccagactgactctggtcgggatcaggcacgg

SEQ ID NO: 377114 - DNA, 321 bp, Zea mays subsp. mexicana
  unsure (1)..(321): unsure at all n locations
ctgnctgattcatcgccaccaatggccacgtgccggggggcttatctcccgaccgtggcggcggtcgaggaagcccccctggtggagaccccgcctccggccgtcgagcccgaggagactgcccccgtcgaggccgaggccaaggctgctgctcctgctgatcccgaggagcttcccgcggccgaacagcatgcagacgccgaggcggaggccgctgctcctgctggcgccgaggagcccgaggcggccgaaccggccgctgtggcggagggtgctgctcctgctgggacccaggagacccctgcggtcgagcaggaggca

SEQ ID NO: 377115 - DNA, 406 bp, Zea mays subsp. mexicana
gttttgtgctttagggcttgttcggttattcctatcccatatggattggatgggattggaaaaaattatgaaagattttgacttgtttaggattgaaacccacccaatccacatagattgagagcaaaacgaacatgtccttagttggaaccaaactgaaatcagctcacgacattctgatacctgagttatatttcagctacagtttgatcaccatctatgccttagctattcatgccagagatgaccactcctgtattttttttttttttgttcctgcgtgccaaaacacttcagcgcctgcatgttttccacacaggaattcactgaatacacaaatctggacgagtgcatttcatatctatgtgattacatggtgaaaaatgggccttttgatggcctgctc

SEQ ID NO: 377116 - DNA, 329 bp, Zea mays subsp. mexicana
acgcgcgcgctcttgcgtttctggcgtggcgtctctgagtgggtgtcttcaaccccggcaccggcaggcggcggcgtgatggcggactgggaggggatcccgccaagaaagcggcggcagatggaggagatcctgcagctcgacataaaggagctcaacgtggaggtcgtcgacgacaaccaagaagacgaggaggaagaggcggaagactataccgaagaggaccacgaacgtcatgccttgctcagagaattcatcgaagatggaggagacagcacatcttgaccactaacactcaaccagcctgtagctgaagtacacacatacct

SEQ ID NO: 377117 - DNA, 366 bp, Zea mays subsp. mexicana
cttctagtgagcaccaccaccctcaggaggtggaggtggtcacctcaggcgtcctgatgctcatcctccccaagggcttctaattcgtcttggacaacaaggcctacctgtactccatcaccctactcaacatgctcacatcggccggccgcttcttctagacgcgccatgaccaggttcgctttccgtagatccacacccatatgctcgagacgacctgccagtactagtattggccgatccattattccagtggcaagcagacaccatagcttctgatcgaacccaataccaccctggagctgatgatggctcgaaactacacgtacacttgatgaggagcctgtaggatctaaccgctatgac

SEQ ID NO: 377118 - DNA, 235 bp, Zea mays subsp. mexicana
ttttctaaaaaaagaaaaaagaaaaaaaaaaaggggggcttctaaaaaaagaggggagcggagaacacaaaaagtaaaacaccatatgaaaaggcccgggggggttgcaccggctgctcttccccgggcacttgtccgagccggaatgtcccggtgggcgccccgctcatggccacgggctgcggtctttccgcatggcttgcggccgggggacccgtttctggctcctgtggga

SEQ ID NO: 377119 - DNA, 284 bp, Zea mays subsp. mexicana
ttttcaggcacactatcgaaatgccaagtgcgggtggcaatggaaacatagagttcgaggaagaagaacatcatgatccacaattgggaacatgaggagagacgagaaaggcagatgaaggcttcaaggatgcgagctgcccacattccagtaaacagtactgacagggtttcaggaggacatcaccagatactaggagctataggtcacggagacctgtgctataccacgcgctgatccatacctgaaggtcttaaacgataccaatacagtgatgtggtaca

SEQ ID NO: 377120 - DNA, 274 bp, Zea mays subsp. mexicana
tcctggccgagcccccttgtctcaggccaggggggttctactagcaaccaccaggtccgtaggatggcaccgacttttatggagcgagcactcgagcaggctatgcttgggctggataacctcgaggtccctgttgggagtgtgcttgtggaggacggcaaggtgcttccctctgggagctacaagacgtgtgccactggtaatgctacaagacatgctcagagggaagccattggcttccaagtccaggagaagctgggcttggctcttagtc

SEQ ID NO: 377121 - DNA, 448 bp, Zea mays subsp. mexicana
tttatatcgtgacgaggagagccgcgccatatatgacacatgaggattggtaggaggatcagaggacggaggcagagttgtgtatggcacagaagaggtcgagaaggtgcacatgatccaggagtgcagcaggcagcacagaaggggcagattgctgattcctttgacgcaagcgagggacctgaataagatcctaaatatgacgaagtcggtcccacggaggaggaggtcactgaaccacagaacggcatgaacgtcactatgagggctgcagcttatatctgcaaggcacacaaggaggggcatacaggtcaggtgtcaacggctcccatagctacggccgatgaagtggcctcgacaattataaggcggtggaggtcggcaggatccatggtggaggcagcagcacggaagggtcacaaagtatgtgctgccgagccttatgatg

SEQ ID NO: 377122 - DNA, 516 bp, Zea mays subsp. mexicana
ttttcgcgtccggtttcaatgagaagaaaaatgcacatttttcactctgatgttgtacatttgacccagtttttcttgtgtggttcattctccacatatttattagtgtctgtccaaaatccataacttgctattaaaaatgcaggcaactgttggtggtcctatttttgctggtgcatgtttgtcacccaccctccctcatcaggtgcttataccttcccgtgatggcaacttgtactctttcgatactgtgtctggtgcccttctttgggtatacaaggctggggatccaattactgcatccacttttgttgatgagctgttaacatcagtgtcatttggaccatctgagagatttgcttgtatctgcacgagttccgggaaggtccatgtcatcagaattagagtagacatcagaactagagtagatgctaagtacaatcaggagcaaggtggtgaccggcgttaaatctgaggagttagttcaaggactggatgctaagtacaatcaggagc

SEQ ID NO: 377123 - DNA, 236 bp, Zea mays subsp. mexicana
ttgtgctaccggcaacgcggacgcgaccgcggggggggtgtttacagtagcagcgaggtagccctcgaacatgttaccggagcacaggacagttcccggggccccggcgcgcgggaggaaacacccacccggtatccaaggtgggcgacaaggccaaaggcgagcgcaagatgcgcgcttgcgaagacggaataaaccacctgcatgagttgtggcgcgcggaccaccagggaccc

SEQ ID NO: 377124 - DNA, 250 bp, Zea mays subsp. mexicana
tgcagatgcttcggccggtacgcgtcggtgcgcgcggtgtcggtgaccgccccgcccgcgaaggagggggcggacgacctggggttcctggagatgtcgtccgggacgcggcgacggtactacatgcttgggggcaagggtggggtcgggaagaccagctgcgcggcgtctctggccgcgcggttcgtcagcaacagtcaccctaccctcgttttgtccaaggagcctggtctgtagctcattgattctc

SEQ ID NO: 377125 - DNA, 553 bp, Zea mays subsp. mexicana
tctgtccgaggtcttcttcgattaccttgaccggtacctctacgtccataaggtactgtatagatttgtcgccaagttattctgatccggttgctacccaatttgggactactacgagcgagctgctggaattcgaagtcatttcagctgtctgattgatatggcatgatgtagtatgtcatctcaacctctcacataagactgccttctagcaaatttctgttgtacatgcaaagcttgcaagtattggtgctaatttactaggatatttcattcaggggtttcggagaacaaatggagtgtcagatgtgcggattatgtatcttcactcggtcttgacatgccgttctggatcagctctaatgcttgcgttaatatattcagagatactgaagactgtacgaacatatggctcactggatttcgatgcagagaatttctttccaatgatctcaatagcctccctaggggctatgacatacaaaaaagcaaactggtcgatgagccacatattatgacttcaaagtcactcttggttgaaactttgagaact

SEQ ID NO: 377126 - DNA, 385 bp, Zea mays subsp. mexicana
aaccccttcacggacgaggacccagacaccttcgacgcggcctaccagcaccagcgggacatgctgaagaagctgcactaccggcagcaccagctcgacaacatggtcaggaccatccagtcgtggcccgggagggaagcatcatagttctcgaccacgtatcgcagacgtgctcatcagctgagattgctgccgaggtcatagctgccccacctgttcctgcatcattggccgcggctctgcagtcccgctgcgatccatggatgaagtagggccgattctggtgctgaaagggagtcaggacgcgatcaacggacaggagggggcggtgagcgcagtgcatgtaggcacatctcttgtcgtcactgattcggagagtatcaaa

SEQ ID NO: 377127 - DNA, 280 bp, Zea mays subsp. mexicana
  unsure (1)..(280): unsure at all n locations
tccacttttcgctggaccgatccatggatgatggtagaggccacggccctcgacctcgataaggaggagactccaggactactgaggaggagcgacagacaaagacgtgtcagattggcttcacggtgtgtaactccacacgcgntagcagagcaggcattagcaatggagctagcgtgcgcggatcgcacaggttcgcggttttcatgagagctagctgctgtaagtctagagattgatcccgtgctatccagagattgcagagtcatgagctatccgt

SEQ ID NO: 377128 - DNA, 527 bp, Zea mays subsp. mexicana
gtcgtcttcgccgcctttcatacctgtcatcgaggagttgcttggtgatgatgcacctccaccttcacctaccggacatagttcacttgaggctgaagctactgctttagctggccggtgttagacgatcagctggctgagcccagatttgcgagactgcctaacagttgacagcgcacaaatcccagcattggcctgcaggaattatacaggcagagcttgaagtgcacaatatggcgtttcagatgtgccatcaggcgaacgtagtctgtaggacggacagcctgcagctttgatacacaatgtactccaatggcatgtacgccgagctatcctgagggaacgaaggttgctagaaacaagcgctagagctggggagaggacccgacctagaccaaaagaccgacagctgatacaagatcgcagtaaagaatcacgagaggatcgccctactggtgcagagtgcaccattggtgctctgttggggcgatctattttcccatgctgttcttcaagcggaacaattt

SEQ ID NO: 377129 - DNA, 471 bp, Zea mays subsp. mexicana
  unsure (1)..(471): unsure at all n locations
ctgacattcctttttcctaatttgcttgttattaatatgcctggttgcctgcacaattcagttgaactggatattcaagttcacatatttccaacgatttgttgtgctattggtcttgtcatggagctcaaatttggtccaatatgaattattatatgtgttgcatattcaattccagcgccaagatcagataaggaggcggtggcgacgctgaaattttgcattaatttatcctattcagctccttgtgcctggatacgagagatggttaactaaaactagatattttatcctgttcaactcctgatgcttggatacaaggtggttaactgaaacaagatggtatgtgtttgcaggggacgccaacaaggttactgtcatgtacatacatattgattaacgagcatgacctgaacctctntgctgaatgtgattttgagactgaaagntactgcccgtatgatggtatat

SEQ ID NO: 377130 - DNA, 435 bp, Zea mays subsp. mexicana
ctttgaactacgatactctgaaggaaacaatagttaacgtacgagaatctgccaagtcagataaagaggttccactgtcaatagttgtgatatctgacagagactggtttgttggagatgctgcacaggctgataaacagttggcatacacccttcttcttgctgaaaacatttgccagaaacatggcgttatggttgagaatcttgtatcagaaatcgttgacatgggactaggaaaacaaatatctaaaataagaccatccctttcatttattggagcagaggaaataatgagtcgtgtgacagcacaagttgcggaaagtagtgagctgaatgaagtatggaaggatatcctgaacgctgaaggcgatgagatctatattaaggaaattgggctgtacatgaaggaaggagagaaaatatcattcttggagc

SEQ ID NO: 377131 - DNA, 368 bp, Zea mays subsp. mexicana
tcgattaagcaagtgagaaggggcaagccaggttgttagaggatggctaccaccactgcctacccacgtcagagcaagaagcaggaaagtcacaatggggaattaaacaaagatgatggtaatttggctaacggaaagaagggcaaaactgacaaagggaagatggacatagatatggatcgtctgacaccaaaggcaaccgtaaatgcaaatcagaatggtggcattgggattaggagtaaggaaggagaaataaatgatgatggaacagaaggagatactaatgtgcaaggtgtgcacagactttttggtgagctccagaagttgtattacaaccttgctgttgatgtgtaggagattgagaccca

SEQ ID NO: 377132 - DNA, 531 bp, Zea mays subsp. mexicana
ttttattcaactccttatcgttttcttcagggtgattttgacattattggcggtacttcaccgattccagaggctgaaatcatcaaggtggctttggaccttgggacccgcttttatgattccaagacgctagtcatacgtctgaatcacggtaaacttgctgaagctatttgctcttgggcaggggtttctcaggaccaaagacaaaatgttgctgagtattggccaaatgaggctgaccgcaagtcacagtggagtttgattagggggcaacttttacaggatcttcgtctttctgaagaagttgttgagaagctacataaagcagatcagcggttttgtggctctgcagatctagtacttgctagattaagagggaccctgttctatgatgaatctgcttgcaaggctcttgatgatctatccgtgcttctgagatgtttgagagtatggtcggtagaacaaccaattactactattgatgtactcatgcctccgtcagaatgttactatacaaatctgttttttcag

SEQ ID NO: 377133 - DNA, 435 bp, Zea mays subsp. mexicana
gaccggccggaaatcccggcccgcccacgcgtccggtaatacgcaacaaaaaacggacgcggccagggcatatatacggaagccgcccgaggacccaaggaccgcaaaaaggattatcaaaacaacagcacaaaccaccaacgggcacgaagacaacaggaccgccaacgcactggacacgcttggcggacaagagaagaatgcaaaggagaccacacagccagagaggccacagcaagggaccacacatgggggatccaggcactgaaaaaacacacaaacaaaaggacgcggagcaaaaacgggaccaaagcagaaaaaccagacggacaggggagcactaatgggaaccgaactgagagaaaggaccaaccgcgctaaaccgggcgaagagccacaagactgacaagaacgagttgaaactacagaagacca

SEQ ID NO: 377134 - DNA, 298 bp, Zea mays subsp. mexicana
gtcatctcctccccctccggttcgggttcgggttcgtgtggttctccggggttcgggttcgcgggtgagcggatcgagatggcggcgtcggatgttgagtaccgctgcttcgtcggcggcctcgcctgggccacggacgaccactccctccacaacgccttcagcacctacggcgaggtcctcgagtccaagatcatcctcgatcgggagacgcagaggtcccgcggcttcggcttcgtcaccttctccacggaggaggcgatgcggaacgccatcgagggcatgaccggcaaggagc

SEQ ID NO: 377135 - DNA, 455 bp, Zea mays subsp. mexicana
agccgcccggtacttccgggggcgcacggacccacacactgttacattttctggggcgccccccgaaccaccccttacccaacctctaaatcccaaaccgtatgcaaaaacattgcacatttgtgtaaccctttatgaccctcatagtgcaaacaggccgcaaagaacagatggcaacgcctgcatagggccctactggagcagctgaacaagatagagcagaccgaatgcgcagctcactagggggacatgaaatttaagaaacagtggaaagaggtctttgtggatcttttggctagaggggataactaagtcgggagcacgacgatcagtgaagatggcggcgaagcacgcataaaggacgctgctatgatgcttgaacccgaacctgtggcacctgagaccgtgggtttaacagaggtcgtgcaccctaaaagaaactggcatatcattgc

SEQ ID NO: 377136 - DNA, 501 bp, Zea mays subsp. mexicana
gtacaattcacaggggccacatcactagcaccgtgtggatgtattattacaaaagttccttgatcagcaaatgggagtagcgaagcctgaacccgcgcctgtggtgcaagacatcaacatgcgcctcaaagagcagctatatcagctccctaccacactcatacccaaagaggaggaggaccaaacggccgacccacccgccactgtgctatcgaatgtcattcctgaggttgaactccctattgaatataaaatccaaaatattgaagaaacagaaagagcacgcaggatgatggaggaggcccgcagattagaaatgcaaaatcgagcgaacaaggaagggacctttgccggcaaccatccagtgaactacagtagcatgtatgccacacgccgagtgcaaagcgatcaagagtataagcgaaaaagagacccgaatagggccactgatgacttggctgtcagtcgcttcaaacgaaatatgcgattttaaatcatata

SEQ ID NO: 377137 - DNA, 485 bp, Zea mays subsp. mexicana
  unsure (1)..(485): unsure at all n locations
gttgcctctacctccctccagtctcctctgtggtggccgttggcaaactattcggtcgagcgctgaactacgttgtcaaccagttcctcgtcgagggcctcgccaacaagtaaacacacctcatctcagccagtcagcctccctttccaaccctatatccagatctatctacccacgcctcgcggtctgctccggtcgcggccttgacatcgtgtttgtttgattggatttgatgcgatttgttgcgcttcgtcatctggtcgttgggaggattggttctgccaatcggttcccaacggactcgttcccttgaagctacataattccgttgtatcctgggccggctctttatcgcgtgccttcaattattccccatgaacaggggcaccgcacggctcttacatacatgtttcttttagaatggtgntttgagctattgattattcttggcttacctgatggctgtttagaatttgaaattatgt

SEQ ID NO: 377138 - DNA, 487 bp, Zea mays subsp. mexicana
gtggcattcgcataatgcttcctgtatcttttttatgtttgatgggcatgagaacgtggacaaggcgaggaccctccttgaccgtgtcgccgagcactccgtggtcacgtttggttttggtgagaagagcgacgaaaagttgctgtacgacatcgcataccacagccatgcaggcacgtaccaccatgtccgggagaaggaggatgagaaccagctgatgaaggccttcgccttcctggctatctaccgctccgtctccatgttggatctcaaggtgacagtgagtgctcacaaagaagcaggagccatcatacggggagtggatccatgctgctacaaggtcgatggtccgcagggtgatgggtctttcatagtccattttggtgatctcgcccgcgaggagaaccgaaggatactggtggacgtgcagctccctcacgtacagcatgagcaaaaagataagccggtcatcatgtaaatatgaata

SEQ ID NO: 377139 - DNA, 241 bp, Zea mays subsp. mexicana
gagaaggtctagggtgagcttggcaaccctaacacggtggctcaacccatggagaaggatcagagggggcagttgaagaacacagaggagacaggctttgggatacccaggttgaggtggagcaaagataagcgataccttgaggatgattgtgcacacaagaaggcaatcgggtttcggagatactgaggggggggtggatgtaccgggcgagctaggaggtagaactgcaaaaagaaag

SEQ ID NO: 377140 - DNA, 393 bp, Zea mays subsp. mexicana
cgtgtgaagttagtagctagaggcgctgcttgtgtgactggacacagcatcggcgttctcaagcataggtcagcagacacttataatgagaaaggcacgaggaccattagaaagggagcacctgaactctatggatgttgaggccacctataactgctgtgatttgcgacagaccaagctctaagagatcaatgaatatgtgcgggcgacctcactgggtgtttgacctgaacttttctgcagggagctggatactttggatgacctgatgccggcttctcacagaacggtgggccctgtgcaatgctctattgcaactgtgctccatgcaagcttgagaacacccaatgtcaaagcccgtctgaataccatcagagaggaattccgggctgt

SEQ ID NO: 377141 - DNA, 90 bp, Zea mays subsp. mexicana
cccccttttacggtagggcaagaagccccacccggaggggggtttatgatcgctggccgcgaaacgaccgatcccacgagcgcgaagggc

SEQ ID NO: 377142 - DNA, 313 bp, Zea mays subsp. mexicana
atccatccaagcacagcaaagcagttttgtacagcctgctgctgaaactgaaagcactgcaagagagataggagggagtcgtatgaatggaggggaagaatttctattcgctcctgccacccctccatttcttcctcttcttcccatccctcttcttgcccttgctttctcctccctcctatcctttattcttaaccatgtctccctttatgccatctcctcccgttttcctccttgccctttccatcttttttctcctaccactgctcttctttctcctataccacgttccttccacctgtgttcttcctcc

SEQ ID NO: 377143 - DNA, 461 bp, Zea mays subsp. mexicana
tttccgatttttcttcttgtaccgctgatcctgtagctcctacacattaccttgctgtcctggcttgtaactctgctaggtttcatgagaggaatggtactccatacgtatggtggaatactagcaatacttattcctgctctggctgaatctttatgattattgttcacaaagaatgcaatgaattggtttgctcacccttatctggcgttcctaatgtgtgtgcctacttcattgattgtgctattgctgacaaggcttacatgggggctatcgctgcaagcacacttttggggtgctttcagggctgtattctttaatatctatggcctacacactagctgggctgagtggacgttttctaacatttgtaaataccatgtccatgcttcttggacgatttatttctagaatctattaggcaacattgtggccaacaatcacctaggccgtttgatgcg

SEQ ID NO: 377144 - DNA, 378 bp, Zea mays subsp. mexicana
ccccctcgccctttttgggtgctgagaataaggcaggtgcggtgccgtttataagtggcgcgactgttgaaccattgactaccatgcatgttgaaaaagagccagaacatggtggagagcctggcagagtctgcattaagcgtagcgtaccacattggaaccgatgatggtgatgagccgatcgagtgggcaaagccaaagggtgagacaatggcagcggtgcagttggcagatgcagccatggctcttgcacagcattcagatgctagtagaagctgctgggatggcaagagcttcacatactgcagtattatcaacattgcactgtctgctgcaatggatggaggccttatgacacctgtgctttaagatgctgac

SEQ ID NO: 377145 - DNA, 273 bp, Zea mays subsp. mexicana
ccggccgaattcctgggacgtcccacgcgcctttcaggtttgctcgcgacggagttgccagttgggataagattggcatccttgcagcacctgacgatctcgcagtataaagttgagtgacaaaggtttgttcgctgctgaactagggggcaaaaaattattcagtggatacaaatgctaccggtactagccgcagccaatttaccactgacttatctaagaccgtgcctgcacgtgccagaacgagtggatgagcgctgtaacagcgctcac

SEQ ID NO: 377146 - DNA, 337 bp, Zea mays subsp. mexicana
tgtacgttttgaatgcggaagggggcagcccaggaactgtttagctagataggcgacggattacagggccatatcagcatcactgttgttctggtgtgtgcctactagactgcgggatgccaattgggcttggacattggctgactgtggtcccaacagaacctaagtgtgctttgcgttaagcaaggccgatgccacactggtgaaagagatagatgaaacatggatagacatctttagggggctcaaaaggaggttagctgatagaacaactacatgaagctgtactcattaatgaagctgctgtggcaggggggatgcaaaatttggtgcactg

SEQ ID NO: 377147 - DNA, 483 bp, Zea mays subsp. mexicana
cggcgttcccgggttgaccggtccgcccactttccctgtttttctgcacagcgcggtggcctggccctggatatgttgttgagtctactggtgttctcactgatcatggggacggcgtcagtgacttgtagggacccgccttgactgttgttattttgtgctcctaaaggagatgcacgaacggatggccaaccggcaaacgtacggggggtccggtctggcatctactgtctcaggcttgagctcgcactcatggcatgggtcgatccgcctgctggactcgacggacaccgagagcctgttgcagcctaccagacttccgccgatggtgacattgctgttcgctcgcagacaatgagccgctcatcgtctcctggatcacgccacagatgaggcacgctatgtcatatccggcacgcccgcacccaggtaactgctattttgtgtcaccaaggatttgcctgaagcctattttgcttgcca

SEQ ID NO: 377148 - DNA, 397 bp, Zea mays subsp. mexicana
gtctcccggctgacgagccatgaagctatgctatggatgtcaatgcacattcgccgcatcccctactagcaccagtacccggtgcactatcggaggcgggctccacacgctcatgatcaagtacagccgaccgtgccaggtgcttgacatataggaggacaccaagggcgaggtggagagagccgacagcgaatgggtggagaaggacgggaagctttggtatggatccggcctgatgccgaacatgggtggctttgacgtaccaaaggcgttttagtcgactccagtgagagcggcatcatgggcgctttacgacatgaaggccatggttgccactgtacgcttctctgagaggatcggtgaatcgaaggacgcttcagcttcttttagaactaaa

SEQ ID NO: 377149 - DNA, 491 bp, Zea mays subsp. mexicana
tttttaatatctcttcatgtcgtcctaaatggttgtttattaaagattaacaaattgtttacgagcttagcagtgcaaatcctcccaaaatgttaagattgattgactctgtattaaacaacgtaaaattaacggaagaagaactagtagctatggatcatcgcccgaagactgagcatacaaattctcgtcctgcttctgtcagcgcgaagttaaaatccagacgacaaaggcctaagggttctcccaaagaaaaacaatctgctcgtaagtcagcgaaggatttgacaaatttcgtagaaatctgttgtcgcatttccactacaacagaagataaatacgacaatgtacagctagtatgctcaaaagagattaaagatgctgaaaataacacatctagtttccaaattttgagcaagtctgaaccatttttattggtatctgcaaatgaagaatattatcgaaagagtgccttcactttagatgaagat

SEQ ID NO: 377150 - DNA, 485 bp, Zea mays subsp. mexicana
cgcgggccccgattccgggttcgcgccacgcgccccgctttgctttttcaggggttcaactagcgggcgtgggggtccaccttttcaaggagggttacgacgagaaagaagccactgactgaagaggctagtgatgagctatttgatgagcgtgagacggaaccgctttgactatgagcaacggaggacgccactgatattggcatacactgggacaagtgctgcatgtgctacatttctctggatgatggtaaacatcaagcgaactcacattcgacgggctactaccaatgcatgcgcgacgaagaggagataggcgtcgtggaatatgctcgtgaagctgctacgcatagattctatggtgctcccgagggcattcagcagcaactagtggacgctgcgacagcgatgggcggatacataaattgtggggccctacggactacatcattgatacatgtggagttttgacgaggtactttggg

SEQ ID NO: 377151 - DNA, 270 bp, Zea mays subsp. mexicana
tctgtccggtgcccccccttgcttcactactctaggtgcggggcaattttaatagattgtggcgctcctaccaacacagaagattgttgaatgcatgtatacgccaaataagaggaccgacctaaaccgctacatgggtgatgaggcaaactcctccactgaaagagttttagactaaacgggcatgatgaaggtcaagggatgcaccttgatgcccaacataggatatgggtctgacaagacgatctgtgcgtagctcatatacaagtg

SEQ ID NO: 377152 - DNA, 273 bp, Zea mays subsp. mexicana
ttaaatattgaaatctatggcaccatggacgaattaatatgcaggctcggggactaattgtattgttaatatccaaagcagctggtcaaggaccaggtatgccagaaaaggaacatgactagagtgctcgcgttgaacatggacaacgcgcatcggccgaagtttgcgaaacgaatcagatctgacatttggtgcatcaaggttggactagttcacagggagtgccacatgctgaagcacgatttatgattgcaccggcgacacgacatttgg

SEQ ID NO: 377153 - DNA, 368 bp, Zea mays subsp. mexicana
cgtttgcgttgaaccatgaggagcaggtgggggttatgccgttatgggcaaaatgggctttgttatgtatagtgagacaaatttgacttaacatgcgtgtgtacgcttgaatgctcctcttggtatgcgatactttatagtggtacacttcatcattgccttaatatttttggtgctaatttattgtagtattatttgaatgccaaattcaaggagacagggcacaacaacatatactttcctcgggactgacatgtgaaggtggaaagtgaagatcaaccaacctcaatgaatgcattagaactgattgcactaaacttggcactgaatctagacactttgtttgaagcagaggaggtcaatcataa

SEQ ID NO: 377154 - DNA, 324 bp, Zea mays subsp. mexicana
gcccgacgcgcccaattgaaccgttatggggccacatggaattgggcggttgatatatagcaatgatcagcgagcataccgtggcatactcgcatttagcattgctatggcactatacgacgacactggtctggagagctttcgagggacacggatgaagagtcgtcaccaaagtctgggcagaatatcttgatggccaagagctcaaatgagaagactatgcaactgctaagcgatgcgctggtgaacatagagctatcttcagaacggactaagtgatgcgaggacagagaggtaggggagaactatcggcacttggagaca

SEQ ID NO: 377155 - DNA, 121 bp, Zea mays subsp. mexicana
cccggattgaccgacgcgcccgattgtacctttattgctagaggtggactcctaggagtttgttgcggtggtggacgccgtccacacaatgctcacattaagcaaggttggaggattgtaa

SEQ ID NO: 377156 - DNA, 322 bp, Zea mays subsp. mexicana
gtagccttgcatctccgtccccgtccgcaccgggcgacgctggcttttaaagcccgcgtcagcttcgcggatacagtgagcgtgcgtgttacccacgcggaggcatggccaggccggggatgggattgaagccgcttacgcgcgatgggggggaagcagcatgctcacatccatgacattgcccatgtccgcaatgcaggaaccatggtgcaggaccatgccgggggccgatggtagcagaaactggaggcgactaataggtgagctgctatcggttaggacatcgctgcaaattttgagccttaaaggaagtgcaaaaacg

SEQ ID NO: 377157 - DNA, 464 bp, Zea mays subsp. mexicana
atttggtttcgcttatgccccaaacgaagtgttacccgtgcgcttagggctgaagcgtgcgcttagtgacgctttttagaacctatgcaattaagcagtttgaggttctcatatatctctttggagatgcattcacatctgactttacataggcatcctatgtgtgccgagattattgaagaattccagaagtgccatctggatcaccctgtcaagaagttcttcggagagtgcacagaccttaaaatcaagctagatcgctgcttccgacaggagaaagctttgaagagaaaggcaaactttgaagagagcaagagatttaaagaacagttgaaggcttacaaaagggaaattgcataaaaaaactaggaatgataacttggaacggaggacaaggccgtagaggctcttaatctgtgatgacctgcccttgattttgtgaaggatctgtcaagtgttttttg

SEQ ID NO: 377158 - DNA, 489 bp, Zea mays subsp. mexicana
  unsure (1)..(489): unsure at all n locations
aatgtaatcctcgttttaagtctagtacaagtgacaagttcctctgtcttttaataaatcaacttctagaatggtcccaaatcaagtttccttaagtttgggcgatgttatatgaagtattagtatctatcacagcaaaaaaagtataatatgaaaatatatttcatgttttatctaactgagtttgtgtcaaattttaaatatttttttcttataaatttcagcgaaacctgaaaaaaggttaactgaaaacaactatagaagttgatttatttagggacaggaattttaaccagttctccacgaactcactcaagcggaattgaggtacccctgataatttgatgttggcagttccatattcaatgccttataatgacgtctgaagctccattgtatatgcaattacaaaggcttcctttgtattnttttttgtacacgaaattttttcaaacactgtaaagtgtattactgaatcaagcagtcagg

SEQ ID NO: 377159 - DNA, 289 bp, Zea mays subsp. mexicana
acggcttcctcttactgacgtggatcgatctgattgatcacggcaacaaaagcgaggcgcacgacactctattcttgaggtgtacaccactgcccccacaaggaacatgcacacagacctactaaggaccaggagcaatctgatcggacgtacaataggactccctacacatatctgaagacagaacccaccacaggggatgtgctgatctccaatggtgggactgagggccagactcctgctgatagaattggacctgcacttgaccatcgcgaactcccatttgcat

SEQ ID NO: 377160 - DNA, 246 bp, Zea mays subsp. mexicana
gtctccatttactgacgtggatggatctaaatgttcacgacaaataatgcgaggcacatgagtttctatcctgggggtggacacatcagcaccctctagagagatgcacacagaactactatggaccaggttcaaactcatgggacgtacaataggacaccctacacatatctggagacagatcccaccacaggtgatgtgctgatctccaatggatggactgagggctagactcctgctgataga

SEQ ID NO: 377161 - DNA, 287 bp, Zea mays subsp. mexicana
ttttccctttactcacgtggctggatgtaaatggccacgtgaaaaattgccagggctgtgagtacctaaactgacggtgctcccataggctcacatgcgagagctgcggggaggacaacttcgggtccacctccaacacattgagcgagcaagaggacctgcccaaaagacacggagccggtaaccacgaccagagatgcgctcattttggatgagatggctcatctctgatgatttctggacagaatacaccacttactatgtgagcatgagcccgatagaataca

SEQ ID NO: 377162 - DNA, 436 bp, Zea mays subsp. mexicana
ctgtaccattactggggtggctggatcccctgctcgggcgccatctagacgtcgcgggcactactcagggagtatgcaaggcagctcaaagatggacctatcagaaataactgctctggacctagtgcaaacaaatcaaaaggattataggctaacacctacgaacgtgtactccttgcacccccatggtgagatcttgatttgtgaccgatggtctgtgctgttgagacccactgttaggacaggaaactctctagtcgctggaaaaacattatatgcatcacaagacaatgttgcgatcaatctgacaagctatttcgtcccaggggggtgggtgtgtaatcaacctgtaactttaactcctagggtagaatgaagctcttcgtgttataacccatggatacctacaaattattttgactcttaacacaattcc

SEQ ID NO: 377163 - DNA, 450 bp, Zea mays subsp. mexicana
cttccatgccgatgggagcaccgcagctgctgcaccagggtgtgctgacggtgatgcgcctgcatcaggtggtggggcatgtgccgctgccacggcacgcggtgccgctggcggtctctgtacccaatatctgtccgatgccgccgcagccagtccagcgcccctcggtcgccgttcccttgagaccagagacaccaaaactacgggcaagactgtacgaagggaaagatagtactcccacgaagaagaagtgctgcaactgcaggaactccaaatgtttgaagttgtttcgaggggcttcgcatcgcatgctgccaagcccatcgagaagctggtcaagcactataccatggtttggtgaaaggagagaagatgaaaggggctggttcattacaattaatactagaagcaagacagacgcacccactattggtcctgaaagtgaagatg

SEQ ID NO: 377164 - DNA, 436 bp, Zea mays subsp. mexicana
acccacgttttctatttattcaagaattacgcttggtgccgacggggaactttaaacggcctatgggggtctttccaggcatagagattgacactagccaggcttcgcactggaactgacttgagggatgcacactaactggtctgccagctggacactaaaatttcactggatatggctagccaaatatgtgaaattttaagaaagccaggttgcacatatctcactcaggtatgagcttcaacgcctgtgcctggaaagaacctactttgcaactccaccctgggcttagaggttttttacaaggggaccccccgagttttcacgaagaagatatgcggagaacttggaatatacaagaagccttttaacttcataaattagaacttgggaatggccaatctgacctctcagaagaggcttaaatcgttggaaa

SEQ ID NO: 377165 - DNA, 346 bp, Zea mays subsp. mexicana
gcggccgcacctttgcggattataacatgcagaaggagagcgggctccacctggtgctccgtctcaagggtggtatgcaaatctttgtgaagacactcactggcaagacaatcacccttgaggtggagtcttcggataccattgacaatgtcaaggccaagatccaggacaaggagggcatcccaccggaccagcagcgcctcatcttcgccggcaagcagctggaggatggccgcaccctggcggattacaacatccagaaggagagcactctccacctggtgctccggctcaggggtggcatgcagatttttgtgaagacattgactgggaagaccatcacctt

SEQ ID NO: 377166 - DNA, 462 bp, Zea mays subsp. mexicana
gcggctcatggtacaacaactgattacatgtatgacattgcaaaggtgccaatgccgttcacctttgagatatatggagatgagaaagcatcttccgatgactgcttcaaaatgttcaatcctgttgacaagaaaacattcgacagagtcgttaacaagtggtgcatggcatttctcattctcttcgaggaaggcctgcgaaacctgggagacccgcagatagggttcgaaggcacgcttgaaaactgggtcccaatcggaggagacatcgtctagataaattgtggagcggaagaacaacattccctaaaagaggaaacttgaaggccttcaccttggaaagcaggagctaaagacatactttccgctattcttgctgtcaacattcctgttgatgttcatgttctgcgcgccgatatcaaagaacagaaaccgagacttaggtaacttggttgacccttg

SEQ ID NO: 377167 - DNA, 325 bp, Zea mays subsp. mexicana
acctttaccttttacctcaaattgccaagcgcgggggcggctttttgaaaaacagagaggggtgtgcatgaatctctatttggcttacctgatgcaccatcatcgaacttggagaccactctgccgcactatgaaccttcagatgttccttccgacatttcatctgtgccaaaggagacaaaatcccaaccccttgcagagaaaatgtctacacgccagctttcatcaggtccagcatctgccggcagagaccctgcttctacatttaaagcctcgcatgaaaagcttctttcgaacaattcggaaattccctaattttggaaag

SEQ ID NO: 377168 - DNA, 154 bp, Zea mays subsp. mexicana
acgtttgcttttgctccgcctaaccaatcccgggggcgggttcaattaaacggggggggggaacactagctactccatctacattgcctgcttcaataccttctcttctgggacacccggtccccctatccctacgctatatgtttacccccaa

SEQ ID NO: 377169 - DNA, 168 bp, Zea mays subsp. mexicana
ttttggaccaaatccgactaactaaggggggggtctataaaaaaaattggggggaatacaaaactagggactccatatagaatgactggttctataatttctcttgcgtgacagccggtctcccaatgctcaaggaatctttttactccaagactttaaatatcgaaa

SEQ ID NO: 377170 - DNA, 206 bp, Zea mays subsp. mexicana
ttttggacgtgatccgcctatccaagagggggggctataaaaaattttggggggaataaaaaacttgggacttcatttggattgcctgctgctagagattgccttctaggacagtcagtcttccgatgctcacggtgtcttcttactcccaggagttaattatcgaaatcgacacttttataggtatggaaagaaccgttctcttt

SEQ ID NO: 377171 - DNA, 175 bp, Zea mays subsp. mexicana
ttttgaaccctatcagcctacccaaacgcgggggctatttaaaattatggggggcttacaactcttgggactccatttgcattgcctacatccataacctatcttcccaggcactcactatctctatgcctacagggtcttctgccaccaagacttcaatcatcgaaattgtgac

SEQ ID NO: 377172 - DNA, 252 bp, Zea mays subsp. mexicana
acgtttgcttttgacccgctcagcctaaccaagggcgggggctataagacgtggggggtagaagacaaccctggggactccatttacattgacagatgctatacactttctgctgggacagccggtatccctatgcataaggagtctgttgactcccagacggcaattatcgagatcgacactatgacaggcatggaaaggaccgacctgttcaaaaagcccacttaggagaccagggtaacgaaggagcac

SEQ ID NO: 377173 - DNA, 338 bp, Zea mays subsp. mexicana
ccgggggggggttatttaaactgtttgtgggccccctcgaggtcttcattgccggggcctgtcttgcactcttgtggtcttgtgggcgcggtaccacgcggcgcagcatcaactccccattgaagattgaagctgtggacttgtggttgctgccacgtggttatcgctaaatagtggacttgcctatctcttgctcaggttcaagtgtggtactgaagactcgaaactgacttttttataaccaaactataagcccatattattccatcatcggaacaattggatctataccattaaaagagccaaactttagatattttaccatggaccccacatgt

SEQ ID NO: 377174 - DNA, 116 bp, Zea mays subsp. mexicana
tttcttttgaaagccgactatattttccctggggggggaagccagaaagtatgaggtggaaaaccagtgatgactacgagaaggtgattgagggggctgtgttcaatttggcagcc

SEQ ID NO: 377175 - DNA, 174 bp, Zea mays subsp. mexicana
ttggagacgagtttgctgacaccatgggtgggtgaccagaaagccgtggctgtaaatggaaacatggagcttgatatggattcgctagggggctagtctgatgtagaatggcaaggccgattctttgctgcaggcatctaagataaagcggacgctgactgtataagtgctgac

SEQ ID NO: 377176 - DNA, 395 bp, Zea mays subsp. mexicana
ttcgagatgagtatgccgccgccataggtgggtcaccatgaagccgtcgctgtccaccgcgacttcgaccttgagatggagacgctagggctcgagtcttatgaagaatgccgtgggggagtccttgtcgactacccctatggtgaagcagacgctgacagtctgactgttgactaacttgcaaagcaagagctgaactgtcatgtagcagcaggcaatgcagacccaattaaacccattactgctagtgtaaaaggggatcttgcacgaaatttaaggtgaacttctggtacaggaatagacttttgagcgattgaaggatgagatgtattaatgcatattgacattgatgtatgtcaccatgcagttaaagatgcaacaccagtgcctgaaga

SEQ ID NO: 377177 - DNA, 198 bp, Zea mays subsp. mexicana
ttcgatcctagaatggctactccaaagaggggtctgcttaaagtttaggggggcaaccaacatttggtgctcgacatggatgcgctagggcccgaaattgacgtaaaagggattgagatgctcctaaacgacgggcagtatagtgtctaagactttctacacctaacaagggactaataaggtcagcgatagctctaa

SEQ ID NO: 377178 - DNA, 181 bp, Zea mays subsp. mexicana
tttcaatcctgataaagcactcatacggtggggtctttttaaccgatgggagggcaatcttacttctttgtatcagatgcagactttcaagacctctgtttatgtcactcatgctgacatcctccttatcgacatgtagaaatgtataaaaacctttctaactcaaaaagtggactaaata

SEQ ID NO: 377179 - DNA, 90 bp, Zea mays subsp. mexicana
tttccttttaaacaacctccgcctaacctaggccggggtctatttaaaaaacatgggggtctaaaaacctcccaactccatatcttttcc

SEQ ID NO: 377180 - DNA, 331 bp, Zea mays subsp. mexicana
acccgtccatggaatatatagggtgggagcccaggactgggctactagactgctgggaagcgcatataggaggattgccgggagcgcctggccgcacgcacaaaaaccaatgcctaaagtggcctgtggtgggcgaggaacatccacgggggagcatactcatcggtggctagtgattattcgtggccacatcatattacggaatgtgagtgccaataaacgggatatgccttcttcgatcacctcggaggagagtatcattagaatgttcatacagggctggactattgaggttctggctacgcacgctgctgttgcggctcttgtgttt

SEQ ID NO: 377181 - DNA, 159 bp, Zea mays subsp. mexicana
tttctcatctgcccgatagacatcatgcaagggaggggtcttaacaaagggacggacggcaactggcgagagaggttcgggctaggcctcgtggaggacagtgttggtctccaatgtccctctcattgcaacagtgctcgacattaaggggttctttaa

SEQ ID NO: 377182 - DNA, 374 bp, Zea mays subsp. mexicana
ttagagtggagctagctgctcttttttttggttgggcagttagacagagtactggggctaaatatttcattacataagttaatgatcgaaagctaagagcaaataggctagtggagtgcatacttgtagcgatgcacacattgaatgtgctaataactctgtatatgcatgatcaagccgagctttagttggttttctttctttggcctgttatgttcatgataatccatctgaacaagttttcgatgcgcattaccatttgatattctccatactgtttcggttatttgtttacttggaattacatgggagctaaacttatatcttaatttacgggacaaatgtaatgggtacatcccactctagatatacct

SEQ ID NO: 377183 - DNA, 118 bp, Zea mays subsp. mexicana
ttgctaggtaaacatccggcggccacgggggggtcattatatagctcgcgcagtccatcgcagcctcgtcctctagatggagcggaccaggctcgcgaattgtgatgaaagccatggg

SEQ ID NO: 377184 - DNA, 137 bp, Zea mays subsp. mexicana
tttgaatcttggtctccctccttgcaagaggggtctttttaaatattattggggcaataaattatttgtttacctcatggaagcgcttaggccttatttcattatcacatttgatgactagaccctattctttttcc

SEQ ID NO: 377185 - DNA, 327 bp, Zea mays subsp. mexicana
tttcaattgggaggaagcacttataaggagggttcgttttaaaactgagaacatcatatggtccttgtagtctcacagttgggcgctatcggctcagacctgtccttgatgttgcgtcttgcgttaaatgtaattgcagtagtgtatgttaacattctttaaaccatagctggactacaacgactggtgatggtgctccaatgctattacagcacgtacttatgtatggtaaaaggtgaaaataagttgtgtttgtatcatttttccatgtaaactcgactatgggattgcaacatggattgtttgttgattgattaccggttcatt

SEQ ID NO: 377186 - DNA, 226 bp, Zea mays subsp. mexicana
tgtgaattgggtggaaccttttttcaggaggggttgtttgaaaacagagaagatgacatgggccatgtattcactcggtatagcgatatcggctcttaaccaaccttgatgaagcttctttaggtggttgtaattgcagtcgtgtctgagctcatggtttaaaccacagcgggtgcacatcctctggtcgagtgttctggattgctaacacaaaacgtgacttatg

SEQ ID NO: 377187 - DNA, 348 bp, Zea mays subsp. mexicana
tttggggtattttatctctgacttttccaggggtttctttacatcatctgggggtctacttatatcagtgtgcaactgtgcatgcaatgtcgaagtcgtattctgatatgattatctctaaccagatgtacggatatggtccgctctccggaaatttagaaaagtgctgtatttaaacttcctgtatctaagggttgggctgctggtcatctatttcattgtttatatatggcaccacttaaagccagctcttgttttgatgtatgttggacatggattccttgaccatttgccctctgtgggtttcttgtgcttggaagcccacagctgaagtttcacgtgatgaca

SEQ ID NO: 377188 - DNA, 347 bp, Zea mays subsp. mexicana
agcgacctttcctgtggcacgagtgcgcaccctgccacgggtggtggggcagtagtcttgacctgataagcggcctggtgaaggaggtgggcggcatggtgagcagtctcagggctggggtggaggtctacgcctacgcctgggtgtccagccaccagatgcagcgcgccaccagcatgggctcggcccgagaaggtgaccgtcgagttcctgacgcctgcgatgcggctcctattggaggaggcgcgtaagttgcctcggtggtggaactggaactccccgtacacgggctgtgtcgaccaccggcttttagaagatagaccggaggctggagctgtggtccaaga

SEQ ID NO: 377189 - DNA, 405 bp, Zea mays subsp. mexicana
tggactcgtgggattttgcatagcaagatgaggggcttgataaactggtagagacggtgctgaacacaaagcatattgcattagcagtcaatgaagaacttaccctgcacacaagattgatagttagtgccatataacaaaaaccagtagtatatgtgtcttttacacttgatgataacttgttatcttgtttgcaggatgaccttgaagatcatgttgatgttacaaattcacgtctttaggctagcatttagtatcaatatttaaaccgctgctattgcttacactactactacgtagcattgcttaaccgctcttccttcattccagatatgaagttctggatacactacgtgactatttcttgattcatagcaacagttatttagcatgtactttaaaaac

SEQ ID NO: 377190 - DNA, 330 bp, Zea mays subsp. mexicana
ggggaagctggtgcgcgtgccggtaccgaatcgctaggtcgggctcgacccaccctagattttgagggtgatgcgctcgcccacaggcccatctgcaaactggatgccactgtttagacgcacagccgttaaatatgggcactgcactatattcagtccgctatggactcgagaacgctctcactggaactggatgagctcctggatgtataaacatgctaaacaaggttctgccttatgggagactgcctgagcacgaactttctccaactttgatacccaaggcgtgaagtgtcagattgcgcgttcagtcggtccatgacctcatta

SEQ ID NO: 377191 - DNA, 282 bp, Zea mays subsp. mexicana
ggtgctcctactttgactttcagccttgggggctcaagcttaggcgcggctgcatgcaacgtgctggcgtttatatgtcctgccctaagttaaaggcactgcacgttatttaacaagctaaggactggggaagcctatgagtggccctgcttgagctccttggaggacatacgggtttaagaaggtggtgcaatatgggagacggccggagctggagctctttccaactattgtacccacggcatggagattgggactgcgcgttcagtggggccatgacct

SEQ ID NO: 377192 - DNA, 515 bp, Zea mays subsp. mexicana
tttggctcctcctagcccccagtgtcgaccgcccgggctcctctaggctgtgctgggcctccacctcaagccgtgccctaggatcgtcttccagcacccccttcacacccttgcctccagctcgccagcaccctccgttcggccggccatggccacctcgccgaggccccagccacgacgtcatcccccgctagctatcgaagtcgtgcctcgcataccgcctattcgatgaaatgcccaaacctgtggactgtcgacgccacatctgctccctctcctaacaccctgtcgcaatttcgtgcgttgccggtgagacatcggttttcttctgttcaattagttctttgcttggtgtcaaatggttaactgcggtttatgtttgcgtactggtgtgtggcttggaggagaggaatcccttatgtgtgaggacaggaatccgtgcaatagttgtttgatgtttggggttatgcaaatcggaaatcggcattattatccaaatattgatttggtttatg

SEQ ID NO: 377193 - DNA, 195 bp, Zea mays subsp. mexicana
gaccacgactaccaccgacaagagacgccgctccggcttccgacccggtcccagatcacgcacgaaacatggcgctctgctgaagcctacacatcctgaattgaatcgggtgaggggaacgtagattgcacgcaccaaccaaacactgccttgttagtttttgctgctgcatctaggtgctccttgctgctggaa

SEQ ID NO: 377194 - DNA, 241 bp, Zea mays subsp. mexicana
tcgttaaaatccagagatactgttaggggaggaggctatggtaataaagccaggaggcacaactggactgtcctattctacgcagcacatctctttaatctgcagcgagtgaggtctagatgagattgctgaacgagattcttccactcgcttatgggggacttacatggtgacattgcactaaggcttctgggatacaatatcatgtcacttgctggactatgcagatcttattattgga

SEQ ID NO: 377195 - DNA, 203 bp, Zea mays subsp. mexicana
ttgcaatccagactgactgctgagtctacgggcgatggtactaaagccagggggaccgacgggacgacctaaggaagcgcaggacggccgtactatatccagcgagccggtacaaggttcgcttgctgatctaggactactcctgacgcctaggacggtctaaccgagcggcatcccattaagcagtggctgacggagtacct

SEQ ID NO: 377196 - DNA, 250 bp, Zea mays subsp. mexicana
tctttcccccaaaatttactgcagcggctacgggggatgtttagaaagctagtgggcacatcgcgactacccaagcaagcgaggcaccgccgatcacagatgcagccagcggcgccaacgttcgcttgctgagcaaagactactggctcacttatggcggactcacatggtgacactgcactaaaacttgttggaccagatacactggcatctactggcctaaacacagctggttaggagaccaccaaga

SEQ ID NO: 377197 - DNA, 170 bp, Zea mays subsp. mexicana
tcttttactcgatcaatggaactttccaaggggggggtttatcaagacatttgcggacatcaacccacacataaattgcagtgcactgtacaggcggacgctcatggacaaccattcatctgatggcgctgagatgaactacatacaatgtgacctgtgacagctgacat

SEQ ID NO: 377198 - DNA, 286 bp, Zea mays subsp. mexicana
gtagctggagcttatgagattcgcggggatctaaaaaagaatgttggttcaaatgcaactggcagcaccaactgtcttgctggacttgccatggttgacgatgaggaatccggcaccgttggtagatctggtgacatcggttgatgctacaacatgctcccagaagactgccgatggtgcttcgatgaaggattggactggaggaagacggtgctctccacaacatagttcctagtttcactggcgcatcaaaggttgatggaaaagtcgtgcttgaccttattgg

SEQ ID NO: 377199 - DNA, 309 bp, Zea mays subsp. mexicana
tcgtttatggttgaggtctctgcggttcctgaggggattattaaaagtgtttgctgtaagacaaccacaaggactgatagccaggaaaggctcgtcatagttgatgatttagaaccctccccagagattgatggggaaacggcgaaagaaactgcaactgctgacaagagatgggacgatcttgcgtggaagaatgctgggaatggtatcactcttggattgctcattgcacttctaatgggacctaacatgtccagggctgcagtcactagacctcttgaccttatggcacttgattttacggacgca

SEQ ID NO: 377200 - DNA, 403 bp, Zea mays subsp. mexicana
gtgaggttatatcctgattggtggcggtgttatgctaatccgatcttggaaaggccacatatagtttttcatttgcaaaaatctgtgaacgttttttttgcttagttacgtgatctaaatgatgtgaaactttgaaagggaaagcacccaatctgatcggatgtggtgtaccatgacacttctttcatattgaataggatgatctgatagatccatgaaacttttttttggtgctgagctctgatgagagatattgctgttgataacacaagtgtaattcaggtattcctgtctgatgtcttcaaaagggtgcttgaatacggtgttttgacaccatatgatcttattaaaaaaaatgttgtagttccatgcgcattctaaattcgttaattggtgtaaaaga

SEQ ID NO: 377201 - DNA, 164 bp, Zea mays subsp. mexicana
tcgttggcatctgccatgttgccacacaggggggggtcttaagagggttcttggcggatgaaacacgttcacagcaagatctcgggctactatgcggcgtggactgctgacaacggcaactgcggtgattaggatatccctgcgcgtggcctgtccatgggctc

SEQ ID NO: 377202 - DNA, 333 bp, Zea mays subsp. mexicana
ttgtgtacgatctgactcttctgtgtcggccgggggggacatagactaatcatgttgaagctccaccgcgcgcaggctagctccacgcggccatgccatcgctaatgtcgctgacgccgtggcggtggaagaagagggtgcctggtgggccggtgaccgtgcgcacgcggcggcgcaccttgctgggttctctgtggcggtgcctggtgcggtcgctcaccctgcgcgcgccgcccctactactgaccgaccgatagacgatggatctatcatcctccatggacgacccgctacgggaggatgacaatcgttggcagcttgatgagagaggtg

SEQ ID NO: 377203 - DNA, 354 bp, Zea mays subsp. mexicana
ggttgggcttattacaggtatgcggtgctcctaagcaaaatgctgcatagtggaggcaaagggattctataggtactgatggatctgtaaaaggacccacacccataatgcagcgtatggcctgctgaatgggatctatttcactagggggtctcaataatgggtacctagtgacagtcgctatacgagccgcaggtgatgtattaatattgattttactgacgactaccgctttaaggctgcaaaagtgaactgccaaacacaagtttataacacaaacatcaactctaatgggagcatttgactatgaatcctcatggatccagggcaccttgctctgaccatattaaaggt

SEQ ID NO: 377204 - DNA, 410 bp, Zea mays subsp. mexicana
ttttgatgtgtggttatatcctgaatgctggggggggtatacaaaaacgttttggggatggccacatatattattacatttgcaaaaatctgtcaacgtttatttgttctagttacatgatctaaacgatgtgaaactctgaaagggaaagcacccaatctgatcggttgtggtgttccatgacacttattctatattgaattggtagatctgatatatccatgaaactttttttttgatgctgtgctctgtttagagatttctgatgatgattacctcaagtaaatattcagttttcctctctctggttcttttcaaaagggtctcttatttccctattctttaccacatattgttttcttaaaaaaaatgtcttgttccatgcccatttttagtacgttatttggagt

SEQ ID NO: 377205 - DNA, 357 bp, Zea mays subsp. mexicana
tttgttgtgaggttatatcctgattggtgggggggttattctaaaccaatcttgggacggccacatatattttgacattggcaaaaatctgttaaccttgttttttcttagttacgtgatctaaatgatgtgaaactttgaaagggaaagcacccaatctgatcggttgtggtgtaccatgacacttatttcatattgaataggaagatctgatagatccatgaaacttttttttgttgctgtgctctgcttagagatgttgatgatgattacacaagtaaaatacagtaatccctgtctgattccttcaaaagggtgctgattacgttattttgacacatttgtgtttattaaaaa

SEQ ID NO: 377206 - DNA, 243 bp, Zea mays subsp. mexicana
tgttgttcccagcttatcgccatcctgctcggggggttttttgaaaacctactggggttgaccacctcacacgagatcataggcatcgacaactacctctactgcttcggcatgaccctagcaatcattggctaaatcaagctggggttagaccccacgaacacctatcggtcctacacaaaccatttgggcaccattggtgctgaagttctgatcaacccatctgagttcttgatgatggtg

SEQ ID NO: 377207 - DNA, 295 bp, Zea mays subsp. mexicana
tcgatggaaccccgtttattggcatactggggggggccttcagagagatcttgctggcctggatcagcttacaggagatcatcgccgtccagaactacctatactgcttgggcatgatcctggagttgataggcttcatcaagctgggggtggaccatacaaacgcctgtcggccctacaagatccctctgggcaccattggcgctatccttatgatcatcccacctggtctcttgatcattgcggggatggcacttaggtgctacaaggtgatggggatgagaatcctagacat

SEQ ID NO: 377208 - DNA, 294 bp, Zea mays subsp. mexicana
tcgttggaagcacaatgttggtttcctttgggtctttatgctaggaaagctggctgagcgactgcaattgccaatagaaagcaatcgtattctcggaagcagcattggtggcatgatcttatttttccagtaaagttcctgatattggagcattgtgataaaaggatctccagaaggggaactcaaaagcatgcagagccattggctgaacctatatgagcactcaaacttatttgaagactgttagattgttctgaacactgaagctgctgttgactctaaaaggagattcta

SEQ ID NO: 377209 - DNA, 293 bp, Zea mays subsp. mexicana
tttctgtgcaaatagtgacacctatacaccgggggagttttaaaaaaacggtggtgttcaactcaccatggaccagacttgcggacgctgggcagtacgaccatggccagaccggcatacacgtccccattgtttacccagatcgggcacagtgcacccccgaggtactagaactgtaacacgatgacctggtagacaagtttcccattggggtctatatgtgccccttacagtgattgggaatgctctacccgacacttggtgatgcctgccacatgctgatcaatggccac

SEQ ID NO: 377210 - DNA, 189 bp, Zea mays subsp. mexicana
ttcactgatttgcacaactacataaatatggggggggtttttgacagacatatgggggaattgcaaatgcttgttgagaactctgaaatcctttttgaagcgttcaatcttaaaacccgcagagatacatctatactaaccattggtcaatcattagaggatgcttcattatagagatcacctgacttt

SEQ ID NO: 377211 - DNA, 215 bp, Zea mays subsp. mexicana
tttcgaggcccaactcctaccggttgggggggggtaataaaaagagctatggggtcctccacccctacgacgcttagcgcgggacctactgctaaactacggcttgcatcaccatgctcagagagttctccgagaacgcctaattactcagactgtgccacaagaagaagaaacgccctagtcctcaaacaaccagcctatatttccaataccag

SEQ ID NO: 377212 - DNA, 51 bp, Zea mays subsp. mexicana
tcttttacaagaaaaacaaccactgactggggggggattaaaaaaatatcg

SEQ ID NO: 377213 - DNA, 89 bp, Zea mays subsp. mexicana
tcctccttccctgccagctgttgcagggatcgaggacaggtactgatgcaggtgcctacagagctggggggcgaaaacggatacctggc

SEQ ID NO: 377214 - DNA, 345 bp, Zea mays subsp. mexicana
tcttacgcgtgggcggacgcgtgggataaactatgtctgtgtgatttacattcgtatctaatgtgtcctgcaacattgattttctgaatataaatatggaattaaccaacctgatgaagtgactgattgagatgatatcaacatgaaaccagaaattacttctgttgaattaacactttttgcagccgccgctttttaaattgtccctcaaggcctcaagcttttacactaaaccgtagaggtaaccttatattattcggtcttctgaagtttggttcgaatattgatacacataccactgggctttatttggcaataggttggcctcctaaggttggacccttt

SEQ ID NO: 377215 - DNA, 268 bp, Zea mays subsp. mexicana
tttctatgccagcaattgaagggaacaaggccagatatagatgcagttgcctacaaagctgatgtgcaaaattgaatacctgcttctgcatgtctttcgcacattcagctctgctttagcatgcctttcactctacaggtaaatactgtgaaaaccttttttaatacatgagaatagttgcccttcatcgattctccagctagaatgatgttctgtggatgatggggtggtcgcgggttggcacataaattcaatagaactctgcttc

SEQ ID NO: 377216 - DNA, 349 bp, Zea mays subsp. mexicana
gtatcccctttggttcctcagcgttgcatgtagcatgccaaactgtgttccttgccgtccgatccatttcgaaccattcctctcaaagttgcatcaagcggcggctttgccttcttttagatatcttctgtacctccgtgcccttgttcatgtccctggagcatgcccaggattgctctagtctcctccatgtattctccgtaaaggacttcgtgtatcagagatctgcaaatgctcaaacctgaatatggtttgcttgtccaatgcacttcatgtcatccagacctggagttcagaattggccaaacatctatcaattagctatctggttcattcataggccagtatt

SEQ ID NO: 377217 - DNA, 312 bp, Zea mays subsp. mexicana
tggctcgcccgcctgcaccggccgggccgtacttgccggaccgacccacgcgtcttttctctgattgggaaccgagcttttgtcgtgtccatcgatgctctatgcgcacgcttggtgagagaaatgtccgtctatgcacgagatcacgaaccgtgcactatatatatgaagactgctgttgccaccgatggccggggagtgaccaagtgaactcgggctgatcctgagacccactggacgttgtgggtactacccaaataattaaaccgttcggatgggcctgctgcggtcatgacacccacggccccacat

SEQ ID NO: 377218 - DNA, 321 bp, Zea mays subsp. mexicana
gtctttctcagttactcgccgtcgaagctcccctgttggctgcgtcctgcttgcgccgcatgcgctcactcctcattcatccgattctggcgggttcacgtttagcgtcgagtcgtcaaacccgtcattctatgctcaaacccacctcgtcagctcgctccagacataatcctgtcatcgctctgtgcgtcgggtgaagacgaacctagccgagtaatattcaccgagtgcgcgaccaaaaagctcggacatcctgcgcaacccaagtttcgggtcatcgaaattattcaatcgaggaaaagatcttcagcaattggttac

SEQ ID NO: 377219 - DNA, 481 bp, Zea mays subsp. mexicana
gttctagatcgcgagcggccgccctttttttttttttttttttttttttttttttttccgacattaactttatcggcacattaaccttagaagcacaatgatatccgcaactccacaattcagctacagaaatacaacttcggtttttaataataacacacactggttcgttattgtcgccggggcctccgccctttcaccggtggtacagaatgcccatgtgtaccccagcctccgggattaaatttacaaccttgtaacccaccccggacaccccccccaaattgggccaaaaccggtgaaccttttaaatcggaggggcctggaaccccttatttccggcaagacccccgggtttttttttttgctttagggagagggcccttcgggaaggggggggagcccttttgggtggggggggccttttgggaagggccctttttggcccaaaaaaggggctttttgggggggcccctttttt

SEQ ID NO: 377220 - DNA, 347 bp, Zea mays subsp. mexicana
cccacgcgtccggttgaaccagtaggacgtcacctctatccagattggggagcaaggtctagcttgcaggtatttattttataatcttgattgaagggaataactttttcaacttcaaggctaggttgatagaagacctatttgtgtactttcaggtttgtaatgtgcataagttttcctgttaatgctcaatcttaacttgcactttcaacattcccatataatgttatttatgtaactttgtccttttagtgacttgtttgaaattcatattttccttagccaaccaaatctttgaacatgcatatatacatccttttatggcgtgatatgggttctgttcacat

SEQ ID NO: 377221 - DNA, 276 bp, Zea mays subsp. mexicana
tcactataggaaagctggacgcctgcagggaccgttcccggaactaccgtctcgacccacgcgagcgcttgattttgatgtgttcacagctttgaaaggagccaatgcataggtccttcatcaaggcgttgaagcttctgcggtcgactccaaccagaacggaggccgacaaccggaccttgatggtgctctctatcttctgtcaaacagctgggctggtgccggtgactgaccagcaccagagggcccaggtgcgccaccacgctgccctgagca

SEQ ID NO: 377222 - DNA, 245 bp, Zea mays subsp. mexicana
tcatctgtatagcaagtaacattgtaacagtgagatgccatttgaaattataaaaccagttcggtgctagacatttccttttttctttatgggttttttgaggcttcgttggcgagctctaaggttttattgatttgaaaagcagcattaatttcttttttctaacagtcatttgcgaaataaagttccctgatgtcttggttggcaggtgaacaatcggaagccttaccataggtgtgaacttt

SEQ ID NO: 377223 - DNA, 276 bp, Zea mays subsp. mexicana
cttggctgctgcggcggagcacggaggcgaaggaggaggagcagcagcaggcggcgccgaggagcggcatcccactcagtgcttgcaaccatggctaggggattgaagaagcacttgaagaggctcaatgcgcccaagcattggatgctcgacaagcttggcggagcttttgctcccaagccatcttctggacctcacaagtccagggagtgccttcctctgatcctcatcatcaggaacaggctcaagtatgctctgaactaccgggagggcatt

SEQ ID NO: 377224 - DNA, 205 bp, Zea mays subsp. mexicana
tgcatatgccgtgttaggctgcggccagtcgactgtttgcgtagtggatgtagttgcaaataggagatgggatgcgtaaggctgctggagatcatagctttagcaagactttctgagatggacctttactctgcgccgagcctttaaccttgttccagcccagaccggcacatcttgacaaggggactgcacccctacttccgct

SEQ ID NO: 377225 - DNA, 93 bp, Zea mays subsp. mexicana
  unsure (1)..(93): unsure at all n locations
acctctcctttatatnncaggcatcccccacacgggggtgatattactcagccgggctggccttccgacaagattgtgcaccactttgcatcg

SEQ ID NO: 377226 - DNA, 235 bp, Zea mays subsp. mexicana
cgttttcgtgggctcggagtcggatgatgcttgcagcatgaaggccagaacagggctcaaggagctgaggatcctaaaaaatgaggataccaaggcaaaaattatcagtgggaactctgtgcacacgaccactaccactacgacaattaccaccaccgcattagtgccattggcccctaaatgcagaagccttgctgatgatgaaggctatctccttccggagttcaatgacatg

SEQ ID NO: 377227 - DNA, 366 bp, Zea mays subsp. mexicana
acccggttcgttgaggaagataacgagaggagggaagaggcgctggaccatgctggccttacaatgcaggagacgagcgagacgcctaagaagatgctgagcgccaacccagaggccccactgaacattgagtgcttgatggatgagaaagatcttgcatttgcaagctggcttgaaattgtgctttgcttgtcctggaacttcgctgctgccatagtctgctggatcaaggagggagattcaaagagggttcttccttggaacaatctatgctttgcttggaattcctttgtcattatttgatatggcacaggccactctaaccggcaatgaggactaacagggctttcagttttggatggcttt

SEQ ID NO: 377228 - DNA, 463 bp, Zea mays subsp. mexicana
gagacgtacatccaaatccatacaggaacaaccgacttggagccttcgagtttgacgctcgatgacgccgaccgccgaggccgaccgcgagtccgccagaccgccaccgccgaccggtctcaactctcaacctctcaggtatctctccgccacgcactcctctgcctcggtcccttcgcttcgacagcgccatcgcgccgtcctggatctggacgcgggcctgacgaccaccgacggccaacgcggcttctccaatctctgggctctggcgacaagcacaccagattgctaagtgatggaacctttatcagttcattcagttgtggcagcgaaacggaggagcgaaagagacgagactgattcagagagcaactcattcgacaagaatgatgacatgtctgaggatgagatgacagtgctaggtgggagaaatgagatgttgttagagttgatgaatgcaatg

SEQ ID NO: 377229 - DNA, 157 bp, Zea mays subsp. mexicana
tgtctacgtggcggggatggctgcgacggccgccgtctgctgaaatggaggggctaattcaactacatcatatcatataatatcagactttttctcatttaattaattaatattatatttttatttaacttttacatactttatttatttttattat

SEQ ID NO: 377230 - DNA, 346 bp, Zea mays subsp. mexicana
cctgcgccgacccggtctgccctgcccgacccactcacgcgcccgtttgattacaaatgatgcctgcctcaaggcagtgggtggaatgtattggtttggcagcccgatgcactaccccaagagaaccatggaggtgctggggaactaggccgcatgggtggaggcgccgcaaaggacgcgccaccaaagattgcacattggtgcgataaaacacctcggtgctactaacagaggctcgagcatgattgactgcagatcctacagtgccaaacatccattcccggatccctggatatataggcgagaatctggcatcaactgacgctagactgaagggcaaagcaat

SEQ ID NO: 377231 - DNA, 79 bp, Zea mays subsp. mexicana
attgatttcttcgatccaaagttcaatatagtcgggtcctggagttgacatgtacatttacttcccacataccgagaag

SEQ ID NO: 377232 - DNA, 123 bp, Zea mays subsp. mexicana
ccaggtcttgattctgacaccattcatgggtcttattatgttgacatctgttactgtaacatttgatacgcatgcttttgttttttttattccattatatactttattttaatttcatttatt

SEQ ID NO: 377233 - DNA, 90 bp, Zea mays subsp. mexicana
gtgagcgagggacccggggcggaagaagagagagaagacttatatctcctttgggcttccacatcccccaaccagtctactatatacctt

SEQ ID NO: 377234 - DNA, 391 bp, Zea mays subsp. mexicana
aagtgtctggaaccccaccgacttcatcttgggtgcgggcgcttttgcattccacatggccggtggttgcaacgaggtgggaaagaagccaagcacacgggatcacttgtgcctcaccttccctgatggggctgctggtaatataaacggggtcgtggcagaatgttctgtaccacatgtacatggaggatgagagcttacgtgaggaaataaggatggactcctatgggctcttcatcatttgggttcataactctgccgattggcccactcacaaggcagtattgttccatatggcatgaatttctacaaaaacttcatcaagttgacggtagagagcggcattgtgccatttggaacaattaaccactgggacacgctctaagcactg

SEQ ID NO: 377235 - DNA, 98 bp, Zea mays subsp. mexicana
ggctgtttttcagtctgtaagccacagattctggaatgggggctgctctggatgcgatgctgcctggaatactaactatgtctttgccaaaagctatt

SEQ ID NO: 377236 - DNA, 522 bp, Zea mays subsp. mexicana
cccttttgtactactgacccctgtccttatcgcattagcattgttgctcggcttcaacacgctgtctgctgcttccggtagacagcaaattctttttttggtgcttgctattggtatgaatagtatactgcatataggttgtgggccggtgatccgatattggtggtgttgcagttgtagagtaagtttcttcgtacctgatgtgtgtcgtagctactgaattgaccacttcaatgtatataaaatgatatttatgcacttatatttctctgctcatatttttcatctaaatgaaggacgatacttatatttctctgctcagatttttcatctagatggagcccttttcctgtctcatttgggtaccctcagtagtctaataaactaatattttttaggataataggatgacaatttcttgtataccactgtaatcttgtactatgtccattctgctacactctcctccatacatcttatgcttggcaattggaagcaaccagccaagaaatgaactaccca

SEQ ID NO: 377237 - DNA, 507 bp, Zea mays subsp. mexicana
gccggtttcggcggggtctgcggattccctcgctacaaaggcgctagaggctaagatcaaggagcagctggaggcggacacagtcacggttgtggatacctctggagatggccgccatgtttgcatagacgtgatttccaaggcatttgagggaaaatctgctgtaaacaggcagagaatggtctacaaggctatatgggaggagcttcagagcactgtgcatgctgtggaccagatgactaccaaaacgcctgatgaagctgctgccaacaagtagatgcataatacctgtgaaagcacagattatctgtgcttcgaagatcaggtcattgcttcgaccaaaatttttctcttgggtgctattactttgcgtgtcagctgaatggtcaataatccttagagcagttctagcccaagacacttgttatggtttctatagcctttatgtcatctagaaattactattagacaccaactttctaatgcaaccatactccttcttttttc

SEQ ID NO: 377238 - DNA, 306 bp, Zea mays subsp. mexicana
gatttgttacggtgatggtgtcgaggtccaaaaggatgtgtttgagctgggccgcccaagaggactgaaaaactgttgcgactggtctgtggctggtcagggagaggtttttatttttactgcgtctaatttttttactggattaagtgtattcaagttcactgaccattcgttttagtgagtaattgggcataacccctctgtttttgctaaatgaccgtcaccttccataattattttatgatcttgttaatgatttataatttgatttattgatagggaactaaattgaactggtggaaggag

SEQ ID NO: 377239 - DNA, 61 bp, Zea mays subsp. mexicana
tcgggaggtcttacgcagccacggatgtactgcatgggcggggcgattttaccacagaggc

SEQ ID NO: 377240 - DNA, 99 bp, Zea mays subsp. mexicana
ctcgattctctcaagtcgagagcaacgagaagcctatggggtgggccttataaaacctaccccccccagatcacaaagcccaaaacagaccctccgagc

SEQ ID NO: 377241 - DNA, 522 bp, Zea mays subsp. mexicana
atatatttcacgaagaataatgccagcgatctatctctgagaaagaagacaataatacacattctacgactgcaattttagctaaacaatgcatagcaattgaaggaaaaaagaatattaaggaagttgcctgaagttaaggtcaaattttcttttctcctctgtggataccatcatattgatttcttgttggttatattcttaacccgttggtgaatgaagatgttattttccttgttatctttaatttattcttgccagctactgctatgacaatataatagtaattgtcaaatttaagtgttgaaattccactactttgtgtaccaccatatgctaaaatatatatagtaccaccatctgctaaaatatatatggtaccatcttttaaaattcctctacgaaggtgtgttaaagtaagcctgcaaatgcaatgttctttcagatctttatgtgtaaaaattatatgggactttcaggcatgttttttttcttttttactactctcaactaatttatttt

SEQ ID NO: 377242 - DNA, 489 bp, Zea mays subsp. mexicana
  unsure (1)..(489): unsure at all n locations
gaaagtttcatctgaatacctttgtgatgataaaaaattaccaatttgtttttatgcacctaaatgttaatagttcatacttgtgctggtttgattcagccattcagggtgtagtggttgggacaatcacatatcttagtaacttgtatggcatctaacttgcatatattcttttttagtttttctgaataaatgaatctgaacaattattcacagtgatgccctatttgtctgccaagaatcagttaacactggtattttttatctggctaactggtctggtagctttgatgatgtttcaggaacctaatgcagaattatttgacaggtctcgtgccttcgttcattaggaaatatcccatgcagtacatgagacggtcttgttaatactatttgctgtcagctttctttcattcacttctactcttcatcagagtaaaggttccagattaacttcttgttgaaagggtggctggangatgacttgat

SEQ ID NO: 377243 - DNA, 437 bp, Zea mays subsp. mexicana
accgttacttacggcacggttgggtcagagcccggcgcctcagggatcgccgggaagaaaggcatcttcccatcacacatctcaggtgtctttctcacacataaataccataaataaaggtatcgagatccgactgacgttccttgcggcgacgcgcgaatgggtttggatctggggtctatccggcctgctggacagcggaatgacatttgttcacggttggatggattatttcacaatttatggtgaagatcattttaggcctcccttgttcggtgtgccgttcttgttccgcgtgagaattaagatcatgatcattttttctcttcaaattgcatgctccgtttccttagctgcttgatgtaaacaatattacgctactgtaaatgcacttctgaaatttcgtccttaccatattttagagtctacaaataaat

SEQ ID NO: 377244 - DNA, 233 bp, Zea mays subsp. mexicana
cttattgaagtgactgcatgcctgccacaaaatcttccctccttggagcggtaagaatttgctaccccgcatccgtgttctgtacgttgaaaataaatgtgtccagacatccctgaaagattggtttggttgtactgcgcctgttccactaattgtatgtaaacacatgtgcctgcttgtttgtgggaaaattatatcttacttatcttcatccaattttccaacattttaag

SEQ ID NO: 377245 - DNA, 348 bp, Zea mays subsp. mexicana
atccgtttgataccacagcacgcacaaaaattgcatgacttacttttggagagtggagcattgctaccctccggataaataatcagaacaaaaaaatcatgacaattacgagaaagagagaaaaggaagggaattagttgctcaaacaacacaaaattcgccaaatgcatatgaagcaaaagatacgtcatcgcatgatgaagatgaacagtcccgtgcagaaaaaacagaagcaactcatcagagattcggataagcatggacacactgctagtgcaacttccaaagagggacaaacggtcgatgaagggactctggcgaacaagtcaggaagtaacaaaaggaaaa

SEQ ID NO: 377246 - DNA, 467 bp, Zea mays subsp. mexicana
gtttgtttggtagcatagactagacaaaaagctgatgctgcatgctccagagtccacacctgtgacagcttagcttgctgcacactttctagaatagtttgcatccagctcataagcaagacatcagatatggtaatcttaaagtaaggcgtgtatctcatgaattcgttacgcctttgaagatattattttcatcttgggttgggataatcaataagtctttgctataggatgcctacttccacaaggatatctgggccaaaagaatgcttagtttgctagtgtaagggctgtgtgagacttcatctatgagctagacaagctggtagattatatatatacataattggcatgagcctcctctataaggtctataagggggcttatcgtaatcgcacactgaaactatctgttgcaggagcgttgttatgaaaaggttatgccacggtcctcatattgcacttgct

SEQ ID NO: 377247 - DNA, 224 bp, Zea mays subsp. mexicana
caatttatagcgtctctcaaccctcacccaaccaccatctccatcgccaatgcatgggtctgggggcttttctgcgatcagcacctccttataaggacgacgtgatccactgctagccaaagaagcagcagatgaagtgttaaggccttcgtcttcacaccatcgctgatacttcaagcgacatccaagaaaagcattagatgggtggtgggggaaggaggaga

SEQ ID NO: 377248 - DNA, 561 bp, Zea mays subsp. mexicana
gaaaattgcttaaacgactgataacgccccagtatgaagtggtatggatggtatggttcgaccccgcgataacacaaaactgacgagctccaaaggtcgataccaaccaatgtgttgattggatatcccttgtccggttgggcaactccgtattctcccactaaactgtcgtgcataccatggtttatgcaaaaatcaggccgagtgtttgatgaagatcatgtcgtcagtggtcgagtgagggtggttggccgaggaacaaaaaaacacgcaagcctggaaaaaggatgtttgatgcaaaaagtcggatgattgggtataatgattaaatcgtaggtaaaaaagatatgcgttagaatgacgaaagcagttttccgagtttccaaagggtatcgtcgaataaagttggataaagccgaggaaataagaattaatgttgggtaatcgaaaacacacgggcggtttttccggaagtgtgcccccatgttgtgcgtgtggcctccattgaatttgtgcaatggtaatggaccctgcagcaactcgccctgttgatctggaata

SEQ ID NO: 377249 - DNA, 342 bp, Zea mays subsp. mexicana
cttctatctgcaccttcccaagcgaatggtgatggggcattaggagacatatatgaggtgaaccccgatatggctccagagttagtcaccactgatctaccttcttgacttaaatattgaaaaacaaggagcactgaacttatacaagcaccccatgacataacttttaactgcaggaataacgtggttaatatgaaactcaaagaccttaacatgatggaatccaatactcaaatgagagaaatgattcagaatccagaatttcttcgccagttgacaatctcctgaaccattgcaacaattaatttcattccaccagtctttgatgtcacaacttggccc

SEQ ID NO: 377250 - DNA, 235 bp, Zea mays subsp. mexicana
gggccccccctcaatccccgggacttcccacgcgcccggtgagggccaccacgaaaccccaacaggggtggccccataaacaccatatgccggggacaaccccacgcccaaggccaaagcctccagcgaggacgccaacaaggaacgcgccgccaaaccgcacggagaccgcacccgagcgcgcgcccccgcgcagcagcgccagccggagcagccgacccacagggaggaacga

SEQ ID NO: 377251 - DNA, 478 bp, Zea mays subsp. mexicana
ggcggataggacaaatgcttcgcttccaagtaagactcctcgccaagctaccggcgtgactaaaaaattttatatttaccgcgtgctatcacgtagcatgcataaattactgtcttaattactcgatctctcaccgtacacaaatttcttcttcccatgttaattttatgtgtggacactgtaatcctttcctcaatttcccagtgtcttactctttcaacacttggatagtacaagcgtgctgaagaggaggatgctttttaggtgaacccacatctaaagcaggcttttgtctactaagtctacaacttcatgccaaatcaatctaagtattgtatctaatgaagtagcagcttgagcacacgacacaggttttgttaactaaaatatccttgtataaaactgttagtcactttattggtagcatctactgtttagcgtgacacattcctcccaaagggtacttgctacatcagat

SEQ ID NO: 377252 - DNA, 467 bp, Zea mays subsp. mexicana
tctcccgtctagatccgttgttagtcttagggtcttagtctggtggggggccgggggtttataaaccgttcaaagtctgagtttgatttcaattcaattagaggctgctttggtgtcctagttggtttcgattcaattagcctgatttgatgtccaggtttgatttcgattcaactgaaccggtttaatttgatggggggtagtacctttttttttcttatcacaagagacagagcatgcatgcggcatgcctctatggccgtggctttttctcctgctttacactgccgcctacttatctcctatatcttcacacccatggtttttttccttccctattttgttctgtggtctttttagtcatgctgggactgctaccgatgctgctgctggtcatgagaagctagctattggccttgtagtaccggagtaaatgattggcgctactagttttttttttcctattc

SEQ ID NO: 377253 - DNA, 183 bp, Zea mays subsp. mexicana
ccgcgccttctctttcacactgaaagctcctgcacctgatcaaggtatagactcagtcccagcaccaggacaaataaatcctattatactcacgctgtttttgagagatactcttgtaacgggtgttgttaatggctatccataatttttctgtatagccttttttgcttgcttgctttgctt

SEQ ID NO: 377254 - DNA, 194 bp, Zea mays subsp. mexicana
atactgcaaaggtggcaacaaatgaagtcagcaatgcttatagtgaaagttcattatctgagcaagagccaaagaaacgcatgtacaaaacatcgccatcatcactaaagtcaaaaagaataagatgtagcaatcatgacgacaattgccaagacatgaatcaaattggcgtgcatgacaataccttgtgcagc

SEQ ID NO: 377255 - DNA, 689 bp, Zea mays subsp. mexicana
tcgtttgaaccttctcaaacaaacaatgccattgaaattgttaagacaagacggaatccaaggaaattaagtagcactcttgctgagtcagttcctgatggccagataacagaacttgaaaaggttaaacgtagccttaggaaggttactatttccgtggctgaaaccttttaaggcactctagtacaaaaactgatattccttacctttcatgtggttctctgtgatgagtcctctatgattagcttatcttgctccatttcttttttttttttccatgtctctgtttttttttatttactttttctttccttcttttacttttttgttttctttctttttcattttttactctcttctatatttcttcttcatcccttttttcactatcttatatctttttcctttttttttcctttttttttcctattctttttctcttctctatatctttttctattttttccactattttactttctttttactattttttttttcttttctctttctcttatttttattttttcttttcttttttctctctcttttttttgttatttctcctcttattctgttttttctattccttctatctttcttttcttttattttatcttctttcccattctaccttctttccttcttcactctttattcttctcttatctcttctttcttctattcat

SEQ ID NO: 377256 - DNA, 577 bp, Zea mays subsp. mexicana
  unsure (1)..(577): unsure at all n locations
ttaatatgccccaccatctgaatggtctgaggcgctgtattaccggtgacagctgcctgtgacaaaaccatattattgagttccgcggaatcatcagagttggctgattcgtcctgatctggcaccggaagcaactgccacaactcttccatcacatgtagttgtacaaaatcagcacaacgatgacctcgagaatactgaaggccacatttgtagcaaagacccctggctctgcgataagcatataacgatgtcagcttatcctctgtggtcgtagtagtgattcctcctgttgttttatccattagcttgggagcggcaacacttggcggaggtggcaggggcaagaggtgactttgccatgttcttggatgcaggaacatcgaacctccggtagtcacgcctcttgtcagccacctcttcctgcaattgagccaacacnaaagcagtatccaaatcctttggcctttgaaccataacaacagacttcacatcatcacgaagcccatctataaatctcatggtataataaagagggtcggatatagaatgataagcctttcactgatctaccact

SEQ ID NO: 377257 - DNA, 505 bp, Zea mays subsp. mexicana
tcgttcaggcatcgggatcggtgctgggatgggggttttcataagcggtggtggtggtgccggcggctctggctctggctcggcgtctggctccggctccggctccggctcggcctcaggttccgggtccggtgcgggctctggtgcaggatcgtatgctggatctggcgctggctctggctctggctctggtgcgggttcaggagctagttccggagcgggttcgggttcagggtatgggcaagggcaagggtctggatatggcgaagggcatgggtcgggccagggacagggttctgggtctggctcgggatacggccagggaagtggattcggtcgaggatctggctacggcgaaggctccggttccggctctggcgaaggatcaggatccggctacggtgaaggttacggctcccgtcatggccaaggctctggatacggtgagggctcaggaagaggatacggagatggtacaggctcaggctacggcgagggacacgct

SEQ ID NO: 377258 - DNA, 409 bp, Zea mays subsp. mexicana
gtatagtggctgtgcggtcccggtcccgcgcagccagtggcgtcgacgcgctcgtagccactgaggccgccggcggtggcaacactgcagagcggtgccgagacaccatttcaccgaggaggctgatgctcctaacagcgaacaacggataagagcagctgaacatgcaggcgagaggctgcagctatgctcaccgcacaaccgccacctgaagtagcgggtgaggatgacagcagtagacaccatgtctttgtggcgtttatgaccaaagtcggtcaatttgacgagcttgctgtatctgtcgagcgattgctcgggagattccgatgggagcttgagtatgatcgtacggccctgatttctaaggaatcagatgtaaatgaatcagatactaataatcaactgcact

SEQ ID NO: 377259 - DNA, 275 bp, Zea mays subsp. mexicana
ttttacatgacctacagtggtgagaacaccggggggctgctctagatggctcaccacaatcgggtctgccttgcccttgcttgcctactgatgccctgcctcgtgtaaataagacctgccaagcaattgtgtatattctggtttcctcgctcaactgctggaagtctaaaacctaccttatcagatgtcgtcgatgtaatggacaccgtttaaattaagtaattgactggacctgaatctcgggggtcctatgacctatgtcgtttacggttacc

SEQ ID NO: 377260 - DNA, 229 bp, Zea mays subsp. mexicana
cgccccagtattcggggcgacacacacgcgcgctaaacctctgaagtaaaggttgagggcacgtgagcttcgttagatgagggtgcggctgaacggctatcatcgcaaatccaggaaattgtggaccatgaggttgcagtagacacaattgcaccacttgagaatgatacaactgatggtgagaacactgatcctatgtacgatgacacacgtaatgagtaaatgagaa

SEQ ID NO: 377261 - DNA, 130 bp, Zea mays subsp. mexicana
cccgggcaggcaccggtcttttttcccgggtctaccacacccctctctcatcctctgaagaaaacggtgatccactgtgtcattttaaaacatatgcctgctgtgacaacgttaacccgattggtgttat

SEQ ID NO: 377262 - DNA, 304 bp, Zea mays subsp. mexicana
tttttcaacaccttgaaagcttcttcgtccagcggcagcaacgagatgatggtgaggaactccacaaagttcgacgtcgagaggcggggcaacgggagcacgaggatcgagatctgctgcgccacaaaccccgaggtgctgctatccacggtaagcgcgctggaggtgctgggcctggagatcgagcagtgcgtggtgagctgcttcagcgactttggcatgcaggccttttgctcacaagaggaggaggaggacggttattttaagaggcttgttctatgtaccgacgagataaaacaggcct

SEQ ID NO: 377263 - DNA, 286 bp, Zea mays subsp. mexicana
tttaatgatggctataagtgtgacggagcgggggacaggtaacatgacgcgctgagattcagtgctaacgagatcttcagacaatgatgaaagatgaagtcgacgacgacattactggaaaatgcaacaatgagaaaaaggaccagtagaacacccagctagatcatgatgacacacttaatgaataaatgaacgaaggtaccaatttagtacgcgacatctattataaggcctgatgtaaatagacctgaggcattaacaggataaccgaccgtgagcatacgtg

SEQ ID NO: 377264 - DNA, 340 bp, Zea mays subsp. mexicana
tggtctaacccggccataactgtcctaaagcgggggacatatatcatgccgcgctgatattcactcctaacgacatctccacacaacgatgaccctgtaggtctacgacgacatcactccaaacttcaagccattgaaaaaggacatgaagaagacctagctagtttattttgacacccttaatgaataattgacctatggcattaatgtcggacgcgagacttgttaaaacgtcatgatagactttgagcgatttaataaagatgaggctgagcatactgctccagcaacagcaaaaatgttttatgacagaaagcagtctaagatctaataattaaac

SEQ ID NO: 377265 - DNA, 444 bp, Zea mays subsp. mexicana
ttttgaaaatgcaaagcctaatagaatccggtgggcatcattaaattgggtgtcgtgtggaaaccagattcaaactggtgccatgcccggcgagaaaagatgctaggttgaagagacagccgatcagctttctcaactgttctggccggaagcaagagctgtcagattcagtcgtgactgatgaagacgaagctgcgaggggacctggagcaagagagacaccgcttaaaggctacacctttagccagcaggaatcaccatacaccatgcgacgtgtcgattcgaaaccaacaacggtccacggttgcgaggatgactcccggagtaccttgacgtcaagcagatccacggcagatgacctgacaaggacgtgcaggtcggagactggctaccaaagggcgcgcgtgagcagggccgctctgatggacgcataggagcctgacc

SEQ ID NO: 377266 - DNA, 221 bp, Zea mays subsp. mexicana
gtcacaccgacctagcactgtggaggaaatggggacatataacatgacgcgatgtgatacacacataaccagctctggtcacaatgagaaaccttgcatcgaatgctgaaggcagtcaagaatgtatacattcgtgggaatcgctggagaactcaatatgcgatccacgtgagggtatgaggcctgaacctgctgatgttagagcatcattctgagatatg

SEQ ID NO: 377267 - DNA, 408 bp, Zea mays subsp. mexicana
ttttaatgcatgtaagaaaagtcatattctgtaatattctgtaatatgggatcgagtttacggggtttcttatgcgtggatctgggccttcgcacattttctgtgatctttttttttgtgcgctagagtaatccggtcctcaaacttcacgagaaatgcactatgcacttaaatctgagccggatttgtggggaaaatagttggtgtctgtaaaccctacctgatctatgtttctgtactctttctaactgtttccttggccgtggattcagaaatcccgagccatttcggtctatgttgactcgattttcagtggattctgttatttaactcgtggatccggtcataaataaacagtgtactgtgcactttgaccgatctggtttttggggctaattcggtttgggt

SEQ ID NO: 377268 - DNA, 283 bp, Zea mays subsp. mexicana
tcgtcactacttcggcggcagcgcgtccgagcgccaccacgacctccgcgtggacatcgtcgagaacatccaggaggactacggcatgtttgtctggccatgcagtgtcatccttgccgagtatgtgtggcagcacagatcacggttctctgcttccagtgttgttgagctaggtgctgggaccttactgccaggattagtagctgcaaaggttggggcagatgtatcattaacagacattgttcttaatatatatttactaaatatttttagaagccttttg

SEQ ID NO: 377269 - DNA, 430 bp, Zea mays subsp. mexicana
actacgcggcggcatcacggaaggcgttcggttttggggaagggtccaaggtgatggacttccaccgcgaggaggagaacggcggcgtgcagaggggaaggggatttgccagccacctccacggcgccgtgcaatggtgaaccaggtgaagggcggcgtagctatagcctataactaggtgcgacgcgaaacgatatttgcatggtgctggtctgctggtgactaaatttgcgtgcgtacgttgcgtactagtaattgattgcagtttctgctctccgtcaaacgttttaatgagatttatttgaattgaaactcaaatgtttctattgacctggaagaatttcgggtagttgtgcgtcgctattgacctcttgttcaacgaggtaaactgatttgatggagagtgaaatatgaagcagtacgtacgtat

SEQ ID NO: 377270 - DNA, 262 bp, Zea mays subsp. mexicana
  unsure (1)..(262): unsure at all n locations
ctccacaattcnncatctggaaggacttcgtggatacgcggccgaggatcccgtaaatgaacagtttcggaccctttcaaactcacttgtgtctgcacaggcatatgttggcctctttacccatgggcctgctgtagtctttcttcaccatcgtggttttgaacttcatctggttttcgacaactcgcagccttcagcggcgcctgaatagccttctctcgctattagggttgcgcccagtcggattcaattttctgggttg

SEQ ID NO: 377271 - DNA, 285 bp, Zea mays subsp. mexicana
aacccgccaggaacgccaggaccggacggggacaacagggaagaaacccgggggaaacccaagccaagaggcgacgggagccgcaaccagggaaggaagaagaacaaagcagcaacagccgacaggacaggagcgaagaacacgaggcccgccgcccaaggcagcgaagcgagacaaaaaggcaagagagcagcccagggaaccggcggcagagcacgcaagccccgcaaaaggacgcccgggcgcacaccagcccaaacgacacgaaaaccaacccacgcagaa

SEQ ID NO: 377272 - DNA, 436 bp, Zea mays subsp. mexicana
tttttcgtttcacgcgcccggatcattgctcacgagcagggagttctgcaacatagtgttctaagatctacatctacacgaaggaggaggtccagaagatgaactcgaaatcatccgcgccgaggaaggaggaacctccagcagcaggcgaaggttgtgccgtcgccgccgcaaacgagtaggatgtctgcctgcactgcagcaaagcagttttagatgactaggtaagtcctccgtttgagccgtagtactctgttttttgttgttgttgttgctgcaacagtggtggcgaatggggttctgactgtggactaaaaggagcaacggatttgtctttgttgaatatctgttatgcattgctaaattcagcagctcggctgctttggcgctctggttcacattctgcagtgatgggaaaaggaaaaagggggggctc

SEQ ID NO: 377273 - DNA, 246 bp, Zea mays subsp. mexicana
ttctcgcgtccgccgatagcctcccaactccatcaccctgttgtgtcccatgagtatgggaatgggctgcctatggagagcggatgcattggaacgcgggattacagtgcccagcttgttgtgtacgaggctatagattttgtgaatcgatttgagggtggaattgaggctatacgaaaccggaatcatgagaaagttattgagatgggtaggatgcttgctgaggcatgggggacttttcttggc

SEQ ID NO: 377274 - DNA, 383 bp, Zea mays subsp. mexicana
acttggactacctggagtcagacacgaggcttggtggatgtacgtggaaacctgacagcggctgagcgagcgagcgagcgaggcacacggagctagctaaacagagcacaccgataggaaagaatgatgtcggacggcacggcgacctgcatcgacatcatcctcgccattatcctgccgccgctcggggtcttcttcaagatcggctgcggggacgagttctcgatctgccttatcctcaccttcttcggctacctccccggcatcatctacgccgtctgggccatcaccaagtagccggccggtgcgttagcatgcaatgcgcgcgcaggtgatctcgtggcgggggacgcggtgtgcgcgtgtcttgagatgtgattcct

SEQ ID NO: 377275 - DNA, 262 bp, Zea mays subsp. mexicana
tgtactgttaaatcacttgcagctttctacactgatgtctcacgtatcaatgcatcgggaaaggcaactgctggggagggcatgttgcatgccttgaatgatattgagcataataaggacgctaggcacatgattaccgcgtgaagaagttcatctgtgcttaacgcaagacgctggtgcggttgtaagctatatatacatagcgtatttgaactatatttacagcctatcatgctcccattccattcagaatcctttacca

SEQ ID NO: 377276 - DNA, 474 bp, Zea mays subsp. mexicana
gcatttttctttcccatacccatacccgaggctctgtgaatgtacttgtgaacctgccagcgccttcgcctgatgaaaggttcagaggccgtgaacttgtcaccaagagccgcccgatgaggcacactacgttgggcgttggcacgcacgcactggcgtcttgaaggaaagcgggaactctgctggtcttgatgaggatcttcacgtgagataggaacgtgtgtacagttgtcgccttatggcattgagttgaggaaactcggaagttccattacttgtctgtagcctctactttatatagatgcgaagaagcttgagatacacattgcctacaatgtcttttgatgaataagaccagacagcaccgaaccgaactcgtactccacggttgctttgccatctaggtggttttcggcgtggtggtcgcgcttcctataagtgtgaggcatatggcgtggctgccatttatacaat

SEQ ID NO: 377277 - DNA, 459 bp, Zea mays subsp. mexicana
  unsure (1)..(459): unsure at all n locations
agctttccttatctatgctagtccgttcttcagtttttgagttattagtagcctctctgtgtgcatgagcactcatggatgtaataagatgtaactcgtgggtacgtgtgccactagtgtgatcgtgttcaactcgatcagctattcaactcctacacatgcaggtgaaggatgcgtgaatcgtgctggaaacacgcttgctttgactagctaggagccgtcagctgtgcttgtgagagtcacgaaggctgcggacgtgtcgagtaacggtgaagggaggaggtaaaaggctgtggccatggcccatggctctagctagctagtgctctcccctcatattacctacaatgctgttatgcttgtgtgcctgcttgcaggcagtgtacttgttcctgaccctcttggattgttntacttgtgtatgttatgatcactataatatatagccgagtgtttttc

SEQ ID NO: 377278 - DNA, 330 bp, Zea mays subsp. mexicana
gaaaccaatggcgcgtggggaccacatagtgagagaggtgaactgcgctagacgggcgcgcacagactatggagaaaccaggggacaggatgagctgaatcttaccacagtgctaaagagatggcatggacagcaaccatgaggctgccagactacatctggaaacaggtctgacaagatatagaaagtctatgatcatgtgctaattgagtggaacacgcctgaagagaccacgagacagcatactacctcagaaactggccagagcgatgacaattattaatagtgatctaccacgaccggaacacttttcatattgacacaggcatc

SEQ ID NO: 377279 - DNA, 358 bp, Zea mays subsp. mexicana
tgttataagctgccatggacagagacttcatccacaatattatgtggatggcggcagctggagatgttaggccccgatcgaatggtgatcagcagatgagacttgctcgggcttctctggcactcgtagatctttgatgtctgtaacatctttctcatgtattgctatcatgtgcatgtgcaacagtcaagtggctgcatttggtagtttatggttgtgctgagtgatgatcgatttagtggtcgttgatgagtgaagcgagccatgtacatcattttatcttgaagatctgatatcttctttggccttggtaaaaactgcaattttgttgcaccaaaaatttagcatctaataatag

SEQ ID NO: 377280 - DNA, 516 bp, Zea mays subsp. mexicana
gtttatattttctgtgcagacatcatactctttccctcctgaaatataagggatttgagttgtcctaagtaccgtcataagtttgaccaagcttacacttacacagaacaatatatttctgacactgagttagcatcattagatacattatgaatatattttcttaatttacctctttgattggtagatgttaatactcttctctataaacttggtcaaactttggacagttttgactaggacaacgcaaaccccattatatttcaggactgagggagtagattattgatctcctgttatgttttaatgcttgtattgaaacttctttccccatcttaaaatacaactctacttctgcaccctgtttagatctgatttctgggggacaaacttcaaaatatatgatagcaagccaccatatgatggtgctaaagcatcaagtagtcgatctagtcgtcggttcggaagcagaaggattagtccccagtatcggctggcaattatgaagttggacag

SEQ ID NO: 377281 - DNA, 357 bp, Zea mays subsp. mexicana
gtctttctttttaggtcagggcacggcgtacacatggatatttaagattgacgtgggctctaccaccaagctcattgccgacgcttatggacaaagaggccgtagggatcatctagcgcatcctagaaaatttgcttcacatcagacacaagattggtaaagttgctggggtacaccaactatgctgatactgctattgagcccatagtgccagagacttcgaggaagatcttagagtcttcggcagagatgtccgctcagttaagtgatgacactgatagagtgctcaacatactcactgacctcaagatcaaggaggatagacatgctgaacaagctatggaagatttattgtac

SEQ ID NO: 377282 - DNA, 447 bp, Zea mays subsp. mexicana
cctttaccttcacggatgtgcgctctgcctccaaccctccatggatctaggtcatgtcgtccgacgtccgtagtccaccccagcccctcgccggctacctggctcccattgggtccacgtgcacctccactactcggcagcggcgcagccgctacagtctaccttgacgctcacacaagacgcgaattggaccagtcaaagtgccgaactgccgaagtgaactggattgctgcactgttcttgcccggtggtcactgcttcatgcccacgcgagacgccaccttctcgacaacctattggcctgctacacaatgatgcagtgtcggacaatgtgagttctcatgtttctcccctttccctacattatgattttagtgatgtactccgctatttcaaaataaaattccgtttggcttactagatgaactatatgtgcatttatatatg

SEQ ID NO: 377283 - DNA, 160 bp, Zea mays subsp. mexicana
cggactcgggaccttcgccacccctggcacaccccgtgggacaacataccgacacgagcttacactgaaattgtcaccgaaacccacctcatgactcggcggagcagggacccaaccagtcccagacatggaccgagaggctcccactacaagctctaca

SEQ ID NO: 377284 - DNA, 472 bp, Zea mays subsp. mexicana
acccacgcacccttttgtctctactatggatcttagctattacggtggagggcttcatttaaaaggggggtcgtttaatatataaatgcggaacactgcttaaatttcgttgtactgaccaactcaattttgctacaacacattggacaccatactggccctttgtatttgtgccattaaaactttatcatatctaatgcaactaggccattggtcacagctactgtttaaaaacaaaatccatatgattaataacatacgtggctatcttcaagatctaatggtttgcctcacagtaaaaagatggtagaatgctcttgaagaacatgggaaaacaatagcatctatgaagacttgaagataactgaatattttaccacgacaggcttcaactgatcgttcacaagtatctatgggaccaatttgatcccccagaaattccccacccataatttcttcacccatcttaacc

SEQ ID NO: 377285 - DNA, 480 bp, Zea mays subsp. mexicana
gccatcagtagctaaggttagtagtaactatctgttttggggcttacagcttcacactttggatggttcttcaattaatagactaggtatgtgtccgtgcgttgtcatgaggtgggagaccgtatggagcggcgcctaggctacaaatatttttttttatttctaaacacaagatacgtgtggtctggtggttagctccaaatttttagaacagagaggtgtgggttcgagtgctcgtttttgcactgtttttttgtgggcgctgggcgtagggagggtgaagccgtagtagcaccaggtgcctacattaggttcttaatagagtagtatagattagaacagtctgcttgtcacttctttaggttgtgcgtacaactttgttagctatttagcctgggattgctaaatttaccttgaattggatgctggcactattctttatgtccggttgggtttcagttaattgggtatgttacctta

SEQ ID NO: 377286 - DNA, 141 bp, Zea mays subsp. mexicana
acccgcgcatcttcaaccacacgcaccgtcaagacatccgcacacttaccaaactacaacacgacacttggactccccacccaaccaccggctggctcccaacagccaactcaccaaccactgtcccatccttcacagccc

SEQ ID NO: 377287 - DNA, 334 bp, Zea mays subsp. mexicana
  unsure (1)..(334): unsure at all n locations
ggcgacttatctgtgtgcgaccctgtgtccccacaatagctggttctgttgaaatccccggggggccatccaatcancgctgccgccgtctggagccgttcctcgttcccgccagtaacgaggagccggagacgtcgctgagggtggtctgcgtggcanagcgcaaacctggacagctggacgccttcgccttctcttcggacaccgggcgatggggaagtctgaccgaggatgtcagcaagcctacctcttgcaaattatcatggaccttctaccgttacaccaactgctacttgaaggggactgggagtaacaaactcctctggctcgacac

SEQ ID NO: 377288 - DNA, 391 bp, Zea mays subsp. mexicana
  unsure (1)..(391): unsure at all n locations
ccagttagtatttcaagagggcaatcaccaaanaccaggccgctctttttgaaaactccgcggggttaaaaacccnnncaccncatggcaccgcggagtgccggagagcctccgcccacagggcggccccaaggatggcgccatgcatctcggctgccgacgacccccattccacgcccaccagcagctgctgctcctccgcgcacaccatcgcgcaccgccccagctgcctgagcgcccgcctactaggcacccccaccagggctcccggaaacaagcccgaagtcgccataaccatccccaagcgctgcaacatggccaaccgccccgacgatacaaatgccgagactacaccctaccctacctgaacaagacgccaataacgagaccc

SEQ ID NO: 377289 - DNA, 425 bp, Zea mays subsp. mexicana
  unsure (1)..(425): unsure at all n locations
cgttgtttcaccacatggcccttccaaaatggctagtgggaattattaaaatcatnagggggatatccaaaanaccccccattangtnggttttaagagatccagaacaaatggagctacagcagaaatccatgatgagcgaaatattctgaaaagatcagatcagtcagccttcaccaggtgcaaaacataatatcagtgtcattactaggttattaacataacagtaagttgcatgctaacccattatgatttctgcaagggaccatacatctgtggcttccaatcaaggtggagcaagatatggggaaagctcttcaccacaagataacagttctgaggccatgaaaactgactctacatgcaagatgaagtcaaattcagatgctgctccaataaagcagggctccaatggcagtagcaat

SEQ ID NO: 377290 - DNA, 495 bp, Zea mays subsp. mexicana
gacatttgtcgctagttcttccccctgctgggcaaaggcgggccataaatatgaggactcgggctctgtctcggaaggaaccggagcggaagcctccggtaaggagggtgaagtccaagcggccgctcaagaaatctgtgctggagcaacagattcagcaaaagggtgcgagctcatcctggtccgctaacacgaatcagcagttggagaaccacaagctgaagcaacagattcagccaaagggtgggaactcatcctggttctttgacaccgatcagctgtctgagaaccacgagagtatgtcaagggggtcagcttcagcggtgtcaaaaagagaggaaagatttgaacaacccaacagctatttgactgcaggggcgtatttggtgaaaatcggtgtccaaaaagtcatttatttttttatgcaaaagcccttggggatggggctgctctgaacatttttctaactctgccgcactatttcgctaggaaaaa

SEQ ID NO: 377291 - DNA, 536 bp, Zea mays subsp. mexicana
  unsure (1)..(536): unsure at all n locations
cttattataattattaattataatatttttgttttaattattgcaattaatcttgtaaacaattattattcaaaccgatcgataacccccgcacacacacacacgaacacacattcacacacaaacacacttttctaatcaaattatctaaattacgcttttattgtgatcatttttctctcgaaatattgctgcacaaatcttaattaatttcaactatttgtaactaaattcgcaaacaatgtcgtcattgtttataaaagcagcaattctattttattataccaatcttttgtctaagtctggtccgagtgtttattttcagacactcgaaccctttcacgtgcattttaattggttgttcttcttcgcttctccggaaatccaaattggattttaaatcatttgactagtttcgattactttcaattaattgtcatttcaatgtaaaatgtcttctcttttcgttttttgtacttggcacctncgaccttntcttttccgtgacaaataattgtgcacactctttattatat

SEQ ID NO: 377292 - DNA, 185 bp, Zea mays subsp. mexicana
gcgggtagttgttacgtgcgcgccgcgtattccttggggtgctgttgtctgtcggaaccacttattaccagggatccttggaattttccctgttggtttcccaataatgaagggaatatattggtcaccatgcatggtgtttccaagggaaaaaaaatatattaaaaatacaaaaaaaaaataag

SEQ ID NO: 377293 - DNA, 551 bp, Zea mays subsp. mexicana
cttcgttccggggagacgaccggagacagctccggggggagttcaaccccatacaccggcgatggggaatcttctacgcggacatactgggcatcgctggtgactcggataactataaccgtgaactcggtccgcaactgggcgccatgaatctgggcaaggctttcgtgactaatgctgtgtgcgtgcggtcgcgctacccagcagacgtggagcgtgtcgatcttagccccaggcaggcactggcaggcctgatgttcatgctctccgagtcggcaaagttcaatcatctctatcacctctttgaaagtcgctgggttgaaggtgtgaaaccccaagatgaaggtgacctacgtttggactacatgtggaactggtttaccatatcagacactctgcttgcgtggaaggaggagcgaaaccacaaaaggagagccgactgtgtcacgaagctcaaaggtctgggaaccaccggcttacaagatgcgctaagtaaccttcaacttgtcatcgggaatgacattcactctattctaggaagaaaatatgat

SEQ ID NO: 377294 - DNA, 383 bp, Zea mays subsp. mexicana
  unsure (1)..(383): unsure at all n locations
ctctactacataattttactaccagcagctngctccagcgggggttttatttaaacnaggggggcgttacccaanccctcntnagangncctggtcctcctggcggcggcgggcgtgctggccctggcgcgcgcggacctgacgcacgacaactgcgtgaagaacaagaaggtgacggtgcacaacctgtgcagccacgacgtgacgctgacgctggagccgctggccaacagccccccgctgttcgcgggcacctacacgctgcacccgcgcagccaccccgagttccccctgtgctggtggacggggcgcctgcccgcgcccgacgccacccaggaggaggtccacctcagcgtccaccgcggctccttctacctggcccc

SEQ ID NO: 377295 - DNA, 286 bp, Zea mays subsp. mexicana
  unsure (1)..(286): unsure at all n locations
gcggattcgttagcttaaggaggcgctggagcangnccggcgggcgttttttaaactgggcgaggcctacaccaatctcggcgtntctctatcggaggagaccacagcagctcccccggcgggcgaggaccgcgaggctgatctcgatgccaatggacatggcgcggagacatattatggcgcgagtgactccgattacgagacggcccataaccgtgctcttcatcaacctacggtagcatcactggagttactaacaacgctcaatggcgaacactaggcagga

SEQ ID NO: 377296 - DNA, 464 bp, Zea mays subsp. mexicana
  unsure (1)..(464): unsure at all n locations
gcgctttcatactttacccggnccccgcctcaccccgaaccggccttttttataggaaagcgggcggctacaacaccgccgccatgcctcgccgcagntcaggaaggtctgccccacgcccagctccccgtgctgctccagggaggaacccgccacagccagcacgccaggcctcttctccagctcctgttcgagatggcggtggctccatgcttggaggaattggggccaccattgctcaaggtatggcgttcggcacgggtagtgccatggcacacagggctgctgatgctgtattaggtccccggaccatccagcatgagactggcgcctcagaagctgctgctgctgcccctgcccctccagtgatgaatgctgatgcttgcagcatccattctaaggctttccaagattggctcaacaactatggcagcgagatcagcaagtgccagttctacctagac

SEQ ID NO: 377297 - DNA, 195 bp, Zea mays subsp. mexicana
ccccgggaggcccggcccagaatccccgggcctacccacgcccgcgatataccacttcgtccaccaaggaacctccggggtctttttaagatgcaactgggttggctcccgcagcaacaaaaccaagatatctcatcactcctccatcagacccatctccgagttcattttgcaatggaatttctccatgcaaat

SEQ ID NO: 377298 - DNA, 348 bp, Zea mays subsp. mexicana
tttcacgcgtccgcggaagtataaatggaagcaggatttgtgccctaggtcggctattctgcgcccacacagtcagggattgtagatgaagtcgggctatctatctccctggtttgctattctctgcccacgcagtcagggattgtagatgaaatcagattatctatctcatagtttgtggcaccatcgttgttttgggaaaataatttgttttttcggcacgcactcaaagtttctttacttcaaaatgctactaaaatccgttatgatacattgtaaagcataggtttattgtaatagttggatctgcttctaacattctatctattgaaaatgataaaaatacta

SEQ ID NO: 377299 - DNA, 471 bp, Zea mays subsp. mexicana
cttttaccagaacttgggacctgctaagttgacacaacataagcgtagttaattaacaatattaataatagtatgaaaacttcagatgtaggaaatgatgaatgattaggaccgtaaagattcaatacttattctattttactactccatttcaaactgtaagttgttttgtcttttctaggtacatagcttttgctatccctctagatacacaatatacttagatatgtagtgaaacttatgaatctagtaaagccaaatgacttataatttagaattgagggagtaataattgctaattattgaaccaccgacactgaggtgccattataattatactctcgtgagctcctctaccttcagccagtaaacgcttaatttgagaatttgtttactggaatatgattttcttgtgctgatgcccctcccctaaaatttgcggaacatcttgggtctgcgcttatctgctct

SEQ ID NO: 377300 - DNA, 450 bp, Zea mays subsp. mexicana
cttttgtgcagcctggtgcaggttgttctgctgacccagaaattatcgtcaagcatgttgaattcgtgcaggacacaatggaagtagatacaatagaatcatgcaggacaaaactcatgggtgacaatattgcttcgacctctgatactagtactaagctagcatgttcttctcttctccatggcagagagctttctggtactagtcttgaggatcaggggccaggtcactctagtgaaagcctagctaatgagaagtatgatatgaaatatcacactgattgcacctacggtgtgaacgataagaccctattggttcaagaaattctttctggtgccgatatttggcctgaggacaaggattcagatgggttctgctggaatgcaagctgataatgaggcttccagaggtactttaagaatactggagtgtcccccatgtgtggtttga

SEQ ID NO: 377301 - DNA, 237 bp, Zea mays subsp. mexicana
ggtagatgacaggcgccggacacggagaccggggggtcctacgcagagaccgcggacccttacccgccagccaaggaatgcacacagcagcccggacccccggtcctgactccccccgcgccgcacgagtcctgacaagctgcccaagggttgtatggtacggcgccaggcgccgccgcaggcgatccggaccgaccaccggaaacttccggagacacgcgggcgtacgcgagaggg

SEQ ID NO: 377302 - DNA, 470 bp, Zea mays subsp. mexicana
ttataaacatgtgcaggtttttcgagggggcctggcattggagtatgttttaagggaagtcagttcattttatgaatgaggtatgggttcatggatgtggtaaataatgtcatcatcgtggttagagtagcaccctcaaatgcctacctcatagctggtcttaagtctccaatccttgtatttggctctcattacgatatgttgtttatttgcctcatctttttccatcttttttttacccaaatgtagctggaagcgaaacttcagttgttgatgttttagttttcgcaggtcgaacatttcgtgctcttgatgttactttttcccactccccaactctgtttgctttggtcttggttctctcaggattattttgtggatgctcaattacatgctctcaggaataagactgttctgcatctgagctgcgagcctgcaagtgaactgcgtatttgctggcgcacttcttt

SEQ ID NO: 377303 - DNA, 470 bp, Zea mays subsp. mexicana
tttacgcgtccgcacgaccaatcgcacctcgaccacaacaaccaatcgccccacgcccggttcaacgcccaattgctccacgaccagccccacaaccgatcgcacctcgtccagctccacgaccaatcgccccacgaccacaacaaccacttgctccacgtccacgaccacaacaaccaatccaaccaatcccgactcgtcaagaaagcgaacaagacgaaggtgaatacgatgacggtgccagcaacatcgaagaccaaactgttcaaacttcgaccagtcaattgcaaaacgtgtacgctgccccattcgcagccgcttctcgtaccaagttcgttgtgattccattgggcaaccgtcgtccaaacaacttgaacgaattgttgcgtgccggtgcaactcaatccggcgtcgaattgaacgaccaacaaatccaaaacttgatgcgcatgtcgactcgcgttcaataa

SEQ ID NO: 377304 - DNA, 469 bp, Zea mays subsp. mexicana
  unsure (1)..(469): unsure at all n locations
ttacaaatctagcctccccaacttgcttgggactaaaaggctttgttgctgctgctgctgaaacaaggtttctgttctttgataacaatatagcattggaattcgtgaaggatttattggttactagatttctgtctagcaatactagagggtagaggtgaaatcaattacgtgttcattattatactgccttttttttctttctacgtggtatgctaacattatatacttctagcattcatctgaccttggaagaatgatttgaaatatttgaccatgttgttcatgcaccattgtagatatgaggagataccaaacttaacatctggctgcactgagtttgttgaatccgcacaacaaattttggaggagnaggaagcttaatcaaacattactagccaaccacactacattgcttgacttgcttgaaattccacaattgatggacacgtatgcaacttttatctta

SEQ ID NO: 377305 - DNA, 469 bp, Zea mays subsp. mexicana
tttgattgcataagaaataagttgatctgattttgtcttcgctgtgctgtacttcttaagattccaaagcatgtttgttcttctccccagggtttagctgttcaaagtgctcagtcatcatagaccattttgttggcaaattttctgtgtctgcagttatcttcttgacgtatcatatatgtgctgtgattattgaatgcctatattttttacactaatgagttttccaaatgcatgtgctgccattgattatgaaccaatggatctctggcttcctttctcctctggcttatttttatacaaccaagcttgtcgatgttccagaggccattctggtttatctgctggaacggaatgtttcgttaccagacaataccactgtaccattccagagtataatgaatgaatagaaaatatatcattattatatttataataaatgtctttttggcacaatatttggatatgt

SEQ ID NO: 377306 - DNA, 319 bp, Zea mays subsp. mexicana
aatagtttcatcatagtgcttcgtggcccagaagctgttcaaactttctgcagtcgaatgcatttttcacttggggcaggtgtaagtgctgcagcaggacctgtgggcagagtagcagaagcagacctgagagctggtgataaaggatcaggagtttgctatacatacagctgcagcaaaggtaactgttgtcttactttgtatctttcaaccttttgatgccatgtttaatctggcaatggtttgggcttgtcactgtggaaaaattaaatgtgcaccgcccatacattttatcagaaaatgtgccctacaaagtttt

SEQ ID NO: 377307 - DNA, 464 bp, Zea mays subsp. mexicana
attcaggcatgcagtggccgtcgttgcctgtatgtcgggagcgaaggttgctgccaagcttgagttccttaagaggagtctttgttgttctgaacctgaggtttccactgcagtgtccaagatgccatatatattaggattgtctgatgaagttcttcttcgcaagattgagttccttgtcaacaaggctgcaatggagccacggcacattgtggaaaggcccaacctgctcacatacagcctggagaagaggctagtgccacggcattgtgtactgaaggtcctgcgggaaaagggattgctgaatagcaatatgagctttaacacatttactcattttggagagaggactttcaaatcgaggcgaacggtctatggtggaactgtaactcatggccattagcagctggcaggtcttctccatttgcaagggaaccactagtgacctctgactgctcatacat

SEQ ID NO: 377308 - DNA, 335 bp, Zea mays subsp. mexicana
gaagattgtttcttccccgaaaatggccgccaacatgacgccttgaatggtgcaaaccgtgggctatgagccaatactcactccgaatgccgaacgaacatgctattttatcgccccagaaatgctgacggcttgctatggtgaagtttgaaatgatatgccaaattgtgacttttattttaagggggttgcgacaagaaatgtccccccccctaaaaacaagcgctagcagagttgagaattgtttcatgtatcatatgtctggtcagccagtgaacgagtacattgactcgtgtgagaaacaagttcttctcagacagggtgttcttggtata

SEQ ID NO: 377309 - DNA, 326 bp, Zea mays subsp. mexicana
cgaaacacaatgagatgcggcgattttatatgcatccggatgctcacgagaaatatgaattttatactgaatgaacgagtggacattctagagtaagaacttaatgctgtacgagagccgcttcacaaccttacactgcaaaagaatttaaatgggcctattgatggacagcccaatgttagttaacaacagaattgagctgccgcatggcccacatgaatggcttccacggtgaatatctgactaatgaaacaaggcgactgagatgcgaacctgagactgataaaggacagacatatcttgacctgtgcctgtacattgaacat

SEQ ID NO: 377310 - DNA, 444 bp, Zea mays subsp. mexicana
  unsure (1)..(444): unsure at all n locations
gcgggagattgtaggcagcctgtccactgtccacgcgctgaagaagagagagatgggggtgcgggcggaggcagcagcagaggcagctggtggcggtgatgggcatgctggcgccccgagcggtgcncagacaccaaactgctcggcgaagctggtcccgtgctcgtcgtacatgaacacgacggggacgccgacaggcacctgatgcggcccgatcaaggacgcctgcaagaacgacctcaagtgcctctgcgatctctacgccacgcctgatatcttcaaggccttgaacatcagcctcgacgaggccctcggcctatgcaagcgacgctgactcagcgacaccaccgccgtctgcaagggcctttcacctacccaatatcctacaggctcaccatcaggtggcggcagtggcagcaactactgtgatcacactctgtcggt

SEQ ID NO: 377311 - DNA, 615 bp, Zea mays subsp. mexicana
gagatttctatttgattgtgaggatgagtttgtgacagcatgtaaggaaatgttagaaaagtatgacatagaagataatcaatagctagcatatttgttctcaagaaaggagaaatgggcactgacatatggtcgtgatgcattttatgttgatatgaaaagcgtgcaacaaaaggaaagtttgacaagtgagctgaagaaacatctatccttggaatgtgaccttttgaacttcttcgagcagtttgaaagactgttatgtgatcgtcagtctacagagatggaggctgaaccaagagaccactttgttaaatttgattcactcaattccacgatggactgtacttgtaagacgtttgaacttattggcatcccatgtcgccatatgctggaggtacttgacatgaggaatatcaaggaccttcctactcagtcaccgtgaaaaggtggaggaaggatgccaaatcaggatcctcaaatggtggctattctttctcattgatggtgaacctgactcctctcacataaaacattataattttttgtgtcgtatcttcaatatagcagcggctagggctgcaactttggtgaatcattgcatatatggaaacagtc

SEQ ID NO: 377312 - DNA, 293 bp, Zea mays subsp. mexicana
tgatgcttggcgcgtaacggtgatgtaaaccgaccgactggttctactattaactattctcgaaatataggttcccttgtaggtacagctttaccaatgcaaaggtgagccgggaactgcattatgccgggaaccgttctatgtggcaagaagctgcttccagcgactggaatgatagaccagggtgacaatcagcgtcctgaatacgtgaggtgacccctagtaatcttgcccacacaggactcaggagtgtagctggtgctgccgccaacagggccgccagctaggccgcc

SEQ ID NO: 377313 - DNA, 347 bp, Zea mays subsp. mexicana
gcgatccttcttatatggagccccggtgcctacctgtcacgaaattatgaagagcctggacgttgtggcggcacttgtgcccggaagttgaaggagaatgaacccttgttggacaagattgatgatcaagagctgagacgatggcaccactgaccttgtgatggcgcgtgctgcacaggctggaggcggtgtgtcagggatacttgctaccaggggagcaacgtaaacataggaagacctgttcctcaagcttggaagttgctaacatatatcatccagattatgggccaatgctagccacgcctgaactgttgtaagcgataccggctgaagcaatgagcttgttt

SEQ ID NO: 377314 - DNA, 427 bp, Zea mays subsp. mexicana
tttatttttagttcctccattttattctatttaatccctaaattgtcaaatacgggaggggctaaaaaatagtccctagaaaccaaacatcccctaagttcttatgctgcctgatggatttaatttccatgatcattaatggcgcggtgcttcagttaggaggccaataaacctggaagactacactccacctgttgagcttcttcagatattacccctgaagtccagcgttagaggaaaagatgttgggccccaaatcggtccaaataacttaaaattttctccagtatgttcctgttgttatagatcaatggctaatgcattatgcatgtgatttgctgtcattggtccttgcaatttgcatatttaaacacctgcctttgtacttcgttttacactgggcagggaatgcaagctttattagacc

SEQ ID NO: 377315 - DNA, 508 bp, Zea mays subsp. mexicana
  unsure (1)..(508): unsure at all n locations
agcagttttacctttctttaaagacgtttattttgtttaattctcttgaataagatggagtttcgaatcttatgatgcaagcaggcagacaaggcatccatgctggatgaaatcattgattatgtgaaatttcttcagcttcaggtcaaggtatgtctgtgaacattttttttgggaacaagcacaagtaacttttctggtttggcaaaagatgattaacattcttcccttttacctggtttcattcaggtgttgagcatgagtaggctaggagctccaggagcagttcttccccttctcgcagaatctcagactgaggtgccaaaccttctaatttccttcaacttccaggaatccttgcaaaagtattgttgattttataattggtgacatagacttcttatctttttttttcatctgtatgcccaactgcaatgcctcaaacaaattctgctatgacatgatagcttattacagcagntctttttttttggtgcatacatcatgc

SEQ ID NO: 377316 - DNA, 107 bp, Zea mays subsp. mexicana
ttatggtgccccctcactacccaacgatcaaagcgcggggttttaacatccagggccggcaaacataccgccacaaaaatttcttaaactcgtatatccaatttcag

SEQ ID NO: 377317 - DNA, 517 bp, Zea mays subsp. mexicana
acgccgctgttacgtgggtctacctttactgggtctactcctggatcctgttctgtgaaattatccttttttgcgccaaagcattttaaccgccaatcacaacagagctggacatgagaagatgccagcattagcttgctgctcctggatctcatacactggatcagctgcaatacaccatgttttgcactaccccctgcccacaatgacactatataactaaacgaaaaagtgtaagagtctgcctagagaccacaaagcattttttggtgcattggaatcttgcgtatgcttgaattttaaattatgaatccaaatgtcgctgaattacatgcaggacccataaactttgaatcattatgatgtgaaaaatgatttataatacagtatgggagcacaagtgtcgatagatatacgaaaaatgaatatcggggaagagatcaatggtagtgtcaccctaaagtgctggaaaagttttaaggtgcttcccataaaacaacgtcttgggggagcacta

SEQ ID NO: 377318 - DNA, 506 bp, Zea mays subsp. mexicana
ccgccagaatctcgcgtcgacccacgacgccggcggcttcctcggcctcggcggcgcccggccgcgcgtgcggctcgagatcaacactggcgacagcctgaacaacacggatgaggcccatccgggcgctcgagtcggacgccgtcttctccgtcgacgacgacctcatcgtcccctgctccgcgctgcgcttcgccttcttcgtctggcggaccgcgccctccgacatggtcggcttcgtgccgcggatgcactggcctaccgacccggtatgatgtgttgagtccatcagtcgctataattcttccaaagcgagtgccgcatattgggatctctgttccaacacgaggatcggaatctggaatggaagtatctgctctgctcgtagttgtagctcttatgttcagatttgaatggttggtttggcacaaattaaactaagaataactttgaagtttgcatgaacatcagaacatgttgaaggatatatgtaaaaaaaacaaatc

SEQ ID NO: 377319 - DNA, 197 bp, Zea mays subsp. mexicana
tttttgatgcctgggtgcgatacaactacaagccgagggggttttttggcaagagagcccgtcaacagaccaaaaggacatataagctgacccacgcacatcaggcctatgcggacctcttggagaagaaatattaaaatgtctggcaccaagtaggggaccatgacgtaaacggtatccggagcgtgcacctccta

SEQ ID NO: 377320 - DNA, 539 bp, Zea mays subsp. mexicana
  unsure (1)..(539): unsure at all n locations
tttacttggttttttttttttctaaaacgcttgttttttttcttctaaaaggtgcaggagaactgcgcgttaaatatattaagaagatagaagaaacaataatggtctaaatagaccagagtacagagtaaaaagcaaaagaaaaaccaccttatggtggccagaaacaaaaatacacataaacatccatatagaagacagccaaaagacatcaacaactgcccctaaactaagtccagatggcgcacagatctttggcacccgccagacaccacctctgagcgttgtctttgatgttctgtataatttggttgccgctaggagcatcccctcaaacacacatttattccgctgcttccaaagccaccatgccaacaacatcataagagagttaatccctttgcgcagcacatgagggatctttccctccaaattagcccatcaatcttggaaaaccaaatcagccctcgtgggggagaaatgccgcagattaaccatggagaaaatcctgaaccacacttnnctagagaaaacacaaa

SEQ ID NO: 377321 - DNA, 384 bp, Zea mays subsp. mexicana
ttttgttcgtgaggttctccggggttcgggttcgtgggtgagcggatcgagatggcggcgtcggatgttgagtaccgctgcttcgtcggcggcctcgcctgggccacggacgaccactccctccacaacgccttcagcacctacggcgaggtcctcgagtccaagatcatcctcgatcgggagacgcagaggtcccgcggcttcggcttcgtcaccttctccacggaggaggcgatgcggaacgccatcgagggcatgaacggcaaggagctggacggccgcaacatcaccgtcaacgaggcccagtcccgcggcggccgtggaggcggcggcggcgggtacggtggtggccgtggaggcggcggctaccgcggtggcgggcgc

SEQ ID NO: 377322 - DNA, 343 bp, Zea mays subsp. mexicana
cgagtgcttgatgcgatgcgatgcttgtgtgccaagaactgcaccccaaatctggtagctcgtcgagtgtcctgatgaggctatgattgggcaggcgggggctatctagctttggccacacagctgcattgcgttgggctgcatggtaccgtaccagccaattcgagttcatcaatcatgtggtgtgagagtatttcttttcttcttcacctctcctttttctttctttccttttgagttttttttttccattctcctcctcctcctcctcctcctcttctaattcttgttcatggaaggtttgggattcttttggagtgcatactatactattcagatagag

SEQ ID NO: 377323 - DNA, 430 bp, Zea mays subsp. mexicana
tcttaatcccctgtgatccctgattaccaaatcaactctgagtgtgctcggatgtggcttgtccggtttcagaccgttgtttgttctctctaaactctttccccttaattgatggatagagatcttgccattttcgttcaaaaaaatatatatatcagcccccataaaccagggacatgtgccggtgcctgaacttgcttatgttacttatgcccagtgtcaatgtaaccgttggagagaaagaagaccgcatgacgatcacagggatgtattccgtttctgatattttttgtgttggctgcggagagattgttggatggaaatacgtaagatttataatgatgatttggcaatatatatataacatgctctagttttgtctatcgcctggacttctaagttgtatatatgatgcatggtgtctctactc

SEQ ID NO: 377324 - DNA, 513 bp, Zea mays subsp. mexicana
  unsure (1)..(513): unsure at all n locations
tttttatcagccattgtgggttccgatgttgcctcagctgcagcgcaagcagctatttctgcacaatcccgtgttgaccttaatgacggcgagattgaaacttcaataaatagcatcaagcaagaaggtatcagcccttctttacatatttgacctattcttttgcaacttgtgtcgttgaattattcataaagattctcctttgcacatcaatgtgcaaaatgcaagcaatgtcgacagtgatggttaatggaagtttgaatgttgtatgggtgcaaataacattctacaggaacaatacgccaaagcatacatgtgtagtattataacattgtgccatgtgcaaatataatatatacacttgcacctgaattttgtgtgcatccactattaaaatacttcctgctcacctcactcgtaccatgctttttagccactaactntaatgccttctttagaatcatctcacacaaatgggctctcagccaacgtgttactgaaagaggcagctgc

SEQ ID NO: 377325 - DNA, 364 bp, Zea mays subsp. mexicana
cccatagattaccgacccaaacagcagaccgacgagggggggattgaataagaaaggcccgccctgccttcccacagggtgcaaaaagcagaaggcggacaacacgacgccaaagacgaaaagaagatggccaatctacacatcaatgcgaagaagaaacaccccggaggcctgaaggaaaacccgcaagagagcgaaactagaaggaggcagcagccaaaagaaaaagacatgcgaagatagtacatggggctcggagagaaaaaacgtccatccagagaaccagagaaggcgaaagagagcataaaacagaatcagaaaatggcctaatgaaggatacccgcccatacggcaggtaaagaag

SEQ ID NO: 377326 - DNA, 406 bp, Zea mays subsp. mexicana
tcgcccacctccggtttttcttttcgccaggcatcatggcagggggggtttattttcaacaccctcggtctgctccactatgatagctcaaagagcagcttgcaacaacttgctcaaatcgactctatacggctacgaacctaacacaaggcagagatcgatcgaactaacggacagggctaccttaacaaagaacagtgcatatcgtactggagagctaaacaagacaggtcgtgcccaaaaccccagggaagattttgaactaatctttccgagctgaccggagcgagatctcaaggttacctcgaggaattgctgacctatgaatactagtgaataaaactccaaagaaccccaccttcatattggagaagacccatcttttaccattaccacaggtgaaggc

SEQ ID NO: 377327 - DNA, 334 bp, Zea mays subsp. mexicana
acctttctttccgcggagcgccgacacaaaaacggggggggatttaaatgcaacttaccgtgcgcatcacacaccaacatcgggagcaacgccggcaacggaggcgtgctgcagcaggcacaaggagcaggagacgcgcatgtgcacgaacgcgcgcgaccccaagctgcagccgacaacaaacgcggccaaaggcaagaacgccatggccgcgagcacggtgcccgcgccaaccggcaaaggacaacttcagaaagcgccgccgccgcgcgaacgcacgcgagtggaggataacatatgacgacagcagcgtgtgccactggacagggacaga

SEQ ID NO: 377328 - DNA, 499 bp, Zea mays subsp. mexicana
ctacttccatcttggtcaccggcggcgatggcgagttccaagtccggcatccctatcaaggcagaacaagattcggatggctcggcacaaagcacagctgatatgacggcttttgtgcaaaaccttcttatgcagatgcaaaccaggttccaagctatgtcggagaacatcatttcaaagaatatcctcaaatcatttacctttttatgtattcaagatttttagcatgcaaagtaattggcattccaactattttattttagcttctagaaatattgaaattattagcagtgtcactgcagcttttaccatagtatgccaatttattattgtgtgaatgataatagtgccaaacttctagttaaaagttcagaggtttgggaattggaaaaggatgattgattagagaagtttccactctgtgtaagtactccctctatcccaaaaagaatataactatgggtttgtcccaaaaagaatgcaactatatgttacgtgc

SEQ ID NO: 377329 - DNA, 223 bp, Zea mays subsp. mexicana
  unsure (1)..(223): unsure at all n locations
ttttataggctcctgcnctggtactcccatcagggggttttttttaccagatcgcggtttttctactacaagtccgacgaggccgtggccgtctaccccgagctgaggccgttctggaacgaggtgcgcacaagaaagacaaggccctagacgcgaacaagatagtcatcaacagcagcatgctcatgtgcaaccgcgcaaacactaaccaccattatttggt

SEQ ID NO: 377330 - DNA, 231 bp, Zea mays subsp. mexicana
ttttaaaatgagaggaaccatgtatcaagagattcggtgcccaaagttccaaaacgacgaggtcgttctctttttacggaagagcaagagaggctcataagagacctttatgaaaaatataaggatggtcctaaatgcagtcatctaatagctgagtctttagaccccagcgggaagatatcttctgctcaagtttctcgtaagcttacacagttaggtctcaggaatgtc

SEQ ID NO: 377331 - DNA, 234 bp, Zea mays subsp. mexicana
tttcgccctcgtctccgaccaccgcagcggcgactccgcctcccggtgatcgggccgggcaggccggcaactaacgttcggccttgaccgtccgtcgttgtcaacacctctcccagctcagctcggctcggctcatctgccgccgcgccggcgttcgttgtgcgatccgtcgtccgtccgggcggctatatctgggctccgacgacaacatgatccaggtaccgaccgacaaac

SEQ ID NO: 377332 - DNA, 233 bp, Zea mays subsp. mexicana
ttctcacccgggcgggcaccagaaccgcgggggaaattctagaggcacacccgggccatcccacaaccaacctgcgcggtaagcatcaccccatcatcagacatgaccatccaaacaatattgaacactgactactcatggagacttgcacccaaccacgcacaggacagcagcaaagacgtgctggctgataagagggcaacatgcacgaaggagactgacgaagccgagaa

SEQ ID NO: 377333 - DNA, 136 bp, Zea mays subsp. mexicana
tcgttttaaccctgaagggaggcctgcggaaggggggatctttaaagatctctccaggcatgccaaagacacaggctcagattaacatgaactcatatagaaagcgggaggcatggaactaattaaggatcagatt

SEQ ID NO: 377334 - DNA, 234 bp, Zea mays subsp. mexicana
tttggtgtaaatctgcctgcgggatcagctcctgcggcagctgctcctgcggatgaggctgaggatgatgatgaccttgatctttttggtgatgaaactgaggaggacaagaaggcagctgatgagcgtgccgccgctgccaaggcctcttctaaaaagaaagaaagtggtaaatcctccgtccttatggatgtcaaaccatgggacgatgagactgatatgaagaagctggag

SEQ ID NO: 377335 - DNA, 232 bp, Zea mays subsp. mexicana
tctccacgcgtccgcccacgcgtccggaatagcagaacatcgaatttctctccaatcgcgccatcgccatatgctctccttcacacttgaagttatgcttgattggatgcctgggttcactatggttgcagttctgcttcaagcaatgaccatgagtcgcaatcgtgggctatgatgcaaacaccaggctttgtttattggctaatgtaactatatgatgaattctaaagct

SEQ ID NO: 377336 - DNA, 230 bp, Zea mays subsp. mexicana
tccaaaccgacgcacacgagggacaaacaggggaacttgaacgcagaacccgagaaaccccgacagagccaaccggccggcggcccgcacggggaacgccagacgacaagcagaagagcagacagccagaccggagacagcaagacgagaagaggagaacagaaagagggaacccccgccgagccaaccgagcggaaaggacaagaccaagcacacagccgggagcaggg

SEQ ID NO: 377337 - DNA, 234 bp, Zea mays subsp. mexicana
tgttcgttctgaacgacaggaacaagccaatcatcttctccatggctcgtctcgaccgtgtgaagaacttgactgggctggtggagctgtacggccggaacaagcggctgcaggagctggtgaacctcgtggtcgtctgcggcgaccatggcaacccttccaaggacaaggaggagcaggccgagttcaagaagatgtttgacctcatcgagcagtacaacctgaacgggcaca

SEQ ID NO: 377338 - DNA, 210 bp, Zea mays subsp. mexicana
aaccagaaacgggctgttcatagcacagatcggccatttaccacacagcaaaaccaatgaaaataaagaccagaccaatgaccgatgaatcgacccgaaagaaagaggaaacccacacaaagacagcaccggagcctaagcaagagacattcaaacaacagggtactattccatgtggagctcatgatggaagaaaccaaacggagacac

SEQ ID NO: 377339 - DNA, 293 bp, Zea mays subsp. mexicana
tcactacttttgaaggctggccgcctgcaggtccttccgatttccggtcgcccacgcgtcgttgctcgctccgaatctcggcgaagtgtggggagcggctccaccctccaaccaagcaccggatcaaccaaaaggcgggcgcgcgggcggcaggcggcggtgctgagaacacgggtggcactgtctggacggacgctgtggatctcggcgattcttcgcggcctgcgtcaagggcggatcggcagcgatgagcggcggcggcggcgggagccccaataacacggagtggcgct

SEQ ID NO: 377340 - DNA, 238 bp, Zea mays subsp. mexicana
ttcacgcgtccgcccacgcgtccgcgccgctcgaatccgccatgaagggggccaaatccaagggcgccgccaaggccgatgccaagctggcggtgaagagcaagggggcggagaagcccgccaagggcaggaaagggaaggccggcaaggaccccaacaagcctaagagggctcccagcgctttcttcgtgttcatggaggaatttcgcaaggagttcaaggagaagaaccctaagaa

SEQ ID NO: 377341 - DNA, 232 bp, Zea mays subsp. mexicana
tctgattcaatacttaatttactaaattaagcaatcgatttaactgttgattttcttaattaataatagttgaacttgattagtgtcgatttggaatctagaacattcacaacaacaacaagatcaagaagaacaatggcaggtctcattccagaagaaactcacggtttttcgtttcacaattatgaacgaaacgaacatttgaacggtttgggatatccggttccgaagt

SEQ ID NO: 377342 - DNA, 241 bp, Zea mays subsp. mexicana
tttaaccctaaccagagcacatcacacggggcgacggcggccggcgctgcgccaccggcgactggcggctggtgccccctctcggtccccactccccagcacggtgacggcctgctgcagcagatggtaaattatttctcagactcagagtgcaagaaagttggttcgtccagggaagaggaatagaggttatggttttgtgtgagattgattagcatctgccttcaaatcattcccttgg

SEQ ID NO: 377343 - DNA, 239 bp, Zea mays subsp. mexicana
tttctacgcgtccgaaggaaacggaagaacatgggtagttctgattggagagatggtaggccatttgatagtagagggtcaagtaattggccagataatgttgggaagttcctgaggtttcacctgtacaaagagaacatggacacccaagaagcattaggagtaataggaaaaatgctaggacttcagccacggtcatttgggtttgcaggtacaaaggataagcgtgctgttactac

SEQ ID NO: 377344 - DNA, 175 bp, Zea mays subsp. mexicana
ggcggccgcccttttttttttttttgacgggtctgttacacagatcgcgagaatttacatccttctatatttccggtatgggaaatccccagaattggaacccctgaaaaaggaaccaggaagggcctgccaacagggggagcccagaacttgctgcaggatcagtcagtccaac

SEQ ID NO: 377345 - DNA, 310 bp, Zea mays subsp. mexicana
ggatggtactttcactagggcaaatttttgacgctatacaaatatcagcgcctcacatggctctgatacacataattgactggtggaaggggaaatgcactggggggagcgccatggccgatcacccgccgcatttaacttagcccaagtgcacaactgggacaccgcattgaggctttactagtacaatcacactccacacggaggatgtgagcatactcagttgattctcacaagctgaaagcaaggaatctgcgataactgggatcatatgctagtttgagatacttacggctggttctgacgggac

SEQ ID NO: 377346 - DNA, 350 bp, Zea mays subsp. mexicana
caggttaaaattttggaccagaaggccaaaattttggcccaagtggaatctttgaagctaacagtacacaattggttggtcacatttcacaattttatgtacattgtttccaatcttattttaaaggtaagaacttcacctttacgtggtgcaacttcgaacggaaagttttgtacagaactgggctggttgaaaatcgaacagttctgcatcacaatttccgcgtggaccaacccggctaccacgtttggccctcagagaataacttcagacccgccgagatgtcatccaaccttgagctagatccaccgagcgcttaattgctggcgccaagtaggacaagcttgagg

SEQ ID NO: 377347 - DNA, 428 bp, Zea mays subsp. mexicana
gggacgcccccgggggccccggcgcagaatcccgggggagacaccacgcgcgcgcattgtccgtaccacctagcgcgagtaggacgcggggtgaattcaaagctggaagccggtactagccacatgcgcgccactgtcacactgacgcaaggaggcaagctgcagataggggcgggcgccaccacaaggcgcacactgaccttcaaggatctgaacctcgcgttagatcccaaggacgactagggtgagctataagtgctcacatggtgggctaccctctcgcacattgccgcaattcagatggccacttggcaggttcagaacgccatcaagggcagaacgacggactaccggtacaagacgaggagagcctacgctcattgtgccatgaagccgaggataaccaactggaacactgtgataaaaat

SEQ ID NO: 377348 - DNA, 369 bp, Zea mays subsp. mexicana
cgggctcttgggtccggcctgtggccgttcccaacctcatggcgtatttagcgagcagcacagcatgccaaaagcggcgccgccccccgcacgcacaaggtgattatgtctgggatgggatctgatgattcacactgggcaagatgaatgtctgaacggagatgtttcacagaaaaaagtatgacctgggccgaccaggatgaagcgtaaggaatgccctcacgacacgaggtggaggactctacgacaaaaaagctggggggtagattgcccaagctggccgccgtggacagacatgaagatgcaggagctcgatgcgaccagattcggtgctgttgtgcccagcgggggaggggatctaacaggcct

SEQ ID NO: 377349 - DNA, 542 bp, Zea mays subsp. mexicana
gtctttctcctccctgctggcgtacctggccggtggcagcagctggcacgaggaggaggaggacgacgacgagggcggagcggcgcccgacggcgggctctctgacctctacgacctcttcgtcggccgccaagccgacggccgcgggcaagaggaggatggcgtggatggtgtaggagagattcaggcagttgaagagcaggggctgctggatgccaaggatggcgaggaggaggaggtggaggacgacggcgacgacatggggttctgcatggttggcaccaccatcgcgctggagttctccgacggcgaggaggactggatcgtggtggaggagatctgattcccatctcgtcgtcctcggtttggcaaattgggaagggttccaatttgcgaataagacatcctgcccatcctctgtcggtgctgtggtgtgtatgtatatactactcctgctatgttctgtgtgcatatggtaatctgatcgtggtcatggattatacatgattcaaaaaaacatgaatgaatttctcatctgtgat

SEQ ID NO: 377350 - DNA, 147 bp, Zea mays subsp. mexicana
gctggcctcgatcctatagctcctgtggccccgcgtagacccgctcctcgcccagagcaaccggtccgcacctggaggaatgcgaccccgaactgcaactgaagtggggcccccctgtcactcgaagctctgccacgggcgaattac

SEQ ID NO: 377351 - DNA, 360 bp, Zea mays subsp. mexicana
ctggttttcgtcgtcctctcggtggcctccgcggccggggggcctttgccacagccccggcggcgtcgccgccggtgcatcggcgccgttcgccgcggccctcgtcgcctcctccgccgccttcctcttcgccgccgtccgccactgagccgatggggcccggcctagcggtacttccgccgccgccgccgcctagatctatttattggagtggtattcagtagtactggtcctagggagatttcttcgttggtgtcgtgtcgtcgtcgcattttggtcggatctggtgtccttggtgggtggggaggggtttcttcctcctcccctctcccctcccatcctctcgtctctttccccttc

SEQ ID NO: 377352 - DNA, 412 bp, Zea mays subsp. mexicana
cgcgtactcatgctccgcagaggttgcggcacaagctgggggtcttttatattgagggggggccttacaaccgctgattccaagaaggatcccatcaagcttcagcgtctgctcgaggtgtttgattctttgaataagctgagactggatttcaataggttgttcggtggcaaagcatgtgcggagattcagagccagacaagggaccttgtcaaggtattgatagaccgtgctgtcgagatctttgaggagttgatcgtgcaagcggagctgcagcggcacatgcctcccccagtccatgggggcgtgccacgcttagttacctttgtcgccgagtactgcaaccgtctgcttggtgagcaatacaggcccatgcttgggcaggtgcctactattcattccaactggcgca

SEQ ID NO: 377353 - DNA, 450 bp, Zea mays subsp. mexicana
tgcggtgcctgccccagcgcctgagaccgaatctaggggcgagtttgaagctgatctggccctattgcctgaaaccaaaccagatgccaagcctgctgctgttcctgccccagcgcctgaaaccaaaccagatgccgagcctgctgctgctgctgctccagtgcctgacaccaaatcagttgctgagcctgctgctgctgctgctccagcgcctgacaccaaatcaggtgctgaacctgctggtgctgtttccgggcccgagaccaaactagtcgctgaatctgctgctgacgctgttgctgctccggcacctgaaaccaaaaaaagatgccgaacctgctgctggtccagggcccgggacccaaaccagttgctgaatttgctgctgaggctgttgctgctccagagcccggaaccaaataaaaagcccagcctgctgggggcggtgaa

SEQ ID NO: 377354 - DNA, 520 bp, Zea mays subsp. mexicana
catttattgaaacaacaattaattaaaaaagtaaattggggggaatttttaaatgtaaaggcctatttaataccaaatttattgtatttttttaaaaaaaaatctaatttctttgtaccttttgtctcagggttagtttaaaaaaaatgaaataattctcgaatgttcgaattaaaaagatctacaaatttaataaattttattattttataaatataaaaaattaatttttagaaataaaatgcttttcgctttttaatatatctaatttttttagaaataaatttaatttagttttaatttatataattttttttatttaatcattatataattattaaaaaaataaaattagggattagcttaattttaaatataaaaattttacttataaaaattttaaatatagatttttaaataattaatatttttaataatactataatctataatttttattttatttttaaaaatttcaaatttattattttataaaaattattataaaaattatatttat

SEQ ID NO: 377355 - DNA, 417 bp, Zea mays subsp. mexicana
cattatgtaaggaagtgtgatcataatcactgcagggctatacagattattgttgcttcatgtccaggcatgcttgttaaattatgttggggtttccaagtttttagcacctgcttttactcagctatttgatgtcatcttgcagtagctaaataataagggctctgtggtattagcattcagccgtatccttttacgtatccttattcagctttacaatgtccttgcattcggagttaatacctgttacagttggatctgttaggttaaatttttttcttgctatacaaattcatttacattgatccaggttcttgctgtgctgatattttagccatttcaccgctaatgttttggaaacactttcagctagcattcaagttttttttaataatttattcttgaattttactcagt

SEQ ID NO: 377356 - DNA, 358 bp, Zea mays subsp. mexicana
ccaagatcttaacctcctgaactctctggaggaagggcggggactatgtcatcccattgaggggaaataagaaatgatcagaaagaagactcccacggcgatcaacatgactatctagatcttgacagggagcctgctacctacagctggacagaaaactgcatgtcgggtactgactcacacaatgaaatctgcacgcctgacaccccataaccacccaggccaccacacacgcgtatcaatatgcttcaagggtgcacaagtggtgatgagactgagaggctcaacaaaactaatgaggcaacatatgctgttgcatacacagcaagggataagacgacaagtgagattgctgcat

SEQ ID NO: 377357 - DNA, 337 bp, Zea mays subsp. mexicana
cgtctttctccggcgttctccaagcctcgctccgaggttatatttaactaattacacggtctcttgctgcatctacatgctaactatatggatggcatgcatagaaatatagtcacgtacagaatataatgtatatatataactactcacttcgacctttttgacgcgttctagttcaaaaataaagtaatcggcgataaatattcgagaacagaggtagtatctagtatctagccttggcgcctctactgaatgtacctctactgaatgtactcgtcttcagtcttaagtttggtgtggtggatggaaaaacatcagaaactgataaaaccaatag

SEQ ID NO: 377358 - DNA, 465 bp, Zea mays subsp. mexicana
tatgacgacacctaccgcgttgccaacaccgggggagccttttaaaatactgggggttttcattcaaccaagcaatgaagcagatgtacctggcacgtcctttgctttcatatatacagcctcactcgatcgatcagtgactgctggtgttatgacgacatcccaaaacaaatgcaggcgttggttaaggcgagcaaactccggcaatgcgacgtctccggcgacggcgtcgaggtggtaccggtgccgctgctgccacgggcaggcgcatttgcatgatccatcatccatccaccgcctactctcctaccgtatattttgattgtatcttgtttcttttctctctctaaaaataataaaggagagcatgcatcatcagtttccattggcgtaaaaattattttctttagacgagggagcgttacaacacaaatcacttgccaacacttaatgcaacgccccctc

SEQ ID NO: 377359 - DNA, 486 bp, Zea mays subsp. mexicana
  unsure (1)..(486): unsure at all n locations
tgctctcttgtagctgtactgtcgggacctnagggcactttaggactttgagggtttttataaaccggctggtctacggccttcattgatcttcagaaggccataagcggtgaacttagcaggcaactgtccggtggtagtgttgcagctgtaaaagagctggaggatgttgatgtatgtgctagacagctgcatacattgacttgcactgttcagcttgaagaggagaatgccagcctggctcattcatttagccgttcaaaggaagtggtcctgacagatactacagcccagggaagaggccatgtggataatctcaagttggctgatgatagtagctgtcagcatgaagtgatcatgctgcaaagtattactacagaaggaggaattggtacagcttgatatcaaggaggataccgagaccattggccatacaaaggaagtgatggtgcctgagaaataattgacagaggacaccaagatgat

SEQ ID NO: 377360 - DNA, 359 bp, Zea mays subsp. mexicana
ttttaagcctctgtggcaaaatcatgcaatattggatgttctctaagctttggcagctccaacctttgtggtactctggtgtctacctatgcctctggatcagaaggtactgttctaaatgaacctattgtactaagaaaagaatactcaaggatcttgttggagttcgaggcaggaagttttaagaaatatcagttaccacgaatcaatggttcctatattctccaatgtcccagtcgaagttttacttgcaccatgggaaactgtggatgtttgcaaggtggtaaagtctctattgatgctcaagatagactttggagcttcgccattaccattggtggtaatataaacatcaaggg

SEQ ID NO: 377361 - DNA, 561 bp, Zea mays subsp. mexicana
ttgtcaaagaattttgacatcagcgaggaagggggggctatccgtatagcactagaggttgccagttgcccagataagaagaccgcagctgggaaagcatatgctttggccctgtgcaagggtgtggtccttctaagattccggcaatcagaacagaaggccatcaagtgcatgagaggccttgtgaatcatttggctgcttcagtggtttccgacaaggagctcgggaaggagctagctcaaatggctgcacggcttagatcgcttgatgcctgtccagacgaagaacttgcacaagatgacgcagatgccatattcaagaaactaggattcgatgatggcttcaagttggacaccaatcaagcagtgcctcctacaccagcaccacggtcagtccggcctccggctcctgccaggagaagagcgagacaggcaccgtcctctagcgatgacagtgacgaggaagggggagaagctgacgtgcctgcaacatcgggaagcaagggtccagccactcccagtatgactgctgctgcacgttctcagagagcaagcaagact

SEQ ID NO: 377362 - DNA, 573 bp, Zea mays subsp. mexicana
  unsure (1)..(573): unsure at all n locations
tgtctantggccggagatggagtcgggctcgaggaggagcgctggcacgcgctggtgatccgtttcaacgacggagaactactgcgcgtcggagatccacctgccaacgtcgtagctgctaccggagatcactcgccagctccgcgcgaccctgtcggccgcacgcgccggagaaaaggaaggcaacgccggagatccgtcgccagcgccgtagtgctgccgcatagcactcacccgctccgcgcgaccctatcggtcgcatgccgcacgggccagagctgcagctgagatttggatacgcacgcaccggagctgcagtgtcgacgcggcggctgcaggttgtgtgcgccggagatctgcccgtcagcgccgatgactcggccggtagcacgacgtcgaagatgtagtcgggagagacgaagatggaggtggcgagtggacgaacggtgttgctgcggtgctgtgttgtccaatgtgcaggggcgattcaatttgggactatgggtgaggtaggggaaagagattgacccacttgtagagcacgtcccacttgtaagagcacggttcataagt

SEQ ID NO: 377363 - DNA, 393 bp, Zea mays subsp. mexicana
ggtttttgaccccgggcgcagaaagaagcccggcggggggggttgaagacaaaggcggcggttacacccagagggaggagaggacagcgaaaggaaggaccacggcgggacgggctggaacgatggccgaagagcaggcgccaccaaaggccagaggacaagcacaaggagggcaggagggcgcacgggaggaagcaaagacgcgcaccaaagcagcggcagacgccaggaacgggagaggaaccgagggtggcacggaggcacaggacaggaacgccgcaagcccaggcacaagggaacgacgaaggagagagcgggccatggccgacgccggagcagaagaccgaaccaaagaggcccacgccacaagagaagaaaagaaggcacgaagcg

SEQ ID NO: 377364 - DNA, 243 bp, Zea mays subsp. mexicana
ggctgcaaaccacggaagcagaaagaagcccgggggagagttaaaaaggcaaaagccgttgttacaccccgagggaggagaggagagcggacgggacggaacacggcggggaccggacgcaaacaaggccgaagagcaggcgacacgaagggaaaggcgacaggcacagggagggccggggggggcacgggaagagaaaaggatgcgcagcaaaccagcgagagaggacaggaacgcgagagg

SEQ ID NO: 377365 - DNA, 248 bp, Zea mays subsp. mexicana
ggtgcaaaccccgaaggcagaaagaagcccgacgggggggtaaagagacagaagccgcggttacaccacgagggaggagacgagaacggaagggaggaccactgggagacgggacacaaccatggccgaacagcaggcgacacgcagggccagacgacaggcacagggagggccggagggcacacgggacgagaaaaggatgcgcaccacacacaggagagacacccccaacgggagaggatcagagg

SEQ ID NO: 377366 - DNA, 277 bp, Zea mays subsp. mexicana
tctgagcaccgcagagagcggacgcaacgggggaccgtttaggaagtgccacggcctttctcccccaggagcgcactgaagccagccgacgaagagccgccacctcaggcggcagcacccagcggcccgccgcggagctgaacacccggcgggcgaggccaggcggctgcacacgccgccattcgcgacgggggccccgcaagaggccaaaggatccagcccagcggaagcgcagaactaggcgcagggcagctgggcaggaccggccaaccggaac

SEQ ID NO: 377367 - DNA, 326 bp, Zea mays subsp. mexicana
gtctgaacccgaagagcaaggagaggaacaggaggccgtttaaaaggaccagccggggcttcacccccgagaagagacagaggcggaccaaccgcgggacgaaacccaacaagaccaagaggggggaggagacccgggggaggcacaagacggacgagggggccgcggcgcaggacgacaagaacaagcggaggggaacccacgacgcgcaaaagggaacgaggccgcagaaggaacaccagcacacgccacagagcaagggcgaaaaggagggccgggggaaccaccaagacaccaccagggaaccggaggagaacaggaaggag

SEQ ID NO: 377368 - DNA, 492 bp, Zea mays subsp. mexicana
ggcatttctgagtgatgaaacatctgtttatttgatttgttctggattaaggtcgcttgtgagagaatgccaattgttatctgtgtgcaattaggtcgcgtgtttatagttgcctgatcgcattttgtccttgtcccttctggattgcggtcctgtcacccaccctgaggaagaatacacctggttgtggtctccatttttctcagctactactgtccctatgccacagttttttagatgtgatgatgcggcattgcttgccttttatatatatgggcttgtctatgcagatgagtgactattttgttagtacatggcgatactttgaaaatattgttctcatttttcatctcttccagatttatcatgacatgctttcccttgataaccacatgcatgtaatcatatttatttggttcgcagcagtcaaatactctgtctataggttgttttatttttagtgaagcagagtgtcacatttggtacagcaaa

SEQ ID NO: 377369 - DNA, 451 bp, Zea mays subsp. mexicana
gctcgatgaggcacagttatggaaaacatgggagctctaaagaatataggccaattcactcaccatgcggactggatcttagtcgagatccgctgagctgaccattacaagagggtagaaaatacgagcttgatgcaagcatcacgtgacatgggagggacccctacagggggcactacactcggtgacgcaaagcatggcaacggtcaatggcttggtttggaccacgacgccgttgtgcccgttggtgagaaggatgtattgcatgaccaagcatatgtcctgttctacaaacgagtctgaaagcacgacataattgaatagatagtagctccttcggattggcgctgattaaacagccagatatcatcatgtaactatggtcctggtaatgaacccgctaaggatcagcagagtattatgtggagcgcaccctggtgccgactgagtt

SEQ ID NO: 377370 - DNA, 391 bp, Zea mays subsp. mexicana
atcgcttcacactgcatgctgcggctgagcatccttgggtcgctggggatgaggggccagtccctgaattcatctgtagatgtgggtttggccgcaggaagaggaatgatgcccgagaagaagtacaatagcaaagcatcctcggatggtctaataggtctagcgtagataattgatgatcggcaaagcgaagccctgatgatgagttcgttgttccctgtttctaatacgcgctcgactgaacatatttctttttggtacagaatatatagcgtgtaacccgctgccagtaaggctaaggcaacgtttggcacagtttgacgttgtcgaacgcatctttacgggtgatgcatcttttttttatgatccgaaaaaaggggtatctttacgg

SEQ ID NO: 377371 - DNA, 486 bp, Zea mays subsp. mexicana
gttttatcaaggctaagaaacgcggcggcacttggcgggccaggagctgaatctgtcaaacctggaaatgagagccatgtagtagccagtcgcgccattgatatagctgctcaagttaagcaacccacgcatagcacttcgaagagcacctgtgagaagttcagcgccgaggacagtgtgccagggttccgtgtagagcctcgggcactgccaacctcagcgcaggttcctgagtgtggatccacgtggaataacacaggggatcaccatcgttcggtcctcggccgcgtttgcagctctgttcgcgttgcgaggaagaaagggccatcgaattcgaatacgccacagtacgacgctgcagacttgaggaacggcggtgaccgcaaccagcgagcagacaggcctgccgtctcctctcagaagaaagaccagcaggaggaccgtggaaggaagtacaaaaggatccactattctgggccgttgatg

SEQ ID NO: 377372 - DNA, 471 bp, Zea mays subsp. mexicana
gaagatacgtttagaatctctaaatcccataagggattctgttattgtgtcagtaagtgaataaccccaaggccatagatctgatgtttcatctttgaaattatttattcctcactgtcagtatttctgctttagtattaacaggaacgagtcttattgattatatgtttcctgtttgctagtagacattagttcttttgttgttttctgagcagataatgttggttttggtctcaactagtatgtgtatgttccgtattattgtctcaccttttcttgtatcagggtgtttatactgcacagcatgctactctgaattcagtacctcagcaaccaactgcacaaaatcctgcagatgtaactggccgtcagaatattgccacaaagcctgcttttatgcaacagcagcctatacctgcggaggcagaaaagaagagaagaccctcgaattcggcaagagggaggggtggt

SEQ ID NO: 377373 - DNA, 317 bp, Zea mays subsp. mexicana
caagcccctcgggcaatggcgaccgcgaatctgaggcaccgggcgataccgccacagcagacgacaaaatggcccaaggaagcatctttctgccagatgctaatgcaccctgtgccagaaaccagaccgaagacgaggtgcgtctaatgctagtgcccaaaatcaagaaacagacaaacgggactgcgcgcacctataagccccaacaccaactcagcctgtcagtatatagtgccgaggtcgtacactccataagacagaacgtggattgacagacacgagcacgcagttgcctgaagaccaagctagcctgggaa

SEQ ID NO: 377374 - DNA, 413 bp, Zea mays subsp. mexicana
  unsure (1)..(413): unsure at all n locations
atcctcctaacccgcaaccacnggaaggganagagggggattttgagaaagagaacccccgcataccccccccaggaagagagggatcgctggaccacggccaaccaaccaaacagcaaagaggcaacggcagacgccaagcaagcaaaagcagagccactagacccacacaaggcagcgccagacaaagagccgaagactgacgaaaccaaaaaggaggctccgaagcccaaagcaacggagaaagcagcagaagaagagaccgcaccaaagcctaagccaaagaaccccgacgaaggggctcaccccagcaagacgactccagaagaagggcagaagcggcacgataacacgaaaaccaacaaccgtgaggccggtacaaaagaacccaagggaacgcacgacccagaggg

SEQ ID NO: 377375 - DNA, 492 bp, Zea mays subsp. mexicana
  unsure (1)..(492): unsure at all n locations
ctcatctggtacaccagtcccgaggaggcggacgacagcgccgttaccttcgcctctgatgtctatagactgggtgtgctcttgtagtcttgttcgagctgttctgcacattcgaaacgatggaggacaagatgcgggcaatggcgaccgcgaatctgaggcaccgggtgttgccgccacagttgctgctcaaatggcccaaggaagcatctttctgccagttgctaatgcaccctgtgccagaaaccagaccgaagatgaggtgcgtcgtgtgctgtgtactatttttgtttctgccagttgctaatgcgtctcctcaaagctgggaactgatttgtttgttagtatatgtgttgtggtcgtacactccataagacagaacgtggattgacagacacgagcatgcagttgtttgaagatcaagctagcctgggaaattggctgaatcttgcagataggaaaaccaatattcatggngcagtaagaaacact

SEQ ID NO: 377376 - DNA, 490 bp, Zea mays subsp. mexicana
ctcttctacaagttgaggtgtcggccaactgtggctgtttcttgactctagtatccggatctaactccattaactcgaacccctttaccatgcatgtatgaaatggatgagatgtaatattgggtcgagcttttggagtctctcatgcgtagatccaggttccagttgcgttttttctgttgtgaatcggtcagtgcatctgtgcacttttgattcagtcccaattttgggaatatttcagttatggttcaaaaccgtaatccgatctgtatttctgttacatattgactatttcttggtcgtcgtggatagttggatcttgagccctgtgcaccgtctctgttgatggttgaactgatagggttaggttattaaaccctaaccctaaactgacggtgtgttttgctctttcggtttccatggttgtggtcgagaccaagtctctcagttgccgaaaccctaaatttagtgttaggtaaaccctaacccg

SEQ ID NO: 377377 - DNA, 403 bp, Zea mays subsp. mexicana
  unsure (1)..(403): unsure at all n locations
cgcgcccggcgtcctaaacctaacgactctactcacatatgagacattttgtggatattctacccgggcacattccgcatgagctgaggcctcccagggcaagctcagccgataagactgaacacttcacttaagcatcgcaaactaaatctcatctcgcgtcaacgtaaatagctggcaaagccatgctacttcagaacacacaaagngagtcttaagcaaatcaacacgaccatgcaagcaaaaatggagcatcttgacataggctcggcactgcagaccgacagctagaaataacctggatgagtgaagttcttagatgcaacacaaaaaaatcttgcagaatactgtgaatttgtagcaccgggaggaattatgatgaacactctaatgaacaccatga

SEQ ID NO: 377378 - DNA, 416 bp, Zea mays subsp. mexicana
  unsure (1)..(416): unsure at all n locations
atataatttagtatttttacgaaatatatagattttgtataaagtatatgtgaactatttaaaaacagggaaattattcgctgttgtaattgaattacattattcgtgttgataaacagcaaaactaaatagacaatttttataatttaagatttaagtaaaattttatatgaaaaatgataatttttctgatattaatatttttgttatgtagtaaactttctactatgtgaatattactagcgattgatcaaatcaaaccaaaccaaaacaagaataacagaaaatcaataatttgtgaaaagtgaagatcaaaagtgttttgataaaaaatatatagaacattaaataaaattacgaaatattctgtgatttgtccccnnanaannnaannnaaaaaaaacccataaaacaag

SEQ ID NO: 377379 - DNA, 326 bp, Zea mays subsp. mexicana
aaggacccccccgggcccgacccgtactgaccggcctggcccacgcgccctttcgtttgtgccgacaacggagggacctggggagggttgggtggcacttcacgtgggttttcccaaagagaggcgccaccatgctgaggattgctggcaggctgaaccagagtgctcatgattgaaggatagagtgtcgcggcttcgttgagggggctgacatatgccttgaacgccctcagtgtgaaaagcgggatcccacatgtgggtgacgaaaacatccttcacacccacagaggtggcgaaacttgccctcactctctcggagaaagaac

SEQ ID NO: 377380 - DNA, 527 bp, Zea mays subsp. mexicana
ttggacgcgtgggcgtggatctccgatctgatatccccattccattgccatcgtcgcggtgacggatccctctcgggcccaacctctccaacaattgagtggcccaagcctcggcctctccggcagtcgagtagcccgagggtggcggcactaatgtgggcctggatggtgaggctcgtgtccacgctagactggtgctcacgacctccccatggaccatcgcccagcggtgctatcacccacactggtctagcgcctagtcctcgccaccgtcggcggcgtcgggctcgagtcatcatcagccaggtgaatcggtccgctcattccccttaccccatcctctaggtatggatttggtctatcgacggttttcagatccacaggtttccactattcaacgttgatgccatcccttggagattccacattcccacctctccggtcgccgcagctgtggaggctagatgtgcgacgttggtggctgagaaggaggcacgagcggcggtggaatctgccagtaatgtcgt

SEQ ID NO: 377381 - DNA, 538 bp, Zea mays subsp. mexicana
  unsure (1)..(538): unsure at all n locations
tccattcgtccgctccctcctccctgcggcggcgcggcgagtgcgcacaatgcacctcctccctgcggcggaacggcgcggcgagtacgcatcccgggcgcacctcctccctgctccctcctccctgctccctacggcggaacgatgcggcgagtacgcatccggtgcacacctcctccctgctccctactccctcctccctgcggcgtcgtggcgcggctagtcggcatctggtgctccctgctccctcctccctgctccagttgctccaagttttgtggatccgtgaggaaccagtgcgcgtcggatctccatcggtctccacggcgagtcagcgacggtaccaatgctccagatctgctgctcactgtcactggtgagtggtgaccggatctgatgctcactgtcactccctatctagcacagaggtaacctcatccactattgaaatgttttgctcactgatgaattgtttagtttacaccggatctactactcactactgaaantgttgttggtgggaaatcgttatctggat

SEQ ID NO: 377382 - DNA, 399 bp, Zea mays subsp. mexicana
tctttgaccaactggcagcttgcatatttggaggataggtgggctactggtggtggagctagaggtcctgacaatcaataggactgcttagttggtgatcctagcataccaggaccagcagatgtctgaaaccgcacccaaaggacctgactgtgcgacgacgaataatcagtggtggcgcgtccagagcaccagcttgaccgagcgaggacctagcacgacctcctgaggaagtgtgactccatatgcacaaacatgggcccggtttacatggacaagggcgcatgcaagctcagatgccagacatcacatcgcgatatctgtaaatgtatgatgcactagagactgatacaactccaccatgtctgtgcggcacacatggacagagagacgattctt

SEQ ID NO: 377383 - DNA, 344 bp, Zea mays subsp. mexicana
ttcaaccaacacttctgccttgattgtgatagggacattcatgagagcttgcacaattgccctggctgcgagagccaacgcatcattgcattatagagaccgagtcactgcgtgcattattcaggtggtaccttaagctttctcctacactgtgacagccagcagagttgtttaatgatcaggtttctttctgacaagcttttatgagaatctagctgaggagagaatctggctgtgagaagaatttgtatcgctaaaattacgtgtggaggaagatgaagcggtccaaagggttcaagatctgacaagggatggattcttactgacgggactatacaaccgac

SEQ ID NO: 377384 - DNA, 272 bp, Zea mays subsp. mexicana
aagggcgcgactggacgcaacgacatcgaccatgacaaggggacgccgaggatcgagcctgaggaagagggccgggcccactatctcaaggccgccacatctcgaagccagggccggtggcagcatggctgaggacttggatgcaagggaagagcacagctgaaatctaacagcactggaggaagacgtgaagaggccaaagactgttagctctaaagagggactagggcaaaaattcaggcaaccttcaggaacaggaacgaccaccacga

SEQ ID NO: 377385 - DNA, 255 bp, Zea mays subsp. mexicana
acgctccacacgccgtcggcgactacaagggcttttgaagtggcctcagggttcttaggcccggggagaagacaacctaaaccaattggatctgggaggcccagagctaataagtcacgttcttcatcaaggtatataaagaaactttcttgtccggtcatggcttttccaactgccgcaactgttttgcttaatgagaaccagccgatctataaaggaaacagggttgatgcaccaagtgccaaaccactggaa

SEQ ID NO: 377386 - DNA, 417 bp, Zea mays subsp. mexicana
  unsure (1)..(417): unsure at all n locations
atccggccatttcgtttggcaccacaaacatagatgntgatgcgggggggttcttatataactcgggactttagtggtaccccacgcttggtttgaggacaatccatggtgacattattacccattctcatgctgatgccattggagggctcgattgtcttctcgattggacgaacaatgtcagctattgatccaacttatgtggcagaacgtgattttgaggtgacgaagatgacccactattatcttatcgacacatgtgtggttatacctgtagccgcagtttcagcatttgaattgaacattataaaagaggaaccatttatggttcacaatcttgaggtttgtaatctgaaacttgaactagcacgtgtaacggaataatatgcccctacccgtgtcattgtgatttataat

SEQ ID NO: 377387 - DNA, 120 bp, Zea mays subsp. mexicana
  unsure (1)..(120): unsure at all n locations
ttacaatccctaccaccgccggacgagcaaaggcaaggggttaatttaaccaantgcaccgccatcaaaatcccaatccgngaatggggatgaaactggttgacccacatcttttgcaaa

SEQ ID NO: 377388 - DNA, 136 bp, Zea mays subsp. mexicana
gccactcggccagaatcaatccgcgccggggtttattataaaggggcagacgctaatacagaacacatccattagggagagcggtaaccgcctcacccgcgcccccaaggtgctggagcaactcacgaggcatacc

SEQ ID NO: 377389 - DNA, 353 bp, Zea mays subsp. mexicana
cttcattttgtaggactggttgaccaaccagggccaggggtccaaattaaccggggcattggcatttctttcccaatccgggaatggggatgaaattgggtgatccacatcttttgcaaagctcatgccaagaagaaagaagatcaagcaatttttgcttttaaggaaaaagattgaaccgttcataaaaataattgataaaatcggtcaaaattttttgcttaactaggcattggaaaggaccatgttcaaaaagagccctttttttaaacaactacactgggattttttttcaagcccttgcttgttttagaaaagagaaaaagggtaaagaatggaatcactttggagat

SEQ ID NO: 377390 - DNA, 185 bp, Zea mays subsp. mexicana
gcccgccggcgccggcccggacggactggctggaccgacccacgcgtccgctcactcgtccgcacaattaatggagaaaatgggctggggtcatttggaggatatggtggccgatataggaaccaggcttatgctgtcaaggcaagggtcaaaccaagtgtgccatctgaacaaataaatgaatc

SEQ ID NO: 377391 - DNA, 153 bp, Zea mays subsp. mexicana
gattgttttatttgagctcttcaattattacaaggagcatatatatgatacctagaattgtaaagtatggagtgagcaatttctttgcaacaataaaaggtttatcgaatgggctctggaaaaaaaataccatgattaaattataaaattata

SEQ ID NO: 377392 - DNA, 519 bp, Zea mays subsp. mexicana
cggactcgtgggctggtatgttcagtcactcaagagcaatggacctgtcaactgttgagccgtcgactgctagggattcactgagagcatcttctgttattgcaatgcatactattcatacttccgaggaagattctatggagagtgttgagtattacccaggtgatggtaatgatatcgatatgccttcttctagtacacaaaggaacattgaaatgaatgatgccttggatcttaactatagcaaccaagcacagcaaagtgctaatgcacatgctggtgctggaagcgatgcaagagaaattggaggaagcagtacaaatgaaggggaggaggtcattaatgctgaaacagttcccccttttggaagggatcaacttagtttaggaattagtggtggtagtgttggcatgggagctagtcatgaggctgaaattcatggaaatgctggttctctgcacagaactgagagtgttgtaggtgatgctgaacctattgccgagcttactgagacaatgg

SEQ ID NO: 377393 - DNA, 334 bp, Zea mays subsp. mexicana
ctgttttgttggtgctgatgctgctattgaaaaactggcggatttttttacaactgcgggccgtaatactgcggttaggagtggtatggtaccccttcctagccacgtgaagttcactatttcatacgacatgaggcgatgaacgagctctactccacctgtacttatgtgtacagtgtatgcgtgcacaattatcgcgtagaccttgaatggtctctctggtaggctaagcgcgctcgctctccttatggtactagggacctccagatatgcgttactctatgagctgaccatgctgcctgtgtttcggtgagtcatcactctatatcatcat

SEQ ID NO: 377394 - DNA, 546 bp, Zea mays subsp. mexicana
cctttttgtttctcccccgtcatgaccacaccaccatggtcggtttgttgggagttggggctaaagaacggatctcgtgtcagtttggcctccttcccttggctgcaggcagtgtgggacttcaatcaaatccggtgttcccttggatacacggatctgatccctgatgtgtcaagggaatctgctggccaattccgggttctatgctgcatcattgacgtgcggatccatacatggttgctcttgctgcagttaaggtctcctaccaattttgagtgctgagtccatcatcatcaattcatcaccacgatcgtcctcaacccgctcctcgctgctgcgatttaagggttctttctccttcctgctgtttgatgctcttttctttttacttccagcgatgatagcataacgagaaagagaaaaaaaaaggtgtgtacaaatgattttgtaaaagatcatatcatatgtcaagtacagagagaggtccacttgctacccattttcattgttcgaaaaagtttgcttaaaactaaacttctccttttt

SEQ ID NO: 377395 - DNA, 195 bp, Zea mays subsp. mexicana
ctatcaaattgcccccatctgtgttcagaagcatgtcaccctggagaatgcccatcggatgatcacgtgcatgaaaaaggacaacaacccatagtgcatgcagcacatctataaacaatgagtaggcgaatgataaaaatggcctcaacgaataccgtaagcatggccgggatccaaaaaaagtacctaaaagtc

SEQ ID NO: 377396 - DNA, 433 bp, Zea mays subsp. mexicana
gtcattattgtctggtcaaagaaagctaggcatggcggtaaagtagctactggatgaggtaggagaacccctttcagcacactaccagaataacctcaaatgacttatgaacgaattggcaggcggatcctgcgagggaaacgacgctatcctggatgcattggcttaattgggtgcgttgctgccatgtcactataactgaataagactccaattcgccaagggctatactaaatattgtctgcgctgcatgtacgcggaaatcaaagttgtacctataaacatgtttctcgtgttgactcaaagtgattacagctttcagagatccatgattagacaatagtgtgatctcaatgctgctccgaggtttgtaaccaatgtgtgatttctaagacaaagggttctgctgaactagatgaaagagaaggggctt

SEQ ID NO: 377397 - DNA, 94 bp, Zea mays subsp. mexicana
gccttatttgtcgtctgaagactaccatggacaacggggggggttttttaaggccttgccgccgtcaataccaacagcacagaaacatggtaca

SEQ ID NO: 377398 - DNA, 471 bp, Zea mays subsp. mexicana
  unsure (1)..(471): unsure at all n locations
cgggtaccagcagcgcgggcgtagggaggagcgccgggatggatgtggtcatcgccgccgctgcggtcgtcgccatgggcacggggaaccgcgtcctctacaagctcgcgctcgtgccgctccggaagtaccccttcttcctggcgcagttcgccacgtttggatatgtagttgtctatttctcgatcctgtatcttcgatatcgagcgggcattgtcaccgatgagatgctgtctctaccacagaaaccttttctagctgtaggactcttagaggcctttggagcagcagcagggatggcagctggagctgttctttctggagcttcaataccaatactgtcacagacctatcttgtctggcagcttcttctatctgctatatttttgaagaggcgttatagaattaatgagatagcangatgttttctagtggcaattggtgtcataataactgtagcaagtggatctg

SEQ ID NO: 377399 - DNA, 323 bp, Zea mays subsp. mexicana
gtcggtcgttatcagccgcagctaatgtggatggcgggggggttaacattgaaggcacatttgatgcgcatgcggaggggcatgggacaggttcaggtgccactgaaggcagtgcacggagggggttcaacaatggccgattcagaagggatggaggctagcggatgccaaagatagtggtctataattagctgccagagccaactacaagggagcttcccaggaatgaggacccgaatttggtgagaagaaataagatgatgctggggcaggtctttgacggttcattatagaaattacaacaagaagataaaaaactgtct

SEQ ID NO: 377400 - DNA, 200 bp, Zea mays subsp. mexicana
gccattcgttcgggcgccctccaacaccacactacgggcggggtgttttaagtgcgagccgtgcgcccagcgaagcagggggcgctctctcagcggcagatgcgtcagctatgcactggctcgcgggccattttggtgaaacagccgaaactgctccagctgaaggctgccattaagatcacgcggtgacaaacatggtc

SEQ ID NO: 377401 - DNA, 486 bp, Zea mays subsp. mexicana
  unsure (1)..(486): unsure at all n locations
cggtgtcgtatcgccgagctcgccgacgagtacaggaggggttttggagagctggacgcggcgttttctacacgccgncatggcgtcgcacaccagccgcatgggcgaaccgtccaggaggcagacggttcctgacagacccaaggaggaggactacttctacgcgaacccgcacgagtgcctgcaccagccggaagatgtctcggacttgtgatacaggccctgccgcggtacagtacagtggatgatgcgcgggctttcggaatccagaaccacatgtatatgtaatagcgcattcgacagcgttgcgttggcagaggataaacgtaaacggacgaggatgtgagttaggtttcggtacagattcatggaacggtggttcgccgattcttttttctgttcagaagaataagcagaccctttcgttgttgttcttgtacaggagacgaagtcgtgaagataaaaactacagctgcagaaacgtcg

SEQ ID NO: 377402 - DNA, 273 bp, Zea mays subsp. mexicana
  unsure (1)..(273): unsure at all n locations
tgcatatctgggcggaccgaccctccaaggcgggggagtttaattagaatagcccttcgcttcacccgcccnggcatcggaaagtgggatgaagccagagaaacggcgggcactgaaagggcttacagtacggctcatctaaggagaaggaggaccttcgacaggacgcaacacctagagttaaagatactgggctacaaaacagctctgcggcaagaatacgaagaagggagcgaaaactcagtgccgaaggaccatacgaaaccagccaaa

SEQ ID NO: 377403 - DNA, 110 bp, Zea mays subsp. mexicana
tggtttgttagcaccaggcggcaaaaagagcgggggggattttttacaaatagaccaccttttggccgccgcaaaggagagcgactggagcttgaagacagagacagaga

SEQ ID NO: 377404 - DNA, 156 bp, Zea mays subsp. mexicana
caccacccgacaaccctgctctacactgcaacgcaagctgagcttcgcctacacgacgcaccagccaaagacaatgcaaccggcagggcagcccacccggccacacagaaacgtacacacataagcaaccctacaacacattaacgctgcccaccc

SEQ ID NO: 377405 - DNA, 458 bp, Zea mays subsp. mexicana
gttttttctatcggcgccgctcaacctccgcctgccgctcgcgttttttaagacggaggcgggcttcgtcctcttcggcgtgctcgcgtcccacgccgcgtggctcagcgacgccctggcgcgcggcgccgcctggcgccacaccgggaaccggggcggcgtcgacgagtacgtccgctacgccatgctcagcatctccgactgacgcgcgcatccacggcggacgacaaccaccatctccgactccgtccctgcgcgatcgagaaggcgctagctatcaagctgcggtccgtcgcgcatgctcgtggtggcaactgcatgccgcccctcgctagattagcttaggatctctctccccctccccctttgtaacacattgcttgctcgctcctttggtttcttcttgttcgtagcatgcgtgatttttggtagcatcggaaagatctgggagattgttg

SEQ ID NO: 377406 - DNA, 403 bp, Zea mays subsp. mexicana
ttcaaacagaaaaaccgctgcaggcccatggggaggggttttattaaaatcctgcatggtttataacagtcacaacatagacattccagcacctaagcactggtcaacacctttacactaacgaaccaccaatcaaggacgaggcattctgataggcaacccacacatgatctctaatgactacacgcataatgaaccttcacattgctaacgcttgtgcgctctaacactacatccaaaggatggagatcataatcgctaccgataggatgtgctgcatgccatggtggaaactgagctatctgatcaccaccctgaaaaagtcctgggatatgctgcccactacaatcaggattagctctcaacatcctcaagagtctgcaataacgaacgcccaaaaaga

SEQ ID NO: 377407 - DNA, 426 bp, Zea mays subsp. mexicana
gtcttagattgctccagataatatgcaagttgaggtgggctgaatttacaaatcagaggcgcaattcaagagataatgccgtatttgaagcagtcgctgaagcaccaagtactgcacacgatcatactgaggatgatactgggaatgaagttccagaagaggacatggtatcttctgagttacaagggcaaacccctggtgagaaactagtggggcaatctgcaactgaacagatggtgggatctgaagatccaaagccgcaagccgaaaattttgttgctgaacctgttgtgctgggtgcagtcgggcaagtagaaattgaactggaatccaaaactactgttgaagtgtcaggcgaacaaggctatagtattgagcagactgttcaaggggaagctttaattgaaggcgcagggggacaacttg

SEQ ID NO: 377408 - DNA, 403 bp, Zea mays subsp. mexicana
  unsure (1)..(403): unsure at all n locations
cggtcgcgtggggcaagggatgccgtgattaacgacggaaacgaagccgagagggagaagcgaagctagccttgcatacacccggccccgtcccaatgcccaccgcttccggctcggatcccaaaccctaaccctactcggccgtccgcgggcccgccgccggcgacgcgatcgggcgccgacgctgacgcgctctgtgccgcgtgcgtgattctctcgcgcgagtaagcgttggaaaaggggctccctggctgcagcgacgcggccgacgcgtggccgaggtgcggatcgggaggggaggacggttggagcgagatgccgggngacgtcgcgacttcgcggcgccgggcccgcggccgtggcttcgtcgtcgcagaaccaccaccatcacggncccacgacc

SEQ ID NO: 377409 - DNA, 388 bp, Zea mays subsp. mexicana
gtggatcagaggcgccgcatcggactagctgtggcgaggggctatttgtggaggggagactgaggtatcaggacatgctaactgataaagcatgagcgcagggctgcagctcggctaacgatcacataaccaccagtgacggacctctgaacgacaccagcgtaacaaagaaggtttatggggaatgctaacacatcaccatggatgctgacaaagaatctgtttactaatatgccaatgtcggtgttctatgagatgagaggagactgcacactgaaccatacaatcttgtaatgctacacgacttgaccaggcgcaagctagattatgtatcaaagcgcatagcgctgtgtttagaacaatatatgctggggcacaggctattgat

SEQ ID NO: 377410 - DNA, 383 bp, Zea mays subsp. mexicana
ccggcccgaatttcccggttcgacccacccgcccgcattatttcaaacaaagcacaagggtggcttggggggcttataacaggggggccggaacttgacggcggattagattgtacagtccaccgaaacttttttgggagtatagcttaaaagctttgagacagagctttccgtgccatagctttctgataaagggagagggaatgatacatgccgcggagtatttatacgggcacctgctatattggaagtaggtccagatcatgaaatattggcggattgccctgttcctgttgacagactacaacattgacaaattgtttgaagagtgtactgtggaagaagagtattcaaaagatcgggcaatcgttgcattgcgtcaa

SEQ ID NO: 377411 - DNA, 130 bp, Zea mays subsp. mexicana
tgagaaaaccacggacgaaggcaaccacggcgaggaggaagtgaaggacgcagaggaggacccaccccaccgagaggagacggaaacccagaacacggaggacgggaaccgcccgagcaaaacaaaacca

SEQ ID NO: 377412 - DNA, 401 bp, Zea mays subsp. mexicana
gttttctactgcggtgagcctgtccttgtgccacagctacggcagtggtcagcagacttcacccacaagacgaacacaaagtttgagttccacaaggagaacttctaatggcataactggagaagctttggacgtggtcctctaatgatttcataatgtgaattacgagggttgtaatatatatacgagtagaataaaatgatgggagttattttgttgtagatgtcaaaagtcaacattttctttttgcaatgtgctctgtccacccctgtttactcctgctaggagatataccctatgtcgtctaggcgaagtagataaagtgtcttttgcatacaagcaacattagaagttgtaacacatgagaacatgtcatttcgtttttagaccatttgatagtt

SEQ ID NO: 377413 - DNA, 478 bp, Zea mays subsp. mexicana
gtgttacgctcggtctacacatcggcaaagggcactcgagtgggtggagcgtggcgactggcgaggagggggacgacggcgccattgcgacggagcgaggggacaggtcacagccgtcagcatctggcggtgcagcccggcgtgtcgtcgtcgacggggggccctgtcgccctgcttcggcgctttgcccatgtagaccacgtacacctgaaggaagagttggcatcatcatccatttgctagctactacagaagtgcagctggtgaccaccgtggagatataataaagcatatcggcgcgcgttggagtagagtaggcacctgagagccagagcagcggcgaaggtcgtcgcccagtagcgccagggacagcgcgaggaagaacatggctgtgcgcggaggagaagccatggcagacacggtgacgcagcagctagcggcccgcagatacacgggtttggatggatggcaagcgtgt

SEQ ID NO: 377414 - DNA, 533 bp, Zea mays subsp. mexicana
gcgcggtttttttgcgctgcgacctcgtcgtggacaggctggtggacgtcaccagtcccatgaagatcaaggccggcaactgcaagttcagcttgaagttctgattcattgggttttctgttctctcttttggagcgagttcagttcagagtcgttgcgttggattcttttggcagagtgctggccgtgcacaggtgcatacgtgcagtgcactcccgccaacctcgttggcgttcatctcggccgacgtgtacaggtggtagtatataattgctgttcatctcggccgacgtttagggtttagagagggacaatacgcgtggctagaattttataattctagagttacttctatcaccacacaactgaatgcacaagacgcaacaaccaaatggaaaatgtgtgcctgccaatggaaagcacatcacaactacttttgcagcagcataatggaaaatcgaatcacccactccagagaagcttgaatttacaagcaaaaagggttgtgtgagttcgctctggcaggaatttac

SEQ ID NO: 377415 - DNA, 435 bp, Zea mays subsp. mexicana
atactgtcattttgccctttgcacctctgctgtgctgggttcataaaaagccccttcatctgctaagactgctgcatgcattgcttgtcaaggtacagagaacaaactgatgttccatctggacagtttcagctctgattgttcatttatttttcaaccctattttcgtgtgtgtatatagatatagagcaagtacatacggtggaactaatgacttgcgattgatcattattgtttccctagaaaactaaaatcttccgttccgtttaatttatgaatgatgatatggctggtgttgttccaaagattgacaacaacactacctactggtgtcacggtaggttccatgaaaagtagtaatctttatagcttatattcatttgattgagatcgtttgtactggtgaccgattagtatttgtgatgatctctgatt

SEQ ID NO: 377416 - DNA, 335 bp, Zea mays subsp. mexicana
gctgtgtattgcgcttaacgccgcagcctaccccggcggggcatttttcgaaggggccgaggagtatgagcaacacaaaccgagggaggcgacagcgtatcctgccgctgatcagacatgggtgatcacgatgctcgcggcaatgactcatagaaagatgcgtgcattgctctctggcactgggtggctcatgtgcgaaagacctgtgacgcctacccaccatgggtcaaggctggaaactcctgtagtctatgcatgaactgtagaagatgcgcatgatttgacaacaagactgctaacagccattctaagggagatcgcaagcttgacgctgt

SEQ ID NO: 377417 - DNA, 469 bp, Zea mays subsp. mexicana
ccgttttaggtagctcagggcattgaaagagtcagggctctctctctcttttccggtcccttgctgttgcgtgtttggattctgtgaatatagctagctctacgagaaaccgcataggtttgattgctcatccatggacaatggatctataataattttcttagtgatgtataacatggttctgtgctgaaacccctgtgaactgttctctaagtaggaccctgagccctacggagaaatttggaatagtgccattatcaaacttagactgtaaggtcttcgctagttcaccattctcacacgttacagacagagtgccattcgatacatcaacagagaaaagatcacctgcttggtctttttttgcccctcttcgaaatcagaacgtggctgacaccgttcgtggagatctcccgttcacttgacggctcgagcctgcgtcgagtctgccgctcctcccgttcgatct

SEQ ID NO: 377418 - DNA, 479 bp, Zea mays subsp. mexicana
  unsure (1)..(479): unsure at all n locations
ttcatattctcatctgtagaaatatattctgcttgtaagcctccattgagtttggagttcaataaccgaaacaaaaatgattggcttcacattgaagtgaagaatgtccttcttaaatggaagcagttatttacaacaattgaaaatgtaatacaagacttgagatcaagatactctagtcaagccatgggggaagacaccaacgtttcagtagatgaggatgaggggttacttttggaggtgtccaggatgcttacacaagagaaaaataaagttgaggtttctctgagggagtttagccgaattgccatacctgagagttttgcacatgggatccttggtttgaactggttgtaccagcaacttcttcttgggttctacatttgggatcttcggttgcttcatattctgcagtacactaaagttaatactgcatcttcagacaattccattcatgaaagcacagcanagaatgaacc

SEQ ID NO: 377419 - DNA, 523 bp, Zea mays subsp. mexicana
gtagtatacacccctttgttgttgggttccttggggtggagcttccagaattacatggtggacgtgctatgaactcttatactgctgatactgagttaccacctaacacatttatggataaatcatctgatgtaactccacatactgcgtgggatattcaaacttatggtgatcaggcaaagggttattctcagcttgttaatgaatggaagaatagtgcccttatgatttctcgaactctggcaatggcttatgttatggatcagaaagcatatctgcttcaacaaacttcctggcaaaataatgttagaatgagtggcttagtggaacagatttggggccccctctctagcattcgtgctcttgcaaagatgttatcctttcacacaaagagaagtgagatcccctatgatattattgaagatatgctcacccaaagtgatcacatgaaagatgctctgcaacaaattcaagatgctgtatatctgactaaagcaaacatagttagaagcaatgaggagac

SEQ ID NO: 377420 - DNA, 364 bp, Zea mays subsp. mexicana
gcgttggttcctctcgctcctgacctcggacatgtggggtgttctcatccgcatcttcggttaccatgagaaggtcgactggatctacttcgttgctttcgccgccactgcgggcggcatcgtcttgcactcgtacaagggctccaatgaagtggaggagacagcacaggtggccggggccagcgacgagcacggcaagggccgggacgaggaggctgggacgcggaacccatcgtgaagctctggcgccagccagcaatggaagtgggttgccccctgccaggcatacaagagtgactagttgttgttgcatgccttggacggcgagtgtagcagagaacttggtcaagtgtcgcaggagact

SEQ ID NO: 377421 - DNA, 183 bp, Zea mays subsp. mexicana
caaccaggcactgaacagtcaggatttcaaactgcccatggacgggcagaggtccatcgccgagcatgatgaacatgtactacaacaacatttagccaaacaagaacccaagcagcgacagcgtcgccgacatggataggccaagctctatgccccagcaaaggatccagatggactagggtt

SEQ ID NO: 377422 - DNA, 456 bp, Zea mays subsp. mexicana
ccctttcttccgggcacgttcctgccgggccccgcgcggggggttcttcacggggctgacggtgtacctcgcgggcggccaggggcaggtcgtcggcggcagcgtggtcggcacgctcatcgcggcgggccccgtcatggtgatggcgtccacgttcgccaacgccacctacgagaggctgccgctggacgacgccgaggaggatccagggcaggcgcagctgcctcccggccccggcggagggccccctctgataatgggcgggatagccgatccctcggcgatgccaatgttcggcggcggccgcggcggtgtgccgcccagcctgatgatgccagggggcgccgccgcctccggtgcgggcctgcagctcgggcacgaggggcttgcttgggctcgtgcacggccaccgccatactaggaggggatccatgtctgagaaattcgagtagaaat

SEQ ID NO: 377423 - DNA, 260 bp, Zea mays subsp. mexicana
ccggcttaaatgggcctactaggccatgcagttgttctagcttgcttattagatttcgaattagcaatatataaataatattttgtctattttttaattttttgatagttaaatgcacggtgccccctgaactcttcaatggatgtcacttgggagttgggtccacgaactttggaaatacatttctatatcctcgaacttgttaaatgatggaccacacatccttaaactggtaaaaatggtgattaacaggccaattt

SEQ ID NO: 377424 - DNA, 371 bp, Zea mays subsp. mexicana
ctcacgaaaccaaggcgaccctccgagaaggagcgttttgatgccggactggggctggcacgccagtctggtctgtggcgcaagccagagctacatgagggctcaatacgcactgagcgggatcactcacagctgcaagggacttgatgaccctgacgagaataacccgccgactatctctgaggaccagagccatcatctccgcatgaaccacatatgggctgcttgctaggggccagaacaagctcgattatattaacaccctcacctttaagaactccctggcacgggacatgctaacactcgacctcaagggtggcatgaccaatgacattcaccatgctcaggtcttgaccaaccagtgctacatc

SEQ ID NO: 377425 - DNA, 542 bp, Zea mays subsp. mexicana
gaccgtccgaattcccggtcaccacgcgtccatttttttggtaatctttcaaagttccacggagtggagggtatcatcgtggatttaactggaggttatcaccgtggattgaactcttctatcgcgcaatccatgccctaaacatctcagttcttcagctccccaaatcatgggtaccaggacgccgagccaggaccaaacctgcacatagacagaagagacgcacctgctcctccggggttgacagcaagggaatctgttttcttgcagagggcacactttagtttaaagcatgtactctctctattccaaattgtaagttgttcagattttttctagatacgtagtttttacttgtatctagacacggtatattcttggtacatagcaagagctatgtatcttgaaaagctaaaatgacttatactatatggaatgaagggagcacaaagcttactattgatattatgtgggttaaatgcgacaatcaatatattctggctctcctactgtttataatactattgcaagacactaatttt

SEQ ID NO: 377426 - DNA, 314 bp, Zea mays subsp. mexicana
gttctctttcatctcatcccttcttatctatccaaaatggtgaaagaaaaaaaaagcatggggactgtttggtactttgtctgagggcttatttggtttctcacccaggtttgctattgagcaaagaagtcgtaatttaatttgggcagagtgaaagacaactatttttttttcttgagatggtcaaagttggttctctaatagaaaggatcatttttccagtaaaaatctggcaagggtagactaggcaacaaaccatggctatattccacaactaaatggccacatgatcaacaaatttcatattttaacca

SEQ ID NO: 377427 - DNA, 499 bp, Zea mays subsp. mexicana
ggggccccgcgcccagaattccctcgtccaccccctcctcccattttttccccctgtgctggaagccaccctggcgatgccagtcaaccgcctactagtgctgcagcaagctatccagttcaaggttcagctccatctggatatggtgctccaccaccccagcctggctatggcacccaacctccacagcaaggtggatctggtccagccgcttatgggcagccttctccacagggcgagaaacctgctgcatcttcaccttatggacaagctccgcctcctggatctgctcagggtggttatgggcagtatggttacagccaacctgcatacggtgcaccaccagcttaccctggtgcacccactgcaagccacccgggctatggccaacagcagtcttatggcgatgcttatggcagtggaagctatgggcagcctacagcctacactactgaagcagcagctcctgctgcatcccaggatcactctgccgcacctg

SEQ ID NO: 377428 - DNA, 429 bp, Zea mays subsp. mexicana
cggcagttatcgatgggccacgaaagttcgacgacgggggggtcgagttcaagatccagctggcacgatcctggacatgccgaaggggtagccataagaagggtactatgaggaggtgcacatatcacagacactgcacatgctataacatatgcactactatctgaagagggtgttgactaaggactccggaggataacaggacgcactggtacacgtgtcacagcactactacgacaccgggtatgaatcgaacaccatatacctaaatgatctcaacggaccagagcttttgtgggaaagaaaatagcatccatcaagagtgggctggatgcaagtgctattcctgctgctagaaaagctgatttgagaggcaagggttcaaaagtagaaggacgaaactaggaaggcacagaagaaatgggggag

SEQ ID NO: 377429 - DNA, 268 bp, Zea mays subsp. mexicana
gccttttgtttctagggaggcactaaatcaagacatcatgcgcgctctttgaaacaaataagcggggaacaacagatgcaaaaaagctaactgcagccatcagagcctcgcgatctgatatgactcaatagcaactcatgcggacgattgctcatttagtcaaacatcgcagtttaccgaacaactccgaggcgtttcaccacatgatgactgccaaacatacggagtactatataatcaaaaagaactctcaaaagcattccgcatt

SEQ ID NO: 377430 - DNA, 517 bp, Zea mays subsp. mexicana
ccgtttctttttggttgcagctatccgcaccagcagagcgaaatctaggagagtgagagagaagaggatttccgccgccgtggtttcgcgactacgacgccggagcggtcagaattgttggcccgggtgcttctacgcaacctccggtgtgtgctctcggcctctgttggcgcgattgaagctctgcgcgccggcgattgctcatcgaacttcaaccgggaccgcatcacgtggccagagccgttcgcataataattagtgacgagcaagctacagaggattctgaggttcagctggtagagactgctgagcaggagctcgtggaaggagaagaacaggtggtcgaagaggagccgcctaacactgaggctttcgacttaatctaggtggcgtctcccagtcaactttctggcaccaaggatagattttagttcctgtattgaacatcttttattttgtaagacttccgctatgtaataaggactctgattttaatgtgacatttatctctatacac

SEQ ID NO: 377431 - DNA, 439 bp, Zea mays subsp. mexicana
gttgtcttctcctccccctccggttcgggttcgggttcgtgaggttctccggggttcgggttcgtgggtgagcggatcgagatggcggcgtcggatgttgagtaccgctgcttcgtcggcggcctcgcctgggccacggacgaccactccctccacaacgccttcagcacctacggcgaggtcctcgagtccaagatcatcctcgatcgggagacgcagaggtcccgcggcttcggcttcgtcaccttctccacggaggaggcgatgcggaacgccatcgagggcatgaacggcaaggagctggacggccgcaacatcaccgtcaacgaggcccagtcccgcggcggccgtggaggcggcggcggcgggtacggtggtggccgtggaggcggcggctactgcggtggcgggcgccgtgatggcggcggcggctactgcg

SEQ ID NO: 377432 - DNA, 499 bp, Zea mays subsp. mexicana
caattttacttgagagacacagacggacaagatatgtttgggaaacttgtggatgtagttccgaggatagcattgttgtccttcggaggacagcatgatggatccaaaagtctttatcagtacttaaagcacaaaattctgatggtaatgatgcggcttaagccatacatacagcaagattgttcgcatattgttagttggctgaaattgcttcgacgttactttggagaccttcttcatcagcctatctcacaacatattgctaaaccagaaaattgtttagaaggttctccgtttttattggacatggtagatttagttgagagtcaggataagtcaactcggcacttgcaaaggcaaactatctatttgttccttagttgttccatatgtttgtcttacaacagaaatgatggtgcacttcagtgttcatgcaagcgtgatgagtgtttgttgggtcacaaagtacaaggctgtagtaatcaattgcactgttttg

SEQ ID NO: 377433 - DNA, 489 bp, Zea mays subsp. mexicana
  unsure (1)..(489): unsure at all n locations
tcggtcttttccgaggcggcgggatgcagcagcagcaggttcaaagggagcagaggcggagcagcttcagcgtggtgcggcgcgagcgcgcggcgcgggaggcgtggctggaccacgcgtgggaggcgaagcggagctggcaccagcggaacggcggcgcccccgacgcggacacccccgtggtggtggtggtcggcacgtcgccgaggtcgtcgtcgtcgtcgtcgtcccactcccagcatcagcagaccggtggcggggtggccatggacgtggaggaggttcgcgcgtgccgggacctcgggctggagctgccctccgactgcaccgtggagatccagtgctacgggctgtccggcggcggcggcagccccggcagcggcgccgactcaccgtgcgacgtcgccgactcctgccctgatgcancaagaggaggagcggatccgatggacgtgaaggctcggctcaaggtgtgggcccaggcggtgg

SEQ ID NO: 377434 - DNA, 501 bp, Zea mays subsp. mexicana
gcctaagtattccaagacaacacgagcagcgaaacgccatctattcccgactctgctgcacctgcacctccgggccgccgccgagatgggcgcggatggcgggctgaaccgggcggcggagaagcccagggatggagagggcggggaggcgagggtgttccggtgcacggactactcgctgccgcggacgacgctggcgctggcgctctggctgggcggtatccacttcaacgtccttctcgtccttgcgtcgctcttcctcctctccggccgcaccgctgccatagtcgtggcgttccagctcttgttcatgttcgcgcctgtcaacgacagggacaaatggggccggagcgtcgccaggttcatatgcagacacgcaatgggctacttccctatcactctgcatgtggaggactacaagtccttggatcccagcagggcttacgtgttcggttatgagccgcactcagtgctgccgataggtctgtcggctcttgctga

SEQ ID NO: 377435 - DNA, 409 bp, Zea mays subsp. mexicana
acttttgtgttcagactgatgtaatcgtcttctgcagcggggggttccagaagttcggcacggggggcatgggaccgcagaccagttttcccagcttgtcgacttgctgaagctgactgcggctagacacacgaaggtctacatgccaaagctatctggttatctactggagaaccattccgggtcttcacatggctaaagacaatggtgtgcggactaacggtacaaaaactggcctactgagcaaatgtgacggatagtgcctagataaacgacttttacttgaaggaacctttgtcggaatagagctccttatcatctttagatcacagctcatggatgtgaaggccatggacattccttccgaggaaaatgatgccaaccagtcaaccataaaaatggatcgaga

SEQ ID NO: 377436 - DNA, 384 bp, Zea mays subsp. mexicana
  unsure (1)..(384): unsure at all n locations
gccttaagcatttttgtgccctgtgtcataaggctgtccaaaagcccgcacagcattatggccccaaaggatgcaagcaacatacggcagatccctaaatgaggttttcacacatgtgcatcaacaccgtggtgccagtgcagtttccatgtgttctgtgcaagtacagataaatacttgtcctgggacgtacttcactcctggattccattatttttttttgctgcgagaagtttccgtcgtcgttgtacctacagtaacagttctgcagtttacattcgggaacatgaacaggaactgttcattcattcgttgaataccagatgaattgttgagaatactcgcatattgaagacacgattgaacaccaagtccaaaaccgnt

SEQ ID NO: 377437 - DNA, 107 bp, Zea mays subsp. mexicana
gcttatttttgcgctcgctgcgggactcctctttacaagtccgtcacaaaatttgattctgggtgctgacagccatcattctttgaggggcttccagctgccataaa

SEQ ID NO: 377438 - DNA, 235 bp, Zea mays subsp. mexicana
agttgcctatatccaggtcaagtagggaattctgcccgaacagacacgtgttatttttgatgggcagcatatgtagtatggcctcaagctggctaattacatcatgcagattgaaataaccatatggctgatgatccgcatgatgtgtggcaagctgatctgagtgaagaccctgcctgatacgacagtcacctattaagcggagttctggcttatcatcgacaatgattatgaa

SEQ ID NO: 377439 - DNA, 235 bp, Zea mays subsp. mexicana
ggatattctgaaactctagagccagcatttggatgctgtggtatatcaagatacgcctgggacttttattggcaagctgatgaaggatggccacacggtgactgatttcttcatgcggatggagataaccctcggactggtactccgagttatgtcataacatgctgaatttagagaagaccctgctgtgaattacggacaccctaaaccaggcatttttagaggaatactacaa

SEQ ID NO: 377440 - DNA, 221 bp, Zea mays subsp. mexicana
ggacattttaggaccctatagccagctcaggtaggcggtgctatctgaacagacgcgtgcgattattgatggccagcatatgtaggatggcctccagcagacatacttcatcatgcagatggaaacaaccataggactgatgatccgcatgctgtctggcaacccgatctgagggaagaccctgcttgatatgacgaacacccactaagtggagatctggc

SEQ ID NO: 377441 - DNA, 291 bp, Zea mays subsp. mexicana
gtgttctagatcgcgggcggtcggtcccgatctagaacccctatcgttcgctaacgcgtgcagacctatgaaaacgacattgttgaacagccacaagctgagtgtcttcatgctcggcgttgacacatctctttcccatatgatgtgcatgctgtcagtgtacctgttctgtagggcgttcacactctataagatgttccgcttctaacttgtgtgcttgtgttcactccaattgattccaatgtttcgctggatgggatgagaaaggtcctggcttgtactatgttgtac

SEQ ID NO: 377442 - DNA, 166 bp, Zea mays subsp. mexicana
agatgcatagatccaggatacggagggggtggtgcccgaagcgacgcgtgcggttattgatggcaagcatatggagtatggcctcaagctgactaagttcagcatgcagatggaaatgaccatgggactgatgatccgcatgacttgcagcaagcggatctgaggg

SEQ ID NO: 377443 - DNA, 363 bp, Zea mays subsp. mexicana
ggctattttagatccctatatccaggacatgtagggagttctgcccgaagagacacttgtgattattgatgggcagcatatggagtatggcatcaatctgactaattacatcatccggagggagagaaccatggagctgatgatccgcatgatgtgcggcaacctgatctgagggaagaccctgcctgagatgacagtcacccactaagagaaggtccgggttctcactgacaatgtatagagaaaatactgatcacacggagacaagacaccatggacatgcaggtccttatcataggccatatgctgcaaattggtggactttttctgcaggactacaatattgaggaggaaaataccctt

SEQ ID NO: 377444 - DNA, 207 bp, Zea mays subsp. mexicana
ggcctttttagatgcatagatccaggacatggagggggttctggccgaagagacgcttgcgattattgatgggcagcatatggaggatggccacaagctgacaaagttcatcatgcggatggaaagaaccatggaactgatgatccgaatgatgtgcggcaagctgatctgagggaagaccctgcttgatacgacagtcacctacta

SEQ ID NO: 377445 - DNA, 517 bp, Zea mays subsp. mexicana
ggcctttttagaaccctagagccaggacaggtcgggggtgctggcaaaagcgacacttgcggccattgatggacagcctatgctgtatggcctctaacatacaaacttcgtcatcttgcaagaaagaaatctttaacgacctttagaagttcgtcaacgagcagggtgcgtatgaaacaccctccttgatatgacggtcaccacttaatcggctgttccagtttgcgccaacaatgattagcataaatattgtgacacggagagtagccatacttgatacagcacgagggtcatagacgagccttatcatacagaatattgtgaattcctgatcatgctacaatagctaagaagtgagaacccttcacatggatgtaccgactatctagagactgctaggatcaggcaggttcgggatgacgcatcaaacagtcgtcacatattgtaagcagttccacgttttaaacatgaagggcaataatcagaacacatgtactttccttgacataccagaaag

SEQ ID NO: 377446 - DNA, 213 bp, Zea mays subsp. mexicana
ccaggattctagagccaggataggtctgctgttatagcaaaagctacacgtgcgatcattgattgaaagcctatttagtatggcaaccagcagagtaactaagacatttgcactgaaacaaccatatgacatgggatctgcatgctatacataaacacattctgaagtacgctcatacttgaaacgacggtcacctactaagtgggattcagg

SEQ ID NO: 377447 - DNA, 213 bp, Zea mays subsp. mexicana
ccaggagccttttggaatgattggtctagggttatagcaacagctacacgtgcggtaattgattgagataatatctaatatggcaacgagcagaggaacttagggatgttcacagaaacaaccatatgacattgactctgcatgcgagcaattaatatatattgatgcacaggcacactttatacatagcacacctactaagtgggatgcagg

SEQ ID NO: 377448 - DNA, 180 bp, Zea mays subsp. mexicana
ggttatcttagatgcatataaccaggatatgtagggagtgctatacgaagagacacgtgttatttttgattggcagcatatggaggatggcatcaatctgattaagttcatcatgcagatggagataaccatggagcagatgctccgaatgatgtgcggcaagctgatctgagggaagac

SEQ ID NO: 377449 - DNA, 190 bp, Zea mays subsp. mexicana
agaggcatatatccaggttaagtaggcggtgctgtacgaagagacgcttgcgatttttgatgggaagcatatggaggatggcatctagctgactaatttcgtcatgcggatggagagaaccatggagctgatgatccgcatgatgtacggctagctgatctgagggaagaccctcgctgatatgacggtc

SEQ ID NO: 377450 - DNA, 185 bp, Zea mays subsp. mexicana
ggttatcttagagacgtatgtgctgccaaggtagaaccttctggtgctgacgacgctggaatgattggtgtgcaagcagctgctggagggcatgaccacgataaattacatcatgctgatggtgataaccatggacgtgatgctccgcgtgatctgcggcaagctgaatctgagtgaagaccctg

SEQ ID NO: 377451 - DNA, 290 bp, Zea mays subsp. mexicana
ggttatcttagatgcctatatgcaggactaggatggggtgccgtatgaagagacactgacggtttttgatggaaagccagtgaaggatggcaacaagctgaaaaattacgtcctgctgatggagatgaccatggaacaggtgctccgcatgatcgcaaggaagcagaactgagagaagaccctgcttgagatgacaatcacgtaagagaagttatgcttcgtttccaccgacgaaggaaaggaaaagattgctaagatgagtggaaaccttacgatactatgcgatgctc

SEQ ID NO: 377452 - DNA, 191 bp, Zea mays subsp. mexicana
gtctactgaaggggccgagagcgaggattgggcgggggatatttcaaaaggtgcacgcgcggtccttgagagagagcaaaactaggatggcaacgagcagaggaagtgcgggcagcggacaggaacaaccatcagacaggagactctgcatgcgagccacaatcgggaagcgagggaaacagcacgcttca

SEQ ID NO: 377453 - DNA, 121 bp, Zea mays subsp. mexicana
gcaggatcctcgtgcgctgattgcacgtgggcgatagcaggtggttcacgtgcggttgttgagtagggtcatatcttggatgtcaatgagcagagtaactgagggatgtcagcatgaacaa

SEQ ID NO: 377454 - DNA, 183 bp, Zea mays subsp. mexicana
ggctatcttagatgcatagatccaggataagtagggggtggtgcacgaagagacacttgctatttttggtgggcagcctatggaggatggcaactagctgatcaagtacgtcatgcggattgagataaccatggaggagatgatccgtatgatctgcggatacctgatctgagggaagaccct

SEQ ID NO: 377455 - DNA, 180 bp, Zea mays subsp. mexicana
ggcgtatttagaggcatataaccaggacatgtagggggtgttgtacgaagagacgcgagtgatattagatgggaagcatatggaggatggcatcaagcagaccaatttcgtcatgcagatggagagaaccatggagctgatgatccgcatgatctgcggcaacctgatctgagtgaagac

SEQ ID NO: 377456 - DNA, 178 bp, Zea mays subsp. mexicana
ggtgtacttagatgcatataaccagcacaaggagggggtggtgcacgaagagacgcttgcgatttttgatgggcagcatatggaggatggcaacaagctgaacaagttcgtcaagcagattgagagaaccatggaggtgatgatccgcatgatgtgcggatacctgatctgagtgaag

SEQ ID NO: 377457 - DNA, 131 bp, Zea mays subsp. mexicana
ggctcttatattgttcatgtgggtactgtgagatgcggggcttcttaaaccgtctcgcgggtgaattaaccgggatcatattttgtaagaccattaacaccccaatttatggcactagaatcaacagacct

SEQ ID NO: 377458 - DNA, 185 bp, Zea mays subsp. mexicana
gtctaattcagttttatattgacaggattggacgggcgatattgaaaaaggttcacgcggggctcttgagtgggagccaattagggatggcaatgagcagagtaagttcgggaagtgcggatgaacaattataggatatggcctctgagtgctagacacaaaggtacattgatggacactcatat

SEQ ID NO: 377459 - DNA, 154 bp, Zea mays subsp. mexicana
atctgttgcaggtttatattggaatgattggacaggcgctttagcatgaggtgcatgtgcggctcttgagggagggagtattatgggttgaaatgaggagagtaacttagggattttggtatgaccatccttaagatatttgctgtgagtgtta

SEQ ID NO: 377460 - DNA, 121 bp, Zea mays subsp. mexicana
gaagaagtcttttggaatgattggacatgcgctatagcaagaggtgcatgtgcggctcttgagagagagcgtatcatggctggacatgagcagagtaactgagggattttcggatgaccaa

SEQ ID NO: 377461 - DNA, 438 bp, Zea mays subsp. mexicana
ggatccatataacatgcctgccttggttctggtgcacccggcggcaccagctgtggtaggttggcagctggtggaggacgccaacaaggtgaacatgttcgtcaagctgcctgggctgaccatggatgagatcatccgggtgatctgactgatacctgctctgaatgaagaacatgaatgagctgatggaccagcattagccgtgctgtcggtttctatcaacaaacagttcgcagtcacagcagcaaagcaggagatgcaccctagacggcatggagctatctgcggcacatgtcggccagaccgtcgaggttttctatagcgatatgatattcagggagtgatacacgcatgaattgcttgtatgtcaaacttacgtcctgcatgatcatgttcactgttttaatggacacagacctagctcgcatgaagatagac

SEQ ID NO: 377462 - DNA, 183 bp, Zea mays subsp. mexicana
ggctatcttaaatgcatatatccagctcatgtagggggtgctgtaccaagagacgctagctgtgtttggtgggcagcatgtgtaggatgtcaactagcatactaagttcgtcatgctgatggagatgaccctggaggagatgctccgcatgatctgcggctaccagttctgtgtgaagatcct

SEQ ID NO: 377463 - DNA, 271 bp, Zea mays subsp. mexicana
acgcgcgcgccctccgctgccaccaaaaccggcggatgcaagtggtgccgatggcggaggcacccaacataataaaggaggagcaggtgttcaacaccagccctctgtcgaagctcatgatgcgcatggagataactatcgaggttatgatccgcctgatctacagcaagcagttgcttgggaacatgctagctttcaatagggactgcaacatggatgttgagagcgttagcatgatcaacgcataggaacagaagaccgacaagggcag

SEQ ID NO: 377464 - DNA, 118 bp, Zea mays subsp. mexicana
gtctatcttaaattcatagagcaaggacttggagggggttgtgttcgaagggacgctggcgttttttgatgggaagcatatgaaggatggcaactctctctcgatgctcatgatgcag

SEQ ID NO: 377465 - DNA, 132 bp, Zea mays subsp. mexicana
ggctttttcaagctgaaagagagtggactgggcgggggatctgtaaaaagggacacgagcggcttttgagggccagcaaatgaaggatggcaactagtataataactttgacaaatatatgcgcagacttat

SEQ ID NO: 377466 - DNA, 201 bp, Zea mays subsp. mexicana
atattgaatggatttgacaggcgatgtggaaagaagttcatggagggcttttgagggaaagcaatttaagtgtagaaactggaacaatatgtttgagaaatgggtatgaagaattataaagtatggaatctaagtgttcgtctcaatggtatagtgaaggacattcatacttcaatagactacatcgaattgaagctatat

SEQ ID NO: 377467 - DNA, 201 bp, Zea mays subsp. mexicana
attgtgaactcattggacgtgcgctctagaaagaagttcatgaagggcttttgagggggagcgaactaagtgtagaaactggaacaataagtttaataaattggtatgaccacacttaaaatatgtactctaagtgctagacacaaaggcatagttatagacaatcacattacaataaaatgcatcgacttgaatgtgatt

SEQ ID NO: 377468 - DNA, 188 bp, Zea mays subsp. mexicana
gtctgttgcaggtttcttgtggactcattggacatgcgcttttgcaagatattcttctgcggctcttgaaggagagcgaatcctggcttgaaatgagaacagtaatttctggattttgggatgaccaaacttaacataattccagtgagtgctagacacaaatgcaaagtgatgaacacccacacttc

SEQ ID NO: 377469 - DNA, 279 bp, Zea mays subsp. mexicana
gggaagctggacgcctgagggtcccgtcccgaatttccgggttggaccaacaccgtccgcgttttttccagtccgatagcatggtcgtcgccggcgcgctcaccaacaaaatggctccagccctccgcaaggaagatgaccaagtgcggcatcttcgttgggaagttcgacatgcagatggggctaaccctggtggatacgctcagacctctcttcctgcaagcagatctgtgagacggtcctgtctgagatgacggacacccactagggggtctgccg

SEQ ID NO: 377470 - DNA, 152 bp, Zea mays subsp. mexicana
gtccatcttaaaagtatagagcaaggacatggagggggttgtgtttgaagggacactggcggtgtttgagtgcaagcatttgaaggacggcatcaaggataataagctcgtgatacagatggtgatatccttcgaggtggcagtccgactga

SEQ ID NO: 377471 - DNA, 237 bp, Zea mays subsp. mexicana
gtcttatttaatgataaataacctggacttggaggcggttctgtagaaaggcacgctggagctttttgagtgccagcatttgatgtaggacttcaggtataacaacttcgacaaactggtggtgatatccattgagggtgccatcgaactgatcgactgcatgaagaagtgtatgacgatcatctttcaaatgacggtctctaacaagaactaattccggttcgacatgatcaaagg

SEQ ID NO: 377472 - DNA, 218 bp, Zea mays subsp. mexicana
gtcttatgcaagcttaaattgatcggacttgacgggggctcttttaaaaagctcacggaagtcttttgagggcaagcaatctaagtggtgcaactggtgtcacatgtcccgtaaatgggtgtagaggtttacaaagtgtacagtttaagtgctcgtctcaatgccacagtgagagacattcctatttcaaaagactactgcggattgaatctgattct

SEQ ID NO: 377473 - DNA, 457 bp, Zea mays subsp. mexicana
ggtttttaagaatggaaaggcccagatcgtgacggctgataggtgatggaacctgcgggaatgttttgagggctggtaatggataaactaattgagctatcacacatttcagagacaggtagtgttttcttcagtgggtacaatccacctgttcgtctgtttgaatctccttctggagactatagttcacttgaatagctagaacccgatctaattccagtacagaataatgaaattaaaatatatacggcaaaggttgctgtgaaggcatgttatacaaaatgctaatgaaaatgagacttctagtgcagatgatgatgattccactgattgcgattgtgacatgtctgaggaagatgagtacagagatgaacatgaagtgtcaagcgatgcagatactagagatgattctagtggggaagaacagacacctaccgcatagaagactgatgtatag

SEQ ID NO: 377474 - DNA, 100 bp, Zea mays subsp. mexicana
tccatctcgctcaatgatgtttttgagttcaattcaaaatttgctgactttatgagaagaattaagattccactgcctcccgttgatgagaagaaatagg

SEQ ID NO: 377475 - DNA, 135 bp, Zea mays subsp. mexicana
cttctcctttttattcaccaaccaccatttgcctgacaaacagatcctttgtattcagcttttgggtttctaatagctaagagtgaaacttttcctgctcgctttgtttgccttgtagacaaagatttattgacc

SEQ ID NO: 377476 - DNA, 284 bp, Zea mays subsp. mexicana
atttttatgtcaaaaaagtagttcttaactgcatctgttctgtgctttaactgttgatttcataactattacacaaccctctatctctttctatctgtcaacaaaaaaaaaattcagtaatatttctatatcaatgtctcctttgttactaacaatttctcttcaaaacgatttatgtgtttcatccatagtttacaaataattaccaaaattctatccaaaaagagcctaaatttttattcttgttacgacttaatacttagacaaaatcagcttatttgaga

SEQ ID NO: 377477 - DNA, 336 bp, Zea mays subsp. mexicana
tctcagatcctcaaagcttttgatcctctgtttcctaacaggccgcattaggaacactgcgagatgcatgccccttgggaagaaaccaaaaaatctcagccatggtggcaagtagctgatgtcgatggtttggcttcccttgtcgcttaaagagcattggaaaacattgtcaacacttgtatttgtctagacccactcagacagtctgggttcattggactttaagttatattgcccctgttaatcttttgttgtttactttttttctcagcttttttctcttactttttcataatttttttttttttcttcttcttatgtcctttttttatttct

SEQ ID NO: 377478 - DNA, 101 bp, Zea mays subsp. mexicana
tcgcccatgcgtccggaaatagggaatttgcactgtagattacactgtttgcatagtgaagtctgaattccgagatgagatagtgaatgagatctggcctc

SEQ ID NO: 377479 - DNA, 172 bp, Zea mays subsp. mexicana
ggatccgtcattgaccgtgattgtgatgaagttgatgacgccttacaagattctggtgcttggagcaaaaggtctcgttgttttaatctctttgatattaatcgcccatcttctttaggagctatttccctgcactaatttaagcttccacctgtatatatattgctctctc

SEQ ID NO: 377480 - DNA, 117 bp, Zea mays subsp. mexicana
tgcgttttgctatcatcaatgctgctgagctggccagttttgatcaagtcaagcagtctattttgttactccctgggttcaaagatgatgtggtctcttacttttattcttgtttct

SEQ ID NO: 377481 - DNA, 146 bp, Zea mays subsp. mexicana
tctgaaataacaggtatatcggggaagtttgatggaggagtcaactcttgtttgggggccttttctgaagtcatcaatgtgcctacgctattgcctcacatcttcgtgacgtggatgtttttctccccttgtttcatcttcctttc

SEQ ID NO: 377482 - DNA, 272 bp, Zea mays subsp. mexicana
gcctgcggaccgttcgaattccgttcacccagcgttttgcttgtaccgggacactgggtgctgggattttgccactaccagacgcgctcgctgtcagcctcaggaactacctctggatcctttgcaggcagctacatggacgagtccgtgtacaaggaactggtggagcgtgccaaggaggaagggtacgacgtgtcgaagctccgcaagacggcgcaacctgacccgccgccggagagcgagcagagccccagggacggcgggatgtggtg

SEQ ID NO: 377483 - DNA, 69 bp, Zea mays subsp. mexicana
cactctcgcttccgccaacgtcaccactgaagtcaagtccgtttgtgattcaccacacccatctcaagg

SEQ ID NO: 377484 - DNA, 186 bp, Zea mays subsp. mexicana
acacccacgcatcttgtctactgacatggacacacatgctgcacactttagggctgattccaaagagcgtgatggatggatcacaaagccctactctcgcatattcgataagcaatatcatgcagaatgtgcatcagcaagacctgcaggccatgcttggttcatcgcagcgtacaagttgtcttg

SEQ ID NO: 377485 - DNA, 147 bp, Zea mays subsp. mexicana
tcgctatctgcaaagagtgatagcttaaggatgtttgatggtgaagatgactccagcgtagggtgtatgctctctaccaatggtaaggctcaagacaaccactcattgttcaatttatccttcctcccttacctatatctctttttt

SEQ ID NO: 377486 - DNA, 124 bp, Zea mays subsp. mexicana
cgtacattgttgagtgctcttttgtgcaatcaactgtgacagagttgccgttctttgcctccaaggttcagctcggcaagaatggagtggaggaagtgcttgctttgtttttttcttcaatact

SEQ ID NO: 377487 - DNA, 119 bp, Zea mays subsp. mexicana
gcgtgtacgatgggcggcacgagcggccgggactacgccgtgcccagcctgttctgagatattgtccgtgatccgcttaatgcgccgcatagcattggccgcctgctggacctgatgga

SEQ ID NO: 377488 - DNA, 143 bp, Zea mays subsp. mexicana
cattgtttcgtgtctgcctcagcccgccgcaaggagaggtaagttcaggagacatcttcgagaagctgaaatggctcctaaagctgctcctgccaagaagggtgatgccaagacccaggccttgaaggttgccaaggctgtga

SEQ ID NO: 377489 - DNA, 259 bp, Zea mays subsp. mexicana
cgtctgaatgcccaaccagcaccaaatactacggcttactaacggaccggcctgctgctagctatcggaggagaagagcaaaacgcgttcgaagaacgaaggagaagatgcggctcttcaggactccaccagaggcaggccacacacaacagagtctgcaaagctaggccccaagactggtcaagattaaatggcaaactgagccatcagcagcaaggcaactagtaggatcggagccgatcgcttctatatatggtgc

SEQ ID NO: 377490 - DNA, 84 bp, Zea mays subsp. mexicana
cgagcttcgttaggcatgcgtcccaccgagccccgtggacgtgtccaagctcggcacggacgcgcataggatgcggttggagct

SEQ ID NO: 377491 - DNA, 246 bp, Zea mays subsp. mexicana
tcgcaatcagcagatgatattcttcggcaaggtgttcgtggcatatcagatataatcactagtgatcgtttctatgtttcttttttttgcttgctggtgccaggtctggtgtatgtggtcttcttgctttttttcgttttttattttttttctttttttcttttttcttttttttttgcttttctttctgtttatgtgtctgttttttttctttctcttctcttctttctctttctttttcatttt

SEQ ID NO: 377492 - DNA, 351 bp, Zea mays subsp. mexicana
tgttttctcccagtggaagtgccacattttcattgaaataaccaaggcagagttgtgaatacatcttttcagtgttttcagcctgtatgcttttgtgatcactcatcttgttttcatattttgttttttatgtttctctgtcatttacttttctttctttttttcttttattttcctctatatttctatctttatttttttttttatttctttttattcttacctatttttcatccttcttcttttctttttttatattcttttcttttttctctttttttttttctttattttactcatttatcttctttttctttatattttattttattattttctctttctttattt

SEQ ID NO: 377493 - DNA, 420 bp, Zea mays subsp. mexicana
cccttttctttgttgggagcaaagcaaagagagagaggaaagctagctagctagcatggagagtggcagcaagaaggtcgcagccggtgtgttggtgctgctgctttttcagcttgttggtagcttcttcttctgttatctttccgcctcctgtttttcgtttccttctcttgtttttgttctctactttttcatctattttttttttttctcttttttttatacccttccttctttatctctttcttttcattttcttttctctttctctcttcttcactctcttttttttcttttatttttttttctttcttttttatttcttctctttttttttttctttccttattttctagtttttcttttcttttttctttttcctttcttttcctttttcttttttccttttcttttttttct

SEQ ID NO: 377494 - DNA, 95 bp, Zea mays subsp. mexicana
gtgttaaggctgttcaggagaagaaggtccttgaggggcatggttaaattttaacgcaggacagcctgattacccacttttccatttaaatcata

SEQ ID NO: 377495 - DNA, 419 bp, Zea mays subsp. mexicana
caactgatatctatggcggttaccaagtcagacacagagttctgaaggtccaagtgttcgcgatcgacctgaacacgaagccaaatagcctcactgagatccacagcttcggtggcgactgcgtctttgttggttcaggcggctgcaagtcctttcctgctggtcagtaccgtggagttgaaggtgaccttatctactttgttcctgaccattacaaccctcacgacgcgttcgtgtacaacatgatggatggcaagacaaggttcatcgccgagccattgccttgcagcatttgtgcaccagagcagagctccggtttcccgctgtgggttgtttccttccaagttgttctttctctgtcccattttttttttctcgatctgcatgtgtgtttcttttttctttcttttacattattt

SEQ ID NO: 377496 - DNA, 248 bp, Zea mays subsp. mexicana
tggtactcttaaatgtttcatcaggagaaatcgaacgactcagacatattatctgtatattggattgacagaagcattggctgatgatgggaagtttctactttgctgctcgcattgtgtcctttgcctcttctttctccttactaccctaatttctcttgtatatggtcctttatttcctatttcttttctccttcctttttttgttactcttttttctctcttattcctttttttttctctttttt

SEQ ID NO: 377497 - DNA, 164 bp, Zea mays subsp. mexicana
atgtgttctgttgtaacgaacatgcagccatcaattgctgacagtgagcaaatccgaagccaaaggcagtatcggaggttgcttacatagcaaggcttgaaatagatgataaaatgtctgcacgtccaagtatataaaccaccaaagctgatttcattgaatat

SEQ ID NO: 377498 - DNA, 140 bp, Zea mays subsp. mexicana
ccactatcggcgctgatttcctcaccaaggaggttgggatcgacgaccgcctcttcacactgcagatatgggatacggcaggacaggagcggtttcaaagtcttgttgtgttcttttttaggggttctttttcctttttc

SEQ ID NO: 377499 - DNA, 173 bp, Zea mays subsp. mexicana
attttctccgctttagatccgtcgcggtcttccaggcgttactgacaatagccgaagggctcgggtgctgctatgttgactacatgcgatgcgctccagagattcactgaaagctccagccatccctaccagaagacacctaagccatgcatcttggacatggctgctgatcc

SEQ ID NO: 377500 - DNA, 174 bp, Zea mays subsp. mexicana
gatttctctgctttagatccatcgcggtcttccaggcgttacggacaatatatgaaaagaacgggtgcagctattttggcaacatgcgatgcgctagagagatagactgaaagctccagccatcccttccataagacacccaaaccaggcatttaggacatggctgctgatcct

SEQ ID NO: 377501 - DNA, 203 bp, Zea mays subsp. mexicana
atctgtgtctgagatgaaggagagaggcggctccagggcggcagtggacgagcgctacgcgcagtggaagtcgctcatccccgttctttactactggtttgccaaccacaaccttttttttgccatccctttcctgcctttttgtgcctcatttttatattttcttctttcttttattttttttattcttttacctatttttt

SEQ ID NO: 377502 - DNA, 74 bp, Zea mays subsp. mexicana
gcatcgactacgtcctggggtactggccgtcgttcctcttttcgtacctggcggacagtgcctacatgatcgag

SEQ ID NO: 377503 - DNA, 76 bp, Zea mays subsp. mexicana
tgttagggaccgacactcaaattcaagaaactacagaggaggttataatggtgacaggggtgactatagcgataag

SEQ ID NO: 377504 - DNA, 127 bp, Zea mays subsp. mexicana
gttttctgcggtttccatgagccgaggtctggaagtgattgtttacaacagcagagggaacttggtgcaaggacttttaacacctgcgaactggtgcacatgcagacttataggggcatacctgcgt

SEQ ID NO: 377505 - DNA, 76 bp, Zea mays subsp. mexicana
gattcctccattataaatcctcctaggtcttcaagtctttacttactctatcacaaggaatcggctgcaactatct

SEQ ID NO: 377506 - DNA, 86 bp, Zea mays subsp. mexicana
gttgtctgtgttatagatccatcttggtcttccagtctttactcacactagtcgaagggataggctgcttctattttctctctatt

SEQ ID NO: 377507 - DNA, 129 bp, Zea mays subsp. mexicana
gtctgctcagtttaaaatccatcgaagtcttccaggctttatggacactattcgaagggcaagggtgcaccaaacttggcaccattatatgcactatatataaatactcaaaattctattcatcttcat

SEQ ID NO: 377508 - DNA, 56 bp, Zea mays subsp. mexicana
aaatgctccacgagaactccattcacaactaaatgatgctatctagaactgaacaa

SEQ ID NO: 377509 - DNA, 104 bp, Zea mays subsp. mexicana
gtgtgcttcaattgacatcgattcaggccgatggcatgttgatgataagggtacaaccatggagaaacatactgagatggctctccataagtagtctatggttt

SEQ ID NO: 377510 - DNA, 106 bp, Zea mays subsp. mexicana
ggtttattcaactgatcttgataaaggccggttttatgcttatggaaaggctatcactgtcaagactcgtacttttacatcctttaatatatttactacatatatt

SEQ ID NO: 377511 - DNA, 131 bp, Zea mays subsp. mexicana
atttgttcgtgtatagatggctcgaagtgttgcagggtttattaggactagttcagggacacgggtgctgaaatcgtgaacactcgcgatgcggtatagtgtttcactgattggtgcttgagtgagtactg

SEQ ID NO: 377512 - DNA, 91 bp, Zea mays subsp. mexicana
aattcctcaactataaacccacccacgacatccagtcttttttgactctataacaacaaatttgttttcaataaccctaaatctatattat

SEQ ID NO: 377513 - DNA, 139 bp, Zea mays subsp. mexicana
agctgaggcacctgcactacctccccggatttaccgactcgtcccactcgtccgggtatatccaactgatcttgataaagttaggttgcaagctgttttaaaggcttacactgtctagagcttctcccttcttaacttt

SEQ ID NO: 377514 - DNA, 104 bp, Zea mays subsp. mexicana
ctggtcgcgtgggcacgctggtagctcgattcaacaagtgcagtcttcactcgataagaaagaggcgaaggtgaaggagctgttgaagatgatgaatgaatgga

SEQ ID NO: 377515 - DNA, 84 bp, Zea mays subsp. mexicana
cttgattggttttgccaagggcagaggaaagagagggagcgttaacactaaaggcgaggaccggttgataacaactatgacact

SEQ ID NO: 377516 - DNA, 51 bp, Zea mays subsp. mexicana
catgattggttttgccatgaccccacgactgagagggagtgttaacattag

SEQ ID NO: 377517 - DNA, 98 bp, Zea mays subsp. mexicana
ctatgactcgacgtctggcagggtgcgtttgcactagttgcgggaaccttttgccaactttttgaacactgtccagctgtaagaccgtctcactcata

SEQ ID NO: 377518 - DNA, 111 bp, Zea mays subsp. mexicana
cgctagcctctcccccgccgcgccgccacttcccgtctcccgtcaactccggcttccgcgcgaggacgagctagcgtttggagttctcgagacctgctgtgatggcgacag

SEQ ID NO: 377519 - DNA, 71 bp, Zea mays subsp. mexicana
caatcagccgccatggttcttgttgagttggctgagctccaagaccgaaaggtttgagattgataccacta

SEQ ID NO: 377520 - DNA, 72 bp, Zea mays subsp. mexicana
ttcttccggtgtcttgcaagcataaaactatgaagtctcattgaagaacctgctacgtactattaaacaaga

SEQ ID NO: 377521 - DNA, 83 bp, Zea mays subsp. mexicana
gattagtccaggtatttcttccaacagctgatatcaggggtcagctactgccattctatggaaatttgtcaccgcgaccttaa

SEQ ID NO: 377522 - DNA, 224 bp, Zea mays subsp. mexicana
gcgtgcgctccctttcgtggcacgactgggcgaccgccgctgtacgccagctgctcagatctcgtcgggccccttcgccggcgaccatcacctgttagtgaacgcagggagtccattggatgtctcaaagaggtctaggattgttgaaccaggcccgccctattttggggccatggtcagcaacactggtggtgccagtggtggcttctaccagtctcttaaca

SEQ ID NO: 377523 - DNA, 85 bp, Zea mays subsp. mexicana
gctccattcgctctttgcctcttcttctctaaattggatgcatataccttcctgtactgacttccctactacattagatatacac

SEQ ID NO: 377524 - DNA, 236 bp, Zea mays subsp. mexicana
atgtatactaaactctacacttaggacctttcccaatacattctacttcagctatgctacaaagaaaacaagaaaaatatttggaattacagttccttcaagtgttcttggagtgcaccccattctctttctgagagtccttctgatgtgttttgtttgacacctgaatatttgctcctcttttccttacatggatactgtattttatttatttctcctcatctttaatttttttt

SEQ ID NO: 377525 - DNA, 184 bp, Zea mays subsp. mexicana
cggtcacggagatacagcggcgattccggcgatggagtacgtgaaccccctcaccggcttccgcgtcgacggccgccgccccaacgagatgcggcaactcaagggcgacggcccccccactctaaaattcaaacctatcccccctctctcctttttgtttttttttcatattatcttaatatca

SEQ ID NO: 377526 - DNA, 254 bp, Zea mays subsp. mexicana
cttttccatggatcatgttaccgacctcaagaactcgtcgcccatgcttgtcaagcaccgtgccgtcacccgccaggctgtcacgctgctccaggacaactaccccgagttcattgccaagaaggtgttcatcaatgtgccgtggtttttcttttttttctttatttaatttatttatattatttatcttttatatagtgtttactttcttattatttttttatttcttttcatttattctattttctcttcta

SEQ ID NO: 377527 - DNA, 120 bp, Zea mays subsp. mexicana
ctttttaagctcggaaacagagctcaggggacttgaaagaattaatcggcctgagtgcgtcaaaaaaacctaactccagacagaggggggcccgagcatgcccaaaagtacaagacccta

SEQ ID NO: 377528 - DNA, 125 bp, Zea mays subsp. mexicana
ttttccgatgtatctgctggaccccgaggacggggaccttgtgcctgttgatgaccgtaagccaggcattacgcccgaagagctacgcctcacaaagatccatatcggggctcccataattggag

SEQ ID NO: 377529 - DNA, 401 bp, Zea mays subsp. mexicana
gctgatgatacgctgcttgcttacatctccgagaccagaccatcttctgattcaccagtccagactaacttccatgaagtcccaccatcaggagaagggctaccactttattctgattttttctttttttactttttctttctcctttctacatcttctttcctttttctttcttcttctatcccttctttttctcttctcttttctctttccttttttttttctctcacttctttttctctctttcttcttccctctttctttcttttttttactccctcttcatttttttctttcccttcttttttcctcttttcattttatctttcttttttcttactctctcctcttctctattcttatttttttattttctctattttcttttttctttttctttc

SEQ ID NO: 377530 - DNA, 289 bp, Zea mays subsp. mexicana
ttttgtggctgtgtgttgtctctaataccgacaggtatccttttttatatatcccctggctgcatttttccctttatggttttatacatattaaacaccatgcaacttatgtgtgatttctgctaatctttaacattctaactcaaagcttttcataaatctgggtcttgatatgcatctaataatgaacctgacagtttgggaacttgagaactacagtggtctgtcttgagctctttccctgtttgaaatattagttcattttggctttgtcctaagtcgaattttc

SEQ ID NO: 377531 - DNA, 99 bp, Zea mays subsp. mexicana
cccactcgtccgcccacgcgtccgggaaaagataaaacacctgaagagagaaggatagctatctgcatttttgcctatccacctcttccttatttcccc

SEQ ID NO: 377532 - DNA, 56 bp, Zea mays subsp. mexicana
cctacgcgtccgattttggacattggttgggattatggaggtctatatcgatttca

SEQ ID NO: 377533 - DNA, 213 bp, Zea mays subsp. mexicana
gtgtccttcgtgaggccgtacgccgagcagcctgggagtgggagctcctcgtggtcgtcgtcgtcgtcgcggcggcactgaccgtcgtccagcggtcgttgactgtaaatgacaacagtccacgcgacgcagctattttcaagatcaagtagtagtaggaagagaatacgagtaaggatacgctgaaaattataactttttgttgttgtatag

SEQ ID NO: 377534 - DNA, 444 bp, Zea mays subsp. mexicana
gttatttcatggtacataagagtcttcttttaaaaaggaaataacgcaccatgctgagtttcccacttgaacctggaaaatcccttggattctttaccatccgtatgcctatcgctgagggtattgcagacatacaatatgaggtaaaaaacatatcagccaagattaagtaccatgaaacacatattctatcgagcgatatctatattgacttgttggaaaacggaattctattatggtttgaaccgaacagccaaaggctacgaaagattgaaatcaaagagcccaggaaaacatgattaagttatgcaggaaacgaattctgttcaccagatgtatgagccgacctttgcaataatctataaaagattcggaccttttactcctgggaattatgatccaaacaaccatctttatgctttgcactacccaggtgtttctttt

SEQ ID NO: 377535 - DNA, 201 bp, Zea mays subsp. mexicana
gtcacttccagcgatggacattgctactacaggggaggtgctaaggaaccaggtggggtataccattcgaaaaacgatgaactcggctatgctaacgaacgcatggtccaagagctgcatgtcaaccagacatacacataacctacttctctgaagtcaacagaattaggaggtacgttctgcaattactctatggccgat

SEQ ID NO: 377536 - DNA, 266 bp, Zea mays subsp. mexicana
gctatttccagcaacggaaaatgccaacacgacgggggtgcgttagaaccagatcgggtaatccatacgattagcgatgagcgctggggttctgacgaactcttgttcaacacggtccatatcaaccagcaactaccctgaacaagcttggcagagattaacaggttcatcacatgggtctgaagttagcatctggctgaccaaggttctaggtgatgtggattaatctatagctggtgcaatttacattgactgccaagcatgac

SEQ ID NO: 377537 - DNA, 139 bp, Zea mays subsp. mexicana
gttatttgtaccaacggtatacgacatcgcgaggggggtgcgtgaggaccagggggggaaatccattcgattagcgctgagcgctgggggactggagaacgctttttggaacagcaacggattaaccagcaataaggaa

SEQ ID NO: 377538 - DNA, 162 bp, Zea mays subsp. mexicana
tttatttgtaccaacgttatattacattacggggggggtgctataggaccagggggggaaatccattcaattaacgctgagcgcgggggtactgaagaacgctttttgaaacagcaacagatcaaccatcaataaggcataagttcctgctcagagattgac

SEQ ID NO: 377539 - DNA, 97 bp, Zea mays subsp. mexicana
ctagcaacgttccatgcccttgcgggggaccttctaaaggaccagggggagacatccattcgattaacgctgagcgcgggggtatctaagaacgctt

SEQ ID NO: 377540 - DNA, 509 bp, Zea mays subsp. mexicana
gtttatacgtgtagaggacattgaagagacaatccggctgattcctaacaaggttgacgatctgaatcttaaacctcctcacttgtctatacaaccttacacttgctccaagagttcctcatcaaattgggagcaaacatcacctagtgctctgcattcaacatctttaggaggcacttctgcctttggccaatggcagaggccttcaccgctcgcaacacaaagttttgatttgagcaattacaagctacttatggaacacctgtttaaggttgttgggaggcaggaggaagcattgagtgctatttgtgcatccattgtgcggtgcaggtcgatggagaggcgtcttggtgcaaacaaaaagaacgacatatggtttagtttttatggccctgacagcattgccaagcggagagttggtgtggcacttgctgagctaatgcatggtagcttcaaggaacttgatatttctggacttaagccctaatgattgcggtaaccctagtttt

SEQ ID NO: 377541 - DNA, 450 bp, Zea mays subsp. mexicana
  unsure (1)..(450): unsure at all n locations
tgtacatgttccacatcgtctaactgtaacttccaactggtacatggcatgcctatatccaaagatagatttatttattttttgtnaaaaaaaaaaaaaaaaataaaaaaaaaaaaaaaaaaaaaaaaaaaaaaaaaaaaaaaaaaaaaaaaaaaaaaaaaaaaaaaaaaaaaaaaaaaaaaaaaaaaaaaaaaaaaaaaaaaaaaaaaaaaaaaaataaaaaaaaaaaaaaaaaaggggggggcctttaaaaaaaaaaaaaaaattatacccctttaaaggaaaaaaaaaaaatttttttaggggaaaaaaaaaaaaaaatgtggggggggtattaaaaaaacggtaaaaaggaaaaaacccggggaaaaaaaaaaaaaatttgttggaaaaaaatatcttttttaagggggtgaaaaataaaaaaaaattttaaaaaattttttttat

SEQ ID NO: 377542 - DNA, 283 bp, Zea mays subsp. mexicana
gtccttcgccaccctccattaaccctagcggcagcagcgctcgtttgatccccgcggcggtccggcgtccgggtaggggagcgaggatgacggagtccctggtgcggaacaagccggggatggcgagcatcaaggagatgccggtgctgcaggacgggccgcctgatgtcagtatacctagcgttctcatcacactcgggatttgaaccttgggccccagcgtcactgtcatctagctcacacctttccaatttaacattgggggtatgtgccgggtacttca

SEQ ID NO: 377543 - DNA, 417 bp, Zea mays subsp. mexicana
ggagtctcgtcaaatttagcagctattgtcactttggcttcttctgttgactatacaacatccaattcatcgctgaagctgttactgcctcttgctcatcctgctcaagctcttaatgtccctgctgttccattgggtacattgttggcagcggcgtatccgtgggcatctggtccaccatatcttttttcctggcttaatcctcaaatatcagctcaggacatgatgcatccggagttgctggctaagcttgtttcaaacaacttttgtaagtagtctctcataaggtcttgtcttgtcttctctgcatttgtgcatttgtataacctccggatccatataattactcatgcgctacttctaatagttatgatcactgtgacttatttgcctacagagggtatatgttcatggaag

SEQ ID NO: 377544 - DNA, 239 bp, Zea mays subsp. mexicana
ttctacgtcgtctacacggcgcagttcctgcccaagctctggggcctagtcgttgacgtgcccttcctccacaaggcggcccaaggcggcgcgctgcccgtgccgcaagacatcctggacggggccaggccgtcggctggcatcggccggaccaagtcggcgccggcgcgttagctaggcgtacgaactgtgcctggcgcacttttcctagacgtatatatgtacagacatgggggtgt

SEQ ID NO: 377545 - DNA, 258 bp, Zea mays subsp. mexicana
ggtcgttgtgcgtgctgtgcctcataagaaacatgggggtgttgtctagttatgtagcgcgacacgctccatagatgattaagtagccagcgatctaatgcgtgacagcttactgcttatttcccgccacaaccttcatggcgctaactgtggtctgtgctactagaggcttacacgagtgggcactgacacaagtcctggtcatagctgttttgtgcgctgaaattgacgcatcttgtatgagctactagataatga

SEQ ID NO: 377546 - DNA, 182 bp, Zea mays subsp. mexicana
ggtttgtactgtttgtggatgatcatggaaattcatgggttagttagagcagtggaagtgaaattggaagctttcttggttgggctatggcaatgatttatatggggtgggaggattaaatagatttagttaaatatgcatagaggtcatgtttaggggatgataatattgatgtttatttt

SEQ ID NO: 377547 - DNA, 153 bp, Zea mays subsp. mexicana
tcgggactctgctgcccgggaatgatcggaggatgctgtgagggtggatatactcagaaaccgcagtgctgtcccgtgcagcagtccacaatgcttagagaacaggcagaacgtatcacgaggacaaaggcctttttcatgataggtgacaag

SEQ ID NO: 377548 - DNA, 322 bp, Zea mays subsp. mexicana
ggtttttgctgcccgtgcatgatctgctgccgggggggtttttaaaaaccctgtgaccgcaatcctcacacgcgcactgaccacaatgcttgagctacatgcataccgttttacagggacaatggcccttttcttgacatggacaatagtgtggcatacaagagtacatgcacgcgacctaacacaaacgagctcaaagagctatattacgcttactttcaagctcacacacagatcttgcagaggatttcaacagattcccagactatcataccccaaatctgctcctggtgaagagcaaatgggatcaacacgaagatga

SEQ ID NO: 377549 - DNA, 195 bp, Zea mays subsp. mexicana
ccctctcgtccgacggactcggagcactggatctggagcctggtttaaacaagtgttgctacgcggcgcagctcggccacgtcgacgatgtgcccgggatagggacggaggaggcggagatggagattgaggacgacgggggcttggagatggagatggagatggcgctggggctcgggccttccctccttcttt

SEQ ID NO: 377550 - DNA, 312 bp, Zea mays subsp. mexicana
atcggtatattttcttgatattatctgccattttttgtgttatgccacatgcaagaaccatggttgtgctgacaatttaaaactatggggaccttgttattcttcagcataaagtacatgcaaatgcatagttttcagtgacgctgccttgttattcttggaagcactgatatatcataatttaactttagatgtcaaagtttaacttcagcatgtctagcaaagcatgcaaatctttttgttaggagagtaaaccttaaccctaactaggattgggatgatttattaatagatattaatgtatatggaatg

SEQ ID NO: 377551 - DNA, 362 bp, Zea mays subsp. mexicana
gcgcctgccggtaccggaccgcaatttcggcccagacccacgcgtacgtctgttttggacggctccatactgttccaaagggacgagagtttctagctccagtggccatggacttactctgtctgccatgttgtttcttgaccgggagagtcatgccacaggaggtgtatttatgtataataactcctcgaatcagtgcataaatcgagtttgtttgagagcatagccccaggcgtgggtttgtggaaaatgcaaagtaaccgtggataaatgcgttcgcccttggcagttctggaaaaaaaaaaaaaaaaaaaaaaaaaaaaaaaaaaaaacaaaaaaaaaataaaaaaaaataataaaag

SEQ ID NO: 377552 - DNA, 137 bp, Zea mays subsp. mexicana
tcgatcatacacaggaccactgcacccatcaatagtgggtgggagtgtatgtcacatttgggggagccccacaagctgcggaaccacacacaaaaagggcacatagttcaggcttggcacaggctatcctatttgaa

SEQ ID NO: 377553 - DNA, 119 bp, Zea mays subsp. mexicana
aaatgctaggccgactgcctatgcctgcaatgggagagggaatagtcaaagccggatgcgggccaaccaccactgggaaagaagcaacaatctacacaccgcaccagtagaaaccaaaa

SEQ ID NO: 377554 - DNA, 519 bp, Zea mays subsp. mexicana
tgctcgcctgcatgcacggcccggactgacactgggtcgaccacgcagtgcggtggctctgcggtggtgtccctgatccacctgcccatgccgcagcccacgcggctgtccagcaggccatcgccgtcgccttcccgcgctcagccactgtcgcccattagagagcccaacgctagggcgccggtgccgtcaccggcaccggttgccaaagagcacaagcagccttctcctcttcatcattccgagcgtggagttcctaagcaaaaagacattaccgttccgcatgagaaaaccatccatgaaccgcttgtagcatccaagacacaaacaaagaccccagagaatgtagaggactgggtagcgcgtgaggagaaggagtaggaaggcagcctgctgcacatggaaaaagataaggagaagaaagacaaggtgaagcgaaaggataaagatcaagagaaggcgaaggatcataaagattagaaagacgaggatcaccaagagaagaaaggaaagaataaa

SEQ ID NO: 377555 - DNA, 305 bp, Zea mays subsp. mexicana
acttcccacccctgctggactacgacgatccaatagtaacatccctggcgaccacgtatgccaaggagacagggatctacaccgcgcaggatgtagcccatatgtgagccctactgggggtcataaacgggccccgccttagccccatattcgagatgtggaggtgagccaatgactacctggtcaactgaaacaataccttccttttgcatagccaacaattgcagagcagctacctacgaatccagcacgccactcatgccaagcgtctggacaatgtgaactacttcttcgacaattatata

SEQ ID NO: 377556 - DNA, 254 bp, Zea mays subsp. mexicana
gtacaaccaacccccgttgaacttcggggggggtattttaaaaaacttttggtttaatcagccaacgagacagggctatccaccccgcaggatgaagcccatataggagccctaatggggatcagaaacaggccccgcattagccccgataatcgagaatgtggtggacaaccaacgaccacctgttcaactgaaacaacaccttcctattgcatagtaaacaattgcagaacaactacatccgagttcaacat

SEQ ID NO: 377557 - DNA, 573 bp, Zea mays subsp. mexicana
ttttcttggaccgccttaccgctttaaaaaccatgggcaaaagacgcagcagaaagcacacgagcggatatgtagtggatgacggaaggcacaaggtgtccaagatgtagaggcgaggagcagctctacggcgacggccagtcccaatcacttcccctatgcgaagatcctgtacaaaagaagatgagtcatcaaatccaacaaagcaattgtggtctgtaatttgtcctactgaaagaaggtccatagatagctcagagatagaaaatattaggaatagtgataggcatggagcctctaggcggaggtcttgtaccacgagtacgagcactacgacggacacaaaagtcagccaacttctccgggaacttaacaaagcaattctcagagcgatgactggtcttgtggcaatgctcacagggcgataaagaggaattcttatccttctgagcagcaaccaacacactgtgagagtgcacactagtaaaagacaaggacttaaggcgagtctcttcagcatgtaattcagacaacaccttagtcatggtaatagtgtcagaactataaacagtt

SEQ ID NO: 377558 - DNA, 563 bp, Zea mays subsp. mexicana
cgattttatcgccacttcaacgccgccggagaaggaagtcgtggatccgcgcacggccgcgattcctttctactggtctgtgcgaaggcgccgccgccggtcgtctctgtccgccggatcggcgtctgctgggcggaggtcaacgggggttcgtcgattcgccgacagatctacgctcacccgatctgcgtcattagagcttcaagtgccaaggtacgtgactcgctgctccaagttccagagctccgattcaatccgtgtcccaacataacctaagttcgattgaccctagggtttacatgtacttcacatgtttaattagaacgatttatatgttcatggcgaacttggtcaactagggttaattggtcaacagatccgtcgttatcatctacaccaagaccaatgctttaagttgtcgatcataggatacgacatgaacactcttgtctgcttttgatattcgtcatcgtcgtctgctcatttcagtgtatccaccaaacttgtactggtgaattaatttgcagtcatgttgtttgtatgatgtttgctcaatgatgctc

SEQ ID NO: 377559 - DNA, 417 bp, Zea mays subsp. mexicana
gatttcctactatcctcgggcttccaccaagagggggggggatatgtaactgtacgtgagtgtggagatcctaatgtgcctggagcgggtatgaagaattcgatgccacagtacaagaggaggccacctgcttccagcctaccacagacagcatcactctctgggcctggcagggtcggaaatgcatataattatagctggaaattacagtctaaatacgggcgctgcattgtgggcctacaacttggggagttgatgaagctttaggcacacacattaaagaccccaatgactatgcagctatacagcagattgataattctggaatgtggattcatggaggcgctggttcaagaacagagtctgcaaattccgctggtaactataatggtcttcagggacagagccagcatggtg

SEQ ID NO: 377560 - DNA, 268 bp, Zea mays subsp. mexicana
tacttcttaatcatacgtggcctaccagcaagcgtgggggggttatgggaaaatacatcggggtgtagctcctgctgtgcctggagctggtatgaagtattcgatgccacaaaacaagagcagcctaactgcttcgagcctaccacagccataatcactctcatggaatggagggtacggaaatgcaaacaatattacgggaaatctcagaataaatcagggagctccctctgcgccaacaactttggaatttgatgaaactttgggt

SEQ ID NO: 377561 - DNA, 346 bp, Zea mays subsp. mexicana
ctgttttctataaaagacgcgtatacacacatatagtcagatttttgttttgttaggatggtgaaataccgtttatggttcgttgaatttgaaatcgttcattgtgaatcggactatttgaatagatataaagctttcacctaatgttttgtgtcgctatgcaaaaatcattttatagaaatctgattagatcaaagaaagaagaagtacaaaacatttaactttatggttattttgttacacgtgtatcaaattggtgggaattagattttttgacgggtgatgctgaatgatggattactattggtttttatgggggtcataaccttactgtctattggaatta

SEQ ID NO: 377562 - DNA, 410 bp, Zea mays subsp. mexicana
  unsure (1)..(410): unsure at all n locations
gaatgactggctggaccaactcgcccgggctgctttaaaagggataggcgcgcacctcaagggccggtacagtatggactggctgcccgcccatggacagagaggctggatctgccccaccacaatgagcacatatgcagcctcacagtgaacggcgcggaccacggcctcagacctgcggtggactgctcaaccttcaccncacatagagcgggagcgccaccgacggatcgagcgtcgcgccttcctggcagaccttacacgccagcatcgccaggaccagacctgctaggacctggtggccctggagaagtgcaaccctaagtagctcgcggaggtgtccgagcgacaggtcgtctaggatcaaaccggacccccttgaccggggatgggggagatacatacataca

SEQ ID NO: 377563 - DNA, 347 bp, Zea mays subsp. mexicana
ccttaatttatgaaaaataacattgtgtttattaactgcgggagttattacctcagcttattcttagagttgtcacatattgccatgtccttcataaaaggttgagtgtcctaattctgggtgtccatgattggaaggtctcttgggtgcgttttctgagggactacaaaatcactcgacctgaaacgagcttatacttgatcgagctcacgacttatcttgtggaagcgtctcctgtctcctggactgggtgcaagattttttttcttggcccgcgcgttaggattgctgggacaaacagttcttggtttgttccaatatcgaatattagccgaggcaatgttgtg

SEQ ID NO: 377564 - DNA, 501 bp, Zea mays subsp. mexicana
agtttgtttgctctatcacaatggatacatccttggaggggaattgcctgtttctaactcattgaccaagatctggtatctattgcagtgacacaatttggacagaaaagctatatttttcatcagatgctgcctttctggggtattccctcattttggcgatactgcggactttaaatttaagagacgaagcatctagagttatggttgccgctcctattctagcatttgtgacaacccacattctgtacctgaacttctacgaacttgacaaaggtaatcttgggcatgaccgctgatacttgcactcctgacactataaaaatagcggtattgtttctgcacaatttttttaccagcactaagtatgtaacccagcttatatgatatataaaattccattagtatgctagattggaatcttagtacctgactggttgattactgagttatgggtcataaaaaaccagcctctttgaaatgcgagattttacaaacaca

SEQ ID NO: 377565 - DNA, 215 bp, Zea mays subsp. mexicana
ggatgactacgcagatctcgccacgcgaacacagttagatcgagggagtaagtgagagtgagagccatgacggagctgttcgacacggccgtgaccagcctcctccacctgccggaggtgctggaccgcctcgccttcgcagacagggaccggttctcggacaatgattacgctgccttcctcctcaggtgcaaggccaactatgaggctaccct

SEQ ID NO: 377566 - DNA, 257 bp, Zea mays subsp. mexicana
ggttcatttttagaaagtgttgactatacttgcagggagggtgataccaaccatcacctgtgctggaatcctactcgatatgcgggacaaaagcatcctgcatactgtagctggatgatttagggaggctctcctgactaaaggggaatgatatcaccaccctggagccgtggtaagcaagaaataggagccaaaggcgactcatgagcccaactatggggtgtgagaccaaacacatctggggaagcatggattgc

SEQ ID NO: 377567 - DNA, 364 bp, Zea mays subsp. mexicana
gcatcgctactataccgacaaatcctagatcagggggggggatttttcccaaggtgctggctgacactcctcagaatgtatctcggccgtgggtgtatgttcgcggtccacacgatccaccctactggctttctgtacagtgacagatgctatggtgaggtgaaagaaaatgcctctgaatatggagccagggtagagtggggtacatgtgtctatgagatggagaaccatgccatccacatttcgcagtggaatctggcatgatgccttttctttttgaagcgttcagaggcataagttgtttttggatgtgctcggagagcttgttcttttgtgctgactgcaggtgggcatgactttggtt

SEQ ID NO: 377568 - DNA, 321 bp, Zea mays subsp. mexicana
ttgtctgcgctgttggcggccagagatgatgacgcgttgcggtgatacaactcctggtggcacgggggatctactcatcaccatgcctttctcggaggatcaaccaaacggaaagtgaaattgttcggatgctatatacctccaagtcgatagagggaggaagcaatagtaaccattgtgccaaggtacacatattctatgcatggatgggatgagaggttcattaggatcctgaagatattcaagtggggccctgatgctgagaaggcgctggaggttctcatgcttagagatgatcactggttggtacgagaggttatt

SEQ ID NO: 377569 - DNA, 137 bp, Zea mays subsp. mexicana
gcatcagtgccgatcctccaaaccagcacccgccgggcgggtctcttcccttgcgcacctgctgctgtgcggatcggtgaggcggaggagtaggatggcgagcgcggccggaggcggagcggcgggggaaggggaga

SEQ ID NO: 377570 - DNA, 258 bp, Zea mays subsp. mexicana
tcgttctttggcagggacgaagctccaaaatgatgtgagatggctggaccagctcggaaaaaaacggcgttcgtgctcggaatagagactagagcgatgtcaggtgggggcctataatgtgctaaggcaggaacatacgtgtgatccgcagaggcaaagagagctagaggtgctgacggaaaagttcgcgtacagctgtagaagcgcgtataaaggaaaactaagtgactcggatatctttttagtggcagcaattac

SEQ ID NO: 377571 - DNA, 89 bp, Zea mays subsp. mexicana
gtcgttttgaagaagatggccgggcgcgcgctgcacggcgcgagaaatactcctctggggacaacagcacagacctaaggtcctatcct

SEQ ID NO: 377572 - DNA, 341 bp, Zea mays subsp. mexicana
tcattatgaactatgctacctacaccgggagtacgggtctctccaatgctatagcgtgctgggactgtgtgccgccgattgcgtgcaaaactggctgcaaaacttgctgttaagcaagctctgaagacaagtgggctgaaagatgacaccacatgtgtggctgtcgacatcatcccatctgatcattgttcaacaccaccagcattgtctccaaagaaaaatcagaacaagttgaagcatcttatttttggtaaaaggtctcatagttctgttggaaagctcagcaaatctgcttattgggttcagtggaagaaatattcgaggagggatctgcaatgttg

SEQ ID NO: 377573 - DNA, 459 bp, Zea mays subsp. mexicana
gtagggatacagaagtggaccattgtaaggaatggaacagttaccgacgcgacaaaggtgaaccaggatatgatcctcatatataaggagatcttgaagttgatttgagaagccacgatagacacactcgaagggatgcccctgtgcatgaattgtacccatctaagatgaataagaggaaacagctcctgttcttgctgaagctgtgctatatttgacaaaagaagcggataccaaaacaagagatgtaaaagctctccaacctacatgttgccccttatacggcgagatctgcataagataatttcctaaattatatggacaatgcaccgcacgaggtgctcaacgcgattcatgaagctacagtcatgcggtcttgggcttgctgtgaataacaacttcattgcacccagcttgccaactatacaacttgaaagatctggtggactacctgaactc

SEQ ID NO: 377574 - DNA, 447 bp, Zea mays subsp. mexicana
tttcatcctaatgatacagtttactctctacactcaagctaaagtagtgaaggatccacctcatatcttcccaatatacatatacaacctcacttctttccaaaaaatagaagagagcgtcgacaacaaagattacttgatcgatgtcattggaatgctgacacaaattggcgctccacatgtagctggttacaacaattcaagcatcgtcagggatatcttcataaaaaatataagtgatgcctctcttaaaatcacgctttggggagatcaagcatcaggtttctctactgacaatgtctgcaatcaaggcaataacaaacctattgtcataatgtttgttggatgcttagctaagcaattcaaaggccaatcatatctaagcggcactgcagcaactacatggtacttcaatccagacattcctgaagcacaagaatactacat

SEQ ID NO: 377575 - DNA, 309 bp, Zea mays subsp. mexicana
tcgttactgccgaggtccagaccccgaccgtcgtggcgaccgaggaagcgccggtggtggagaccccggctccgcccgccgtcgtgcccgaggaggctgcccccgccgccgaggccaaggtggaggagccagctgccccggcggagaccgagccagctgccgccgctgagcccgaggcggcccccgtggcggcggaggaagagacgccaaaggaggcggagccggagccggcggcggctgaagaggtgaaggaggaagcggtagcgcccgctgccgagacagaagcagaaccagcagccgctgagcccg

SEQ ID NO: 377576 - DNA, 167 bp, Zea mays subsp. mexicana
tctttcacccgcaaccgaaagccctaggagggggggtttttgtgaccgtagcgtccaccacctcaaaggggatgggcaaccccttccagaaggaaagctccgggcagtacacacaaggactgaaatccaacgtggctagtggcgaccgctcaagccgcatgccgaag

SEQ ID NO: 377577 - DNA, 390 bp, Zea mays subsp. mexicana
tcgtttactcgttcggaacaccaggctctgcgacgcggatgttgtttgggacatgcacctgggcgcacgtgcacatcgctcctgtgtgcatcgctacgtgctctacgtgcatccacgggagcatcagctcaagatatccgcacattgattattggtctgttgctagcttgaatcgaattacttgattaacatgttgttgctctcgtctacatatttgtggacatgatccatgtaaatggctgttgcattgtactaaatctaaagcgtgagagagatgtacaccatactgtgtggttaaaaatgctcagcgaatgaactggctctgctgctcagaaattactgactgaaattggtcgatcacttggttcccttattcaactttttatctgc

SEQ ID NO: 377578 - DNA, 186 bp, Zea mays subsp. mexicana
tttattatttgctttgccctggacatgaacgccggcgatcctttactgcagttgctccgcatggtctggacgtagaccgctcgcgttaccgtgtcggggtcatgggaaaccagcgagcactcttctcacggattctgttccaggcgtgatagtcgagcccagtgaggaccagttgcctgcttgcga

SEQ ID NO: 377579 - DNA, 201 bp, Zea mays subsp. mexicana
tttgtattatgaacggaaaatccacgtagtgttattgtgtggacctcagggagtagacaagactgaaactgaaggacagaaaaaaaactacccgaagtgtggaattctgatgaaaatcgagccgtccacgcaaggccacctgctacagctgtcatagcccagccgtcactaaacctgacccattctgacgacatcctgaat

SEQ ID NO: 377580 - DNA, 524 bp, Zea mays subsp. mexicana
tgtgttcgtgaggttctccggggttcggtttcgtgggtgagcggatcgagatggcggcgtcggatgttgagtaccgctgcttcgtcggcggcctcgcctgggccacggacgaccactccctccacaacgccttcagcacctacggcgaggtcctcgagtccaagatcatcctcgatcgggagacgcagaggtcccgcggcttcggcttcgtcaccttctccacggaggaggcgatgcggaacgccatcgagggcatgaacggcaaggagctggacggccgtaacatcaccgtcaacgaggcccagtcccgcggcggccgtggaggcggcggcggtgggtacggtggtggccgtggaggcggcggctacggcggtggcgggcgccgtgatggcggcggcggctacggcggtggaggcggcggctacggtggcggcggcggctaccgtggtggtggcggcggctaccgcggtggcaaccgtggcggcggctacggcaactccgatgggaactggaggaactgagcg

SEQ ID NO: 377581 - DNA, 198 bp, Zea mays subsp. mexicana
aacgaatagcttgcttggggattcaccagagcttgaggagtaagcacgacctaaggagagtagagaacttgacgataaagatcatggtccgagtgaatctttatcttattggacaccaaacgtgacagtaaatcttgttgaagactacacacggtatcccaacaataatgaacctgccatcgctgcttcaatgtgaat

SEQ ID NO: 377582 - DNA, 412 bp, Zea mays subsp. mexicana
aagagccggcccgccgggaccggacccggaacttaccgggtcggacccacgccacgcgtggatttgatacgtatttgggatgacgcgcccatgttgtggcgttatgaactgatggagaagctggctgaacggcgctcttgataggtggttcatgagcgtctgtggagcaggcaccatctaaggagtgtgcagctcatgttgctagaggacttgggtcctcggagacgtggtggatactaagccggctgcggcattatacgtggcataatgctgaactctgtaattcagctactaggtacatgcgataggggaactacatttaaatgtggaagcagacgacatgagaaatgataacgctaaagttcttcgctacatgaagcctttgcaggttgaagatgtgggcctaagacag

SEQ ID NO: 377583 - DNA, 227 bp, Zea mays subsp. mexicana
gttctaaccacgctgcgacgccggcgccatcggggacgccttccaagggcaagtcggcggcagcgcaggccgcggctttgggccacggttcctcctcccaccaccactctgccggtggtggcggtggtggcatgctcccttgaatcttttcacactgtgaaccagatggagacactgatgaactatgacgagagcatatctagatgtgtgtacattgcctgtgaccc

SEQ ID NO: 377584 - DNA, 137 bp, Zea mays subsp. mexicana
accccgtgcgtgccagcctgtcgctgatgcataaggtgacctccatgcatttgaacgaccccctcatcacaacgtactcactgcgcgagccctgcggttactcaactaacaccacttgcgaggcagagctccttgcg

SEQ ID NO: 377585 - DNA, 495 bp, Zea mays subsp. mexicana
atgagctaccctgttgcactcccttaaaatctctctggaaggtgatggattgaaaatgccacaccactgatctgactccatcgatgccaaacgatacgttgacaccacttgcacaatccaactaaagtttagtcagtttctgcacccactccgcagcaagctgcaatgtttcttaggaagctataattctacttcctcagcacaagcacatacactcactaactggccatgttgaaagagctatctgtcaatcatgatgaaggattataataccaacacttaattcaagatgaaaatttctgtttgcagtgtaccacagacaattgtcatgtctattcttgtgttaaactgttaactagttgatctgttaaaaagaaaaaggtggtctcgatggccaatatggtatattatttctttttcctgtcttctggatgctactttgcagtccgaccagtttccaatgttgtttttcctaaacttcaatctaagtgatgc

SEQ ID NO: 377586 - DNA, 495 bp, Zea mays subsp. mexicana
tcgctgcttcttctcaatcacaatcacaatcttccgctggtggttcgtcgagttcgatcgcatctgcttcggccattctgtcgtccaatttcggactcaagcgaccgactcctgctcctccgaccaagtacacgtacgaatcgtcggtctttcctccgtccggtccacctcggagagtgggcgtgttcaacaatcgtccttctatcttctcgtcgtctgccaccgcttcattgagcaatcttctcaattccattctatctgctccacttccggcgtctccatcggctccggccttcacactgaccaccgcaccgtctgcaattcgaaacccgttgcttgccttgatcggtgccgaatcgtttcaacatctttgggctgccattcaaacattcggtcttttcggagttcttcgttcgttgctcttcactttgttcgttgttttcatgccgccgatttctttggctgctgcatttgcggctcttctttaacttccga

SEQ ID NO: 377587 - DNA, 290 bp, Zea mays subsp. mexicana
ctattttaaagccgagcacagaaggacgacgatgggttgttcacgccgaataccgatgcctgccgctggaggttgtgatatggcctacttgctacaaaggcgtacaatgtcctggtacgatgcggatggtatcaagcataatgcgactcttagagggcctaccgttgttcgtgcaagcggcgtaccgatgcctcaagtcggtggtggtcaagtgacctcatggcacctagaatgcctgaaaggcatgcatagaacatgagttgacatccatgaaatgattgcgccaaaag

SEQ ID NO: 377588 - DNA, 423 bp, Zea mays subsp. mexicana
  unsure (1)..(423): unsure at all n locations
attagttaggaggtttaaaaacgaacagctaatgaactagctagtaatagtaattggatgtctaaaactagcagcctaaagcgaagcatgatttgatttggtatccttaacctgaccgtcagtcagtcagtcagtcaggaagagtgcccncctgccgctacttttctttttgattagattagaagaaagaaagtaccaaagcactgcacttggggtggttcggagacatgcgctgcacaaaagctaggagacatggatgccgcccattcctttctttcgtgaatctactctacttaaaaactttttccgtgtccactccacgcacgcgcaggccaagttcaagctgcggtcgatcgtgacgatggtgctcttcttctgcctgacgacgccggtgggcatcgntgtgggcgtcgggatctcatc

SEQ ID NO: 377589 - DNA, 402 bp, Zea mays subsp. mexicana
ttgtttcacgggcgccacgaaaaagatcgaggttggaacacaggctatagatgcgcgagtataatctttcaccatcattgatgtatggagccacacgccattcagggttgcgctcagcgtgtcatgcgactggatgacaggagactatctcgtcacagactaacctaagtatcccatgactgcaaacgtcctagataaatatatagaatcctatacaaatatacggtatgattttaaccatgtacaaaaggcatgaaggctatgcttattctaaatcaatgcccgggacgtattcggatgagtctgggtgacagaatgggtaccgataagctttaatttctcaccttgccgttctgctacacatatacctatttacgtaatttggtcaagttaaaggtgcac

SEQ ID NO: 377590 - DNA, 290 bp, Zea mays subsp. mexicana
ctgctgcgcctcctgcagccgccgcgccgtaattgcggggtcgccccccgccttctttgtcctgtcgaagagacgctgatatccccggatgtgacttgccaggaccatgagaccatatgactgccacaataagctacctgatcgctgaagctgacacattggaggtctggatgaacatggctgtgactgtgtctccacgctatctccaggtacctactatcaatgaaatgatcgacatgtggtagaactataatacgaacactgcctatataatttacacatgcatcttc

SEQ ID NO: 377591 - DNA, 506 bp, Zea mays subsp. mexicana
  unsure (1)..(506): unsure at all n locations
ctgctatctccctccgaccgtccggccagcaccgcctcttgctcgcggcctcgcccagctcctccgccctccgttgagacgcagatcttggtgcggcagggcaccacagaggctgtgcgtgtgctggtggcctggtgctagcaaccgaggagcactgctgtgaggaaggccatccattttgtcaacctgcggacagctggaaggtctagtggaaacctggctatgaactccgtaccgaaaccagcacttgggtccgaaacatctgggagggaggattttgctgcgggggataaggatgctgtggtcattgttgatcatgggtcaagacgccaagaatccaatctcatgctaaatgactttgttgagatgttccgggcgaagactaactataggattgttgagcctgctcatatggagctagcggagcctactataaaggatgcntttggaaaatgtgtgcaacatggagcatcccgagttattgtcagtccatatttcctttccct

SEQ ID NO: 377592 - DNA, 512 bp, Zea mays subsp. mexicana
tctacgcgtccggctgattaccagacaagattgaaggaactggtcatagaatcttgtgatgcactatcatcacttagagagttgcaaggccttgtctcccttactaagcttatcgttgcaaactgctctaagttggaattgctgcctggtatggattccttctgtgcacttgggattctgattattgaggattgccgtcttctgaggtcactaccagagagaggtcttcctgtatcgcttagaacttttgtattggatggatgccatcaagcattagacgagcaatttcagaagggggaaggtccagactggaacaaggttgctgcactttcaggatgcatgcgctatgaacatatggcagatgtcgaagatgagtctgtctggcattcattctataacctttattacttctagtatagcagctctcagctgtgcttattttcaatggtgtggcatacctatacgtcaagtttttttcaacactggactgaattagatgtaaattacttctt

SEQ ID NO: 377593 - DNA, 198 bp, Zea mays subsp. mexicana
ctggtaacgtgatttcggttccttctgatcattcctttgcaattgtgataatatttgcttcgaagccagttgttgttctcgattccaaaccagtgttgatcggggttcttttgtgtaaataacttcgttccttttgttaaacgcggtattcccagttgaagaagccttatactgggcaatatcaggattctaccgttt

SEQ ID NO: 377594 - DNA, 516 bp, Zea mays subsp. mexicana
  unsure (1)..(516): unsure at all n locations
cacatgngatgtctagcttacactgtttatatttcaactattctctggtttgaagcacctctgggcgttataggcagtttcttctgtacatgcttgtatgtataacatgcaaatatctctattatagattgatatgttgcgccattgactaactgacatgtgatgcccgtctttattctcttaggctgatacagactcgctaaagttgaatgcttggagacaacttgctttggaggaaggtatgtttataagcaaagccatgtaattgtgtaggatactactgccatgtgaccaatctagcaccacgagggaccattttctatttacatggatatattaagactcctttttcatattctcagtgatggatcgtctagtataagcacataaaaagctatctctcttttagactgaaattttgggacggaaggaagggctgttgtatgaacaacacctgttcattggtcttcttgatagttaataggttttcggcctttttgcattaaaaatgatcca

SEQ ID NO: 377595 - DNA, 502 bp, Zea mays subsp. mexicana
tcttacgctacttctctaatgcaaacatcgatattacttaactgaatttaatactcttcttctccccttgtgtcttggatatcgtgttgaaaccaagtcttatgtaagacccaatgtcttaccctttatttaattgtttgtcgtccgcaagggcaaggataacaaataagaacacacataagcaaccttcaagcgagcagatatgatattgcgaaggtaggacacctccccgcgcaccgggcacgtcacttttgttgcacaaatatcacctttgcgcagatttcacatgacctcgagaaacaccactaagagcggccacatacgacaaacactgacatcctggctttgcctccaacaaggggaatgacacagaagcgccaccaagccgagtctgacagaaggccaaacaaggctttcacccataaccgatctggtcgatgttgtacgaccatccaaaccttggacacaagggtcggtacaccggtctggatggccggagggc

SEQ ID NO: 377596 - DNA, 616 bp, Zea mays subsp. mexicana
  unsure (1)..(616): unsure at all n locations
ttacaattccattacctaaaaatatggtacagtttcagttcgccagtacatattatgcaaatgaaacacaattaaaatcagcattgtgaactttattgtttgcccatttttttgataaattacccattttatgattctactgggcccttttcgcctctgccctacaattattcctcctcttcgctcttttgtttcattgtttgttctgctttgcacttctattcattgcattcttcgtcggtgattgcgctcgtccagttcgtcggtcatgtgttctatcattttcgtcagaaatcctctcttaagccctccacttttctccttttttgttaccttcgcacttcgtttttattgttcatgttctctgtcgtcgagatctactgtctcaggtttattctggcttttatagtaaataaattgctcttcttcccctcatttcttgctggacgcatattatgcttttccactttgcgacaacactgtttaccttcattgtgttcgagtaaagttcacactttatcctcagaggtcatngttacttgccttagcttgcactctatacacataaagcgctactgtgctgttgcattaactgtttagttccatagttttgttt

SEQ ID NO: 377597 - DNA, 492 bp, Zea mays subsp. mexicana
cctatgcgtccgcggggctgtctattggaagaagcctaggtaaacaatggttatcttattgcttatgagaaagtttactgcattcaaggagttgttaaatttattgtgtcatgcaccttgggttatattggctgagaatgattgtgatgctggtgtttgcatggaactgccttgacttctctggttatacacagttacatgttattaaagaacaatgaacttcatattcctgttctgcaaggcttgttttcttggttgaactgctacaaatacatggtgaatataacatatgagccttaaagcttcattgaaagttatggcatttccctttattctggttgagctggtcaaatttgtgaacctgctgggacaccctggatatgtatctgctgttggctgacatttttctatgcaattcagcagtattcatggtgtaatctatagctgctggatgagtgcttattttggacaccagtgtctgtgaggtttacg

SEQ ID NO: 377598 - DNA, 458 bp, Zea mays subsp. mexicana
ggctccggcgtcggcactgccgtcgcgcccaacctccgttcgtaggagggctcggccaaggcggaaggcgcacacagcgaggcgacgccggtatcggaaaccggcgatgaggagtggaaaggcgccccggctgccacagacgcggccaacggcgcgttgggctatactcacaaggtcaagtccgcggctgtgggcaccacggagtacggtaagcagctggcgagcaccgtgtacgagaaggacgccggcgtcggcaccgtcgtggcgggcaaggtgcagcaggccacacagtcgcccagcacggtgacgccaagagccgacgcgcagcaggacacggacgccgtcgagacggccacccccggcgccggcgggcagtccaaaggaacgaccgtcacggtgtacatcgccgagaagcttcgttcgggcgacgaggaccgcgcgctcagcgaggcgatctt

SEQ ID NO: 377599 - DNA, 522 bp, Zea mays subsp. mexicana
gatcgtatttggaggacctgggctccaccaagatgcaagttctttctctggcttgcagctcaagataaatgttggacagcagatcgcttagcgaaaaggggtttaaatcatccggttcaatgccctctttgtgatcaagaagatgaaatagtgcagcaccttctgatttcttgtgtcttctcgagagaattgtggtttaggattctacccatggttaatctgcaacagttttctccatcaaattctgatttggttttccaagtttggtgggctaatctggaaggaaagatcccagctgtgcaacgcaaaggaacatttgcttgttgtgctggtggcatagtggctatggaaacaacgaaatgggggctactcatggtggcaatcgtattattcaaaacatcaaagatggcgttcatcggtggtgtcttgcaggcacgagatgtctgcacgcggtttggagttagtctgtttgttggcttctgatagtagtagttttctataggttgtttcttagatggatct

SEQ ID NO: 377600 - DNA, 542 bp, Zea mays subsp. mexicana
gttgtttgcaacaggaagaagactgcagagaggattcagaatcttgaagaagagaactttgcattaaagcttgagcttgagaaaaaaaaggctgctgaagaaaaggcagttcgattggagcgcatgattgatgaacttaagagtgatgttgatgatgctaggaattttggttccaagtcaaagcagttagctgacgaatggcagaagaaggcacagcttctcgaggtcagattggaagaggctgatcagtctaatattttgaagggtgaatctttgaattcagcaatggaagaattggattcaacaagtagtttgcttcgtgacagagaatctgaagttgctgctcttcgtgacaaagtcaggttcttggaggatgagctgacaaagctcaagagtgatattgttgtgtccggccaacgggcagatgcagcagagaaagagacgacggatctatggacagagattgaagggcttaggctgaagctccatacagtggaagaagagaaaatggaggccttgaacagtgataagaatactagctc

SEQ ID NO: 377601 - DNA, 146 bp, Zea mays subsp. mexicana
gaacattttaattttaacagctcacgtgtctacactcaagctaaagtagtgatggatgcacctcatgtctttccaatatacatatacaaccttacttctttccataaaatcgaagagagcgtgtacaacacagattactggatcga

SEQ ID NO: 377602 - DNA, 374 bp, Zea mays subsp. mexicana
gcggtctgtagtttacaacatcgtcgcctttcccctggagaccgttggctctgatgtggagccaggaggccctctacacttggctaggcatacactctccgcaccacttagcggtatggttatgcatgaggtgcaggtctattgccatgtccacctgactggactgaaggatagttgtagcattctccccatccaacaaccggtggcactggctatgccaaacttcactatgctgacattgcagtctacgagataaacgtatatatatacatgctccggagatgaccatgagcaatggcactgcatagtgatacgactgctggcatgacatatgtgcttttctcggactgtacacgaaggctccaaacagacga

SEQ ID NO: 377603 - DNA, 573 bp, Zea mays subsp. mexicana
ggagcttgaggtggcggacccgagacgagcgcggtggaggggatgggagccgacgccggtgcagaggcgacaagagcggagggagccgtcgacgcgcccatggagagctcttccagaaggagttcggagcgaacctcgacgaatgacgggaaggggcgctgccgcttcaggcatgtgttcttcctgcccccaggagatctttttgtggcaattatgccagagtcgtgaagcaaattttgcaaggcctgaccaatatgcatgtattaccctccatctcccactactcattctgtcagttttatctgtgttctagatatgcttatacctgaatggtattttttcttctgttttttctcaagttgtggctcaggttgcctctggagaagtccgagcctatggatgatgatcttgataaaataaataataacagccacacgatattttttttgacaattgagtgtgcctggaacatgatataaaagtattttagcattatacacaatgcacatgtgtatgtgttttctttagttacagagtgaaattgtagactcatgggatttatggaattcattc

SEQ ID NO: 377604 - DNA, 85 bp, Zea mays subsp. mexicana
tttgtgttttcaaccccggatgggagcctggagggggaagtttgaagtcttcggcggaccgcaagagggacgacaagtaaggatg

SEQ ID NO: 377605 - DNA, 282 bp, Zea mays subsp. mexicana
aaccaaaaacaaaaggaacgggaggaggttaaatttgaatatggacgagggcacaaaccctattaatatggttgcagcatcaatcctctcgaactgcacagacacagactgaaaattcacagctcttgaacgaaccgaatcaccgcccttattggggaccctgacaaggctgacgctaacaaaaatgctattgaggccattacctttaatgaagaacattggattcaggtcaacctaacatcagagaaagctagcatggcccttcacttggccacatatggt

SEQ ID NO: 377606 - DNA, 489 bp, Zea mays subsp. mexicana
cgcctccggtccccgattcccggttcccgggtcgccccccgcgttttgcatttttacccccacagcctgactatgactgtctccgagccctcgcatgatgcgggtgctgggtctgatgctgattgtcaagatccgcagacctgtggctgagagtcctgtcaagcctaccctctcgacaattacacatgcagagaggcagtatgacccagacttctgagacgaaggcttgggatggtgagtcctgccgcttaagcctgccgatggatctgactgtggaggaaataagacaccttggagaaaggcgcctcttttaaaaacgaaagaggccatatgtgacatcttgtaaaaaggcgggctattgaagcatcgcatccaacattacaccataaggttaggagctgtgcaggtagacatgttccttttgaggatccatacagggcaccacgctatgctgcagttactgtagactctcagcatggccattctttg

SEQ ID NO: 377607 - DNA, 368 bp, Zea mays subsp. mexicana
ccacgcccccggcgtgttggcattttaccatgagctgcctatgccttgaagcactctggtgctgccttgaattgtcacggataagggaagcagctggtttgttccggctactcaagtcgttggagtgatagaattcgtgcgttgtttacttgcggactctgcaccatactgcatcgagtatgttcctacttacattctctggaccatgctgcctcttttttcccccgtaatatatgtacaccttcattgtcatggttgagtcagatgcctcaagggcactggatgcgaggatcatgagtcggatcgaaaattttgcatggaaccatttttggaacccttccaaagcaaatcctaccaaagccaattaa

SEQ ID NO: 377608 - DNA, 469 bp, Zea mays subsp. mexicana
  unsure (1)..(469): unsure at all n locations
ttcacggtcggatgactggaaaaccgaaagacaccattttcatatggcgatcttcggaggcttccagcaaaatgtcgacgccgtagacaaacgcttcatgtgcagcgttgatgtgggatcgaacgataggtatgtttcgagaatacgtggcctaaccacgttacagccttgctcccgcgcttaatatagtaataaatggaagctccttagatttagattgtcattttgcattgaaattattaggcagatttagtctacttgcctaattttttactggngtttgtgctactaagtttgctacgcgcatcactatgctttattgaatgctgctttgcaatgaaactttgttgtggtgactattaggttatcaagatcttttttatattggnttggaaaangtaaaagagttattggctgagctcgtactggcccaacataacttaatgggtttatatagcttttctttttc

SEQ ID NO: 377609 - DNA, 489 bp, Zea mays subsp. mexicana
tcgtgtacgcgtgggctctcttgttctggtgggcatatgatttagtgctgatgttcaaattgctggtgttgctagttcctgacattactctagcaaatgaaccatttgagggcctctttgctatcatcttgttgcatggccttgatacaatgattgtccgttggttcatgtctaatcctactgaatagcttttgcttgctctcatcctcttactgtatgaaactttctttgcaaggtcttgaacacttgtagcatcagatatagacgtgaatgattgggccttcccttggtagtaattggacagccctttcctgtggaaatcgtgttaattgaacatgagttggaatgctttgcatagtgaaatttatagaagtaatgttgactatccgtcttttataatcaacattgcgttatatatccactcagccttttttcctttcagcaaatatacatatgaagttgaactctgctgcatacttatcatagatc

SEQ ID NO: 377610 - DNA, 145 bp, Zea mays subsp. mexicana
catagttatagcagctgccccgcctggtaccggcccgcaatacctgccgcgtcccaccccgcctcctggagttcccagaataactcatgtaacactttgatttctgagttgtctattgcaagcgagacgatggcttatcggatca

SEQ ID NO: 377611 - DNA, 325 bp, Zea mays subsp. mexicana
ttcttggccgaggtaggcagatgcgttggacagtcgacacgcgcgtctcgaaacatatggttgcattgaactggtgtgtagtgcagtccactgcagattggaagtacagtacatttgcgtttccatttcatgccaaggtgagatggaggaggcagatgccatttcaaggctagctccttttgtcttgtgttcttctgtatgtagtacatgttcagtgtttgtcagttggcacagttatgtagtacatgttcagtgtttctcgaccactaccttgtctacagtggtgtaacaatgcaaccgagaactagggcaatgttttctagtc

SEQ ID NO: 377612 - DNA, 471 bp, Zea mays subsp. mexicana
  unsure (1)..(471): unsure at all n locations
ttggcaggcgcaggcgtgaccgggcagaagcttccgcacccgcagtcccagtcccgcacccggggtcgctgaccggcgacctcatcgccgaggcgaggacgagacagacgacaccgcacccgttaccagcgcggcgcacgagccggccagttttattctgctgccgtcgcgtgctgcggaatcaggccagggaagtgtgtggggaccggggacagaaatatcctcctgctgctcctcgtcctcgccctcggcgtgctcgcgggcgggcggagcgagggaggtggatcgnnggagcagagatcccggccggagggatgncgaagggcggcggngagaggggcacgctgctgccggtctcggcggacgacgggaagggcaacgacgagntnggaggcggccgacaaccccctgctgtaaaggggtccgccatgacccgncgaggcggcgccgcggcgctctcctacatggcat

SEQ ID NO: 377613 - DNA, 395 bp, Zea mays subsp. mexicana
tgcctagctcgtgcgccgcatcgccaggatggcacccgggattggcggcttcggcggtctcttcccctacagtaatgcgccggcatcgcttttatctttgctatcttatctatttttttttaaaaaaacagccttttgtgaggattgttttacgtgtgccgcgatttgcagttcaagaagggagtgagaaaaaaataagttggtttaataatgggtgtcgattaagtgtaaattaatcatcaattttagctggtgaaaggggcgaatttaacgttcttggtgcttacctgttggtttatttgaacagatgacgattatcttgttgctagcaccgatggggtggggacaaagctgaagcttgctttcgaaactggtattcatgatacaatcggcat

SEQ ID NO: 377614 - DNA, 354 bp, Zea mays subsp. mexicana
accgccgccggggccgctttgagaaacccaaccccaccttacaccccggcggcgacgaagaccaagggagagagagaccagcacaacaaagggcgaccgaaggggaagaagaagaagcgcgcagaaaaggacacccgcgacaacggcgaccgcgagaccgacgacgagaagaaccacagccagcacaagaaggccaagcacacaaagagccacgcacgccacaagaagcaccacaccgactctggcatggccaaacacgtaccccaggtacacaaggagcacgagaccaaggttcctaatgcaaaagccagatagggaggcaccggaaatagagaaacatcggaatgcagggga

SEQ ID NO: 377615 - DNA, 498 bp, Zea mays subsp. mexicana
  unsure (1)..(498): unsure at all n locations
tgtattattgggtgattcctctcacaatcgaagatgggatgccagaggatgtgcgaaatggaagccaattcgatggtgctatggattctgggtattacactaatctcctagtcaatggtgttcaagaatctcaagctttgtatatacacttatctatcttttttatagctctcaatactttttatttaactagtattatacctaatctgtcccataccaatcgaatcaacagggatgaatcctacattggtgagatgctggtggaaattgctcatattatttgttggtaatttttcaagactaaacagttttttgaaccaaagcagattttggaactggaagacatatgtggaccagaacacttatgtgcagattgaagtggatttttgctggacaaaactctctgcttgcatgattgaagtgcatatgtggcccaatacacttatatgctcttattcctcactgccatctcatttctanagttggaaagattgaact

SEQ ID NO: 377616 - DNA, 404 bp, Zea mays subsp. mexicana
gtcatactagtgatggatcttgattctaatttcttcaagaggaaggatgctaggggtagcatatagtaggagacaatgggatggatgaaccggtggataatgatctactcatgcataccgatgaggtgatcaagccagctgtactggaagagcaagcagaagaggtagagaaccccatggcgcagagcgacatggcagctacaatccagcagctggcggcgatctcggagattgtccagtccccggctgcagaacgcaagagaagatcgaacacatcagacgagcatgccttgatcagggctgaacgcctgaaggcggagcgcaacggaagtactctttcgagggacttattggtgtcggttctgggggcttcttcaaggcgtgaagaggacatcgtaaggatc

SEQ ID NO: 377617 - DNA, 208 bp, Zea mays subsp. mexicana
tacggcagctgttcaactgtgtacagaataataacgtgtgtcgtgtttggcgctatctccaccacataaacatgaaaatgtttttctaattatatggtcagtccttgtttgagaccataccagaactataatccaccacatacacgcgatctttgatctcgcatgaaccgcctccggaaggatggaaaacgagcctctgggggtcctc

SEQ ID NO: 377618 - DNA, 498 bp, Zea mays subsp. mexicana
ttcttgtcatcatggatgtcttccctgatctctagtgaacttggtcatgactgacgttaaaaccagcccttgcatatctaccatttgtaaaatttggttcacttagaggaaaatatgagcctatccatgcaactaagtggcctctcttttcgctccaagtcagcatctccgcattttctctggccacacctcaagctgtctgttttgtgatgttagtacttagtagaacaccttgacagtgttctcacatacgacatatgcggcatgctaaagtaaaatgcactttgcatgatgccatgatcagtaccagtggttgctatgcattatcctgcacccattgattttgcccccttgctaatcacctgggatcattttgtgatgtcactgtttttcctagtttggaatgggcccgtcatctcttggagttgtatctgacctggtagttaaggaatatgattaagcttgagtatagggtatctttgcattcagccctttgtt

SEQ ID NO: 377619 - DNA, 312 bp, Zea mays subsp. mexicana
tcgtttggaacgcggaccctgcgctgaagaaccggacggggccggtggaggtgccctatacgctgctcaagccgacggcacagcccggactggtgctccgtggcatacccaacagcatcaccgtttgagcagcagagcgccgtcggcagctgtcaactgtgtacagaataataaggtggtcgtgtttggcgctatctccaccacataaacatgaaaatgtttttttaattatatggccaggcttacgggctgctctgcttggtcatataatccaccacataaacgtgatctcgctactcgcttgtagtgatg

SEQ ID NO: 377620 - DNA, 248 bp, Zea mays subsp. mexicana
gttggcgggacgtgcggatcctaagcttcaggttgtggtggatcttcgcgtctatcacgacggacgaggagcctgacgcggacttcaatctcaaattatatccaatgatgctcggcttcgctctattagcagaatgcattcataatgatgtttacgctatactggagcttattgtaatgcctgatgctgatcctgatgtctttgatgctaatgaaattagtgatgatcgttatttaatggatgagaaa

SEQ ID NO: 377621 - DNA, 325 bp, Zea mays subsp. mexicana
ggaatgctgtcgcctgctgtaccggcccggaacttactggccggaccaccccacgcgtccgttattttgtaagtgccggtgcattacgagctagttcaaagcgactgatggcaaacgatattctggtagttagcggtgacctgttaacagatgtgctgcctggagcagttgctgatccttattcataattaagatgctggtggtactcactcaactatgacctgatgttgtacgtggtccttcacacgcttttcattttagagggaaagataaagctcaaaagccaaatcgtttgaacatatttggactggacaggagtcaacaa

SEQ ID NO: 377622 - DNA, 421 bp, Zea mays subsp. mexicana
ggagtaggtgttcgccgaggagttcctctgcgagagattccgggtcggcggcaccggccggctctggcatttcaggatcccgccagtttcacggcgtggggaggacggcacggcgaccgccggtgaccggaacccgttttgttaaggcgccggtgagagtcttggacggtctatttggccctatttgggacggtctatagttagtactccgtaaacaggatttacgtcgtcgtcggccctgcagttcgaatgcattcgagtttttttgttttgttttgtttaaaaagcagatgcgaacacatgtatttcctttcgttcggtgtttcaaagtgatagttcatcaggaatcagggaatgcacaatagatccaataatgtaatataatgtaatgctcactccagccagcaattattttctatat

SEQ ID NO: 377623 - DNA, 420 bp, Zea mays subsp. mexicana
caggttcgttggagcgcgggctcgggctcgggctcgggcttggtatgtgggtgatttggatgctcaagaaaattcaccagctccgccgatgcactcatgccaccaaaagccacatgctagttttctagatccacgtctagatgcatcttggtgagcattgttcacaactgttagagatccgactttattcctggaggtattctgaactttttggaaaatgagcgccggtggtgcttttggtggaaataggggggtgaggcctgtaccccctgaaaaaggtgtattcccattggatcacttacatgagtgcgacttggagaagaaggactatcttgcctgcctgaaatctacagggtttcaatctgaaaaatgtcgacagttcttaaagaagtatctggaatgtccaatggagagaaactt

SEQ ID NO: 377624 - DNA, 178 bp, Zea mays subsp. mexicana
cggaccgacccatgcgtcctgttgtttcacgcctggtgcggacgactgaacatgggagtgatggatgcaatctgtcctactattctgccttagagacaacatgagtgctgcttaccttgacatcaaattgactctacccatgccaccgaaacgtccctggaggataagaatgtccggt

SEQ ID NO: 377625 - DNA, 286 bp, Zea mays subsp. mexicana
tttgttcgtaccgaggaacgaaacacaggaggcttgccatgtctgacacaacctagggcggatcgtgatccagctggtgcccgagtgccttgagatgcccagcgaccaactgtaccaggaggagtgcacccagaacccgaacgtggtgcgtcaatactacccggcgctcctgaggctaaacaagccctagtggattccatagtgtacttgggtcagtgaaataccagatgccaaagaaattggcctgcttgagaccgcaagggcaactgggaaatagcaaacagag

SEQ ID NO: 377626 - DNA, 519 bp, Zea mays subsp. mexicana
  unsure (1)..(519): unsure at all n locations
ggaggtcgtattatctcgatggcccacattccttctgattcccagtggcttcacagcagaattgagataaatggttatgaagaatacagtggggctgaatataggtctgctggttgcacagaagagtacaaagtcatcaggtaactgaagtaataatttcaaagtacttgtccatgtggctatttgtttcctgttacatatttcttgtctaagttaaaaaaaaactgtaggaggcaccttgaacaatctggagaggaggaatctatttgtatggaaggagacattggtggtggtctagttctccagcgccagatatccattttgaaggacaacccaaagattgttcagatcgactccagcattcaggcaagaagtgtaggagctggttctggtgnggtttcaaggttggtctgtttacgagttcatcctacattcaccctgctgcacccaactgggtagtagttgctttcacggccataatgtttcaagcangagatctccccggagcaggagaaataa

SEQ ID NO: 377627 - DNA, 322 bp, Zea mays subsp. mexicana
ttttgctttcatgcggatcagacattgagaacacttctgtttctacaagcctcaatgatagtcgtttggcttcatcgtctgccgtactaaatgaaagtgggaagggaagctggatagaaaatggctaatgtgggaccggttcagccttttataaaggggactggacctctttttgctccattctaaccgttgcttaagcgcagcagaccgcctccgaaggcgtgttcgatcggtgaagtcccgaacctgaaccttgcccccccggggcctggcactgatccatttgccagctagcttaacgggtactacccaaatggcactg

SEQ ID NO: 377628 - DNA, 268 bp, Zea mays subsp. mexicana
ggtcgcccagcgtcggccgtcttgaaataagggagagagttgtgaaattagcatggccgtgtgctcagggctgttttctgccggcacataccttggggggctaacttcgtagtatgtatgtactacactgcaaaagaagtcctagggttagcctattgttatcactatttagtttgctataattgtttagtttgctatattgtatcggggtcgtggtttctaaaataaactgcaacctttaggagtgttgatgtgaaaactcattctt

SEQ ID NO: 377629 - DNA, 256 bp, Zea mays subsp. mexicana
acaattgtgctttctgcgccgtgcttcctgaaagtctgtctgatgttgtttaaatatggttatgcagtgttcagatattccacgaggattcagcctgtgctgaacttcagctagcctgttataagatctatggtaacgatgtctgcaatttatctatgcaagtgatccagactgttggcacatgctggcacgccttgggataacctactgctgaatgtcccccataaccttttgaggctcatgcttgattgcaaca

SEQ ID NO: 377630 - DNA, 450 bp, Zea mays subsp. mexicana
  unsure (1)..(450): unsure at all n locations
gttgttttagattgccagttttgtggtgcatgtgttgccttgtggcctttttctcttgtgcaacgacctcttcaactctttaagctgatttcagattctaatagacaagatgaccaggataatggacatgccaacatagtcagtggagtaggacattcaaaggatgccaacattagttttaacttcactattgctgggggtcctccaccaactagacaaagtttccgaccaaaagtttcatttcctgtcgttagtagacatttgaaagctgatttgaacgcccgtgtgaatttgctttcctccagaagtgattgctacatggttcctgttgcttcgcatgcttcaggttccatgaaacgtataagaagcacagatgagcctcatttgctgtaggtgatgccgatgatgtngatacacccaccataggggcaaagcatgaccagccaggag

SEQ ID NO: 377631 - DNA, 280 bp, Zea mays subsp. mexicana
gtttttgtccgtggctggcttcgtgtgcatcttcttcggcatgggcctaggagcctctctatagttcgggagagggatgaacaggaggacatactcgagtttgaggctggaacggctgctgtggaacaggctctggcatggtggactgatggggggtgagcgaggcagatgtcaagtggtcatgacggattggtgatgggctttggcgtggtacataaggaacatacagacgatcgcccatgaactttgggtgcttgatagagactgtgtccagcacaga

SEQ ID NO: 377632 - DNA, 485 bp, Zea mays subsp. mexicana
gcagttcctgcacgggttcagcctgctgccgggaaaccccgaaccggtggctggcaatggcaatggcagcagcagcagcgctagcgtcgctgccagcggcggggacgagatagcgctggcactggctgcggcggcggaggcgcacgcggcggggtgcatgctgccgttgtcggtgttcaactaggcaggcgtatagccaaaagcgaggtagggcgaatgaatagtccgggtgcttgcttatccggttccggtgttcatgcatgatcgttctcattgtcgcgatggagttgagggcggtcaacacacgtacgttctgcttgctgttcttaagtaattcctattcccatctcttttgctcatgcatttcctgctgtgctgctgctgctgggaaatagtattagtagctgtgcttggtactgtagggttgcagaatcctgctgggattgtgtatgcaatgcaaatgatgacggaggtataatataatg

SEQ ID NO: 377633 - DNA, 446 bp, Zea mays subsp. mexicana
  unsure (1)..(446): unsure at all n locations
cccacgtgttcgcaggaaaggtctagtttctgttgtatttgcagtattaggtagaggttagctagatgaaactgaacctagttcattgggcgggagttgtgggtgcactcccagcatccaaacaggtttgggtcctctccaacttgaatttggttgcctattttttatatttacaatggcacctagttcttcataggttggttgagttcttttaattatttggttcatgatgaacaacaacacctaggttagattttctcaattaaatatcctgacatgtgatccactgattccctttggcctatcgaatgcagagagtagcatacttcaaagtaaactatgagtatatgtagagatatcctgtttcctgacataatattcattccttaaggtacctatctcaagggaactngagagatgcaaatttacttatggatgagatgaac

SEQ ID NO: 377634 - DNA, 484 bp, Zea mays subsp. mexicana
gaacatagaatacaggtcttcaacatgctttggatatctcttttcttcttgagttgcttatcttgcttggtatcaacgacacctctatcaaaattcacaagagcgtcaaatatttcaccatacaaacttccaataacaagtaaatcattatatgtatcaacaaatggatcagatgttagtggaactggaacaattgacaatccattcaaaactatctctaagtgtctttctgttgtaacaccagatacaactgtttatgttcgaggaggtatttacaatgaaggtgttactgtttctatttctggacttttaaatgcttggattgtcattacttcttttcctggagaacttgctatcttagatggaactggaattgacctttcacccattgggttccttttacgagatgttagttatattattatcaatggatttgaaataagacatttctgggagtttcagcatctgtttctcctgctggaat

SEQ ID NO: 377635 - DNA, 375 bp, Zea mays subsp. mexicana
ggaggtggccacatgctctctctgtattcccttttttttaatttcttgcttcagccgcacaagaaacaagggccgccagggagcatctgctcctggccgaccgcgccccagtgttccgttcgggtctcgatcagtttgcatttcttgttctcgtctctatgtttggccggcactgtgcactgatcagccgaaactttatgagcacgggactccgcagaccttgccgccagcgagctcatcccttcgggcgggtgagccgctgtcggctgggatctgatggtggtccgagcacgacgggtcaaaaaaatcggactcatgaccgagtttaacctttactcggatctagtcctcatgtactcgaatcccttacagtga

SEQ ID NO: 377636 - DNA, 498 bp, Zea mays subsp. mexicana
aaattatcatgagtgttttgaacgcacaacacaaatgaatgttaaatatgagagaaggataactctcgattgtaagactagatggaattcaacctacattatgcttagcaccgcacttgattatcaagtagtgtttgatcgcctagcaagtaaagaaaagctttgtgctccttttaacccaaccatagaggattgggaatttgctaaaaagctttgtggtagatgcaactgagctattatcaggaaccaattatgtgacaacaaatttgtttttcccgaaaatatgtggaatttatttggctattgaaaaatggagaactagtgttatcccaaatgtagaacaaatgtcttccttgatgaaagacaattcaaaaagtaatggtcagatgtgtgtggccttatggtattagctactgttttggatcctaggtttaaatgaaattcatgaaagctttctttaccaccatttatggggaagaaagtccaatcacaagtagt

SEQ ID NO: 377637 - DNA, 263 bp, Zea mays subsp. mexicana
aggcgcccctcctcggctccgagccagtttcgccggcggtcatgtggcaaacggcggcgacggaggccgtggcggcccagtcgcagggtcgcggacgcgcggtgcgccagggcggcctgcggcagagtcatccaggcatcatgcggatggcggagatctggtactatgcgtacaagttctttggacccaagcgcccacccgcggaccctggaatagtcatgtgcaacctcttccagaagggcgagccaatggatatgtggatg

SEQ ID NO: 377638 - DNA, 480 bp, Zea mays subsp. mexicana
  unsure (1)..(480): unsure at all n locations
attgtttagtaacagtgcctggcatttggcgaggattcatttgtccttgctcattgattacatctttggctcttgggacgatttattgttgtgatcatggaaatttcttctttttgtgtacatggttcttcaaaaatgaggacttcatctaaagatgtatactggggaaaaaagaggatcaataacactgcagatattggttcacatatgtctcgcttgaacttctgtaatcttgttcatgttatttatggtcttgtgtcgtaagagattatgatgatttgaaattgactggtggcttgagccttgtctttatcacaaccttttcacagactggttacattctaaaaattgactatgagcctactggcttaatcattttctgaagcttgccccactcgaggtggacgatttgaggctatctcttgttccccaactgtgaggaaattaaagcanagacagctgactcagtacctgaaagct

SEQ ID NO: 377639 - DNA, 427 bp, Zea mays subsp. mexicana
tgctcgttcacaggggaatatatgaggctgccaaaggaatataccagcaaatgttgccatatgtcaaatctcacttcatagttcatggcgaatctgcaagattacgattcactgggcattctcttggcggaagcctggctttgcttgtgaacctgatgttcctaatacgaggagtagctcccgctgcttctctgttacctgtcataacatttggttcaccatctgtcatgtgtggtggtgattacttgcttcaaaagcttggtttgccaaatagtcacgtgcagtctgggaccttgcaccgggacattgttccttgagcgttattctgatactacccgaatcatatcgtaagcatttttgtatcttgtcagtgggtgctttcgcagtctgccttgcctggcccaccattagctgttataagcctcta

SEQ ID NO: 377640 - DNA, 317 bp, Zea mays subsp. mexicana
  unsure (1)..(317): unsure at all n locations
tacgactcaaacgcccgggctcaaagccgccgnaaaaaaagaagaaaagggggaggctttgaaagcaacgttgccggtttgcaccacaacaaaacaaccaacagaaaaacacgaggagaagccgccccacaatgggggatgtgctgcggaacctggagtatgtgctgcagctgcaggaggcaggtccagacatgtccaacatcaacagaatgaaccagaaccctgaactccccccaaaaacaaaaaaaacaagaccaccggaaaaaaaggctagtacagatcaaaagccgcgggcccaacaaacaactctcacatat

SEQ ID NO: 377641 - DNA, 555 bp, Zea mays subsp. mexicana
gatttacacatgtgtagaatcaaacaacagtagatttttatgaaatttaggattgttcatggagctgaatatggatacatgcaggtggcctttttatagaggaaggaatgagtattaattaagttctaattagttgcgagtagtgttttgtcctatagaactagggagttttgcttcatggtaggtgttcctaggctgcaaattttgtctgatcttgcattgagaatatgatgggtgaagtctgtgacacgtcgcgtcgcgccgtcggtcgaagccagctcaatagtgaggttgaggcctcacaactttctgcaaaactacatgtcaagtgctccaccttgtcagaattttaaagaaacattttgttgtttcaccttgacttcttattgacatggcctattggagagagatctctgtgtgtttctggtttctaattggacatgtaaaagtttatgattagttgctgcataaatggattggctagaattttcacagtataagtgcttggtgtcttctcatggtcatagggaaaatatcatagctgttattttacac

SEQ ID NO: 377642 - DNA, 120 bp, Zea mays subsp. mexicana
cctaagaacatcttccgtccgtcgtctcaccattcctatttaaaatgatcgccggcacgctcaccaacaagatgggttcctccccttcatatggtcttatgaccaaatgcctgagcctaa

SEQ ID NO: 377643 - DNA, 399 bp, Zea mays subsp. mexicana
gctgtgcgctatatcttcacgggcttatcgggctagccgttcgttccaagctttgggatgcccatgacccacagagcttgggcttgagcttcggtagcttgttagtcggaccatatcgaagtgggcactgccaaagcgagcatagcagcacgctgactaggactacgagctcatgttattatgaccacatggtgcggctgagacggatctgaacgctgatctgagggactaatacagctagatacgcactactatagtgccggcagcaccaaaggagatgggccagtcattgaaccagaaacaatacatggcgtggtgatgataatgcatcgagctgcagacagagtaatcagcagaggtgcttgtttactgtatccagacgttgcattctatacagac

SEQ ID NO: 377644 - DNA, 171 bp, Zea mays subsp. mexicana
ggatatttccgtgttcgatctcacgcgcccgtactctttcacgtgcatgctcgtcacgctgctggggaagctctttgtgctgctctaggtgattgagcaccaccgcaagaagcgcatggtggccattaatgagggcaaggccggccagctggtagaaggtctagaaggtcc

SEQ ID NO: 377645 - DNA, 427 bp, Zea mays subsp. mexicana
gcggctctatagcacataaacaatggcgacaaggaccaggtgatgtaggaacgcccttggctggaaagggcaccaccttgtccagccagattggatcatgggcgagccgcggttttggggcctctcggaagggcgaaaaggggaggcttgggagtgttagtgattactgtgtacaccactgtgtatgccccgttgtggttgttcgctaccctgatgatgctgcagatgccagtggagatgcatcaggggcgacagatgagttgcacactgtaccagaggacgaacctgtttatcacgatgcgcctgaagtgcaaaaagaaaactgaggcaatgcccccaagcagctgaagaacgaaagaaaacatggggcccgtagtgactagtgaggcgattctgcgtatctgaaagatgggactggctggttatc

SEQ ID NO: 377646 - DNA, 310 bp, Zea mays subsp. mexicana
accaactcctgctcggcgggttgagatcgatcacgcgctaacttccgggaactggaccaataaggccaccggccggagccagtggtaaaacggagggcaagccggaggagacccgcgccaacttccccgacggcttcgttgttcgacgcgacaccttccagtaccaaatcaagggagcgagaatagggggaggcaaaggagacagcatatgggatgttttaacagatgacaaaataagcgagtgtgtcataaaggaacgcggagatcgaaggggaccacttccatcggaacaagggaagacatcgagctc

SEQ ID NO: 377647 - DNA, 483 bp, Zea mays subsp. mexicana
  unsure (1)..(483): unsure at all n locations
ttctgtcccacccctgctccggctgcgcagcaagaccagaggcgagtgctcttcttgctgtttccctttgctagatttggcaaccaagctgggttttgttcgagtgcttcgttttatttttgtgattttctggtgtcgatcgatgcagcaagggagagaatcctcctaccgtggatggtaccgatatgggtgacatcgactcgggctgggttatcctcaagaactcggatgtcgtttccgcggatttggcagccgccgccgtctgtggcggtcagcgtctaggctcttctacgattcctagctgggcacgntgggttctggaggtgtggtttacacgctcgtgccgttctacaacagagttaggcatctcgaagacagacggtgggattcgtggagattgctgggangctgtggagcatatagctgaatgtacagagaagctagctgcgaatgtggctaagcaacttcctgagatgnatctct

SEQ ID NO: 377648 - DNA, 365 bp, Zea mays subsp. mexicana
  unsure (1)..(365): unsure at all n locations
anngatgagcctttatatatattcgttgtctgtgtctgttgtcttcgtgagtcccgtgtcgtggactgttggtggtgatcgtgtaccctatatattcacatatgtatatatacggtgtgcctggtgctgtgttgtgtgcgcagtgctgatcccatcgatcgattgtgctttggaaatcacaccatcacaatcggacgatccaataaggtgcgaatatcgatcatatcaaacatattagtttattaatccatatcgtactcaagttcagtctgtcggattccaatcaatcaagtcaagagtttagtaattctataatatttatccaagttaatcaatcataatccactcgctcgatttcgatcgca

SEQ ID NO: 377649 - DNA, 392 bp, Zea mays subsp. mexicana
gtagttcttcgatccgatcactcagagcgccgagaacaagcctctgccagcaccgccgcaaccacaagccttccagccggccttcagccaagccaatcaggcagtgaacaatctggacttcagcctccctatggacgggcagaggtccatcgccgagctgatgaacatgtacgacaccaacttcatgacgagcaagaccatgagcagtagtgacagggtaaccatcatggagaggccgaacgcgatgccccagaggatccagatggacaagggcttcttcgaccagggacacggagctttggagaactccattagctggtggcagaaacaacagcagcaggcacacccggggggcagcagcagcacagcagttcttaattccgagaaacaca

SEQ ID NO: 377650 - DNA, 583 bp, Zea mays subsp. mexicana
  unsure (1)..(583): unsure at all n locations
gtgttttcgcatgacaggggcactaagtgacaaggaaatcaatcagacctatgtcaaggttctgagtcagatgccatatttccgtagatcaggtgggcgcgaccacatttttgtcttcccaagtggtgcaggcgctcatctgtttcgttcatgggcaatatttctgaatcgatctattatccttactccagagggtgaccggactgacaaacgtggtacgagtgcatttaatacatggaaagatattattatacctgggaacgtggatgattctatggtgaagtctgatgctcctgctgtccaaccaatcccgctaacaaaaaggaagtacttagccaacttccttggacgtgcccaggggaaagcaggacgccttcaactggtggagcttgcaaagcagtatcctgacaagctggaatctccagaactcaagttatctggccccaacaaattgngaaggatcgagtacttcaagcacctgagaaatgcaaagttctgcttggctccacgtggagagtcatcctggacacttcggttctatgagtccctttttgtggaatgtgtgccagtgatttgcagatga

SEQ ID NO: 377651 - DNA, 348 bp, Zea mays subsp. mexicana
ggaaagctggacgcctgcggtaccggcccggactttacggctcgacctaactcacccgcacttcttttttctccttcacacaattctatccggggggggtgtgataaaaatcgacctggcgctcgctctcttccggtctgctcatgtagtccgctactttacaccctaatgcggctatgagaccagcaaggccaggccctgaaggatctccaacagaaagttttttccctccaaacatgtgtatatgtattggaggtcgtcgacatagctctcaaacacggatatgtgctactggagataatagtgctgttctacattatggacctgcggcaactacaaaagaccgga

SEQ ID NO: 377652 - DNA, 391 bp, Zea mays subsp. mexicana
ttatttctccaggttcgaggcccaggtcttggcgttgcgtgcggaccctgccacgttcactgaggagcctgaagattctgagggcttaggtaaatggagtgccttggctctctttggacgatataaaggagcagatatagacctggctccatgaaagccctggatcggagagctttgtgcagaggctgaggccgtcagttgtggattacgagacattatggtcaaggtatttctttgctatttatacgatatggcaagcgagggctgttcgtaccaaacctgttagcaggtccatataaatttacggggatgcagggactagttcgaggggatccagtgatgatgctaaagatgccaatactattgagctcacaaaggtgccagggccatt

SEQ ID NO: 377653 - DNA, 301 bp, Zea mays subsp. mexicana
ttcgcgctacccgcgttctttgaagcctaccgacgcctcatggccctggtgcccacggtagatgatactgagatggacgctaattgctgaggctccagcaactcagatttcaagcaatcatggtctccctgcgattcaaatatattgctacttggttgcactgatttctcttattgttcatactaaatacggtgaggcttaactatgtacctgccccatcatgtgttggctgagaagaatctaaaccgcataacatgccagtctaggaggtcttcatgctgtcagcctgtgctctgttctc

SEQ ID NO: 377654 - DNA, 119 bp, Zea mays subsp. mexicana
tcctgctgcacgtgcccgtacttacttgctggatcatgcgtgcgtgcttcctttacgtcttggtaatcatggcatggagggcagccggcgtgcttgttaaccattaagtggggaggcgt

SEQ ID NO: 377655 - DNA, 417 bp, Zea mays subsp. mexicana
tggtacgcctgctgctaccggcccggacttacttgctggaccgacccacgcgtccatgttttcacgcgtgggtggaagtacataaaagaatcatagaccaaactacacgatgcccccaaagtagacgtagcgattgctggctagttgcatgttgtaagatgactcttggttccttcattagctaaatctttagatggctgttgccagatgaacagagatgagagatccacttttggatcgagacaatggttccatccattttgtttgtgtggactgaacctccatgcaatatgtccctttcttttatttctggaacctttaccatgatgtactaatacataagatctgtgttgatggtggcaatctagttaagctttgtttgattcaaaataaactgaaaatactatcatcaaaaag

SEQ ID NO: 377656 - DNA, 145 bp, Zea mays subsp. mexicana
tttcttttgccccctatctcgcgaggcttcctcggtcgctttgcttcaatccccttcaccgtggcgagggtggagggagctccaggctttggtcgaaggcggtctccacaggtgttgatttgcctggagacgagatggggctctc

SEQ ID NO: 377657 - DNA, 359 bp, Zea mays subsp. mexicana
actactatggaaagctgtacgcctgctgcacgtaccggtccgtactggctggaccgacccatgcgttcggtgtcctgaagcacttagttaagaggaacagaacatgatgctggatacatgggaagcacgcaaccaaaaacaccatgtgggatgaatggctaaatgaatggtggaagggaccttcaacttcatctgacccatcagacaaggcttctactctttcagaagaaagtcattttcaggagaatcttgaacaaaatgaccagatgtttaggcctggttggaaggacattttccgaatgaatcagagtgagctcgaggctgagattcgaaaggtctctcgagattctactcttgat

SEQ ID NO: 377658 - DNA, 559 bp, Zea mays subsp. mexicana
cttacacattacacatggaacaaatgacagagcaagctggactgcattgttctggacattcagatatcctggtacacactacagatttttgtaatgcactgctgctagaagattctagcacaaattatgagatgacagtttgcttgcaaccctgccaggcaattttgcctgggacacaagcaaaccggcccgaagtgcacatggtatcaaccatatcatacagtacaaatagccctgtggaatcaactatacatggaacttgcacttcacatgactctagcacaagtgcgtccagctgtgctgacgatccaagtatgtcgactgacaacatggttaaatctgtggacatggatggtcagaagcacatgaaaaacgacaaaattgaggtgcacctagcccctcaaccagaaaacgcgtcatttaagaaaatgcttttgaggaacctgtcgaggaaactcgggtggtcaaaggcgcaggcagacacgcatcagaccatggcgcctggatcacagggcgcagaaggccttggatatccactggtttcttcatcggatgatga

SEQ ID NO: 377659 - DNA, 543 bp, Zea mays subsp. mexicana
attttctgcagtgattattattacttcggttacattacagaatatgttgtctttgcaggttaaattttattcttattatctagggtgttggagcaccacaaaattttgtcaatgaatatgaagaaatccaacagattgtgctgttgtggcagtgttggtcaagtttatgagtcacatactacttagtgccatcttgtccaaaaaaggagaaatccacttctcttactgtcctctgagccctttctatattgctacctttcctgtctttgtcctatgtccacagctgcttcttctgttccttggcacccaggagcttatggtatgatacttgtgcttatgctgataatgaggcaaggggttgcaatatggagtagtaatggtgtttatttcttttttgatcttatggaacaattccaccctaacaatctcactagatggcatgcatgacatggcattggaatgttgggctagtatgacttaatattactttcctgtcagaaactggatatgggttttgcccaactagatttcagctatcgcatg

SEQ ID NO: 377660 - DNA, 506 bp, Zea mays subsp. mexicana
  unsure (1)..(506): unsure at all n locations
gcatttccttgcatgaacgccagcgctacgcagagagaggcggtgccgctcccgtcgacctctacctcacgaagcgcatgaagaagtacttggatcaagcccacaaagtccacaagaatcccaaaaccaaaatctgatctcatatgcatgcgatgatcagctagcaagacgatgattcatccgcaccgcgtgcactcgcatcgcatcatccaccaataattcccctttactttctttgcttataataacaggcccagttctatatgttctaggccctggatttactgctgctgctactaaagtttgctttgcttcttaatttcccttgttcgacattttcattttatcctgtatctttgtaataactgctctgacgagatggctagcgctgcccaagtgtccaacattgtatctgctaagccaaccaaccagaggggattatgtcattttaattaattttctttgatttccaaaangtcaacatcccagttatggctttctgtaat

SEQ ID NO: 377661 - DNA, 198 bp, Zea mays subsp. mexicana
gacttttgcgctgagattgccactccctagggcgcctaggagcaaggagagcatgcgcagggtgaacatcacattgcacgtatacataatgggagcgctcataacatgtctcgacaggcaactaaaaatgcaagtgctaagtcacccaagaaagactcggtcatgataatgagtcaatcacaacctagagtcaaagcg

SEQ ID NO: 377662 - DNA, 165 bp, Zea mays subsp. mexicana
ttcttttgtgcagcgattgttactacatcgagcacctaggagcaagaggagactgtgcagggtgaatatcactttgaacgcatacccattgggagcactcataacttgtctcagatgtgccactaaagcttcaagtgcttagtctcccgtgaaaaactcggtcat

SEQ ID NO: 377663 - DNA, 346 bp, Zea mays subsp. mexicana
ttcttttgcaactgggcatatatgccttgtgggcaattttcataggaggttgaatgtaatagagcacatggcctaggcacctaggttgttagacgggtaccatgtggtataggtgctataacggacgcacgatcaacagaatgggtcctactgcacaccgtaatagtatttctcagcgactcggagctatattatgatccgggaacaaactgagatctcgggaatgctgatcgctctatcagttatattcatgcgtacgatgcaacgcgacaaagatagcatttttcagacctctatgctgggctgaacatatgcgattggacactgaatctggattagacaaacc

SEQ ID NO: 377664 - DNA, 315 bp, Zea mays subsp. mexicana
ggcttttgttttgcgacagcgccaccgtagaaggccaaggagctcgatgtggatgcgcacggcgagcagcagaatgcacagatcgacagtgggcctcggtcacgccatcgagaggcatccggatatggatgacggggcttagaaggtaaacgaggaagctcgcgacatggttatggtggcggagcctagaggcagagcgatccgtatacctgtcgatataaagaggggcggcattatggagggcttcacggacgtttggctcacagcggttatgagccatcgattattgagtgaggttgtgcctgacgaggaccg

SEQ ID NO: 377665 - DNA, 219 bp, Zea mays subsp. mexicana
acacagcgattggtacttcatcgggcacataggagcaagaagagcatgtgcacggtgaacatcaaatatcacgtcaacataataggagcgataataacatctataaccgtgcatataaaggtgcaagtgctaagtgtccccagaaaaactgggtgatataaataagtctgtcaaaaactacaggcaaagcgatctgtatcacattcaagataatcatgg

SEQ ID NO: 377666 - DNA, 149 bp, Zea mays subsp. mexicana
tttttatccagcgcgaaagcaacaccatcgcggaaaaagaaggaaggggaaaccaggcagggcgcgtattaattaggacgaacacccaaagggagcggagattacacgacatgctcgacaactaaagattcaagagctacatgacagcc

SEQ ID NO: 377667 - DNA, 612 bp, Zea mays subsp. mexicana
gctggcacgcctgcccgtaccggaactgacggctcgattagacctccgactatttctgtacgcgatgttgctgcaccaggctggcatcctcatgtaattggaggagggcctcgcgcggatctttcctaatgccttacacgtttcatatccataagatcattccgtggcttggccatgccttttatactaacgcaatagatactgttcaagctggatattgatgagctgatgcctgaatataccaaggagaactgtacgtaaccttaacttaagacagacctagtttggaatggggcaagaaacttttcttatgggtgatgcatagccacatcctaattacaaaacatcggggtttatttcatgcaagtccctcttttctggcattgtattggtcatttgacttcttcaaagttcactgcaccaaagattggctgggctatactgcctttactgtctgtatgagagccaaccatacaagcccgcagttcaagattaactttgcttttgaggagtgcaggcaactgaaagatatcgctgaaaccgcaagctaaatggactgaactcgtgcctgcacttgtcaaaggatgctggataaaacatgtttttgttggc

SEQ ID NO: 377668 - DNA, 604 bp, Zea mays subsp. mexicana
  unsure (1)..(604): unsure at all n locations
cgtgtttgtatgcccattgcaatgtaggggcacttagtcgtccaccaactgaccatcagaggtgaatcccctttgtgtggccacgacagtagagattatgacagcgaagtctgttggccccaaatgtggcgtcgtctccagtgcaatgttttcaagtggtctgtcgtgattaatcgtccaagtcggtcagccagaacgaccagcaagtcgtccgacttgaaaacattgcttccagtgtcagggtcaatcaagcaggtaatagaagtgaggagctccacctcatccggggcatgccgccaggtctctctttctgctgaaaatgccaagctggaaggggaagaagaggacgatagtcgagcaggagcaagccggtggatgggaaacgggtgttggggatggaggctaagtcacatgctgaattaccagatctatgttatcgaatctgcatctcttaagcctgggactaataccagtgctaagagattccatttgcgtttagtgttactgttacccagactaacactaatgcatgtgatngcatatcaaggctttagtgagcgctgaagattctgatactattttactcatatagggttcttaatgc

SEQ ID NO: 377669 - DNA, 145 bp, Zea mays subsp. mexicana
gcacagcgacagttccgtcctagtgcacctaggagcaaggagaaagcgcgcacggtgatcatcaaataggacgtatacccaataggtgcgatgatggcatcaagcagggtgcaaccaaagctgcaagcgccaaatgaccccagaa

SEQ ID NO: 377670 - DNA, 154 bp, Zea mays subsp. mexicana
tacggacttttgttttgccaaaaaaaattcgtcgaacacctacgtgcaggatgagtgcgcgcactgtctgccacagatggcccggatcgccataggtgtctgaagtatcagagcacggcctccccctaagaacgctagcggtcagtcatcattc

SEQ ID NO: 377671 - DNA, 439 bp, Zea mays subsp. mexicana
tcgttcatttctaatgcaagtctgccgtgctcgcagctccacgtgctgcttgagtgaggaacctgtcacagccagctcgcccggatgctccttcagttcgtgtatgagatcgtggtggctgcatgtaaggacgaatgggctacatcattgctcaaagtatggtctgtgataccgatagtgtcatagaacacaggcctgtcgatgctgtattaggtccccggaccattcagacaggagactgttgtgttagaagctggtgcgaatgaccctgctcctgcagtgacgatagctgattgttgcagcacccattctatggcgtttcaagattgtctcatcaactatagaaggcagatcagcaagtgccacttgcacctagacatgctgaacgagtgccgtcgtggtgctgtatctgtctaagctgcctctaaggttatatatg

SEQ ID NO: 377672 - DNA, 131 bp, Zea mays subsp. mexicana
acccacgcgtccgcggattcgtgggctggccgtcgccttcgccgccgacccagctgcgcttgcggacggcgacgacgtggtggcccttaccgaatccacgttcgagaaggaggtcggaaaggaccgcggcg

SEQ ID NO: 377673 - DNA, 277 bp, Zea mays subsp. mexicana
gcttttacgcatagacgactcactttacacaggacaaccagtatgagcgctttcaaaaacgactagttgtggacatcaatggctgacgggcacagctgatactgtagtgcagcatgataacatacattaagagcatgactctgatacgaaattagatgtttccagatccatggaacaaccttaaagccaggggccagaggagtctattcttgacagccatgttattaagcaagagatgtccttatatgacttggccgaactagcaagatctaaacac

SEQ ID NO: 377674 - DNA, 219 bp, Zea mays subsp. mexicana
cgttctcaaaccctatcttcgctcgttgcggccgcggcaggctgccagcaatggcgaagctctctgagctccaaacgcaacgaagcgactggagacgtcgcccgtgaagatcgcgcactctctctacaactagaccgaagcccgcatgatcatcaatcaggccggtggcctagctgctgccccgttaccggtccccgggacccctacgatccatgctgc

SEQ ID NO: 377675 - DNA, 500 bp, Zea mays subsp. mexicana
gagaaatcccatcaattgatgaagccactatggaccatgaaaggctgacagaaaggttgaggctgtatgagctgattgacaacaaggtgaaaggagatggccactgtcagatcccgcaccctttcttcaactgaccaaggtccttattatcataattatcttattgctgcccttaattaacctgcttttaaccttcccttgccctcttttattcccacgatgccattactctcttaatatattcttatcttatctcttctatggatgtggagatgtctgtcgcatggaacaccctctcctaataccttcttgaggccacttggcaaccttagcaagaaaatctttccctttcatttgaagatcaagaaagacacctttacttcccctgtctctcttctacagttttcttttaagaagttgaggtgttgtatgactaaatcttccaacctttttccagttttgaaaacaaacgcacttgcaatcattttcaccttccttat

SEQ ID NO: 377676 - DNA, 497 bp, Zea mays subsp. mexicana
cgttgcaggcatggccgatagtgcttatgatcatgaaggagaacacggcctatcactgatgcttatagcactaatcaggctcacatgcacgccggcgccagttcctattacacgagtcaaccattttcctatggacaatacgagagccagcacaccaatatccaaagatgactgccggcacaagatagctttgactcgtctgccatctcattctcgctgtaaaaggatagtcgcagaatccaccagattaagcatgctagagaattccgttgcatcggagcgctggaactcctcgtgttcatgtttgcttttcttttctggctaatttgttcctgaatggatgggtcgaattatggggcaaaaatctttctggcttctccatgtactaccataacgatttgtcagttaattctgcagattggtgtggcgttattcagggccgactatgatgcctctagccttttgtgtacatacgtataaatgaatgacgattgacg

SEQ ID NO: 377677 - DNA, 313 bp, Zea mays subsp. mexicana
  unsure (1)..(313): unsure at all n locations
gggcgttctccccaacatccacactgtgctcctccccaagaaggtggccgagaaggcggccaaggagcccaagaaggtcgccaagtcccccaagaaggcatagagtgatctcatctcttagagggggcgggattctccattagaacactattaccattagcgatcgtgcagttagactagatcatgtttattgtagatccgcaatgttcttgtccctgctgccatctggaacggtttatctagtacatccgtgcattttccttgctaattgcnnaaaataatttttcatatttattttttctaataataaaat

SEQ ID NO: 377678 - DNA, 311 bp, Zea mays subsp. mexicana
cacgctttctacacctactgttgccactaacggctggacatcggcggggcttacgcgacatggggagggcagggcgatcggactagactgtcaggagctgcctcaggcaatcgcatcctgatagctctctactatgcatatgtcaaattggagctggagcctgatgcaactgcatatcataaacttattgatggcctgttggctatcagtctggtcgacaaggctcaggagtacttcaatcagatgaaggagaagggagttaacgcaagcatctcaagctaccagacattgctgaaggcatatattgctgc

SEQ ID NO: 377679 - DNA, 391 bp, Zea mays subsp. mexicana
gtattttggaaaacaagaactaatgctgtcatatacgaaagagaaacaaacgtgagcttcgctgttcatcagttcctgtcaccattgctcgattcattggcctgctttaactttaactaagctggtcagttattcagttccgcgtagagcacggcaggcattgtctaataaaggacaggttggcgatcccatttttactagcgattttctttttcattcttgcatggaaatgagcccattttaccttaggaaaaccggactcacttggtgaaatgaatgtgccacactagccctaaaatacatgaaaattgccagagacatcgctcaataatcgaataccgatgctgctgtgaaaattgcgagctagcgacaaacgtggacgggctgttca

SEQ ID NO: 377680 - DNA, 116 bp, Zea mays subsp. mexicana
ggactgttgtttcttgccaacagctagatctggcagagggaccattatagcaagaaaagcgttagtaaaaaatcctagcattcagtaccacaaatacttgatatttgattctgttt

SEQ ID NO: 377681 - DNA, 135 bp, Zea mays subsp. mexicana
gttaaaatctatctcatggtaatgttggtgatgggcaagttttgaaatacagtggcggcatgaaaagaaggctcagcgtggtatatctcactgatcgcctaccctatagccgtttccctttatatactctcctat

SEQ ID NO: 377682 - DNA, 77 bp, Zea mays subsp. mexicana
tgtaggcgaaggaggagcagcagcaggcggcgccgaggtgtttacatcccactcagtgcttgcaaccatggctaggg

SEQ ID NO: 377683 - DNA, 241 bp, Zea mays subsp. mexicana
aataccggcaagggagcttgtacaagtttttgccagaggacatagaacttggcggcgagctgccaaaagttcctggcaatgacaaaaggaaggacttgctgattgattctgctattacccgctatcattatctcgaagagagggaacttgagcgctgggcaccagatggaggagattcagagtgtcttgtactgtcagtagccctattctcatttatttatctatctttttttttttttta

SEQ ID NO: 377684 - DNA, 76 bp, Zea mays subsp. mexicana
ttgctataatccgtgtttgatttcaattcaattagaggctgctttggtgtcctagttggtttctaataaattagcc

SEQ ID NO: 377685 - DNA, 188 bp, Zea mays subsp. mexicana
  unsure (1)..(188): unsure at all n locations
gtcggcagccgggcaggtaggaaaaggtatcagcgtcgccaatctccatggagctcacaggcgccgcgctccggcgatacgcgctgccgtcggcgtccccggtggccgcgagggtggggaggaggatntttttaaacattagagccagctcaccaatatgcaaagatgactgccggcacaagatagct

SEQ ID NO: 377686 - DNA, 92 bp, Zea mays subsp. mexicana
cgctcttagatcctttctaaggagtatgggtgggactgggacctatacaggttgctgtggtttacacttccagcatatgatggtatgctgaa

SEQ ID NO: 377687 - DNA, 57 bp, Zea mays subsp. mexicana
gaatatctacgcacccaaggcccatggggataacatggggtacttttaaaactctat

SEQ ID NO: 377688 - DNA, 84 bp, Zea mays subsp. mexicana
tttctgctcctacctcaccggcaagatccgctccgcgcggttggcgctcaccgacgtcatcccgacgcagctcatgacggagga

SEQ ID NO: 377689 - DNA, 92 bp, Zea mays subsp. mexicana
tgtctcacctggggaaagcaacggagtacgaaagggccgttttatagacactcgtagcgctaaaacactcgacgagatgatagattagcacc

SEQ ID NO: 377690 - DNA, 96 bp, Zea mays subsp. mexicana
gcctttcactcccccagcccctcgcaggcgcaccacggaaactgttccgcctccacgcccgctcgcactgaccacggcgatggtcgtcgccgtcct

SEQ ID NO: 377691 - DNA, 62 bp, Zea mays subsp. mexicana
tgttctactgtggtggcttcgtgttgaagcacgggctgatatcaagtttcctgaagggtttt

SEQ ID NO: 377692 - DNA, 96 bp, Zea mays subsp. mexicana
ttatacttggggagacggcagacataggcaggttgtgaggtattctgccctggcgggagaggagaaagcagatacaaatattatttctttttttat

SEQ ID NO: 377693 - DNA, 332 bp, Zea mays subsp. mexicana
gctaatatggcccccagcttcacaccccacgcgggggggattattaacccaaggcgggttgtcatcagcaacaccctcgacccggactgacacagctacccacacgtgaacggaccgctcgaggatctccacgatcatacagacacacaagcacggagcgtatcagggagcctaacaacgtgaacaacagcaccacagatctggttaagataatcccaaacaagcccaggacggaggaaacattcaccgcataccaaccccaagggaggacaggcggccgataactgatgacagccaccaggtagagaccctaccatagaacccggagagaa

SEQ ID NO: 377694 - DNA, 187 bp, Zea mays subsp. mexicana
gcctttgaggctgccagcttcacctcccaggtcatcatcatgaaccaccctgggcagattggcaacggctatgcccctgtgctggactgccacaccttccacatcgctgtcaagtttgctgagctcattaccaagatcgacaggtgctttggcaaggagcttgagaaggagccatagttcctgaaga

SEQ ID NO: 377695 - DNA, 57 bp, Zea mays subsp. mexicana
ccgatcatgcggcggcgctgcgctggtgccggccagggccattatcggcgacgggcg

SEQ ID NO: 377696 - DNA, 97 bp, Zea mays subsp. mexicana
cccactgcgtccgcttctattcaaatatgctggattggacgttgttaatctgcagaacttggagtgctgcctttttgtactctttacttactttttc

SEQ ID NO: 377697 - DNA, 104 bp, Zea mays subsp. mexicana
ggtgtatctgatgatgacgacaacgtggaactagagagaagctttgtgctgttaatgggacctactggctctggtaaaactttacttgcaaagacattagctcg

SEQ ID NO: 377698 - DNA, 320 bp, Zea mays subsp. mexicana
ggccgttcaggtatctccaattcttgatgggaatcagactgattctgattcgaatactgcatgggaggaagccgcttcaagactgttgaacaggcagcttagcatacatctctctcctgtctttggttcttctacatatattgaggcccctgctcttgtagctcgctagttctactcagatcactatagcttctctgattttttgctatccctgttctggcccatgccattacaaaccttttacaaccattgaccagcctatattctcctagtttgctttttttctttccttcttatctcttgtctcctattcttctttt

SEQ ID NO: 377699 - DNA, 189 bp, Zea mays subsp. mexicana
gtgtacttgcaaagagagttggagctaggatttggttgacttcaacatctgaagtttatggtgatccacttgagcatcctcaaacctgaggcctactgtggcaatgattacccaattgcagacatgagttatctatcatttattatttttctttcttctaacttcttctcccttcttttttttaatatt

SEQ ID NO: 377700 - DNA, 527 bp, Zea mays subsp. mexicana
gtttctcgttcctccaaatcaaccggatgagctgactccgttttttacctcgcacaggtgctttgctgcgaggcagctctgaggggatctctgttgtttactacttatatttttttattttttttttttttagtcttcttctattttctttatttttactcctctatttttataaaacttatttcttttttccttttttttttttctttatttttttctttattttctattacatcttttttatctcttcacttatcatctttcttttcttatttcttaattctttatttttcttcatattttttatttatttcttttctactttatttttttttttactatttttcttattctctataaattttcttggttcttttttatttattctaatttcatcttttactttatttttatcttttattattttattttataattcttattttatttactaattttttttattttacttatctatttttctatttttatctttttatttatttttctttctttctctcattttt

SEQ ID NO: 377701 - DNA, 74 bp, Zea mays subsp. mexicana
acaccccccttatctcacccccacaacacacaacacccacagggggggccttttaaaaaaaaacccccccttaa

SEQ ID NO: 377702 - DNA, 52 bp, Zea mays subsp. mexicana
gcgctagtcacctctgatgcgcggcaaaccacacgggggccattttaaaaca

SEQ ID NO: 377703 - DNA, 554 bp, Zea mays subsp. mexicana
ttgataaagatgctgcagtagatggggcaccatgtgacactgatggagcagtggctgagtcccgagaggaagaaacgacagagaatgttggtgaagcgacatttagctatgaccgattgacttttaaatctaccgatccagttcgagggttagattacatactctttgttgtttacattttttatttctcgtttttttctgtttctatctctcacataaatcatttttttttatcttcttatttttctatgttttactaactttctattttctttatcatctttacttatttttaatatttcctttcttttctctttttttttatttctttcttctttctttttctattttttctttcattttcttttcattatcttaaactttttttgatttttctttcttcctattatactttattttcttatttctttatttattcttatctttttctctttcttatattctaattactattttcctttgactcttcttttcttcctcttttttaatttttcttgttctatctatctatctttttttattttattttctct

SEQ ID NO: 377704 - DNA, 85 bp, Zea mays subsp. mexicana
ggagtcatgatcgctgccctgcaacctaagtcaggaggtgatcctcatgaataaagctgatttcgccaccgaccacactcctcat

SEQ ID NO: 377705 - DNA, 458 bp, Zea mays subsp. mexicana
ttatagaagccctcgtaagcaatctttgctaagtagatgccattaggagcaatactgaaaacatgtttatcctcaacctcaggctgcagctgccaatctgaagtcatgtcccacaactgaagatactctgttaagactcccactgtcagaggacctttggtcaatgcatttattggagagggacaatgcaagtcatcagattttgactacagttgattcaattaagtgtcgtataaacaaaccgcaaaactgtcatttttaaatttttcttgcagacaatagctattggtaccaaatgcatgcttacgaaattctgttgtgcaggactcaaattgcttgggcgtccaactaattctccattaagatctttgactggttatggctacggctttattgtccggaaggcctgtgctaatgaaacctggatcaatggcctgaactgctatagacagggaaga

SEQ ID NO: 377706 - DNA, 117 bp, Zea mays subsp. mexicana
atggattttacattcgtaacatttcaatatgggagggtgccttaaatgacattggtggctttctgcagcctatgaataatccagtaattgtacaatacgtaactgacgtcccatatt

SEQ ID NO: 377707 - DNA, 516 bp, Zea mays subsp. mexicana
gggatttcttcgccgagggcgagggatctcacaacgtctcccttggcggcgatttcagcatccaggttagtccagaccctccaggtctaggcttcatgaaaaattatccatttaggtttcttgggctcggttagatcgaccaatgcgtagatcatatcttccgtgggcacggttacgagttggttgtctgttaaggtctctgcctagaatttaggggatttttgctcgagcattgctgcttggagatcgtcgattgccttctagtctagtcgaagattctaggttaaatgtggcggtatatacttcaataggatggatttgctaacaacgaagagagttacttgaagcagacaaattagcagggtttagcctacatatagaagaaaagaaaattaggtagttaatgcgtcatcccagtcatgtgaaggaatacttatcaagtgattgcatgattagagactctctccttgacatagatgatgcaatcatattccaatctaatggtacttaggcaac

SEQ ID NO: 377708 - DNA, 569 bp, Zea mays subsp. mexicana
  unsure (1)..(569): unsure at all n locations
gagcttccatagttatcgccaccacaaggaaatgtgctggtcttgttgcccggttgggcttttgtgctcatgaaagtttatggcaatccccagaaaagatgatgcagataggagaatgatgggtggatcaaatgatcaatattagatatctgacaaatgcttagacaagtacagaacattgtaacacttctgagaatgtgcatatcaccatcattagcccaaattaagcatgataccagtacgtcatcactctactttgttgctaaaaaaaatcctcccagaaatcagacaaagggaggtactatacagttgaaccatcaactcagttctgttctccggcgaattcggntgttttggttactagcaaagcaggctgtatgacggcatgtcttcgatgcggatgacatcgtccagcataagctccctctccagctgncttcgtgtcgacttcagcacctnctggtagtggcaccacaagcatgagatcagtagaacatttgcactttgagttgaaacataggatgaaatgttcatatactcagaacgtacattgaagtccatgtaagatg

SEQ ID NO: 377709 - DNA, 466 bp, Zea mays subsp. mexicana
  unsure (1)..(466): unsure at all n locations
gctgcccctactgcggcgcgcgcgtctggagcatgaccgccgcggggctcgccccgcgcagcgcgtcccgcaggctcggcgcccacgaggaccggctcgagtacttcgtctgcgtcagcggccacctccacggcagctgctggctcgcgcgcctctccgacagcgagggcgccggacccggcggcgccagcgacgacgacgacgcgtccgccggcgncagcgaggaggacgacgccagcctctgacgccgatcgatcgacgggagggacgtgtacagagagttttagttagcgtcagcttggcattttccccaccttgctgtcttcgattcatcttgagaatgcagaggctctggcgatctgcactagagctgtcgactattgaagtgcacaccgaattgcctgctgccagagatgaanaaaagaatgatcaacctaccttggttgtaccaanatcggagtctgtc

SEQ ID NO: 377710 - DNA, 448 bp, Zea mays subsp. mexicana
ctagatcgcgagcgggccctttttttttttttttttttttttttttttttttgtctgtttttggtttttatgattgtttcatctctgaagaaagcggattttgttttttgctgaccacgatgcacctgatgcagcctttattaaaacagaaccaaaatttggggattgggaacttttaacgacaaaacaggggcaaaaacaccccattcaaaaaatgggggaatgaaaaatttctggatcaaagcaaaatccgtaaaaaagcactgtttatttgggtccatggaaaaaaaaacttaaaattgatcccctttttattgaacgatggttttaaaaattttttttgccaaatataaaaaaattttggctatatccaaggatattccattgtcattaaaaatacctgtcccttggacaaaaggggggcttttcaaccgaaaaaaaaaaggaa

SEQ ID NO: 377711 - DNA, 523 bp, Zea mays subsp. mexicana
gttggcttctcctccccctccggttcgggttcgggttcgggttcgtgaggttctccggggttcggtttcgtgggtgagcggatcgagatggcggcgtcggatgttgagtaccgctgcttcgtcggcggcctcgcctgggccacggacgaccactccctccacaacgccttcagcacctacggcgaggtcctcgagtccaagatcatcctcgatcgggagacgcagaggtcccgcggcttcggcttcgtcaccttctccacggaggaggcgatgcggaacgccatcgagggcatgaacggcaaggagctggacggccgtaacatcaccgtcaacgaggcccagtcccgcggcggccgtggaggcggcggcggtgggtacggtggtggccgtggaggcggcggctacggcggtggcgggcgccgtgatggcggcggcggctacggcggtggaggcggcggctaccgtggcggcggcggctaccgtggtggtggcggcggctaccggcgtggcaaccgtggcggcg

SEQ ID NO: 377712 - DNA, 563 bp, Zea mays subsp. mexicana
cacgctttcgatgcccgccggtggcttgctgtttttgcgcagccccatccgcgacgccgtcgaaacccgtgctagccgtcaatgtcattcgtcgcgcacgcgtgttcgatacaagaccggtcaggtgcaccacgtgcttgcacaactcaaatccgatcccgttcaggttgattgatttataataatacatgtgctttggttgatgtcgggcaatgcatgtatatatgtggatgtgtgtaatatgtttcggtattacgcattggtaggatcgcgtttgcgattggagaacaagaggttgttgatgtgtgtgatttgtagtttgtcgaattacgttttggtcgatgtggtgtaaattggtgtttgactatatgtgggtataaaatgttttggtgagatgtagtggcaaggtcgcattcacgttttggtaaacaaatgtgtcgggcttgttttatgtgatgagtaggtctgaaaatacaagtaatgtaaggatttaattagtgcacgtatgtgtgtgggccggggtgtattgtagggttgttgcgtaggacattgttgacgtgtgc

SEQ ID NO: 377713 - DNA, 384 bp, Zea mays subsp. mexicana
ttcactcgtccggtgagcatggtgccgcgtctctgtttccccgttagatcgtgccctctgcgacctcgtcggctgcacctccaccgtttggtcccgagtgtcccaccctgttcgttccctggagctcgcctggcctctagctcgccttcagcatggtcatcgcaccctccctgctcgctgaagacagtgaagtcctagaaccacgcatacatggtgttcgatgaatggttcataccggatagccttttcgaaatcatggctccgagtcgattcagacatagtaagctgatccatttgtttaccgttagtatgaggaatgattagatacattggattaaattactggtcataatgataggcaatatatgctatttttatttaaaa

SEQ ID NO: 377714 - DNA, 202 bp, Zea mays subsp. mexicana
gacacaaaaaccatccctgaataaagccttgcttcttggagatgcaattctagatttaccaaaggtacaaaattaccagcctaacgatgtgatggaataaggtgcgtcttccaagactgaattccagcgctacattcgactcaagcgtaaagacatgttggattgggccttctgtgaaggggctggtccagataaatgcaag

SEQ ID NO: 377715 - DNA, 500 bp, Zea mays subsp. mexicana
tcgtttattattcccagttcatttagaaggaacattacatgatataactaaaaccatgcttgaaaagaaggaattcttcccaacaattactgttctccagatatttcgccaggtaagtaattacattgtcttctgtgttctgctgaattctgaagttatttggcagatataatagatgtgactttccttcttagtaatccacgtgctagaagcctagagccgtgaacttggtatcaactatcaagcttattttactcatagtactgcataactatttttgtccacatgcttgattctactccaatgcaatttcacttggatacatataagtatgcatcaatgactactgaaccttttcaagctttgggtgttggttgaggtcgttccatgtgcatggaactggtagcgggcattttacctatttctacagtattgttttcctatgacatgcagttttcttgtgccgttcaggaaaaaaatgactactgaattaaggttgt

SEQ ID NO: 377716 - DNA, 429 bp, Zea mays subsp. mexicana
tttattgtcttcgaaaagggtgcctcattcttagctgggaatttgtcattctcaagggcaagagcatctttagaaggatcggcacctgtccctgtatacaaagagccatcttttgttatcccaggagttccagcaataattcaacatgagataatgaataatagaagacatgtactgacaaaggataccactggttcagtcaaattgtgggagatcactcggggtgctgttattgaagattttggcaaggtttctttcgaagacaagaaaaaggagttgtttgagatggtattactgaaatatgtcatgatttctatgttttattaaaaagttttggtacctactactgtgtaatttgttaattgattattaggtaagcatacctgcttggttcaccatggatgctcgattagggtgcttgtctgtcca

SEQ ID NO: 377717 - DNA, 409 bp, Zea mays subsp. mexicana
tcgtctcacgcgtccgctgggtgcggactgcgggtgcggctgtctctcccccccttcgcttcgtttcactccaatcaattaaatcgtctcgtctcgtctcgtctcgtctccttggtgcagtgtttatttcgctcttcgcggattttttgccaaccatttttttttgttgcatctctcggctgcaatggtgtgcatggtcagatgattagagaataactgcaacaaaatgatccatgacctgattcctagttttaagtctctgatggcctacgtgctgccatcgcaaatgcttctgccgtcgccgtttccccctttctttgttcgtttgtcaaccctggatctgcgctggatgtgatgaaagaaagattggtccgtgtatctgaatttttcagtgactgacaaccggctc

SEQ ID NO: 377718 - DNA, 397 bp, Zea mays subsp. mexicana
ttttcatcaagtgtcatctcgcctccataacaggcccatccaagtcacagcatcttcttgcatccagcttgacccaaccttatccagggagcacccaccttggtggttcctatactgcacctgttgtagggatcacttcagtaattcctccttatggaggctacaaaggtgatgtatcaggagattggccctctttataccaaccacgaagggatgagagctctgcaaaggagtttagcttgcgtttactttgtgctgctgcaaatgtggggggtgtaattgggaagggtggtggaattatcaaacagattaggcaggatgtctggggctttaaatcaaagtggccttgctttcaatttcagacccttggagatgaactgcattaatttaccagttt

SEQ ID NO: 377719 - DNA, 88 bp, Zea mays subsp. mexicana
ggggggcgcaatgcatgcgaggtcatgacttctaaatatcgtggctcctaaatcaaggtcactggcctgaggtgaacaccgtgaagat

SEQ ID NO: 377720 - DNA, 430 bp, Zea mays subsp. mexicana
cacccctccggaatattttttgtggtcacggacccagatggaaggaaccgcccagggggctggtactgcctgacgcctcctttttgatttaccaagctcgttggggggacctgaggccttgccctccttcctgcagaagtagacagctgccggtaccaggatcacttatgtctgtcgctgtactatccggcggcaaaactacagttgaggaaaaaaaagcttctcgcagaaaaaaaaaagaggcacaaaaaacagcgaacagtagaggccacggtcacactgccgtcatcgttagatgagccatgagtgcacaggttgtattgactcgccctgcatgttcgctgtatgatggagatgctggtcagatgtaaagccagcacatcttatggcaccgcagacctggtacaactagcggccaatgacatgattt

SEQ ID NO: 377721 - DNA, 295 bp, Zea mays subsp. mexicana
acaacagggaaagggaaaccccagcagggaccggatcggaaaccccgggacgacccacgcgaccggtattagaaccacgagagcacgacaaggggggcagggacagcggaggcaaaaagagaggaaagatccgaacaacccaacagcgagaagacagcagagacacaaacggcgaagaacagagagaccaaaaagccaccgacgcacacaacgcaaaaagcgccggaggacaggggccgcaaccgaacacaaaaccaagcgcaggccgcacgaaagcagccaggaaaaaaacacc

SEQ ID NO: 377722 - DNA, 220 bp, Zea mays subsp. mexicana
gtccatgaaaagtgtcaagcaaactactgctgacaaaacatgaagccagctgctctagttttaaccgaacaggtggacatgtcagtatctacagaaccttgaactggagctgtcgttaatcgagcagcccatagcgcactattgacaattacgctatcgataatcccatcattaaggccaggaaggactcatggttcttcaagaagccgatgataaacta

SEQ ID NO: 377723 - DNA, 254 bp, Zea mays subsp. mexicana
acgcgtacgtttactgttgcctacaagcaaaccacgccagggggtgggcccagcgcaggacatcacactttaggttagaagaacagataaaaaggaggcttgctaacccaagaaataggattagactttgaccaactgcccagacttgggggttttgtccaaaggctagcccagctcaatgccaaagattgagggggccaaacttcgagtttggccactgagacacaacgaggaactactggacgacaaggaga

SEQ ID NO: 377724 - DNA, 256 bp, Zea mays subsp. mexicana
gaccgttcggaattttggtcgacattccttctttttttctatcgactagacatgatgttcagagtctgttcttaatttcatgcatcacacctttacattgtacagtggtacatttttttttacaatagacagggtataattttgtgacactgccctagccattctttttgctattgatatttatagagggaaagaattaattgaggtggtcattggaattcacagcagcatacaaaaaaaaaataaaaacaaaaag

SEQ ID NO: 377725 - DNA, 383 bp, Zea mays subsp. mexicana
tttttattctccattatatatttccataattggagaaaagaactattttaatatccgctactctccatatcgagatagtcgatctaatttactaggactttttatattaaaagaggtatattgaggagctgaatactagttatcccaagggttcttttatgatctgaatttggtgggcattatgaaaggcagtatcagttgggataaatcgtattgttctgcctttccttgcagaaggctaaactataatattttagatacattgttttttttgggtagtttgtgctgctataattggacaaaaaagattgaacattcataggctgaatttatgtgctttttaagtcaataacatgtgctgatcttatattaatattgcatgc

SEQ ID NO: 377726 - DNA, 640 bp, Zea mays subsp. mexicana
tctcatacaatttacatttttgtgatttcactttcgttccagaaaaaaacaagttctttcaaaatgaaatgcttcttagttctcgctgcattgatggctgttgcctctgctaacggcttgttgccacttaactatggtcacggatacggacacggtttgccactcgcacatggtttgggacacggttacggacacggtttgagccacggttatggacatggtttgggacacaacttgggacatggctacggacatggtttgggacatggcttgggacatggttacggacacggtttgagccatggctaccgacacggtgcctacttggctccagcttatgctaaaattgctgttgctccggcagtctctggttatgcttcaagcgtgttgcatgccgtcccagctaaagttgccatcgccccaatgattgctcatggtcatcatggtcttcatggtctccacggacttaacggtgcttaccacaaatagatttgatgtaaatcaaacccaacaatcgatgtgttcaaactttcgatcaatcgaattgatctacaatcgattctgcaatgcttcatttgattttgtattaaacaatttgaccaaaaaatcgttttatatttgcaaaataaacggttcaatc

SEQ ID NO: 377727 - DNA, 435 bp, Zea mays subsp. mexicana
cgacccacgcgtccgctcatttttttggagtgctgctcacgaaagagtcgcttaggtttttgggtctaattctaaaacagctttgaatgttagttctgatctggggttattttctgtgctgtgtccaggagcctctgtgtcattggtactggtgaaatcgggggcaaggtttgtaccgctccgttgcacatcttaatggaattactcgcatttgtgaactcgttgacaatgtccacccctttagcccttccttattaatacgttcccaatttaccatcatcttttattttattttattctacccgtgctaactatgtcaattccatttgcgccgcagtgtactctcaggtgcattgaatatatactatttctctttgtaccaacacaacaaaataataaaagggccggctctgctctagtaaggatcccaagcct

SEQ ID NO: 377728 - DNA, 285 bp, Zea mays subsp. mexicana
ttgttgtgtgggcctgatccttgtatctctaggcgccgtttgtgccgcgcctccgcccacgtctcctgtgagaacagctcctgtgttacgcggatatgactactgtaaggggttcttgctgacaggaagagtgtaaagtttcagatgatcataacaaccgagggttacgctgtgcctgagaccacggtgatatttagcatctgactaccttgtaggacctttaggtcttggattctttcattttagtggccagtggaacaacctttgctcagataatcaggacag

SEQ ID NO: 377729 - DNA, 416 bp, Zea mays subsp. mexicana
tatttgcgtggatccacgcgtccgtctttttgcgcatgccgcggcgccgcaaggacggggtctacatgtacttcgtaggtagcataccgatctggcgtgaccaataattgctgagattgacattcaatttacctttggttctggtgaaacatgctgtctatctagtttagacgtgaaattctttatccttgaccgtagggccgcgaggctctttagcttttttctgaagcagaagtagttagtttctgcaacgccattgcgttgatgatttccattgaatgtttttatccgtacggggttagtcgtagtctcatactccatcgacttgtgtagcagcgtcggtgacatcaaaaattgggactgacacatttcacacacttttggattctggtatttttactgggtcacatgggtct

SEQ ID NO: 377730 - DNA, 447 bp, Zea mays subsp. mexicana
gtttttagggaacccttgcagcagctggtcaggtgtcttctcaagagagccagagggtgaattttgtgttgcttgattccaaggtctgctccctagacacggccatcttcctcagttcaaacttcagatggctgcatcaccaatcactatgccactatggttctgcttcgctgttgctgtgctcagtgcagcaaactagctgcacggctcaagtcttaagcccatgacgccaccctgacacgctggaaggagccagaaaagggtcagacgacagggttggacgtgtcgcgggattcattactacttcatcagcatggatagatgtcttttaagcttagagtttctttattgcttgaacatataaatacaagtgaagagacaacgaagaggagccagctgttgagtcacatctattctccacgatggggtcacgttcgttgccagttg

SEQ ID NO: 377731 - DNA, 204 bp, Zea mays subsp. mexicana
ctcttgcgtggggctgacgcctatcttgaccttggcgaagcagctgccggctctctcaactatgttcgagcgctagacaaactgcctgtcagcgtaggactggcaatccggcatccacgaccaagtctcagacactacgctagatcctggcaccatcagactcgagagtaggctaggttcgacgccccacctcgtgtcagagag

SEQ ID NO: 377732 - DNA, 227 bp, Zea mays subsp. mexicana
tctttttcttctgcccatggatcctaattcatgatggaggttgtttgaagactttttagcctcatattgacaacttgatccgcttcatgggatctgacaactgatgtctagctgtgcaatctgttctgtagattactaaaactctgcatagtagattttagctcgcaaataacactgtcagattccgcttttgtaatcggctgatggcactggcgatcaatgctctg

SEQ ID NO: 377733 - DNA, 218 bp, Zea mays subsp. mexicana
gtcctgctggcagtgctgtggtttcccgcacatggaggaaaagattggacccctccgtgcggtgctttggcgacaaacaagtgcaggatgggcaattgcggcccttttatacctgtggcaattgtggatcgataacctttgacttggtgtggaggtctataatcagaagggtggggagcaggcgtgaatatgtgggggtgtttttaggtcttatttct

SEQ ID NO: 377734 - DNA, 203 bp, Zea mays subsp. mexicana
gttattcttccgggtgacgaccatcgtgaccgtgggggcgcagctgcgggcgctctgcactaacttcgcggacttgacactcgccctgttggcggaagacttgctgtccgggatctacgagctcgtgacagacacgacgcttggtgtacggacatacagatgcctgtattggctagggtcggcgcccctcaccggttcaaaga

SEQ ID NO: 377735 - DNA, 381 bp, Zea mays subsp. mexicana
cttcgtcccccatcctcaggaaggcgcatgccccgggggcccatcctcaggaaggcgcacgccacggtccccatccccaggaaggcgcaagcctcgggccccatccccaggaagacgcatgccacgagccccatcgcctggaaggcgcatgccatggtctcggcctccaataagacgtgaggccgcatctccaaaacgccagaggacatcaccaagttcaccaaagactctctctgcatatcgtcctttatcgccagagggaaggaggagtaccagtccgtacaatagcgggagccctaatctgctcgcgccagagttcaagttaagaccctgacaaagaaacaaatggctcccctgccgttaaggacagagttgtgcact

SEQ ID NO: 377736 - DNA, 348 bp, Zea mays subsp. mexicana
cccttttcgagtgctcgagctccgaccaaatctcgcagcggtagcaatccccgagcggccgagcccgaagcgggatcagaggaggacgagtggacgacaccctcgattctgacctgcggtcggcgcgacttacagagaaccggagatgcagcagggcgacagcacggaggcgcaggtgacgtgggaggaccagcagaacatcaaccgcttcggtggcctcaacatctgtgtgaacgagctccatgacgagatcaacctcgcgaaggatacgaacatgaaccttgtcgatgctgcgaacgaactaatcctgtagggcgtggacactcgtggcggtgtcacccggctttc

SEQ ID NO: 377737 - DNA, 280 bp, Zea mays subsp. mexicana
  unsure (1)..(280): unsure at all n locations
accttgttcactgccaggtcgagctgagcaccctcaccaaggtccaggctgagtacctcggcctcaccgttgagggtcccttcaagggcgacatctaccgctactaagcgtatgtaatcatacccaagggtccttcaaccggaatcctacgtataacgaactttttattcacccgttacgacaataggcaacttgtgttctcaacagcataaaaacttgggtggcattcaggcaagggcagggttgaggtgttagggacgtcnatccctggttcgagttt

SEQ ID NO: 377738 - DNA, 71 bp, Zea mays subsp. mexicana
cctcacaggaacagcacgatatgctagtgtaaacacccatcttggagtagaccattgcagcagagatgact

SEQ ID NO: 377739 - DNA, 439 bp, Zea mays subsp. mexicana
tctacccctcgtcctccgtttttttttttcctatcatttagttagatggtatggttagactatggtagagaaggcaaatatagagagagttttaacttaaaactggtaagtttcaacatagcatggattgttctactgtctgactgcatgaaatattctgactgtatgaaatataggaagacctcttagtagaggttgttccttaatggtatgaaattattcaggtgggatttcctactgtcaagcaaacaaaaaataatataagtagaggcctaaatgtcatcaggctcaaccatttatagggagaggacatgtcacttcggtagaacggctgttacagggagataatagttcaagttgtcctgtccttactgtactttggggagaacatatgctacgccattaatttgcaggttgttgtgtgcattttttagttgat

SEQ ID NO: 377740 - DNA, 400 bp, Zea mays subsp. mexicana
cgtttacttgttcctcttcgcctggctcgaggctgcctcgtttggcgcctactacgatcggttcatacgtctcggcgttgcggtcggctcccacggcggacccgtcgcgtacctgctcaccgagttcgcgcgagtccgagttcaggggattggcgcggttcttggagtatagctcagtgaggtggctttccctaatgtgggtaaaggagccctgttatgtgactgtgctcataatggtgcgtatgctgaaggtttagcaactttcatggatggtatggtatagtggaccctgaagaagtgggagatgtaaagcttctttatgaagacatggttcacacgcatttggttgaacacagtttatatccttagctcggatatgactggcgggattatgaaccct

SEQ ID NO: 377741 - DNA, 155 bp, Zea mays subsp. mexicana
ggctttcttatagtaacaggagggactctgaaacgggagctatgacagaagaggacgtgcagcctatgctagcgagagcatggagagatccaacgcaccgggtgatgatgataggatcgtagccttgtacgcaaggtgggactcagggatataca

SEQ ID NO: 377742 - DNA, 225 bp, Zea mays subsp. mexicana
gtctttttttaagagcgcggagaagatctgctcgggatacgacgacggagtgtcccatggggacacattcttaccgatgcaatgatagcccgtaccaatggtgccacccagggagaaggggctggccagtagaactgtgtggagaagcactatgcgtactgtactagaccaccagtgcaatgtgctgaggggctctacctgaggacaaactcacgaccagaggtt

SEQ ID NO: 377743 - DNA, 94 bp, Zea mays subsp. mexicana
gtctttttttatggaaccggagacaagctgctggggatgaggcgacggaacattacatggggacggcctgttaccgatgctataaaagcgacgc

SEQ ID NO: 377744 - DNA, 370 bp, Zea mays subsp. mexicana
gtttatatgttagagacatcaaatgatctgctgggtatcttacgaaggagtgttcaaagggaccacgctgtcgactatgctctgcatgacctaaccactgttacacacctacagggttactacagccaatgaaatcctgtagagaaactctatgcatattttcctaagctaacagcgcaaatgccggggtgctctacctatggaatgcttcgtattgagagtttgaacttgacaccgatcggtatcaaccttaataaggtctgtcacactgtgaaggacctccacatgtcaaggctctcaactttgtagacacacatgttcttggatcacatagcgacctgctactcacatcaatggcttgatccaagtt

SEQ ID NO: 377745 - DNA, 197 bp, Zea mays subsp. mexicana
gtttattggtaagagcccggagaagatctgctcgggatccgacgaaagagtgtcacatggggacacgctcttaccgatgcaatgatagcccgagccaatggtgccaaccagggagaatgggcggctcagcggaactcggtggagaagcactatgcgtactctacgagaccaccagtgcaagtgctgaggtgctctac

SEQ ID NO: 377746 - DNA, 554 bp, Zea mays subsp. mexicana
  unsure (1)..(554): unsure at all n locations
tgcttctcctccccctccggttcgggttcgggttcgggttcgtgaggttctccggggttcggtttcgtgggtgagcggatcgagatggcggcgtcggatgttgagtaccgctgcttcgtcggcggcctcgcctgggccacggacgaccactccctccacaacgccttcagcacctacggcgaggtcctcgagtccaagatcatcctcgatcgggagacgcagaggtcccgcggcttcggcttcgtcaccttctccacggaggaggcgatgcggaacgccatcgagggcatgaacggcaaggagctggacggccgtaacatcaccgtcaacgaggcccagtcccgcggcggccgtggaggcggcggcggtgggtacggtggtggccgtggaggcggcggctacggcggtggcgggcgccgtgatggcggcggcggctaccgcggtggaggcggcggctaccgtggcggcggcggctacggtggtggtggcggcggctacagcggtggcaaccgtgtgcggcgctactgcaactncgatgggaactggaggaactg

SEQ ID NO: 377747 - DNA, 621 bp, Zea mays subsp. mexicana
aggctggtacgcctgcggccgccgctccgttaccgccccgacccacgcgtccgactgtgttaaccacttcggagcgcgagttcgtggttggttttgtggtacactgaaaaatgattgctatttttattcgccgtttatttattttatctatatttttgctcgcatgctcgcaagatttccttctcttccgctccactcccgggtctctcttgctgcctcagctcacctcgcctcaccttggtgggatgctggcagtacactgcggcactgtaaggatttaacagaacgaagactagtgctgcatcatctctcgctctcgctctcgctctcgctctctttctctttcctttctccctccctcgtggtgcaggttcagctcatctttgaacactgtagccattattccagctagctcgcgctgtttctgctcttgcttgctcgggggttctcttctcgctctctcgagttcttgctcagttcctcctgcggccatggcggtccgggtgggttgcgcgcgccggcgctagcaagctcctgtttgcacaaaaatggagcgtggagggccccatgtgatgaccccaattggcaaagaccgggactcgccttgcccttgccagatct

SEQ ID NO: 377748 - DNA, 265 bp, Zea mays subsp. mexicana
tttttacccgacgtgccaccgtgtactgcgccgtagctgggcatgccaacgatccgctggttgcctaagagacacgggggggctcgaaggccgtatgtacccgtattgcggcaggtgcctgtgacactcccggagtcgatggccgtccacgtgctgacatagggctgacacttagtggtgaatgacctgcgagtctaagtagtcagtgacgacaacgctctcgatccgaggcgtgcgcataccaactgtggagccggctactctg

SEQ ID NO: 377749 - DNA, 611 bp, Zea mays subsp. mexicana
  unsure (1)..(611): unsure at all n locations
caccgatcatgatgaagggtggtagcaagaaggaggtgggcgcggtggtggaggccatactgatcgcgcgggacatcatgggcccctcaccgacggccatggccgcccgctcgccgcgcggagccgtgccggatggctccctcgccacgacgcccaaggtgacgatgctgtcagccacgctgtgctacacgggggagacatgcaaatacattacctgcctcactcctgcttgctcctgaaactatgatgatcgtcgctgctacatcatatttactcctgctgctgcttgaggccattctgtacgtgaatgaagccactatactctcacacacagcatgcgccggccgacgacgcgtacgtacgtacgtacgtatatatatacgctacctcgtgagcttttgttcgagtgatacgtgtttcaaggcatccatccatccatggatgcttatgtacgtatatgtgttagtcgtgtgtcaggcaaccgggcagcagaagggtntgttgaatatatatatttacggcttctggggagtaaatataaagggggcatgtggatgtggcaccaaaaaaaaaaaaaaccctcttcttcaaataaataaggggcggcgttt

SEQ ID NO: 377750 - DNA, 594 bp, Zea mays subsp. mexicana
agtgaatccaagtgcgcatggctaaaacatacagagagaggtatgctcttcagccatggatgcattacactcttaaaggactgggatctcacaaaaaggataaagagtaagatgacaccagttcaaaatccataagcttagactgtgatatgatctgactcgtgcttggtgtcagcaaaaaaaacaagcacatatctaatgaataactgtatgttcctattcctggaggcaaactcagctcgacagtagggcacactacgtggaataatagatggccggatgggtttatacccagctgaatgcatcaagagattactatcactagcaaccaattgtcgtcaggatgaaactgatgacaggactttcatgtcggtgattgttagagaacttgaactcatcttgaggatgatgcctgaaaggattatttggtgtggaaacctcagagacagactcaacgatgtcagtaagtcgttgtcatttccgcgacgggacctcttgtctcgcacagcctctggagtctgatgcgagcagcggatgatcttggagagaactcccgtaggatgtgtaaacttggatatgcagttgtctgacata

SEQ ID NO: 377751 - DNA, 420 bp, Zea mays subsp. mexicana
ttggtgtttcgctcccttttagacctccgacggatggttggcagccgacgccggcgccgacaaacgctaggtgctgaggacttcgccagagtcttcgacggggacgagcacgtaccagcatgatgtgggaaagaggtcgactggcgggacgatagattgataaccgcatgagagggtgccatgtagtccatctagctgaggatcccagaggccatcctgaagtcctcgtgcatggggatcggaggagatactctgacatgagtggggttgagcaacgaggggactaccctgacaccaatctggtgaaggaacctaaggtctaccataggatgctggaggaaaaccataagccctattctacaagccgaggagtggataagcgcaagggctatcctgaggtacatgaaggatcacgcatga

SEQ ID NO: 377752 - DNA, 59 bp, Zea mays subsp. mexicana
agctggcgcgcctgcaggcaccgcgccggaaccgctgcgacggctcactcgtcgttggt

SEQ ID NO: 377753 - DNA, 206 bp, Zea mays subsp. mexicana
gttttagaacccgttcatgcatgcctccggggagaggtgcccgacagccattcatgatttcgaaggtgaccagacctacagcgagaagcctggccacgattttactctgacagcgtcacacggatgtgtgacttgttgcaagaaaggaccgttcaaccaagacctcatgagcaactccagagtacctggctatgaacgataaggtc

SEQ ID NO: 377754 - DNA, 464 bp, Zea mays subsp. mexicana
  unsure (1)..(464): unsure at all n locations
gcatgattcagaccgtatgttcacggatatgtatggcttcacccagaatatagccagtggcacaagcagtcaggtagcacctatagggtctctggattgctcacattggacaaatttcatacaacaaaattctggaatgccgagtgactttacaaacaggccatctggagggccttgtaccaaataactgtatgacaccctgaactggatgtactagattggttggttctaggcgccacctaagtcggttaataaggaaactgacgcacgttggaacagaatgttttccagcatccatgacttatgtcatgtcacggctacgatctgctgaatgntgtcgtttagtgattagcttttgcaccatacctgtctgcacgcacgcgcttgtgattttgagtcaaactgaggattcccgcttttgctgtcttgccctgctgattttttttattttgataataagctgt

SEQ ID NO: 377755 - DNA, 502 bp, Zea mays subsp. mexicana
gagaaacgtgcggaggtggaagccacaacgggagcgcctaccctcgcagtccgcccctcgacctcggagccgcagcccgcgaggagcgttcacaatcacaccggccaccgcggaccctagcgctttagccttatccgtccgagcgcgcgcccgatgcagacggaggcgcgcgtgggcgtcgtcgtcgacggcggcgccgccgtgggccggtgccaggagcagcgccacatcggcacggcggcgcacctcgccgccggaggcttcgcgggcgccgtcagcaagacgtgcaccgcccccctcgcgcggctcaccatcctcttccaggtagctggtatgcattcagatgttgcaactctaaggaagtgtagcatatggcatgaggcttcacgaatttttcgagaagaagggattggagccttttggaaaggaaatctagtgacaattgtacatcgcttgccttattctgccatcagcttctatttcgatgagcgctacaaaatct

SEQ ID NO: 377756 - DNA, 489 bp, Zea mays subsp. mexicana
gcgcccgcaggtgcgcgccggtgccggaactggctcggaccacgcgtgcgcaatgtcttctgcttaggtgctactgccgcacaagtggaggaggtggaggccgtggtcatgcgtgccgtggaaaatcatgccaaccgtccaaccataaaaatggatcgagcataggaagaaaatatcctatccgaccaagactgggaggctctgcttcagcaacacactaaactacaaggcggcgtgctccagctgaaggataaacctgatgctttcttcatcagccagctacggttgtatcgacatcttcagaaagccgttatttcccacgactgtgcaggtgccagcatgtgtgaggtgctgaaagtggaagcagcttgtagacatgcagccgaggttcatcctaaccatccaagtattgaactgatcagaacaaataccgatgaaatggcctactcatctgaccatcctaacacagaggccaggaattgatgactc

SEQ ID NO: 377757 - DNA, 435 bp, Zea mays subsp. mexicana
  unsure (1)..(435): unsure at all n locations
gtgttcgcaaggatgaaggcgacccactcggtgagtattgtggctgagaacgtcaccaatccgaggccggggagccggtcgtcgaggcggtcctcgcgtgacttcgagcacaacgacaacacctacgcatccctgctactggaggacatccaaaactaccaccagcagagcgccagcgctgccaccgccactgccactccagcgccgaccttggcgctcccagcgtgcgtgtcgaatgccttctcgatccttgaagctgtcgccaacctcaattcctcgtcgcccgacaacaagagcttcgagctgggagaggtcggtcaacgacaanggaatccgtcgtcaacgngaggtacggcggcaatggtgcggcgggcaccaccttcgtggtggagcnngaggtccggcgtgaaagacgacctcatggagccgagcatg

SEQ ID NO: 377758 - DNA, 171 bp, Zea mays subsp. mexicana
tgttgacgcgtgggcggacgcgtgggataagagcggatagaagagtggcaactccctgaagatcactagattaagcttggaattgttggaataatagatcccttccgagtaggagttttggatattgttggtctatgataagcagctggcataaatgcgcacatggttact

SEQ ID NO: 377759 - DNA, 317 bp, Zea mays subsp. mexicana
gtttttgcatcggacattgattctttttccctacgcgcgaccgataatccgagcgtgctgagatgtatggttatcaagacctcctatctggctacgagctcctgtcttattcattcatctacaaggtgctcgagaacggcgtcttgtgcgaggtagagggaaagtatttgaccaatggttcaggttatgtagacattggtgcaaaatcatttaccaagcccgttgcggttgatagtggattatgacacaggccataacgtccttgatatcgttagcattattccgtatacaggaccaactgctcttttgacaagaaa

SEQ ID NO: 377760 - DNA, 167 bp, Zea mays subsp. mexicana
ttgttttaagaagcctatatggaggtccttggcgacaagattgatgccgtcgtctacctgctgtccgtctgtacgccgttaaccttggattttattctcaaccgcatccgcatctatttcgactaccgtttcggaagctcccctctacggatgatagttaaatctac

SEQ ID NO: 377761 - DNA, 451 bp, Zea mays subsp. mexicana
ttgacgcgtgggcggacgcgtgggttccacaacagatgtgacaactggatgtctctgcaaggcaagtttagagagccagttcatgcatagtttcaagttgagaaaagccaccgagtcggtgttgatgcaaggctagctcactgtcatcttcggaattttttctctcagttcatacaggtttgagttgcggcggcatacagttcagatttgttcagagcatagataggtcagtaagcatcgtaattctttcgtgtttctcctttgtacatgtgccgtaaattgtgtatttggggagggagataagttgtgttgtattatctcaacaacaaagtgtgatacgctggcagatcacgcggaatggtgatctaccatgggcctgattttgcgttggccggtcagcttgtttttgtaaagtgaggtggccatcgattttatcatataagcttatacc

SEQ ID NO: 377762 - DNA, 110 bp, Zea mays subsp. mexicana
tgatctcatgcttgaccccaggcatggcggggggggtttagcaacaggacacgccgaacctcttcaacagttggatcttcgatgatgttcaggtgaacgacatatcgatg

SEQ ID NO: 377763 - DNA, 346 bp, Zea mays subsp. mexicana
tcgtttacctacaggcagggtccgacccattcacagattattgagtatggtgacgcactccataagaaagactcgagttgactgttattgtgtggatgctcatacttcaagcgcaacatcaacactgatgcatctaggttactggcggccatggatagctacgcccaagcacacactcgcattaagcgcaacaaagtgctttcagacgataactctaagcttgttgttcttgaataccaggaaatcgctaaccttaaagttgttcacaaatgtaaaaataaggatagcgacatcaagagctcagagcctgagagaacgatcgacgacagggaatccgacaatacat

SEQ ID NO: 377764 - DNA, 586 bp, Zea mays subsp. mexicana
actgattccagcaacagacaagcagcgaccgattgaatgttgttggcccacggagcagctaccaagggggttcttctaatcaccatgctggtagtaatgccatggatgacccggcagcggttgcagcagaattgcagcgccgctgggttcccccacagccaccaggcgtcatcatgccagaggctgcggccgccatccgacaggccaggtcggttccgaggcagctgccaagcggcgatgggcgcctgggcgctgatgtcccgagacagcctgagcctgccattgccatggcgacaacagagcacgtgaacgttgcccctgaagcacctggcggggagttgccaagcgatggtggtggtgccatgactgctgatgccagcaacggtggtgggagtggagagcagcaagagcaggaagcctcttgagtgaagctttttggacgccctttgatttggttctttgagaggatctagcttgcacctgtacctgtgtgtgtagcatatgcatatgcatctgcataggtttgtgacataatgtgcctcgtgttcgaaactgcagctgtattgtagatatataaactgatcac

SEQ ID NO: 377765 - DNA, 164 bp, Zea mays subsp. mexicana
tgagccgcctccccggaccggaccggaccggcaggtccggcccgacccacccgttttaatcttaacctgccacaaaggtaaaacaaatcgcctttataagacgccggctgccagataatcgagtcgacggccgtcatttccgaacggaacacggccgacagtct

SEQ ID NO: 377766 - DNA, 519 bp, Zea mays subsp. mexicana
cctacgtttccgcccacgcgtccgaccgcgacgacccccgctacgtcatcaccacctacgacggcgtccacaaccacgcaagccccgcagccgctgccatcagccagtacggcggcggtggattctatagcccgccgcacagcggctcgccgacggccgcctcctactcgggctccttcgtcctctgacttctccgggccttgacccagagtgatctacctgctttatcccagtcgtaggatgagaagagtgttcagacttcagagacatcagttcagcagccggctaaattcggacctgattgtagaatttttacacttgtgcagtacaagttatactatttaagctagaagcgaagcgtactctacttacacctcaattattggttacctcttgtgacgactgacgaggcatcataatcgtcactaggataattgatcacgcatgttattcgcttaattagttgctgtgtatacatatgaagattgccgcatagctgataggctgctgatttaactt

SEQ ID NO: 377767 - DNA, 543 bp, Zea mays subsp. mexicana
tcggttatgatgccgatattaagatttgggatatgaagaatcttaagagatatgctactatctccactaacggtggtaccaatatggacggctccattgcctttattgagaaggataagttagttggagttggctttagatctggtcatgttaagttctatcacttgtataagagaactctcgctttcgaattcaagactggctttgagaatttctacacctatgccctccaatacttacccaagagaaacttgatcttgggaagagttaaggagaacgtcattaaggtatggaaatacgattctgataagaagaaagtcgaacaaatcaagaccataaatactaagggaagctaccccgattgtattgttcctaatgaagacgaaagccaattgttgttcacatctagagataaattcctcgagatgtacgacttcaatactgaaaagacctcaatcataaggtcgaccctcatataccaagactaatgctttggtacacttagagaatatgggaaagatccctgtctgggaatatacttct

SEQ ID NO: 377768 - DNA, 129 bp, Zea mays subsp. mexicana
gtttattggcccaaaatgcaaaccgactgccaacactggcattagtgtcattgcctaggatcgaacaagaaacactgctaaagctacccaccatgctggatcagtgaatacacacatctactgtaagca

SEQ ID NO: 377769 - DNA, 441 bp, Zea mays subsp. mexicana
ttggcttgggctgcgcagccacaaggacctcagcatcgacccgcgccgcgcgccgcggaacctgtccatggtcgacttcaagcgcttcctcatgtggcgatacgcgctgccgcgggagcacgccatccggacggacgaggaggagtccgggctcgggcccgggcgggcgaggacgaggccccggctgctggtcgtggcccggcgctcgcggcggcggttcgtcaacctcccggagatcgtggcgctggcggaggaggtaggcttcgacgtgacggcgtcggacctgatgtcggggacggcgtccaagagcaagagcggcgccggggacgaagggcacgcgcgcatggcggacgcgtcgaagctggtgaactcgttcgacgcgatggtggcggtgcacgggtccgggctcaccaacctggtgttcctgcccatgaacgcggt

SEQ ID NO: 377770 - DNA, 461 bp, Zea mays subsp. mexicana
ttcgtttaatgggctggcccaatttgtgctaagcagcacacgtctccctcttctgaaagaagcaggttttcgccggaccatggctggaagaggcggaaacggcatttcggccgcacaggagttcccaggctggagcatcgccaaagcccaggaagatccacacccacctgtgcggcatgtgcacgctgctagaggactccctgcgcaggctcggcataaacacgaggaagggccggcgcatttcatccctggcatctccaactgcatacctagccatcatcttcaatttccgggggcgcagtggagcaagaaccctacgacgccaaggccgcctgtgccctctgcagtgaaattcatcatataggcgaatcagaaccaaaaggatgagctgaatgaaaaagcgcgccaaaagatgcttcgcttatccggctgagggaactagacaaagaagagaaaggatg

SEQ ID NO: 377771 - DNA, 181 bp, Zea mays subsp. mexicana
tttgatgtgggcgccatcctaggatacacgaggctgaaggcgaaccagtgctagaccacgtcgcttgtgcagatcgagggggtgaacaccaaggacgacctatcatggaaccctgcaaaaggcatggcttacatatacaaggctgactctacaagaacatgtgacccgttccagaagcgtg

SEQ ID NO: 377772 - DNA, 480 bp, Zea mays subsp. mexicana
cttcagaagaaatagatgtggaaagggtggttataattcattgcttatcagtcgactcatgatacatcagctagcagcatgggaaaattatttaattagaaatatctgcgttgatatattatgcaagttctgtgataaattgacaaatctggattctttctgtaagctgtccactttctcgtctgatatgttatgcagtcacaacatgttttagaatttcattcagttttattttagatatgttcacaaagtcatcatctattaggctgtatatttgaatgatcgattcaggtgttaatatattttttacctctttgtcttgcagatgtcttactcaaggggctcaaggtaagcattattttgtaaccttgaacgacctactttaaaaaccttcttgtttcgatttgtcttcactcttcaagtgatcttgctcggagttgtgataggtttatttttttacaagtgaaaggtatggatctc

SEQ ID NO: 377773 - DNA, 577 bp, Zea mays subsp. mexicana
tttgcgtgcgcggcgacggttccccaagagcgtgaggcggcggcggcggcggttcccgagagcaaaaggcggcggtggcccgagacgcgcgcgacgatggcctccggacacacgaccggcggctgctccctgatccggcggcggggcgatgatggctccccgattcggtggtgcggcggcggtggcaccctaatccggaggcgcgacggcgacgtttccctgatccagcggcgcgacggcgacgtttccctgatccagcggcgcgacggcgacgtttccctgatccagcggcgcgatggtggtggctctccaatccagcagcgcgatggtggcagtttttcgatccggaggcgcgacaacatcggctccccgatctagatgacgacaacgacggctccctagaggtgcacgaggggttcgccctccgtgccggaggccacatgacatcctccaatccagcgtgcctcgagcattctgtggcggcggtctcctccgatccggcggcttgcattctcatcatttgcactcgtagaatgatggtgtaacaaataaaatttcttgatcacgatgaagcgtt

SEQ ID NO: 377774 - DNA, 270 bp, Zea mays subsp. mexicana
tacacgagcagcaagccgaacactcaaggggggagttagccaaattgagcgggaactaccacaaccgtgggttggaacaaattgaagatccaaaaccgtcagattaaagtcacccagagtacgtggaaattatgcacctggacgactagcttcatacaccttatcagtaagtcaagtgcaagcaacggaaacagaatcagccagaattaaagcactatacggtacgaggcgacacaaaaggacatgtataagccagtgcaacacctgcaa

SEQ ID NO: 377775 - DNA, 395 bp, Zea mays subsp. mexicana
tttgtgtcggaccaaatgagggggaagatgggcaactatttaattgacagttcaattgttggtgttgacgaagccgtccgcacccatggcctactgtgagctcgtctgcacctacgccgtcctcatactgagcgacgacggtatcgtcgttgtcgagacaaagttcatgttactggatagggtggctatgatgaaggtagattcctagtgtgcgcagcttttgcctaagataaagaatattcgcaaagatcccgattcaagtccatgtggttctatgtcgatgtggatgcgaagtttcgtcgatgacgataaagcaactgaggttccttaagatctttggaagagaataataaactatagaagactgatcagtttgagagggttataagaggcct

SEQ ID NO: 377776 - DNA, 521 bp, Zea mays subsp. mexicana
ctgttcttcgctttgtgttcagtttagttttggatttctttaatcaactagaattctgagtaaaagatctcatttcgtgtgtgtttttagatatcatttattcgcgtccagactttagtgcagcttcaaaaaaaaagataattttattttgctttttttgagaattacaaaaaagataaaatcaaagatgaatctcgttcaaccaactccagatatgcgcgtgttcatccgccaagaacttcgtgaaccagaaaatccagaagatattgaaaaagacattgcttcaattcgtgaatggttgagccgtcaaccacatttaccaaaagacatggatgatgcacgttttcgtactttcttgcgtggctgcaaattcagtttggaaaaagtaaagaagaagttggatatgtactacactatgcgtaatgctgtcccagaattctttgctaatcgtgatgttgatcgtccagaattggctgaaaatttcaaagttgttcaaggtccaattttaccaggacttacac

SEQ ID NO: 377777 - DNA, 393 bp, Zea mays subsp. mexicana
gcgagctaggccggcttggagaggagagctctaagggcacagctttgagcatgcgcctcttgcgtgacaactcgagaccttagggacttccgacccaccgggcacggcggatgtgagctcaaggaagcaggttctgtcattaaagaactcgccccagagggccgacaaaacggatccgatctccgcccctgatgcgtgtgtactgatgccggagagtaccacaggtgtgccgcccttgagatatctgatcgcttatcttataatacaccgcgctatgttctatgagacacggccccagtgcgcgtgcgctaaaggacgactgacattgacattgccttcgcccgtgtttataattcaccacattctctagatgttatccccgcatgcgatgtt

SEQ ID NO: 377778 - DNA, 155 bp, Zea mays subsp. mexicana
ttctcatattttgttttgatggtagagtgccatcgatgagacgcacagaaacatgttcctgttgggccatgatgctcaggcaatgtgaagtaggcgcctacctgtaagctagctacttcgtatgtatcccatcaatggaataagttggctatgtg

SEQ ID NO: 377779 - DNA, 448 bp, Zea mays subsp. mexicana
ttttcccaaggtggccgtgccgctgccgctgccgccaatgcccgccatcccgtccgtgctgcccaagctgaccctgccaccgatgccctctgtcgatccatccgtcgtccccaaggtggccttgccgccgatgccgtcggtccccaccgtcaacgtgcccatgccttttgcggcaccgccttcgtcggcgtagacgctcgcggcgcgctcttgcaggtttgcgttcgtcgtgcccaccatgcacagcaggtggcggtgaccggtgtacgtgagagtgatgccattgtttgtcaatacttttgcacctgtgtctcgtgctttcttgttgagtgtagcgttgtaccgctgtacgtatatcctctgtatttgtaccccattcatttatgctgtatatgtctggtcaaaacacacttattttttactacattttattgtcttctcacataat

SEQ ID NO: 377780 - DNA, 324 bp, Zea mays subsp. mexicana
agctagctgctgccaagagctaggcagtggacagagcgactctgcgaagttggtcaccaatgctgatgcgtgacatttagcgcccaggccatgattagctctaggataggcatcaactacaattatccctgcgtgccatgctgtggtagacatgtctactaacttaaggggcctcatagagcgagagttagatgcatttactccaagactagcttaagacgtgccccaacggtcagcaccccctcaggaccgatatggacagagcggtgcgtaccgacacgcacaaccccgagctacatgctccgttcgcgtcttcatgactgt

SEQ ID NO: 377781 - DNA, 391 bp, Zea mays subsp. mexicana
tttggcgctgcttcttccctgggatccaccaagggtctaggatcgggggtgatggcatccaggctggtacaattgtgatctaaggcggtgtacgacggatgagtgagtcgtccagcatgagcaggtcctactacatggagcttatgcagaacaacaagcaggaccgcgtgcagcctcccaccattgagaaatgcaactagatgtcaaggaagttgtactacacgcgtctgggaagccaaccagggccgtatgagtgattgtggaaggaattcgatgctgtcaagcatcgtatggaagaacaggaaggacctcaaggttgaggacactcgggatcgcgactttattagcagctgagctatatgcatgtgtattgagcggccagattcgttgc

SEQ ID NO: 377782 - DNA, 319 bp, Zea mays subsp. mexicana
ataacacacaggtaaagagagaggcaagagaggtgaaattgaggacaagagaccaacctttaactacaaaagacgttgaggcacgcagcactgaacaagagaaagactagccaagtgtacaaggaggaggctactacgcagatagaattaaaaggcaagcgagagcacattaagactaaagacgcaccgaggacaccagctcccaagcaggtacagaaactaagactaacatagggattagacgatagcgtaagaacctaacaacaaagaacgcgcatttattcgacgaacagaagggcacagtaaagactgccaaccg

SEQ ID NO: 377783 - DNA, 473 bp, Zea mays subsp. mexicana
  unsure (1)..(473): unsure at all n locations
ttcagtcctcgtcgccgtgctcctcttcggcggcgtcgtcgtgcctgacgtcgtcggtggacgccgcgtcaaggctgccgctgatccaccagatccattcgcagctacgttcagatataggctaccgctgatccattcgcagccacggaatctcctacgttcagctcaatacagatccatttggtgagtttttgtccctgaaattctttcattccatcctcaaatgaaggtatatagatttaatcccaaagaatcaaatacatcagatgtactcgtgtgtacgtgattgctggatagctgtgcagatataggtttacagatagaattagaattccagcttgatgtttccttggcaagcttggaaattatatatttgaacatgctacggataaaaaagccgaatatgcgtgctacttgcttgaaaaaaaaaaaattaattattctanntatggncatgtgctggcgttacttgt

SEQ ID NO: 377784 - DNA, 229 bp, Zea mays subsp. mexicana
cctgacccacccgtcctgtaaaaaccaaaccggacggagatggaacgccgggcgtttataatatctggctcttcggcgaaataaccttaacatcacgggattacactgtcattgcaaggtggaaaaaggcaccacagtggctgcaacttagtggatccctcttgattatcacccatcatcggagcttggagattctttcttgcgtgctctagtgcttccaagacacttg

SEQ ID NO: 377785 - DNA, 90 bp, Zea mays subsp. mexicana
ggacaggagatgattctggccctgaacctagatgaaccaatgtgcggactgagaggctggactggacgtatttgtggaatggggaataac

SEQ ID NO: 377786 - DNA, 96 bp, Zea mays subsp. mexicana
accgacccggaattacctcctcgacccacccacccgctctatcaagaatttaagaccctttgcttgctacagcgagggcttatcataaatacgctg

SEQ ID NO: 377787 - DNA, 442 bp, Zea mays subsp. mexicana
ctgacgttttcttcgctgacttgacaacgcgtgcatagattttggatcatgtggttacagacggaccaggaagatgattcctgtccctgaacatagtgaacgcatgtgcggacttagcgacaggacatgtcgtatacaaaaagcgggcaataagccccacgataccaaggtgatcaagcctcatgatccgtgcgtctccgaagagcaggctatacgaggccgagaaagagaatggacctcaaggatgtcgttgcagcggcaatcagggccaataggaggcagcgaacactgcaactaaccacccgccagcttcaggcttgaaggcggcaggtgtggaggggaagcagcagcagcagcgctggaagaaggtcgaaaatccaaagccgcatgcggacagcgtccctgcccagggctcacaggaggaagcacctgagaagcggtt

SEQ ID NO: 377788 - DNA, 127 bp, Zea mays subsp. mexicana
tcgtttcttccgtccacaaccatgttggccccaatggcagggactgtgagcctttttcggcggtcgctccgagaaccgtgcggcttcagctcctttgtgctggcttcatctaaggaaacgggccgac

SEQ ID NO: 377789 - DNA, 160 bp, Zea mays subsp. mexicana
ggccgttattcagctggaggatggccgcaccttagcagactacaacatccaaaaggagagcaccctccaccttgtgctccgtctccgtggtggtcagtaagtcatgggtcgtttaagctgccgatgtgcctgcgtcggctggtgccctctccatatggag

SEQ ID NO: 377790 - DNA, 246 bp, Zea mays subsp. mexicana
gtattattgaccaaccctccaaccggtgcggcttcgatctttcctctcctatcacctgaatccctcgagtattcatcgagagattctgatatttgccatcagtaagaaacagtattcatcgccggcgcagtgcggtctcttcccttcgctggagaagggggaaggggacacgaacggagcagatggccatggacacgatgtcggtgcgcgctggagcgggccaagatgctggttggcatggaggtt

SEQ ID NO: 377791 - DNA, 119 bp, Zea mays subsp. mexicana
ctcacttggccctggcatcaactacttgtcacaggagttcttcttcacgaaaaatggagctcccgtcggagccattccaaaagaaattaaaggcccactatatcctacaattgcagctc

SEQ ID NO: 377792 - DNA, 231 bp, Zea mays subsp. mexicana
ccggaccgacccacgcgtactatggttaccgcacaaaccaatgtcataaggcgatagtagggcgaatggatccaagcgtgtactcggaataccaccaaagacggcgaccaaccaacgttcaagtggccgatcaaaactgacacaaggtctgcttccggtgcttacaccggcgaaatcagtcccgaactgtagcccagacatccgactagactgggaagaacctttgtacat

SEQ ID NO: 377793 - DNA, 315 bp, Zea mays subsp. mexicana
ggtccgacgcccgccgcccgcccagcgaccccgaggaggagttttgatgatgactatcctggattcgtagaataaatacaatgaattgtagaatggttatacatggtcatactaatattgtctagtacatcttttaagattctcatgcattatgattgctgtttcctgttatgtacttgtacaggcaaaattttagttttcccttttgccatgatcctggtgtaatgaagtaggcttttgttttccaagttttgcacatgtcaaaattgaactctgatgtgtacgaggtttgattctgtaagtacttatgttttc

SEQ ID NO: 377794 - DNA, 94 bp, Zea mays subsp. mexicana
ggtaggtgaggtgattgagagcggaaagcaaaggggggatatattcaagaacacgaccgttaaggacggagccataaaaaaagatactaaacca

SEQ ID NO: 377795 - DNA, 139 bp, Zea mays subsp. mexicana
ccgccgcggacagtgaaccgccgggacccacgcggccggcactattgtctacgccgccgccaagatggagaacgggggattattaagaagacgcgctgcaagaccccacagcgcccgaagcacacactccacaaggtga

SEQ ID NO: 377796 - DNA, 113 bp, Zea mays subsp. mexicana
ttgatgccgggccaaatatacatacagaaaagcggggcttttttactcattgctaccacgaaaataaccacaagcagaaagttagagacgggtacaagcccgaatgtacccac

SEQ ID NO: 377797 - DNA, 501 bp, Zea mays subsp. mexicana
gccgcggactaactgccgggatctacccacgcctccggtgatgtcggcactattctcctcaccgtcgcggtcgacatgcttgatggcgaggcctacgtcaacatccgcaagggcaaggtcatcccggggtacgagactctcgctcacccctctacctgggatggccttgaggcccgacttctcacatgagacggacgcctcctgcatgccctttgctccacccaaagcatctgtctcattatataattctactcctgctcatacaatctcatcatctcctgtctctcgttttacacctccttctttctctttctttaattccatctcctctctaacattcttacttcttaacttacttttttatcccttctgctctcatttctctatccatccatccatgctactctttttagcttttgctgtccagactgcttgcgactgcagtacgctgcaacaagggactgaccaccaccaccaccaatgggcatgctgctgctgatg

SEQ ID NO: 377798 - DNA, 189 bp, Zea mays subsp. mexicana
gcgactgcacgagcaccaccctgaccagctaagaggggcaaatgtttggacaggatgaggctctttaccaacctgagaatagtggaggagatgacagctattccctgaacaacgctccaatcattgatgaagaccggacaccaaaagtattcgattaaacaatgaaagccacaaccgaaaaaggacaat

SEQ ID NO: 377799 - DNA, 51 bp, Zea mays subsp. mexicana
gcagatgccaagcccaaggacttcaccctccacgcgggcgcctttaacaac

SEQ ID NO: 377800 - DNA, 168 bp, Zea mays subsp. mexicana
agccgccgcggacaggaaccgccgggaccgcacgcggccggcgatatggcggcggcggcgctcgtggtcagacggggatccattacataggactcgcgatggggcagccgaacctcaacgatgcatctgcgcacgaaggtcaacgcagaccggcgggggaacgcataa

SEQ ID NO: 377801 - DNA, 97 bp, Zea mays subsp. mexicana
tgatcactaaccccgtcgcttccggctcccgcagggtggtttactcttcacagacggttccttcctccgccaccatggggaagacacgtggtatggg

SEQ ID NO: 377802 - DNA, 208 bp, Zea mays subsp. mexicana
tcgttctttctgtgtattcctcaagaagatgagagagatgatgcagaacacaagccgagatcatgacaagattgtgctctcctttgaaggggcgaatatgcatgatcggatgcatgagactgagaaggaaccatgtaagaggcaacaacaacgctctggtggagtcaagcacaaggtattcgttatcctacaaaggtgggtaattgag

SEQ ID NO: 377803 - DNA, 128 bp, Zea mays subsp. mexicana
gaaccgccgggaccgaacgcacgccggctggatacgcgtacgcagagaacgaccaggcaacgggcgccatattttacatcttatcggccgaagaacaccgcattactccaaagaagctttctatttat

SEQ ID NO: 377804 - DNA, 84 bp, Zea mays subsp. mexicana
catggtccaaagtttatgatggcaaacgggactgtggtgctttttttaagaggtacacaacgagcggcccgtggggatggtggg

SEQ ID NO: 377805 - DNA, 234 bp, Zea mays subsp. mexicana
attgatcacaccgacctgcatttaaagctacagacatggcattattagtcaacaaaataaacagatcttcaatatctccaatgcccccaatatactcatcagcactgaagcagatcgtgaagagcatgctaaggaaaaatccagaacataggcctactgctggggagctgcttgaggcattcacattcgtatccatatctttctgaatcgttcaactgctcaccctatctactt

SEQ ID NO: 377806 - DNA, 311 bp, Zea mays subsp. mexicana
gatagcgccgctcaccgtcaccggaccacagcagcgatcgatggctgaggtacacaacgagcggcccgtggggatggtgggcggcgctcgttactctcctgtggtccctgagaacgacctctatgccatcgagctcgcgcgcttcttggttttctattattttagttagatttttctctatgctttttttccttgtttttttttgtagtttttttctctttcttttttgttcttctacctcttttcttctttttttcttttttcgtatctttcgcttactttacttgtttcttttttaatctcctttcttt

SEQ ID NO: 377807 - DNA, 200 bp, Zea mays subsp. mexicana
gaagcttgcgttcttgtagtagagggcggcttgttttctgtagagtgagtgtgtttacaacatgaatagcatcactttttttgctatccttgtttatccttttctttcctgtcttctttaatttcttttacttttactttttttttattttcatattattctctcttaatattttattattactctttttttttttattt

SEQ ID NO: 377808 - DNA, 79 bp, Zea mays subsp. mexicana
ctcaactcctactgggtgaatgaggatagcacctacaagtactttgagatcatttttgttgatgaaccccacactacca

SEQ ID NO: 377809 - DNA, 118 bp, Zea mays subsp. mexicana
cgcgcctcaccccgtcccgcgcaagctcgaccccgtcggcaatttgaacgggaacccggctgctcatcgctccgtcaggaatcaggctggaacttgggaggaaaagaacctcaactat

SEQ ID NO: 377810 - DNA, 156 bp, Zea mays subsp. mexicana
tgttcctgtccaccggcgaagtcggccatccagagcatggataattgagcaggaagatgccatcacatcacggtcttccgtcgcgagattcacatcatgaagaagggcaactcaccccagcatgttgaagctcttctaagtctttgagagcgacca

SEQ ID NO: 377811 - DNA, 69 bp, Zea mays subsp. mexicana
ccacccgtccggacctccccgacccacccacccgcccttttgtatccacccccacccaaacacccaaag

SEQ ID NO: 377812 - DNA, 152 bp, Zea mays subsp. mexicana
tacatgtgtctttgtaacgcgctgacccatgtggcggagttgataggctaactccgtgtactacaaaaactatggctacaggactgccgctgatgttacaacatatgacataaaattcatacaactgcataacctgctataagaggacttaa

SEQ ID NO: 377813 - DNA, 275 bp, Zea mays subsp. mexicana
gttctttccacccagaccccccccatcccaagggggggctttaataaaaagggcggtgtttgctaaccccaagggctcctgccaaacattgaccaccatcgagcactatttcggccagaacaagactgcaaacgacggcactatcctaaatcaggcctacacaacccttaggcacatatgccctaccccacccagacatgttgctggagcacttagcgcgaaattgtgacccattctgtatgacagcctgcctaagtccacccttgccactggtg

SEQ ID NO: 377814 - DNA, 161 bp, Zea mays subsp. mexicana
ttccgttttaacacaacttcccccatcgacaaggaggggagcctttaaatacacgaggggttcacaaatcaactacttcacccaaactatcattaacatcccgttactgactcacaccaacattcttcaatcttcagctatcccccacatcacttagtttc

SEQ ID NO: 377815 - DNA, 205 bp, Zea mays subsp. mexicana
gttacacgttgcagcacccccctaatcggggggggctttattaactggtggcgagacaccagaacctttgtccacatacaaactctctttgattgccagttgcatactcttccacacaagcttttctcatgaggcagctcccgacgacattaagatgagacaggatgctcacaacaatgatctactcgtcatgaacatcttgctt

SEQ ID NO: 377816 - DNA, 268 bp, Zea mays subsp. mexicana
ccggtccggtattgcctggtccaaccactcctcctgtttgacgcagcagcactcctcttataggggggggcttttttaaatgggggggggataccataacttttacccacatacaccctctcttttagcgccctttgcatactcttccacagaacgttttctcatgagacggctccccatcacattagttttattcatgatactcacataactgatcaactcgtcatgaatttgttgcttaatggtacatgaccttactggtgattcc

SEQ ID NO: 377817 - DNA, 204 bp, Zea mays subsp. mexicana
gtctaacgttgcagcaacccccttatcgggcgggggttttttaaatggcggtggggtcccagaaccgttccacccatccaacctctcttttatggccagctggttactcttccccagaagaattgctcctgagacggctccccatcaccttagatttattcacgatactcatcttactgatcttctcgtcatgaacttgttgct

SEQ ID NO: 377818 - DNA, 191 bp, Zea mays subsp. mexicana
gtttatcgctccttcaactcactaatatgtcgggggccttttaaatctcggtggggttcccaaacctttttacccatccaacctctcttttatagcccttttcacactcttccccacaacaactactccttaaacatctccctatcacattacatttattcataatactcacattacttatcccctcatca

SEQ ID NO: 377819 - DNA, 228 bp, Zea mays subsp. mexicana
gtcttttgcagccggaccccccttattggcaggggggacagggtctggtgtcacgaccctggcttctttcaacacctgcaggcagactttgagggccagggggagtctgttgcacagagcaatcctgcaagagacagctctcgaccaaatgaggttgactcagcccgttgagcataaatgtgcagctcgagacgggaatgttgctggatggttcaaaccgaaatggtg

SEQ ID NO: 377820 - DNA, 213 bp, Zea mays subsp. mexicana
ctacaccacccccctaataccaagggggggttttatctaaaatcgggtggccttctcctttctacacatccaccctaacttttattgccattcccacactctccaccacaacaattgttcattagacagctctttcccaaattagctatatacaagacactcacacaaatgatccactcaacacaaccatcttgcttcatacctcatacctaa

SEQ ID NO: 377821 - DNA, 236 bp, Zea mays subsp. mexicana
gtttatttttgcagcagtccccttataggaagggggggtattttctcgggccagggacctgttatctctccccacttacaacctaactcttattgccagtcagatactcttcaccagaatatctgcagataaggcggctcttcatcacattatattggttcataacactcacgttaatgatattctcgtaatgactatcttgattaatggcccatgaccttactggtgcctcaaga

SEQ ID NO: 377822 - DNA, 224 bp, Zea mays subsp. mexicana
ttttatttttgctgcaacccatttataggagagaagggggggttttcaagctacgaggggttcataaatcccctgttccaaacaaacgtcggttgcctggctcataattttcgacacaataattgttgaatacatggctttgcctaacatgacgatgtgtgatgtgatggccctaaatgatactctcaccacggaccagttggttgatggtagggcgcttcttg

SEQ ID NO: 377823 - DNA, 211 bp, Zea mays subsp. mexicana
gtttgacgctggagccactccctaagggggggggcctttaggagctgggggcgagacactctctgttttctacatatacaagctcacttttattgccagtgggagactcatcaacagaaggtttgctcctgaaggggctcctgaccacataagtatgggacatagaactcacagaaatgatgatcttgacaagcatacgttgattgatggt

SEQ ID NO: 377824 - DNA, 205 bp, Zea mays subsp. mexicana
gttaaacgttgcagcaattctctaagaggggggggccttagggtctgggggcaagacaccctcttttttgtacacatacaacctcactttgatggccagttggagactctccaacagaagatttgctcatgaaacagctccttatcacattagtatgatacaagatactcacataaatgatcaacttgtcatgaatttcttgctt

SEQ ID NO: 377825 - DNA, 213 bp, Zea mays subsp. mexicana
gtttcacgctgctccaaccccctaatagggggggtttttattctctgggggttagacacccgttcttttttacacatccaacctctcttttattgcccgctggacactctcccccagaagatttgcacctgagacgtctccctaccacattaggtttattcatgacactcacataactgatctacccagccatgaaatccttgattaattgtt

SEQ ID NO: 377826 - DNA, 216 bp, Zea mays subsp. mexicana
gtttaacgttgctgcattccccttatcggacgggggctttttaactggcggcgaggcccctgtactgttttacacattcaacctctcttttattgccagctggttactcttctacagatgagttactcctgagacggctccctatcaccttaggtttatatacgatactctcattactgatcaactctttatgagcttgttgcttgattgtacatg

SEQ ID NO: 377827 - DNA, 206 bp, Zea mays subsp. mexicana
ttttcaccctcctcccccccccttattggctggggcctttttaactcgcggtggggttcccaaacctttctccccatccaacctctcttttacggccctctgcttactctcccccactacctttgctccttagccttctcctcaccaccttagatttattcacgatactcacattactgatcctctcaccatccatatctttcttc

SEQ ID NO: 377828 - DNA, 198 bp, Zea mays subsp. mexicana
gctgctgcagtccccccgtcggcggggggcgctttgtctcgtggcacgtcccccgttcctttcaccatcttcagcgacttttttatggcccgttgcagacgcttctccacaagagccgctcatgaaacggctcttcaccacatttgattttgtcaccacgctcacgcaaatgatctgcccgagacaagaatgttggtt

SEQ ID NO: 377829 - DNA, 215 bp, Zea mays subsp. mexicana
gtcttttgctgctgcacttcctccggcggcgggcggctcagtgtcaggttgtacgaacgctgttcctatcaccatcgtcagagtaattcctatagaccgtagcagactcttctccacaagaaccgttcatgaaaaggctcgtcccaacattagaataagacagccagctggcctctaatgatcctctaccgacgggaaggttggttgattgccca

SEQ ID NO: 377830 - DNA, 204 bp, Zea mays subsp. mexicana
gtccttttctactctacttcctccatccccatgggggggactctctaaaaccacgtgcgtttctcctaccaccatctacacacaaactcttaatgccttctccttactcttctccactacatccattcataaaacgtctctttccaacatttcaataattcatcctactcaccctaatgatcctccccactcttatatattgat

SEQ ID NO: 377831 - DNA, 167 bp, Zea mays subsp. mexicana
gtccgtttcagcagcagtcccctcaatcgcagggggggtagtctctggcgccacgaccggtgctcctttcaacttctacaacctaacgttcattgcccgccccagactcacccccacaaaaactgtgcaataaacagctctccccaacataagaaagtgacatctca

SEQ ID NO: 377832 - DNA, 209 bp, Zea mays subsp. mexicana
gtcaattgttgctaccatgccctaccgggagaggggggcaggttctcaagctacgaggcgtgcatggatccacagttccaaacaaacgttggttgcccggggcatactcatctacagagtatttagagcttacatgactcctcattacatgaggatgactgatgtgagggccctaactgagacgctcaccacggaccagttggttgatg

SEQ ID NO: 377833 - DNA, 209 bp, Zea mays subsp. mexicana
gtttaacgctgctgcactccctttggcgggggggcctttaggccctcgcgccacgactcctgctcctgtctacacattcaacctaactttcattgcccgccgcagactcatccacagaagatctgctcataacacggctcgccaccacataagaatgacacaagagactcacataaatgatctacccgccatcgaatatgttggttaca

SEQ ID NO: 377834 - DNA, 187 bp, Zea mays subsp. mexicana
gtcagacgcagcagcacccccctagtggggggggactttaggctctggggccaagacacctgctctgttcaccatatacaaactatctttgatggccagctgcagactcatcgccagaggcactgcacatgaaacggctccctaccacattaggatgacacaggacactcacataactgatctacta

SEQ ID NO: 377835 - DNA, 231 bp, Zea mays subsp. mexicana
gtcaaacgtagcagcactccccctctcggatggtacctcaaacacttgagactagataccagtactgttttacatattcaaactcacttttatcgccagctggatactcagctccagaagatttacacatgagacgactcgccatcaactaaggttaagacactatactctttgtactgttcacctcttcatgaatctgttgcttgatgatacagacctttttgatcattc

SEQ ID NO: 377836 - DNA, 230 bp, Zea mays subsp. mexicana
gtctaacgtagctgcactccccctataggacgggacctcagtctctcgggtcaagattctagtacttttttacacatacaaactcacatttaacgccagctggatactctgccccagaggactcgcacatgagacagctccccatcaccttagattaagacacgacactcactttactgatcaactcgttatgagtatgttgcttgctggtacagatcttgctgttcata

SEQ ID NO: 377837 - DNA, 223 bp, Zea mays subsp. mexicana
gtttgacgcagcagcagcccccttatcggaagggaccttagggactggggccaagacactagctcttttttacacattcaacctctctttgatggccagctggagactcagccccagaagatttgcacatgagacggctcccgatcacataagattaactcacgatactcacataactgagtaactcgtcatgaatttgttgcttgatggtacggatcttgct

SEQ ID NO: 377838 - DNA, 232 bp, Zea mays subsp. mexicana
ttctaaccttacaacactccccttatagggtgggtttttttaaaaatggggtggggtaccaatacttttttacacattcaaactctcttttttcaccatctggatactctcccccacatcatttactccttaaacatctccctatcaacttacattaatatactccactctcattacttatcacctcttcatcaatttcttgcttaattatacagctcttactgatcattcc

SEQ ID NO: 377839 - DNA, 170 bp, Zea mays subsp. mexicana
gtttttcgcagctccaccccccctatcggctggggggtctttttctggtggcacgacccccgctcctctctccacatccagccaatcttttattaacctgtgcagactattcaccacaagatctgctcaaaaaacagctccacaccaaattagataagttcacaaaactc

SEQ ID NO: 377840 - DNA, 123 bp, Zea mays subsp. mexicana
gtttttcgcaggtggagttccctcgtaggacaggtggaaaggctaggacaattggggacgcgctccagcctcgattttcacatgaaagatgttggcaccattggagagcgctacaacagaggg

SEQ ID NO: 377841 - DNA, 139 bp, Zea mays subsp. mexicana
ttcattttctcctccaatcccctcaatggaaagagggtcacttttaaaaaccaagggggtttcataaatcaccccatacaacctatcttttattgcccgctgcatactcttcaacacaagaactactcataacacatct

SEQ ID NO: 377842 - DNA, 224 bp, Zea mays subsp. mexicana
gtcttttgcagctgctatcccacaagctctcggatggaatctggaaaaggtcacgacacctgcatgtctcgacacatacaagctaacgttcaatgccagctgcagactcttcgccagaagaactgctcatgagccggctcttcactacattagtatgattcaagtcatctacattaatgactagctcaacacggacaggttggttgatggtacggacctagctg

SEQ ID NO: 377843 - DNA, 169 bp, Zea mays subsp. mexicana
ctgctccattcccctaataccatggtggggttttttcacatggggggtgtctttaacttctcaacatatacagccaaactttcatggccctttatatactcttccccattatatctgcacattagacatctcctcactacattagcatggttcatgatactcaccttaa

SEQ ID NO: 377844 - DNA, 211 bp, Zea mays subsp. mexicana
gtcaaacgcagctggatcccccttgtaggaggggcccttaggcactcgggccacgacacctgcacctttcaacatatacaacctaacgtttatggccagctgcagactcatccccagaggatctgcacatgaaacggctccacacgacatgagaatgatacaagacactcacataaatgagtaactagacacggacacgttggttacatgg

SEQ ID NO: 377845 - DNA, 382 bp, Zea mays subsp. mexicana
gtcctaatggggggtgttgagctcacaacacatggaacgatgagcactattgacgattcgaaccaactgtggtgataacctgacagataccgtgagcatcgagagctctaaaatggggtcagctagaccgacaacatcagaatctgtcaacatcacggaatgcagtacttggaccgcaagaaaggtgattgactcacggtatgcaggcgctttatggcacccaacgatgattgcactgcgagcgtgcctagtcacacactccgtttgtctactgcgaaaaccactggaaccatggtacgcacggccgaggccgctgagctactgatgatacatgatgtacgacaccagctacacggttaggaactgaacgtacgagaaatcc

SEQ ID NO: 377846 - DNA, 204 bp, Zea mays subsp. mexicana
gtttaacgtagcttcaactcactaaaagggggggtcttttttaactcggggtgcggcactcttacctttttacacatacaaactctcttttattgcccgttactcactcacccatacatcatttattcattatacgtctccttatcttctttgttttactcaacttactcacattactgataaacttaacattaatttcttgct

SEQ ID NO: 377847 - DNA, 341 bp, Zea mays subsp. mexicana
tcggttagacgctgcagcaacccccgaggggggggggggtatagggtctggtggcgaggctcttgcaccggttaacacatacaacctcacgttgagagccagcgggagactctccgacagaggggttgcacctgagggagctcccgacgacatgagtttgattcatgacgctcacgtaactgattcacaagacatgaaataccttggttgatggtataaatctagctggatgcaccatgactccaaaggcggaacccgctctgagttaaaaagcgaatagcacagccactcctactcaagaagcagaagccggagttatagcaagagtaggagcccaagat

SEQ ID NO: 377848 - DNA, 205 bp, Zea mays subsp. mexicana
ttttcacgttgctccatttctctaaatcccgggggccttttaaactcccggggggtcaccaaatcctttctacacttacaacctctctgttattgccctttacttactctccactagatcattttctccttagacatctccttatcacatttgttttattcatgtcactcacattactgatctacttaacatgcatttcttgctt

SEQ ID NO: 377849 - DNA, 227 bp, Zea mays subsp. mexicana
gcaacagcaatcgactaagagcacggggggactttttaaagaggcaggacattcacttcggtacacccatactaccagactataattgccatctgcgcacaaagagctacaagaagtgcaaaagaaaaagctgctacctacatgactatattgcaataagttcacaaaaaagatattcgacaacatgcgatgctgcttaataccaggaacgttcctggtgacacgaa

SEQ ID NO: 377850 - DNA, 264 bp, Zea mays subsp. mexicana
cagcaggatctcctgtagggcccaggagtactggctcagggggaaagaaacctattttgatcacgccatacaacctgagtgtgatagacctcagctcaccgtccataagcgtgccggttcataacacatctcgtcactatatgtgaacgacctatcacactcacatgaattctcgtcttaaactggcttcctcgataactagctcaatcctggccgctccatgaactatgctgatctcgagagttcctagcatttgtcacgtga

SEQ ID NO: 377851 - DNA, 198 bp, Zea mays subsp. mexicana
gttttatgtagctgcacccccccaataggaagggggggctttttaaaaaggtggggggttttaacacttttacaactgcacccaatcgtttatggccacgctggaggacatttacacacagaagttttccataaaacagctatctaccaaatcaattaattacaaaatatgcacaaaaaacttatactctagtcgtga

SEQ ID NO: 377852 - DNA, 274 bp, Zea mays subsp. mexicana
gtagcagcaactctctaatggccatggggggttttttgaaaaggcaagggactagattggttcaacaccgcctggcgctagttgagggcctgcctgtcactataaccaatagaggttgtgccttaaagggctcgctgctacataagcttcaataatgcacaccccaaacaatatttactattaatgtgaaccatactgaaaagatgaactcttaatagtgaatcaatgacacactgttatttagacacgctaacttaagagcttgtataagcca

SEQ ID NO: 377853 - DNA, 244 bp, Zea mays subsp. mexicana
gtttttcgctgcagaaacacccttacaggaaggggggactttttaaaggggcagggctctaacactgctaaacacatacaacctcactattattgccctctggatactcttcaacatagaatttactcataaaacgtctcctgactatatctgattaattcataagactcacaatacagatacacttaccacgactatctcggttaattgtgagaaccttgctttgtgaatccataaccccaat

SEQ ID NO: 377854 - DNA, 206 bp, Zea mays subsp. mexicana
gtcagacgtagcagcaacactcaaggatgaggggagtctaggccatagggacaggaccctcattcttttgtacacttacaacctcactataatcgcccgctagatactgtcaaacagaaggttcgaccataagaggtctgcttgccatatgagactaactcaggagactcacataactgatactctagcagtgccaaccttgctta

SEQ ID NO: 377855 - DNA, 262 bp, Zea mays subsp. mexicana
gtcttacctagcaaccacactcaaaagtgggggggctttttgttataggggcaggatccccattcttctttacacttcctacctccctataatcgccatctaggtactttgagacagtattatcgatcataaaaggtctgcctgccttcttaaaattactcatgatactcaaatgacttatactcttgctgtgcattcctttcttaattgtggaacgatggctgatgattccaagactcgtaacttgatgaacgttctgaat

SEQ ID NO: 377856 - DNA, 289 bp, Zea mays subsp. mexicana
ctcgaactttgcaatgacaaacacagttgtggggctgtttccatataggggcggctttcattttctatcttagacaccagcgttctatataaacactgtcgaggtaactggtgccagaacgaacgacgctgaaatgcttgcctgccacctgacaattaatcttgatcctgaaaagaggttgccaatggttgatgaatcgattattgagctggacacgatcagtacttacgctaagacacgtatcttgaaccacctttaacagatgccattcgtgaaggatagcagcact

SEQ ID NO: 377857 - DNA, 256 bp, Zea mays subsp. mexicana
cccatcggggtgtgcttttttaacttggggggggtttctcaatcttttctaccctttctccctctctcttattgccttttagatactctcccacacattctttgcaccttaaacatctccttacctcctttcttttattctcgacactcactttactgatttactcaccttgcataccttgcttacttctacaaaccttacttgtgataccagtactaagatcttgctcaataccttcattttttacgttaccaaa

SEQ ID NO: 377858 - DNA, 210 bp, Zea mays subsp. mexicana
gttaaatgtagcaggagccccctaataggacggggggattgtctatagcggcaaggatcttactcttgtttacacatccaatctcactattattgccagcgagtcactgaacgatagaagaattgcagctgagagggctgctgacgacattattgtaactcatgaagctcaatatactgatattccagtcatgacattcatgcttaatag

SEQ ID NO: 377859 - DNA, 226 bp, Zea mays subsp. mexicana
gtagcaggagccccctaataggacggggggactgtttaaagtggcaaggctctaactcttttggacagatccaatcacacgtttattagcagcgacagactattggacacaagagttgctcatgagagggctgctggcgacataagagtgtctcatgaaactgcccaataatgatatacccgtcaagacaaccttgctgaagagtataaaactgtatgtggataca

SEQ ID NO: 377860 - DNA, 298 bp, Zea mays subsp. mexicana
  unsure (1)..(298): unsure at all n locations
tttgttgatttacgcgtccgtttttccgcggcgggcgcgcgcgccggnnnnnnggggncttnttnannnntnccggggnttttaactttctacccttacaacctcactgtgatggccagggaggtactgttaaatagagggnttgaccctgggaggggtggggattacattaccataactcacgagacccacattacagatactcatgtcgtgccatccttgcttaattgtaaggactcttactgttgataccaggactctgagttggatgaaagacttgcagttttactgtgaccaa

SEQ ID NO: 377861 - DNA, 204 bp, Zea mays subsp. mexicana
tttttgacgctgcagccacccccaaagacggggggattttttattatagggacggttttctagctctggtctacacctacaacctcactataaacgcccgcggggcactttccgccacaagagtcgaccataaaaggtctgcttgccatatgagattgactcaaaagacccacaaaacttatactctggccagccccaccttta

SEQ ID NO: 377862 - DNA, 342 bp, Zea mays subsp. mexicana
cggacttgctccacggtcggttcctgacagctgtggtggtgttgtggactatgacgaggatgacggaggtggactagctgatgctgaacgtgcagaacatgaacttgttctagttggtggggtgtatcccatatacccggtgatgcacaagccagtggatgtgatacatgcagatggggagggtcgcaagaggcatagtatactccacctacatccaggagatgttacggcgggtgtgcctagatactaacattcatgtcacagatgtaggaaatatggatgcgtgtcacttggctacatcagccgtgccatgtactgaacccaatggtgattttagggagc

SEQ ID NO: 377863 - DNA, 449 bp, Zea mays subsp. mexicana
aactaattggtgccacatgtcccactgaggggctgaagccattttctcttcatggtctttccttgccctttttttgtggttagaaaccataatttcctttttgttgccctctatacagcgatggatgagatcgctttatggtttgaacccaaggagctggtctcttacaccagcaatgcggagaagtggatcttttgctttatttatccatttagttattttttttttgtttttccttttttttttttgtttcttaattatttttgccgacagaccatggcacatggatgtatataaagttctgttaccgttaccttctgagattttttgggaccctttatgtttttcttggctctttttcttgattggatatggaaaggattttttcccgtgtatttttggagggttgccttgtttcttatttttttttattctgtctctatttttct

SEQ ID NO: 377864 - DNA, 422 bp, Zea mays subsp. mexicana
cccacgcgtccgctagatcgcgagcggccgccctttttttttttttttttttttttttttttttttttttttttttttttttttttttttttttttttttttttttttttttttttttgggggccaaaaaaaatccaaaatttgccttagagtattgaaacaattctagggtctcccgggacaaaaaaatccaatttaccaaagattggaaattttaaacaagaacccaattcccagcaattttcttgggttgccccatgacaaggtgaaaaacaaaagggatgttttccccggaaacgataaaccatgaccctttgagggattcaacttccaatgaagcacacccccttgcttttcacaaaactggaaaaagggaaaaaatttggaaaatgcccacctgatcaaccatgggctgggacctt

SEQ ID NO: 377865 - DNA, 589 bp, Zea mays subsp. mexicana
ctcatctttctaccgtccttgattgcagtccttcctcccccaagtccctagagcctagacgaatggcgctgcagctcactgttccttcttcagttcactcatgtagtcctattcatgtatgaggtttttcccttttaaattcatatgcagaacatggtttgagcctcccatcactcagtccacactgtagttgacagacatcaactgtatttgtggttttaatagtttgtatcaggagagtgcatcttgatttactaaagctaatgtagtctcaagtttatgtataatcagttctaatcttgttttttattgaacaatatgtgtttctaggtccattaaccagactaaagtagtgcatattttaaattgaatatttttcttcttttcggtgagaagtgaaaagtggaagacatttcagttctgcacttctaagtaaagtatttctcttatactcttgttccaatcactctgttattgattgtttaataaatcatttcatatgagcagagcccttttctaatttctgatacctgtgaggagtcttatatcatttgtgtttaggctattatttatgattaaatattttttt

SEQ ID NO: 377866 - DNA, 122 bp, Zea mays subsp. mexicana
ctttctgcatctgcaagggcggaagctgccccgggcccaatataaaggggtgcgggtgccctgacaagcagggctaacccgagacctgctgacctgcgcacataccatgggattcgttcatt

SEQ ID NO: 377867 - DNA, 557 bp, Zea mays subsp. mexicana
tttttgtatccaacaatccaccgactaaaaaccaaaaatgtcgaccgaaaacgctgaagtgatctctcaaaccccagccaccgaaacaaacgtggaagaattaaagactgaagctaaaaaagttttagaacaagccgcagtcaacaacaagcgtagtctcgaagtcgctgacgaaacttccaatccagttggcgatgaaaccagtgatgctttagccgaagaaacagaaccagccaagaatggcaacaagaacaagaaacaacgtgttgccaaggaagacaatgaagacagcaacgatgtcgatgaagaagaagacgaagaagaagatgaggaaggcagtgaagctgatgccgattacgatgaacaattgtccaacggtgctgccgatgctgacgccgacgatttgaacgaagaagaagatggcccagaaggcgacgaagaagatgttggtgatgatgattagattcgtctaacctactctgacattcacttgcacaccatttgcaccattcttctttttcattcttgcattgaaattccacgctgggtgctatgaa

SEQ ID NO: 377868 - DNA, 478 bp, Zea mays subsp. mexicana
ataatcattctgtccaacaccggcaagcgaagagaaccgatgccatagtcggagcgtggatcgacatgcacacaaaggcctggatggaacgagctcaacacaacagaacagccaagcccaacaaaagaacccagacgctaggacaaacactgttgcgagccaaggccagaagacccttgaacacgtttacagattcatacgaaggaaacacagacacctgcccattgaatgaccacgcagcagctgatgtgaacatggaaggtgtcatgtacacggaggacatcatacggactgtcagattcctagcgaaggacaacatcgtgagacatgctgcggacggcaaccgattgcaccgagtctgaggcctcaatgcggaatgcccgtggatcttagggcaagaaagcagggccagggcacatctgactactgttgaaggtggagaaagctgatggtggaaccacactggcaaatgtggcga

SEQ ID NO: 377869 - DNA, 221 bp, Zea mays subsp. mexicana
ggactttgtggggaaagtgtggtggttgcggtactggtactgtaacagctgtcagagctactttctcaccaagggctggagccgttttatcaaggagaagggcctccaggccggattacgtcttccgttactaccgttcctcggtcggcgcctacagcatgctcttcattgactgcaagcatgcgactctgcagaacattctaactacttacgacgagccg

SEQ ID NO: 377870 - DNA, 383 bp, Zea mays subsp. mexicana
tgcataccctcttgtcaccttagaagcacgcctcgagcgcagttctaatagccaactgggctgtgatacaggaacacagtgtaggtcagggacctaccactatagcccagagcaagatatggcctcatgtgaatacctactgaatcattcaaggctagggagccgtatgaccaccaccgagatcggatgaagacttagatcttctagcactgaaaagtaccatactaagtacctacagaagggcggacgaatcatgcttggggctagatgcagccattggctggacagaccgactacgatgcttgcgtagagcgacatggaccatgcgtgcatggtgtgaatcgtaatgaataagggatgcatcaaaggccgattcgatactg

SEQ ID NO: 377871 - DNA, 370 bp, Zea mays subsp. mexicana
ctgactcgtgggcggacgcgtgggtaaaaacaaaactaccgacaaaacccaatttcgagaacaagaagaaggccacaagttggcatgtataaagacttataaacttgccactcaagcagacaacctgtaatggacaccattagaagacaacgccgtctcttacagcctcacctgatgtgaaaggaactttgtgctgatggacttagatgacctactcgctccttcaaggtgatttcttcttaacttctagatgcgtacctcctgttggaagaacaacaacgagtccggaaactgacgtgtactcatgctgcgatagacgaagcttacgctttagaaagatctatgcgcgctggggacattagagaacaga

SEQ ID NO: 377872 - DNA, 482 bp, Zea mays subsp. mexicana
tcgctgacgcgtgggggaagatgatgaggcccgttgagcacatcagcaatggaagcgtcaaaagttgtcgggtccatgacatggtacttgagtacattattttcaaggcagcagaggagaatttcatcactgtggtcggtagccactggtccatgtcaacaagtagcaagaaagttcgtaggctcactatccatggcagtgaccctaaacgtgcaaagaatgttgacagtatgaacttgtcacatgtccgatcactgactgtgttcgagaacctggacaaactgcgcttcaaatcatttaaaactggaatagtgcaagtgttagatctcgaaggctgcaaaggtttcagggaaagcgatgccaacgtttcagacatatgcgaaatgattctacttaagtatctgagcctacggaaaacagacataaaaaatatccccaataatattatcaagctcaagtacctagagactttcgatgtgagg

SEQ ID NO: 377873 - DNA, 294 bp, Zea mays subsp. mexicana
atgcgttggttaggactatgatcatgacaaaaggaatcatactgctcatgctgccggtcgcggcgccggcgccagatgcacgtctggacgcataaccagtgtccccccttcacctgcttatgtgcactccgaagagtgggaggagcaaggagatcatcataacatagggcgcgtgagaacgcggctacttgcacgaggagggagagggccaggtggctactactgaagtggcaggtcgtggtgtctaccgttatgattatggctatgcccgcagaggcgggtactatgaagagc

SEQ ID NO: 377874 - DNA, 548 bp, Zea mays subsp. mexicana
cgatccgatcccccaatgtctgacagcagtccagctcccggtacgcgctctcctcacccatcgtactcctatatgcaaactgtcaaattaagcaagcacacaggagatgccgtatatcgtttacctcgcatgctaattcgctggcccgttctcttcgtgctggtgctgctgcaggcgcctactactccggccctcccgccgcgccgccgcccgagtctaagcccgttgacgactgccaggtcaacgccgatgttcctggtgcgcgcactacactacactacagatccgatccaagcgtttcttctcctaacttcgtttctaattctccctccaaccacggttgcgcggatgtgtctaacgaccttgttggcttgtttggcaagagcaggctactactcctcctccgtccctgctgcgaaatctggcgccggcggccagggcagctccgctgctcctaaggaatcgggcttcttcgccagctggtgagcatccggagcccaacaatcgatcaaaaaactaaataaatcagtcgctgttgcctgctttga

SEQ ID NO: 377875 - DNA, 178 bp, Zea mays subsp. mexicana
tcgatctttttacagagacaaaggagaacctgaggaattggcactgaaccccacccctggcacccattcgacaacatggaacccagccacttcatgaggaggatgcgcaaaacaaggacaaggggagacacgcgtcaacaacaggctacgagcacaaaactgcaaaaaccaggagaac

SEQ ID NO: 377876 - DNA, 312 bp, Zea mays subsp. mexicana
ttcgtttcaggatgcactgctgtgggcagatcctgctcagccagcacttgaggcccaccagatcctgaacttgctcgcgcgcaagcttgcggacggcactaatgtttttcttaagcctggtgatagggcccttagctgcacttctggtccaccaggccatgtggaacccaaggggcgacctggggatctgcgatggatactacttgttctgaaaggcaacatggagaacatgactttgtataaccgagcctccgaggtgccatgggtgcatagagctgacactaagccgtatgcccatacccgtctgttctt

SEQ ID NO: 377877 - DNA, 247 bp, Zea mays subsp. mexicana
ttcattcgaggctgagcaaacaaggacagtcacgcagcagccaggagtgagtatattgttttataagaatcgaggaggcaggaacattgcatagatgaggcaagcgacactgcgaatacaccataggtcctgaacagacggctgcacatatgcacatggtggatgaaagtgccaattggcatgaaggaaatgatgaagtatcgttacaatggcatgggtactacagaaatgcgaattgacgtgaagc

SEQ ID NO: 377878 - DNA, 443 bp, Zea mays subsp. mexicana
ggctcgcctgcctgcacgggcccggacttcctggctggaccgacccacgcgttcggttgtcgaggcgcctatacggatactccctgttcaccttgattccagcatcgattctgtctattgtgccaatagaaatattcagatgggtgattgctgccgttgccgggatgatgtctgctactctcgttgctgacaatctgcgcgcgcacattaggaagatccagtgagcgactggtcctgatcgtggcaaggatattcctgttgcagctggggcttgctgttctgctgaaactctatttcttcacgatcactgggtagggttatttacatctgcgcttgtactagtcaggaaaacacacaattttccatgtggagtcacctccatgttcattggacatcgatgtaatttcatcgggtatacaacgtgttgagcaccaaaaaaaaca

SEQ ID NO: 377879 - DNA, 230 bp, Zea mays subsp. mexicana
gtgcctggctcgcaggcaactgacggtcgcgaacacgggggaccgcccttcgattctgagccgaaacgctgaggccatctagaagatctaggacgaccacacgaaccacctggtgtagctcacgaggctggccaattcggtcggcctcattctggacggttaccctaacggagtgttgtagttctcccgtcctccgtacgactgggacacgtaggctaactgctcgtacg

SEQ ID NO: 377880 - DNA, 223 bp, Zea mays subsp. mexicana
gtcatctaacgagcgcatacacgggttagatactgatgtacccccatggccagtcttaccactactctttcttactcggatagtcaccgtaaccagctgaaagagacctgcctgtgcctgctccacacacccagtgaggtcaggcgccaaccaagctcatgccatagacagctaggcgccgattggcatcaccgccacctgcaattaacaactggacagtgta

SEQ ID NO: 377881 - DNA, 511 bp, Zea mays subsp. mexicana
ctagttctagatcgcgagcggccgcccttttttttttttttttttttgtatttttttttcttgagtttatttcatagcaacaacatcgtctagagttcttgaccaaccaaaaacaaacaaaaatctaggaatcacatggtctaatctctgtctcctagcatttctgtgggtttccacggttttcagtgacacctacaaacatttcattcctgatatgggatggggaaggaacgaccacgacaaacgtacgtgtacttcggaatcaaggacgcttggctctctgtaacaggaaaccaaccatcatgacagcgcagcatgtacagctaaccaccagagtaccacaggttgtgcaagctaagggcacgggaaaaaaatactcctggacctcaaccgcttttacaagcatgtaccacttcggcgctgttcatcgctgctccacagtgagttgtcaacttccgctcttcggcgcgggctattgtatcgttcgatgggtttgtacagacgactgtta

SEQ ID NO: 377882 - DNA, 333 bp, Zea mays subsp. mexicana
aaagctggcatcgcccgctgtaccgacccggccttaattgctggaccgacgcacgcgttttgttttggtgagcgtatgtcccagttcaagtcgggccttatttttgcgcacacgtgggaagaacaccgggggacgaccacttctgaatgtggtaggaagtctagccataccacctcaagatcatgctggcctggcggcaaggcatgagcgagaagctataagaactgctagaaccacaatgggaagaacactagtgtgaggcagccaaagagtggactcatgaacagctgtcgggccacagggggggatgaggaacctgcaaaaactgaaaca

SEQ ID NO: 377883 - DNA, 419 bp, Zea mays subsp. mexicana
tcttttttgtaactactccagcttgaaggacccaaggtgagctagtttcaccattggtagagatggccaaaggtggatctttcttattgaacaagaccatgttgctgaggagtcacaggcgctgatcgaattcagaaaggggatgaagagctatcgttccgaaccagcgtcagatactgagagagaggctgatgctccaaccagagtagtagagggactacaatcctccgatccttgaaaggaagcttaaactaccgacaatgcatacgatgcaggagatccaccttacgcgggaactcagaccgtaggaaggaaagctgaaactagctcggaataatgacaaagtggcgccgtaccattgatacagacgacgaagattagtctcgaaatgccagaccgcctcatggggataaaatatg

SEQ ID NO: 377884 - DNA, 349 bp, Zea mays subsp. mexicana
gcgagagtcgataaaatttgttggtgatggatatacccattgtgaagcttccggagttggtaggagctacactacccgctgcggacgtcgagcaaggggaaggcggcggtcgttcccccggcggcggaagacgaagctaccatttctcgtgcgccacgggcaaaaccatcttcagatgtcagcaagagcatgtgtttagacctttctgtgaaggataattcctgccacacacccacggaggcactcaatccaaacataccaggagctaagccaaggccaacacctttctggaactgtgactccggtgttctggggtttcggtcaaagagatcggaaagccaggggaggt

SEQ ID NO: 377885 - DNA, 322 bp, Zea mays subsp. mexicana
ctccgtttttcggcggcatcctcaacgagacatcgtccctctttatccagaggttctcgctgtacaagcagatcgagctgttccagggcacgcaggccttcatgcgcgacaagatcggcaaggcggcggccgacaagttcttcggcgaggggtactacgtggtggccatgggcagatgcgaccacgagcacgactacctgccttccggctactgctactcgtggacctacaacggggacacctttgtcaagtacatggtcagcaccctggaggcgcagctcaggctgttgcacgcgctgggcgcccggcggctgaccttctt

SEQ ID NO: 377886 - DNA, 263 bp, Zea mays subsp. mexicana
gagttttgccttttctattagctaagaaattaaaagtgatgccaaaaattgtagaaaaatccaaaaaaatagcaagacaaatttctgttggatatctaaattcatgagctctctggtaaagttggatttaggatttttagggcaattataaaatattaaatgaattaaaggtgctcttggaaaaactattaaaattttagaaataagaattgtgcatcaaaaatcatgaatttctttttgagaagcttgttatcagaagtttg

SEQ ID NO: 377887 - DNA, 422 bp, Zea mays subsp. mexicana
cccactcgtccgcgtggacaaaaatgggtcgcatgtggctgaagcagctctcaagtcactcgcaacacatcttgaagatgaagcctccagggccatgatagaagggatactgaacaaaatatgcaaggttattgctgtggatgctgttactgtgatgtccagctgctatggttcacatgttctccgcactctactttgtctttgtaagggtgttccatcagattcactacaagacttccatactactaagagatcttctgttctagctgagcggctcagttgtgggacaaatcagtctagtcgacatgttccaaagaattttgaaaatggtttttcaggcatgtttaggtcttttgtaagagaaatgctacttaatgcaaaagctgacatttgcactttacgagttgacaagaacagttgcc

SEQ ID NO: 377888 - DNA, 507 bp, Zea mays subsp. mexicana
gcagtacacttctcatcagccatgaagctcgtcctgtgcttctgcatctgtgtcgttctcgtcatcgcctcgtcgccggtcacgctctctgatagccgccctgcgatggggcgacgctggctgcgagacgaagttgtcattgccaggggccctgaaggcaacacgacctctgcctggtcggaggaggcgccggggatgataccgtacgacgggtcgaagaggctcagccccggtggtcccaacccgcagcatcactaatcgtcgtccgatcttgttggcaagtgccactgcggacatcttgctacgggaatctgtggttgattactacactttggttctgatcagcttttcttttctgtcctttctgatcagcttttcttttctgtcaaggccgtttgatcaaggagtaaacgtaacaaattattgccacgatttttctgaatgtatccaagtcatgtgagtgataataatgatatgctgtcattaactaaactaaagagtcgttgc

SEQ ID NO: 377889 - DNA, 77 bp, Zea mays subsp. mexicana
cagtttcagcgacattgagatctataagcataatagggaagaaagaatagcacggacatggttgtttacttctctta

SEQ ID NO: 377890 - DNA, 208 bp, Zea mays subsp. mexicana
gccctaccatgaacgaagcttttgattttgatattagcgatgctgacactacaagaagggctgatggatatgaaagcaacacaaggcagaatgattcgttgccctctacatcaaagagagatccagagtcgaatcattgggcaagtgatggccagagacaactgactactggtgggagcaatagctcaacatctgaaaggggctatgg

SEQ ID NO: 377891 - DNA, 261 bp, Zea mays subsp. mexicana
caataattcatacaacggcaaccttctgaggccttgccatataacagcaagcgctttgcaacaaatgatgacgaaatggatgatggaactagaaagacactaatctagcgcgagattactctaggtgaggggagatctatactaattgacaggaaagcattgacgccgatgagacgcatcagcattcagtttacgattgtgagagcagaatattcatggacatatagctagcagactagcttgctgcatggggctacacat

SEQ ID NO: 377892 - DNA, 119 bp, Zea mays subsp. mexicana
cggtcccaccagcgctgcaagaggtgattctctgtagtcctctctcgattttagtttttttcattcaccatgagcttactgaacctagtcactatttctgaatggcagccattactata

SEQ ID NO: 377893 - DNA, 55 bp, Zea mays subsp. mexicana
ccctcgcgtccgcgacaacagcgggactgttgttgggatcatgtgcaaagatgtc

SEQ ID NO: 377894 - DNA, 154 bp, Zea mays subsp. mexicana
cttccggagtgtccggcgattccctggctgccgcaaattgggggggacaaatgttcgtacgtgctccagcgggaaaggagatcatgatgtataattcacagatgcatatggcagtgtttgatttccccacatttgtcaagagcgggttacacgc

SEQ ID NO: 377895 - DNA, 126 bp, Zea mays subsp. mexicana
cggacttgtttgtcgcccacgcgtccagatctagatggcggggtttcattaagataagcacgcccatcaacaccaaccaccaaaatgaaggcacgtaggcgagcaccaacagatacatcggccatg

SEQ ID NO: 377896 - DNA, 483 bp, Zea mays subsp. mexicana
ctcttttttgcctgcaggcccgtacaaccgcaatccgcgcgcctttttaatcccctatggccttctgccactgcaatccaaaaacccctcattttgctgagaaaataataataaatcctctattttgcggcaatatgtcgcttcattgccattcatgcttgctacgtcgttctgaaacattcagcagctcatacataatataaccagatttctgaatgtgattctctggacagatagttcaggacacgccacggtagcatggtggtttgattacttagcataattaacattaatgttactctttggaagagatgactatgcaaactatggttgtttggcgataggacgagattcaatttgtctcattgcaattgctataggtgctaaaccctataactgatttccatacctgtgatgtcactgtgtagactgcacttactgtttcagacccacaagcattctattggctctggattgatcaca

SEQ ID NO: 377897 - DNA, 415 bp, Zea mays subsp. mexicana
gtcgtttatttgaaatggacgatgatggctgtgaaaggacgatggtggtggcaacggtggtggaaggaggcatggcggcctctaacggctagtcgtgggcatggcagacggctgcatctggtcggcgcaccagcgtttggaggaggggtcggagatcggcttggcatagagaggcgcaactgatggcagcggaggccggctcggctcgagaggcgcgggcggtggagatggaggccggcttggcacgagagacacggccgatggagggaggctggacttggcgcgaggcgctttcggtggacgaggccggcttggtgcgagaggcgcgactggcggtggaggacgcgtcctcggtgcgaggaggagctgccggtggatgtggcgtattcttcggcgcacgaaggctggccggctg

SEQ ID NO: 377898 - DNA, 228 bp, Zea mays subsp. mexicana
gttccttagtagttctttctttcttttcttttactttgggggggttttggattccttactgcttcagttttcccccttttatatatctgatggatgtagaaggggacagggaaatctttgtttccagaaagaggatttaaggctgtagcaagcagtgaattatgaagatcatgtacagatacactttgatccagagaatggggattataatttaattcagcatcttca

SEQ ID NO: 377899 - DNA, 461 bp, Zea mays subsp. mexicana
ttcctgtagctcatgtggggtaagcctcaagcgccagggtctgtattaagatgaagctggaaggcaagggcatgttgcacatggaggaatgctccccagggctgttatatctcagcagcagagcggtgaccagcctcaaccacctggaacggagggacaacagcaagcaccatcaggatcatactacttcaacattccagcaccgccaggagcagagcggacactgtacccttcaatggatccccagaggatgggtgccttggtcaagtcacaggagggtgatggcaaacccggtccacagcaggctgcccaagctcaggcatcaagcagctcaggacagagctaccctatgccaccaccatattaccatggtcagtacccaccctactacccaccatatggcggttacatgcccccgccttcgatgccatacccaccaccaccacaggatccaccttatc

SEQ ID NO: 377900 - DNA, 447 bp, Zea mays subsp. mexicana
gaactattgctctgttgggatggctttttggcgaggggagggttataggggataaattggatcaaatgcgctttgcttgtcgcctcattgagaatgtctttcaaaggtgaattagtttgattagacggaactgcaggaatcgtttagtttctacgcgctaaagaaaggctgtttagaggaggtttaagtcatatctgtccatcatggaatgcaatgttcaatttgaggagcagcctgtaccgatcaatggaccctgctttctcattgccccacatcgtgatgaatttgtttcatgcaacaagttcagttgatagagaatagagaccatgttttagattcttgaagcaacatatatagcgtgcttgaatatatcatatatattctatgtgggggggctggagtctgcaactaccaatgttgggtgttggacatgagcttgcttgctta

SEQ ID NO: 377901 - DNA, 154 bp, Zea mays subsp. mexicana
cgcgtgtattaaccctcccgaaaccctccttccccgatcgaggccgttcgtcgacgcctcctccgccggagtgggccgacctcccggtggacgcggtcctggcggtgttcgagcggctgggcgcggcggaagtgctgatgggcgccggggtggt

SEQ ID NO: 377902 - DNA, 531 bp, Zea mays subsp. mexicana
ccacctcttaagattaactgtgaaaataagggtgggttgacacaagccttaagagtactctgttgaagagaagggaagaaatagagtataagagatatgcaagttatgaagagtttcaagtctatctttaaactctgatgagtacaaggtcagcagtctagtgcttgctttatctgttgaaaaatttgtgtatcaacatccagggaaaggaatcaaggttcaaggatatgaataatcaattgttcctttacttgactaaagtcaagtattcttttcaggattttcttgtatactgttcagaattgtgcaattaattaaagctaaatcttgttatctgtaacagggagcctcgaggatttgggttcattcaatattatgatcctgaggatgctgctgatgcaaaataccacatggatgggcaaattctttttggcagggaagttactgttgtatttgttgaggagaacagaaagaaaccatctgagatgagggctagggaaagagtcggtagcagggacctgtcttatgatc

SEQ ID NO: 377903 - DNA, 486 bp, Zea mays subsp. mexicana
ccaagtcccagattgccaaatcggatcgggtgtatatcctgtgtttttctgtattctgagtacatgctggagcatgaaaacgttccaggccagagagcttgttacagaggagtagttggtacgacacgcagatagcgtgcgtagcgatctctcgttttgggcagttacgcataccaattaactgcgacggtgctggtcctggctcatcagtttgcaggaaatggagggcgttgacctcggatgatgaactgtggcgcaagctgttcaacgacaggtggggagcggacgccgcagcgttctacgcgccggagggatccaagtcttggaaggacgtcttcgccgtgcaggaccggtgcgaccgatacggactgggtgtcaggatcatcagggaagggaaggactactacctgatctaccagggcgagatccagaggtacttgggctcccgccaggacacagatggcgactgcggcgaggacgtgccac

SEQ ID NO: 377904 - DNA, 262 bp, Zea mays subsp. mexicana
gttgttctcagtgagctgagctcctccggcgccggggggccgttttgacgcgacgagtcgcgggcgggcttgcggcgctgtacttagcacgtactcacccccagtgtgtgtggtataatcggacggatgctaattggctctctcgttctcgtagtagggcggctgatgatgcgatctgacgagggtttgtgaatttggcttagagtttggcgtggcgtggcgtgctgtttcgtttggagagttggaggggtgtgtgtagcgt

SEQ ID NO: 377905 - DNA, 464 bp, Zea mays subsp. mexicana
tgctcctcccgattcttccattccacggtgatccctcgcctggttctcctccatccgcgcgatccgatcgcctcgagcccagcgagcgtcgccgccgttggtagcgggccgtgctgcgtctccctgctgctgctgctgctgtaactccggccggtggagacggtgccggcggcgaggcgaggcgagagcgctaacgcccgtggcctgttcgacgaaatgcctacggggaaggaggggatggaagagcctttgccgaccgacgccgaccacattggggctctcccggacacagtgctccaccacgttctctccttcctgccgtcgcaggatgccgtgaggacgtgcgtgctcgccaagcggtggctcgacctctggaagtctgtcacggcattgcgcattggtgaccgtgacatgaggaagttgtggaccgtgaagggcctccaggggttcgtggaccattttct

SEQ ID NO: 377906 - DNA, 247 bp, Zea mays subsp. mexicana
tgtcgtctcttctcgagccgcacgactacatcggcctgtgcgctgtggtggcgtccccgacgccgagctcgtcgtcctgctcgtcctcgtcgaacccaggcggcgaggcccgcggcctacgccttacgcttcgcctcggtctcccggggtcggagtcccccgagcgggaggttcgtccccgcggggctcaccctcgggcctctgtccccgtccaccaccaaggcggcctccaagcgcgcctttcccg

SEQ ID NO: 377907 - DNA, 410 bp, Zea mays subsp. mexicana
gagagtgttgtgagagagagagagagagagaacctggggaaggctgtgtctccttcctcctcgccgatgagccaggtgagctgctctagcaatgagggcaaagaagttgacttgcaaatgctactaaatgggcgaattagcagtcagttaatgtagcagcatagactctactgatacaagagaaaatgagcgtgtatgctttgaaaagtccgaagggaccattgtttcctttgcgatcaattcttgtcttcttaattgcattatatgggttctacgtctgctacttcttctttaatcaaattgatttagaaaataaagaaaatttgatcagtggagaagaacaaataagaactctttgcagaagacatacaatttcaaatgagctgatgcaatatgtgcactttccaaaa

SEQ ID NO: 377908 - DNA, 505 bp, Zea mays subsp. mexicana
tttttccttgccatggtcaaggacgtgatgtcgataaagaagttcaaggatcggcgccagatctccgacaaggtcaaagacatcaagaaactctccaacgagttagctgaactttgtgccaagtacacggtaaggggtgtgggtgctgatctcgccgcgagcaccggcatcgacccccgtgtcatcaatctgtacaagaaagagacagatctcgttggcatcgaggagtcaagggacaaagtcatcaggatgctgtctatggggaccaaagatgacgatgcgcatgagtctcatcaggatctaaagatagtgtctatagtcggggttggaggactaggacattcgagaagatgctattggaactcgatcgtgagtataaacaagttgacatggccagatgggatctagaacaatttataaaagaactggatgaattcttgagggacaagaggtacttgatcgctgttgatgacatatgggatgatgatttatggaagcggttaat

SEQ ID NO: 377909 - DNA, 551 bp, Zea mays subsp. mexicana
ctactgcagaggctgcagaggaaaaaatatccatacttcaggaaaatgaaacattactcaaggacaatgaacgactcaatgctgaaaatgattccttgatgaagagcagggaaggagctaatagtcaggttgccgctttaaggaagtctttggaagctgcacacaaggatataaaagacaaggaaaaaatgattcaagacttgaggcagtcactggatgtccagaggaaggagctgaatgactgcagagctgaaatcacagccctgaagatgtacatcgaagggactcaatcaatcaaacaattgtttgttggaactagtgatggtgtaaagtcgcattcctttgctaattctgtgggagcatcatcattgaataatgaagatgaagattcaaaaggatctgaagccataacaaataagctagcatcagcagtaaatattactgatgatacgcacaaagatcgccaagttctagaaagtagcgcttgagtgtcctcaatttcagaatctcagtgtctttacagcttgtgagatgacagtattgtacatcca

SEQ ID NO: 377910 - DNA, 449 bp, Zea mays subsp. mexicana
gttagcaacaagggaaagaagaccgaggggggactattgaaaacagagccgacctagaatctgtaacaaatgggacatatgaaagcctgtgcgagtttgaccgaaggaaggtgacttactgtgaacaacatggcaatcgcgcaaagcgctactgggatgattccacagcacccactcatgatatatacgacaatggtctacggagtgcgagccaggaacattattttgttatgtagcctacataggacagccataaaagagaccactaccgatgcccactcatagtgggcagtgggacctaactatgcctattcgctttacagaatggctttgaactaaagttcgcgaataaacaagcaatgcccatggctgtccgccttcatgtgtgaatctctatgttgtgaacataggtagagcatataatgatggccaatgggatgatttgaccg

SEQ ID NO: 377911 - DNA, 320 bp, Zea mays subsp. mexicana
agtagtttaactgcatggcatggtaaagaaggccaagatggtcatgacatccacagctgatacaaccacacaagccttggtctttgagtttctgcatggctttcaggatgttctccatgaccttggcgagatcaaggaaaatggtggttccgctactagtccacatgttgaatcagctgccgctcaagacatgcctctacttttgctagaagctgaacagaacattgttgatgccgatcaagaagctcagcatcaggaagaggaagagcttcacatggtggatgatgcaacaatgaccctcgagcctatggatgaggagg

SEQ ID NO: 377912 - DNA, 449 bp, Zea mays subsp. mexicana
gaccttctccaccgttagctggactggggggctatttaaggctcttcttgtgatgagaagccacttacaagtgaaataacaggcagtgctacacgataatcaatgcactaccctcatgcaaacttctgcactgttgttaacggaaaatacatacagaccaacatgatttcctcgggacactggatagtgatcagttgatcagcacagctcatctcaacgctgtaacaacagacaggttccttggaccggtacaaccctccaggctccactaccagagattgcctgcaaagatgcactcaccaccttcagggttcaggtgacgttggcttcacattgaagtactgctttgagaagcctttaaatagcaggaaccgtcacaaagacaacgggagtgacgccttagggaatatactctggcccggcgctaggatggctaggggatcatatct

SEQ ID NO: 377913 - DNA, 220 bp, Zea mays subsp. mexicana
  unsure (1)..(220): unsure at all n locations
cttttctatggcgcatgccaatcgccattgaccggtgttcctttcaaaactctttatctgctttcttactcgctgcccttttgaagcgaantgagatctgtgcatattgcatttgcatgatctgcacaccctccccccacccaccccagaaaaaggaaacaactgcagtgagagcgagctactggtgaacagaacagaacagaagcgcatgcatccatgg

SEQ ID NO: 377914 - DNA, 494 bp, Zea mays subsp. mexicana
tgcatttccatttcgcctcaccggagatgagatcccatcgacgcgacgccgccgcctccttcctcctcctctcgtcggagccaccgccgggagggattcatcgcgagcggcggctgaattggaacaggtgaaaccaatgcagccgcacccgcagccagtgaggagatcgtcgtctccggcctccgggaatagcgtttttgatcgaagacgcttatgaagtattttcagaatgcggagatgaaaggttcgaagcagcctagaagatccatggacgaaaatactaatatgataagtagttttcatcgtacatatggagtgtatgttaaactaaagaaaaacttctacatggttcgtgggacaaaaatgatgatactagtgaattacaacttaaatatgtggccaatatcatgatcatctcagaaactggctggtcatcacagcgagaactggaatcaaataatcgaaatgccgacgtatcacagaaaaagataagc

SEQ ID NO: 377915 - DNA, 98 bp, Zea mays subsp. mexicana
tcgtttgttcatgattgggcagtttggtgtcgggtgctactccttctaccttgttgctgagagggttgttgtgaccaccaagcacaacgacgactagc

SEQ ID NO: 377916 - DNA, 441 bp, Zea mays subsp. mexicana
ttgatgctcgctgttgctgatcaaacacttggggaaggctttctggatgatgtaactgaagatatcaatatgagctctgatgcctcagagcacaccagcataaacaacaattctgtcgaggatgaaacagggactgaagatgtgatgcaatttttcctgactaatgagagaatcccagaccaacgcatgaagatagaaatggatctatccattacggtgaatgatccgcataagcgtctgcatgtggctgtgtgttgggaggacagtggactggaccaatacaactttagttctttgaattcttttccagaagtttacaaagcggagctgttatctaggaggccacaggacacaagttctctatatgcatgtctgggagcttttattaaggaagaaccattatctcagaagacatgtggtcctgcccacgttgtaagagca

SEQ ID NO: 377917 - DNA, 94 bp, Zea mays subsp. mexicana
ttaaattgttccacctctgctgtcctccaaaggggagggtttttataatagggggcggctaggtgagatccgagaccgagcaatgatggggcct

SEQ ID NO: 377918 - DNA, 203 bp, Zea mays subsp. mexicana
  unsure (1)..(203): unsure at all n locations
gatgcgcccaaagagcggggcggttttaaaagcatttgcggggancacccacggggcaaacgcagccccgcacccgggtgcaccaagagcgcccgccgccgcaccgatcgctgagtgaagcacggaggcggcaagcgcagcaagcccgatgggcgcgacaagagcgcacaggggagcaccgacaaccggaaggctgatggagg

SEQ ID NO: 377919 - DNA, 126 bp, Zea mays subsp. mexicana
gtaacctctcacgactcacgagcgctctctctgggaaccttacttgctacagtaaatcccctctctcgacccctcttcctcctcgattccggcggcctcgtcgccggcggcgggagggagaggggc

SEQ ID NO: 377920 - DNA, 445 bp, Zea mays subsp. mexicana
cacatttgattgatatgttgctgccctcaaaggggagacactgattaggaagcggtatgaacggattcagcctgtcaacaaggaaggtacaccggagagtccgcctgtcaaggagcaagctacaacggagagtgtcaaggctaaatgattcatggttattgctccgagaaagatattatccactcaaaacactgaacataaatgtgctgtacctttggaaggttgaattcaaagttcgtcagcatcattatgcatctagtttttgtttaactacaagatggggtcacagtacactgatattttagttgcaggtgatgtcctgtaaattttggtctgctgggccatgatcaaatctttagatgatggcctttttttaggttatttggccaccccctccattttaggtcattaattcactttgggaattgtctttttttttataaaa

SEQ ID NO: 377921 - DNA, 233 bp, Zea mays subsp. mexicana
caagattctgagcatctctgacgctggcggcgcagatggggcatgttctactagaatgagagcgttcatcaaccgagaaggcattgacttcaatgatgctcaaaacacgcaccctgcgcaggaatgggagctggcagagaatttgcagggcgttcttgagtaccaaacaaggtaactcaaggccccagggtggggctaacctaactctacatttccccgcgaactctggaggt

SEQ ID NO: 377922 - DNA, 431 bp, Zea mays subsp. mexicana
gtctttttgtgctctaactcagacaacatgctggggggggaattgtagagaggatttactgatcaggagacaaactatagatggtgcatttattttgttgaaactcaggtcagctcattgcacatgcaactataatttaaatacagtggaaagttgctgtatctttcagctcaggagctaaagagaactaaagaattgaaaaagtcagggcctcatcttcaaatgtgaagccatctgagaagtgaagtggcagccctgcaaactaggcaaaataatgcttataccagaagtcaaagggcaggactggtttagtggtgagagttgtctcactgagtcactaggtcacaatgttttgaagcagcctctccgcattcgagggggaaggcttactttggtttattcctgtaccaaaccctacttggttatgagta

SEQ ID NO: 377923 - DNA, 107 bp, Zea mays subsp. mexicana
gtcatttgtaccggcaagaagcgcaaccttcgggggagctataagaaagtggacggcatcctaaaagagaacaacacacccgagggagggcaaaccgcgacaagaaa

SEQ ID NO: 377924 - DNA, 158 bp, Zea mays subsp. mexicana
aattttaagtcgccgttgcgtgggagagcaaagtggaagcagccgaaaccgaagctagccgccgccgccgccttcgccttcgccgcgccgcgccgcaccactcgcctccaaggtccctagggttttcccgcgcgcggagtgtggggaggaggaggagg

SEQ ID NO: 377925 - DNA, 63 bp, Zea mays subsp. mexicana
cgacatcggcatgttgtcgaaggggaggaggagtttgagcaggtttatgataacctagccgac

SEQ ID NO: 377926 - DNA, 454 bp, Zea mays subsp. mexicana
aatggttaagaatactattggattattttctcatagaaagctatctgtatcggtgggctatgcaacagcagcatttgttttagcagttcttgagggcagcacacagcctggcgtatggtttccagaggagccagagggagtagcaattgaatcaaggaaggtgcttcttgagcgggcgtctcaaggaacaacgatcttcgtgatgaacaagccttcctggatgatagagactgatccaaaggaagttggcctgggaatatatgtgtaggggaatagtatgtttccctcactatatgtctatattgaagtttacagctcctaattataattttgacggtgaaatcttagcacttactacaaaagttcttgggtatggagtagagcaagagcgacaaataggacaggggcaatgaacaaggaaaatcttatccattttcaacaaggcacctttgtc

SEQ ID NO: 377927 - DNA, 264 bp, Zea mays subsp. mexicana
cacttggagggaacgatgggcagtggatagagaggttcgccggcaagaccgttgattgtaataagggtgattgtcctaatgagaaacggcaaagatcataaggttatgatgatgtacctatgggtggagcagcagcaggcccttttatggatacaagcacaaatgctgtagtaaaaccagaggagccaaagccattggctttatctgatagggacatggttttctacactggaaagagggttgttgttagtaaatctgatggtg

SEQ ID NO: 377928 - DNA, 149 bp, Zea mays subsp. mexicana
cttccttcttcgcctcgtctcgtctcgcgctagggtggactccttctatccttcctcctcttcctcctcctccggctccagcggcggcgaggatgcgagcgcgtgtgtgctgcggcagtgcgtaaagaagggagaagggaaggggaggg

SEQ ID NO: 377929 - DNA, 281 bp, Zea mays subsp. mexicana
ccacgcgctcgcttgtctgggctacacactctctcgacgagggggggggagttgactccgggtcgccgtcttcatctgcaacgacggtgatgagccgggatggccgcgcgtagcccctactttagacacgggagcgaggggaaccgaaacggggagcccccatgcgcggctgtccacacgatccttgcaacgcccggggcgcaccaggccgcctgcggactcgacgggctcggggaacgcctgatccagcgcgcggggaatcccaactgctttatgggaag

SEQ ID NO: 377930 - DNA, 280 bp, Zea mays subsp. mexicana
gtttgtcatataaatctgtgcataaaagctaagtacgaaacagtcttgatgacaactagcatagtatcgtgcagggaaagagaataagatcatgttgctttgtgcttgatcctgtgtttctctgcttccttgcatatctaattacagccatgacaaaattggcacctcagctttctctctgcttctcattcatcgatggttggatcaagtgaggcttggtgggagggttagacacggacagtatcacaaatgaggacgtaccttccctattcttgcaagc

SEQ ID NO: 377931 - DNA, 135 bp, Zea mays subsp. mexicana
gttcatgatcgcgggcgggcgtgcaaaccatagaggggggaggtttatatgaggctgcccctcaaccagcccccaaggcaaggcgtgcagaactggagcatctgggcaggcggggacgaagcagagctaagcccg

SEQ ID NO: 377932 - DNA, 220 bp, Zea mays subsp. mexicana
ctctcttccttatatccactatccccatcccctctctgtggggggcttccctgctgcagcgagcggcggcggccagctggcaaggcgcggactcctccctccccttgctacggtgagcggtggcgggcggccgcccagcacagcgtggcagtggtgtttccgcggtgccctggttcggacgctgctcgggcggctgctcaatgcctaggaggaggaggag

SEQ ID NO: 377933 - DNA, 217 bp, Zea mays subsp. mexicana
ttccttttgccggagaggaaggccgccgccggcgccatgctcagggtcgtcggtaggcgcatgacgaccgggctcgcctggcgccccgccgaggacgacggcgccaggggcccgctcgccgggggcgtgctccccggcgacgaccaaatctttggtgagccccaaaggccgcgctgcgccgtggatccccagaacttcgccgatgcgaggggcctgt

SEQ ID NO: 377934 - DNA, 223 bp, Zea mays subsp. mexicana
atgcgtgctttattgtgaaagcaaaaccataattacggcgggggcatttagatatcgtggctggtcgtgacacgaaagagaaaacgacattggcgtcgccggacggacggccagacaaacgacatgagaatactctgtgagccagtgctgcgagttgtgacaaggcaagctagctgcgaaaggcccaatcacaaacacagacaccatggggagggagaggcca

SEQ ID NO: 377935 - DNA, 112 bp, Zea mays subsp. mexicana
ctgaattaagctacctagcttaattacctagctactcgatcgatcatcagtctagatatggcggctttgaacggtaaggtggtggtggcggtgatggtggtggcgatggtgg

SEQ ID NO: 377936 - DNA, 420 bp, Zea mays subsp. mexicana
  unsure (1)..(420): unsure at all n locations
ctcctgcttccctcaccaatgacgccgctccccataccccttagccgccctttcccggcggccggcgccctatccttatctcctcgtttttcccgatcaatttctcttcctctcactctcggtctttctctcctccgctgctagtcctctcctcattgcgccttctttcctttccctctttttcttcttctctccacacttccacagtcgacgacaccctccatctccgtccctcccactccccccacggcggcgtcgctccctgtacccctcagccacggngccctcttcccagccgacggcgcccttcccctggtagcggcgccctacccttggcggccagtgcctccgccgctgcgccctgcccccggccggcggtgtctttcacctcgcgagcagcggtgcgcaacgggcccggga

SEQ ID NO: 377937 - DNA, 226 bp, Zea mays subsp. mexicana
atgctttgagggaaggcatatcaacctccaaaggcgggattttattggcaagatccctgaacaacagcacaaaagatgacatcggccatgaagagtaaggcctttgcattgcctgaagagccacaggaggcagatggatacgttcccatggaaaggtaggtcacaaatggaatgggaacaaagcccaaagcggaactggataaggatggttaaccggaaatgatcc

SEQ ID NO: 377938 - DNA, 246 bp, Zea mays subsp. mexicana
atgattatgctgaaagagagcgtatgcagcatattagggggtttattacaactgctgtacacatggatattcctgttatgctggagaagtccttaaagaaagaaatatcttcagttggacctgctgttgcacggacaacagctcctattattgagaaaacactatcttctgctgtttctgatcactccagaaagttcttggtgacaaggttgcgaaataactggacaaaacccttaagtacaaaac

SEQ ID NO: 377939 - DNA, 447 bp, Zea mays subsp. mexicana
ctctctctctctctctctctcgcctgcgggggattattctctactctgctctgctctcccactaccactccagcgctgctcccctcgccgtcgacgctgccctccccccgatcgatcgatcgctccctctcccgcgccgccgtggccatggaatccggccaacccaactgcgccgccgcagataagacgcagaacagttctgtaccacctgtggaaggtgcagctggaggagggactagctatggatgggtagatggaggattacaggcgtcgagtttaggtaatggtgctattgatcctacaaagatacactcagcagatcttttgcatgtctggcctatgccgagctcagcaaaagttagccaacaagaagcacctcgacctctggaacatgttaaccttttggcagcaagaaatgaaagggaaagttttcaaattgctttacgt

SEQ ID NO: 377940 - DNA, 213 bp, Zea mays subsp. mexicana
attcttttgtccactgccccgtttccatcccccggaggcgttttcttgtgttaacgcggcgactgagaagaaaaaaaaacgatagagaagaaaaattgctccgagataccttctttgtcgacgccggtgctgctgctgaatgcacaagagttttgggatagggttattatgactttcacatagctcatatgggtaaatggcataataaggacc

SEQ ID NO: 377941 - DNA, 206 bp, Zea mays subsp. mexicana
gtggtatcgacaggaggacatgcatcatgaagaggagggattttattgggatgatgcgttaacgaaacaacaaaagattacatggccaagaatgataaggctgttgcaccgactgaacaggctcatgatgcagaatcatatgatcccattggtaggtaagcaattattggaatgagaacatagcacaaagggtacatgatcatgga

SEQ ID NO: 377942 - DNA, 106 bp, Zea mays subsp. mexicana
gttgttttgagggcagccctaccaacctccacaggggggattttattgggatgatcccttaacgaaagacacacagcttacattgccaacaatgataaggctcttg

SEQ ID NO: 377943 - DNA, 297 bp, Zea mays subsp. mexicana
gtggtttcgagggcagccctatcaacctccacaggagggatattttttgggatgatgcgttatcgatagacaaaaagatgacatggccatgaataataaggctgttgcatcgacttaagaggctcatgatgcagaattatatgatcccatggacaggtaagcaattattggaatgggaacacaccacaaactgagatggatgatgaatgctaactaggcatgaacccagaataccagatgatgctcagcattgcatagtcaacgccggattgaggattatatatacaccgttgacat

SEQ ID NO: 377944 - DNA, 582 bp, Zea mays subsp. mexicana
  unsure (1)..(582): unsure at all n locations
ctgcttgtcaaaatcgggtaaattagataagagctcaagtaatacaaaaacccgctttggttcaatttatttgatcataaatattttgtccaaaacacaagaaccaagtgaaaaagatataagacaagttcaaatgataaattaaaaatcgaatataagtttttggtgacgttttttatatcaaaaaataaaaaaaaatttgattcttaatttttttttgtgaggaagtgttaagaaaattaaacgtgcagtagaaataaaatcctggaaaaatgtttgaaatacccaagttaggtgatgaggacagccaatatgatggcagccgaatattcacttggcttgccgatatatgcggattatcagttgaccttatcaacttccttgtttgtcaaattttggcattgttctttgcatcatttttccgttcatatttgcatacatcaaaagtaacaacaaatattcgacatgcatttggacttacattgngcttatattttgggtatttttgttttggacaacaagcaattcatattgccggtcttncagctgtatgctacattataattcgtacaacaaatccac

SEQ ID NO: 377945 - DNA, 282 bp, Zea mays subsp. mexicana
tcgtttttttctggcgttagatgattctttagagcacttttatgttgactaggacggggccataggaatcaaggatggctgctggcttgcctggaatattgatatcttacatgctacgcctaaacaccgggaggcaatatagccggagcccgtaaccagcacagccaagctgaaattgtagacagtgagcgaagcagacatgctagctacaggcatcgccgcatttgccggtggaatcatgacagaaggggagcccaatcctgctgacacacatattctctt

SEQ ID NO: 377946 - DNA, 334 bp, Zea mays subsp. mexicana
gatttatttagcctccaagcaaacctacagcctggtatccaaagtaatggctctcaccaagggcaacgagttcgttggctacgatcaggtagaggaggtgatcaaaaataactgcccttattgtcaagaggaagaagcactaaggtccttaaggtgaaactaggtaaaaagccattggcttgaatgccgaaagtgatggagatcacctccagaatgccctgaatgactggactggagacaagactgctcaaaaccattacatcaagggcaagcatattgtccggtggcatgatactatggcacttgagaataatcagaaacatcccgcctttgg

SEQ ID NO: 377947 - DNA, 192 bp, Zea mays subsp. mexicana
tctttttgagtcgcgctggcgaagagaaaggcaccgccacgcgcgcctcattcggcaccgacttgacgagagcctacgagctgtgcaccgcgcgctgtgccggcgccgaccgtggggcccgtctatccgacctaatcctgtatcggtacgccgacgcgcttggtgtccagaacggacttggcgcccaacacc

SEQ ID NO: 377948 - DNA, 488 bp, Zea mays subsp. mexicana
gtaaagctggatcgcctgcaggtacgggcccggactgactggctggaccgacgcatgcgttctgatgtgtgtgctacacgctcgtgccggtctacaacatagttaggcatctcgaagacgagacggagggattcgtggagaatgctgaggaggttgtggagcatttaactgaagtaacagagaagctagctgctgatgtggctaatcaacttcctgaaaatgggtctctgcataaagcaagggaagaggttgaacacattgctgaggtaggggatgatgatgctgtgaaagttgaagcagacactgaaatgaccgacaatggtcaggatgagcattgatgctgctgtggagcccatcatcgcggatcttgaaatggaactcgatcagagcacaaccttagtctatagagttggcacaaagaaatggtcaactgtttgttatgggagctcttcattgtacatagcggtgagtactggtgtttgatcatg

SEQ ID NO: 377949 - DNA, 437 bp, Zea mays subsp. mexicana
tttgtttccataaaagtcactacctccggtgcttctggcgtaggtagtgcacagcctgatgctgccgatccaaaggatggggtcactcatagacggacatctatattagcctaaccatctggaaccgccttctatgacaaaaacattgatagagtgcatcagatggacagacatctcataagaagtcaattgcattgccgccagccgttaaaccagctcgccccttataacgagagccgagcataaggcatctaacactgtgtccagctataaggagatcactcatcttgttgctcacgtctaatgactcgagaaactgaataaaggcgatcatccgagacagagccacaacagtttggagaacctccgggacataggagtaagctttatcacaagttactttcccaccatcctttgcacccaaaaaggcttaagat

SEQ ID NO: 377950 - DNA, 256 bp, Zea mays subsp. mexicana
aatttacaccaatagtcgtcgggaactgtactggctgtgcagttaataggatgttgtgtccatacactcaatgagcactctattatgtaggcctgggcgtgcacagaggagtcaattgggctgagcttcaagctgctcgagacaaatccagaggcctacacggcatggaactaccggaagcttgggttgcagcacaatgtcaaggggctttctgacccacaggccattaaggctgctattgatgatgtgctgagag

SEQ ID NO: 377951 - DNA, 189 bp, Zea mays subsp. mexicana
acgtgcgtccaactgtcaccagtgttagtggaggccatggctcccgtgagggactcatcatgtcaagacctcaggtactccaagcccagcgttctgctcaatgactcttgccctcacgtacacaaagagagtcaacttgggttgagtctttcaatgctgctctgagacataatttcagagtgtcttaca

SEQ ID NO: 377952 - DNA, 444 bp, Zea mays subsp. mexicana
agcggtacccctgggggagccgcgccgcaatatccggggctgcccacacgcccgttcttccacggtgctacagccgatagcctggggggccgttagaacgccttgtgggcctaaactggactaccgacgacggccttccctgatattttgagcgatgaacagctctcaccagatcccgcccctgcgacggagcacgtgttgaacccgaaggtatacccgctggctgatgcgcagctgacgataggtatgcatcgatatcatccagcagggccgtcactacaaatcagttaagaagggagcgcttgaagcgactcaccaccctgaataggggcatatcggagtttgtagtgatggcggctgacacagagcctatcgagatcctgctccacctccacttgatagctgaggataagaacgtgccatatgagattgatccatcgaagc

SEQ ID NO: 377953 - DNA, 411 bp, Zea mays subsp. mexicana
ttttattcattcacattcggcaggcagggggagaccagtacaccagcagtgggcgtcgaacgaccgaagaccatggcggacgccggcagcatggctcccgcgaggagggccctatcgttagcctcgcccggcgggtgcgcgcccgcactgaggcgggtggtgcggaagctgcggcggcagagcaggctgctgtgcgcggacacgggcggggcgcgccacgccgacgacgcgatagagacacgcgcgctgatgacaccaccaccaccaccagtacgacccggtgagctactcgcgcaactatgacttaagcaccgggctggagggcaacaaggcccactgctccttggcctgccgattggtgctcgcaggcctcgccgcgcggaaggcgcagtactagatcagaggctgcct

SEQ ID NO: 377954 - DNA, 336 bp, Zea mays subsp. mexicana
ttttagatgtagactaactaggcaccaaacggggggttgttaaacgtcttgttgctaggaaaacatcacacggaatcaacgggctggtgaggtatctgaagagtgtggaccctgacaatctgcaggacctgactagtactgttggcgaggatgacgactttgtcatgaatagcgactataagacctacatggtcaagtactaactcagagaagatgactacaggaacctcggcaacacgctcaagtactctgggccacttgcttttctggctgatgatcgcagcgtacaggactgcccaacattgtggtgacatcccgacatgtagcgagtgctct

SEQ ID NO: 377955 - DNA, 384 bp, Zea mays subsp. mexicana
gtttttatctcgcgcttcagccaccccacgtgtggctacttaaacaactcttggtggtcaaaaaccacatccgaatcgacggcttcacctggagccgccaactctgagccagctgcgccctgcagagctggacaaccttactaagctgcgtgaacttcccctaatcaccaccgtctacatgacctacatgtcaagacgacaccgcgcccctgactttgtacacagtgagacattagtggaggactcaaagaccctgccctaactggagcagcctgagaacaaagaagtcagattgtgccctgaagggaatccaggttaacaggcggcatcagcttagggagagacctacctgttcatgtgccctgactttacatacgctgcagc

SEQ ID NO: 377956 - DNA, 160 bp, Zea mays subsp. mexicana
gtgtcgcgtgggttgaggaactttggattcgggggcattgtatggccagatcttggtgaggatgcatgggtcagactttggtgggaaggaattgaagatcatgcaacaaattgattgaagaccatacacttactctaattgtcaactcatggttggacat

SEQ ID NO: 377957 - DNA, 270 bp, Zea mays subsp. mexicana
gcagaaaagctattggaaagaataaaaggggaagcagaagcatacagttagcatcaatatttttactgataactgctatccctgcttatttgcattattttgtactcttatttatgggtcaatcacaatcagtacatttatgtgagtatttactctcttccctcttctgtaaccagctgacgcgtattgtgtattgtattcactgttttggacttctcaaagactagatctgtaatgttgaactcaatgaaactaaccactctagaggtt

SEQ ID NO: 377958 - DNA, 307 bp, Zea mays subsp. mexicana
ttgtcgcgtgggtgctgatcaaacgctaccaggggagagagttgctatggaaccaccgtcggttcctttcacacttgtggatacaacacttgctcactgctgaaggaaactggcccgaaacgacataccagatggatatgtttgtcatccacgacatacaactgttgctagagtgcctccatcgatcctgtggaatgacgtcttaggctagttcgctgtgaccagccaaagcaactggcagaactgcttggaccttgtgatgcatcatgtaagccttgagcttgtggaggttctggagaacccccta

SEQ ID NO: 377959 - DNA, 417 bp, Zea mays subsp. mexicana
cccgggcaggccccgccgcaaaatcccgggctcgccccacgcgcgttttttgacagtctgaccatagtgccctggggggatctgataagccgagaacggcatgggcagaagccttaatcacagtgcatcgccacccataggcttcaggagaggaacgttctttcgaagtgctcataacactgatgattgatgtgtttctgatggaggccgacaatctggaaatgcggagaagagaggtacctggtaatgctagactgaggacgtttgaccactgtatgtaaaattgaggccctgttaaggacagataatctgccaaaggagtactacactcgggaacctagaggattggggttcatccaatactttgatcctgaggatgcttctgatgcaaagtactatatggatgggaagatgctg

SEQ ID NO: 377960 - DNA, 450 bp, Zea mays subsp. mexicana
tggccaccgatgaacatggtgatgaggcggaggagtttttcaagagcagaaccaaggcgaacatcgcgaggactgtgaggcagagcatcgagagggtgaggatcaatgctcaatgggtcaagaacatcaaggccgaggctgacctgggcactgttctcaagaagctggcttacaagcactgatcagagactgttcactttctttgtgtatctatagttctctggaattagtggattaattaaggtcactttcgattgtgtgtccgtcctgagttgtcttgaatctatttctttttctatttgttttttgtctaatgcttctatatttttgatattatattcactttatattatttcttttcctttattcatattatctatcttttcttccatttttttctattttcttcttctttcaatttccacctctatcttttttttatctttattc

SEQ ID NO: 377961 - DNA, 542 bp, Zea mays subsp. mexicana
tgctttttatggatcacccaataactgacgctgcacagagaatttttctatgactccaacgcaatccatatggcaaaacaaagctcgttgatgcggatattggacgggatatctaccgttcagagcctgagtggacgcaccatcttactataggaagctacagcttcggcatgactgcatgagtcttattgaacttggtgaaggaacgttcgagattaattggcaaagtttctaccaagcaaggctatgaaaactgagaagtggaggtccttttcttctcagcttatagaccaacctggtgaagctccactttcaagatactgtgatccaaaatataaactcttgatcttttctgattttgatttgacgtgcactattgttgattcatctgccattttggcgggagattgcaattttgtcattccaaaaggcaaatcaaagtgggattgataataaccttgaccgtgcaaatcgggagacctgagaagttcggggaacatgctctctaagcaatacatggaagagtttgagaaatgcctgga

SEQ ID NO: 377962 - DNA, 247 bp, Zea mays subsp. mexicana
cggacgtgagggctggtgggaatattgagggctaggggggattttttaaaagaactcacgcttttccttgaacaagatgaaattgatgaatacgagaaatggattaacacagatgcattcagtgattttgaggacaccacacttcaaatagaagaattgctagacaaactaagtgtctcattaactggtgaggaacttgagattattggcaagctctaccagcaagctatgaaactggaagaggaga

SEQ ID NO: 377963 - DNA, 147 bp, Zea mays subsp. mexicana
cccatgcgtccggtaaccatagcattgagatggagcaagctgatgtgtcagccaagatggctgtagactcctgtttggagcatccagaggctgttacgagcaaaagctctgttaagaaacacaggcagcataaggggaaagatgctc

SEQ ID NO: 377964 - DNA, 312 bp, Zea mays subsp. mexicana
cgcgtgttcgaggcgtccaagcagatggacaaggggggcttgcacaaagatcattacttcccccacgcggccttcctgcgggttgaagctgacgaaccacctgatagatcataggcatactgagctaccgtgggatcgtatctctgttttttgcagggaaggaaaaattgtggctcctttgggggaggcaaacccagccggcctggccaataaggttgcaaaagtagctgggcctgctagcgtggctgagcctgctgcacctgctagcctagcagtcctggttgtgcctgctgtcctggaaaccttccaaag

SEQ ID NO: 377965 - DNA, 532 bp, Zea mays subsp. mexicana
tgaagctcggtcccaggcatgctgcagacgcgttacgtatcggatccagaatccgtgattattgcagattagataaacggactggtaatggcggtgcttgctttgcttcaagcgactgtaactgcttatgggcttgcaaaatattcatcatttgtactcctttgagttcctatgaatacaccctattaagtgcataatctataagcccttaagaggttttatttggattatccaacaatcatgcaatcttgagctgaaagtatcatattcacttggaacccacatggcatgagtgccattagcccaacgtaatagtacggaacgtcgtaccttaaataaatcaccttcatgtaatccccgagcttcgtgcgctagtttattacaaggaattgcatgacgatatcctttccgataaacagcgcacatattcttaccgttccaaccttgacgtgacaacttattgccacttttcattaattcgagcgctcttccaaaattcattattgtagaccgtcctttcattcttcataac

SEQ ID NO: 377966 - DNA, 232 bp, Zea mays subsp. mexicana
cggaaccccgggggggcccctccgcaaaatccggggcgacccccacgcgcgttttcgcacagttaaagatagatcattggggggagccttttaaataagatctggacctcgcaccaagatgtggtgcatgatgacagccaagccctactatgggaagccccctaactacatactctcttggctattcagatatggaatcatcggcgtacagcggaaccctcacaccagcagc

SEQ ID NO: 377967 - DNA, 86 bp, Zea mays subsp. mexicana
  unsure (1)..(86): unsure at all n locations
cggactcgngggctgatgggaatattggggttaaggagggtttttttataccacctctcacgcaataccctccctacaactcaaat

SEQ ID NO: 377968 - DNA, 251 bp, Zea mays subsp. mexicana
ttcacgcgtccggcgaaggcgaaccgcggggggaacttaaaatcccattgtggttaagcactcactaaccggcgtccggcagggacgtccagagtgggtccgagcaccgcactgacagctcgaccgcctgtagctggtcactctgtgcaggctacaggctcgagaacaaggcgctgtaccccggctatctgaactacttcctctggccgcgcaaacctgcctggctcgcctagacgacccaccactagcct

SEQ ID NO: 377969 - DNA, 330 bp, Zea mays subsp. mexicana
cccactcttccgggaaccatagcattgagatggagcaagctgatgtgtcagccaagatggctgaagactcctgcttggagcatccagaggctgttacgagcaaaagctctgtgaagaaacacaggaagaaaaagaggaaagataaagaggttgaaactattggccagaagcagatactcgatgctgatgaaaatgttgggtcagaagattcgaagaggaacaccagacttagggaacatgagtggaagtataagacacgcaaactaacgttcaacgattacgagactgtctcaaaaggatcttcagtttcacaattagttacaggggaag

SEQ ID NO: 377970 - DNA, 289 bp, Zea mays subsp. mexicana
tcgttctgtttttcttttatgcattgtgagggggggtggcatcaaaatgtgaggttgggcagatgaataatacgaagaggaagaatgcccagacctttgggtgctggccaagaacgaatcctttaaaaggcctactgttggggatctagaggataaggggagaatgttactaagggagatagtgaataattggatcaggcgagaactccagaggatctaaagaaggattgacagggcgagtgaccaaaggttgaggcaggggaaagattgaatcccttgataagaaaca

SEQ ID NO: 377971 - DNA, 185 bp, Zea mays subsp. mexicana
gctcggccccacgcatgctgcagacgcgttacgtatcggatccagaattcgtgattatttaatcaaattgtctttttcctgtttgagagtcaatatatattccttttaacgcacgtagatccgtcgaatctcttaatattctccgcttcaattcttgccggtttttctaaattataagtgtgacc

SEQ ID NO: 377972 - DNA, 118 bp, Zea mays subsp. mexicana
atctttttatacatgctggaaacacgcttgccatgcacgagttcatgatcctcccaactggtgctctcctcgttcaaggaggccatgaagatgggagttgaggccaggataaataccg

SEQ ID NO: 377973 - DNA, 205 bp, Zea mays subsp. mexicana
cggacgcttggggtgcgtgtgtttatcaaactaaggaggtatgttattacctattatgccatttaccagcagtaccacaatgaattcagccccaatgtgagcaccaaacacgcctaagtgctgtatgtgcatgatcacatcaatgttattaatttcttattttccctttgagtgcgataaatccatgtattatggctgaccttac

SEQ ID NO: 377974 - DNA, 424 bp, Zea mays subsp. mexicana
acgcactgaaaaaaggaggaggatgggggactataagaaaggagttgcgggtaggaacaccatatatagagcctaaatttgctggggacaggcagccagcaggtagctctcggctatactcaatgtaacgagaacatgctgtgactcagtactgcatcctagcgatggacctaagactggctgcaagctctgtgacacagataacctctctggagacgaagcagctatgccactgcgaaacgtgaggcctagtgcgcagaacagatgtggtgagatcatagcttctgcatattcactgcggctaatagagtgcctttaattaaactctactactgaaaaagtatactagcaaggccgacggagcaaatgcaaatagcgcgcggaatatagagtttaatcacttcataatgttttcttgtaaata

SEQ ID NO: 377975 - DNA, 263 bp, Zea mays subsp. mexicana
ttttaatgcgggatgcatacaggcctgacggggggcagtagaagccaaaggtgttcatcgatcatgccatgccatgccatgcttgtacaaggaccatgatcgtgagtcctttgcttcaatcgacgacctttcgtaatgttgctatactgatattgtggaaccctgttactgatactgttagcgcatcctattggcaataatcaaatgtggtgtgggtgactactatactactgggtggtgcttttgatgagaatggggatact

SEQ ID NO: 377976 - DNA, 386 bp, Zea mays subsp. mexicana
cccatgcttccggtcactttgaaggctatatttaaatcacatgtgctgagggtgcacaatttcaaatttgcacagtttatcatgttttatgcttgttccctgcatcctgagattggcgatggctttgctaattttcttactgatatttttattgacaaggacaaaaacgaggatgcaattactagagtgtttgcagttttatatgttggaagctattttttttctgtaccaggtttattttcgtatttttttttagtttttttctatcttttcatttattttattttttttttttcttttttcctcttttttttattgtttattttttccttttttttctttttacatcattttttttttttctttcctttcttttatttcttttt

SEQ ID NO: 377977 - DNA, 93 bp, Zea mays subsp. mexicana
gtaatttttggaattttgtctgatatgaggaaaatctttccattcgggctgtttcacttgggtggcgatcaaagggtcacaggttgctggaac

SEQ ID NO: 377978 - DNA, 94 bp, Zea mays subsp. mexicana
ctgtaagtagccttagactgttaaattttagggggagccatgtctaagaacacttgctcttgttacacgcaccatggtgtggcctggctgtttc

SEQ ID NO: 377979 - DNA, 549 bp, Zea mays subsp. mexicana
ctcgacaagtactcgctccagagtaggtgggccgagacgaacaacgaacctaattaagctctttctcatatctctgcaagactggaactccagagtaggtaggtaggtgcactgacggtcggccgccgcttgtttggaactctgtcaggcttgaggctggaggacaaggtgctggaccttggctctcgcaacttcttcctctgcgcgcggagacctgcggggctcggcttgacgacccgatgagagcctggttggttggatcgatcggatccgatcgacggtgcacgcacgtgcagcctcgcgtcgtcgatcgtggcaagatcacatgcgaaaaaggggttgcgacttgcgagtgcagcaggtattcaggccttcagggtttggagatggagatggcgatggcgaacgacgttgaatgtttgagttcctgtcgagccatttctttatcgcgtcaatctgcgagaaagagaatgcaaaccgaagagggggtatatggtcagctgagaagatgtcgaggaaaaggaataaattataaagaaagatcggatt

SEQ ID NO: 377980 - DNA, 119 bp, Zea mays subsp. mexicana
accttctaactaatccttaccaatccaatcctttcaccgaaatcatacataagatagagggtcaatatgactcgggacccattggtcgtcggcattgctgcgggagatattgggggccc

SEQ ID NO: 377981 - DNA, 333 bp, Zea mays subsp. mexicana
ttgttgcacgccatggtagcagctggcaaggggggttcattacagtgggaaggtgcgggaaacccctctggcccagcgccttgttagccgccctctgggggtagcaccagagatgttgctgaagcttctgggacaggaaaacatggagaagttgtttctgcttctggaaacaatgttgtctccaatgtaaacagcacaatttcaatgcctgtgcccccaaggccttggcagcagcaaggctatgaaaactcttatgggggttacggctcccgtatgtatagctcttacggcggatatagtggaccctatggaaataacatgtactcaggttat

SEQ ID NO: 377982 - DNA, 320 bp, Zea mays subsp. mexicana
tgtctgtgcctccgttggcgtggtggcggcgacctgggtgtgctccgctcgatgtcatcaagaccaggatccaggtacacggatggtccaagcttaccacaggcgcaattgaaggcagtgtaattattgggagtatacagagagtagctaacagcggaagcaataacatgttatgatcaaaacaactctctatatcgtgtttggtaaatggtgaaacatgaaacaggctagtttctgtacgctctgctttataaaatcttcatttttttagctgtgctacattttaggtttattttttttagggttcggtttttttcatt

SEQ ID NO: 377983 - DNA, 271 bp, Zea mays subsp. mexicana
tgttgagatggtggcggggggcgctccggaggtcgctcatgctgagcagcagcagcgccggcgccgaacagcttgagccggagcaggacgatgacgaacttcattgcgcaggttgaaagactgatatgtgatcgacggtctgcagagatggaggctgatgtgaatgctaatcagagtacaaagaagccaccttctatgcgaatgttaaggcaagctgccaatgcatatacaccttctgcctttaaaatgtttgagagggaattagaaattt

SEQ ID NO: 377984 - DNA, 310 bp, Zea mays subsp. mexicana
tggtgctggaagggggcgcgggggctgggcagctggcaacggacatggcggcggccggcggcgagaccatgatgacgagggagcagctgctccacctcttctcccgcttctccttcgtcacctccctccccgaggtcaagcagcggattgccgacgccgtcagggacaagcaggaggctgtggccgtgaccactgaaatacaagaggagattcttcgcgagatgggagtagaccacaggttggatagggggcccctaaaaggggaatgtggtttacacaaatgacacggactcgaggataaaattctatc

SEQ ID NO: 377985 - DNA, 315 bp, Zea mays subsp. mexicana
tcgcttttatgtgatgagaaacatgtacgacggggaggggatgatgccacgaatgatcccattgttattgacacaatatctaaagactaaacggacatccatcgtcagtgacttgtccgtggactctgttttgtgccattcgaatacatgatctccgacctggcgggactgatagcgtctattgctactacaagtgcttacctgcaggagctgctcgaccaatatgcaggatttgcacacctgatgccacgtattgagccatcatatggtccatgcaacacgactcctggcggagtgactctggcattatttcta

SEQ ID NO: 377986 - DNA, 223 bp, Zea mays subsp. mexicana
ccacccctccttttttaccttccctgttcagaatctcttggggcgcatgcaacgaatgctgaggtgaaaaacaggtttactcgcttccccacaattcttcaaggttgcgaaagtatcattgaaaatttaaggggacaatatgcacattctgttggctgcttcgatgaatcagctttccactttcttgaagcaaaaaagctgccggagagtaaatcaatccatt

SEQ ID NO: 377987 - DNA, 292 bp, Zea mays subsp. mexicana
tttttgaaaagctatcggaaagaataaaaccaggggcagatgcatacagctagcatcaatatctttactgataactgctatccctgctgatctgcattattttcgacccctaattaacggggaaatcacaattagtacatttatgcgagtatttactctctcccctctactgtaaccagctgacgcgtattgcgtattgaattcactgtcctggactgctcaaagactagatctgcaatgcagaactcaaagaaactaaccactttagagggttaataatcataataacaaa

SEQ ID NO: 377988 - DNA, 465 bp, Zea mays subsp. mexicana
tcttactggccaccgatgaacatggagatgggggggttttgaaaactcaatgagcggaacccaggcgaacaacgagaggacggagaagcataccacacacagggaaagcaaacaagcatggagggtcaagaacatcaaggccgaggctgacctcggccctgatacaaacaaacggtcatacaagcactgcctatatacgcaccagattgtttgtgtaacttcgtactctggaataagcggaataataaagggcacttacggtcgtgactggccctgagatgcccagaccgacaattcgtacaaactggtcctcgcgaaagccaccaagaaaaaaatgcgtccaaatgactgactctatatcccgaaaaatgaacgggaatcgcccatgtcgcacaggagaacgaataatctgttccaatgatttgacgactgccaatgacttcaaaaaaaaaaaaaaaaggcggc

SEQ ID NO: 377989 - DNA, 468 bp, Zea mays subsp. mexicana
ttgttccccccacccatcaacatgcaaaaggggggttttaaaacgatttggggtgaaccaacgcgaacaacgcgaggactgtgaggcagagcatcgacagggtgaggatcaatgctcaacggggcaacaacagcaaggccgaggctgaccccgggaaaggactcaagaagctggcttacaagcaccgatcaaagacggaccactgtcaatgagtgactaggccccctggaataagtgggaaaataaagggcactatgcccctgtgtagacaacctgagctgccttgaccgtagatacgtacaaacagcaccgaccgaaagccaccaagaaaaaaaagccccgaattgattgattgtatatcctgaaaaagactgcggatcggccaagccgcccaggagaacgataaattccgaacaaggattagactgaccgggagctggggaacaaaaaaaaaaaaaaaaagggcgg

SEQ ID NO: 377990 - DNA, 96 bp, Zea mays subsp. mexicana
tcttttttacatccggaccatatttcgtgtaagggtagggtctctgtcttcatatgtcatgctgaacactttcaggaataggcacaccgttcattc

SEQ ID NO: 377991 - DNA, 59 bp, Zea mays subsp. mexicana
cactcgatcatgatgaagggtggtagcaagaaggaggtggtgttagtcatactgctggt

SEQ ID NO: 377992 - DNA, 247 bp, Zea mays subsp. mexicana
  unsure (1)..(247): unsure at all n locations
tttttctccatatgcaaacaaaccaaactatntggttttttgggacacagtttgcctcagggagccccagcatggcaagcacagggtcatacggaccaagacggggagaaggaagcatgggcctatggttccaaaaggtcaattcaacaaaaccgggccaatactcccacaggtggaagtaggggcactacacacgcctggataacaactacacagcccactagtcacaaagccaggcagatgctga

SEQ ID NO: 377993 - DNA, 254 bp, Zea mays subsp. mexicana
tttttatttccattaatgtattcacagtgttcctgacagcaatagaagcagcctgtcagatgatgattccggacaggattaacgttaccacgttctactgctgctcatgaatctatccttttttgggcctactgacgggcatcttgaggacataccctgaagccaccgaagggggatagagattcattgtatcagtcatggacaccggaggcttgaaagattattggtcaccactagtgggaatggcctgtgcc

SEQ ID NO: 377994 - DNA, 463 bp, Zea mays subsp. mexicana
  unsure (1)..(463): unsure at all n locations
tttttcactcgtccaaccaaccganaccnggagggacttttaaaaggctgggtcgatcctacacaagccctcgctggcgtgcatggaatccgtcatctatatcgccaagctcgactccgatagaactgtacttacggtagcacactgctagcactagcacgtcttcggtcgacaaccaaaccacagtgctcgcttgcttgcttgcatcttcatctacattctccaccgagactcaactgaacctgaacccacccaccactcccgtacgtatatatatccctcgcatcggcggaggtgttctttgactacagctccctcaacatcttctcaaggaatgcctcccgatttccgaccctcatatggagcgtattctcggagtttttacccgcgtcgttcgtgcgtgcgttctgcattcgacagcttttgcttacagccggcaaccctccattcatggtaaccttct

SEQ ID NO: 377995 - DNA, 195 bp, Zea mays subsp. mexicana
cctgcgggcagcacccctccataacccccgcgacccacccctcctttgtaatcaaatccctactacacattgaacggagggagtttaaaggatgtctcagaagacaaacagctacaaagaacaacaaaaacctatttaggggccatgggcataaacactgaaagaaccaaagatggcttctaccaacccttcaac

SEQ ID NO: 377996 - DNA, 86 bp, Zea mays subsp. mexicana
ctctccctagcctccacgacgcaagggagggtttttttaagcgacgcggcgcgagcgaggagggccaaggggaagaggggaagcac

SEQ ID NO: 377997 - DNA, 410 bp, Zea mays subsp. mexicana
ttgtcgcgtggggtgcgtgtgtttatcaaactagtgatgtatggtattccccattatgccatctcccagcaataccacaatgaatccagccccaatgtgagcaccaaacacgccgcagtgctgaaagtgcatgatcacatcaatgttatttatttcttcttttccctttgagtgcgataaatacaagtaataaggttgaccatactgtgttcaacactgaatgcacagctaattctgattttgttgctcccatcttatttatgccttttttcctttcattgtactctgtatgagtagtaagtttagttctttctgacaacgaaaatttgtgcacctacagatccatctttttgacattgacattccaggaaagatcactttcaaggaatcgaagactcttactgctgggc

SEQ ID NO: 377998 - DNA, 476 bp, Zea mays subsp. mexicana
attttgtttcactgcaaatcaactagcgtctggcggggggactcataagaatcgcgctggaaatgacattattatcaaaaagctgacattaacttacgccatttgacgcatgaagatgcacttttcaaacgtcaatatactgccactttattttgactggactgttgagcaaattaaccacacacttggaacggggaggcaatttacatggagaaccatattgtctcttggatatctatgggtttgagcgtttcaatactaatggttttgagcaattttgttattaattatgccaaagagaggctgcagccagactttaaccgacaacttttaaactacaacaggagtgaattcttgtaagaccgtatttgattgtacccccatgggattcgtggcaacacctaatggtccttttttttttgaaaagaaccttttgggctattgtcattatttggacgaagaagttacttttccaa

SEQ ID NO: 377999 - DNA, 304 bp, Zea mays subsp. mexicana
atgttatgcgggatgcacacaagcctgacgaggaggaggagttgcacaaacatctccatcgatcatgccatgccatggcatgcttgtacaaggaccatattcgtgtgtccttttcttcaatcgtcgacctttcgttttgttgttatactggtattgcggaaccctgttactgctactgttagtgcatcctattggcattaatcaaatgtggtatgggtgactactatactaatgggcgatccggaggcacacaaaatggggtgagggttatatctacacaaagaatgacgggggcgtcgcttgc

SEQ ID NO: 378000 - DNA, 163 bp, Zea mays
gtggtaatgggatctcttgcaggtggtaatagttactgtatgtaattagattggatagtactctctctattcttttttatttgtcacggtttagtgtaaaaatgatctagcgaacgataaatattactatcggaaagagttttactaaacaaaagtatttatt

SEQ ID NO: 378001 - DNA, 276 bp, Zea mays
gggatgactttgttgggcgtcgaggactcgtcccagatatggaaatgtacaacacaatgatcaagctgcagggcagtctcgggcatgctgagctgatagtgggttatctcgacgacatgatctccaatggagtcttccctgataccaacacatacaatgtggtcctccagcttttgttgaagggaaagaagcaccgagaggcagccgcaatatttagcgagatggtcaagaacgaatgttggccaaacgagggaaattgttcacttgcacttcgca

SEQ ID NO: 378002 - DNA, 269 bp, Zea mays
atagatttgatgcttgttgtcaccccatttcttcccttgctctatgtatgtctgattctcagtccaaatgagctgtgccaatgtctgaatattcatgtgttttttcttgtttattccactttcaaatgtaatagatcttagttcttgtcttccgtagaagcagggggtttatgaaatcgttgttttttttttctaaaacggaagagctttaacaagttaagcttgaatgacatttgttcttttattgttgcagctttaacccattgaat

SEQ ID NO: 378003 - DNA, 237 bp, Zea mays
gagagtgagcatgtagttctacttgcatgcatctgggtattttgtatagaacacatcaagttgcgtctgtgacatcaatgcaagctagggcatgcaagcattccatcattcaatgcatgcataactcacttgaatgctgttgtatccactccacccatgcactttgaataaatacatatgtcgacttatatatgcgtgaagttattacgacataaaataaatcgactgagatcgatc

SEQ ID NO: 378004 - DNA, 274 bp, Zea mays
cttgcagagacggaattgcagggacgccaacatcgacctagagctacttttggcgcctcctctacatcacggacgcacacacctgcctcgagtcatacaccttcgaccactccagcgtccacgcgacctccctcgacacctgctgcacatgttggtaaccttcctttgcaggtacccaccaagaaacataattcactagcacctgcagcaacttccagtggtcgttcttcgggtattgtttgccaccgctgtcatgggattggtcacgtgaaga

SEQ ID NO: 378005 - DNA, 283 bp, Zea mays
cgacgcttccctattgaatctaaggggcggcaaaagaagctgtatgaggattgtctactcgaataaggtgataaatactaaagtatgcttgcacagcgcttcaggtacatctgccccctacacgcgtgctagggtgaaaaggcgtgcacataatatcgaatgtcgtgctcacatttaatgcgagccatgcagtagttatctcttcgcaaagcgaccatcataccgaataccagggttgggaccgtgacagcaatttgtgttacctgctttctgataagatgtg

SEQ ID NO: 378006 - DNA, 264 bp, Zea mays
caaaggttgaactcgtagagggagacggtggagttggaacggttctgctcgtcactctcccgccagggactcctggatcagaggctttcaaagagaagttcgtcaaggtcgatgacgaaaaccgcgtcaaggagtgcttggtaaccgagggaagcttttttgaccgtggcttcaagaaatacctggtgcgaatcgagatcataggagaagatcgggaggcatccaccataagatcaactattgagtacgaattgatcaagagca

SEQ ID NO: 378007 - DNA, 260 bp, Zea mays
cagacagagagagcgagcgactgagaccgacagggttcggttcgacccgatgcttccggcgctgcggcctcgcgccggctcccggtggcatccctcctccgccgcctcctctccgactccaccccctcctcctctggcactggagagagtgatctgatgccatcgctaactgtctattcagtggcccactatgcacggagggagatcaaaaggatggaaggggaagcagaagagataaggaaaaagacgaggaacttgag

SEQ ID NO: 378008 - DNA, 265 bp, Zea mays
  unsure (1)..(265): unsure at all n locations
gggccttgatactgcggccaagccatatgaatggagaaaacttgaaccggatagtgaagggccaccaccatgcatgtaagtgccccagtaatactgaggaaactgtactccttttagattctacttaaatcattgagcttaagagtaactccaagagtttctatatccttattgatagaaatagagattttgggtctccaacagcttctttaactagatgtccanatattgctaatctctattttagatttctggctaggcaaag

SEQ ID NO: 378009 - DNA, 281 bp, Zea mays
  unsure (1)..(281): unsure at all n locations
atttcattccagcatgagaggttaaaagcacatcaaagcgaaccttnaaaagtcacaactcacaatttgatcatcccagtctcctacactgcttgccaagtaactctatcatagttcatcagatctgatcaacttgttgcagtcgcaaaacatgtaacacgtgaatgaactatatcttttgcccatataccctctcaagaacctaagaacaagaggatgagcatagaggaaaactgtgagtacctttgctcgttttaggttcctcatttcttctagcatga

SEQ ID NO: 378010 - DNA, 249 bp, Zea mays
ctcgaactacgtacatttggagctggaaattgtggatagtaccgcaccgtatctcgatctgagtatccttcctacatagcattctcgaactttctacctggtctctctgcttgagagttcctcagcctatcctggccactggttcagtcagaaagccttcagattatcacgagctgaagtacaaatctaagtcgcagtctagtaccaatgtgatcttgaaagctgggcaaattagtctactgggtgatg

SEQ ID NO: 378011 - DNA, 221 bp, Zea mays
  unsure (1)..(221): unsure at all n locations
ggaattcgctcgaggtatgcggaatgctgggatacaagcctgataaacgcnctgatatggatgaacgtgtgcagttttagaggctctggacacgagcaaaggcggtagcatgatacctgatggccaatcatcaggatgcttatgcttcacaaaggctcgtggtccatagatactttttcatggaccatttggaagacatagctgagtgctagtgggctatt

SEQ ID NO: 378012 - DNA, 310 bp, Zea mays
catgaagacaatgatctcttcccaaagaatggtaccggcgctgttatcagggaaggcaacattctgaagatgcagcgcaagcagaagccatgcactcccctcccctccaacaagcagagtcggtactaccggcctcgggtcaaggggaggtttgtcagcaaggcttgtttcctccagcgacacaagcgttagagaaggagagctagagaaagatggatcctgctccaaggcgcatttctggggctctcttggagaagcagcagagcttctccgttttcatctctgcggcggtacagccggcagatgtaga

SEQ ID NO: 378013 - DNA, 196 bp, Zea mays
ctacggcggcaccgtccaacgacgcgagagtgtggaggtgatggtctcacggaatgctcgagacaggactagcacatcacgagtgatgattgatcaatttaatgctgatgttgctgataggatgccgtggaagttcatcaactgcacaggagagtggtcagggttaaacctagtgagagtgctcgtggcttgtata

SEQ ID NO: 378014 - DNA, 142 bp, Zea mays
caactacataatgatgacgttccattacttctatatcggtatcaaattaccccctgtacatcgacaggattgtcatcgtcacctggtgccacttatctcctcacctgcgatgcagtcgcagcatagtcctgatcctcatcac

SEQ ID NO: 378015 - DNA, 217 bp, Zea mays
  unsure (1)..(217): unsure at all n locations
agtgtgcagtcgagtctcagcaaggaagatgtatgggaggggaaagaagcgttacgggggtagatgcagaggcgaatccgaggctaagcgtaaggatgggatggatgatggctctgcgaattcgctgaagaatgtaacgtcttacatgagatatatagtaanaagaaggtatacgttaggagatggaaaggtatggtcttgctggagttatgtgagt

SEQ ID NO: 378016 - DNA, 243 bp, Zea mays
tagttggaggcgtcaacttccaagatacccactagctcccagcctcccaccttgtccttttcaaccttcgccgatgctagctaggatgatgggatttctggagctctaagctaagtactactcatccttgctcttcatacgccctcttgctccctgcgtgttcttgattcggcctcaaaatttgttccctgttttctcgtggtgacgaactatcttccctacttgttagttgtctaggggatt

SEQ ID NO: 378017 - DNA, 259 bp, Zea mays
  unsure (1)..(259): unsure at all n locations
attctaccctaacatgtagctcttgcacatgttacaacctgattcttttagcgtggtagtcccaacatgagcgttgtgataacctcattctatgtgatgtgcagtcccattaacataggattagatgaagtagatagtctggtaataggagactcagnatctcgtggtagtttacactgggggaaaatggtacatccagttactgcgtacagatggatctcatcacggccctgcttatcgcgtttgagccgagcgtaag

SEQ ID NO: 378018 - DNA, 222 bp, Zea mays
cgatgcaagtagctggatagcggtggcggatagcatgacagcaataggacgtagcatgacagaataggaaaacggtcgcaaacgtatatttattcggtttgacttgttctctttaagtttgaatagataagatgtatactgtgcactacaaatttatatttgtgtttgtagcattgagtccgtaaaagttcataaaagatacatctcaaatttattatatat

SEQ ID NO: 378019 - DNA, 247 bp, Zea mays
cggtagcgataccatgacatcaataggaggatagcatgccagcaataggagaacggtcgcaaacgtatatttactcggtttgacttctgtactttaatgttgaataaataagatatataatgtgcaatagccatttctatttttgtttttagcattgagtctgtaaaagttcataaaagataaatctcaaatttattatatatcttctcttcttaaataagattcggatacaaatttagagttttta

SEQ ID NO: 378020 - DNA, 133 bp, Zea mays
cacgcggaggcggccagaaagtgacgtacagtacgtgtggagtgtaatggaagttccatgcatgagtgaatccatgccatgtgatggatctagtccttcctttcttgtatcgtccatgtgacgcggcgtgtgc

SEQ ID NO: 378021 - DNA, 100 bp, Zea mays
gtgcttcggccgcgtacgtaggtgaacacggcatgggctctgggtctcattgttggtccagctcttggaggctacctttcgcagctagctgagaaatatc

SEQ ID NO: 378022 - DNA, 255 bp, Zea mays
atgcaaacagcgataatgattcatctgaggaggatacatcgtcagagggacatgacaatgaatggtgacagaatgacggagatggagattccgatagtggaaacagtgccggagatgagggcgacgttgatgatcaaagacacggatccaatgctagttccagggagcaaatcttcatccgagaacagctgattctttcgtggttgtggttgtagccttgtaggttattttggcgagagcaggcttacgcaaaaa

SEQ ID NO: 378023 - DNA, 281 bp, Zea mays
cttgtttctggaattttagggaataattaataactccagaattcaccaaactttttaggtaaactttaaatattatttagaaaccttgggtaaagtttggtatgatttggaccatgtttgatacttagaacccaaaaccctagcatgtgccctatgaacttcactatcgactccgcgaactctagtttctcggagatccgtgaaggaaagttatattcaagaccttaaataataaacttatattatcttagcattttcataagcattcatatgcataatgc

SEQ ID NO: 378024 - DNA, 127 bp, Zea mays
acgaatatgaatgcataaaataacgcccctgctgctcccatgcatcagcagtgtgtaccactatgttatatatatatatactgtatttcgctaccgaataaaaacataaataaaagatccagtgtcg

SEQ ID NO: 378025 - DNA, 179 bp, Zea mays
gcctgacatgttgacagcctcactacttcaagccttcaattggctcgacgtcggccagacgccagatgcctaggaccgacggggcgaaagatgggaggcggcaaccgaagaggcgtggtcgagctcagccagtcgggtgaggcacaatcacggcgaggcgcggtccaacgagctccggt

SEQ ID NO: 378026 - DNA, 271 bp, Zea mays
gatggaactcaggttgtttcctgttcaaagtgtcgatatcaatatgaattattttctggagacattacgagtattgaatccgaagaagttagcatggatatttcagccctggagaaagccttgagatttattaatatgaggaaagatggtattccagtacgtgtccactctattgtgatccgctcaccttcaggaacagcacgtacttacagatttgctacccagaatgtaactcttcctgctcaagaaggagaaagggttaccatttcct

SEQ ID NO: 378027 - DNA, 129 bp, Zea mays
cacagatctttaagacacaacttatgcagtccatgggtactgcgctgtcatctttggcttctttgcttctcttttgggcacacaagcttgatactttataatttatgtggtgtagtgcccgttggaatt

SEQ ID NO: 378028 - DNA, 246 bp, Zea mays
caagtgtgttcaaatggtaaccagtccgtaggagctgcatttcagcactcccactcataccaagatcataacagtgaacacatgagttctagtcctgggactttatcagggccccagtttctctggggcagtccaaagccatattcagaacattcaaaatcccctatttggcatccaccaggaatcggatctgcattgtcatccagcagtcgcactcatggccaaggattcttgtacagtagccgt

SEQ ID NO: 378029 - DNA, 269 bp, Zea mays
ggcggaggcaacaaaagcagcggtggatatggaggatgggatgagcttctggacaacaataacaacactgctgctgcccgggaggcaaagaggagcagcaactcattctcagctggcaacacttattacagcacgaaatcgcggccttcggcgactggggaggcagatgcggattataccgccgctggcgtacgcggaagagcggagcagggagtaggagctcctccggaaagaatgagaatgagacgacggcgggtgccgagaacgat

SEQ ID NO: 378030 - DNA, 276 bp, Zea mays
gttgattcctatatgcagatctagaaggatcatataattgtgagttggaaactaacacatgcagagagagagagcaggatggcggcactgttgtgcgaggctttatcaaacatataacaataaaggaactcaattacatttacagagaatatcatataatgcatagatcccttttctttattctcttgaatcataacaacataaaccctatgtttgttcctgtgtttatcatgttatcgtgtgtttgtatgaccgttgttaccgagatatttttca

SEQ ID NO: 378031 - DNA, 275 bp, Zea mays
gagcagttccatgatctttttcatttacctgtctctgatcaagcgtttgatcaatttctggtactcaaggggtcttgggagcaaattattcttaataatgttcatgaccgctggaagtacatttggggatcggacaaattctcgtcccaaaaagcttacagatctttcatgggccagatgcagactcatcctatctacaaactagtttggaaaagtaagtgtcagcctaagcatagagtcttctattggctgtggcttaagaacaggctaaacac

SEQ ID NO: 378032 - DNA, 256 bp, Zea mays
cgcacattcaatgacatatgcatgcatcagttaggacaacgcctcttcgctaaaagtgaatatccgaccagtattgacctgcagtttccagtgtcttgacaccaaatcgccatacaaaaactacagagtggtggtatacgggaagttcatggttggttagcatacaccctctttgctgaaaggctgtcatattctacttggattggccgcagcttgcaatgtatgacaccaaatagcaccatacaaagactatgaa

SEQ ID NO: 378033 - DNA, 267 bp, Zea mays
gaattaatactcacgcctgatcaacaatattttgtcaatcagcaatagtcctgacaatgtgagaccatgtcctgtttatattccttgctatacacacacacatatgtactatacgtaattatgtagcaaaaaataattcctttaaatctactgcatctctatgcatgtagtcgtatactgtgtgttgtatagctgtacctcagctgcttgttattgatttgctcgtgtcagttgggctgacctatttgcgaatataagcagtgtggg

SEQ ID NO: 378034 - DNA, 235 bp, Zea mays
atccgattagcgatcaaggctagaattgtttatcgctcgcgggcgggaagtgtggtgatgcgtctcgatccgcgcaccgcttgggcttctcgtaggagtactgctcagcctgtcaccgtcagcgtatgttcttgttccagttcctatttttactccaagtccactagggatcctatccagattcgtggggacaccctcttcgagttccaggtttccaaggtccaaccttctcctc

SEQ ID NO: 378035 - DNA, 191 bp, Zea mays
atcttgagttctcattgtctggatcatctttttctccttggaagtgttgcatcttttgagtgtggaaatggatggtactcctcgccatgaatttgctggctactttatacattgctttgtaaaaaaaaaaaaaaaaaaaaaaaaaaaaaaaaaaaaaaaaaaaaaaaaaaaaaaaaaaaaaaaaaaaacaa

SEQ ID NO: 378036 - DNA, 278 bp, Zea mays
gtggcagagtcaggccccgcgagctgggatgaggtgatgagggtactgccatgcatggacgctgtggtcaaggtgtgctgcgtgcacacggagcccaacatctcgctaccgtggcagcggaagcgtcagtactgctccagcagcagcggatttatcatcagcggccaccatgtcctcaccaatgctcactccgtggagtaccttgccaccgtcctggccatcggcacagagtgcgacattggagtttcacctattgagtttggaacatgaccagtcct

SEQ ID NO: 378037 - DNA, 274 bp, Zea mays
gtcggggacgttcttaaggttaagccattggcagatttagcaatgatggatgaaggagaccagcaacttgtggccaagaaagagattctgacccaagatatggatgtgcatgagacagttgatagacctcagcaagcagttgaaagtcctcagcaaacagtgagcataacatccaatgatgaccaggaactgtttgattcaaaggtccatgatcgtgatctcaatgtagtttcacccagagaagcttctgatgctgaagaaatactttgttgac

SEQ ID NO: 378038 - DNA, 279 bp, Zea mays
gcgaattgcgaggagtactggtcgcttcagatggcgtaccaggttgtgcagcggcttatctgcctgaagtactcgaaccatggcgacgactacatccgtgaagcactgcagaatctcaaggagagctattctgcgggccggctaacataagaggtctcaacagtgtatgccgctggaggatccataagccaatgtatatattcctccgtcaatgtgatactatcttaggtcctcaaacgcacatctatcgttatcgcacatgccatgtaacatcttatc

SEQ ID NO: 378039 - DNA, 280 bp, Zea mays
taagtatgtcgagactccaaagcatgtgtgtgagatcctgatgctgtagagcattgagaagtttccgctgccaggtgtcccaaaggaccactgctacagcgcgatcttgcgccactgggcgaacaggttctaggatggacatgacggcgatccaggagatactagtgaacagacattacagagatgatgatctagacccaaacgtggtcgtcgctcgaggaatggacacagcagtgcatggatatgttggatgataggtgaacgtggggacgtcactttt

SEQ ID NO: 378040 - DNA, 276 bp, Zea mays
  unsure (1)..(276): unsure at all n locations
ggtcgcaccgtttatccccaagtgggagcccaaggcggttcgngcggcgnatgctacctcccgggaagtcgccgtggaggaggaggaggaggaggccgagccagctgcagcgacggaggcggctccggcgccgtcagagacaccgtcggaggagtgggtggtagaggagaaggaggaagaagagaagaaggaagaggaggataagccggctgccgaagaggcggcgccgccatcagcagcagctgctgctgagggagaagtgatcctgttgacgga

SEQ ID NO: 378041 - DNA, 272 bp, Zea mays
gtttgacacgaccataattacattcaacatggctgttatcctgtatcatcttcatgactatgaatctgcactatctgttttggacccattgtaccgatacattgtaccattggatgagacaactgctcttcatgtatgcttcttattattggatatcacattagctttgcaagatgcaacaaaggctgcggacataatacagtacatggaaagggcatttggagtagctaacgtaacgagcccgaatgacaatccaagcatagctcagcagc

SEQ ID NO: 378042 - DNA, 267 bp, Zea mays
agctaacgacactagtagcaacaacgacgaggatatggatatggatgacgatgattatatggaggaggatgatccggcagtcgtcgatgatggtgacgacgaccaagctgatagcttcaacggcgatgagatggtctcggacagcgaggtgtttgatgggtacggcgacggcgaggaccttcaagtcaaggacgagttatatctgggtcgatacctggtgcggtcgctgagcggagagctgctgctcgtgaggcaccaatggcaatc

SEQ ID NO: 378043 - DNA, 260 bp, Zea mays
aacgccagagggttgtggcagtagatcacctctctcccgattggggagcagggtccagcttgcagccaaatggcgtacaaaccggcaaagagcctgctaaggaggttcccaaggaaccatcttttacctgcccaatatgttggaataagatggaggagccatccacaacgacttgtggccatatcttctgcgacacgtgcatcaaacaggccatcaaggttcagaagaaatgccctacttgcaggaaggggctgaaaatg

SEQ ID NO: 378044 - DNA, 258 bp, Zea mays
tgctcctgcctctccttactgccgcacttgtagctgtttctcgagtggacgactactatcatcattgtcaagatgtatgatgcagggggtcttatacgtcttacagttgcttcggtatgctacctacagtgtgtcccatatcctctcgatggcgatgcttagtagccttatgcatacgcggtccggttagccgaggatgtgaacagtagtaatgcgacactcgtacagcgttacatccagcgagatctatcacagtgg

SEQ ID NO: 378045 - DNA, 263 bp, Zea mays
ggagagtgagggggctagggttttgatcccccacccccaccacgcctcacgcatcgaatccgagccgggtcggggttgctgcgaatcgccggcggtgcttgatgattcgggcctgtgtgggctgtgattccattgcaatggcatctgaaactgatgagaaagctaagatggagagtttgacatctgctgcagcctttgtggagggtggcattcaggatgcatgcaacatttgccttgaggccttctgtgagagtgacccttct

SEQ ID NO: 378046 - DNA, 110 bp, Zea mays
cgactcgcctccgacggacgccagccgcaacgccgcgaaccccatcctcgggagcctctcctccgacggtcgatggcccggctccctgacgccatcctcgcaacgccaac

SEQ ID NO: 378047 - DNA, 249 bp, Zea mays
aagcaaccagtgcctcctttctccacactcgaagcaatcttctcttcctccggcgctttctctctccctctcactcatactctctttctccagtctctccatagaagaggcgtgtcaggtttcgcccaccgcgccatggactcgggatgtgctgctgcatgggctcaacggcggcggcggcgacgagggcggagcttacgccggcggcggccgtcgaccccaagggagttcctctggcgatgatgattg

SEQ ID NO: 378048 - DNA, 266 bp, Zea mays
ggcagaaaacctaaacgtgaggttggcgaaaagagaaaagaactagagcatcccgtggagagaagagcgcgggttggcgatggctggttcggcggacgcgtgactcgaagcccttctttttcacgttcgcggcgcgtgcggcgtcgtccccggcgtaatcggctacggcgtgatgcagctcaccggctcccgcaacgagcagctcgcgttccaccttcgctccacggcccgtcccgagaccacgatgatggggcaagtgaacaggg

SEQ ID NO: 378049 - DNA, 149 bp, Zea mays
ctggcttcccatgcttccccagatagagttcgctgcgcggtaccgcccccggtcccctgtcacacagacgcagcatgtcggcgatgaggtgaggtataagccacagtctagtatctgcagaacgtcgctgtagccatcgcaacgatcag

SEQ ID NO: 378050 - DNA, 169 bp, Zea mays
tccactgagagatgaccatttcgaaattagataggttcggtgtaacactagttatagctcgtagaacatatgccatctagggagcatagtaagctcaaaagtcaaaatattgtgattctgctgaatgtactaccttttttttaattccttcacgaaatgaatgcactgt

SEQ ID NO: 378051 - DNA, 265 bp, Zea mays
actggctggttagcaagaggtgcagccctttcagcctgtatagcattcatgatcatcacgggtgcctcacatcctccagctgcaagcttgcccctcctatttatcgatggcccgaagtttcacagtttgcaacttggtacgcgcttttgcctggagctgtaggttgcatcgtcctttgcttgattcaagaggtggtggtttacctgaagaagaacatcaaattttgactcaagtatcttgactctatggattcttgtggcagtga

SEQ ID NO: 378052 - DNA, 263 bp, Zea mays
tttccattcatcatcgatcttcctgcgtctctgaactttttctgctgtgtctgttggccgggagcagaggttgctacacgtatatattctgaagaagagatcgagatgaccagcgtgtggaagaccaaggtctgcctggcctcaacaagatctttgacaaggatggcaagaaggctgcagctgcaggcttcttgaagtccttcaacaaggaggagattgacaaggagattgaggacaagaagacagagctggagcccaaggtc

SEQ ID NO: 378053 - DNA, 101 bp, Zea mays
cactgaagcagacatcatttcctgctacactgttgaacaccggtcaatgtcggacaaggcctgtgtccaactctcccttattttattcccacatcactacc

SEQ ID NO: 378054 - DNA, 263 bp, Zea mays
tcgggccgttgaacccattttctcctgctcgacctcgtcttcgtccttctggtgtccatcgtcaatatggtgccggactccgctcctttatctggtcgcactggctgtcgaccttgttggtccttttcgtgcaaaccagcaagcttcgccaccgtcattcaactgctcgccccgtgtgtgctcgtaaattttcttggtcatgtcctctgagctgaacaacgctccatcttgccgttatcgccaagtcccacgcagctatgttg

SEQ ID NO: 378055 - DNA, 121 bp, Zea mays
cacatacatagtttcttctactacacgacgacaaacatggggaagcctgcgaagatcggagagtggggtggatacgccggcgatcgtcgggatctgagggctactccggaccggctgaccg

SEQ ID NO: 378056 - DNA, 260 bp, Zea mays
ctcgggactactacgaaagcaggggtggccggggctactctccgcctccttatggtggtggtaggtcgaggagggaccgatcggtttcaccgtatcggatgccagaaaggggctacggtggatatgacaggaatgtagaggttttctctccgccggtggctgctgctgcgatggctgtgtatggctctcgcagctccggtgatatggttagactgctgcctgtagctgtgtacttggtgtactgtcttcccgcgtatgtg

SEQ ID NO: 378057 - DNA, 279 bp, Zea mays
atttacgagcacagagtcgatacctgcaggtgatatcttcttctcccgtgattgcagggctccacttgagaaaacgtcaacaaagcttaacaatattgaccaatcatttacctctgactcaaatgtccatactgagaatgatggcactgttactcaaagtaatttgggccagccatcacaatttgtttcagctcggacaggtctttcgcgcacaactacgaaatccagttatgctactggtcgccattgccagatgagcaccaccaccactttgagtag

SEQ ID NO: 378058 - DNA, 209 bp, Zea mays
tgaaacaagaacacagctgtttgtcatctcttcactataaccttttgaacactctgaaatctaatggaatcaaatatagactttctctgccatctgctgatcaagtgaccagcagggagagcaatttagaccaaaaaaaaaaaaaaaaaaaaaaaaacaaagaaaaaaaaagaaaaaaaaaaaaaataaaaggggcaaaaaggaaaaag

SEQ ID NO: 378059 - DNA, 119 bp, Zea mays
cagtatgtgaagaagttgtggcctcgtaatgttgtggtactcatgcgtccagaagaatcagggttccggatgtcgactgggtgagccaattgcggttggaagctcggaatcatgttatc

SEQ ID NO: 378060 - DNA, 261 bp, Zea mays
cgaacctgtacttgttactgtaagtggtgatggcagtgttggaatgtgggacgttactttaggtcaaccttgtgtcagacatatcgttgtccatactcgacgtgctaatgcggttgttgtggcccttaatgacaaatacctctgcacaggaggaagcgaccagaaagttgttttatatcataacagaagtgggcgtacacatcttaattggcatctttcacatcctctccaaggaaatgattgatatgctgccagaaatca

SEQ ID NO: 378061 - DNA, 261 bp, Zea mays
tggaaaattctgacttcttgctgtgccgtggtgaagtagaagaaaaaattttctctccttggctgcaatcattggagcttaaaggcttaaaatttgtagaaaataaagttccaacaagtttgactacagatgtggatagcggatgcatctctttcattgtatgtggtgatgatgtgtacgaggcagatgcatatgttttagccatgggactctcttctctacagtccatcgtcaaaaacagtccattcctacggtctgatc

SEQ ID NO: 378062 - DNA, 282 bp, Zea mays
ccaatttggattcctgagtgtggtaatggaccttacatagaccaagcatgatagatgatcagttgtccttgtattgtgttggtggttatctagacgctacctaattctcggcctcagactgaggttgtcatatttcgtttcctgctttactgtccagtcagcagtcacagtgcatgtttgtagcagttttgagagcaagtctgttatgtgacataattaatgatagtagattagttggatttgggtagctgctgtgttggacatatgcgagttccgcaattt

SEQ ID NO: 378063 - DNA, 275 bp, Zea mays
  unsure (1)..(275): unsure at all n locations
ctcgcagcagctccgaaccttctcccagccggcgcangaagctcaccgggaagccggtgcaaaacccccaagatcacacacacacacaccccagctacaaatccgtccgccagcccccgtcgacatccctcactcccccatgcgcaccggcagctcaccgatccccggagccgctactgctataaatacaaagcttccccggcggtggtctagccggccatggcggcagtcggagcgcacccagtgctgtaccaccacccggcgccggcgtgcga

SEQ ID NO: 378064 - DNA, 274 bp, Zea mays
attctcattaagggcaacgtagtcgagtctctttcaagccatctgaataaactgaaaggcaacataaggatgatcgatagtcatctggatggaacgaagcaagcttttatttcaaatatacaagataaattgaatgaaggaattaatcttgccagtttggaaaaggaagtagaaactgctgaaaaatgttgtcaggcaatgaaggatgaagtagctgcaatgagaatgaggtacttggaccgtggaatttagattgttccagtgtccgctatct

SEQ ID NO: 378065 - DNA, 262 bp, Zea mays
ggagtttgcagccaaagatgcactgcagcctgttctaaagcttctccttggtcctggtggggaggaattgcgtgcgttagttgtgaaagaggcagttcgtgtgacagaagccatcgccattggaacactggtcgattcatacaatgcagctccatcatttttgaagccattaatttccagcggcaatctagctgaaccctttaagtttagtgagactgaacaagaacagatgatggagttcgagaccaggttttcagagtat

SEQ ID NO: 378066 - DNA, 262 bp, Zea mays
cgagcgacggcacccgctccgctgcaggcacgtcgtccgtgctggacaggctccgctcgctgggcctctacggcttcctcgctcccggtttcaggcggaggccgtcgccaccccagcaagagtaccactaccggcaagaatacgtcgtggcggaggcggacgcgcatcagtgcgtgaacgcgcgctcggacgacttcatcaacaagttcagacagcagctacagctgcagcgactgaactcgctgctcaactacaaggagat

SEQ ID NO: 378067 - DNA, 273 bp, Zea mays
atgaacagcctggacgacggctgcctcatgcacatcttcagcttcctgagcccaatcccagataggtataacaccgccctcgtttgccagatggcgcttccttgcatgccaccctcggctatggctgcgtgttgagaggccaatcagagatgcgatggagcctggagtttatcctgatctcgaggctgctgtttctgctgctaggtctatttctcgccccccccccctctctctctcaagttctcattgtgcacaatggatgttatggctgat

SEQ ID NO: 378068 - DNA, 288 bp, Zea mays
ggctcgaacttagttttcttattgatttgtctgaaacattgaaactataattgattgcattctttaatgtatgtaacaaccaaccaccagcatcaagttctttaaggtaatcacttgcttctggtaaacttatatgtgtcttgattgatagctatttcagtaactatgatatcattttcttggaaaaactatgaatacatgtccaccctctatccgaaaaatatttcattggtggttttaaaatctcaaatacaagctaacatttgttattgtttacatggtagttct

SEQ ID NO: 378069 - DNA, 272 bp, Zea mays
atcaaattctactatctctacatcactcacatatcatgcaccggttcgaactgtattgcctcagcattcagctgcttatccaaatggggccagatccaatgccattgtaccttatgatcagcaggcccaatcgaactctacaggttcgcggaatgggcaaacagcctatggaggaaatcaccaaaagcaagcactaaattatggcacaggtgatcaaaatggagacattccaccagcaccatggggaactaagagatccactaacccatttg

SEQ ID NO: 378070 - DNA, 272 bp, Zea mays
attcgagtacgggaagtatgacggacaccacacctatttcgaaggccaaggtattactatcctcccagaaaaaaataagaactccattgttcatgatatcatatccttcattgcaaaaagaaaaagaaataatagtccactgattgttttgtgctgtggtgaaacaaaaacctgcaaacaaccgcaacaccccccgcttttcttcccaagacaagaagggcttctgggaggatgtctccgagtggtaccaagaagctgagcctcctcagggc

SEQ ID NO: 378071 - DNA, 272 bp, Zea mays
atcgtatcctcatcgctccgtctatggcgactctcaccatgcagccgatcggtcccacccctgctccggctgcgcagcaaggccagagcaagggagagaatcctcctaccgtggatggtagcgatctgggtgacatcgactcgggaactcggatgtcgtctccgcggatttggcagccgccgccgtctgtagcggtcagcgtctaggctcttctacgattcctagctgggcacggtgggttctcggaggtgtggtttacacgctcgtgccgt

SEQ ID NO: 378072 - DNA, 268 bp, Zea mays
acgcgagcttggacgagcacatctcgagatggttcgggctggaccagtctaagtaccagtgggcgctcaacgactattatgagaggaccgggcagaagcggactgagaagaagcgtttggcacccagaagttgatctaacggcaagagtctagccacaagccgaaacaaacaggcctattgatgtctaggatcatgtttcgagtgtgcagttgcaacctgacttagcactgcctctgaatagtactaatccaagtctgcctatagttc

SEQ ID NO: 378073 - DNA, 284 bp, Zea mays
ttcaaagcttcaagagctctttggctgtgagagtattcctatgtcaggactatcagaaatgcttagtcaccacttcatcaagaaaacatagcaaatcctcgttaactgatctaggattgcagtttggcagataggcctaacattacaatatggtgttcttgacagaatggacagcatagcgtctgtatttcttcaatgttatggaatatgaatggtgtctggcaaagatcatattatttgcggtagaggtagcctgtgctttgttacgtgtgcaggccaccgct

SEQ ID NO: 378074 - DNA, 276 bp, Zea mays
ctcatcctcgccaattttcctcgttgtttctcggctacaaccgtgtcagctcctacgcgtcgtgcgcgttttgtgttcgggtcgagccccaggattttgaggaaaaggaagcttcagtacatcggccggtgaaaagaataaactggtggtagtcatggtccttgcaaaatccgagatcagcttagtcgcggtatgtgaattaaccacgtgatgcggagaacccgagccaagtcgaccccaagcgcagactgattcgcgcagtgatgcgaatgatga

SEQ ID NO: 378075 - DNA, 287 bp, Zea mays
catcactgaaatatcacctgtgcaaatatccagaacagtgccatcctatcttcacctccctcccttgccctggataatcttcaccctgcagcaccggcgtgggcttccttgaagcaacagggtgagggaaagaaagcagaagccagtgcagtgatccgtgcctcgatcatcaaccatagtgagtagcttcagtcagcagtattgctcttccttccccaaatcataccctggacgcgcccaattccatcgatcaaggcactgaatgtgtctggtgaccacacctgcag

SEQ ID NO: 378076 - DNA, 273 bp, Zea mays
aagagatcaatgagaaagaaggtaagtctttatctgtggaaaagaaaaacaattcatccatttcacaacatgaccaccaagaatcaggcattaagagcgtctcaagtgatgattgctccttagtggagccaaaaaccaataatgctaaggagtcaggtgattcaactgctattggggacaagagtgcaaccgaaactacaaaaggttcaataagttccatgaaagattcagtttcctgtagataatgcgagtgaatgtggttttattagcttc

SEQ ID NO: 378077 - DNA, 273 bp, Zea mays
gtaactaagctgatgccgtgtcaagctgcatataccttttggtttcatgaagattgaggcctccttttctgcatacggaaacgcttggttgtaacaaatccatctgttagcagcttcactgtagctccgttgttgataaagaaaaaaaacctagttcctacttttttaatcgctttcacaacagctactctgccacgttgaaattactgtcttttcctcctggaccatccactggtgcatcgacagatttccatgggataaattcctcgacaa

SEQ ID NO: 378078 - DNA, 287 bp, Zea mays
atttgcatcaccgctatcaagcatattacaattgttattattttctagttcttgcttgattacctctgatcaattgaaaacgctacttggaaccccacaatttcatatgttcctaatctgatgcatcgtatatcgtctatatacccatgttccgatatatgtcgtcttagaccttactactgttggtcctctgcagttctgcaactgtcagaaaagttccgcgtgcagctcggtcccttccgttacgttgttgctggccttctgaaggttctttcattaccccagta

SEQ ID NO: 378079 - DNA, 245 bp, Zea mays
cggggtatctccctggccgcggtgccctcttccttctccgatggaccgtggtggcggcgctctgccccttacgacggatgccatggccggtgcacgcatcccgacatttcggccaccgaaccctacgtggaccagcgctacacgatgcaggacatgatacgaatctaattgtagtgttttactgggacgggaacgatgatggcggctcagcgtccctctccacatgacgatgttggcgtcgagct

SEQ ID NO: 378080 - DNA, 227 bp, Zea mays
gaaacttggaattttcagtttgatgcacttgtattattattaggccttggtagcaacaagatacggatgtcgtctctacgtttgctgttgtacttcagtgtaacttgcctcccgaatgtatgagtattatttatcaagtcccaaataacagtgacggattgctacattctgttttttttgtttgtggatctgaaaattggaattcttagcttaaaaaagaaaaaggt

SEQ ID NO: 378081 - DNA, 284 bp, Zea mays
gtttgaggacaggatgcaaggggattttatagaaggggatgcaccaggtccttcgtttacgatgggtgggaagcttcagatgccaggcagccagctagtgtcagatgatgacgaggatactgatgatgaggtgctatataggaggacggtcatgatctaatttggtggaagataatcccaatggtctttcatgacatgtttccctgcagtatcatataaacaagtgataagacaccagaatatgattgatgagtgttctcttggcaccagccgcagtagtttga

SEQ ID NO: 378082 - DNA, 128 bp, Zea mays
actgatttctttgtgttagtgtaacgttgtcaggtggtttgagtcgggcagccatcacacgctgtcacatacctttctgaaacgaaaaggataaatttgcaaataacaagttcattatgttctagtgt

SEQ ID NO: 378083 - DNA, 269 bp, Zea mays
ataagatgttatcatgttaaactaaaagcatatgcaacttacttctgctatctcatcccaaatttcatctgttgtgtcaattatccatgcatgattgttcggagaaacaccacttcgatcctgtgtccatcttgttgtagtttttttcgtgattcttagtgtcgtcaggttcagagtttcagttagcgagtctgtcagttcttcaatgtttcgtttcagagtcgttgagtcagtcgcaattgctgtaaatatggagccgtgtgtggtga

SEQ ID NO: 378084 - DNA, 279 bp, Zea mays
  unsure (1)..(279): unsure at all n locations
cagcttttagatgctcattttactagatctttccacacaccatacgatagtgccatggngacataccatgacatttcagctatcgatcctgaaccctagaagactgtgaactggatagcacgagagtgccattaatgatgttttgcgatctcaccttcagcatggatgcggacgacgagaaactgatatatgtacgatcaggcctcacattaatgccttcctggagaggctaaatgaactcattccacgggagctaatatctatcttcaacgacaaaga

SEQ ID NO: 378085 - DNA, 101 bp, Zea mays
gcgagtggctggtcgaggtttcttccttgcccagctccgacacgacaacctcgtcacgctcatcggctactgctacgaggacgaccaccgcaagcttgagt

SEQ ID NO: 378086 - DNA, 276 bp, Zea mays
atgcttttgattgatgtctatgcttttatcagaacttactgcgtgttcctctgtgaagaagctggcaatggcatggcggcgatggttgggctgcgcacggactgggcgctcactgaagacgacgagtgcttgagatggatcaggatctacgcacgcgaccaagctaggttcttcgacgacttcagggacacgtacatcaagctcgtagacagcggagcctcgtggagaacagcttgactagaactgcctgtttctcacagtgttaggccttgttcg

SEQ ID NO: 378087 - DNA, 270 bp, Zea mays
gtcatacatggtcaaatcttatcatgttttctcacaggatcccttctttcaaatttactcatgatgctggaactatgctcgagcttgatcattctgcagttccagaaaaaatgcaccaaaaaaatacatctgcgtgtatttctcatttgtctgagctttcaggtttacctgatgacacagatggcttccctgaaactgctgttgcacaattctcaaatccttcagcaacaagcaaaatggaagcaggttcccgacgcaagccatgatgag

SEQ ID NO: 378088 - DNA, 120 bp, Zea mays
gcactctttccatgatggaaagaaccacaatttccgtgtcccaacctgtgatcgtaacccggatcaagtgaacacaggttatcactactgtcttgaacaatccagtatggcataataggc

SEQ ID NO: 378089 - DNA, 163 bp, Zea mays
gattgttctcagaaaaatctctttacctctttaatttctttcccaaaattttatgcattcatttcgacgaacaaaccaacggattggcttctttatttccaacaaaggtccgggaatttggcaaacagctcactggagacaaatgaagctcggagggagttgc

SEQ ID NO: 378090 - DNA, 155 bp, Zea mays
agtgcctagccaagtagcacatggaggcttcctccccacgcctagccctctctactgatggccgccgtccctgctccatcctatggcgcttgccctcagtccagcttgccagcagccgtctgccctcatccctcaagccctagccgagttttcca

SEQ ID NO: 378091 - DNA, 266 bp, Zea mays
cagcaatccacacaagcacttcgacgtcgcacgggcgctgcacacagacacaccaagcgtcggcaccaatggcttactaccaggaggtggactactgctcggaggaggtgacgtcggtggccccggccggcttcggccgccacggaggcggcgtccagcagcacgtcgtcaaggagaagttcgaggaggtcgacacggtctcacgcgccggcgccatccaccatcaccaccaccatggtcaccacggcggccacggcttcgtggtg

SEQ ID NO: 378092 - DNA, 261 bp, Zea mays
atcccgcgcctctacaccgagcagttagggttttgataaacttgcagtcagaggacggagaatttccccagcaagtaagtaacaacagccggtccacagagatactacccttttaatcttgcttacatcaaacacagtctcacgttaaaaactttgctcaaggagcaaaagggtgaattggttggtgattcctctctctcttgtttttgtcttgatatctaaacatcttacgcattattttaggcgtatcagttttgtctt

SEQ ID NO: 378093 - DNA, 257 bp, Zea mays
cagtgcttcgctcgccatccccctccgcctcggcaccggcgtcttcgacctcgggtactcgccatctcttgtttctccatcagagatacgatcagcccagtatgcacagcgagttgtcgtacgtttcatcgtgatagaggattccactgtatgaccgtttgcacgctctgagtagtatgacgtatggtgcgtaagagtatgctcattgcaatgaccgaaaaccgatgtttggtcatgaagctacgaccattctggat

SEQ ID NO: 378094 - DNA, 116 bp, Zea mays
ctggagtgcttggcgtcccgcggcttcctggtgtcgtttggcgagtcgtcaatccgaccatacaccatggtgcacaagcgcggcgctgttggaagatctatcgacatcaacagata

SEQ ID NO: 378095 - DNA, 140 bp, Zea mays
cggcggaggaggtgtggtaggagatcactggcgcaggtggcagtgagctagccgtgactcccgtggcggctcaggctgacgctcccgatggtcgcgctagcacaagcggaccggatgtgacgctggagcacttcctggcc

SEQ ID NO: 378096 - DNA, 284 bp, Zea mays
gcaaaagctgaatagtatcaggaacaagggcatgaagaactaggtagagctgggggggaggactagcacataaagatctgatgtaacctgaaccttggtgtcagcccaaacaccggtgtccattttagacagcggaacccaatggctgatgtctgatgcttagcgacaccgaatgaactcgagttgatatagctgggattctccttatacccgatgtactgagaattgagaaagatacagatgaattaggcaaactggtgtaaggagtaagtcagtggctattg

SEQ ID NO: 378097 - DNA, 280 bp, Zea mays
caaacagtgtccatgaacaaatgcagcgagtccaacctgctaacggtgcacaatcttcaaatgttggcaagatcaatcagatggaacagtctttcattctaagcggtgaaaatgaaaaaccatttacatacatatacagcatgcttattgactggggaggcaacaggacacaaagatctacattccaggaaaaatccagggtctgatcacttctgtaaaaaatttccatataaactacgcacccagtacgagctttatgtatatatagatgaggggagtt

SEQ ID NO: 378098 - DNA, 255 bp, Zea mays
ggatgaatcattattatatatatattctgaatgagctgcagcacgtacgcatgcatggactttgctcgatcatattgggtaagtcgtatcatcgatcgaatccacttcacttttttgcttggcacttattttgatgttcatttgggggggtactacggttatggtcatttcagttcttatatataaacttcattcattcagaagtacggggcaattatatatggatgttttgctataattatatatcctagtcac

SEQ ID NO: 378099 - DNA, 266 bp, Zea mays
caagatttgcttagcgaattagctattgctcaatatagggagagagttttacccctcggtagttaaagcgcctgatgtcttagtaaagaaggaagttgttagcaagttttggatagttagatgagttctaagagtgcttagctccctgtatctatagcttgtaggtttggtctaggagtaatctgtgttgtctcctttgcaagttacatatcccaacatacgcaagcatcatattcataacatcatgtagaacaccaggaagaaga

SEQ ID NO: 378100 - DNA, 107 bp, Zea mays
catcgtagcggagcagtatagctagcttttgtgatgcttctaccagattgtattgttataggttgtctgaagaaacgagataaccaacgcacagtgcttgtgtgttc

SEQ ID NO: 378101 - DNA, 207 bp, Zea mays
cttttattgtatatgtttgctgttaggttatttctctacgggataggatattgtgtttcgcttatttaatcacgttcggtacgtagacttgttaggtgttcgaggaattgtcggaattagaaatcgttgctgttaacgggtgttgagtgaaatatggtcgcaatgagccgtgtcgtttttgctgctattagaattgatgaatggatg

SEQ ID NO: 378102 - DNA, 289 bp, Zea mays
gtcattattgatttatggggttaccaacgatcccaataatcctggcgtacaggggagacctccttgctgtcaaattatcggatgttgttaatagacgcgctcctatgctctttttatttcgactttctatttcgcacaagcgctctagatgacacgttttttttaagtattcaacgaggtgtagtaaatagacagacccggcacccaaggacagagggacacctatctactatacgctagtaccttttcccgttaaacctatttaccctagatataaatatacaaagag

SEQ ID NO: 378103 - DNA, 281 bp, Zea mays
ggcaaagctaaaaatatttgtttgttgaatgaggaagttcaaagggctattaaggaaaataaagaatggtacatatgtttgtatcatgacaggagtgtggacaacatagagaagtacaagatagaaaagaagactacaagacgagttgtaagtgtggcaaagggtaggccgcatgagggtctttacgaacgtttgagtgcgaaggaaggaaagaatgacatatatgggatgactagggttcgtgagaggaagacaagggacttcaccaagttaagtgcact

SEQ ID NO: 378104 - DNA, 279 bp, Zea mays
gggtaatgggctcctcaattctatacatcctgcacaataaaaattatgaagcaaactgcaaggaatacaatgttatatgtgaaattatcagtttgcttgggcaatatggaacagatgagcttcatagatatgacctcctggctattattggggagtcagtggaaagtgaaagtgcttcaatgctaatgttggctcattttgctagcttatcaacttgttgtttaagaagaaggcttggctttctgtggaaaggttgtattatcatgatgatgatcgcca

SEQ ID NO: 378105 - DNA, 271 bp, Zea mays
ggctactaaacctggatcagccttctagaccggcgaggcaagatgatgttaaaagcacaacagaaccgtgtcctcccactgccaagtcttcagaaacttctgcgggcaatgatgctcgtaacaacgggagcgaacaatggggactctaacaagtgatttcgatttggatgctttcatcaagaagaggctggccctcgacccatcggagctggatgccgtgctcgagggctctgacccgaggggtgttgtttctcagaggaggaaacagcgg

SEQ ID NO: 378106 - DNA, 270 bp, Zea mays
ccatctccaaatagaggttccaacgtgaaaaaggagtgtcatgctgaccattgaacagacagcagcattcgtcatctctttatatcatcccacagaagacacaacaaatgatagtaaagtacacagtgtgccagagattggtggcaacagcagtacagcctgtgccaccttatcatttgcggtgttagccaagctatgatcgcagaaccgtcctgtacaaaatgacagttacgttgaagtggatgggggcactcatcacccattcaccct

SEQ ID NO: 378107 - DNA, 117 bp, Zea mays
atgagaactggtagcttgcgtctgtacaatgttatgttttaatcaacgctgaatttacatatctgtcaagtctgaactctggcacctgcttattctggatgccttgccagtgcgagg

SEQ ID NO: 378108 - DNA, 228 bp, Zea mays
cagacacttcacactccatagatgcatgtaatagctcaataataggcacagtagactacacaatctgtctgtagttcagcggttttggaaaattaataacataggatccgccgttaggttgcaaaaaaaaaaaaaaaaaaaaaaaaaaaaaaaaaaaaaaaaaaaggggggccccccactttggtaccccctccccccgggatttttttccgggcgggaccctggggg

SEQ ID NO: 378109 - DNA, 272 bp, Zea mays
gtagaacttctggagttaaaacagagagaatgggatttgcgcgctgacttgcaagcatgggctattctttagcctccagcagatgattcatgacgaggcggaggctccttagctgcttccagatttgagcgtgttactgagcctgcaataatagccaaccataagttgcttcctccaataatgtctccagctctctcatcacgtaaatgcaaaaggcgtgactctctccgtcattgatacatagaactgccatcttgatcgacggacagtac

SEQ ID NO: 378110 - DNA, 278 bp, Zea mays
ggagaaggctaaggctcaagcatcacaatcacaatctgatgttaaaggcacttcgagcggccaaatggccaacagaactgcaactgcgccaggccttgtaccaaagcatcagacgccacagcaaatacttatagcaaaggcggaggaacgacagagaaaacaagctgaagaaagagagaagagagcagctgcagcagagagaagacttgcggctctcgctgtccaatctgccggaacgagcgcatcaggtgcagcagcaacaaactgctccgcgaaga

SEQ ID NO: 378111 - DNA, 261 bp, Zea mays
gcaaatgttgatcaataattggacttcttagtaccttgaagtattgggcactgtgatgcatggcatttcaaggatgcaatgaatttgggcttgtccctctgaaaacctattcagaacaatttggacatttggtatgtttcttcagcatctgttacctattgtgttaaaaaaatgtctacataaagtgtcaagctttatgcaactctattgattctttgagcatgtaattactagctagagaaattctagaaatagtcatcc

SEQ ID NO: 378112 - DNA, 259 bp, Zea mays
gtatggccaaaaaagttttccaggttagctctgttgtcagaagaatgtagggatgaggttatcaaggctgatatacaaggaaggaaagaaaaactggagagaatgaagaagaagggtattgtcacagcaagaaaatctaaaacaagagcacgacgaggaaaatttgttaggcagcagaaatagaacacgaaagtagtgttggagtagtcgtggcctgttattttttgcttcaacacatgacattttcacaaacagcact

SEQ ID NO: 378113 - DNA, 263 bp, Zea mays
gccttatctctccaccgctttctctcttccatctgatatgccgcgtcgctgtattctggaaagcaaaagaaaatcccaccactgttcttctgttgaaattcctgccgtctcttcttatctgctgctacgatttttaccgtcatcattctcccagctgagctctctctctctgctctttctcgcatccagccatggcgcccctgttcttctcttttccagtccggccagccgagcgctccttctcccacccatggaggtcccgg

SEQ ID NO: 378114 - DNA, 262 bp, Zea mays
caaacacgctcacacacaatcatatttatatttttttaccgattcaacaattacatatgctaagttttttttgttgaaaacggtatatttatagtagcttgattttcaaaaacgattgggcatttaaatctgttgatttcgcaaatcatttgcatcattttatgacctcaacaattcgctaattcaaattgacacaattatgttccttttagggtacatgttggtttcttgtattacttccattcaattcattttaaaaata

SEQ ID NO: 378115 - DNA, 281 bp, Zea mays
ccttggaccgttggatgcggataataaggaggatcaggagaggatcattgcagatcgcaagacaccacttgtggtgacatctgctccagccgtgcgctacccgaacccatcaaaccctgacaaggtgctttacatcaacaagaaggagcgccgctgctaaaagttgagagaggtgttccagttaagttctcggtgcaggctgggcatgacatggcactctatatcacttcagatcccattggtggtaatgctacactgaggaataaaacagaggtcatata

SEQ ID NO: 378116 - DNA, 276 bp, Zea mays
atcacactccaccacgattgccaagtgtcaatctcgacacggcagcaggagcctttgggccgtcgttacacgcacctatccatctcatctccgcggcacacgacacgatcgtggttggtgttggttacacgcgcctatatcgccgcagccatgtcgtactacggcgaccggcgcgcggagtcgtcgatcgtggaggcgttcacgctgtcgccgctgccgtacccggtgatcctggtgctgctgatggtgacgctgctgctgggcgcctcgtggttc

SEQ ID NO: 378117 - DNA, 274 bp, Zea mays
ggccgttcgtgcagcttgccatgcggcatgtcacgtgcatggaggacgccgccatgttcgtcgcgctcgccgcggccgtcgacctcagcgtcaaggcgtgccgcccgttccgcaggcaaccgaacaagaaggccgcctcgccgtgcccgaccacctcgagctcgacacctaggaacgcagaacaggaaggccccgccgactagcacccatggccgcccatggatccatctaactcgacctgtaaattcacttaatttcaagagctggactgaat

SEQ ID NO: 378118 - DNA, 271 bp, Zea mays
ggcacgactattatcgatccaccagcaggcggcctcagctacaattatatattgccatcacagcctgcccttcccccacacgagctcactccatgaaagcaaggcagcatgcatgtcgtcgttgaccacaaaagtgtttgggtgccccagccagggtggtacagggtttattacatcattaataatattcaagagttagtaaccgctctgacccaagagcatccggtggtgctgatgttctgggcggactggaaccagccaagcaaggcca

SEQ ID NO: 378119 - DNA, 271 bp, Zea mays
tcgccttcatcctcgtctccgccgtcgtgctcgtgctcagccaccacgagagcccctccatgccgcttcgtttctggatcgctgcgtacaccgcccagtgcgtcgtccacatggtctgcgttgccatcgagtatcgtttgcgaacggccagctcggcgggtcgccaattcctgtcgacgaggagagcggaagtggtagtgcatcatcgtcctccagcgacgacgacagagagcacggctcccatagtcgaagtggtgactgcctcagtata

SEQ ID NO: 378120 - DNA, 266 bp, Zea mays
gttgtttcatttattatacagcttaataagatatatgcagagggtggatttgtatatatttggtacccttattgcaacgcagttgtgagtcagaaacaatgccgtgcaaaggttgatgctttcagaagcggtgaaatccagccggtggctcagtgctatgggagaaatgaaggctagctgctgttgcaataagggtagcgaatatgcatccggtctatgtatatgatgctgtgttgtttcatttattatacagcttaataagatat

SEQ ID NO: 378121 - DNA, 278 bp, Zea mays
cgactggtttatgctccgcagatcccaagtttactctctgtggatccaacagttgatccgctaaaatctctggcaaacaatatctcttttgccacggaggtcgaagtgcagctcggaaaacgccttcaggcctctgtcgtcaggaaatgaaagattcagaaatggcgatgcagtggacgctgatatatcagctaaccagtaggctccgtgttctcttccagtctactccatccaataggcttctcttcgagtattcagcaacatcacaggaatgattc

SEQ ID NO: 378122 - DNA, 176 bp, Zea mays
tgcttttggtgctaggagaaacaagtatgttactgaagattagttatgctgccagcttccaactgaagagattaggaacaattcttttcattaagcgtcacttacttttatcataagatggtatgtattacagatgtcatctcataagaacagtgatatactcttctgtacaaaag

SEQ ID NO: 378123 - DNA, 168 bp, Zea mays
tgacgacgaagacgacgcagatgctgatggatgaggatgaagatactgaatatcttgtgcgaccaatcgctcagcctcaagccatggacattggaagtgaattagatggagttgaccctgatgatgctgacgaggacaaggaagtattcgacaacgacgatgatgggg

SEQ ID NO: 378124 - DNA, 119 bp, Zea mays
ggcactgcaacttgtatgggtgaaaacagtgagctggttgcaagaaaacaaggggctcatctggctgatgtaaaactggaacctgcattacggaggtcatggagattcggtccgttccg

SEQ ID NO: 378125 - DNA, 232 bp, Zea mays
gggtgacccatggtaaaccatgtggcagcttaaactgtgtgaggaagaagggctgagaaactgaggaatgagacaatgtgagtaccctgcaaattggagtggtttcggtatgaagcagaatgggaattatgattcacggctaaggtactaatgtgctctgctgtaggacacgactagatgtgcttttctcgggctagagacgggggatgctgtaatcagaacattcttcccc

SEQ ID NO: 378126 - DNA, 257 bp, Zea mays
cagacaccacgtgactcctctagaaccaagcgagcagtgtgatggaaggagatttatgcgtcaaggttgactcacccccgacggggcgatgctgtcaaggtcgacgacagcgccgtcgtccttccgtctccaatcctcccctgtactcctttatccaggcctcatcgcttgccataggtgcctgcgccatccacgtctaggagagcaaggcagtcaccctccactgcgccaccgccaaaggatccgcatggccgcga

SEQ ID NO: 378127 - DNA, 261 bp, Zea mays
gtctcggttcgctcggcctcaaattccagcgcctcgccctactctcgtcgtccgcgcttccttcagctcggccatggcgagtcccttccgtctctgttctttccctgcttgcgtcgtgatctcccagctgtcttggccgcgaagagtccgcgccatagaattcgcccgaccgcgacattgctttacttctcgcgtcgttgctcgccaagtcctttctcagtccgcgccataaaattcacttggaccgatctcgtcgtcgtt

SEQ ID NO: 378128 - DNA, 244 bp, Zea mays
aactgaagcaccagctctccaagacgggggagaggatcgttctcgatcgtcgtcaaggtcatggttattaataagggtctattaataattaagttagcgtcgtagtcttaagttagcgtcgtcgtcttaagttagcgtcgtcgtcttttagcgtgttcgaagtcagtgtagagcgagatgtagagaggtcgtctgtcatccgccattgaactggaactgcttttcaagatgaatacgcccctct

SEQ ID NO: 378129 - DNA, 262 bp, Zea mays
gtcgtcgccggtgtagtagtccctgcgctgctgctgcgcgacgaccacgcccgctgcggcggccatcctctgccgaggagcggggcagtcccgccgcttatttcagctgaaacaagctagctccgggcattcaacggtcacttcacagagaggcaacacgtggcggtcgggtgctgcatggacccaattcgctgccccctcgtctggtaggatccaatcaggaccccgaaggctgctccctgtaccagtccggtgctgcacc

SEQ ID NO: 378130 - DNA, 243 bp, Zea mays
ctgaaatgtgcatgcttgcaacatgtctaatatagattatatttgagtggtatctttgttgaagaacatgtgaaattagagttctggtgggcttctagaacacacactgctcctcatctttactttctctacataaatcctcaatatgttggtatgttccgtgacccctggtttagctaccttatacatggatgtcgttacagaaatcaactagttgtctctgaaggacaggctggtgcagtg

SEQ ID NO: 378131 - DNA, 171 bp, Zea mays
  unsure (1)..(171): unsure at all n locations
cagaaaattagtanaataacaattagcccatggtatccaaatgtgccctaagtagtgtggtgggtgatagagcaacacacagccttttttttggttcagttgtttcatggcatggcatgatgagccaatgacttcattgaggagcagcaacagtgagatgcatagctcagt

SEQ ID NO: 378132 - DNA, 181 bp, Zea mays
  unsure (1)..(181): unsure at all n locations
atcctaaagcaattgttttctctgtttgagcaaggttactgagctactgtagcgaagaacaattttggtctcaggtttacacatgctgcttaaagttggcatacccggctttcgggcnggacaacaggacgtgtcttcttgaattgccttgtattatacaagtataaacaaacaaacgcta

SEQ ID NO: 378133 - DNA, 265 bp, Zea mays
ctgcaagccaaactcctctccccagtcccagggtaggctgtccagaactgcgtgcgccaacacctagtctggtgaccacattcacccgagtaatcaccttgtcgtggctaggctgactcaagcaggggcatgtcgccgtgatctggcgttgtgggtagctccaccgcaaaccatacaactcacgtgttccccgatcaacctcgcgcgagcaccgtgatctataacacctagaagaagtggtgtttgaaggagtctactccaatgc

SEQ ID NO: 378134 - DNA, 270 bp, Zea mays
cgatgcggccacgccggccgaggagctcgccgtgctcaaggacgaggtccgcaggctcatgcaggggctgcccgaggggatcagggtggcgctcgtcactttcgctgcgtcggtgtgggtgcacgatcttggatttgagggttgcgctcgggtggttgtgcttaatggcgagcgtgagctcagtctgacaaggtttgtgaatttgtaatatgatccttaggacaccgaatttgtaatttggttctgcgccaatctatgtgacatgatcag

SEQ ID NO: 378135 - DNA, 270 bp, Zea mays
tgtttattgaacataactttatgtgcttttgattttttttagaagtttaagttcaatttcttaggcctatatcccaaccaggataccgttattccttagtactctttactttatgcattatactaacccaggtcctggagaaagttattcaactttctttagtgccagttgccgcattcttattctgtataatacattctctcttggtagctaaattgtttttttaatgaatcaggcatcacaaggcaaaagaagctcaggtgagaatgt

SEQ ID NO: 378136 - DNA, 269 bp, Zea mays
tcaagaccttcgtctgtccaagttcgctgccaactactatgctacatcggttcgtgatggtcacaggggtcgcagtcattctcgattagttggtattggtccttgtgactccaaattttctttatccttctgatccatgaaatcactgttttatattcactatcttgttttatattcacaattttttccatcctcaaggttcatgttgcaaagtatagaaaacaactagtttctaggcatggtctactatctgcagttttagttttgtt

SEQ ID NO: 378137 - DNA, 269 bp, Zea mays
aaacaatcgcccggcctcctccccttccattctaggctccgcgtctcgctgtccccactccgtctcatcccgctgccgctccttctcatcgtcgtcgtcccagtcccggagtcgctccgctcctctggctaagcgcaggtttgagggatgccgagtggttgtacctcgccagcgattcggacaagcggctattgatctacttcccctttatgcaggtcaagctacattccgtgctattcaaaggccccaaggatgacgcaatggcaatg

SEQ ID NO: 378138 - DNA, 210 bp, Zea mays
cagacgtcagctctcttgcatcccttgctgctcatctctctcatctcctcagctcaccttgccggcagctaagcttcttagccgagcccctccaactagcgtgctagacctttgacgctgttgccccgtcgtccaagctccagtacatcggccggtgaaaagaatcaactagtggtagtcatggtccttgcgaaatccgagatcagctta

SEQ ID NO: 378139 - DNA, 258 bp, Zea mays
gtttcaaacaagaatagcagcatcacttatgagcagccagcctgaagcttgtcttggttttatcactctgtaaactgatttgctccagcgacatgtcttggttttatcactctgtaaactgatttgctccagcgacatgtggttcttacatttgaaaccctcctgaacgcatactgtagacaaatgagatacgtaagatggatgttgtatttgacagtctaaaaaaaaaaaaagaaaaaaaagaaaaaagaaaggggg

SEQ ID NO: 378140 - DNA, 162 bp, Zea mays
taatgagttaaggggttgcaatatggagtagtagtggaggttattgctattggaatcttataggacaataccatcctagaaatctcgggagatggcgtgaattacatggcaatgaaatgatgggctagtatgtcataagcatgcgtacctgacagaaactgg

SEQ ID NO: 378141 - DNA, 291 bp, Zea mays
tagaaactgaagagcctcctttcagttttaaattgtgcatcggaattgtagaattgttatcttagctttcaaggcatcgacacttcaaccttcggtttactcgtttcacgtgtgatccagctaagcactagtgtgaagtcgtagaaacattggccctttcgttcgttctcttgggagagttccagtggcgatgaagcttttcagttttcacagctcggatgtgagcaaatccatcagctcctgcactgcatggatcaaccgggtgtgtacagcagagcaagttcaatgaag

SEQ ID NO: 378142 - DNA, 285 bp, Zea mays
ggaatacaaaagaacacatcttctggccctattattttatttaccaaaaaatcactgttttctttggtgctcttggatggagaattaatcattccagtacaattcatgagtagaaaggaaatgagttgcatatttataaaatagattcacttttcatccacatggactgctttatttttattgctattattttaatgctatggctattattgtaatcctaatgttcgagattccttgatatttgaccatagcactgtttgttctttatacaggaaagggagcatg

SEQ ID NO: 378143 - DNA, 255 bp, Zea mays
aaaaaaggtaatacttgttctcatgaaagccacctaacgaaagttacaggtacaaatttagattgaggagtgatgttgttgactcaataccaaaacagcaatgcattgggttttgagaatacctcattcaaggtttactaatgctccgtttggatgtcaatattggaggtcatggaattgaattaggttacaggtttactaatgctccgtttggatgtcgatattggaggtcatggaattgaattaggttgaata

SEQ ID NO: 378144 - DNA, 246 bp, Zea mays
atgggccataatgcatcaaggccagacccatccagaattggcacaccataccatcctatgcaggtgggggcaacttatactacccctagtcctcagcctgtaatggctgggaagttcagtcctgttgtttatgttcaaccaggtcctcaggtgagtgattcagcattatcgtttgccttgagacttgaagtggataaatatcaagaataggaagaggatgcagagtattgttcactatgttattta

SEQ ID NO: 378145 - DNA, 245 bp, Zea mays
caggcctccagtacagacgactgcgggttggtgatggcccttctccaaaaaaaggggagactgttgttgttgattgggatggctatacaattgggtactatggtcgtatctttgaagctcgaaacaagaccataggaggttcatttgagggtggtgacaaagacttcttcaagttcaaagttggatcaggacaggtcataccagcttttgaggaggctatatcaggcatggccccaggaggtgtt

SEQ ID NO: 378146 - DNA, 190 bp, Zea mays
cgacggtcctaaagaagttctacgccttgaaaatcgccgatatgattgctcctcctggagtggagatcatagactttctccatgcaccttcttcgccgattccctggatgacagacgaagaactgggacagtacgccgagaagttcgagaagactggcttcacaggacccctcaactactaccgcatgct

SEQ ID NO: 378147 - DNA, 308 bp, Zea mays
aaagactagagcgagtccactaatcacgggtggccaaagaaattcacccgaccatgccttcagagtttagtattttactattattcgtcaccaccctgctacatgattacttgtatataaatagagggcacacgacaccatcctgtaggttgtagtcttgtgatcttgtccttggaggtacacacaaagactggtagacacagacgacctctgccgatggctggtgccccaaaagctcgacttgtatataattgcaagttatagattatattgcatacaggtgactatattagttatatgtattttca

SEQ ID NO: 378148 - DNA, 106 bp, Zea mays
agcggacgtcatctaacagacactaacatagtgtttattccaggtgagccctggtgcatgcaacccctttccttgtgtttttaaatacttttcgcacacttaagtc

SEQ ID NO: 378149 - DNA, 284 bp, Zea mays
attgacatcatcatcatgatcctgcgcccgcagccacgcatgtgatgactccctgcagcagtgggtttggacgatgtatgttggtatgttaggctctgactgcaggaacaaggatctaaggctgttttcggtcatcagatggcaaagaaaggtgctgtgccgctcacctgtatcagtacacaagtgcggtggttggttggattagttttgcgctcttagcatagcggttatggagggtgtaatgcaatataaatgatttcgtgtggcttcattgccaaaacttt

SEQ ID NO: 378150 - DNA, 280 bp, Zea mays
atgcaaaatagtgaatataaattgggtttttcaatgcccctggaagaagcgaaagagagagctactcaactccaatcagaagtaacactgctagaaaggcgcatgattcttgctagtggacttgagggtatggaaggatttcgccagagatggagcttgcatggacagcttgaagacacaagagatttggaaaatggatggcgccatgtcttttggtctcagtccttgcatccaagcatcgctccaaaaaaggatctcgacccgttgccaatcttaatcg

SEQ ID NO: 378151 - DNA, 266 bp, Zea mays
cagacttgctcttcgttctcatgttgaaaagatcttaatagagaatggtcgaccagttggtgtcaagctacaaacctgacaagtaagctctagaagatattttattggcaagcaaacttaaatattgccacttcagaataaaaaagagagagagggacatgtcacagacacagccaataacagccagaactagcatggctttgatttaggtgtcatatgcttatcatagacaatgattttgtgtggtgtataatttccaatatttt

SEQ ID NO: 378152 - DNA, 280 bp, Zea mays
gggctatatacttatttatacatgagatgcaagatagaactgagttgatattgagagtcctggtctcaaattgcagttacgttctttgagttctgtgatcttttgtgcagtgcgacctgacgttgatattgcgtctctttttccttaacctgacaacgtagtacatgaccatcgtatttgtgcttattatgctggaaggcgcaatcactatggatgtatttctgaatagcaactgggaagaggatttccccgctgaccatcaggcaagtttgaggatttc

SEQ ID NO: 378153 - DNA, 275 bp, Zea mays
atttctgttcatgtgatctgtttataaatctgttcatgtgatctgtttataaatctgtttataaagattgggaactaggagaagctagaggccaacactgtacacaggacgaagaccttgaacaagcatttgaaggactttatcttgatgacccttagggcctagggccctacactttgtaatctcctactattcttcctattcctactctattctagtgatctggacatctgttgttgtaaactgtactcttagcatgaacttattaaatcaga

SEQ ID NO: 378154 - DNA, 138 bp, Zea mays
ttaaagtccagacccacaacatagaatcaaggtcaaagaatctcataccagtcttcgactccctccatacatcaaggtttcaacagacaaggttgaacgctcctgataacagcaggtgcgggctgctgcagcgacaga

SEQ ID NO: 378155 - DNA, 281 bp, Zea mays
aaaaaaaatgcaacatacttttttcaggtgattcatatcaaagatctgattcacataattaccaagttcagcagttttgcctctgacgatatgggttcttgggagggccaagctagcagcttttgttggatgaggaagaagacgatgaagagtttttctttcttcttctccctgctatactttcattcctctctgaagagcaaagcgaaactggagcagctattgaaagtttcgtggaattcaagaggagcaccgcagccaaaacgctcgaagctcttgaa

SEQ ID NO: 378156 - DNA, 275 bp, Zea mays
gttcaaggagacaatcagattgaatctgtgcaacctacttggggcagatccatctgtggtcaatctcaaggccaaaacgcacgagaaagttgacagtctaggggaaaacaggagatagctgctcataccgtagttctcctgatgcggaagtagaaaaaaaaacaaatagtacctaattgtatcgtgctacaagaaaaaggtcgttaagttatacttgcccttgttaaatgctctagccagtatggaaatctaaaatcttcatgtggtagaaacaa

SEQ ID NO: 378157 - DNA, 184 bp, Zea mays
gttgctactttcgatcactttcttgatttttgccacggtggcggtgccagcgctgaggtctaggagcctgagctgggcggcgctgatgtctaggacttcctcaagagatgcttaacccttcagttaataggtaactcagttactctatattgtctcagttaatggggaactcagttaatcttat

SEQ ID NO: 378158 - DNA, 276 bp, Zea mays
tgtaaatgcaactataaccatagactgttataatcacttaatcagaagttttagcacgtagtattccatccatcgatttcagatctgaaacagttaaggtgtttagtttctagggctaaattttagtcctacattttattatattttagtctctaaattgtcaaatacggaaattagaactctattttagttttcgtatttagcaatttatggactaaaatagaataacattgagggactaaagaatagtctctagaaactatacacctcctaaga

SEQ ID NO: 378159 - DNA, 120 bp, Zea mays
catacagatagcttaccttcttggttcttcaggagtgcaaagttgcaggatctcaggcggcgctgacgatgacgcagcagccctggagccttccacggccgagcaaggacgagtaggaag

SEQ ID NO: 378160 - DNA, 177 bp, Zea mays
  unsure (1)..(177): unsure at all n locations
ggcggacgngcagcggaggatcccgcgacggctcggtcttcgcaggtggcttagtgggtgtgggtagttagcgaattttgcatatgttgctgaaccttggttgctggcaggttcaagattttgggcctgcgcacgcaaccgctattcctaattttttggcggcttcgaccgtggatg

SEQ ID NO: 378161 - DNA, 271 bp, Zea mays
attatatataattctatttggcaccaggaaaacttgaacgtatgtgctgatgcctcaaatatgtcagcggatatccttgaaggttcaatggatcaacatttccattcgataatgcaaaatcgctatacacaacatagaagggatatggtcgatgataacttaacatcagaaataattgaagaaactgttaattatgaagaattgcatcacatgtttacttttattttttattgctaataaatcatcatcaattgtttatagataatctatt

SEQ ID NO: 378162 - DNA, 272 bp, Zea mays
ttcgtacttcaagcagatcgctggaagttcacactgattggcgacaagctctcgcccagggagaagttgaaggaggatcaacgtcaacaacatgcgcaatcgctaatcagtagtttccaatatgccagctattctctcacaaattttttgctccacggaatacttgcttttgtttaggccctgccactgaagcatggtagttttatcgctctagaggcgttgacatttcttagcgacttactggcagctcgagttgtggaggggtgtgtgat

SEQ ID NO: 378163 - DNA, 271 bp, Zea mays
gcctaggagaaatcacggtctgggaagagcagtggggcgatgaggagctcccacggcacccatagcctatgagttgtttggtggtgttagttgcgattgtgcatatgcataagccgaagctgggagctggtagggatctggtattgtctctgtatgctatctggcatgcctaatgtgatggcactggttagtacctgtttgtatggccttgtatagaatatatttcgaccgagtgtaggttgtggactttaagtcatatagctatacttga

SEQ ID NO: 378164 - DNA, 268 bp, Zea mays
  unsure (1)..(268): unsure at all n locations
tgtgttcctaaggccactgaagtagttanagctgtacttattgtcgcagctgcatttcttgtcttcctaccttccaggcctctgatacagatgttagtcctggaaatgtacacaagggagatgcccctaaggaaacagtacactgaaaaattccgctagcgaattagagagtggtgggctcgcattccagctgcacctgtgcagatgatcagacctaatgatagcaagaaaaagagatgatcatgggcttttagggttgatttggtga

SEQ ID NO: 378165 - DNA, 265 bp, Zea mays
cgagctgggcagggagtaccggtgcgtggtgagcaagcagatggtgggcatcctgctcacgaggtggatgcgcccggggacctcaactcgctcaggagcttcttcatgtccgagaggttcgacagggaccagatgctgctccgcaaggacgacgtcaacagcgccagattcgccgacactctttgagacatgcgtgttgagagggtgaagttgtcagtccagttctccgactgcaattgtactacgcaagcaaaagtgtgatgca

SEQ ID NO: 378166 - DNA, 264 bp, Zea mays
aatcggtaccaggctaccagcagcaggctggtgatgaagtaggagcagaagtcgtagatgtaccagctccaccatggtcggcggctcctcgggtatgacgtacgcggaagccactacgccggcgtggccatctcgcgccggtacgccttcctcactacctgaatctcccgggccgtctcctcctcggactgtcggggcactttgtcgttgccgccaccaccaccgccgccattcttgccgccgccaccgctgttgccgttgttg

SEQ ID NO: 378167 - DNA, 281 bp, Zea mays
gcaatcctctgaagtctgaaggatgacagcacagagagacattttctctgtaaaaaaagaaaatgtttgacggataaaataagacggcagcctagactgccaggtcaaatcctttgatttgccacctgattcagcgatgctctactgctgtaggtcgctggcttctagcctcgtgcggtcgtgcccacgcaggttagttccaaaaaaaaagaggaaattcgctgacggtctataacaggtactctactgctccgtctaaaaaacgaaattgttgctggagg

SEQ ID NO: 378168 - DNA, 281 bp, Zea mays
cacacctcacagagctgcaggagcatcagcttgcaccttttgcctctcctccttccttcctgcctgcataggttgttgctacacgtatatattctgaagaagagatcgagatgaccagcgtgtggaagaccaaggttctgcctggcctcaacaagatctttgacaaggatggcaagaaggctgcagctgcaggcttcttgaagtccttcaacaaggaggagattgacaaggagattgaggacaagaagacagagctggagcccaaggtcgtggaggcctac

SEQ ID NO: 378169 - DNA, 292 bp, Zea mays
ttgaactaccccgatgtataaacttattgtttctagttacaaaatcatttcctcaagttcatcttgtatagttttctaaatcagtttaggtctcatcagcttaaagcagtatgagggatctgaaagtaatattggcggtcactttgttgctagtgttattatgatttagtgtgcatgttcaaattagcaaccccaaggtaaagttacattatgtttgtccattcaaatagtagcactcatgtcatgtttcttgctgatctgattttcctttttgttaaggactgatttcata

SEQ ID NO: 378170 - DNA, 149 bp, Zea mays
agagatgacaccaccagacaattgagagtagtagataagataactttatacagacgagtggccgacgttaaagtcgatcactcagttctgctgcaggaggaggtggtgctaggtggcgatgagcagatgagggtacttgtggttcgaca

SEQ ID NO: 378171 - DNA, 122 bp, Zea mays
atcatcctgaattcaagagattattcagaaaatcttccaatttgcgtggcgcggtctctgttgttcgatgcatgttaactatgttagtgtttagatcaattgcaataaaaaggacgcttgag

SEQ ID NO: 378172 - DNA, 282 bp, Zea mays
acggggtagctaatggccttgacctaaagtactaccctcgtcgttcgaccggcagtgctgaaggtgtgattgtttcacccgttggtgagggcaatcccaggctgaatagcatggtcaacctggccaccgtgctcaacgccgagctggaccacgcccttgactagttgggaacggttcgggcggagggtgtggaattgcgtgctgagtgcgtacatgccactatcttgatggtgattctcccgcccctgtcgggattcagcacccttaccattcacgccccgt

SEQ ID NO: 378173 - DNA, 123 bp, Zea mays
gcctatgtgggaataaatccagtgttagtctatggctttcgctcagtatgtatatctatatgtgatgttgtgaattattctgatacccatagactactccttcggtcctgggacattggtcgc

SEQ ID NO: 378174 - DNA, 276 bp, Zea mays
tgccatttggctctggaatttactttctgtgcgcgtgagataaattagttggtgccttatgccatatggctctggaatttattttctgtatatttttgcctgtatggcgcttgtgatctgcttgaaatctcactcgtatggtgtttattcctatatcattctctttttgactgaagctgaatggtgaacccttcagcttgtaaaaatctctagttttttcattgtttctttacacatctttccatagagaagatacaactacctgattatctttgt

SEQ ID NO: 378175 - DNA, 280 bp, Zea mays
gttttggtgcaagaggcaacatagttcaccaagctcaaagtcttggcaggagcctgcaagcagccgcagtgtgcaagaatggggtaggttctacagttcaaaatactcatgagacttcgattgtggaggtggacgttgcttcctcagccaatggtgaggtgaagatggtcactgaaatgcagcgtgggttcttcaaatttcagaattagtatggaggaggtttttaaaatggtggaggaaaagtgccttcactcatacaagatgctaccttcagatcttt

SEQ ID NO: 378176 - DNA, 240 bp, Zea mays
gaggtggttcacggagaatatgggcctcttgtaggtcccaggcatcacgttttgcctataatgcgagaccatctccaattgttctcaagaccgaacatggaattgatcctctgaaccaaaggatttggatgcatagttctcagcttcaagaagtggagcttacattgggacttgccatccatcaggcgcagtcggagtgatgggtgcgtcttcctcttcctgcctcagatgtttagagaa

SEQ ID NO: 378177 - DNA, 185 bp, Zea mays
ggctattcttccatcatttatgtgttcgttcaactgagccgccatgcgccaaccacggtcagggccggggaagtagcagggccgcggttacggcattcctgcggcgacgcttcagaagccggaaacggcgttggcgaacgtcgaccagatcaacggcgacaacatctcggagagcttcttattct

SEQ ID NO: 378178 - DNA, 157 bp, Zea mays
gcaatgtaagcgtttgtttctgtcttggcgctttgtattgacgttatgtggacctgaatgtctgtggaaaaacagaggtgccgtttggttcacgaaatgtaacgaaatgtaacgtaaatggtaatggtaacgattcacactcgaataccggggtaac

SEQ ID NO: 378179 - DNA, 277 bp, Zea mays
acttagtcgcgtgacacaccaagataacacgtgttatgtgctctccatcaacaagtgaagctcaccgaagaaggatcattaactctaccggtgtctactgctcagaacagggtctcgctgccgcagaacgttgtcgcagacgcttcaccgtcgaccctttgaactgcgtcatccccggttaatctcgcgcgcgtaccgacagcttcgaagtgtccccgctgccgaattaaacacgtgtctacgttcaccgtggatcagagcctgtgtcgatgccctc

SEQ ID NO: 378180 - DNA, 275 bp, Zea mays
ctcgtgagcactgcacacgtcatcggctacgacgactacgaacacgctcgccgcatgcagttgagaagtgtgcctttcaacaactctattatttatttcgatccttcattgcgtagtactagtacgttctcggactatggattggtcgatgatgtgatgatgatacacaccacgattggagtaattaatactactcatgcttcattagtactggtggttgtaattaaatgtagttgatcaccattttaagcatgtctcaaaacaatcttgtttat

SEQ ID NO: 378181 - DNA, 281 bp, Zea mays
gtggttctctccttttgccatctttagtgaagctatgaaaggtaaggtacattggagtctactgtgctatactactgttgtgcttggccggtctatttttgttctatttgtttcacactccgatttgaaacaagtgaaatgttttttccttggaggagatggagccagatgtgaacttattatctttcttttttgtgcagagtcgagtgatcaagaccaagagcgttgagtacatgcccttcctcctgtcgctggtgagcttcctcaacggctgctgctgg

SEQ ID NO: 378182 - DNA, 269 bp, Zea mays
acagcatctattgtataccgtgactgagtgagacatacttcaattcgcaccggtaacaagaattcagacagctgttattacatcactgaaacagtttatcccgaatgatgacgacgctctctctatggtatacaagcactttgacatgaagcatgaagctgcttctctccttgaatcacgtgcagagcaatacatgaacagctggttatcacgatatgataaggaacggcgaaatgatgagcttctggacgctatgcatcatcttgtag

SEQ ID NO: 378183 - DNA, 282 bp, Zea mays
agatgatgcagctactgatgcagagatgactccagttgatgtagatctgaaccttgtcgagagtattctgaactcgtactcctcgcaacaaggtcttcccggtccggcttccagtctgctaggactcatgggcataaaggtccctccagatgttaaaaagatgtgatttttgtattctagtgtacacgtgacatcttgtgaagctgggatatataggaaaaacttatcttccgttcaaaaaaaaaaaaaaaaaaaaaaaaaaaaaaaaaaaaggggggcccc

SEQ ID NO: 378184 - DNA, 281 bp, Zea mays
tccatccgttccagccctcttggtaaagacagacagtacagtaggtactggtttttcaagcgtgaaggaagactttttgttgaaactgcagattccagagaatggggttactacagcactaaggaagagcttgatgcgctcatggactcattgaatgtcaaaggtataagggagagagctttgaaacggcaactagagaagttctatagtaagataagtaatgccctagagaaacgatcaaaagacatcgcaaacaagacgttacttgaagagggtgtgct

SEQ ID NO: 378185 - DNA, 265 bp, Zea mays
ggttgatggccttgtacacccttcagaagccttgggcatgaggtttgatgggcatctgtatcaagtggagctcgtgctacatctttaggacgtgtttgttcccttgtatatccgagaaattccataggtttgatgtttagcgtctggtgtagtaccatgtcacccaggttttcaacattgtaaggatactccagatggtgcctaacggtcgtttgcgcatggatgcttgcgcacagctgtcgctgatctgtgaaaggaacagtga

SEQ ID NO: 378186 - DNA, 275 bp, Zea mays
gttatcttgtctgtctagggaggatcaagtttgctttaggtactcatttagtgagggctctgttttgttgagccactgacttcacttcatatttggttcatctttccatggagaccatctacaattctatgacatgattatttctttttcacatcatgcaacagttccacttccagaatgattgtatgcctgcaactcaagttgactttgtgaatcaatttctactgtgttgtcattcggggcagagctgtcataactcatagacccacctggat

SEQ ID NO: 378187 - DNA, 282 bp, Zea mays
gttaagtgatcacgtgatgcggaagatcagagccaagtcattcccaagatgatgcagagagtgggcatctccgcaagacgatgtcgtcagtcggaccaacctaaagatggataatctgaacgagtgccaagacaaagtgtgacggaacctcccaagtcattaggcccgcctacagttgtccttgtccaacggacctcggacaaccctgtaaatgcacataatcacttgacaagttcgatatctgtatcctttacctttcccaagagtgtttcacccgtcacg

SEQ ID NO: 378188 - DNA, 271 bp, Zea mays
cccttttgaaatcaagttagctcgtccacatgcccggataagaaccggggagccagtgcgactggttagtagatgtttcttgtggttagtttctaaaatgaagttttgcatggtactctttgatggtttatggtactgtcacctctgatgtgttctattatttttattcaccactaatcccaatgcttaaattatatggcttgtatgttctgttattcaacagcttgttgctctagtacttcccacatctggatttagatatttcattcat

SEQ ID NO: 378189 - DNA, 256 bp, Zea mays
tcgtcattcatttcctcactcatcgaggctaggcaagctgtccgtcaagctcaggcagtctggcgatacgactataagccttcagtgcctaccccttcgccgtctatagagaaggatgccatcgctgatgatgacgatgtcgtcggcgttcgtgtaccggttcagcacggccgtcgagtgtgctgagtgtcagcgcacgggcgtcaccctttgatgcgaactcgatagctccatcggctgcatccatctcagcgac

SEQ ID NO: 378190 - DNA, 113 bp, Zea mays
atgcgagaagcttttagccttgggctgtcgggcagagggactcctaaatgtatgatgtcaaaagcgcacccctagatctgtcagttgcttcgtatacatgtacgtggctgtgt

SEQ ID NO: 378191 - DNA, 253 bp, Zea mays
ccgctcgggttgccattggtctgcgcgcgggtcgctcatcttccccagccaaggcctctcctgcgcgcggcactctgctcggttccttgtcaccgcgccgcgccgagttcttcacagtcgcgcctgcttcccatggccacgggctgcagctcgctcgtctccctgcgcagtcgtgctcatctgctcggtctccctggcgctcgaaacccagtcgcccagcccagccgatctctctccgcgcgcgttcctgtgg

SEQ ID NO: 378192 - DNA, 152 bp, Zea mays
caagaacctgatatctatcatcaaataagatggatgggaagtacaatgggcatgccttggattgacaatcttggcaaatatgaccatggtttaccaattttggtccttgccagtggactttgttggcttgcgttctgaataatctcacatga

SEQ ID NO: 378193 - DNA, 133 bp, Zea mays
gtcatcttggacaacagatacgagttccatattttgctagtcaacatcaacagcggacgcgctagccaagtccaaggaggcgtcgccgctaagaaaggacgacgacgagtagcctcgccgcctcggctcgccc

SEQ ID NO: 378194 - DNA, 149 bp, Zea mays
ttcactactaggcgcatttcctttcttcccattgcgcaacacccccgcggtagtatccaactggtcgtcagcttgtcgctctccgtcctggacatcgctcccagcacagcgtccttggctcggcatccccctcgagctcgtcctctcct

SEQ ID NO: 378195 - DNA, 216 bp, Zea mays
cgtacgtagctcgattcgctcactggtacacatgttttacaggcagacgattggataattagttctgcacggtgtgaatcacataggttatgaggtagaatcgctatggctgtgacgtggcatttaatgctgttgagttcttgcaaagcaatgcggactgaatgcaaggacaacgaagggcaacggcactcactacgctgctgttgtgaagagaga

SEQ ID NO: 378196 - DNA, 142 bp, Zea mays
agatggcggacaacagcagatgcatccgctccatctacttcatctatagcggagatgatggcaagccgtacgatgaagggccatggggtttcagccatgctggcacggagacaagattgatctgtgcaggttcgacgagagc

SEQ ID NO: 378197 - DNA, 280 bp, Zea mays
gaaattgaagaagactttgggaagtccagagtctaatcccagtcaaggagcacagagctaattcaaggtgccaatgatagttggccagttgattggaatcactggaatccggtggaaaactgtcaatcctcgagaacgagatgcgtagagtaaagatggtggatgttgggttgatgcctgctggtaatgggacttccatcaatgttttccgggatgcaagtgttcgttggggaaagaggcaagcaaaagtcctggagatagcagaacacggatggtgaac

SEQ ID NO: 378198 - DNA, 299 bp, Zea mays
ctgtttcatatctccatttccatatacattatacctagtcggcactagcgagcgatgagaaagatactgaacaattctatgatccaagcatggaattataatcattgaaactccgttgctactgttacttggttcataggctgatatatacatccaagctcgcccgcaccgccacctccacagtttatcatggtgcttttgaccctgcttgacagaaccaacagtgatgtatatataggtcattttgcctaatttgcatgaaatggcaatgtttagttgtaaggctgtataaatggtcg

SEQ ID NO: 378199 - DNA, 304 bp, Zea mays
tgtattaccggtgctcctcctactacccgtacccgcccgtggccacgcattaccacgtccagagcatggaggaggaccccaactcctgcaccgtctgctaaggcgactcatggcatggagaatgatctacgaaggtgaagaaggtagtgttgaaccagcatgcagtttcttttttttttcacttctagatcgcgttctggctgctcatggaggatacgcagcgtgtctgtatgtacagtacatatagaataacacgtacgtacgtgtggcgtatatgtgtaagtgggacttcgctttctgggat

SEQ ID NO: 378200 - DNA, 300 bp, Zea mays
gacgcaagtggctaaccagatggaccagtccctgtcagatttatgcttggttaatttctgctcgccggtgcaggcgacgcttctccttcagacgctcaaccagtcaagaaggagtccgagagccaggcatggctcggattaggaccgaatgccgtcaagtccaacctgaacctgagctagcacacaacgacacagccaaataagacagcacagcaacctcaccaaagcctttgcaggacgatctgaaaatatgctttccactagagtaccgaaaccataaatatcctctcgttatcgtgt

SEQ ID NO: 378201 - DNA, 159 bp, Zea mays
ggatgatcgtcaagtggaagtcgtctaacaaacactaacatagtgttacccagggtgatgatgtagaaggccgatgaaccgaagctacatttgaagccttggagtagtcttcttaggatcgtgcctgatttctgtaaaaatactttggaaattcttttg

SEQ ID NO: 378202 - DNA, 149 bp, Zea mays
cttcacgctagtagtgtatcataatacggtcagcgccgactagcacactgaaactcaaggcggttgaaggcgaactagagagaagaggcagatgttggcggcgacggatccgatgctgtggcacaaggtggccgccgtctccggggttg

SEQ ID NO: 378203 - DNA, 137 bp, Zea mays
cacaccttgtttcacttgtagagaaaaaaaaaactattgtaatcattttgcttcagtttttaatggaatgggcattgtaagctctgtatatgcactgagatttctgagactaacaaaaatgttttctcataagattt

SEQ ID NO: 378204 - DNA, 281 bp, Zea mays
caggcacaccgcagtagcaagcggtgccgcccccaatgggggctgactgggcgtgggcgatatggagcgtgaaacacgtcggaccctccgcgaagccggtccaggctgcgctgctgctcaactacgccccctccgggccatctcggctccttcccgtcgtagtagagcaagagagaagacaactttcaacttttgatatgcaaccattcctggactttgtcaagaggggcaatctgcagactgaattcttttctgattggccgacctatgtgtgaacttaa

SEQ ID NO: 378205 - DNA, 120 bp, Zea mays
gtcgctgtcggggtcattcttccaggctgaggatggtgtccagcgcagccgaaacggaagcctcagcgtgtcgctggctggtcctgatcgccgtctgttaggtggtgaggtcgcaggact

SEQ ID NO: 378206 - DNA, 159 bp, Zea mays
cttctttttgatgctattgattacactgaatagtttagttttcaggaaattttatcataatacctgcacccctcctcgctcaaccagaaaacacacacacacacacaaaagaggacagaaaaaacttatcataagaagacaacatgctcctggataact

SEQ ID NO: 378207 - DNA, 163 bp, Zea mays
agggtctgttgttggccataagatgaaaaatcgcgaccgtattggtggcgacattcaactgaataatgactactttattgagaggtcgttgttcaaccctgagcaatgccgcagaaggttccgtatgcaacaatcccttttcttggagattgaagataaattg

SEQ ID NO: 378208 - DNA, 206 bp, Zea mays
tagagaaggcagggaaggagtccaaagatgtggaaatgaaagagaagacagggaaggaatccaaatatgcaaaaatgaaagagaaggcagggaaagaatccaaagatctggaagtgaaagagaaggcagggaaggactccaaagacgtggaattgaaacatgaggcagggaaggactccaaagacgtgaaaatgaaagagaaggca

SEQ ID NO: 378209 - DNA, 152 bp, Zea mays
cgtacgtaatcatgaatggacatctatcccgccggaagagaactttgcacaccaacacactactgacttactgagtactgactgacacaattgtttacgttcaccgtacgtactcgtaagcatgctcggcagtatgccctgtctgtgctcag

SEQ ID NO: 378210 - DNA, 173 bp, Zea mays
tatacgacagccattgataataagccatcgatctgcctggaagagaactttgcacaggaacatactagtgacttactgagtactgactgacataatagtagacgttcacagtaagaactggcaagcatgtttgaaggcatgaactgtcagatgttcacaattgcaaactacgt

SEQ ID NO: 378211 - DNA, 170 bp, Zea mays
atcgcgacaccattcataataagccatccatctgatggaagagaactttgcacaccaacacactactgacttactgagtactgactgacacaattgtttacgttcacagtacgtacttgtaagcatgttcgaaggcatgccctgtctgatatcagtatccgatacatccg

SEQ ID NO: 378212 - DNA, 266 bp, Zea mays
cgcagaacggaggaaaccccgagctgccggttcataccgagctcgctcgagatggaggagttcttctcggcggccgagcaacaggagcagcatagcttcagggagaagtacaacttctgtcccgtgaacgactgtcctctccctggccggtacgaatgggcgaggctagactgctagattccccacccagcacaagagcaccattgatctgattgatatgtgtctaccacaccacaatgtgactagctccgccgccgccgccgtgg

SEQ ID NO: 378213 - DNA, 129 bp, Zea mays
gtccagactgcgggagggcatgcaagtatgacacgcaagctctggtaggaagccaggataccatcagaggccgtgatttttttaactcggtgtttggctgcctctttcttgacgagcaaacgcatgtat

SEQ ID NO: 378214 - DNA, 140 bp, Zea mays
cacgcatctagccaggactgtcaaggacagcggacagaagactgtacaactccctgtatgtgggggaggtctgaaagctatactgctggaattggaccatcatgtgcggtgtgtgcaatgctctgggctgtgtatcgcca

SEQ ID NO: 378215 - DNA, 192 bp, Zea mays
ctttcctgtgttggctccatcctatcctgcgcctgctgctgacctttggcgcctttgcatacttggcggccctcaaactggtccacaacatccgtagaggtggacaccagacgaaatcacagccgccactgcgaaggatgaatgcctttcatgaaacacagtctgaaatgaaggagtgtatacactgacgtc

SEQ ID NO: 378216 - DNA, 99 bp, Zea mays
tagtccttccgttcctgttgaggacctgtagcacgagttccatctatgagcttcggcgatgtagatttggataggttcacaagatgtagctttatgttc

SEQ ID NO: 378217 - DNA, 273 bp, Zea mays
gcgacggcaggccctgctgctcccaggtgtcagtgcgagataggagagcgcgaacctggccgagctccatgtgaggcagtcccaaggcacacgggcctcgcggtggcccaaggacgtcgggcggaagtcgcgccgagctactccctgcctacaccaaagacgcccaacgcagagaagaggatgcccaccagcgacgtcccgtgctgcgaccgccacgcgaagaaggctgacggcatgccccgctccgatatgcccaacagctgggaccgggaa

SEQ ID NO: 378218 - DNA, 270 bp, Zea mays
  unsure (1)..(270): unsure at all n locations
gtacttccaaaaatgatggttgatgttgacatctagatctgttgtgcagaatgttntgtactcttttctgcgaaaatgatttacttatcttttacgtaatatgaattattgtctctgcattttgattagaatgagcattgctttccatgtttctttcttgggcaaacaataaagatctgaattgacaggaaatcaataaaattactcaacactgtgtgctcactactcagtaattcttacttaccggaattggaaattacctgtctataa

SEQ ID NO: 378219 - DNA, 185 bp, Zea mays
aaagattttatatacgcatacaacaagggctgcacagaaagtagatccagctcggccatctagagatccgtggcggcgatacgagacaccggagcaggcgtgcgcttgcctcatcaattttggtttagtgcggcggcaacgatgcatgcattttcatcaggttatggtttgggagaacaaaacaa

SEQ ID NO: 378220 - DNA, 265 bp, Zea mays
aagtggtacaataagttttcaagagttgaaccaaaagaaataccgcacgcccctaattctaggaattggcctacttgtgttgcaacagctaagtggaataaactgtatagtattttattcaggtagcatcttcaagctgcagggctcaagaacagcaacttggacgcatgtgtacttggagctctcgaggttcttgccactggtgttacagtcacgttcttggacagagctggccggagaatcctccttattatatcttcttgtg

SEQ ID NO: 378221 - DNA, 276 bp, Zea mays
gtgctggtaaccttaagatttctaccaactttgtcttctgcacatgaagtctctgccatcaagaagttaatgcgattctgcagctgcaatccatagagacaaaatactgtagaagccgcagcgcaccggattaaagccgcagcaaaccgcagcgaacaattatcttgcttctgatgaaaagtgtgtcgataacagtagcatcgtgtaacattattgtgaccacgcatttcagaaatgatgaagtgatagcttcacttccatttcttctgaaaagcg

SEQ ID NO: 378222 - DNA, 227 bp, Zea mays
  unsure (1)..(227): unsure at all n locations
aaacagcatatcgaggaggttttaagggaggttatggagttgtgaagagctgctgccgctggtctccagtatccaccgatggcgatcaagaacatgatggtggcggcgacgacgcggtcgatgtacgcggacatgacggtggacgagttcaaggagtagctgcgggcgatcganaacgancaggangggngcatcagccgcgacgaactgcggcgcgccctgcgtgc

SEQ ID NO: 378223 - DNA, 281 bp, Zea mays
  unsure (1)..(281): unsure at all n locations
tccgttacccgcttaatttactagctcatcaaaatatagttcatgtgttcttttnatcctagaacattgtgttgtaataattaattatcttaagcatatgagagttatgtttgtggatgatcgatcatgtttgtggactttgaagtttgaactatgttccttgtcattatattatgtctgtcaagttatgttcttggtgaaatgaacatgaccacgtactcatatggtattttctggcgggtaacgggttgcccaatatcggcggatatcctgcgggtacg

SEQ ID NO: 378224 - DNA, 253 bp, Zea mays
cggcgacgagacagtggaaggccgtcttggtggcggcgtcggccgtgctagccgccgcatcctatgcgtgtgacgcggtgctttctttgatcaccaccaacttcatcaggacacacaggagactgtaattaatgtggtactggctcctgtatatttaggtaatggccggcggggaacgttctgtacatttgtatcaccgtagctgctggcctgcggctgttgtattttgtatatttgcagtaacgttttgcac

SEQ ID NO: 378225 - DNA, 277 bp, Zea mays
gcagctttgagtccatgatttttgagctctatgaagagggtcggtttgatcaggctgacagattgttccaggacatggccaagaaggggttcaggccaaccatctgcatgtatgaggcaaagatcggtgctttatgcagggaacggaatgtggatgatgctgtggaagtgctggaagaggagctgccaaagaatgaccttgttccaacagtgacaacatataacttgctcatgaagggtctatgtgacacgatgcaatcaatgagggcactagaata

SEQ ID NO: 378226 - DNA, 234 bp, Zea mays
tgagaattctgacttcttccagcaccgtggtgaagtagaagataaaattttctctccttggctgcaatcataggagcttaaaggcttaagatttgccgaacatacagttccaacaagtttgactacagacctggatagcggatgcatctcttctattgtttgatctgatgctgtgtacgaggcagatgcatctgatttagccatgggactctcttctctacagtgcatcgtcac

SEQ ID NO: 378227 - DNA, 240 bp, Zea mays
gcgggagactgtgaaggcacatcaggaaagttgcaacagtggcaagactgctggttgaatcatgagatggctgctaatggatcgtgggtgcgggttctagagagttgagcacactgccacatatggaaatgcgtcaagatcgataaggagagtagggaaccattgagcaaaggaataatcgctggtcttgtgcaggaaccggtgacagcctaaaacaggtgatgctgtcaatgaaacgca

SEQ ID NO: 378228 - DNA, 283 bp, Zea mays
ggggttcgtgccccctatgaggagccatctaactgggtatttgataaagggatctagaacctcttcactgcaataaggcaagcccggtgaatttgcccattccttgtattttgaaaatacttttatacactttaagtctagtgaaatgtgcactaagtttataggagtttcttggaaactatttgatgcatagactaccttgatatccattccttttataaatacttctttagaagtatcaaatattgtttacaaaattgcttagccctgtctagaggtaaat

SEQ ID NO: 378229 - DNA, 280 bp, Zea mays
ttcaagtgacactagtgatagcttcaacttatcatctctgggtgtaatagatggtgatgaatggaatacgaccttcaagagggtgtactaccctcttgctgcatgcctagactctatatctgtcatatacgctaaagaaataggtcaggttagcccaatatctgttcttcagcctctatctgaagattgctcagattctgaaaacatcagacacgagcctgcagatccatatgatctccaactcagacttgagcttggcacatctgcaccaagggagact

SEQ ID NO: 378230 - DNA, 208 bp, Zea mays
  unsure (1)..(208): unsure at all n locations
gttaccacacacgcacttcgccgtgtnnacngagctggtgtcagagatgaacagctcctgangacaccttaccataaaatggatagcgacatggggatactgtggacagctgtatcgagtagatgtattcacatttcgctgaaatagcagtcggctccttccctcccgatgtataggctcagattacaaagggcttagacgagggtcg

SEQ ID NO: 378231 - DNA, 204 bp, Zea mays
gtttgaaatgtaggaagatttgaaaatttattgaacttttaatattaccagccaagctgcacataaaacttcaataaattttatgtgcagcttggctggtaatattaaaacttcaataaatttgtaaggtaccacaattaaggggacaggaggatagcaattagacaacatgttttactttgaataaaataactcatgtgctga

SEQ ID NO: 378232 - DNA, 274 bp, Zea mays
  unsure (1)..(274): unsure at all n locations
atagcttatcagacagagaggttatangggacaccgatgattctgagtantatgttgcaaagctcactcgcactttgcagtcttgtgttcctctgccgtttaccgctgttcatttttgtggcagtggtataggcgatttattaccttggaaaatgtctgctgattcttcaagttagcgacttgcgtagcatggctacaatacaaatggtaaaagggctagggtattggtcttgggtaccaagctcattccaattcgaagacgaaatgatgaaag

SEQ ID NO: 378233 - DNA, 139 bp, Zea mays
ctagcacggacaatcccgaacgcttggactgggcttacggccggatagacgccgtcattcaccctcccgctctctttcccactgtacttgcgacgactgggctaccgatgccgacgccctcgcaggtgcgcaggtcttc

SEQ ID NO: 378234 - DNA, 283 bp, Zea mays
aattaaggaaacacaagtttagacagagttctactgctttactttgaagaaagtgactttcgttctcaatgggcctaaagagaatacttgatttaaagcattacgtcttgcctagctgctatttctaattagtaatctcactatattgtatgccgaacagacacttcatgtccaatgtgcataccatactatttccagtctaatgctctaattctaggacacaacaaacttcacaggcatcatgattcatgtcatgttctactttgttaagacttaacaataa

SEQ ID NO: 378235 - DNA, 276 bp, Zea mays
aagttcgtgaccgtcgtgctttacaagccagtgctgaggcggtagggtgtggtcgtgtgcctgcgctcctgctccctcttctcgcgcaggatcggtaatggtaatgccgtaatggtaatggtaattgaacaccccttgggttgcagcccaccccttccagttgttgttattgttgttgtagtggtgcagaaacgggcgagaacatcattttcgaatgattattagccttgttgtacctaatttggctgctggtggtggcagtgatggtttggttga

SEQ ID NO: 378236 - DNA, 281 bp, Zea mays
  unsure (1)..(281): unsure at all n locations
ggaatcaggtagcaccatgcatttactatcgcatntgattacggttactgtattgactgccaaagaaaaagaaaaaggctctattgtgccatcattgttctacaaaagcgtattacaagagtgaatgaccatccttgttctatgtttacctgatattaacatggtatgcacttggcgtggatgataaccaagattcatctagggcaatcaatgggatgtaacttgcatgttgtaactgcgactatcactggaccgatctgttcttctcttgggttatcagt

SEQ ID NO: 378237 - DNA, 128 bp, Zea mays
attatagcgtgtttgctttaatatatttgtttaacttcttggtatttacatatggtctagataaccacgcagttaaacaaatatattatagcgtgtttgctttaaggaatgagaaaatacatcttctc

SEQ ID NO: 378238 - DNA, 274 bp, Zea mays
tcgcagctagctgccggcggactgcctgctgtgccagtctcaaagagaggcgcaacgcaactcaagcttggtttgctctctctctcttgcgggcattgctttgcttgctccggtctcatccaacatttgttgtcattttattgtctagtttgaatactctagtattaattttaatcatcttcacacacacgtggattagagttaatactagaatacctaaacaaagtctaattagttttctttttcttttttcccaactttctttgttatttct

SEQ ID NO: 378239 - DNA, 286 bp, Zea mays
gataactttctgatacagcgctatgcatattccgggccttcagacgccgtcagcttgctggggaagtttgctacaggaaatgaagcgcagtttctgacgatggtgtacggaaacctcccatagtggaattgcgtaccgcgcgtgtcaaaatattgttccactatagctaatatgggacaggacattcatcgtttttttttcttctcatcatcattgttgtttgggcgcgtttggtttgcttccgaggcgcccaggcatgcctggctctcattaggtcaacaaggct

SEQ ID NO: 378240 - DNA, 260 bp, Zea mays
attcgtattccagtcaactacgtctcaccatagaattgttcgtcgcactaaatgttattaatctagcatacgtatactgtgatgatcgatttagataaatcggtaaatcaagtaattaagttacaccagcccttcccgtcgacccccagcctcgccctagcccatggacggcttccccgagaggctgtgacactttcccaagcttgagccgagacattgcctcaccggagaagcgagcgcaacctcgccgatattcgacc

SEQ ID NO: 378241 - DNA, 280 bp, Zea mays
gccatcgcatctggctcaccatcgtctccccgtcgctgatcatttttggctagctctcaggactcgccatctcccagtcgacgcgatctcccagtcgacgcgctctcctgcccttctgctttctgccgcactctctcgctttggttcccatggctccccgggcaagtttgttgtctcgctgtgatgagtgagctcttcccttacgccaccacctttccattaccgttgcttcttgcttgtgtcgtccctatatcttcaccacagtgacatagggaatatg

SEQ ID NO: 378242 - DNA, 276 bp, Zea mays
actagttctagatcgcgagcggccgcccgcgatctagaactagagggcggggtcgaccagggcccgcccacaggttaatggggcctcactctaggagtacagctactaaataacagcacgtatatataggtatatagcctcaaaaaaatatacagggtcctcactccaggagtctgtggaaacttaaggttatctttttataaactatttattagtatgggtaacttatttacaaaaaaaaaaaaaaaaaaaaaaaaaaaaaaaaaaaaggggggg

SEQ ID NO: 378243 - DNA, 279 bp, Zea mays
acgagttctagtttggctccggcatcacgcctttctttattcgtcgctacccgtcttccaggctcctcccgcggcgcgcctgagtttcgccctagcagcgcaccccgcacgtacttcctcctcatcttcggacccggcggcatgcgctccttcagttgcgctgccataggtacgcggcggcgtggaaatgctgtgttgcaccacgcgccatgcgcagctcctccttcaaccagggcggcgcatggtaaaggatgtggccacagtcgaggccgcagtcgc

SEQ ID NO: 378244 - DNA, 275 bp, Zea mays
tccgcctcgaggccgtgggtggagagaacgtggcggacaacgtggacgagcacgtcgtgaagcaggcagtcctgcaggccgtcaggagctgctccgagggcggcacgagcacgacgacgaggagtagtagctatagcaagaggctgagcgcgcgtaagcacacacgccttctgctacttgcatcggtcgatgtcgtccctgctgctggtgcatagctctggctggacaaccgcgcatgtactcgatcgatcgtcgaccggccggcgccctctctg

SEQ ID NO: 378245 - DNA, 277 bp, Zea mays
  unsure (1)..(277): unsure at all n locations
gtactactactatcaccaccagtagtactttttaaccttgtgacttgtgaggttacagcactactgagaggggcaagtggtaccctatcgccttgggagctgaaagcatggggagatgctgccggccggccggccagtacactgcaacactgagaggtcccaaaggagtacaaactacgttggcgcgctccttctctctctctaccttctcgctctctctctctgctagtttcaaggtntctttgttctttctgtgtgcaggtcatggacgaggacg

SEQ ID NO: 378246 - DNA, 248 bp, Zea mays
gcttggataaccccaaacctgcgaactttttcgccaaaatcttcgccagatgagctatgctgcgtccgccgaaagcgctgtctcgctcgctcgtggttagagagtacaatatataggtagtgttgttgtggcttcaaagggggacaagattgtgcacaattttccaaatggattggtatgtactgatgagcatcagcgcgttccataaaaaaaaaggaaaaaaaaaaaaaaaaaaagggggggccccg

SEQ ID NO: 378247 - DNA, 126 bp, Zea mays
gcaggctttcccaaaaaattgtagcagttggaagggtttttatgttcacccttatcaacgcctgaccaggaaccaatgcctttaatgtggccgtattttttaaaaaagatgcctttaatgtgaccc

SEQ ID NO: 378248 - DNA, 260 bp, Zea mays
gcacgtaactctaattaacatttcatgatttctgtgtattttattgctgctgaacagtagtttccacattttagtaagcaggtagcaggatacttcgtttatatgatattttctagattaatcttctttgtgttaccaccatatgtatcatatggcaggttgcaaggtcattatggagatattgctatgaatccttctggctcattcttagtagagaagtgcttgactgccagtaactgttctcataaagaggctatagt

SEQ ID NO: 378249 - DNA, 119 bp, Zea mays
attgttgttgttgtatctagacctgtacaaggagaaataatcaaataaggacaaacacacaatgtgggaaagacagctgtaatgtcgtttgatctagtttaagttgttgattgtaccag

SEQ ID NO: 378250 - DNA, 245 bp, Zea mays
gcaagcgtgtgtaccactcatcctttgatgtgagaagggaccttgtacgtagagaggccaggacttgtattttaactgttggtgttggtgatgttaggatatatggataactggctgcagtcttgttgtgacggtgttgattcatgctctgttgaagttgaaggccttgtgttctctctctaaaaaggactttctgtgtttgctgacgaagcaagataattggtgtagaaagatttaaacagggg

SEQ ID NO: 378251 - DNA, 269 bp, Zea mays
actctccatcgatcaattaatttagagcttgtatagaaataaagggtttaagcctaaatatgctttgcgtatataaagcagttaagcttggactcataggtcttgctggaaatgtaaagatgggatatatatcatggggcgatgtatatataggtatagcaggataggtaactagttgatacccaaacattgcataagattttatatgtagatccatagggattggggggtatacagtagattttgcgagaagggtatattggaacaag

SEQ ID NO: 378252 - DNA, 273 bp, Zea mays
ggacgttcttacaccgtggacacgtcgaagatccatagcatactgcggtgctccattccataggtctccaacttggtgccaaggatagaaattcctaggaaccgggtaatgaagcgagatccgtgtaacaattgccaggagctcgaccgaatgtctaaactgagagccgttgtcgccctcgcggttatcaaatcgatacgatcgtggtacgataattaattacgtgatgcggaggacaagagccaagtcgaccccaagcgcgggctactttgc

SEQ ID NO: 378253 - DNA, 269 bp, Zea mays
  unsure (1)..(269): unsure at all n locations
accatgctgtccagagcgccacttgctcgatgccgnncccatggattaccccttctcgctctagtgtgtccaagcgatcaagctcaagctaatcccttcaagcaaggacgactgtgattacggcgctgtctcctaaagaaaactacacagatcctgcagtacgacgtcggtggctgattaatcggctagctaagctggttcagatcggtcgcttgatcaggttgtttacgtgggatctgcgtagttttcatttagattccaaagaacat

SEQ ID NO: 378254 - DNA, 269 bp, Zea mays
ctgaagcacagcaaaatggactcatgtaaaagcacagaatttacaggattagctattgatgccaatcatgtttctgtatttggtggtattcaaaatcagtgccatgaccttcaaaagccagcaggattccagcaagagaaaggaatccaggataattgtcttaatctcaacatagaagatccaccatgcagttccagaatataagaagagcatggcaaggataggatgtttcttgatcataggcctttacagaaaactgacagtccatt

SEQ ID NO: 378255 - DNA, 264 bp, Zea mays
tagcctgcttgctctcagcttactagatattcccatgtcatttggaacactgcttgtgaggatagggtataattaacctattaaatgtctgtggtatagtactgatatgtgtttcatgtttctttatatcagtcattgttcttatggtattttcattgtgcagttcaattgttattggtcaaacatcaatatgtcttgttaccttatctgcaatttgcttcagattgatggtgccatactgccatccatcatcatagtaccaga

SEQ ID NO: 378256 - DNA, 122 bp, Zea mays
  unsure (1)..(122): unsure at all n locations
cgacaagcacctatgagtccgacgatcgcangcaatcctacatcacattctttattgctgtcaactagcactaacacacgatgtgatctgattaaggttgagaataaattcttatcattgaa

SEQ ID NO: 378257 - DNA, 244 bp, Zea mays
  unsure (1)..(244): unsure at all n locations
aggatccagcttgcatccgaagaaaggctgatggcagatgtcaaggnttcatattcgaaactcgaagnacatggatgcgctcaccgatacanacataattttgcaaattaccagtttcagtatgatgattcggtcgctgagcaatgtggcgatagacaagtcgcagaatggaggacgcagatgtatgctgtcacttcaacgaatcaggcagctcgtcctgagcgttaccgtgatgaatgggatg

SEQ ID NO: 378258 - DNA, 283 bp, Zea mays
acgacgagtgcaataagtgatattctgccatatgttattagatgccgtataatgtgttaggcatggaaagttattcgacatactgtatctgctgccttatctattgtggtctactgtaacttcattaccttgcttcacatccgagacaatttgagtttgttatcatgtggattatctgttttgaaatgaatgcataaaataacgcccctgctgctcccatatgcatcagcagtgtgtaccactatgtatgttatatactgtatttcgctaccgaataggcaca

SEQ ID NO: 378259 - DNA, 259 bp, Zea mays
taacatagtggtatctggagatagatccttctatattgagggtgcatctgctactcttccagtataaatagcaaaggtgacacttgatgaaaagagaactatggcaactgatttctctaatgattggtcctcctctgaggatgttgcacaatatgaatcatacttcagcttgcctgaatttgtggagttaccaaatgtgatcaatggtcagcatgcatatgcatattcatatgctccgtataataatttttttcaaggt

SEQ ID NO: 378260 - DNA, 239 bp, Zea mays
gggtgaccatacgcgaaactcaggagaaagcctacgagcaaagccatgaatacaatggagggaagtacatcctcgagagagctagaatggtgaaagatgggttacgaccattttgctgctcttacttctaacatcccagaagcgcaatcttcttgaactctggaaagattcagaagaatgcctcaatttgcatggctcagaacatttgacacctaattgcattccagttagccagtaag

SEQ ID NO: 378261 - DNA, 274 bp, Zea mays
aagctcatcatgacaagtgcctgaaatttttcctctttcctgttaccatgtgtcagaacattatgtagctgtagatatattgattatggaaggctgaagttgccaaaaagtcaccaacaaacgcacttacggaccgtacggacaggacgcaggcagcccgtcgccgtgacaaggtgatggacgacggtcacgtcgcaacactcctgtgaccgctctggacatcacctggacgcgatcgatctctacgtgaaccccaactactaactataacgat

SEQ ID NO: 378262 - DNA, 275 bp, Zea mays
gtcgtgttgatattgacgacgatgatgaaactgtaatggaagatgaagacgttggggaaattgataatgttacagatggtttggatgaggatacagatgatgattctactgatgaagatgacttggatcaacatgatttcaacggaacagtccaccacgagacaaaaggtggaggctgaacagaaactactacagatggggatgaatcccactgctccagatggcatggatgatgatgctatgtcccgcccttgatccttacattgcaaggatat

SEQ ID NO: 378263 - DNA, 292 bp, Zea mays
cagcgagcagaacatggccggtccgcccagtctcgctccaaaccaaagccatcggaggagcaactggacgaccatggcctcgccgctgctcaagtcacactctcagctcgccgccgccgccgccctgcactccgtgaggagagccgaccgctgccctgcgacactacacctgggcaagttccatgaccacaggctcaggtccggccgttctaaggtacacgatcacctcttaatcctgaaacgagaaaaatgaagaaatgtttatgtaaaaccatatggatgaacagagtac

SEQ ID NO: 378264 - DNA, 284 bp, Zea mays
gcgatacttgtgttgggtggcaaggtccttgtgtatggcggggaggactcacaaaggcgacgaaaggatgacttttggatcttggatacaccagctctacttcaatacgagtcaggttccaagaaaatgaccagaaagatgtggaagaaactaagaattgatggtcagtgcccaaactaccgatccttccatggggcatgtgtagatgcttctggttgctgtgtgtatatttttggtggaatggttgatggccttgtacaccttcagaagcttgggcatgaggt

SEQ ID NO: 378265 - DNA, 256 bp, Zea mays
taatatattcgctttctgcagtagacacattttagttctactagtgcagaattagcagctagccattgtgcacactgagtgtcaagtatagcagaggagcacctgtcttgtatctgagcctgttaatatcagtagttgtgtgcttgactgcttgtgttgtatctttgtctcaactcccaactgttatcaggtgcaaatttccgtccttggtaaaaagaaagtggagtggttatagatatgtgaaattaggggtgcg

SEQ ID NO: 378266 - DNA, 277 bp, Zea mays
ctcgagccgatttggattgatgatgccaggcccatcaggtccagaggtgaggggcaatcatccagaggcgttcgaaaggtagttccagatggagatgtcagccagatcgaagcaacagcaggtgcaccaccctgcaatggccgctggcgtgtgcctagtgggatgtacgggcacgagcttgatgcgaaattgagatacagatgatggatgcctggatgcttcactccgtacagaggacctggagggttgtagcatgtacatctgaacgggtgatgga

SEQ ID NO: 378267 - DNA, 271 bp, Zea mays
ggcaagctcggccatacctccctcttcaataagaacaagttgaagaaagatgtccacgtacctggtgtcctgctgcttccggccaccgtcagcgggggcggagatgcccaacgcggcttccgccgcctcctcctcttcattggccccgccgcccgataccaagagagtcggccgaagagactttgttttcaggagcagtgagattgccacgctcgccgccatcatccacttcagtggcagcctgccaagctaccttggcgttcagaagagt

SEQ ID NO: 378268 - DNA, 272 bp, Zea mays
gggatccattacttttgagccttggaggaggctgtggaagtcttggactcctccaaaatgcaaatttttccagtggctggctatacggaataaatgttggacatcagatagattggaaattggataggagaggtttggatcacccaaaatcttgtttattatgtgatcaaacacaagaaaccatccaatatctattgtgtacgtgcgtctttgcaagacagttttggcataccatcttttcgcccttggggtttgttaatctctctccgtct

SEQ ID NO: 378269 - DNA, 272 bp, Zea mays
cagtgtgtaatttggagatagtagtgttacaaaactccctgtcagattgggtgcagacctgtttcagacctctgaaactgaatcttcagtgtgagtactaaattttggatcaccacaacccttgttctatatgatttcagccatgagtttatattcacaataggtagcgatatccatgactcttaactttcgtgaagggatagtggtctgttactaaaagaaattgggtgatcaatgcagctaaacaatgaaatgtgcaagggggcagtgtt

SEQ ID NO: 378270 - DNA, 264 bp, Zea mays
  unsure (1)..(264): unsure at all n locations
ctaagtttgattcccacaacaagaggatgggcnctagatngnacctagtgccattccgaatcccgaggagggcaaatagaatgcagtggtgggtggctatcgctgagggatgaaaacgagccggatgcagggtcatcctggatccgaccgtaatgtatttctcttggatacgagaccggatacagggagttaagattcgggacggatagaggacgggaccaggtaataatccggatgggtaagaaacggatgacggatactact

SEQ ID NO: 378271 - DNA, 261 bp, Zea mays
taagaattgaacatccccaaggattgataaacaaaatccagtactctgaactggcagctggagtacaaagaggacgtggacggattcctgtggcagattgcgagatagtgaagtctgttgatgaaagagacgcagagaatgaacttgacatagctgagccaactcgcagttactactcgtgttgtatgtgccctggtggacatgttgttctaaccagcacaaacccatcagaattgtgcatcaatggcatgtcgttctcac

SEQ ID NO: 378272 - DNA, 266 bp, Zea mays
taaaacttcactagtaatccacacatacaactctaaattatgctacagtgtttaaatgtaaattagtggggaaggagggagttgtgagttgataacctgaaatatattttttctataactttgatgttgcagtcactgagtttctaagaagtagtcctaaaccatggtggataagacatggatcaatgatgatgctaggtacaaattcattataacacaaatataaatgtgatatctatagcttaaatactaatccattacaagag

SEQ ID NO: 378273 - DNA, 269 bp, Zea mays
ggcggcgccggcgtgctcgtgatctcgaccaaggcgtgcctccgctccggtcacccgtcgctccacgcaaccatggtaagcgagcctcttctcgtctggttatggctcgcaagcggacgtcagtgcaagcacggtagcggtggattcggatctggctgcaagcacggtagcgctggattcgattgtttttttgtttagagatgggttaagacgttaggtttggctgttgactagggctactgttgttttggctggttgcccgtgctgga

SEQ ID NO: 378274 - DNA, 252 bp, Zea mays
tacctctgctttgtctcactaatggtatgttcaaagttaacaacgggcatgcaaccagattttgggaagataagtggttggggaactttacacttcaatacaaatacccaagtctgtataacattgtccggtataaacatactacagttgccacggtgctcgggtctgtcccgttgaatgtctcctttcgcaggggtcttcagggggagaacttggggagatggtatgctctagttaatcgggtagcggggc

SEQ ID NO: 378275 - DNA, 123 bp, Zea mays
aattagagcaactcagagaaaggatggtcaaagtaagagagcttttccgcgacacggaatcagcagagtttataatcgtgacaatcccaacggtgatggcaatcagtgagtcatcaagactgc

SEQ ID NO: 378276 - DNA, 284 bp, Zea mays
tgttcctgctgatgttaactctcctcaaccccttggtttgtcctatcccagcgccttgcatgccatgttcctgcgtgtggtgaccaaatccatttgttcttgacctcaccgtggccagggcgcttcaaagaatttcatgccgaaggaaatttgttccgtgatctgcatagaacatctagaaggagtggtatttgaaggagtctactccagtgtctgttgatcaagtgtaggagccatctaactgggtatttgatagagggatctggaacctcttctctgcaaca

SEQ ID NO: 378277 - DNA, 277 bp, Zea mays
ccatcgcccgtcggctcgcgcgtcagcccattgacctcgacaacactggctccatcttctccgactgtgctgcatgatcgggtttgcattgacttcatcctctacgactacctcgactgcgtcgctgtcttcgtctatggcgccctcctgtgccaccatcaacccggcgcctcctggtgtgccgcagggctcaatgcaatatcatcccaccatcatgcacaatatacacaatctctccttcctacatgacattcctgctttagcagcagaggcatca

SEQ ID NO: 378278 - DNA, 272 bp, Zea mays
ggattttcggatgatctcaccaataatgtgcatggaattggacactccaaagagaacatcaccaccaacaacgtgtcacgtcccttcacaagtgggttctcaattggatcatgctaggattcagattctattgagttttccaacctagcaaacaaaacaggaatacacaataatgatgacatcatagacaatattagttagtcttatgaactacagtttggtgtggcaaaggaaatggcaggcctactacagatgcaacaagaccaggttcc

SEQ ID NO: 378279 - DNA, 276 bp, Zea mays
atccagtgcttcgactgggacacggtcggcggcgccgaggtcgatatggccgaagggggcggaatcacgctcccgagggctgtccctctggaggccatctgcaagccgcgccatgctatgcttggcgtcctcaagggactgtgagcgccatgctatgccttgatacataagtaagctttttttctttagtaaagcagtcatcttgcgtctcaagcagttgcttgctttattgcttgaaactcactttcttcctggagtgtagccgccgcagtgtaa

SEQ ID NO: 378280 - DNA, 190 bp, Zea mays
  unsure (1)..(190): unsure at all n locations
atcatactgtgtggcatgagacttatgaagcatctggcaatcaatggggagattctgatgcttagaagggtgaatattatgcatatggaacttatgagtacaggcatcaaatgccacagcatgctggtcaaacagctgcctatggtgcttatggtcaaacatactgtgataangnctatagacaacaaag

SEQ ID NO: 378281 - DNA, 253 bp, Zea mays
gtaggagccatggcttgttgccggctacttgggttctgtagactgttacactgactgctgccgtctcacctggccgtcggcgcgggccgccacctctcacctctctagtaatatactagggcttatgtacacacagctgttttggtagtggcatatgtatatcgtcggtcatgttgcttgcgacaaaaaaaaaaaaaaaaaaaaaaaaaaaacaaataaaataataaaaaaaaaaaaaaaacaaaaaaaacaa

SEQ ID NO: 378282 - DNA, 209 bp, Zea mays
atactcccggcccttgtgtctgtgtctttgtctgcaataagaacgtgtctatgcgtgacacctatcagttctgttattttttggcatgcgcctgacttcttgttcaactggtgtgagttgtatgctttgttcatgaagcactgatcaatgatcaaaaaaaaaaaaaaaaaggggggccccctaaaaagggaccccttcacccgggaatt

SEQ ID NO: 378283 - DNA, 256 bp, Zea mays
ggacagggccgcctacggttggtaggatcgactggtgcagcctccaggctgcagttagcatggggaaaaactgaaacaagtttcagtatcgcgcgtggtgtgtttttgtttgcttgccttgtgttttagacgttaagatgtaaagttgttgagagtgagttttaagaactcctgaagatgctcttgagcatataaaaactatgttggtaaatacttaattctttgcaaactataagttgttttaatttttataagt

SEQ ID NO: 378284 - DNA, 121 bp, Zea mays
cagatatgggacttattacttaattaaattggtcagcagacagtgtttccagaattcctagtgcatgtaaatattggcactgcagtggtagtttcgactttatcatgattcatatcatgtc

SEQ ID NO: 378285 - DNA, 271 bp, Zea mays
gttggaatggaaaactctaaccttaactgggttgggagtgcatatatataagtcgtgtaattgggccaagcccattacactgagggtatgcaagtaaatacacatggactagccccgaaatcctaacaatactctaacaattaccactgcattgtcacatactattatgagaccattgtgatgcatgggagtgtaaggcaatggccaggccagcagacaagcccaaagtgggaatacaagaatgtgacttgtcatttcacatgcataggta

SEQ ID NO: 378286 - DNA, 274 bp, Zea mays
atgccattgtaggtgtatgaacgttctacagcattcatgatactagacatgtgtaacactcagcagacatctgatctgggctctcggttggtactgcatgcatcccttcatttaaataacctgtaaataacatcactttgtggcagctaagcgaatattttaataagccatgagatgcatgatataagacatctgtactttcaggtgtttggggataaacattgtaccttccatatattaaagtggagttgccgtttgaaatttctttccctta

SEQ ID NO: 378287 - DNA, 270 bp, Zea mays
ctgcacggcacaatatgctcctctcagacccagcaggcaccaattgctacctggacaaggagaatcagacacacattggaatgtctttctcctagagttggaggagcactcaagtcgcaccttgacgtcgccaccatactgtccaagtacttcgcagtcaaagccgcgcagtttctgcggggagtggaagacgggtatgaagccttgagaagcttgcctgaatcaacagaaacagaattatccatcctccggaagggggtgaagctggcg

SEQ ID NO: 378288 - DNA, 264 bp, Zea mays
  unsure (1)..(264): unsure at all n locations
ttttcttgcggcagatgtcttatccagacgaacttagatacacnataggcngtgataggcgagaaggggaaatcaatctctgacacctctctacacttaacttattaactactttntacttctaaagagttggccttttctgtctaaataaagaaatacatttgaaagctctaaaaaacccggtgtatctgctttatcgtttctctgaatctaaaacacccagttgtaaccgagttcttttacagatccatgaccatatgggta

SEQ ID NO: 378289 - DNA, 195 bp, Zea mays
caagttcaccgcaacattaaaagagatacacaacatgctacatagtttattatatatttgtggacttgtgaacttgtggattatacataaaagaggggatatgctgctgatttatttttaaaactgtgttgtttcttctataaaaaaaaaaaaaacgggggccccccgataagtaaccccgccaacccgggaata

SEQ ID NO: 378290 - DNA, 253 bp, Zea mays
tacagcaacgcactcattggtggaggcttctcttttcagaatccaaacgcaacaaaaacctgtgggtgcggcaaatctttcgcgactgggaaggaatccgaggctgcagcaaaagcttgcaacaactagagtagtgaaatattgatagcaaatcgtgatgcaacttgttatatagcttgctcctgatcaaatcacgtggctccaccacttatcattgtttcgtttcaaaatagttggctttgtttgttttttt

SEQ ID NO: 378291 - DNA, 115 bp, Zea mays
cggagacgttctaatatgaactatgttatgtgctttggactatgtgttgtggaacttgtattttggcctttgtttgtggccattgtatgaagaactatgttctgtggatgttttt

SEQ ID NO: 378292 - DNA, 275 bp, Zea mays
  unsure (1)..(275): unsure at all n locations
gcagatgcgcgggctggagctggagctccgnctgagtctaggcgtcctcatcgacgtcttcgacgagcagtggatgcgcgacatcctccccgccgatgacatcctcgtgccgccggtcatggcagtctgaactgaggacgccgaggatcaagcgcccgacagtcactgtaggtaaccagtacgatgggatctatggcgtgattttgccttggaagatctctgattctagatgcgctagattctacatgtgcctctagaagtggagattctatgct

SEQ ID NO: 378293 - DNA, 283 bp, Zea mays
acaacaactacaccggagaggcatggaataacagcggcggcggcgtgcatgacagcggctcgccgcagatcgtcgccgcagccgctcaccactcgccgttcccatcgttgctctccttggctccacgtccgcatcagctggcgttctactcctcggaagctgatcagcagactcaggtggagaacattggctcgcaaagcctgtccttgagctcggcgagggcttaccatgatcaggctagctagcggactgcgtactggaacgactcttcaatcgagattaa

SEQ ID NO: 378294 - DNA, 278 bp, Zea mays
ctcctgtgcaactaccactcgcgtcaccgcggaaattaaccccgaaatccagcgccttcggcacgagcacgatcaggcctgcgcaggagatggggcggagaggggagccctactacgtcgaggcggtgccgccggtggacgtgaacaagaacacagagtggttcatgtacccgggcgtctggaccacctacatcctcatgctcttcttcgcctggcttctcgtcctctccgtctctggttgctccccgggggcagcctggaccgtcgtcaacctcgcg

SEQ ID NO: 378295 - DNA, 278 bp, Zea mays
  unsure (1)..(278): unsure at all n locations
ggaggtcaccgatgtgcgccancgtagcccgaagatcttcatggccaccgacttccagctctctgccgagaccaccggcggcacctggtaccacgacggccgcctggacactgacgctgtaaccactgcgcgccgctgctgccaggcgcaggccgagaggctcggcgccgccaccgtgcagatgatccaccacggtattctgcangacgagcccagtgccgggtacactatcgacaagatcagggatatcatcaagaccatggttctccgacaagtcc

SEQ ID NO: 378296 - DNA, 280 bp, Zea mays
ctcaaactatcatagaagtgatatcagacatggtccctgatgaagtcatggaaacttgttcagcagataaccgcgaagaacatagtagcatttgccgaaatgtgctttctggaagtatggcaccttgcccaggtgcagaaataccaacatctgataacatgagtgaacttgctgaagatagcagacttcaatgtatggagtttgcatctcccgttctggcaaattttgcgagtaaggaatgtggagaaacaccagaaccacaagttcttaatgagattgt

SEQ ID NO: 378297 - DNA, 283 bp, Zea mays
gttgatatatcatccataaagaagcatcttgctagatcaaccagcatctcccctgcattaaacaacatcacgttaatgtatgccaacttaggttaggttccaatattcctctcctcatatcgtctcctactagggtatcagcacactcagacaggccaagtatctgcatagaatcatctgttactattgtatcatcaagatatacagcaaatcaaactacacattccaatgaccttcaaaatggaaagctcactatacgcaagagtatgtcttaccgaattcg

SEQ ID NO: 378298 - DNA, 136 bp, Zea mays
tgtatattcaggcgaccaggttcgtaataatgtcgatggctacttctgattttgaggttcggaatcgtgttgtcgatttcgagagttattttgtaatgattgctttaaccaaaaaaaaaaaaaaggggggcccccc

SEQ ID NO: 378299 - DNA, 125 bp, Zea mays
gtaaagggcatcaatgagactattacttaacaatcacataaacttgattaacaacactggaataaaatcaagtttatgtgattgttaagtaaagggcatcaatgagactattattatttattatt

SEQ ID NO: 378300 - DNA, 183 bp, Zea mays
agtactctgccaaatttgcttttgcatgccatgtaaaaatccatgtagctcttgccaagcttcccctgcgcagttcaacaggactgcgattgatattcggtgtaatggaagtatttatcggaacaatcagcaatgttatgctatattcatttcttggacgtgaacaatagattggtcgatccc

SEQ ID NO: 378301 - DNA, 180 bp, Zea mays
  unsure (1)..(180): unsure at all n locations
gtgggattcatgcttgcatactccaaatctttggatgagttcctcagaattcacnatattatgagtatgtaanngttccattctttgagtgacgtgataatcttggagagatagggatctgagattatatgtgttaaagggtccatatcatattataagaaaaacagggttggagttgta

SEQ ID NO: 378302 - DNA, 156 bp, Zea mays
tggcacagggaattggcaatgggctaccattggcaggtagttgtgacaactcctgagattgctagtgtgttagctcaacaaatctcgctttgcacatttcgtggaaatccaatttgattctgctggtgggttagctgtgcttaaggttcttgacaa

SEQ ID NO: 378303 - DNA, 157 bp, Zea mays
attttacagagtatgcaaatacagtagcaatttgtgttgttctctctgttaattaacagtgtctaacaatatattctacctctttacaacatggataaggacacatgtttcatttgattgccaaaaaaaaaaaagaaaaaaagaaaaagaaaaagag

SEQ ID NO: 378304 - DNA, 157 bp, Zea mays
gtttttgtgatacttgataatatagatacgtctatgctagaccactgacaccttttttactaattcctgattcgaaaagtagcccttctctttccaggtctcagcctgtattttctgtaggttatttaaacagtgttgtaataataattcgatgtcc

SEQ ID NO: 378305 - DNA, 157 bp, Zea mays
tgacttgtcagaaaaaaaaatccctccgtccggagtgtgtaccaaaggggggaatgcaagtccatgtggtgaagcaatgctggtcaactcgtgctggctccgagtgttgtatagcatcagactgccctgatgaacagcctattaaaagactgcactg

SEQ ID NO: 378306 - DNA, 300 bp, Zea mays
cgacgacatgatgggcccagcagcagcagcgcctgccggcgccatcttgcccaaggaggaggtggaagacttgggcgtcctcggcggcgacgactggctcgcgggcatcaacctcgacgacctgcagatcccgggcgaggccgacttttatggctccatgctcgtggcgccgatgaccgccacgatggagcaggacgccgccggcttcccgttcttctgagaccttctgcgcaacgcaaactgtgtatagttcagatttcttcaggattcggagaaaaaaacagttctgctgatatctgg

SEQ ID NO: 378307 - DNA, 203 bp, Zea mays
agtaaacgtacgtgctaatctcctggttgagctgccggttgttttttctcacggcacggccagtcgagaaagtcagtgtaatcccctgtcatgatctctctgttgcaacttaattaactcttctggcgtatgtatgtaaaaaaaaaaaaaaaataaaaaaaaaaaaacaaaaaaaaaaaaaaaaaaaaaaaaaaaaaatagaa

SEQ ID NO: 378308 - DNA, 281 bp, Zea mays
cgaagacccacccgacacggtcttgcgccgcgccaacgacttcctcgactacggcggcttccgcagctacaacgttgaaggcaataactgcttccactttgcctactactgcaagacaggacgcgaatatctctcaccagtgcggatgattgctgacccctcgcaggaacaccaacgttccccggcatgtacaatcctttagagctcctttggatggttgggtagtacccactagagatgattttacccgatatcaatttaggagctctaaagttagaaaa

SEQ ID NO: 378309 - DNA, 287 bp, Zea mays
ctgacgactagttttacaagtttgtattaacatttactaaaagaatgttacttctatgaaataatttcattagaaaaatctgtcaatactattttttcatataaaccaaaccttagaggtttcacatgtcaatggtcaaaattcagatgctggatcgaactgatcctagcctttggtgtctgacaatccagaaagaacagaaaaactatgacaaacaagagttgataatgccatgtgttgttatatgttttgaatcctaaccttgtagtatccagttattagtactc

SEQ ID NO: 378310 - DNA, 126 bp, Zea mays
ctcagcacttctatttaaaaaagctggggactgatttttcaatttcccctaatacttaatttgcccaagttgtaaattgtcgtcctatgggcctgtaaattgacgcagttggcaaagaatcacttg

SEQ ID NO: 378311 - DNA, 241 bp, Zea mays
cgacgaccggttgccgttcagcagcatgcaagctgagagtttgtcgtagcgaccggtacgggactggtaactctatcctcgtcgcatttctccgcaagacgacgaacggacagaaggaaaacgtccactgggccggcgcacacgacaccgcggcccatctccatttcagcctctagcaattccttctccgcatccctgtgctctggcgtcttcagtctcctgacataggcgtacgtgcgtc

SEQ ID NO: 378312 - DNA, 287 bp, Zea mays
tgcatattgggtaacatactgttgccatctattttggtggaatataaatgaacaatattttagtcaatcggacaaaacaatccctgaaccagcgaagagtttatttttcctaatctataaacatgtttatgcttatttcctatctatgttcaactggtttagtgttggtccttctctgctcttgttcatccttgatgagagagatagatttgcttatgacattgttcatatcttctgatggacgtagaaagagctaccctccaaggaaaatatggaatttcatctga

SEQ ID NO: 378313 - DNA, 279 bp, Zea mays
gtcaagatgtctgtgctagcatcagtccaggtgcctcacactatgcgaactgctgggatctgctgcgtcaggtcgtcgcatcaactatctgcgcagaatctgggccggcatcgctggtggcggtggtgcgtaaagaagaacatcctttccatccgctgcgtgcatgagttaaggaacggtgcgtatcctggtcgccttacgctgctaagcgtacgccttacacgtatgtcgtctaccacatcatcctgctcagagtccatccagacatcttatactctg

SEQ ID NO: 378314 - DNA, 216 bp, Zea mays
  unsure (1)..(216): unsure at all n locations
ctcagtatcaagtcgtaatcatatatgcaaaagcagcatctgtanatacctatacatgtgatgtcatcgcgtgagtcaactgcctagtaaggtctgtatgtagctgtctggtagctgtgtggcatcaatggagagacagtgaatgaaggagaaccctgtcagctcttaggattagtcagtatgcagtaagctgcatacagtctgtgatataacaga

SEQ ID NO: 378315 - DNA, 269 bp, Zea mays
  unsure (1)..(269): unsure at all n locations
catgtaacaggattctcgtcactgtgttcgtcaggacggcatttgcttgtgcatgcttctactggcgtggcatcaagcgacaagcgcaggtgantacttgtagctcggcggtctgctatcatcttgcctctccattcttcgccggctgtaagttgctaattcgatcagatgccacaccagcgcgaccttcaagatcaagctctatgaggtctgctatgtctgctgtgatatatggtgtctgagacccatgagatcatcgaaagggcgca

SEQ ID NO: 378316 - DNA, 139 bp, Zea mays
ctcaaaactgccaactaggcacatgtagcgacgatgggcaaggaaaagaatatctctggtccttgttctacgctataatttcattgtatatgtagcatcatgattgaaaagaaatatcttatatttatattgatgggtg

SEQ ID NO: 378317 - DNA, 241 bp, Zea mays
gatgaatcacggccacgtcgctggattctttggccgctctggagattagatggaagcgatcgcggtctacgtgaaccacaactactagctatgaacgatggatcggatcatctgcatgcatgcatatgcagtctgctgcttggctgcctgtaacgaatatgaatgctcaagataacgcccctgctgcgcccacatacatcaccagtgtgtaccactatatatgctatatactgtatttcgc

SEQ ID NO: 378318 - DNA, 300 bp, Zea mays
gacaatatctgtggtggaaaagttcaaggaaccagacaattctgtgctggattcacgcttcaggaagacgtgaactgttgtaacctttttcacattttgggtgaaagtaatctgatacatacgttcaatctctcattgtcacaagcggccttccagcaagtgcaggctttggtccaaaggctattggtaactgaagatgatgtatggggttacagatgagaatccaacaccttttcttcaacgaacttattataaagctttgattggacacattgaggtggatctactttcaagtggtta

SEQ ID NO: 378319 - DNA, 159 bp, Zea mays
caccaacagaggtacaagtagtgcagtgtgaagcttcgtcactcaacaaaaatgtatttggcacattcagcagccagggtcatgtttggtttgcaaaggacgcatgtgtatacaacgcaatgacctgttctttgtgctcttctgaaaacacaagtgcct

SEQ ID NO: 378320 - DNA, 270 bp, Zea mays
agcaaagacatgcgagtaccagacatgtgcaactctagtagtatggtgcgtgttatcactatgcacgcgtaatcttatagttgtgttcagttctgggtctatagcgatgtgtagccctgcattatccgtatgcaatatgtgtccagtcagtcgtgcaatgagaaagaaggcgtgatgctcgactatctctctggcctgacatggttgttggtcgtgagattttctgatcgtgtgttttgcctgtaatctaaatatctaatagagatctgt

SEQ ID NO: 378321 - DNA, 129 bp, Zea mays
  unsure (1)..(129): unsure at all n locations
cgtttggcgagtgtagggtctcatccagatcttaanatctatcggagttgtatatctaattattncggtgtatagcagagtgtctcttaactgtgtgtttcggattcgtgagatcttctagttgtagat

SEQ ID NO: 378322 - DNA, 237 bp, Zea mays
cgtcaacttgtctcttggatcggtgcctgtccttcgtcatttactcactcaactcatgccaccctctcaaagtttcaaccgtgtgcccatcgcaataaaaatacaatcaataatagagaggggaggtagcaacaccggctgcttattctcttccttttctgtcttcctatactccagcgcatcccagcaggcggaaagggaggagcgtggagcggcgaattattgaatggttgcccc

SEQ ID NO: 378323 - DNA, 291 bp, Zea mays
cgtggccatcggcctcttcttccccacatgctctccatgcttgagctcgccccttgtcagcttcagctcgtgcccagggcctctgctcgccggacgctgtagcacatgctccctgctcggcctccctggcgtgctgctccctcaccttggcgtccctgcgagctccttctccctcgcccggtttccagctcgggcctcgcctgatgccgacgccgcttctctgaccttgccttgacactaaatcgctgcagcacgccatgccgtgtgttggggtcgtgcttcggtacgccg

SEQ ID NO: 378324 - DNA, 183 bp, Zea mays
gaacgacgggtttatatatgaccggcataacttctccaaatgcacgagttttacccatacaatgcgagatggttgggcgtctggcgactgatggaaaagatctttttggcagtgatggcacctcaatgctgtataagctggattcaaagtcacttgaagtcatgaaagtggtgactgtcaagt

SEQ ID NO: 378325 - DNA, 282 bp, Zea mays
tctgctccttacctttgatttcccaagcacgatcttgtttttttttggcaaatggtcgagaaatcaatgaatatttctaaggatatacatttgttttaaaactcataagtgtctgatctagttgtcaatttcttgtacctgaaaccctttaaggtatctctgttttgctatttccaagaaggcttcgtgcttggtatggatcttggagaggattttgttaaaaacatgtcgatgatattaaattatgccaaagcacacatatggttggattttgtggagaaa

SEQ ID NO: 378326 - DNA, 197 bp, Zea mays
ctcttcttgtttatagcgttatgttgtttcagcgattttgaattttagtgagaattgtacaccagaatttttgacgccttaactggatgaaatgaatggcaagcaaatggtgcatcgggagagcattgacagttctagtgtcagtagcagattcatcacaggctgttgcgctcttgggagagcagcacgtctaccac

SEQ ID NO: 378327 - DNA, 253 bp, Zea mays
  unsure (1)..(253): unsure at all n locations
cgaagctgatgttccaggcacacttcgtctgcgacgtccagcagccgctgcacgcatgctttcagaggatgacgtctggcagcttcacatgcagaaggccatgggttctctatttatgcatactctgagcagttctatgactatatcctaggcgtgattgattgacttaattctggattgagttcacgtgaaatcatgagcacccccaatgcaaangggttagggtatgacatgcacacagctgcggcgctta

SEQ ID NO: 378328 - DNA, 168 bp, Zea mays
catcgcatggtcattcacatggcagtctcctgatctcaggatcagcacgggtcaatgtgggcaccgctggctagtgtcagtgaccagtgaacacgcggactctattgtcatacagttcctacatgcatacgcatctagctgagcttgacttggtagtgaatgtagtct

SEQ ID NO: 378329 - DNA, 193 bp, Zea mays
tgcacccgtcggctcttgcgctggcatgtgttcgtgtcattcctgctgcgaaggctcatggtgcgtggagcagccatttacagccatcggtctctgcttctcgtctctctacgggcgcctgggtatgtgccattaggctcagtgatcagggctatcggttcgtcatctcacttgtacacatcatcatctggct

SEQ ID NO: 378330 - DNA, 175 bp, Zea mays
aagtggtacaataagttattcaacgagttgatccactagaaataccgcacgttcctaattctacgaattggcctacttgtgttgcaacagctaagtggaatacactgtatagtattgcattcacgtagcctcttcaaagctgtatggctcaagaacatcaacttggacgcatgtg

SEQ ID NO: 378331 - DNA, 146 bp, Zea mays
gtgctgctctttcgattcgagaagataggctggctctggatcagaagtggtaatcggaagagagatttagcttcgtgacgtcgatgtagtatatgtgccgcagatgtgatttgttctgaagggtgttatagtcacgttatcgggag

SEQ ID NO: 378332 - DNA, 292 bp, Zea mays
aacctggctggcggtcgtcaagcaggaagaggagctgtaccagaagctgaacccgggcgcacgccatccggcgtctactggtggcatcgcaagtgccatatccttcgacacgaggtacaatgcgtatgatgtggacatcatcgatgagtgcaagggggacgaggccggtaagcagaggacgacatcactgacccaaccgcgttcaaccttgtgcggctatcctaagcgacatcgccgccacgcgccggagttcaggttcggtcctggtttcaacatgtctagcggcgtcgat

SEQ ID NO: 378333 - DNA, 183 bp, Zea mays
atagggtgaagttggcctctggcttgggctttataggaagggtcagtgatggatactggatgggcttgctggggacgaacatgaaggagagggcgctcagtcatggagggtgccttagcgctgggtgagagatgaagatggttttatacctgtcccctcccccatccccgtgtgaattactgg

SEQ ID NO: 378334 - DNA, 207 bp, Zea mays
gtaaattatcctaggggatgatcaggtttccttgtgcggccactcagtcaggggcccttttcggcacatgaaaaatgctgggagttgccgccctgttgctgttccgagtaagccgacctggtcttcttgacaaaaaaataaaaaaaatagcttgcagatccaaaaaaaaaaaaaaaaaaaaaaaaaaaaaaaaaaaaaaaaaaagag

SEQ ID NO: 378335 - DNA, 288 bp, Zea mays
gcgaggaagtacctgtaatacacgggcatgcatgaagggtttgcatctcgtagagtaaagactagagaagcagcagcaccgaaatgcagagagattgctcgaaatgagatgtgatgaatggaatagagacgccgcgcataaaatgcccctttgcataaatgcctgtccctgttatgcataataaacaaagcgtgttccgtcaaagaacagcatgctgacacacacgacacgacgagccaccacccatagcctccaagctagggcgtcggcttgctgtggtgcttgcgt

SEQ ID NO: 378336 - DNA, 208 bp, Zea mays
gcagtcgtcggctgcttctgataaaccggtggcgcagagcaacctgacgcgaactctgtgcgagggaactcacgctcgccaagaacgccaagctcgaggcggccaagaggaagctccaggaaggctaccaagagtttgataacgcaaagaagcagagaagcatacagatggttgatccccagaacctgccgaggggctccaagacccg

SEQ ID NO: 378337 - DNA, 179 bp, Zea mays
tgagttcttccctgatgtgatcggatcctctattgactgtgcgatttgttcggggacagcagtggtttttgatcctggtccccgtggaaaatctctcttacatgggaccttgggtgagcagatggcacttgagcatgcactgaggcttaatgatgtcctcctcttgagaatcagacgag

SEQ ID NO: 378338 - DNA, 167 bp, Zea mays
  unsure (1)..(167): unsure at all n locations
ataaatttctggaacccctgcctttatattcccctatataactcgtttacacatccttgttctttattttgttaaacaaagtactgttttaattccaggtgaacatagccgaggaagctgtcaggaggctaactgggatcaccctcatgctaccgaccgcgtntgag

SEQ ID NO: 378339 - DNA, 278 bp, Zea mays
gggaaccagatgattgcaaacggctctttcattggtgcaggaatatttttggcattgcttgtcagatctatgcaaagagtgaagaaactcgacaaatttgagaccatgatataattatcttattttgtaaagacgtgcaatcgccggaattacatgcgagctgcgcgtcccttcgaggttgatagcctatgcatggtgtatatagtaaatgatattctttctggaaacaacctaacgtgttgcccttgtaaatttgtacaaactatatcattctttag

SEQ ID NO: 378340 - DNA, 266 bp, Zea mays
cactagaggaaatatgcagaattgtgcctggtggtgctctagtgttttttcctagctacaagttgatggacaaattgcaagtgcgctggtctcagacaggtcaatgggcacggcttaatgctcaaaaacatgtgtttgttgagcctaagggaagtagtgaggaactggatcctgttttaaaagggtactatgacgcaatccttggtaaagctcctgtcaagaaaggcagatgtggttcaaaacaaatagcgaagattcgagtgaca

SEQ ID NO: 378341 - DNA, 230 bp, Zea mays
cccaggcgtccgcggggcggccgacgaggccgggaccaccgacggcgacgatgggcggcggcgagggcaagtccaagaaacgccgctcttctacctcctcagcggaggaagaagggggggaacggaagacgcgggacaagaaggagatcaagaggatgagccgatacgacagggaggatgacgatgacagacacaagaagaatgggaaacacatcgacaggagcaaggga

SEQ ID NO: 378342 - DNA, 196 bp, Zea mays
gcggttgttgtgttgcatggcagtcactatgaacgaggtggagccattgtacgagctgtacaagaagctaagttatcccatcgtcaaagacggactcatccacaaggtcgggatcgacccatcgatacattccctagtttattgcgccactgacaggttggagctgaagcagggttacaagctaaacacatcaaaa

SEQ ID NO: 378343 - DNA, 219 bp, Zea mays
gcggaatccatcttctccatctccaactgtgctactgtaggagctgctgcaatcggggagagaaacgcgaccagtttgccggcaccaacacggcctgctgccacatctccggcatcttcttccgtcatggttggggactgaaaactgtcgctgttagttggggttggggactctttcagtggtaagtccacatgcaggctgcagcaagcaactggacgt

SEQ ID NO: 378344 - DNA, 209 bp, Zea mays
gaagtgtcctagaaacaagcaaagcatatgaaagcccttcaagtagtataaaacgacctgaggaaggcatagacaattcactaaggcgtgcatctgctgaagcgtgtgctgcagcacttgttgaggcagcagaagctatttcttcaggcacagcagaagcagaagatgcagtttcaaatgctggaatcatcattctgcctgacatgctt

SEQ ID NO: 378345 - DNA, 240 bp, Zea mays
ccacgcgtccgcggacgcgtgggttgctctttagttagtctgactgttgctcctctctctctctctccctctccatttgggtcacccttctctttctcatggcggcggcggcggcgtcgacgccgcagggagtggcggagcggcggggcatcccggcagcggccttcgttgaggacgttgaggcctacctccgccaggtcgggctcgacgtcaattccgcgctcgcttttctccaggaag

SEQ ID NO: 378346 - DNA, 233 bp, Zea mays
cccacgcgtccgcaaagcagcaggtacacggataagagtgatgtgtacgcccttggcatgatcctgggcgtgctgctcactgggagagacccgacagactctttcttctcgggagagactaccgggcagggcgggggcggcctcccaagatggctccggcacacgcagcagtccgcggacccgaaagaaacgctgggataccagcatcctgggggacgggggagatgaggtgg

SEQ ID NO: 378347 - DNA, 126 bp, Zea mays
aaaacatcacgaacaccgttctccatagcgggagtagtgaggaacgaaagagagggggcggcctagggcttcgattccgcagccatggacgccgctgacgtgtggggccgctcatcgtcctcgtct

SEQ ID NO: 378348 - DNA, 237 bp, Zea mays
cgatcagggagcgccatggacgacccatgcatgacacactgcaggttaactgacagccacgtatatacatatatagacacagcaataataagagactccagatcgatccagcaggttgctttggacttggaggctgtgaagtagatgaattttctcccgagttagctagggttgtttggattggaggggatatataattagttcaattcccttcaatccttatggagaaatggttta

SEQ ID NO: 378349 - DNA, 220 bp, Zea mays
taccttaagccagcagaaaattaggtataggcgtagagactagagagcgagcgagctcagtccgtgttcagtcgagagagctcgtttagcttggccatcgacgagctagcagagcaatagctaggatccatggcgaacgcgggcatgataccgtggcagcctcctgctggtgctcaattgtgcatgtagtcatcgtgcggcggtggcgctgggcataaca

SEQ ID NO: 378350 - DNA, 122 bp, Zea mays
aacaacgctgttgttttgatactttaattgatctgttgctgataacgaatgctatctggtatgagccctcaacagcgttgttaaagatttgttgtctggaatcaatgagtcctgtttaaccc

SEQ ID NO: 378351 - DNA, 234 bp, Zea mays
ggaaaaaagctgtaaattcgcacgaagcattcggatggaagatcaggtagaggaaacaaacagaggatttcaaatgtttccatttttgtatggagcagtagaaaatatttgtctgccagtgccaactgccaagtgcttaaaatttttctgcacactgagatatttggattgcaaattagtctcagcaaacaggggatacctaagaagaacaaccagaataaagtgctgttcaat

SEQ ID NO: 378352 - DNA, 253 bp, Zea mays
atcgccaccgtgactaccattaaaaccaatcggagctgtgaaccagcttcgactcgccccacctcaccgaacccagggaaaaacaaggcgtaatcatgtaggcacctacgtggcttcgaccgtctggcgtgcgccaaatcgctcgtcggggtaatcgctgtggcttcaagcaaggtgccgggcggggtcgctggggagtacgcgcgaagttttgccgcacaacaacctggaagcaagagtctcggcgtaattt

SEQ ID NO: 378353 - DNA, 243 bp, Zea mays
cacaactcgtaagcagcgagcgtctctcctcttcctctcccacgcaccgcgccaaggaaggcagagagagatcgcagctcctcttctctccgtcggtggtgcggttgaccgccctcctcgagcgagatctcgcttgaatccctccgagaatctgttaaaagtctaatcggcaaaatggtgaagatcttgtacaaccgtgccggctaagttcgttggccaaccaatgggggtaattgccttaaa

SEQ ID NO: 378354 - DNA, 251 bp, Zea mays
cggacgcgtggcgggcccagcaagagaagagaggtaaccataaacctgcggctccatcgaactctgcagcaagctgccagcctgcgtgcgccgccctagcttccgtcgtcgtcatcttcttcgtcggatgatacgaggggcccctgcgcttcgctacattctcaacgaagcccctctcgcagcgggcagacccgtacggcggtgcgtaccccaccggcacggggccgcgtttgcagggtgccgccgtacta

SEQ ID NO: 378355 - DNA, 250 bp, Zea mays
gatgcacaaaaggatgcatctttacatgttcctaatgaggtcaaatccaatgacttaggctactaccttatgcgtttcattaacaccgtatgcaacatcccctcagtctccctcttcaggatcttgagtggccacgatgataacgcattcaagaaattgatggcagtagaatcaatgcttttccacgaggagagaaaaactggtcctggattggagtctactaaaatgcatgcaatgcgttatctcctta

SEQ ID NO: 378356 - DNA, 164 bp, Zea mays
cttcgacccagttcctctccaccccgtctgtcacctgcgttatcttcacccgacaggaggacaccagcgcaggggcgcttgttcttcggtcatcggactccgccgtcacgcgctgcgccctcggccgtgcctgctccgtcctgagccagcacaggtgataaagg

SEQ ID NO: 378357 - DNA, 227 bp, Zea mays
cagcgacgccggccgatcggtcggcccggcccggtagattccgccatgctagagcgcctgtgcatacagcttttagctctggattccggcagtgatgcatgcgtcagtgatttattattatagttggttgatgcatgtgactctggaaacatggccccacttgtctgtcgaaacaaacaaacaaagagagagaaaaaaggcaggtacccgggttgcaacaagccaac

SEQ ID NO: 378358 - DNA, 239 bp, Zea mays
ctgctcccttctgctcacccgcactattgcgcctgatgcgagtgtgatgcggcgctggtgtacagagacgcattggcgccagtggaggaaatggtgcgagacctgctgggccgcatgacgctgcgtgagaaggcagcgcagatggcccatatcgagcgcaccgtcgcgacgccgcgagccctcacggagctcggggctgtcagcggttctcaacgccgggggaagcacgccctgcgagc

SEQ ID NO: 378359 - DNA, 245 bp, Zea mays
cgaccagtcctatgagttcttcaataacaggcaccgtatatggtggctacgatagtcccaagctaacatacagtgggcatgtgaagatgtggcaaggcagcaacaagaaattcagaaccaggcgacctccattgcctcgctctttacgaattccaattggtttagtttgcatttgactaggacaaagcaataaatgatggtttggtgcaggttcaagcatgaagcatcacttaagcgtgatgata

SEQ ID NO: 378360 - DNA, 242 bp, Zea mays
gtttgctttagttagccaccgattccagactacagagagcagcaggagctccgggatctcatgcatgatcctcgtcgacacactcaaggaaccctcctccggtttcatcgttggtgacagctgtgtcttcggagtggagctcaccaagctcaccactgctaaggtcaaggacgattcaggaacgctgcatgttcagaagagaaatggcttctgtagtgcccgggaggcctacacctgggtca

SEQ ID NO: 378361 - DNA, 238 bp, Zea mays
cagacgcgtgggcggattcacggtcacggtcgaggtcgaggtggaagaaacggtgccgcgctcgcggcgagagactgggaggaggaaggagcctctcgacccgattcttcgcccatcgcctcgccgccccgatccagttggtggcctatggcgggcgagggcgaggacgaagcggcggcgattgagcggcagctggagcagcagctgcaggagcagcggtcctccctcgcagcggtcg

SEQ ID NO: 378362 - DNA, 199 bp, Zea mays
cgtcttctccatcgccggtgctcccttactctcgatggcatcctcggccgccgctcgccgccttctcctcctccgccaccgccatgggcaccttctccccaaacgccacttctcttcctcatccgctcccgacggcctcgatgacggcggtggccgcgtctagatcctcgacctgaagctgcggcgccgggaacgagac

SEQ ID NO: 378363 - DNA, 227 bp, Zea mays
cccacacctcagattctcaccaatatagctaggttcagttctttttatgcgctgacagtatttgtgaattgtcctagattcatgatgcttagctcttagctgagtgtatgacatgctaacaatttatcttgatctgtcagaattcgatacaaaggaggcttgtgagcgtgcatatttcaaggtcagtacctcagattaccatgtggatgtgtatttacagtggtaca

SEQ ID NO: 378364 - DNA, 222 bp, Zea mays
gaaaggcagctgcgtcgactggcaatgggggagcaaggcaggccaagcagcaacaggatcagagacatcgtgaggctgcgacacttctcaagaagtggaagcagattgcgctctcgccgaaagccggcaagagcggcggcggcggcggcagccacggtgtccggaaggtgttcttcacggtgtgcgtcggcaaggagatggagagtttcgtgatccccaggg

SEQ ID NO: 378365 - DNA, 243 bp, Zea mays
cggacgcgtggtcggtgtcaaaggataataaggctgcaaagttggaggctatgaaccggaagaatcgtgactgataacttcaagaacgcttcggcactgaaacctgtaaatacatctttgaaggctggagaggctggttatgaccctttctcgaggaggtggacaagatcaagaaactattatgcatcaaagccaggaggagataatgctgaagaaactgccaacaagtccagtagtattgtc

SEQ ID NO: 378366 - DNA, 164 bp, Zea mays
ccagctcgagaacttaggactcgagcgtacacccgggctatggccaactcgcatgagggaacaaccagaccagccgaagcattacgcaaggcattaagacctcgaaggagtaaaaccactcctccgaggcctcgggggctacacccggcgggtgcgctcgcgcg

SEQ ID NO: 378367 - DNA, 230 bp, Zea mays
cccacgcgtccgcggacggtgggtcgaattacaagttcatcagttctcgattgatacttgaaatgacatgtacattctaaaattgtggataccatgaagcatttcttatacacaaaatatgggtatttctgttaatcaatttatgatacctcgctctctgaaatatacaaaagagaaaaaaaaaaaaaaaaaaaaaaaaaaaaaaaaaaaaaaatagaagaaaaagtaag

SEQ ID NO: 378368 - DNA, 228 bp, Zea mays
ccacgcgtccgcttagataaaggcgcagtgattcggttcctatgcaaatgatgattatgaagctctatgcgccatcactctgcctctagttttctggggtttttttttgggaggaagagaggtcgttggtatagtctctattgtatatatgtggaccttacctttttcagaactgttgtttatggtacctgtaaaactcaggttctattaagcgtttgtccactcaac

SEQ ID NO: 378369 - DNA, 126 bp, Zea mays
tgttaattctttttctgtactcggaccatgggtattgtctgcttcagtttgtgctgaatgaacaggaaaactaaccgcgtgtttggttggtggacgagtgcgtgcagctgtatgcacggagcgttg

SEQ ID NO: 378370 - DNA, 228 bp, Zea mays
agggcgtacaagcgatgcatcacgctgctcaggtcgctctacgccgcgctccgcttcctcccggcttaccgcgccttccgcaggctctgcgcgtctggccaggtgtacaactactgcatgggccaccgcgtcggctccttcgccgcgcccttctcccgcgccgaggaggcggccatgcgcaccaaacgcctcgcccccgtcgagacccagctcggccgcctcgtcgtc

SEQ ID NO: 378371 - DNA, 230 bp, Zea mays
ggccatggacagcagatacacaactcaaatccgatcggccaggtacgttaattgggcacgtgctgtaggggacgagagttggattaatctcagagtaatgctgatggaggaacctaaggatgggtgatctgatcgagtgccaggatattggaagctcacccaccggacgtctctaacaacactaacgtagtgttatcccaggttataagtttggtctgttgtagatggtg

SEQ ID NO: 378372 - DNA, 227 bp, Zea mays
ggcggaggtcgaggagtaccagcgtcagctgaggagcagggcgagctcgaccgggaggctgcgcggctggccatgcagctcgtgtacgagagcgaggcggagaagcacggggccaggacgcagctgcagctgcagctctgccagtccgaccccgcggccgtggaggacgccggcggaggctgcagtggcgatggcaacaactaccagtcgctcgtggacttcttgcc

SEQ ID NO: 378373 - DNA, 238 bp, Zea mays
gtctgttcttctcctctccctctcatcctggcgtttgtaccgagagtacgactgactgggtgaagggtggtgcctagctgatcgcctgatccatctcgtccgcccggggcccaagcagggttacaagagttactagggatcctctgatcgaaaggatggacactttctctcatgtcccccctggattccgtttccaccccaccgacgaggagctggtcgattactacctgaggaacaa

SEQ ID NO: 378374 - DNA, 229 bp, Zea mays
cccacgcgtccgcgaaaaatgaaatatgctaacttgcattctgttcaatgatttgaaagtactagcaggtagcatgcagaaatccctaaccaggtggtgtcaattgaggataaatgggattaagtggtttcatggaagattggaacactatttaatggtggcatacagtgatctcgggtcaacagaaccgtgaacgatgtaatgctgactaaggctgacctggggaccc

SEQ ID NO: 378375 - DNA, 254 bp, Zea mays
cgaaatccaaagccccccggcccgagccgaaccctaatcctgcatttcctttcccggcaccgcccgccccaatggcgaaccggtgaagtatgacgacgaggaggagatttcctcctcctccggcgaggatgacgattgacagtccgatgcggcgcctccggaatctgtgaggacagggatgacgatgaggaagatgctgcgggctgcccacggaggaggaggaagctgagggcgagggggcacaagaggaggag

SEQ ID NO: 378376 - DNA, 248 bp, Zea mays
cccctgtgctgtgttctgtgagcgcgggcgcgcgcgagatgtggagagaagggagggaattcccccctttctgttcggcgccgtgctcgcgcgcacgcacccgcacgccccacgctgcacgcggccttttcctccgccttgctgctgcaagtccgcaaccactggaggaaaaatcttttccttcacttttcttccctttccccccgcgcatgcacgggctctgattgacgccatgggggacgccgcag

SEQ ID NO: 378377 - DNA, 249 bp, Zea mays
ctgacgcgtgggggaaaagaaacagaaatccggctcgcacctcgcacgcaccgacgcacgataccgaccaccactccggcccccaccactcccccgcgcgcgccgtgcgatcaccgccggcccccggcctcaccctggccgccttgaggaaaagcgaggccaacggcttctcctcctcctcctctccagcgaggtctcgccgcgcgcctggcggcacgatggccgcgtcgctgctcgtgctcgccgtgg

SEQ ID NO: 378378 - DNA, 213 bp, Zea mays
cgctcgccaaggacctcgccgccgggtacctcgtcctgcagctcaggatcgacgggagggtccgctggaaggtcggcagctgggtgtcgggccactaccacatgttcgtcacctgcccggcttacttcatcagctccggcgccggctccggctaccgcggcgctgtcggcgcgcacgggctcaggttccagaccaccacgtactgccgcgtcg

SEQ ID NO: 378379 - DNA, 241 bp, Zea mays
ctggccataaccttggccttctccagcctctctcagttgcgaacaacctgatggcgaagaagaaaggctcggccgccgccgccgccatggcggatgagacggacgtctcgagtcctcagggctccgcccccggcagcgagggaggtggggagaaggagggcgcctttcttcttggggagccgactgtgaggacgctggcggcgggcggtggcggtgcgcggagacggggcacgagctgccg

SEQ ID NO: 378380 - DNA, 149 bp, Zea mays
caataaggtaaggggtgacgagaattggtcgaaccagggttaccaatgacgctattgagtaccgccacgaggacaggcgcgagctgtcagcgtctggcgacaagaagctgagcaactacaattttccgaggtcaactggtcaaccttat

SEQ ID NO: 378381 - DNA, 270 bp, Zea mays
ggaccaaggggcacgagggagaagcgaggaacggcggcggcggcaacatggcggcgcggaacatccttcgcggtgcggcatgcggccaccgcttcctcgtgcccgtcccctcaggcgctcttgctggttctggaagccggagcatcggcgctgtcgctcagggccttcgtcattacgcagcagacgaagcagtgggaaacttggaactgcatgcacccaaggcaaaacgtcggtcatatatcccaacgaaaaatggaacagccatgatgc

SEQ ID NO: 378382 - DNA, 231 bp, Zea mays
gctttgtctacctcagcaggtttgcaacatttacgcgatccattgcattgcgacttgcagctgcagagccggtgatggcggaccggcggagcaatggtggttcgccccctagctggagcttcgcgtctcaaagcagccactaccacttggcggcgatgagaggaagctacgcgccacagagcctctggcgcccgtcgccgatgccggtccgtggtgccgccctgtcctcga

SEQ ID NO: 378383 - DNA, 231 bp, Zea mays
ggcatttctcccctcatcccgttcctgaaaacggatctgaggccgtcgtcttccactgggtcgcgctcctgttcgctccgtcgtcagaaatgcaggcagcgccacaggtcttgcttcacgctcctcgcggatggtggcccctccggcccgcgccgatgcagttgaagctccttccgaagtgagtgaaaagtgttccttgctccttccaaagtttagagatcacagcagcga

SEQ ID NO: 378384 - DNA, 229 bp, Zea mays
aaaccaaaccccgtaaccccaccccatcttcccaaaaaagcgacgaatcgcgcagcggaagggggaatcgctgcgatttcttgtggcccggcggctccagccccacggctgccgagcggataacgaacgactggcggcggctcgcgtcggccttcctcctctccttctcctctctcctcgcatcgcagtcgcagcaggcaacaaaccaaatcgcttaccgcccccgaag

SEQ ID NO: 378385 - DNA, 223 bp, Zea mays
gctgtaaaggcctgttgttcttgtgtgtgtatcgacaagaccatacgtgtagctattgtgttgatggtgaagaacaataagcgcacacgtatggtcttgtcgatatatcgcgctgtaaaggcctgttgttcttgtgtgtgtatccctttttcagggcatgatcgtagagatggaagatgacttaccatgacaaaaaaaaaaaccaaaaaaaaaaagggcggcc

SEQ ID NO: 378386 - DNA, 225 bp, Zea mays
cccgaacgcccggactgggcttacggccggatcgccgccgccattcaccctcccgctctctttccccctgtctttgcgacgactgggctaccgacgccgacgccctcgcaggtgcgcaggtcttcttcgagtccttcgccggcgacgagcaccctctaaaggttgatatcgaggcgtagtgatggtcgttgtcgttgggtccttccatttggtgctaatctgtct

SEQ ID NO: 378387 - DNA, 100 bp, Zea mays
caactaggatcgatctctcgacagcaaatagctagcaatggagaagtacaccaaagccctagcgtcattgctcaccatgctggtgctgggacctctcctc

SEQ ID NO: 378388 - DNA, 147 bp, Zea mays
cccacgcgtccggttttgccatttgccaacccaactcccgattcccgaagcccatttcgtcgtctctcgctccctcggtccttccttcacccatctcacccgcgacccgcccctttcccctaagccatctccttcctcctcacctcg

SEQ ID NO: 378389 - DNA, 220 bp, Zea mays
atttgttagctcgacaattgggatgcactgtgatggcatttgatcgcccaggatggggattaacatctcgacctcgtaggaaggactgggaagataagaagttaccgaatccatatgagctggagtctcaggttgatcttcttatttcattttgttcagagatgggcttgcactctgtggttttagtggtcatgatgatgggggttgcttgccttgaagg

SEQ ID NO: 378390 - DNA, 147 bp, Zea mays
gccctttttgtggggttttgtgttgtgttgtgtacagaggtctcgagtcaagttagggcactagcaatgcgagagaggcgtaccagagaacgcacgcgcctacggtatacggctgccgagtttacatcggctcgcggtgtccttttg

SEQ ID NO: 378391 - DNA, 220 bp, Zea mays
cggacgcgtggcggacgcgtgggctccggctctccccttctcgccaaaggggaagccctgcccgtaattccgttgcggagctacgagcttcgacgggcctcgatctccacctctgaagtgactacttgtgatctagatctgaagctgggttgactactgaaaatgtgcactttgttgaggttgtcggatctggttctcgtgttccggctataatcaagat

SEQ ID NO: 378392 - DNA, 202 bp, Zea mays
gaacgatatatgcactttagccttgtaggatactgtatatgatttctgaatgaaccaataaggtctgactgtgacctagagatctttcttgctccagtaacgctttatctaataccactgtacccttttgggttgtcccattctcatggcctaagttgcacatcatcctctgtaacagggattatctccttgtaaaaaaata

SEQ ID NO: 378393 - DNA, 210 bp, Zea mays
cacagacgccgctgagctctactagtaccactgctccgctcatctctcctgcggcggtggaagattaggaattgagcccgcggcaagctcggggagttactgtgaatccatctgattcccacccacccgcgcagacgcagctgcattccgcgatcccaggcggcgggaggcggctcttgatgctagagatgctcgctaccggtcgttctc

SEQ ID NO: 378394 - DNA, 239 bp, Zea mays
caccagctatgatctaaaccgttctgttttgaagcagtttctttttgttatgttttgatggttgaaatctcgttgaattcacagaaacttatctgaggtgttactgctttgggctcagccagtgttggggtagcttttacttgtgtcaagaagcaccgaatttttcctgggagtgaaaacatatcccgttgttatacagtgagtattccctttgtcgtacaaaacaagacgaatacgaa

SEQ ID NO: 378395 - DNA, 237 bp, Zea mays
caagctcgtgagagcagaggaactctctttcctcatactccaaagcagcaagaccatctggcaaagctgcgctagacgccagcatcaggccataataggccagagagcagacgaggcatggcgacgtccgtggcctgcggcttcttcttcttcgatgcggcggagcgtggcgcgaggttgggccgcggcggcagcggcaagcgctggacgcctgtcagctctgctccaagccgctgg

SEQ ID NO: 378396 - DNA, 242 bp, Zea mays
atcaaagatatcgcacgcaagagggagcaccggagcagcgagccagcgacacagcagagagaacgccggggccgctcgcctgtctggagagaggaaggaaacaaagagatggacgagatcatgaacaaggtgggcgcttactggctgggacagagggccaacaaggagatctcctcggcaggcgacgacctcgattcgctctcgaccagcgtcggggatggagcgaaatggctggtgaacaa

SEQ ID NO: 378397 - DNA, 239 bp, Zea mays
cccacgcgtccgcccacgcgtccgggcaggcaagaagaatatatttggttttactcaagggcctcctatgggagggcaagtaccggatctatcttgtcaaatatctgtgttcataacaatttggtattggagccaggctggcacatcgtcggccatgtacggcgccaacaacgatctggggaccctctctgttgtggagaaacttgatcgcatcctggcgcaactgcaaaccataaata

SEQ ID NO: 378398 - DNA, 234 bp, Zea mays
gcaggccgcaacatgaggaaaccgacttagatttttgtcgccacctgccctgatcacttcatccacaagcagcaactgggatgcaatgatcagggcaggccgcaacatgaggaaaccgacttagatttttgtcgccacctagccgagacttatctgttctaccttttgttttggttttgtgcctagtagtgatctggatgatacgtttgacttgagttggtcccatttcacgaa

SEQ ID NO: 378399 - DNA, 243 bp, Zea mays
ttccgtctccatatcttcttcttggtccgccgtctccactccgcgttccctggctccctgcgttgcgtcttgggggagagagagaagtgggagacccgcgagaggctgccgtgtagggactagggaccgtagagtaagcgacagcgataggagggagagggggatggccgggatcgggccgatcaggcaggactgggagccggtggttgtgcggaagaaggcacccaccgccgctgccaagaa

SEQ ID NO: 378400 - DNA, 176 bp, Zea mays
agcttctccctcgtcgtgaaagcgtcctcccctaccaaggacaccagagtggtgatgccggccgcgccgtcctgcaacgtggaggccgccaccgctgatggcatccgcggcctcctccgtctgtaggacatcaggaagacggcccatctgcaattctgtcgtgcttggtaatccct

SEQ ID NO: 378401 - DNA, 234 bp, Zea mays
ggactctgatggccgcggcgcgcggcaggcggcggtgctggttctggtgctggcgttggtgatgggcgcggggttggcgtggggtccccgcggatgcgctgcgcagggggaggctgtggtggtgtccagctacgggcagggccacctctcgctcaagccctacgactggacctacctgcgcgttgagctcccgccgtcgttctcttctgtcaccatggatttcgctgctgacat

SEQ ID NO: 378402 - DNA, 230 bp, Zea mays
ggaccggggtttatgtacgaaggaaagtagaatctgagcatagtaaagtgaacccttctcaggagttgacaaggtaatggaagagacaaatcaaaagatctggaggcatgccaagatgttcaacatgaggaggccaacaagcctcaagtggcatctccttttgctgaatctgtagaactagtatcttccaaatcttctcaagaaccaaatgcggaaactgtggcggagaa

SEQ ID NO: 378403 - DNA, 234 bp, Zea mays
ctcattgcctccccatctcgtgtaggctctccccctcctccgcgctccgtccgtctctcatcaccattccgccgccgccccacctctccctcctctcgccgccgcctccaaacccgccacggcgcggcggagatccaaccggacggatctgggtcgacctactccgacaccgctttccgaagatagatagatagataacaaggttgtgctgtgcttgcagtctgttgggaagtg

SEQ ID NO: 378404 - DNA, 178 bp, Zea mays
cccacgcactgacacgccggacccaaccgacgccaacaacaccgcgttcgtcgccgcgggatcgggctgggcttgttggcctcgcctcggttggtgccctctctgccgccgcggacgagagtcgccaccaccaccaccatccagccagcgccttcccttacccagcagcagtctccag

SEQ ID NO: 378405 - DNA, 236 bp, Zea mays
cgtcggcaagcgacagaagcgtaagaaacaagtacgtaaccagggccgtaacccgccttccttgaggcagacgcacgaaacgagctgtcggtcgtcggtcttggtctgattcctcttcttccgcgccgcctgtccggccggcagcggcagccatggcctcgaacaggagcagcagcacggttgtgggcgatatgcagagcagttgtacagggttgggcccaactctccttccactc

SEQ ID NO: 378406 - DNA, 215 bp, Zea mays
attcacaacaaaaccctagctactgcttcgtctgccgaattccccctccgctcgcttcgcacgccgcccgtcgccgcggcggcgtctgccattgtccctcccgctgcaaggagcacatgcttctcgccgcgccgttagcccgccgccgccaccaccggttcaccttcagctatgtcttctcaggtcgacaggcgcagcagtccgccgggaagcgc

SEQ ID NO: 378407 - DNA, 235 bp, Zea mays
gctatagcgctccttccttccttccttcctcctgctcggaatcggagctctcgtcctctgcagcgacattatttctcctccggtccggccggcaacaaggagacaatggggtgcaaggcgtgccagaagcccaaggtgcagtaccggaagggcctgtggtcgccggaggaggacaaaaacttgcgactacatcctccgctacggccatggctgctggagcgctctgcccgtcaag

SEQ ID NO: 378408 - DNA, 225 bp, Zea mays
atagattaattagtgttttaggagaggggagattgagctgggagggggttcatggagatggaggggaggggcctgtctgatttgttcaggaacaccagcgaggagatcttcctcaaggcagtgatggagaactcaatgggagtggcagcagcgccaccaagcatggagatgctggggttcaaggccatgtcgcaaggtctcagagaagacagcgaggagctgttc

SEQ ID NO: 378409 - DNA, 230 bp, Zea mays
tgcatccttgtgctcctcgcgtccctcgccgctgccgtcgccgcagcatcctcgcacactcactcgctctcgcgttctgcctcggcctgccaccaccaccaccatctcgcctgctgctcgccaatggcccctgcctcgtcgccggttgcaggctcctccactcgctccgtcgcctccgccacatcctcgggatatgatgctctgtcccctcggattcggcttagcgtcgc

SEQ ID NO: 378410 - DNA, 225 bp, Zea mays
cccacgcgtccggggagaggagaggctaaccaccgcggcagctgcgacctgcgaccgcgaagagtggcgcacgacgaccagcgcggaggaggtggagccggcggcggggagatttgctcgcccggctggggttgcggtgggaggagggtaggaggcaaaaccaccaacgatggcggcgtccgcgaggcccggggagatggcgaccagcttcgccgtcgcgtgcag

SEQ ID NO: 378411 - DNA, 226 bp, Zea mays
cccacgcgtccgcccacgcgtccgtaaaatcgaacataaccatcaaccatttaccatcatctgatatgttaatgatgaactaaaacaggcaggatctctttaataagtaaaagtgactctatgttgacagaaaagagaaaagaaaagaaaagaaaagaaaaaagaaccaacccaagatagaccccttgccctctgtcgctgcatagcacgctcaccacttgacgaa

SEQ ID NO: 378412 - DNA, 233 bp, Zea mays
cccacgcgtccgggaccgggcagaggagttgttggtcctcaagatcaatgtctccattcatcttgaggaccgggcagaggagttgttggtgtcacttgatccatccaagtcaaaccataagaagctcccaaccccacctccaaagaggcgtctgggaattaacatgcttactgggaggaacaagctagtagagtataggcttccaccaaagattgaaaagaaggtggtcaatg

SEQ ID NO: 378413 - DNA, 232 bp, Zea mays
  unsure (1)..(232): unsure at all n locations
cgcaatcccactcgcagcaacgacctacacctacgcgccgcccctaactccaatccagaaccccagagtccagaggcagaccggcaagctggacacctgcggcatggagcgggtggcgctgctccgcacctcaggccgccgcctcctacaccgctgccgcangggcaggcccgtcgtcgtgcccgctgccgcggcctcatccttggcacgccgggcgtcctcgttctcactc

SEQ ID NO: 378414 - DNA, 232 bp, Zea mays
atctgccaataattacttgcagttctaccccagcctcaaccgctccaagtgctgcgccaagggaatttgcacggagtgcttcctccagatgaagtcgcccacctcgtgcaaaccgacgcagtatcctgactaaactcacttcatttcgaatccagagcctggtgctcttgtcgagcgtgtgtttcgtatttttcgagcgtctctggtgttactaaaccgtgccggttactgc

SEQ ID NO: 378415 - DNA, 233 bp, Zea mays
cgtgtctccatcgtcgtcgctgcgtgaggttgacgacgaccagtcacaggatctgttcgttcctcatgcgacccagctagctaaaactggcatgcatggacatgctacgctgctgcgtcaatccatctcaccagtgctagctagctagatctggcctgattcgccgatcgagcggtggtgagacggagtgcttcagctcaaagactgctagtggtaggctggtagctagctgt

SEQ ID NO: 378416 - DNA, 227 bp, Zea mays
ccacgcgtccgatcagcttcccctccatgctccggctggagcaatatctccggttgctgccggcgaccagccacgctacagcgcccgcgttgatctcgggttactctttcctctccagtcctctccctcgcctcagtgcactccggctagcccgctcgcggcctcccccgctcaggggcaaaacgtcgagccccgtgcgcgcatcggcggagcgcgattctacggta

SEQ ID NO: 378417 - DNA, 226 bp, Zea mays
agcctagctcacgtcgcttccaacagacgccaccagccaccgcgccatcgtctcagtgtcacagcaggaagccgcgctcccgcccgccgtgccgcacgcccgccagccgttagctgctcccaacagcggcgggatcagggcttgcgatttggcagacgcgagtacaacgaagccagctacgtctgtggttgcacagtacgtgggggacggcaactcgggggggctg

SEQ ID NO: 378418 - DNA, 227 bp, Zea mays
acagcgcgcagagagagggagagagagagagagggtttgtcctcctgcctgccttggctagcttggcctcccctccacctccatcggtgtattacatccgagggcactccatctcttgcgtcccttaacccctccaccaatccaatccaatcccttaaccccgcaccgaatccagccttcgaagcttcctcttcctcccggtcccggtcccggtcccggtcccggag

SEQ ID NO: 378419 - DNA, 237 bp, Zea mays
cggacggtgggcccgacacacctctttaactcgcttccgtttccaaaaaaatgctccagttaatttaatacagacgaggaatcgcctcgccgcggatctctccgctcgccgacaagacccgctatcggctccggcgggaagactcgcactacggtggggcgcgtcgccgccgctcggcacgtggctcgtcggttcgacgttcgcttgtggaggtcgtcggggccagcggtgccgggg

SEQ ID NO: 378420 - DNA, 232 bp, Zea mays
cccacgcgtccgaccatatcctgctccacctctcccgagtggagtccttcctgactcctgagacctgaggtggaggaacatggaagtggagaagccgcatactaggaaacccaaggggagggagttgtgaggtagagggacatggaagtggtggtgacaagtatactaggaacgccaaggggagggagctaggaggaaccgcaggaggtccggactttctacgacacaagca

SEQ ID NO: 378421 - DNA, 240 bp, Zea mays
gctagagcgtagcggagaagcaggcagccaggcaacgatggagatgcgggttggtcatctgctttgccaggtgatatgtatgcaggcggcggtcatcggcgccgtcgccgccgccgacgaggctcggccaccggcgatgtacgtgttcgggtcgtcgatactggacgtgggcaacaacaactagctgcgggggccggccgtcggcagggccaacagtccctacaacggcgtcgacttccc

SEQ ID NO: 378422 - DNA, 227 bp, Zea mays
ccaggaaattgcgctggaggcgagcacaatggaggcagagcgtgatgacatatctgttgtatccgaggtgcctcagactcctgcaggtgacggggacctgcaaactccactgctttctgaccagagatcaggcgataacaacaggatggccgccacagatggaagcgaccctgtgctcccctccagctccatgtctttagaagaagatcctggcttagagtacgagc

SEQ ID NO: 378423 - DNA, 231 bp, Zea mays
caccaatctccgctccggcctgcgccctcgccatgcccccgcacggccccgaagaagacgccgccgacgcgcacctcttcgctggcgtccgcttcgcgctccacggcttcgaccagatctccgcgtcccagtttcggttggagatagagcggtgcggcggcgtccacgcgggaggttgggacgcagactgcacccacgttatagtttccaacaccttatatgatgatccag

SEQ ID NO: 378424 - DNA, 232 bp, Zea mays
caacgaactcatttcgagaggcgaaaaagcaaaaccctacagaaacccatcggtgaagaggcggacggcgatcggatagcgggatcatggcggggccagttgcggcggtgacagacgcgtgggataagctcaccgtgttcctgtactcccagctctacgacgagaggcactgggccaaaaacaagtagttcgcgaaggctcttggtgtgttcgctggatccatcctgttcat

SEQ ID NO: 378425 - DNA, 270 bp, Zea mays
cctcggctttgacctcggctcaaagaggagccagtctctagtgcacagttaggtgcattctttgcaggcatgacaataagatccaactcgtttccagaggccacacagtggagcgagggtgaacggcgtgccatgagcatattttggccacgccttgtacaaattcttcctccggaggtgaagtttatagcagaccctgaagggacgatcatgggtgcaaatggtttaacagggcctcggtatgttggtcaaggaactggagagatgaga

SEQ ID NO: 378426 - DNA, 141 bp, Zea mays
ctgaatattattatttgttatcgccagtcctgcgtgccgtactctatccgtccagcccttcgccatctgtttagaatagaataccttcatgtaaatcaagagatttcagagattattaatttaagcgaaaactgttatctt

SEQ ID NO: 378427 - DNA, 262 bp, Zea mays
gccatggccacgtctcgctgcggtaaacagcggcagccgctcctccactctcccacgcccgcagacgccaacggtggcggcgcagcgaagaggcgcaggttcgtctcgttcctcgccgtcacggcagctcttgtcgcgtcctaccacctcctcgtgccaaccaattcgtcgcactaccacgcactattcctctccctcggttccaacgccaccgcggcggcccacctacgcgcgctcaccctccgcccccacgtcgctggca

SEQ ID NO: 378428 - DNA, 258 bp, Zea mays
ccacgcgtccgctctttttaatctaggggcaagtggttattttagataatcacactttgagctattttgcaggaatttatcaaagaggttatggctctggtagagcttgatcagctgagatatgcattagtagggaagcagggttctactgggttatcaacagagcaaatgaagggccttactaatttttcaaattctattgcttattgtagcagattgccagagttaccttacttttttcttgtaaaagaactattt

SEQ ID NO: 378429 - DNA, 224 bp, Zea mays
actgtctagagtacaagtgagtagttaagcaagtgcctgtaaaccaagcttgcttgcgacttgcgagacaacacacaacacaacagccatggcagtggtagacaggtgggcgggcctgggttcggcgctcgcgagcttcctcttcctctggtccatggtgcagagacacgtgcctgtcaccatcagccaccgcgtcgccacctgggccaacaagctcgtctcct

SEQ ID NO: 378430 - DNA, 271 bp, Zea mays
gtacctaactgcgtaacatattattatcaatgttaggccatgtatactccgctctaaaaaaaagagctcaaatgccgagcctgctgctgttcctgccccagtgcctgagaccgaatcagttgccgagcctgctgctgttctcgccccagcgcctgaaaccaaaccagatgccaagcctgctgctgttcctgccccagcgcctgaaaacaaaccagatgccgagcctgctgctgctgctgctccagtgcctgacaccaaatcagttgctgag

SEQ ID NO: 378431 - DNA, 270 bp, Zea mays
cgcaagaggttgctggtgctgttcctcctcccccggttgatgagcatggggcattgctccgagcagcggacggggttcgaggtgactaaggactggaacggcgccgaccagttcgcgatccggtccccgcggggggcgtccgttcgggcagaaaaaaacttctctcggtctgattcgagcgttgggttgtcggcgcaggtctgcctgcacggcgggcaggtcgtctcgtggaggaaccaccgcggcgaggagtcctcttcagcagcagca

SEQ ID NO: 378432 - DNA, 237 bp, Zea mays
cccacgcgtccgaagaggatactgaggaaaaggctcccacaaatggagcgacttttaagctgaatgaagatgctgctcgtgggccaactgaatctagtcaatcaggacctatgctatctgttgagacaattgagaagatgatggaagatccagctgtgcagaagatggtttatccctacttgcctgaagagatgaggaacccagattcgttcaagtggatgctgcagaatcccatgt

SEQ ID NO: 378433 - DNA, 271 bp, Zea mays
cccacgcgtccgccagagagcccagcgttccatactcctggagatagaaaatagacgacagtacctccagagcctgcaattcctgcagcaggagcagcaacaacagcagctgctcctccagcagcagagccagcagctggtggtgaaacaacagcagctggagcagcagagcccgccggagcctgatcaccaggccgtgatggcgatgatggacagccagcagagcacggcggaatgctactgcagcccggtgccggtggtgccagagcag

SEQ ID NO: 378434 - DNA, 236 bp, Zea mays
cccacgcgtccgcccctgtcctgctgctgctactgctggttagtggttccccaaacccaagccttcgattcgcccgcccgcccgcgctctcgagccagccttccgcgccgtcgtggttgctttacgcgcactatccatggatgaggtccctgccaccgccgccgtcctcgacttccgacccgcctcttctgtaccacgcgtctccgccgtcccgcgccgtgccgtgcagtgcccct

SEQ ID NO: 378435 - DNA, 220 bp, Zea mays
cccacgcgtccgcccacgcgtccgagctacaagacaggcttagcttagagagctacattgcttagagagcttcttcccgccaccgccgcgcgccatgggaggaggcaagtcgttcttctgccccagcatcttcagcttcctgcgcaagtggaggcgctacgacgacgacatggccgactgggacggcgggtacgcgcgcaaggtgcgctccagcgacgag

SEQ ID NO: 378436 - DNA, 228 bp, Zea mays
gctccatcccctcctgccgtgctgccaggagcttggcatctgcggctatgcaatctcggccgtcctgatcgagcagcgcgcggccgagagatggagggtgcttcgtcgtccgccgccggaggttcgtctttggcagcagcggtgcagggcggccggggccgggagcccggacccgggagggtgggcgcgaccaacatcggcaggctgcggcaggggaagcagcagcac

SEQ ID NO: 378437 - DNA, 232 bp, Zea mays
cagcaaatctcacgcacagaaacaccaaagccccaaaggcccaaactcaccacctcccaatggagaacggcgacgaaaccctcgcctcccccacggccgccgccgagacggacgcgctcaacggcggcgtcgcggaggaggagcaggtccccatcacccaccccgcaaagtcctacgtcacgctcgccgacgacaaccccgctcctaacggcggcgtcgtgaaagaggagga

SEQ ID NO: 378438 - DNA, 227 bp, Zea mays
cccacgcgtccggcgccgtcgacttcctctcaccttctcgactccatagcgcaccacaccaacgcggcgacagcagcccgcgaggagaaaaactagaagaggaggaacagggagagccatacatactcactggttggattcggtccaatccaatccagccggccgcggcgtgaccagccgatccagagggcgccgaatcgatctgcgggggcggcgcggcgatgcgg

SEQ ID NO: 378439 - DNA, 216 bp, Zea mays
gcgcacctacataacgtgctcgccttcggcttcctccgacggccgatacatacgccaaaacccgatgccgacgacgacgagcgcatcgacgacgggggcggcgcacgccgccggagaagctgcaagggtccaccgccacgccagccatggtgctgctccttaggcgtcgacccctctacggtcgccgccaccgctgccggccggtgccccttcccc

SEQ ID NO: 378440 - DNA, 217 bp, Zea mays
attagcgcgcctctcggagatgatcctgcgccggcaaaggcaatgaagatctctaatctggatgcacacttaatcttgtccagctcttgatcagttgatcttgtgctttgctgctcctgctcaagttaatttgttggccaatcaagttcagaggcgcagatgagtgaggagtacaatatggatgatgccctaaaagccaaaaatgttgctgagacca

SEQ ID NO: 378441 - DNA, 247 bp, Zea mays
acaacaccaacgccttcccccacctctgtaccgccggctccgacgccttccaccgcaccgacgccgctggctccaccgcctacccctcctcgacgccactggtcctgttcacgccttgagccctctactggacgtcaagagaagtgctgccctgcgagttcgaatccagaggctctccatgacttcatctgtctctggctcttcaaaatcacctcgtaagcctccggtgtcgtaccggaaatggatg

SEQ ID NO: 378442 - DNA, 252 bp, Zea mays
cctggatatactgaagcaggaattgaaggtccagagtaagcatgttaagagtctgaaaaagaaatcactttggtccaagaatttggaagaggttggtatgaggtgccttgcacaaaaatgtcatactacaaaatgctggcaagggaagacatttttaggatattgatcaccaaacattttaggaccctgctcaaactgcaagcatcctttcctatccatcttatttccaatgttgaactattacattttttg

SEQ ID NO: 378443 - DNA, 235 bp, Zea mays
ggctgaggctgaggctgagcccgaacccgagcaggagcacgagcaggatccggcaccggcggccgagctggctgacggcgccgtggaataacaagaaccggaacttgaaattgaatcaaccggaaaatcctccgaacggaaaccccccttcaacggagatgacaccggcgcagacgaacatcatactgatcaaggatctcaaggggaacacagcctaccagagagctatcccatg

SEQ ID NO: 378444 - DNA, 229 bp, Zea mays
agaaaagcgtgctgttttttcatcctctcgtgtctcgtgtgtgcgcgcgacgtgcgcctccctccccatctcgcgatcccagttcgatccgctcgcccgctctcccgatccgacccgccctccgcggccgggcaattcagccgccgccgctcggattcgcgtgggctcgccctcagattcgctctccccggcgccccaaaccctagatccgccgctggtcgtcccaccg

SEQ ID NO: 378445 - DNA, 235 bp, Zea mays
gccaacaactctcgcgagggcgccgtccgcctccgcctccgtctcggggagcgatgacgatcgcgcgacgcctgctcatatccaatgcctccgcccaggcaatcagcttactgaagcatgtaactggcactgcaagtttgcaaggccatgcacatagtccgttggatgcgtcagtcagacattttagttcagctccatctgcccagtctgacacaactgaagaaaatgggttcaa

SEQ ID NO: 378446 - DNA, 232 bp, Zea mays
attcgcaatggcaacagtagttgccttactatgcaggaagaacatttacaggcagaatgtggaggatatcctcatccagattatatatctgttgatatgattgatgaaagatcactgcatgatttgccacatgggttatcacaaaacaatgagcagtatgagatggagcagctcccacagaatatatgtgaaagtggttctatgcagatggcctctccggaccaatattgtt

SEQ ID NO: 378447 - DNA, 232 bp, Zea mays
ccatggtctgccatccccttgtgaccgtatagcccaagtataaaatcctgacctcgcccgagctcgccacagcgtgctctttaccacgccggacctcgtcgtgctctttctcacttgcctcaccgtgaccggcactccccgagatccttgggaacatcacgttgccgtcagtaaacgccgcttcgaacccatcgccttgtggaccggccaatccgagtgttctttgattgag

SEQ ID NO: 378448 - DNA, 163 bp, Zea mays
ctcaatgtataagatgtgttattaatagatacacattttacaatgtgttaaataaaaccccaaagatcgatcatatgataaaatcacagccatgcttacttatttaacacattgtaaaatgtgtatctattaataactcaatgtataagatgtgttcattctt

SEQ ID NO: 378449 - DNA, 237 bp, Zea mays
atgccttgttcgatgggatttgcaactggtgggaagactttcttcttgtggggtggctgtatgatggtatatatagtctatttcttgacgggaacattttctctagattttctctgtataaacattaatcacccatagtgttctaacaaggcttcactttagatgcatgctgatgattttaggcaagaccggtacggcattgtcagtggattaagagatggcggttactcagatgat

SEQ ID NO: 378450 - DNA, 221 bp, Zea mays
cggacgctggtgttttttttttttgctgtttggtacgatatcaccgtaccagagaggaacaatttattgagacagcgactgtcaaaatcgccaagaccatcatcttctttggtctcagacggacatacaggccggacatcgcaccggcaagtagcagctggcggcaccgtcagctagccgaggttgaagttgttacaattggtctttctgaacagaagcgg

SEQ ID NO: 378451 - DNA, 172 bp, Zea mays
cccacgcgtccgcagaaacgagagggccggagcagccgcagtcccggcgatcccgccgccggtcgccctcatacttcctcgtcactgccttcgtttctctttccaacaagcaagatgagccgtggcggtagcgcggttggtggtcaaagttctctgggttacctcttttgaa

SEQ ID NO: 378452 - DNA, 201 bp, Zea mays
cggacgcgtggcttttacacaccgctccgttccagtccatgatgaactgcataatttcgtgccatgcaggtatgtacgtacactgttattggagatcggaagatttatccgactcgggacgtattatttgtaccacaacaaaacacgtgttactattgtaataccagatccggatatatacgaaactatttttaggatgct

SEQ ID NO: 378453 - DNA, 224 bp, Zea mays
cgtcatccttggctatggtagccattcttccgttgctgtcaaaacgttttgccttttgctttgcaagagtaactggtaggtgaagttttatgtgctgttcaccaaccctgtagacatcggggtgatgagtggagcggcgatgtacatcaagaaggacctgaggatcacggacgtgcagctggagatcctgatagggatccgaacctctactcgctcttcgggtc

SEQ ID NO: 378454 - DNA, 175 bp, Zea mays
cgccctcttaattaatgaaaaactttcatccgaaattctgaaaaatgtcacacgtagccattgtctaatctggccacactaattatacggtgattaaattgaatacagaaaataattaatatccaaatgtcaagaaatcactcccagctgtttcttctactctagctagtagcta

SEQ ID NO: 378455 - DNA, 175 bp, Zea mays
gagagcgtgggggaacacgtagagggattcgcggcgggggacaacgtggtgcacgagttcctagggcagtgctggcgctgagccagatgaggttcggaacactgcaacgtgtgcgacagggtgccgttcgtcatcggccccgggatgcggcgcgacggcgcctcccggttccggg

SEQ ID NO: 378456 - DNA, 161 bp, Zea mays
aagaggtgacggtgcgcgagctggcgtccagcgccgacgcgccggcgtgcgacgtgcggtcccccgtgccggcgatggtgctggccatgggcggactgactggcaactactggcacgacttcagcgacatcatgatcccgctctacctccaggcggcgcgg

SEQ ID NO: 378457 - DNA, 168 bp, Zea mays
gtcatctttgactgatcctgtccggtctccacccctccatcccactccacgccacccccacaccccaccggccatgcaaacacgctgcacatttcagttcagacagtccaagaacagcaccagtaaggaccctttgtgagctttatgttttgcgaatgaataggaggg

SEQ ID NO: 378458 - DNA, 106 bp, Zea mays
tttcccgttcagcccaagccccaagctgcgaattgcgatgagttcgtctccctcgtgggcacgactggccgctggccccgccttcggcacctcgcagattcgcaga

SEQ ID NO: 378459 - DNA, 198 bp, Zea mays
ggcgcagcctccctcgtcgggatccccttgccctccctcccaacgataaagtgccgaagcggcggtcaacgaaccctcgcccccgcgctccgctcaggatcgggagccaccccctagggttagggctcggttttgcatcgttccggcgtcgaccgatacgcggcgcattgcggcggtgaactgccgctacgtcgcggc

SEQ ID NO: 378460 - DNA, 225 bp, Zea mays
cccacgcgtccgtgctaaaccaactgaggtgtcagcagtggaaattgttcaacaaatactactgagttatctccaagaagctggttcacaagatgatgggaacctgtttactcgatggttctatctgtgcatctggaacaaagatgaccaacattctcaggagaagatcatttactatcttgctagattaaaatccaaggagattctgcgagattctggcaatgg

SEQ ID NO: 378461 - DNA, 165 bp, Zea mays
attgactgagatgaacttccctgaagcatctgttgtccatgaagtacctgttaccactagttttcagacattgaacccatttgttgaggaagacgatttgttagaggtgaatcaatcttcacaaacgactaatgatgtgtggctaactgttttagatattgcttt

SEQ ID NO: 378462 - DNA, 161 bp, Zea mays
cccacgcgtccgctactacgaaaggggtcgatgatagcttgcaggatatccttcgtctgttaactctgaggtatccccatggttgaaccaaagaagttcaaacagcgttgcagaaaggtttttcccttgtcaagattgagatgtggctggttgtgctgccc

SEQ ID NO: 378463 - DNA, 233 bp, Zea mays
aagtttgaagagcgacggccgacgactgaagcaataatggccgctcctctatgctcttccgtttccgtgtctctcatgctgctactgctagtgctctcggcctcggcctcggcggcgtccgcgcggacgggaagctgatccacctccacttctacttccacgaggtcgacgccggcacgcccaacgccaccgtggtcaacgtcgccagcctgcacaagaacgcctcgacgttc

SEQ ID NO: 378464 - DNA, 226 bp, Zea mays
aacaaatcagggatatgttccatacaataactatgtggcaccatgggcccaaacgggaccggttgcacagcctggggcatattcgactcaaacccagcaatatgtgtcgagcaatccggcacccccatgggctatgcctgcaagtgccaattcagctaatcctgctgcttctgttgccccttcagctgctccatcagcgcaacatgttccatctccagcaccaaca

SEQ ID NO: 378465 - DNA, 217 bp, Zea mays
ggacgctggctagtactctagtctagcagccatggcggcggcggcggcgggccggtgatcgaccaactcaacgtaccacacgccacactagcgaactcgacttttacgcttgtttgaattgttcaacaccatcaaacagacagtacatgtatatgtatcaccgacagacgaaaggctatcaatcacatcacgtgctgcgatggcgtgtggaatcgca

SEQ ID NO: 378466 - DNA, 234 bp, Zea mays
caccgcccggtacgagatgacctactccaggccagccgagccgcagagatcgagcgccacggctggttctgagtacgcgctctccggcgtgacgatcgacagcatcaccgtctccgtggatggccggcgggcagcggtggaggcgacgatcgaggaggtgggccggcttaccgacgtgaccgaccctaagaacgacgacgcgtacgacaccaagtacaccgcccggtacgagat

SEQ ID NO: 378467 - DNA, 234 bp, Zea mays
cttggagtatgaaatgcgtgttgttcatcaagaacaagcactgtagttctctagaagaaaatgattctgtctgtttctcgagcactgaatccaggtcggcaatgagctcaagcagtagacgagctgttgggtttattacctcaactgtcaatagatgatcagtgtgaccatgtcctagcatggtatcaagtgaactcttatgcttcgtcagtaacctgatgtacctcatgaggt

SEQ ID NO: 378468 - DNA, 271 bp, Zea mays
gggcgaggagagcatagatttcttctttcccttgccgttgccgcttccgtttctcgcttccattcctctctattcgctgggctgtccgggagatgttacaaagtaacagctccaaaaggtatgtgggcgccgggttttaatgggtagggacccccgctttctctctccaagatcttccccccttttcttctgtctccaacccgcggaaatccttggaggagttgcggaaatttgtagcaagaggttttcctttccagctttcctgctgcgg

SEQ ID NO: 378469 - DNA, 268 bp, Zea mays
gcctaagctggaggccaacatgtataaatacctagctaggcccgggtctgtgtgaattaattcacagcatagatggagattttagttgatgtggtgttgccacctgaggtgttaaaggtgtttgttgaccgtcaaatggtggggggtaaacccagtttttgtgagcccagccattatgggctggggtgactgcaagcctacggcaacaatggtgtccgtcgttgtggtgttcgcggtgctcaacacgctgacaaagatggccttcaac

SEQ ID NO: 378470 - DNA, 250 bp, Zea mays
aacatcgttaatacaagcaacacgtactctatcagaagcttcagttattacagtaggagctgcagtttggataatggttcttggcccctcacgagtatcatgcgtatgaataggctgggttaagagtccccatgggggcttgtcttaagtaaccagcttctcctgcaagcaaatcagttctcgagcaacagacttcctagcttcccttacacttggatgcaaaccctgtgtcaatattataaaggtctta

SEQ ID NO: 378471 - DNA, 252 bp, Zea mays
cccacgcgtccgagaaaaggcggcgcgcggcggaaaaccctagcttagctcctctccggcgtcaagtgctctccggtttgagggggggtttatgtgtgtatgggggtttgtggttcatcggtgagtaaacgcgcgaggcagccaggacctgcagaaagtattccgcaactatgatccagcgcttcgtagtcaagagaaagctgttgagtatactcgggcactcaatgctgccaagttagagaagatatttgc

SEQ ID NO: 378472 - DNA, 251 bp, Zea mays
atcaaaaggtaaaggggttgcgtaccaaggtgcacgggaggagatccaagtgcaggctaatgcaagacccagagaccctttggacaagatcccgactattcctacctcaattcatgattctatggccagagtggaccatatgcttttcagtactggcggaaatgttacaaaatcccactctgagggatgtagcctgagggaactgattaagcctgggttgcaaacaatgactaagtttgagaaaatgcatt

SEQ ID NO: 378473 - DNA, 253 bp, Zea mays
cccacgcgtccgcaagattagtgggttggcaggcccttctgcagaaaggactgatagaactgcaggtccgcaaatctttgagctaggaaataagttggtgaaagttaaccgagtttttgtaccaacaagtggcacagctacatccctgacagattagtttctgcagctgaagctttgtttagaaggactggatctggttctggtcacaatcgagagcacaccaagcacagaagtcttctggagtcactgatgc

SEQ ID NO: 378474 - DNA, 255 bp, Zea mays
aatcattcctgtggtgaaggtaccaatggcacttggctggaccctgctaaccttactcctacgaaaaagaagaaacctgcacagcacttcagcaatccggcagccgttattgtggaatttgtacctggtgccactgttccttccagagaggagctactctccacatttggcaagcacggctacttgatcgagtctcagactgatatttcagaagctacccgcagtgcttgtgttgtgtttgggaaaagcattgaa

SEQ ID NO: 378475 - DNA, 244 bp, Zea mays
tggtaagtgtgcgttaatttcttgcttaaaccgtacgaacgtcactgagtatatatacacacatatatctttcgttcttcagctcatcaagaggcgttgaagaaggagatcgagaggctgcgccaggtctacgagcagcagaacctcaagatgtcagccggcgctgctgcctctgaccatggcccgccaccggtgcgcgcggagaaagagctcatgagctagctacccagtcgatccacgcgtg

SEQ ID NO: 378476 - DNA, 244 bp, Zea mays
agagttaaaagatctaacactgtttttaggcttttaggaccgttggcatcagagggccgctgttgccaacggtcctaaaagcctaaaaacagagttaaaagatctaacactacagcaaacgccaaaatatacagctactcttgttgactgtccaaattcaaaatacacagcttataagcaaggctgtatatgtttgctactaactcatacctataggcagctaagaccggtgttatgccaagtg

SEQ ID NO: 378477 - DNA, 240 bp, Zea mays
gcaaccccaaatctctccttcctcacacacgcgaactgtagagaccaaagaagaagaagaaggagcgagcaagcataaagttagctagctgctagcgttgaagtgcccaatgcgagagagagagacaagcctaggacggccgcgccaggctagccagccagctgctagctcctgctgacgagccgatggctggcgccgacgtcgacgtcgggacggagctcaggctctgcctgccgggat

SEQ ID NO: 378478 - DNA, 220 bp, Zea mays
aaaccctagcagcaaaaaaggaaaaaacattgcccaatccaaatccccattccctccactcccaaaatttcgaactccgaatcggagctatcatgtgcgagcgctcacctaccccacgttgactagaagaaccgtccgacttcaacttcccaatttcgcctccaaaaagttcaaaatattatccgaaccagtagccatcccagcggacctacaaatccgg

SEQ ID NO: 378479 - DNA, 107 bp, Zea mays
cgcgacgaaagggctcatcggcgccgtccttcctcaaggctccgtcggcccgtccacggtggccgtgcttgccaacggtctccacttcaaggggacatgggctcagc

SEQ ID NO: 378480 - DNA, 217 bp, Zea mays
ctgctccaccgtaagcgcctgtttcaccgccaccgccgacttcggttggtcctcacccgcgcgtggatggcgcacgcgcctctctcctccaagtgcgccgtcgacaccaagctcccctgcctcaccgcgcgatctccagccccgccgcgctcgcaagtcttgagatcgagcagatccaccatcctgcgccctcgccccatcacgcattcagttgggc

SEQ ID NO: 378481 - DNA, 256 bp, Zea mays
cccacgcgtccggaccacaactcctcgagacaccacaagggcaagggacgcgcgctcctctcgcctcgcctcgcctcccccggggaagaagaggaggagagggagctgagcagcagccggccgacgcgggaatgctcgtcggcggcgggcgggacgacgaggaggtgctccggaagctcaagagcatggacgtggacaagctggagaacggcggacgcggcggcgacgcggagagcccgcgccccgtcgtcaagta

SEQ ID NO: 378482 - DNA, 254 bp, Zea mays
gcgccacaacgcagcacgcacggacgccatcgaggaaccctagaccagagcacatcacacggccggcgacgcgtcaccggcgactggcgccccctcttcggtccccagcgcggcgacgcctcctgcttgagcaggtgtcctcttctgtctgcttgagcaggtgacttcctgggctttaggtactcgctttcgcttccaaccagcgcgtcctcagccagcgctggaggccgcccagccgcgcctgcgaccgcaga

SEQ ID NO: 378483 - DNA, 249 bp, Zea mays
ggacgtggtcggcgagcccgcggcccgttcgaaagatggtgcctttcctaggagccccagtggtctgtcatcgtttcttggcccctatctaaagcggcggtttccagggagctgccgtccccgcccaattcagctgaggtggcggcaagtgggtttagggctcgattcagtgtgttgggtcgtgtctgactctgacccggtggggagcggtggttcttggctagttcttgatctcgttgctgcgcttat

SEQ ID NO: 378484 - DNA, 246 bp, Zea mays
ggacgtggcatagttctagatcgcaagcagccgcccttttttttgttttgtgttagttgtgtttttttgttttttttagccatgaaccaggaaactcaaaacagcaggtaacaccacaaaggccaatctaccgcgggtccacaaagagcagcagtatcaaaatgtggatgtcgtcttcaacttcaacatgcaagcgaccggagcaacagcatatccagtgctgttgacggtttacaggatttattc

SEQ ID NO: 378485 - DNA, 247 bp, Zea mays
cccacgcgtccgcgcttccacccttgccgctccgcatccgaagccatcgagccgctacccgccgcagccgccgcgaaatcgccgccggcgcgcgcaccctggtctccgcgagggccctggagggcgacatgcgcacggactccgtcggtgtcccgtttccggacgttcttccgcgcgccgatccgcccacacatcgtccgcttcgtccacaagctcctgtcctgcaacagccggcagccgtacgcgg

SEQ ID NO: 378486 - DNA, 239 bp, Zea mays
cccacgcgtccggccatatcctcgatcacaagagcagctactagctgcctctagctcgatcggttagtttgtcgtgttgcttacgtacgtcagcagaggccatcgtcgagtgtatccagtggtcgagaagagggaagaaatgtctgcgaacgacggcgccggcgacacgaagatgagggcgatcgtcgtcgtagaggaaggggagatgagcgcgccggcggcgacgccgaagcagggca

SEQ ID NO: 378487 - DNA, 239 bp, Zea mays
gtaatgattgccctccctgctgtgtcttggttgcagttgaaaccatatgtagctacattccccctcccaccacctccacacatcaacttctgcttcaccttttttagcatcaatggatggccggttgtttttaatgcgatgatctgcagttatcgtggcagaagctctttgtgcaaaattattccaaaccgccgatttgtattgttggatgcaactgaaacaaatgaatatatcagcac

SEQ ID NO: 378488 - DNA, 163 bp, Zea mays
ggcgcaatcgcacgctcgctcgctcgctctctctctcccatcccccgcacgacacttgggtagcgcgagagaaggagagatagagacatgacgaatcgagcggcaccatgtgatgggcgtccccgtcacctccacggcgtacgcatcgaggacgcgacgaggg

SEQ ID NO: 378489 - DNA, 170 bp, Zea mays
gtagagcgaaattcgtttcgaaccgaagaacccaaccgaaatggataaatttcatgaaattttggactaaatacagtgaaatttcgacattcgaagcacaaaattcgtttcgaaccgaagaaccctggccgagagctctattggatgaaaggttgaagcgctcaccaggc

SEQ ID NO: 378490 - DNA, 167 bp, Zea mays
gtggccctttcagcatgaatcgatgaatgtacattgcttatcagttcacatgctgatttggcgtccaatgttgttcttggctgcaaatagattatgtagcatatctcctgagatagtacttcttcaacaacttgcactatcgattgagtacatgccctttctatagt

SEQ ID NO: 378491 - DNA, 162 bp, Zea mays
ggctgatgtggaaaggaacggggtggacatgtcggagaatcttggggtgacactcggaatgtctacgccgctccaggctatggctatgccgatttgaatcgttgccataggacgcactcgtttggagaaactaaagtagttccaaaatattttatactatac

SEQ ID NO: 378492 - DNA, 156 bp, Zea mays
ggtgaattggcagagtggtttagacatttgtctagttctaggactctactacatgtatccattctggctgttgtgattcttgctcttgcgattttttccggctaacgctcttctgcagcccatgactcgtacaatttcttggtgaactggctggag

SEQ ID NO: 378493 - DNA, 235 bp, Zea mays
gtccaggcgtactccccgccttgcatcgagattgctaggtatgcatcgacattgcaacttattcaaatctgaagggtatatcaagaattcctttgtaaagtccttctgcagattgttgtgctaacaagaactgacgtccatgattgtatgtgctcctatgttcatgaactacatagaatcccataaatttaactgcatttcttccttttccttttgctcctattcgtgtagctgc

SEQ ID NO: 378494 - DNA, 107 bp, Zea mays
cgagaccaatgggcaaaggctaaacgcatcatagtctccacaagagaatatagtgttgccagatattgctcgggaggagacatgaacacgcacaaacttcaagtcct

SEQ ID NO: 378495 - DNA, 219 bp, Zea mays
ccacgcgtccgggcaccactccgccgcgcgcgacgtgcgatcaacgacggcaaccgccatcacgctggccgccttgacgaaaagcaaggccaacgcctactccacctactcctatccacagaagacgcgccacgcgcattgacgtcacgatggacgagtcgctgctcatgcacgccgtggcgatcatggatcacgctggccacggcagcatcgatagga

SEQ ID NO: 378496 - DNA, 172 bp, Zea mays
caagaggttagttggattgttggggagccggttcaagtcatggttgagttagcaaacccttgcagcttcgacctaattgtggagagcatctatctctctgtccattcttggaattttgatgcctttccagttagtgttagtcttccacctaacacttcaagattagttttat

SEQ ID NO: 378497 - DNA, 237 bp, Zea mays
gccgcccttttttttttttttttatttttttttttttaaaaagagcattgcagatacttgtaataaaccttacattaattgacgtaataaatttcctcaccccacggcaacatgagtcgacgacgtcggaacagataaagaccaattcgccggtgtgccctaggtgcgagttgttacctgtcaccgagacggcgagacacgaaacacgagttcagaggctgcaatgctgcatgccct

SEQ ID NO: 378498 - DNA, 230 bp, Zea mays
caatactcaggtaaacaatatggaattcactggccctgagaattgtctctggattgtttcatttttatgcccatggtatgccaatgctcatgttcagttgccttggttgatgacgcttgtcccaaactcccaaacttaaggctttggttgttgcatcctgtaaaacggtacgcccttggccgcacctgttttggacatattgggcgattgtatgttctgaagcaatttgg

SEQ ID NO: 378499 - DNA, 224 bp, Zea mays
cggacgcgtggcggacgcgtgggctgcagaactagcatgcgtcacggtgggggacgagactccccccaccatgattggattgcactggagggcaataacaaatgttttactcaacagcgtttacagcaacatgagggattgtgataggcatgcagcagtgagtaagcaatatctggtgcctaggtatgagctcttttaccatccttgagagcacccaagaggtt

SEQ ID NO: 378500 - DNA, 236 bp, Zea mays
gaatggtggtagggtagcacccacttggaatctattgaaattctgaagatacatggagaatatcttaaggattcatttttggacgaagggtacatatttatagaaaaaataccactatattcttttgaccacacagcactgggttgcatacaaattctctcacctagcgccaaattctcctttctgtcaatcagtccaacctaagagcccaatgcaatcaatttctgtttttatca

SEQ ID NO: 378501 - DNA, 238 bp, Zea mays
cagaccacggactgattgtatcaaacggaacttacgcgcttaccgctagcaactgtgtgcagtgtagctgtggacctggcagcctcaatctatattgcacgccaacttcactgtcgggaacctgtcctagtatgcaatgtcctaacagcgacgtgatgcttggcaatgtgagcacccatccaaccggtgctggatgcaacgtctctgcttgcagctacggaggttttgttaatggaac

SEQ ID NO: 378502 - DNA, 191 bp, Zea mays
gatgcagagttcatagaaccgatataaagagttccatcatcaggtctgatacaatggaccaaacgataggagcaaatcggatccaaatgcaaccagggtagaaatcatgatagatatgttccttctatccatcattcattcatgaaacaacgcgctgcgtttgtttacatccccacaacccatatcaatcc

SEQ ID NO: 378503 - DNA, 194 bp, Zea mays
gccgcagtcccaccgaccccgccgccagtcgccttcaatttcttcgcggttgcttctcgtttcccttttcattagtcagaataacccttggtggaattgccgttgttggtcaaagtcctctgggtaacccctttgaagcgggtaaccccccaaaaccagcattggaacaacttgaaagtgctcacacctgttga

SEQ ID NO: 378504 - DNA, 247 bp, Zea mays
ggggcttgctgaacggcaaaatgctcgggggtaatatacatctggaacgtcctcttcttgacaacctagttattgaatagacacgtagcagcatgtatgtcaaaataattttgatagctagcagttaaccttgcactgcatgttgggacatggcccatgggtattatacttcacatgaatgatgaagcagcagtgagcggataatgcagcatggttttggattctgccgactgttgcgcatggatgt

SEQ ID NO: 378505 - DNA, 241 bp, Zea mays
gtacgtgtgaatgtgcatcaaacgaataaattatatttcgtttgtttaaggctacatggcatactttgcagatttgtggccattgtgtttggtattcattataaactgccatctttatttgtgtcgtgatcataggaatgtggatagcaagaataatgacagggtattatgtactattaaatttccatattccatgcctttgcgtcagttgtctttgccccttgtatgagtatctttgttg

SEQ ID NO: 378506 - DNA, 241 bp, Zea mays
tcttggcctaaattttattctttttctctctcacacacacaaatatatcagtataccgttctccttttattagtgccagtatgtaatggcatgttcggctgcctttctagcagatttttattttagtcttttttctaaaactgttattgttgttacttgacttcaattatcaaaaatcaaggcaatataagttaaatattaggaccttcgttctttggtttaacactttttcaaagtgtta

SEQ ID NO: 378507 - DNA, 232 bp, Zea mays
agaattcatgtcactgggtaatattcttagttttcctgtatgctatttatgagcaaactgcaagaatcataactatagcattagattgggccttatttaaaaaaaaaatctctttaatattgtgacccatgcgctttttcacaatatgttttttttctggagataacactgcatatagttgaaaataagcaaacaagaatatttgaactcagtaagcatggaggaaacatac

SEQ ID NO: 378508 - DNA, 234 bp, Zea mays
ctagttctagatcgcgagcggccgcccttttttttttttttttttttttttttttaattatgtatggcttgaacgccttattccaaacttatatgtcaatcgggttaagaaaaccagacgatggcctgcatcttgacatgttgcaaacttgcgacaagctagcagagcactgtgtgagatcagtcaaaaaagcagtccctgtgcgagatcagacaaaaagcaactacgcaggca

SEQ ID NO: 378509 - DNA, 109 bp, Zea mays
cccacgcgtccgcattctctcatctgctgctgcggctatatacccccctctctgtctctctatctcctgttcttagacgtttctccagagcctgaagccaaatctaggg

SEQ ID NO: 378510 - DNA, 249 bp, Zea mays
ccatccaatgccaaggaattgttcaatttgcgccattcaacagctagaaatgtgatagagagaacatttgggctattgaagatgaggtgggctatattaaggaaaaaactcatattttgacttacaaaatcagattaggatcatcaatgcttgttgcatattgcacaactttgtaagggataggcaaagagatatggatgatttacttttaggccaagttgatcaagtaatatctgttgaatctcatga

SEQ ID NO: 378511 - DNA, 246 bp, Zea mays
gcccgttcccccatcccccttgattcctccgccagcccagcggcggccactctccacgcatctgcatccgcatggctctccacgccgcggcgccggcctgcgcggtgttctgccgcctcccgtcgccctccccatctcacgccggcagcagacgctcccttcccgccgtcgcgagtccccgcggcgttgtctctgccgcgccgctacggacacgcgcagttccaacaaaggcgatcgtaaacagtg

SEQ ID NO: 378512 - DNA, 243 bp, Zea mays
acacacaccatcactgcgctgcgctactctactccccaccaccgccgccacccaagagctttcctcgctgcacaagaaatggccacgaaccatctctcccaagggcagcaccagcacccgcgagcctggccctggggcgtggccatgtacaccaacctacactaccaccaccagcagcaccaccactacgagaaggagcacttgttcgagaaccgctgacgccgacgacgtgggcaagctcaa

SEQ ID NO: 378513 - DNA, 240 bp, Zea mays
gcctgctacggcaagggcctcgagatccagatggctgcgctcggcgacgcgatcctcgcgtcgcagagacctgcaggtacctggcggaagcgcacgtgcaagctctgcagttcgacgaggcagagaagctgtgtcgcgaaccctccagatccaccgagagcacagcgctccggcatccctcgaggaggcctcggaccgccgcctgatggccctcgtcctggacgccaagggtgactacga

SEQ ID NO: 378514 - DNA, 233 bp, Zea mays
atgactaggtccgcttgggacattgtgcagtcgtttgctcccagggaacagggaagtgaaccgggagagcgtttggacactcgttgcaattcggacacagaggaagagagtgaggctgaggatggggtggcagctgtggagggcgagctgaaagagttgaggataggagagaccttcgaggggctcactggaacttcttcattgtcaacgacaaatgatgatgatgcgtccag

SEQ ID NO: 378515 - DNA, 123 bp, Zea mays
attatcctcaaaggagatataggattgtcctaagaagtaccatgggtccgatagatgtgtacctagttagtcaatttgaggagatgagtggcatggagactcctccaaggcctacacagacaa

SEQ ID NO: 378516 - DNA, 230 bp, Zea mays
cccacgcgtccgcccacgcgtccgttgaattctaaaaaatgtttggtccataaatttcataatgtgtcagggattctttcattttacttccacttattgcgtaagttacatgcaaaatcaccgtagtatccaagtttcaacataatcaatatttcactttatcattttcatatagggacatcatattatctttaatataatgtttattggtccttgtaatttatttgcaa

SEQ ID NO: 378517 - DNA, 203 bp, Zea mays
ccacgcgtccgtaagcggagggcctaaactagggaatccctgattatcccactcacaaggtgataagggtgaaaacccttcatcatacacattttgagtgggataatcagggactccctagtttaggggagggcctaaggtgatggctcagctggtttaggcgtgagcagaaggattgtcccctcatataaggaccggtttgt

SEQ ID NO: 378518 - DNA, 230 bp, Zea mays
gatgggtcggattaagaaagaccagttcatccgattcctccgcaattacgtcggagacaaagtgctgaccaccgtggccaagaaactacgaggatgctaaatttctagtgcgcgtgtctccttggtttcgccgtcttggtggtggcatacgtggtggctctgactacagcgattcaagcttgtctacgtgctagatgtctgcagtagtaccaaatagagatgaggagctt

SEQ ID NO: 378519 - DNA, 230 bp, Zea mays
acacccataatgacccattctaccgtcatatacatacaccgttggcacgccatctaatcagcgaagaggagacgacgactgctctgcctttcttccctacaggaacaggacgaatcaatcaatcattcccctctgcagccgccggccctcagcaagcaagcaagggacagacgcggcggggatgggcagcggggtccgggcgctgatgcgccggaagcaggtagactccg

SEQ ID NO: 378520 - DNA, 216 bp, Zea mays
ctagttctagatcgcgagcggccgcccttttttttttttttttcaaaaaatagatgcaccttatatgaatttaccgcaatccataacgatccacgcagtgaaatactacacttgcataccgaacgttccaaccccaattaactcaaagtttttaagaacaaacccaaacacatgagactgctccaactcgccccaaaaaaattagcaaacatattt

SEQ ID NO: 378521 - DNA, 230 bp, Zea mays
accatctctctcttcgcctagcgtgtatgtagccaagctacgctagcgtctgaagcggtggaaggaaagacgaacgaagctacagctgccgaggtccccgttcccgcccaccgaggcgtcgcgcatgcagccacccgcacccagacccaggcactggcccgggggagcgaggcgtggaggcggacaatggcgggcggtctggaccgatccgtgcaactgtaggcgcggtg

SEQ ID NO: 378522 - DNA, 137 bp, Zea mays
cccacgcgtccgggagggaggaggccaagagcgcaggacgaagcatagccaagctcacccgatccagtccctgccgcccccagcgtgccacagccagtcccgcgctcagctcagctcagattcacgagctcgtctcc

SEQ ID NO: 378523 - DNA, 232 bp, Zea mays
gtctgttggtcgcttgctcagagaaagtaccaataagaatggcttatgctttgttatttcaataagtttaagtgttcgatagactgaactttcctaaaaaggtttagttcactgaatattttggaggctgtcagtgtgagtgtaggacagtggaccatctggcgatttaagaaaacaagtctcttgcaacattgtaaatgtatcatccgcttccagaaataaatgtatcaag

SEQ ID NO: 378524 - DNA, 222 bp, Zea mays
gatttctggacgttgtaaatatcagaagtgattgttcatcgcagtgacgactacttcagtttccacgccttgatgaaattgtacatctctcaagaccatatctatatctggtcttgagagatgtacaatttcatcaaggcgtgaactggagagtttcgcatcatcagtatgctaatatgtgttctcttcatttcttgatgacactagttttcatgtgattat

SEQ ID NO: 378525 - DNA, 225 bp, Zea mays
ggttcatttcactcatcacggaccgaccggcgaccgcacccaatgcaagcaatttttgcggacagggggaccttcctcttcttcttcctcgtccccggcccctgcccctctcccctgcggagacggagcgccaccttcctcaccttctagaaagaactagaaccctccctccagaaccttgaagaccagcccagaccagaccagccccgaagctctccgcgggcc

SEQ ID NO: 378526 - DNA, 227 bp, Zea mays
cgctagttaagcaagaaattagaggaggagagaggggtagccatggaagagcagcagccccgcccccgcccaagcatcatgttcgtcctgtcgtcgctcgccaagaataacccagagtccgtgctggcgctcatcgcggtgctcaccgtcgtcgccctgcgccacttgatctcctcatggcggcagcaggcccggctgcccccgtcaccgacgagcctcccggtgat

SEQ ID NO: 378527 - DNA, 216 bp, Zea mays
gccttacctcctcccgcaacaacgcgcactccaccggccccgagcccccgacgtggctctacctcgtcgcctcgtcgctgcgctggctcggcggcacagcgccggggccgcctcctctacggccacatcacctcccctccaaggctgaggaggacacatggtggagggcgaggaagcggtcctcgtcgcaggggagcgcgatggggtccgaggctg

SEQ ID NO: 378528 - DNA, 237 bp, Zea mays
gacgaatctccgcgggcccagcccctcaccatggtcccacttccgcacccacttcatctcctccaagccgccgccctccacccctctcccggcgcccgtgccgccagctcgcctgtcccgcgtgggttctgccttcgggcctcctagcagaaagaccggcgcggttggagccggggctggcgcgggtgtcgtcgggtggtaccttggcctcttggacgcgcggccgtgctgaccaag

SEQ ID NO: 378529 - DNA, 240 bp, Zea mays
cggacgctgtgcagagaacatcacacggcgatagcagaaccttccgtcggatgatggcttccggcggcgctggagaaggcaatgagacggggacgggtgccgggagcagcctccagagcaagactctcctcaagagccaagcactgtaccagtacatagtggaatccagcgtcttcccactcgaggcggactgcctgcggggtgtccgggttcgcaacgtcagccaccccatggggggca

SEQ ID NO: 378530 - DNA, 238 bp, Zea mays
gtcgctggacggtgcatcagtcccacatttttccttacaagatggcatcctccggtacaagaacagagtttgggtaggttctgatgttcctctccaccacaagctggtagcagcatttcatcaaagcccagttggtggccattcgggtgtgcccgttacttacaggaaaatcaaacaagttttcgcatggaagggaatgaagacctttgtgcaaaactgggtagcttcctgccttaca

SEQ ID NO: 378531 - DNA, 130 bp, Zea mays
cggacgcgtggcgactaccccgcaagtcgaggccttccgctggctctcgctcgctcgctcgcaccgcgaatggttgcctctccgccccgaccctgccctgagaccggagacgaccgcgccccggggtggc

SEQ ID NO: 378532 - DNA, 191 bp, Zea mays
cgcacccaacggccacctgccgcattccgtctccgtgtgagtgggctctcgattgtatttaccggattgttatccttagtggcgtgtgtgactacgatagtaggtttagagtttgctggggttttggcctgccggcttgtattgtatgtccgttttggacggtcctctattgctctgcatacgtacaaaaa

SEQ ID NO: 378533 - DNA, 239 bp, Zea mays
cggacgcgtgggttcctccaaacgttagttggtactctacaaattaatactctggagtctaagctatcatcattcctaatcatgaactaaacagacagcttgtgtaaaaaggagccataagttaatttttctccccaatccaccccagcatgtggatttaagtggatactgagtacagccaaacccttggggttgtctgaagttgccacaatttaacttttacctgttgatgtttggaa

SEQ ID NO: 378534 - DNA, 148 bp, Zea mays
agcaaataatagccgctaatgaacttgagaggacagttcatatttctcaagcaacagcgtcactttcatctgatgtcatgatgcatgtgttgaggttgttacgtaggagagattctgaaatgtatatcgagaatgagccggctagtgc

SEQ ID NO: 378535 - DNA, 235 bp, Zea mays
cccacgcgtccgtctccttctcccgctcggcaaagcacggtctagctatgaagatgagcacgagaggccagccagcagagggtcacctgtggctggtcttcaccatgctgttcgtcacttctgcggtgcgcacgtgaggggcgagcagctttgctcctccaccgtctgtctccgtatcatccccagcgtacgatcctgttatcaaggtggtagggaaggtgtactgctacagatg

SEQ ID NO: 378536 - DNA, 232 bp, Zea mays
gatagataaagcggtggagcagggtgagagggaggtgctcctcgtggttaccatcgccaccatggccgtgtagtgtacaggagcactgcagccggaagcccggaagaggtttttcagatacagagagaaagaaagagaagggggtgggcacagcgcaggcaggatgaagtcgagaactgcgacattggcggtcggcatcctcctcctcgtcgcgcttgtggtggtggcggaa

SEQ ID NO: 378537 - DNA, 231 bp, Zea mays
gtacaggacgttcagcgcgctgctgcccgaggggggctggaccggcaaggtgctgtacgtcaagctcgtgctcgtcctcctcatgtgcggctccttcatgggcctcctcaactcgccgtccatccacctcgccgacgaacgccaccaccacgcgcagactgcagaggcgtggaatgcgagctggacgtcgcaccccgacgcggcgaactccgggtacgcgtcgagcctgag

SEQ ID NO: 378538 - DNA, 230 bp, Zea mays
ctcaattgtcgagaccttctaatccatgacttcgtaccattatgcattgcagagtttgcttgccctcatgcttttaacttaccaattttatttctgttagttatgtttccttttcgaaaactatgtctcattaagagtagagccgagccgatgacatgtgggcatttaatccaaaattttgtacaaactgttgatagggacgcaaaccgttattggttgggtttaggctt

SEQ ID NO: 378539 - DNA, 230 bp, Zea mays
gcggcggcggcggcggccggcttgccacagtccaatccttggaccggccaaaaagcagttgaaggcgcgagcgagcaagctagcgcgcccctacgcctacgcgcgatcgagccgcgcattgctgacctcgagttaagttgggcgaggagaggtggttcattccagcagggatccttctcgtgagcccagtcgatctgaccgtccttggtatctgggggggttgttctgta

SEQ ID NO: 378540 - DNA, 245 bp, Zea mays
  unsure (1)..(245): unsure at all n locations
gggaggccatgaccatgaggtttgaaggcttgaagctagcgtacgtctcagacaggaatcaggaatgaagaccatggcatggagctgctgctgctgtcttgagagttttataagtagcgaacgnacggagagtacattgcttgttgttagctatagaggtcaagggagagccttatcgtgtatttaattagcttgttaattattgctgcgtactccttgttaagagtcttcaacttaacggcgga

SEQ ID NO: 378541 - DNA, 237 bp, Zea mays
cggcgtacagcgggccgatcaacttcaccaacggaggggacatcgctgtgagtgtctcatgctgcatatattataataatgtgtggtgcgaagatcgatcgagtcacgacacgagcgcgcgccgtctcctgttgtattgtaccgcagtgtcttcggtggttcaggtggtcggcctcgtcctctgcctgcacgccgctgccaagatctcccaccgagctcagaacatcgctgcgctgg

SEQ ID NO: 378542 - DNA, 241 bp, Zea mays
gagaagcagccgcaagcaggagcctttccgagtgtgtggagcagcagcagccgtaagataggggagtgcaaagtaagcttcatatattttccatggcaaagtaagcttcatatctacctatatgcatgcatgcattttggacaactgaatattatttcaagtcttctccatgcatatgggatgttttgatgcaatgcaggctcttcggaaaggtggcgatcgtcacgggcgccgccagcaa

SEQ ID NO: 378543 - DNA, 246 bp, Zea mays
atttgcacagaggaaaccaaggcctggttatttgtggagcaatactcctcctgtaactcttctgcacgtggtaccactgtagagttcagatatttgaggtctttgctagaacaatacagtcatgttatcagtagctaccaccaatggcagccaagggaactccatggaaacagtcatggcaacaatggagcgtcaaacagctcgcaggacccagactaatgtgacacagatgatggaatctatttt

SEQ ID NO: 378544 - DNA, 245 bp, Zea mays
aggaaacctctgccattagaaccttctttacttctacgtgaggctaataggcgcagggcttttctctctgctggaaatttatctgagctttatgattcatctgatggttcaggtttagatgcaaattcaaaacttcctcccaacagatctgcttctaacttaatgacaagaacaatgtcaggtccagcaacgtccgagacttcactgccagttgatcgtcccatgaggttgtcagaaattcatgt

SEQ ID NO: 378545 - DNA, 241 bp, Zea mays
cccacgcgtccgcccacgcgtccgtgagaaggtgcctcagtctactcctatgtcgatcccaagctccctggaagctgtcacagcaacgccaagatcaatcaaggaattgcctaagttgaattctaatgtcaagcaaagtgtaatggcttcaaagctaccaaatgcagggcatgtagctcaaaatttgactaacaatgcacccccgacggactatccggaaacagcttcatcagcaacttca

SEQ ID NO: 378546 - DNA, 238 bp, Zea mays
gctcgacggcgacgcggcgaggacgccggtgccagagttcctggaggccgtccgcggcgtcgcggggctccggcaccctaacgtggagcagctcgtgggctgctgcgtggagcacggccagaggctgctcgtctaccgccagtgcagcgaccgcgctctggacggcgagctgcgtctagagcacggggcgtcgacgtctggagctgatgagaatgagacgcttcgctgtgccgcgcgg

SEQ ID NO: 378547 - DNA, 239 bp, Zea mays
atcacatcctgtcacgcctcctgctcaaattcctaacgcccgagaaaccaagaaccggggtgaggccgctgtgcgacgccgtcaccttcacctaatcccaacttccccactagtcctcaagtgtctctcttcttctcttcggttacaagagcagaccggagttaccgggcggtggaggccgcgatgaagagccctcctgtcatggatcccgaggcgccgccatcgccgccgctgccggg

SEQ ID NO: 378548 - DNA, 227 bp, Zea mays
ccacgcgtccgagcccacaagacgagatcggcccgccggcccctcgcaacgcatggccctcccccgcgtcgtcatctccccagatccccccaaaccctaccgccgatccgggcccagatcgccatggccgcgcccaacagcaatgacgccgccagcgccagcggcaccggcccggctggcgaggaggacatcgccatcgaggcgttggccgggcgcgtgcaagagca

SEQ ID NO: 378549 - DNA, 218 bp, Zea mays
cccacgcgtccggctacagatgttatactacatacgtagcagaacatttctcaatcatgaccagagctccagaagaaccttcacgagctctggtcatgattgagaaatgttctgctaagctgttatactacatacgtgactacactacatgatatattcggttttctgattgtgatatctgtacgtggctacactcacatgtgagattgtaataagtc

SEQ ID NO: 378550 - DNA, 228 bp, Zea mays
gctcgtgagcacagcgcgtccattcccctccccggtcatccggttgcaagtatacttttgtgatggttgtatggatgagtcatgtgtaagattatggagtaattattatacattttatgatctatagttatatttgtcatcttaagatatgactaatggttggatgaatgtgtcatatcttaaaatacagattgactaatggagaaaattatctatttgcactcatca

SEQ ID NO: 378551 - DNA, 235 bp, Zea mays
gtaagcctatgtcaatttgtggttgttcattgttgtgtcaatctaagaatgttgattgaaaattttgttgtttggacaatgaaatctacaatatttagaatatatgttaggcactgaatactgtaatgttgttttgagatggtggacattgataacaaggagatggagatgatcaaggacctgaagaactcaagcaggacatcaagcgctacctcttcctcgagctggttaagta

SEQ ID NO: 378552 - DNA, 240 bp, Zea mays
cccacgcgtccgcttcatcctcccatctcctgatctccatctccatcttcttcgcagcgccggcgatccatcttccgctgcctcccttcctcgcgctcgggctctcagtgacggcatcagcggtttcccctcccgcctctcgccagtcgcatcacgcccccgcctccggtccaccgcacaccggccggtgaccctacatggccgtttcttttgcaaatgtcaacgccgaggcagggctga

SEQ ID NO: 378553 - DNA, 255 bp, Zea mays
ctctagtcctccacctcaattgggcaccaacatgttagtaccgctctggtgcgtctaccaacatcttatcttagatcgatctcccgcactgatgatcagcgctacgataatcctaaaccagccgcagacgcaatcacggctcgggttggattcgtggggcaccacgtggcaatcgaaaccccacaggccacaactaactgaatgaacgggggaagataatgttggatccgagtgggggacttagctgcggctcgg

SEQ ID NO: 378554 - DNA, 129 bp, Zea mays
ggaataatcccttcctcggcatccttcggtcccggaatatgcccccggcgactccctcctcgcgttcctctcgtcggtgagctcctgccgcctggctcgcacagccgatttgcctcagtccagatcgtg

SEQ ID NO: 378555 - DNA, 159 bp, Zea mays
ccagcgtccgggacgcgtggcagccgcatgagaaagtcgttgtggttggttctcttttagcttatactcctaattgtggtcgctgacaccagcgaggaagaagggtttcctcaccagcaaggcaggtgttttggccgtcatggctgggcatccgattgg

SEQ ID NO: 378556 - DNA, 235 bp, Zea mays
aaagaacgctatttatgccgtgcatgttgagtatggcccagatcctgcttctactcgcttagactacatagcagatttcacagttgcaatgcctatattaagccttacaggaacacatgatagccaacctgatagtgaacaagttgttcaagtctattgtgttcaaactatggccattcagcaatatggtctagagctaccactctgtttgcctcctacagctgatagtactggg

SEQ ID NO: 378557 - DNA, 232 bp, Zea mays
gccgggtaatgaaggttatagctatggtgcacccaatgcacaagacccaagcattcaaaactactatggataccctggttatggtaactatgagcagcagtcaacacaggaacagcagcagcagcagcctccaccagcacaggagcagcctccaccggcaccacagtaacaatcatcgtggtgacgattgcttgggcacttctggaatgctatcagattagagggactacag

SEQ ID NO: 378558 - DNA, 209 bp, Zea mays
gcagaggcacggaagaagtccaaagttttagtgccaatcagaaaagatgactattcacgaggccacgaaacagatagtagctatggaggcacgagcagtggtaggatcgatctaggacccgatagcaagaggagaacaaacagaagaggaagacagcccagtgatctctttctcaaacctgttgcaaagatatctacagatgctattga

SEQ ID NO: 378559 - DNA, 226 bp, Zea mays
aaccaagcacatacactttcccatttgtcaaacatgatgcaagcaaatcctttgagcactagcagcctattggcgtcaaatcaaaatcatccatctcttcatggcatagagtttgatttgccttatcttgaagcaaaatataacacaggctcgactacaaatcctagaccagccatatccatgcaggaggccctgaaagcaggggttttctccaacgctcggtcta

SEQ ID NO: 378560 - DNA, 143 bp, Zea mays
gctgcagccacgcgcgccggcgaccaaacaaagccagctaggcaccggcaagggagcggacggagcaagcgcgcggccgatcgatcgagcttcagcttgagctccagcaagatggtgaacttcatcgaggcgcagaagccgct

SEQ ID NO: 378561 - DNA, 208 bp, Zea mays
cccacgcgtccggtcctgacgctctcatccactgcagtcgccggcaccgcttgcagccgcagccgccggaagcttgttgtagctcgctagctaaacggtcagagccgagctggctccgtacccacgcagccacgcttactccgatcctccaaaatcgcggcgccactaatctaaagcgctagacccatgacgcagccgccgcaccacc

SEQ ID NO: 378562 - DNA, 239 bp, Zea mays
cccacgcgtccgacaaaaggtggaggcaaaacagaaactactaaagatggggatgattcagatgattcagatggcatggatgatgatgctatgttccgtattgatccttacattgcaaggatattcaaggagcgcaatcttcctggtagtgatactaagcaatcccaacttatgcgattcaagcttcgtgtgctgacgttacttgatatatatcttcagaggaatccagggaaagttct

SEQ ID NO: 378563 - DNA, 238 bp, Zea mays
ggccgaagcgccaccgcgcccaccctgatctgcccgcccacctaacgtcggccgtcaatcggccgccgccgcgatggggtttgacgggctggtcgtggtgtcagatccttacctgcagcgccgcttcacgcaggccgaacttcgcgcgctccaggcccagtatgcggcgctgcgggacgcgtcgcctaacgggaggctgcggatgcgggacctccccgccgccatctctggcgtccgg

SEQ ID NO: 378564 - DNA, 232 bp, Zea mays
gcttcttcttctcctcctattccacctcctcctcctgacaaccctcctgctcagctcgtcgtatcgtacgtagaaatcgcgatcgccgtcgtcgatcggtctcgccaagctcttgcttccgttcttttctggttcagtttgttcggtgctctccctctacgtgggcgctgcgtctatatatatgctgtgttggcgccactagcataaatggcgtactcctcgcggacttgtg

SEQ ID NO: 378565 - DNA, 218 bp, Zea mays
ccacgcgtccgctcgacactcgcttgcttgatccgctgcaatttatgcgtacgattattattattatttattaataaaataactacatatgcgtgtgcgtatgcagagagaaatatgagccatgaatgcagcatgattatgccatgacaaatttatccttttattgtctactatatatcgactgtacgtaattctacgtgcaactctatcatcatgtt

SEQ ID NO: 378566 - DNA, 127 bp, Zea mays
cccacgcgtccgcatgagccagctacttactcggcttcgcggcagtacagatccggccgacacttcgtcgtcaagctctcgccatttgcaactccttgctccgccgacctcgacgcaaactacaact

SEQ ID NO: 378567 - DNA, 152 bp, Zea mays
ctctcccagattttccttggattttgtttgtttctttttaattgctcgttcgtccatctctgaattaggaggcagaactgaagagagagctagaagcgggtgacccatggcttccagcgagcgcgtgtacgaggacttcgtgcctccccaca

SEQ ID NO: 378568 - DNA, 131 bp, Zea mays
ggacgctggaaaattaataacatgtttcttagaggagtgaggggggaattgtaaaaccgcttgtcaattgggctaagatcgttcgggacactgagcaaactcagaatgagttaagtttttcattttcatat

SEQ ID NO: 378569 - DNA, 218 bp, Zea mays
gccccagtgtactacagactcgacaggtacggtgagcataaaagaggagagccgataagcacaatggcgcctgaggaaaggatgaagcagacagagggcagtcacaaggtggtaacagcagcagcagcaggtggcaagatggcggtgctccactctccggtcggagtgaggagcatcgtgacctccctggtggctttcttcatcctagccagctccgt

SEQ ID NO: 378570 - DNA, 133 bp, Zea mays
gcaacgcaaacttgaaatgtaggacattgttgttaccttgcatgtgtcatttgtgtaatcgctataggatgcactagatgactcatgtgagactggatttacgccatggtgaactcagtaatgtttgcagtga

SEQ ID NO: 378571 - DNA, 231 bp, Zea mays
cttggattcgcctgacctgcatctgtacagagtctcagctgtctcatcgtctggagccgaagacttgcagctgacagctctcactgctccaggaagcacttcacatcaagggattcaactgtcgagatcgaccagcgatgggtatgaagcgtcagggggaaaagacagcggctccgttccataagagatggtgcggctgctggtaaaactggagctagcgtgcatccggag

SEQ ID NO: 378572 - DNA, 228 bp, Zea mays
gccgcttcttcctccagcttatggcagacagaagtgatggaccgattgggaggctcccagaacatcttattatagaaatactcattcgtttaccggtctatgagtgggtgcaattagcatgtgtcaacaagcattgggcaagcatatttcaaggagaatgcgtgtggcaaactgctattgcaaggaactggccatctgctggtctccggaaacgctggcctgggccaa

SEQ ID NO: 378573 - DNA, 244 bp, Zea mays
gtacggtcggaattccgggtcaccacgcgtcccgagcgcggacgctggcggacgcgtgggaccatgcagcatagttacctgttcactaacggtcacacgtctcgcagatacattattcccgagagccatgcaatttctgcattgagccgagatctacgggctactcatttacgggctcttctagggggtggtcatggccacagatcaagcaatgcagtgactacaaacatttccagcgatcctc

SEQ ID NO: 378574 - DNA, 130 bp, Zea mays
atcgattgaggtgaatatgcatgcgtccatatgttgtaactgaactgccgcgtagtgagatttagtaactatatatgaatggtttgttacaataacattgcgagttttgaataagaaacattgagatatc

SEQ ID NO: 378575 - DNA, 150 bp, Zea mays
gaagacttcgccttctcttggcttgctcaccggctacgtctctttggttagatacatttttctcctttgtctttcgtcgtccctttcgattcggtcgatacctggatccagatccgttcgtcgatcatatcctgcctcttcaacttgaaa

SEQ ID NO: 378576 - DNA, 180 bp, Zea mays
cccacgcgtccgaaaagctctatgaagacaacgaatatgctttttagatgacctaagtaccacaaatgtatcaagtgtctcatagcttgacagccagtctttttgggagtacttgggacacttgatacatttgtggtacctaggtcatctaaaaagctctataaagacagctagtatgct

SEQ ID NO: 378577 - DNA, 216 bp, Zea mays
caacccgcccattgcattgcatcgtcctcctctcccttgctcttccacttcgttgcgcccatccgtctctcgtctcgtgctcccatcgtcgacccatcacacatccacacacaagctaccctacgacgtatacagagaggataaagactagtggtacggccgtcgctagctcgactagtgatccgatccatcgatggaggcagcatatgcatcgtc

SEQ ID NO: 378578 - DNA, 194 bp, Zea mays
ctcatgcgtccggagataatttctcggatagagaaactaagcgagcgagataaaagaagcgagacgcgggcagctgttgctgaggcgtggagacggatgcggcggctcggccgaaccctagccgacggggctcttttgaggctggaccctctgcaggcgactccttgcggccggattcgagctgccggctgcgg

SEQ ID NO: 378579 - DNA, 155 bp, Zea mays
cccacgcgtccgacactattattcgtgcagtaggaaagcacgtagcgtaccaaaatatttatacttcaggaaatagacaaagacattggtgatgaaaacggacagaatcgtgtggaaaacaactcttctcttgtcatttctatatttttttccgg

SEQ ID NO: 378580 - DNA, 142 bp, Zea mays
agcgttctcagcctaaagtccttcggcttaatcttgtgggatctcctgataaagagtctaaagcaacatgtgcagttccacctgtgttagattgttctagtggtaaaactgcaactgatgttaaggaggcacgaagttcaat

SEQ ID NO: 378581 - DNA, 244 bp, Zea mays
ctaaatttgttgcaaaccaattgtattcattatgtcgtgattatatgcacgatggcttgttaacttctggatatggaactcaaaatcgaacttacaaagggatgaatcacttgaattcaacttgtcctccatatgacccattacatccttttttgccagtgtcaaataatttcgattatcaggctcaatgtgacatctattccaaccaaggctgccctgatacatgtaatgacatatgtgcata

SEQ ID NO: 378582 - DNA, 198 bp, Zea mays
gcacagcggtttcactccacatcatataacatgtggaaaacaaagcatcaccatcatctggagctctatatagacacatcaattctttcctggtttggtgcgtgtttaattatataagctcaatcaatatctggcatggaggactcgagccagttcatgcagtgggccctgagcacgctgcagcacgatgagctccca

SEQ ID NO: 378583 - DNA, 221 bp, Zea mays
atttttctcaagtgttgtttctgagttcgagcaattggtcaattcagttgccaatgggctaaatgctgatgagctttacaagagaagcctacatgagattacatcatccaggattctttgtttgcttagattgctgacagaggttcatatccgtacacatcatgcggactacccagaattcagtcaggaaacagaagcccttatgttttgcttagcatcgg

SEQ ID NO: 378584 - DNA, 216 bp, Zea mays
cacacgcgtccgggaaaactcctcacttggggttctgctgatgacatgggccaaagttatgtgactgctgggaagcacgaggagactccagaggcttttccacttcctagaggcgtcgcaatagtgcgggcagatgctggatgggctcactgtgttgcaataacagatgaaggtgatgtttatacatggggttggaaagaatgtgttccaactgga

SEQ ID NO: 378585 - DNA, 215 bp, Zea mays
aacgccgcttgcactaccacgccgcggtcccacgcccgctcccgttccagcgacagggggttactgagacgagatcaaccgtaacctgactgactcactgacggccttgcactctcagcaaacccgtggcacaagtgggcaaccggggaatcagcttgagccttcgctccaaacctccatggaggcggaggccaggaacatccttgaacgcgccg

SEQ ID NO: 378586 - DNA, 172 bp, Zea mays
ggaaatgaatccgatagccaccgccgccctcacgccatcctcatttttcgcctcaaaccgccgcttcgcccctcgcctccgctccgtcctccccggcgctgccatgtcttacgccgccgtatccgcctccgcgccaagccccagctcgggcactggggaacggttgaaggcg

SEQ ID NO: 378587 - DNA, 143 bp, Zea mays
cccacgcgtccgcccacgcgtccggagggaggcctctttagcttttttggttcaagccgtgctgcagatgatgctacccctactgacgaggatgtccttgcggagaaaacctagtaaaggaacaacttcaaacaatgcgggag

SEQ ID NO: 378588 - DNA, 235 bp, Zea mays
gaacatgccgccagcaacgacgacggtgccgggtacagctacaggggcgctgccggtggaggagcagaaagaggttcgtgaccctgaggcggacccgcacatgccgaacttaccggaggtcacagaaaaggatcagcaggaggaggccacggcgacgaagccagaggccaagatcacctgcgacgagaacggcgtcgacgagggcttcccgtacgcacggccgccggtttgtgag

SEQ ID NO: 378589 - DNA, 140 bp, Zea mays
gttgctactacagaacagcaggcatggtgatatacacaataatggacagacacaatttcccactccattttctattggaagtaagagaatactagaggataaacaggtagcaagtggtggtatagcgcaccatcatcttc

SEQ ID NO: 378590 - DNA, 139 bp, Zea mays
gggacgcacttagagccgctgcagactctctttctgtccaccatagtgaggagcagtgtcccaaaattcatcgcccatgaccgtctgaccggccgtcgccatgggatgcgctggatccactccaaagactaacgataat

SEQ ID NO: 378591 - DNA, 138 bp, Zea mays
atttttcaacgagcgatggatcatggatggccatggcgccatgctctactcctacaggctaagcccaccacgctgataagccaacaaagctagctgctccccattccccaatatggccgcagccgctgccgccaagca

SEQ ID NO: 378592 - DNA, 128 bp, Zea mays
tggtgccatgttgtttcctgaataaatagtgtggctagctgccctgtgagccacgtatgtttccatttctcttttacttgagaaatttccatgtttcaaagtttgccaacgagatgtactgtgaatcc

SEQ ID NO: 378593 - DNA, 220 bp, Zea mays
gacctgtttggatacaagggctaattgctagctagctaaaaattagccctagtgcatccaaacaagagagctaatagatgagctaatgttttagccaagtcttcaattagttgttagtgaactagctagccaacgccaattaatttggggctattttttagccccaactagtcagctatgtgtatccaaacaggcccttagtgttgtgaaattatggttg

SEQ ID NO: 378594 - DNA, 133 bp, Zea mays
cccacgcgtccgcccacgcgtccgatatcatctgatggagctttgctagttactggaagtttgtgcccataaaggtttaaagatggtatgtccatacagagaactggaagtttgtgcccataaaggtttaaag

SEQ ID NO: 378595 - DNA, 232 bp, Zea mays
aaccttttccgctgatcaatcatgcattatagtataataatatatcgattcaagtgatttgcattatcatgatcatagacatttgattcttatcttctgactggaatgcaagcatgaagcagcacaatgatttattagatatttgagaagctattctgcacgtgcatgtccgttcctgttggggcattggttcggtacttactttgcaatttgagcagacttgggattgggg

SEQ ID NO: 378596 - DNA, 171 bp, Zea mays
ggacctggtttgtgggcgccgtgtcttcaccacttctccctctcgtcgtatgctaccgccggtgattctcttctgtggcgacgtactggtctctgcgcgttgccgtgggagtgcgccgggaccttgggtggccgcccgagtcctcgggacgaatcaagcgcctctggtgct

SEQ ID NO: 378597 - DNA, 214 bp, Zea mays
tgccaactcctgtgacatcgcaggaaagggagtgctcgacgccgagcgaacctgcgaccgccgctaccttagccatcactcatagtgccgatcagggagctctaccgccgagatgctgtgaacacagcaaaagcattagccgacaggaaccaccattgggccatgcgtgatcgtagcctgtcgggtgaagaagaccaaccaggggtcctcacgg

SEQ ID NO: 378598 - DNA, 205 bp, Zea mays
ggtgcagggacgaatcccttgacaccagggatgtgcccacgcccacccggcacccggtggcttgcattgcgccgcagcagcgacgaatcgcaacgcaacgcaaggctgcaggggcggtggtagcttagctagctctactgctaatcctcgtcatcttccaaaccttgcagggtcacctgtcgcgccatctgatcactgccctgtt

SEQ ID NO: 378599 - DNA, 209 bp, Zea mays
ggcgagggagctcaccaggagagaggggcctgtgtgagcattgagcaaagcaaacgaagcagtacatacatctctcgcacgcagaggcccggccggccggctccatgcaacaagggacgacgagcggtggcggtgggcgatgatgatgatgatggcgggggagcacgtgctggccgctctggccaccctgcttctggcctcgctcctga

SEQ ID NO: 378600 - DNA, 231 bp, Zea mays
gccgccgtgaaggattacgaggcaaagaaagggaagaagatggccaaggcagaggagcaggacaccccatccccgtaagagcgacagctagtaacctgaagcgagcagtactcgtataacggctaacgagcgaggtactcgtgtgtgcagtgtgcctaaagaagcatgtatgtaatgtaaagctaggtaataacgatgcttgggttttcatagaataagcgaacttgccgc

SEQ ID NO: 378601 - DNA, 236 bp, Zea mays
ggaattcggaggcctggaattcggaggcccaggaatcatgatgcagcaggctcaggcgcacacctcggcacttgcgggagcgccgtcggcgtcggcggtggcaccgacggtggctcacccgcacgatccggtgggcggggatgcgccgccgaagcaggtggctcaggcgatggagcggctgggccgtgctggccggttcatcgcggacatccggctcggcgcggaccgcctcctcg

SEQ ID NO: 378602 - DNA, 160 bp, Zea mays
acgaatcaacgttccttcaaatcaagaagaggctctggttatagtacctgtcgcatgtaaccatggtaccgcggagatgcctatgactcgagtctcgagtgtgccacctcatagatcttagtgggcacaaaacggggcgcttgctcaaaacggcggttgt

SEQ ID NO: 378603 - DNA, 226 bp, Zea mays
ggcagttggcttggcccccaggaatctaatcactggagttgctgctgttgtcgagaaaaacgcaccggtgtttgcaaacaccggtgccttttttttgtgttgaaccaccattagttgagccgtgagggaatggtgaacaagctttccacttgctcatttccgagcgcttctctttgattgtatgcatggtttggactcatgactggtcgtcttggcagttggcttg

SEQ ID NO: 378604 - DNA, 230 bp, Zea mays
gaaaaagattgcggaattgctaactgaagtgcaagataccggtgcatatattgcagaacttgagggctcggttaggagactcgaaggaaacttgacagtaactgaagcttcattgctaactgaaaaggaacagaatgcttccaccttaaaattacttacagaagcacaattgagaatcgaagaattaataaaaaagcttgaaggttcaaatagaaaatctgatagtcttc

SEQ ID NO: 378605 - DNA, 166 bp, Zea mays
cccacgcgtccgccaactgtagtgctagcagcttggaccttttggccatctttacttgtgggagcttcttccactgtttcatttctaaacccaacttccttcttcatttcataaggcgatttttctttcacttcagacacagtgatatccttacttgtacagactg

SEQ ID NO: 378606 - DNA, 155 bp, Zea mays
ctctgccggagtggactgccatgctatctctcgctctctctacccccgcacgccgtgtccagctcagctttggagacaccacctgtccgttgctccaggcgcctcttcctctgccaccccccgtgacgctctgctctgcgggctgcggctgcagg

SEQ ID NO: 378607 - DNA, 156 bp, Zea mays
cccacgcgtccgcagactttaacagatgcattgcatctccatgggataaatattaggtatctgggcaagattgcaggcatggtcaaacatttaccacacctatgggacttgttttctactgagataatagttagatctgcaaagcatgttatcaag

SEQ ID NO: 378608 - DNA, 160 bp, Zea mays
ccggaggattatttcgttcctcacggtataatggctcggacgcaacaagctattctcttgatgtgtggttatatcctgattggtggcgttcttatgccaatccgatcttggaaaggccacatatattttttcatttgcaaaaatctgtaaacgttttttt

SEQ ID NO: 378609 - DNA, 141 bp, Zea mays
ccaatgctgagtgccgccactgccaagggatgacacccctcacaatgaggctgtgccttgccggaccctcgtcactgcaggcccagcctcattgtgaggggtgtcatcccaatgctgagtgccgccactgccaaggccttt

SEQ ID NO: 378610 - DNA, 142 bp, Zea mays
gtccaaactccagctctcttccatggtggtgcccagctcctctcttccctctgcctcccgcgctcggatctcgcccttgctcgccttctcagctcgtccagcgagtcgtgcctaggccacgtcgagctccttccctggtcgc

SEQ ID NO: 378611 - DNA, 139 bp, Zea mays
tggtcgtattatcttttaaatttctgggaccttagatgaacctttacggttctgaatggatatcactaatcttttcatggacttgaaacaatctctgttacgagcagtgtcgtaaaaagcacagctatgtatgcctcgt

SEQ ID NO: 378612 - DNA, 281 bp, Zea mays
gatgcttactgcaggtggcaaatccaataaccaaatatccttggtgtgccaattgatagtctcataaaaaaaaatggaacaaatgtttctttatgtccaagtatattttagtacatagagttagttaactacttagattcaaaagtaaaaagggtacactggaaatcgtgctgaaacatttctcccaagctcctctaaaatacagtcgggttcttcattccattgaggataccatacacgttttactacatcctcagattattacaattatgttcgcttac

SEQ ID NO: 378613 - DNA, 186 bp, Zea mays
  unsure (1)..(186): unsure at all n locations
cactcagcctcagcgaacccctctgcgttccgccgcagcttccgaagacatcgatgtcctagcaagttggaaacccccctccctcccctcatattcanctccgcctccctccgtccctcgtcaaatccacgcgaccgcgattgctctcagaaggcactagcacgcaaaaaccccacgagagatact

SEQ ID NO: 378614 - DNA, 239 bp, Zea mays
cggacgcgtggcggacgcgtgggcgggagatgaggcgggaggacgatgacaaggtcagtgaccatgacgtcgaaggaggcgaacaggacttggactgcagtgagccggggagcctgcgtaggtgcagctggatcaccaagaacagtgacgaggcgtacgtccagttccacgacgagtgctggggcgtccctgtgtacagcgacaaccggctgttcgagcttctgtcgctgtcagggatg

SEQ ID NO: 378615 - DNA, 230 bp, Zea mays
cccagctcccagcccccgtctcgtcgccatgggaaccaggaatcttacgcggaaccgcgccgcttccatggcgacggcatccactacgctgctcctctcccttgccttcctccggaaacaggccgccgaggctggactcgaggcgcgcacgcttgagctcgtcgccgggaagcccctgctgctgctgcggtggcccggtcggcggccgtcgctcccctccatactcctca

SEQ ID NO: 378616 - DNA, 168 bp, Zea mays
caccgtgcgccgcgcagggcgtggccgtgccgtccgtctggcccgctctctccgggtccgtgtccggctacggctacggctacaatccgggctactgaggctccgccgctgtcctactacgccgcttgcgctgtgggcggctacggctgcggctgcggcggttataac

SEQ ID NO: 378617 - DNA, 254 bp, Zea mays
cccacgcgtccgcccacgcgtccgcccacgcgtccgcccacgcgtccgcccacgcgtccgccacgcgtccgcaagacgtccaaggtgcggcggttctggaactggtaccaccacaacatcgggcgcgcggcgatcctgctggccatcggcaacatcttcctgggcctctccatcgcgcaggagaccagcgcctacatcgtctcctacggcgtgttcgtcgccgtctgggtgctcgccgtcgccgccttcgagat

SEQ ID NO: 378618 - DNA, 245 bp, Zea mays
cccacgcgtccgcccacgcgtccgattgacaaggctgagaagaagaagactctgcaaacatttgtcatgcattttgtaaaagcatttaaagattgggagccaggctatattgagcaatcaatcgatcatgaatcgttatcagatgatacaattttaggatgctctactggtcatccttctgaggtcatccttattctcattcaagagatttctcaaataacttcatctatcactgagagcagcag

SEQ ID NO: 378619 - DNA, 245 bp, Zea mays
gccggccaggcgaccgccgccaccgccgccctactcctggtcccagctctgctgcacccttcgccggcgacgagcgtccaccgcggcatccgaagctcccagcgtcctcctgcaggccgagctgaaggttcagcgcgccggtggagttcgacgacgaaactccgtcacgtcatacctctccgcctcccgtctccaatcggggctcccagcgtctcggagaagaggagcagcacggcacggcggct

SEQ ID NO: 378620 - DNA, 240 bp, Zea mays
ctgacgctcgggcaggtcaacggcaccggttgcgcgtccaggatgtgcgcttacagcggttataccaacaccacgtccctcaccatacataccagccttgtgcctgcaaatgagactgcgtgccagaacggaggagctgcgagagcggagtttgccgggtccgtgttgaggacgtctctcatcgccttcctcatgtcgctgatcctcatctgcttgctatagacgttagaacagtagatg

SEQ ID NO: 378621 - DNA, 179 bp, Zea mays
  unsure (1)..(179): unsure at all n locations
gacacccaaatcttccccgaaaccactcctcagcccggtgagcgctcgaccatcaggaatgggcgccggcgacggcaatggcacgcgccccaaggcgagcgaggtaaggatctcgtgcgagnagggtcacgggcacgcgtttccgttccccaagccgcacgcccccgaccccgacccac

SEQ ID NO: 378622 - DNA, 233 bp, Zea mays
tgtcgatccaaagcttcctcccgatccctcttccttgtcgccgtcccatccatcctcctcgtcgatcgacatcttactgcctggccctaatcaagatgccccctggaaggttggttggcacaaggacacgcacagaccttgatggtaagggactctttcgattattctctcagtaactacccccgtcgcgtcacccagcacagcataggctgccgctgccatcgtgccttgtt

SEQ ID NO: 378623 - DNA, 245 bp, Zea mays
agctgatttgctccctaggtcctctttctcaccaccaccgccgttcccaggtcctccgcaagtgagttgaaccggcgtcagtgccggtgcctgggtccctcgcttcagcttccgcttctggctccggcctcaccgctgttcctccctgcagtccgcggagtcgagcaggttgcggtagctcaccgagtacgaccgtcccagtggcggtgagtcgtgttgggtctcgaaaactgatgttgctgcta

SEQ ID NO: 378624 - DNA, 212 bp, Zea mays
cggacgcgtggagcaatggtgtttggttgtggttaagacatgaacatgttacagccatgaaaggaacactaggaagctacaatggcagtttgtatcttgttgacgtgcatgggaacttacacattagagaaagaaatggagatgaactgttgtggattaactgcacagcgatgaggaagggaagacaggttgcaggtgggcctccatgggat

SEQ ID NO: 378625 - DNA, 209 bp, Zea mays
ctcaatgattgctatagaattacgttgaggccatggtttttaagggcttgttcgttttaatgctaaatcatgtggattgggtgggattgagtcgttttaaatccataacaagtccttaaaaaccatggcctcaatgattgctatagaattacgttgactttatttcttttaggtaggctgttgaaaaatttccaaacttaactgaagtt

SEQ ID NO: 378626 - DNA, 238 bp, Zea mays
cgagcggtcacctgcaggggcagcaatatggagccggcggtccccgacgttcgtgttcggcggtgccgccggcgagagctccgagcagacgcccgtcgtcgtcaggggtgccgccggcggcccccaccacaggagcaaggtccacggcggcggcgcgccgtccaagaatctcatggccgagaggcggcggcggaacgcctcaacgaccgtctctccatgctccgctctattgttccca

SEQ ID NO: 378627 - DNA, 227 bp, Zea mays
catccgtaaagtcaagcttcgtgccgctggaggtgtccccacctccgccgccgacgctgactaggttggacccgaatctaggccacctgattgccaccaccggtttctcggtgggagccggcggcgccgattcggacaacagcgatgaccgcaccagcaagtcttccacggccgccagcacgccgcgccacgacttctcgtctgtcggcttcggccgggagcgcgac

SEQ ID NO: 378628 - DNA, 238 bp, Zea mays
aatcgttgtcttcggttcatcctctcggccgccgtctggactgtagcaagcagtgctgctgtccgccgcgctccggagccatgcgggaggggatgaaggagagggacagaagtgggagcccagatgcctcgggccctcctcccttccgcagcccggcgtacaagacgaagctgtgcgctttatggagaaacaggggcggctgcacccgccccaactgcgaggttcgccacagcgaggg

SEQ ID NO: 378629 - DNA, 233 bp, Zea mays
aaaaaggcttgactggtgcctgtatataactgtagtcataaaaaatttgattaatgaacacgaaaattaacgtcattacaaacacaatcagttatttacataaaggcttcagagtagtcgtagctttgtacaatcaaaaggtgattaaattgagaatagataaactaatacaggtaaacttatgacagcaacttcggattgttcatgactggtacctttgcgtactgttttca

SEQ ID NO: 378630 - DNA, 224 bp, Zea mays
ctccctagctagctagctcgcacgccatcatgcagctcgcggcgttgtgcactgaccccgtggtgctgtgcagcgccttcctctgcctcctcctccacgtggctcgcctctcgctgctgcaccctccttctgccgcctcttcctccgggctccgcttgcatctcccgccggggccagcgggccttgcgatcctcggcgcgcggccactcgtggggccagccccg

SEQ ID NO: 378631 - DNA, 208 bp, Zea mays
ccacgcgtccgcaccctccagctgggccgttgtagagtgggcaattgatcagcccgttagtgatggagggcagagtttgagggttttctcggtcgggatcatgtactgggagaacggtctttccctcctctgccgagtttttttagttctcatttttgctgtagaattatacattgtgcctgaagtttcaaggttcctggcattcaat

SEQ ID NO: 378632 - DNA, 241 bp, Zea mays
  unsure (1)..(241): unsure at all n locations
cccacgcgtccgcgagaggtgaaagcatccgtcccgtcccagtttcgccgccgaccctgcaaagcagaaggctctttgcgcgtcctcccctctttcctcccggactcgccggcgttcctgtctgttgctgccggtgggcggtggtggttggagatgacacatgtgtttccaagggaaggtgcctcatctagctcaacctcaatgagcagccagaggagtgaaactgatgatgatangatga

SEQ ID NO: 378633 - DNA, 243 bp, Zea mays
ggaccgtggttgccctgcaactgtccttgtcactgggaaggacagagcggttgcagaagctatatgtagagggctgtttcctgtcctttctccgtctttgaatgcaacagatttactggatctcttctccatgatagtcgctggctcagatacacagccatggtacacacagttgctagagcctgcatttttctctggtcgtacattgtatgtgatccagcctgagtgcacacctgtcatgtc

SEQ ID NO: 378634 - DNA, 168 bp, Zea mays
gcgtgctgcgtcgtccaggtccagatccagtcccggttgtgctccgctgctggtctgactccagcaatgggtgtgttcgagatgcggatcaagcagcatggggtaccgtcgctggtgacgccggcggatgagacgcccagcggcctctactacctctccaacctggac

SEQ ID NO: 378635 - DNA, 229 bp, Zea mays
tttgctaaatggcgttcctggggagatcatttcacaccagaggggccttatgcaaggagacccactatcccctttgttgttcattttggttatggatgttctgaacttgctcattcaaaaggcttccgatgaagggttacttcagcagctatcttctgggactttacatcacaggctttctctctacgcggatgacgcggtggtttttcttaggccggtggcttcagac

SEQ ID NO: 378636 - DNA, 232 bp, Zea mays
caacagctcacgctactcagctcgatttcatatagaggcgctgacgacagccatggcgccgaagactgtgtgggggtatttcttcatcgattatatcccagaaccattacaggacaagcaataaatccatggtttgccctacagtagaagggacttttgttggtgcaagcaaggtacttggttgtggattgccagttcgaacaagaaaagtgcaaagaaaaatttgccaaag

SEQ ID NO: 378637 - DNA, 228 bp, Zea mays
gattttgaagattttagattctggtggcacaaagatgtgtgaagttggttggattcggaagggtaaggctataaccaacacatcagtaatcaaagctgcagatctgttttaccggagggcacctgttagcaggaatacgctgaagttttttattagagatgctacgtcacaaagtaatccatgggttatccatgagaatcttgccaaaaaatttggcataaccatcga

SEQ ID NO: 378638 - DNA, 232 bp, Zea mays
ggcgaaacagcaaaactgcctgaaaacacatttgcagttttggttgggtggctcaattacagcagagaaacgggggagggaggttagggacgagcaggacaaaataaggcgacgggagaggagagaaaaaaaaatacctgctgtctctctccaccctccctccgtttcgccccttgctgggaatcgattgggccggaagctgattgttgcattgcgaaagaggaagaggaca

SEQ ID NO: 378639 - DNA, 248 bp, Zea mays
cccacgcgtccggacttacaagaccctgataagagaggtgcaatagacgagaagataaaaaagaaagaggagatggaacaatttgaggttgagcgattacaaaaggagaatgcgttgctaagagctaagttggtaagatcaggcgagacttcaacattgtgatttgtaacacaataaaaagggcgagccgcagcttgttgtaaattttatctgtttagaaaatggctcaaaatgtaactcatatagga

SEQ ID NO: 378640 - DNA, 244 bp, Zea mays
cccacgcgtccggttggccaaattgaataactaacctttggccaaaaaagttagtagaattatggcaagttagatatcgaactctttcaattgctatgacttcacacacaaattggtgggtatacaatcagtttctgaatgtttgacacgtgtccaagtgacatttgaaattgcatggcatatttctttgagtgattgctctcttttgttggtttttttaatcatagatggcctgacattttgc

SEQ ID NO: 378641 - DNA, 244 bp, Zea mays
cacccttccctgatctacctccctagcctgccgccaccaccgtcgtctctgcgccgcgcagatccgccctgctggtgcggcaccactcgagcatacgtgtacggacgcgacgagacgtagtccccgcccacctcgccgaggactcgttcctgtttcgtgcgcgccagcactaccggtgtccgtgcgtggctgggccaggtcgattcgaccgaatccggtggagttcaccgtaccgtggtgtcaa

SEQ ID NO: 378642 - DNA, 208 bp, Zea mays
cgcaagtggtgaatgtgttggcctggtattatcagaagttacggaggggctctctctgttcttttttatttgtcacggtttagtttaaaaatgaacgagcgacaaatattcgagaagggaggttgtatttttttcagtgttgtgcaatgttcaggccagctagggcaacttgcacgggggctaaaagaagtaatgcatattccagttt

SEQ ID NO: 378643 - DNA, 234 bp, Zea mays
agctacgaaacgccaactcgtcaagaaccccagttgttgcccggccgcgcaccatgaggtggggacttagaagcagctgtaagcaacggcacaaggaatccctgcaaccactggagcgcgagagcaaggggaagagcaaggccagcttctcgtccttcttgcccctggcatggcttgccaagctcacggccagtaacggcgtgcccgctaccaaggtcgtgcatgcgacggcgt

SEQ ID NO: 378644 - DNA, 238 bp, Zea mays
  unsure (1)..(238): unsure at all n locations
cggacgcgtgggttggaatacgatcgtcggtccgctggagatgcctgctgcctccgtttctgtttgtgtgcgtgtctcggagaagctctccctcgcctcgcagatccgcggcctgctttgttgctgctttgccagcaagctgccgcgctcatcctcgcgcgacgccagcggncggggtggcccctctccagtgacccggcgactgctcccgtcggtgccgccgccgcctcctcctccg

SEQ ID NO: 378645 - DNA, 246 bp, Zea mays
cccacgcgtccggcttggcggactcgattcgctgcgtcgctgagcctgagtaatcgattcgtgctgggcggtggcgtggtcggagggatctgaatcctagcgccgtccgtatctgaaacccgcgccggcgagctgctcggcgcctcggtggcatgggtggctggaaagcgggggagaggagaagcagcggagatatgaacggaggcggcggcagcagccgggacgagttcgggcggacggtggcgc

SEQ ID NO: 378646 - DNA, 200 bp, Zea mays
ggcttgagaagataaggaagaagttaaggaggcaaggcataaacggtcctaaacctacttttctctacggcaacacccaggagatgaagagaatccgacaagaactcaagtttgtgcagaggcaagacaaagacatgaatggctacatatccaccatcttccctcatttccttttctggaggaagacatatgggcccggg

SEQ ID NO: 378647 - DNA, 249 bp, Zea mays
caaccaactcggtccgcgcccgcccgcctccgttggccatttgaatgtgagaaagagagggaccagtgatccgtcgtcggtcgccggccatgccgagatcctcctccagccccggctccggctccaagcgcatcctggggagggcgatggccgcgatcctggcgctgccgctgaccccgatcaccaaggccaagctcggcctgctgcttcaattccttggtcgatcggggcagaaccagtcggttgtcg

SEQ ID NO: 378648 - DNA, 138 bp, Zea mays
cccacgcgtccgcttcctcagtcgggtgttgattctggagttcaaccaggggagaaggtagagagtaaagatttgcctagaccaccgagactatcacgggttgctcctcctgatctcgatgaattcaagacaagagca

SEQ ID NO: 378649 - DNA, 242 bp, Zea mays
ctccgcctccccctccctcctacaaatagccaccaccaccacagtgacgcagccgccgccgcaaacgtcgcccccgaccgaagcctagccaccaccagcagcaccagcaacctcgcgtacagcgctcgacaccgctggacgccccgcgcccgcgcgaaagcaggaccttgattctgtcgttggcgataccatggatgtgtcctacgagaagtgtgctgatccgtcgaactcggacctgccta

SEQ ID NO: 378650 - DNA, 203 bp, Zea mays
gttgaattagcttgtttggtatatgggtctatgcctggacatattgatggcgacgagttcatctcatccatgtccaacagttcattgagtcgagaagatcttgccctaaaaactaaacttgtactggacgaggcagactattgcaataacaaaagatgcttcagttatgaagtttcttcccaccaattgccaccaaattattg

SEQ ID NO: 378651 - DNA, 245 bp, Zea mays
tgaaattgccggtgtagttctgttttgtgtagctaggctcggcttgtgaaacctttcagaaccaaatgtcacaggtggctcggtgtagttagccgcaagctgtttatgttcagttctgaataccaatataaggcagaagttgtgagtgacccttccctctttgcagtgggagcaagcagccttactgtaggtttcttccagaggattcctttctcgatctttttgagctcggggaagactcagag

SEQ ID NO: 378652 - DNA, 229 bp, Zea mays
cccacgcgtccgatcttgttccttgaggaccagacttagaagcactattatccctgcagcttgcctcttcagtatactccatccgctgccccgcttctcctcatacatatatactctgtcaaatccaacttgttccataactcttgttctccatcgaagaacagacgacatactctctctctctctctcttggtctctctctactctctagacagtcgtttaaaggtgc

SEQ ID NO: 378653 - DNA, 239 bp, Zea mays
cgaccggttgtcgaacacctgtgccgcgcgtgccggtgccggtgccggtgagaattaataccttgaagctgacgacgtttggacgtgtgtgtgtggcagaacgggcgcgcggcgctgggcgacgtcatctaccggtacatcacctcggaccagttctcccaggactgcctcctcgactgcctcgacctgtcgtcggaataccaggcgctggagatcgccaaccgcgtcgaggcctccat

SEQ ID NO: 378654 - DNA, 239 bp, Zea mays
cccacgcgtccgagagcccatctaaactcagtattgtctaaaaataacagttctgttgttgaggagttctttaggacactggtggactctgttccagatttgacagagcacattcacagaacgagtgcgcgtatgcttttgcatattgatgggtatccagataagattgcgaatgctaaatgggaggtaaaggagcttggaatagagcacaatggatatgttgatttgttactgggcga

SEQ ID NO: 378655 - DNA, 120 bp, Zea mays
cccaggtgctcgaccgcctcgtcgccgacggctacgcggtcggatggtggcggcggatggtgggcccggctctcgcacagctatcagctggatatcgatgttgactaatcatccgatgtc

SEQ ID NO: 378656 - DNA, 189 bp, Zea mays
cccacgcgtccgattatatgcagggctggcaatacccggtgtgctgtccacgaaatggaaagagtactagtactagtagtagatcattgagattcccttttgtcattaattaattatttaattgaaggaatggtgacaacgccaatgggccaattagcaaagcgtacgatatcatttggtgaggtcgac

SEQ ID NO: 378657 - DNA, 185 bp, Zea mays
gacagaatatatccgacttatcagctactgacacaattcagcaacttgcatgtcagtttacccctggaagtgatctcccaccaaagttctctatcacactcaatgttggttatactacaagaaaattcagttcatcaagcaccctgcttaacagctctcctttgcaactcaacagcacaggggta

SEQ ID NO: 378658 - DNA, 195 bp, Zea mays
gcgctgggcaagtctctagtgccagcttgtttacttgtagatccaggctctctcctctccaagcctttagcacagcaaagtcccagtgccatccctgttctgccgttgtatgtgaaccctcctatgcaatagcaagatctccatctctctcagctctctccagcttcatttccactcaagatttgagcacggatg

SEQ ID NO: 378659 - DNA, 133 bp, Zea mays
cggacgcgtgggctggcaatgacatccagaatgttgcagcttgttgttaagtcctgcctcattctggcaatcgacatccagaaaaaaggaaactaatcgagctatcatgcaatgcttgcatagcatggcccta

SEQ ID NO: 378660 - DNA, 130 bp, Zea mays
ggctgtccttggctcagataggagagtttgcttttgtgcttttgagccgcgcatcccatctccatcttgttggggtaaattaacctgtctctttcatgtgttcctttcaaacatatgttcatattttatg

SEQ ID NO: 378661 - DNA, 126 bp, Zea mays
ctccagagaaagggttgagatatcaaatatggttgataaccatctgcttccaagacaatccttttgacgttgttgagatcgaaatgattgtcttggaagcagatggttatcaaccatatttgatat

SEQ ID NO: 378662 - DNA, 254 bp, Zea mays
gagagacatggcgccccaccagcagcagcgggcgctgctcctgttcccactcgtcttcctcctcctcctccttgccccgcccctcgccggcgcgtggggaaaggagggccacatcatggtctgcaagatcgccgagaagtacctgtcggagaaggcggcggcggacggtgcaggcgctgctgccggagtcggcgggcggggagctgtcgacggtgtgcccgtgggcggaccaggtgcgctggcactaccactgg

SEQ ID NO: 378663 - DNA, 195 bp, Zea mays
cggacgctgggtcggagcctcacacgggcggacgagcgggagcttctcccaatctcccctgccctgccctgccctgccgccgcgcttagcttcgcatcttcccctcctcctcctcctccttcctcggccaagcgaggagcgaggcgcgggcgcgagcgcgtcgttgagatggattcggaggcggtgcagcacggc

SEQ ID NO: 378664 - DNA, 126 bp, Zea mays
cccacgcgtccgggcaactgctccacactccacagaccacagtcgccgccggctcatctcctccgtgcccggcacacgaactccggcgccgccgacccacaatggaatcccccgacggcagtcatg

SEQ ID NO: 378665 - DNA, 157 bp, Zea mays
agttatctccctccgctgcgcacccctctgttagaccgtcgttgccgccctactccaggtgggtaggtcttcttcgggcccttcgccggcgacaagcaccaccaggggacctcgccggcgcaggggagggtgcaccgtcgccaggagccaagagcca

SEQ ID NO: 378666 - DNA, 171 bp, Zea mays
atgagttgtatgcagcagcaaacaatgtgaagaaggtttcagaattggatgtgtatatgagtgagggtttggtgaaggtcaatgaaggtgatgctccatttgatatcctatcttggtggagggggcaagtgacaaatctgcctatcctttcgacccttgcgcgtgatgtgt

SEQ ID NO: 378667 - DNA, 136 bp, Zea mays
ctctctttcagtgcatgttacagagagacggatgacgtgctgcccaggcaagcgagctccgagcaaggcacatcagaagagaagcagccggagcagatcacccaggactcgccagcgcgcagtgcgggcagaagag

SEQ ID NO: 378668 - DNA, 140 bp, Zea mays
  unsure (1)..(140): unsure at all n locations
ggatgaggatgctaccaccgccccagagacgacagggagtatgggcatgaactcggcaccggttccacttccaccaccacgacgacgaagacgaagagaagaatatggcggcgangaagcggctccgccacgctgatgag

SEQ ID NO: 378669 - DNA, 125 bp, Zea mays
gtttggacactcctagctaatagttagctgcattaggtgggtggagccaactaatagctttttataagctgggtggttggatagttcagtctgctattagctgggttgttcgggtcagctagagc

SEQ ID NO: 378670 - DNA, 209 bp, Zea mays
cgtcgcagtaatatccatcaaccgccatggcctcctgcgtgccgtcgtcgaccttgttccggaggctgctgctggtgctccagctcgcggtggcggcgctgacgaccctgcgcgcgcaggcgcactgcagtacgggtactacaacgagacgttcccgggcgtgtagtgacctggttcgctacggcctgctttccaagttcgccgacgac

SEQ ID NO: 378671 - DNA, 225 bp, Zea mays
ctcgccgcaaagcccctaaacctccacctccaatggctgcgcttaaccctctccgccgtctcctggccctccgcggccaccgacgcctcctctccacacccgccgcctcatccagcaaccgccttaccccagaggccgtgctctacaacatccacagcctctccaaggacccctcccaagcactcgccgtcttccgccgctccgtcgccgccggccagccagttg

SEQ ID NO: 378672 - DNA, 229 bp, Zea mays
gatcgcgagcggccgcccttttttttttttttttttagtcgaggacgcgtaaaaaaagattcagttaaagttgtccaggagaggtgtagacgatgtcacgtacacggtacacccgtacctctgcagcagcatgatgtaaattcgttcacagtccaaactacgccggcggcgtcggtcatcatcatctaaaccaaaccacggtcgagaaacatacagcgaacacagcagc

SEQ ID NO: 378673 - DNA, 214 bp, Zea mays
cccacgcgtccgcccacgcgtccgcggctccgtgctcaacttcctccacgtgttccgacctctgctgaacatcactggggagttcacggctgaggacgtcgaggcggcgcttatcactcccaacgagattctagatgatgtgcatatgccactgctaaaggctgcctgtattgtgttaccaagtttggaatgggatgctgccttcagtttatag

SEQ ID NO: 378674 - DNA, 216 bp, Zea mays
cccaccccagcaaccatggactgctgctgttctgctcctgctccttttgtttgtttgcttgtgcttgccattcttcttctgaaagaaaataaaaatgcatctggccttgcacgcgcagacatggacgacactctgtacccgctgagccttggcatcaacctagcatgccgcaagaacatacaggagtacatgctgaagaagctgcggatcgaggag

SEQ ID NO: 378675 - DNA, 229 bp, Zea mays
cccacgcgtccggcgagctgcttgcttactgtcctattgactattgtctgcctccacctgccgctgctgcaagcaagggatgtggaacagcagatcacacttcgccggcgggcaggacaacgacgaccagccatacggatacggatacggtggcggccagcagtatgaagcaaccggcggcaagaaacgagcgtcctcgaggctgaagaagagcagcggcagcaagaaa

SEQ ID NO: 378676 - DNA, 222 bp, Zea mays
cggacgcgtgggaaacccttatacatcttgttatatttcctctccaaatgatgctgtggtgttcagacctcacaaaggctgcaggcttggcgtagagatggatttctaagaaaagaaaaaaaatggtgcttcctgcttacaatttattagttatcaaccacaaacactgtgagcttttgcagacagaaattgccttatttatatttacagaaacagatcaca

SEQ ID NO: 378677 - DNA, 223 bp, Zea mays
gctagtgcttgtatctactatcttcatcaggtacttcgcgatcctactgaagtattccccgccgccgctgccatggccaccctcaaccctttcgaactcctcggcgccgacgacaacgacgacccgtcgctgttgattgcggcggcggcggctgctgctcagaaagccgaggcgaagaagtccgccgtggcgcctgctgggaaggctgcccagcctgcggcga

SEQ ID NO: 378678 - DNA, 205 bp, Zea mays
cccacgcgtcctatctccgcactcgcctcgccgcgagcaacgcccgctaggctcaggctgctgctacccgcagtcccgatccaccctacccgcagtccccagcgcaaccgccgcctcggcccgggctgtgttgacccccgttgacctccgctagcccggtcgtcagttacgtgtgcttggctgggttgggtttggtgcgtggttc

SEQ ID NO: 378679 - DNA, 177 bp, Zea mays
cataggtgggcttggctgtctcctccgcctcctggttctggttcgtgttcctcaggttctccggggttcgtgttcgtgggtgttcgttatcgacatggcggcgtcggatctggattatctcgtcctctgtcggcagctcgtcttgtccacggactactactcgctccataactcctt

SEQ ID NO: 378680 - DNA, 219 bp, Zea mays
cgcaggcttcgcaaggcggccacacgccgatacctcctccttcacccgctccgtcgtcccccacagccggccacgccaccatgctgccaccggccgcgcgccttgcggcccgccgcctcctcggcctcgcctccgcatctgcgtcggaagccgccggccgccgggtagcttcctctccgatcgcttccgcaggatactccgccgccgcgtccagtggct

SEQ ID NO: 378681 - DNA, 103 bp, Zea mays
gccaggcgtccgctcaacaagatggtgaatctcgcattcggaatcgtctgcgactccttcagcgtcagctccatcaaggcctacgtggcggagttcatcgcca

SEQ ID NO: 378682 - DNA, 237 bp, Zea mays
gctccgtctccgtggagagcctctctcgcggataaccggtatgcactgccaaggggacggcggcgcctggtgccgtcggccatcgcggctgcgcgcctacagtcaacccattcaacctcaaatgttccttgtgaggtatcatgacagaacagcaggaaggtgttagcaagagctcttcctcaagtattagcagcagcactcaggagagtgaggaggaactgaccatcggtaccctta

SEQ ID NO: 378683 - DNA, 229 bp, Zea mays
gtcgagaagctcctcgctgggagggttgaggccatggcgaaggggtgaagaaaaggcttggattcaatgtctatgccgagctcaggtaaggacttgcgttggagatgtcactgaataaatttgatgcatgggatttttgttatgagttttcggagtgctcatttgcttgctgcagcctgcagctgcaacatggattcttcacggatttccgttattatgttttggagat

SEQ ID NO: 378684 - DNA, 228 bp, Zea mays
accattttatccatttgaagttccctgtccaattagtattaatttattccaggattctgttgcaaaaaaatgcttatgctatactaccatattgaatgaaattacacaataagcactaaatatacgtcaaggtttttattgtagccgcaattctgcaaatgtgtggttatgctcttttccttgttcatgtatcaggcatctcaatcacattgtactaatggtctaata

SEQ ID NO: 378685 - DNA, 116 bp, Zea mays
gatgactacaggaagaaaccaagcagtggtagctatggtgggggaaggtacgaggatgaagatgattacaagaagaaacccacaagtggtggctatggtggtgggaggtatgaaca

SEQ ID NO: 378686 - DNA, 139 bp, Zea mays
cccagcacgaggccggagctgctgctggaaccgtcagccgtgaagagcctgcggttcgatctgctgcaagagctcctcgtcgatctcttctctgcgaggtttcggtctgaggtatggcgtattctggacaaaggcatgc

SEQ ID NO: 378687 - DNA, 238 bp, Zea mays
cgacggtatgcccacagcactcctccggtactcccctcgcacgacttcacgagcgcggtcggccgccgccgccaccaccgccgatctgcaaggtcccgtcgaccaccgccacgctgcaacgaggggaaagaggcaagattgaggagggaagcatcgctggtgtatccgccgccacgttcgtcgccgggagccagcccatattcgagacgaggtcgagctttgctgccttggcgagctt

SEQ ID NO: 378688 - DNA, 256 bp, Zea mays
aagacccgcaccctgtcccctggctcccatccctcatcattgatccttgtgtttgttcagcgggggtgtcctgttaccctgtccctgttcttctcgttcctgcctcttgcagaattttggaaacaggttgtggcgttcaagcctgtaaagctcccccttttccgatccacatcatctctgcattttgggaaacaggttgtttgcatttcataatcagagcccacccatttccagcggagtaatccttccttgtttt

SEQ ID NO: 378689 - DNA, 165 bp, Zea mays
cgaagacactcgttggatgttgcgctgtgttccaatccagggcgctccgctccgctccgctccgcaacccaattcccatctccgccggtgaacgattcgccacaccacacgccaggccgcccctcggtcgcggaagccacttcctgctggcgcgcgccgtcttcc

SEQ ID NO: 378690 - DNA, 191 bp, Zea mays
ggcagcaccacaaagttttgcatgaacgagccagtagtgctgaaaatgaaaatggggctgaagaagaggagttatgtggcagtggtggttctggggttctaagtactgctggatctggttctttgtcaaattttggacagagccctagtattaacaatgaacctgtgcctttgtatccctcaggtactgat

SEQ ID NO: 378691 - DNA, 243 bp, Zea mays
cgagactacagactactcacagctcactgtctcacttgaagctctaacagcaagccatggcaggacgagaagcggacaaagacccagagctgaaggtgctcggcgtgtggtcgagcccgttcgttatcagggcccgggtgcgctaacctcaaggggcttcgctaccgatacgtggaggacaacctggacagcaagagcgagttcttcttggcttcaaacaacgtgcacgggagagtgccggtg

SEQ ID NO: 378692 - DNA, 241 bp, Zea mays
caacaagctcaacgggtatggttatcgccttctcggcgtcctctctgtgaacaaagttgacaaagaggacgccgagaaggccatcaacaagctcaacgggtatggttatgacaaccttatcctccgagtcgagtgggcgacaccaaggcccaattagttttgccgctacctgctagaatcgcatatttctgttgaattatatcagtatgtttgtttgaattactggtacctgagtcatgaa

SEQ ID NO: 378693 - DNA, 237 bp, Zea mays
ccacgcgtccgcccacgcgtccgcatcctgctcagctcagggcgaaacaaaaccctcctccctcactgccccctcgcagacgagacgcgtgtagctagggttttggtctcgccgcgcacgcctcctgaagcttctagacgttcgaggaggaggaggaggaggggaggctcccgccgccgccgtagccatggcgtccaccaaggtgcagcgtatcatgacccagcccatcaacctcat

SEQ ID NO: 378694 - DNA, 113 bp, Zea mays
ggacctggagatgacttataaaaagctgttggcagctgcattgttggcggttggtgataaactttgtagggaaaaataaggcgaaggttttgacttttgaagccaaattcaat

SEQ ID NO: 378695 - DNA, 164 bp, Zea mays
gatccctctctccttccgtcatccaccatctctagggttttagcgccccattttcgcatcgccattcccgatcggatcgccccttccccacccaaccctccggcgccgccacccttcgtgtcagagggtcggtctccaccgaaagcctcgcaacaaatctcctc

SEQ ID NO: 378696 - DNA, 160 bp, Zea mays
attagactatgttcttgccgtggagaatgagttgcataacgaatccaacagtgatagcgatggggagcttcatcggctgcacaatgcagaatcatccgattcagctcgacgccgtctccggccattggatttagcctgtggcgttcacaattataatggg

SEQ ID NO: 378697 - DNA, 255 bp, Zea mays
gagagaattggtgtgcgcggggtaggatctgggtcgtgcagagaaggcacggttcgagcaaaggctcatcaggttctgcccagcgtcaccaggtcgtaccgtggacatctctgtcctcatctttgtcggtagataggtactttaactcgagttcgttcttacttccgctttaatttcaacccggttgcttttggattaatttgctagggggcggcgacacggccgtcgccggcatgcccgccatcgcggttgcac

SEQ ID NO: 378698 - DNA, 151 bp, Zea mays
cccacgcgtccggagcaatagctatccgcgtaacagtatggttcgtctaagttgttatctttcaaaagttatctagtactataaacaaattgttcgtgtcttgttaaaaaaaaaaaaaaaaaaaaaaaaaaaaaaaaaaaaaaagggcggc

SEQ ID NO: 378699 - DNA, 249 bp, Zea mays
cggacgctgggagcgagcatcctctatcaaaagctatcgttgagcacacaaagaagctcaaggaacaatatggatctcacagtgatcacatgatggaatctagggactttgaggtgcatccaggagcaggtgtcagtgcccatatcgaaggcaggctggttttggttggaaacaaaaggctgatgcaggaatttgaagttccgttgagtcctgaggtggaggcgtacatgtccgaaacagaagagcttg

SEQ ID NO: 378700 - DNA, 244 bp, Zea mays
ctcattgccaaattgcccccgactcaagccccccgcgccgccggcgttggtggaatcgatcgacccggcctcgccggacaatccaccagcgttggtttcacctcaggtttttgtgcatggaagatgacaatgaggtcactggagagtcacctgtggctgatgaatgggatatgttgtccctgacttcatcaatatatgctagcccattattccgaagaggatttgatccaattaatttgcctgg

SEQ ID NO: 378701 - DNA, 242 bp, Zea mays
ttcgcgtagagccagtccgcggatccacacgaaactgcacacgacgcaggcactcggcctgccgtgtgtccctttcggccttcataggcgcacttctccctcccgctctcgcgccgccgccctcgtgcgtttgagcgagatccatacatccccatcccattttgcacccggataggcttcttcttctactactgtacagcacttcttttgtgtggctgcaaagttctgtaattctagaggag

SEQ ID NO: 378702 - DNA, 232 bp, Zea mays
gtgatgcgatacatactccacccagttggttttatatacaccacatctacacacactccaacaatgtataaattgacctggctcgtgagcagcatatatacattgttggagtgtgtgtagatgtggtgtatataaaaccaactgggtggagtatgtgatgcgatacataataatttgtctaattcatgtaaaagccctttgtgcggaaatgtgagtgcatttaaaggaccta

SEQ ID NO: 378703 - DNA, 253 bp, Zea mays
gcacatgctcctgctctatctccatcgtcacatctcaggccaggctcctgctctacctccatcgtcacatttcaggcccttccgccgtcgcctgcgtcgtcacgcagccatgcaaccgagcttggcacgcggcagcagcagcagccgccgcctgcacacagcggcttcaacctgcccacgcatggtcgctcgtcctgtcaagctcagcgcattccggcagcaatggcataacggcggcggggctgcgtgtgtg

SEQ ID NO: 378704 - DNA, 247 bp, Zea mays
cacaaagtgatgagtgtactagttccattctctggacatgagctagagtatgttctttgcttagaactagtacactcatcactttgtgtagaatactcatggggtccatgtgcagaagttattgttgataatgtaggatatggcttattcagatcatatccaagaacatctacctttcatccagtattccaatttcctcaaacttctttgatatttcctccaattcaaagatgtctttcctcacaaa

SEQ ID NO: 378705 - DNA, 242 bp, Zea mays
ctctttttgaagaatgcatgatgctcaagaacttgtgcctgttctataggggacataataatgagattgcatctgcattggcttctcttaccgatgagatggctttgttgagtttggctaaaggcgatctcgatctccaagttaatgagcttaacagaaggtcagtaatgcttgaatcagaaaattatcacttaaaggactatatcatctacttggtagagattctcagaactagattagtc

SEQ ID NO: 378706 - DNA, 255 bp, Zea mays
ggacctgcggcagaatatagacgagataaaggacagtcactgagatccatccgtggagcgcggcggtcgcctcctcttcccctgcggtcgagctcgccagtcgcctgaactcgtctcgcccgctgccgatctcctctctctgctcgtcgcgccgcaacctgcagacgggaccgcgctcggtcgactaccacctggggagcgggcgggcggcgtccgccctctgcaccccccggtgtccccgcgaccggctccggc

SEQ ID NO: 378707 - DNA, 253 bp, Zea mays
gtgggaggcggcgcgcgtggtgagttgacgactcctccgcgagaccgcgactgcactgcggtgatacagtcgtgtatcctgcaggcatcgacacagggtagcaggggcgtttgcgcgagcatcaggatgcgggagcctgctagcatgtcagtccatgtatcccaaggccaggatcctctcacggtctcacccacgggcacatctctggtgagcgtcctactctcagcccccctattctcattctctagatcga

SEQ ID NO: 378708 - DNA, 198 bp, Zea mays
ctgcttccggggatcttccgccgccgcttcacgccagggctccttccaccggcgtcttccttaccgtcgtcctctactggcgctggactgctgtgggggtcgagatcggcttagatcaactcttaattttgccgggactctttagagcgcgtgcgcgctggtacacaaaaatgagtgataacctgatggaaaaggtta

SEQ ID NO: 378709 - DNA, 232 bp, Zea mays
ggagagatgatgacactgcaatgagtagcagggaccaggttgtaagttccagttcacgatttgcctctcctgaggacccaaaatacaagcataaatctctttctgaatccccgatggaaataacatccgagaagaaggtgcctgtactactcagtagaaagtaccctgataaactaaaagatggatttattgtagctttgagagcaagagataattcagggtaccatgttgc

SEQ ID NO: 378710 - DNA, 155 bp, Zea mays
ctgaatagaagttttcttaccttcgtgcttcgagttgcgtctgtgctcctggcgcttcgtcgccgaattggtgtggctcacgtcgccggtgaccttccggtggccaggggcgtgacaccgcgctgccagatccggcgacgtatcgactgtcacgg

SEQ ID NO: 378711 - DNA, 237 bp, Zea mays
ggatgtctgatattctacagggatcagcatcctcaagatcgcttggaaaagttccacggaaaactcgtactgcaactgcagatgttttgttggaaaagatttccaagctggatctcctgaatgaaattagtgctatgagaagcaggtcagacttaaacttccgcggagatgtcagggatgctgtctcattggcaaggaatgcacctcctggaccacctccactttgttcaatatgtc

SEQ ID NO: 378712 - DNA, 221 bp, Zea mays
cccacgcgtccgctccccggcgccgcatccctcgccgccgccgccgccgccctctccttgctcgcactgctgcagcattgattacgtgggctagctgcttgctctgtggtccgtgaaaaagaaagggggcacgggggattgtactggagaatgtgaattggttcggttggttggaggacggatccgatttcacttcacccatctttgttagtagtggcagg

SEQ ID NO: 378713 - DNA, 242 bp, Zea mays
cggacgcgtggggcttactgttcacttcacgtgatttctttatgctttacttgttttgcaactgattgggagagtagcaatgtgacgaagtcaaaagggtggctaattcatttagtttctgcttgttttgctttcttgagatggtttgtagccttaacctttgtgatagcacaagaccaatgtggttgggactctgaacatgctcggattggcaaagaggatcaatgctaggttcctcctca

SEQ ID NO: 378714 - DNA, 241 bp, Zea mays
accactacctgcgatctccgcacccgcgctcaccggctcaccgctatctcctccgcatccgccggccgccggcgagcccctcctcctccacgatccgtgcttccccggaggcaactccatgaattacatcgagtccatcccgcccctcaacggagggaattacgagttatggcgagagaagcttgagctggcgcttgcgttgttagatattgatctggctatcactgatccctgtcccatc

SEQ ID NO: 378715 - DNA, 224 bp, Zea mays
cgcacgcgtccgcggacggtgggtcggccgccgagccgttgctaaccgagcacggcgacttctcccgcgtgttcctggccgtggccagcgcggggcgccaccatcgctcacttcgtagcagtccgtgccggtgatcatcacaagatcggcggcctcgggatgcggatcagggggctgctgatagtgcacctctacttcagcggctctgcggacatcggcgacga

SEQ ID NO: 378716 - DNA, 161 bp, Zea mays
cggacggtgggtccggagctgtggtgcctgtctgactcatcatctctgggacactgccaagtacgattaactagaggctgcgtcgaatccaagacctttggctcagtgggaagacttctcaccactgcatcagagattcagaagaacttttgcaagaaggg

SEQ ID NO: 378717 - DNA, 196 bp, Zea mays
cccacgcgtccgactgtgtacactcttaaaacttcatcagctcccgagcaatctcagcccgtacatcaggttcttggatctctcccgagctgggatccgtcaagttttctgctccagcggcgacaattcgtcaggaatggccaacaagccgagtcttctgagcactctgccgactaacccaccagcacagtttctg

SEQ ID NO: 378718 - DNA, 269 bp, Zea mays
gccgcccagctcccagatggtggccatactacaactcacgctcctactcatttcatgtagcctttacagcatgctgcattcttcttcttcttcttctccttcctcctcctccccctcctcggcaccgtcctcgctcgcgttgctggtgctgctggtcgtctccacctgcctctccttgctcttcgcaagcctcagaaggctactcagagacaccaccgcccacagagctaaccacggggcgccactctttccatggaggcggaggctgg

SEQ ID NO: 378719 - DNA, 222 bp, Zea mays
cccacgcgtccggaaagtcaatacgttggaaacacagactttctaatatttcgggctttaaatcagcatgggtttcttggacaactacaagagaggaaactgtgtggtgtgatacagttaccgtcgcaaactctactactttcaatgtatgacaaaacaagccgtatggttggcatgctcttccctaagaacatgctgatgttcaggccagaggccttaact

SEQ ID NO: 378720 - DNA, 202 bp, Zea mays
catcagccaacaacttgcccgcaaaatccttccacagcgggtcacctcgcttcaccccgttaatcccggcgaagaagcgcagtacttggcacaccagcaatgtcgtctacttaccaaattggcattgtggctgagccgcagttgctgaacaccgaaattatcactcagagggcaaccagctttgtggctgacgctaacaaaa

SEQ ID NO: 378721 - DNA, 249 bp, Zea mays
gccacggagggggaggggtcttgctgctacagctgggcctgggaggacgaatctatcttggcaacaggtgagggatgccgtcctgtttgcccatggaggcggtctcaatgtcgccgtcaaccgtctcctcccacacccacgacgaccacgacgccgcttccgtcaccgaggccatgtccttgcaggaaggcctcctcttctcagacaccctcaaggacctgaggaatctgcggtcacagctgtactcag

SEQ ID NO: 378722 - DNA, 238 bp, Zea mays
cccacgcgtccggaggcctgacataaagtcacagtacagttccctcctttatcaacttcttctggatcccagggacagggtctgctttgaggccataaattgtgtgttgggaaaagtcgacaacacagaaagcacggaggacagagctggtggatggattcagttaactagagaaattctcaaattgccagaggccccttctgtagcatcaaagggtgttctggcaaaatctagtgaa

SEQ ID NO: 378723 - DNA, 232 bp, Zea mays
cttggttgttgctggtttagcagcagatggcaggcaaattgtttcaaggaccaaatcagatgctgccagttatgaaatgggttctccataaaccttttcataactggcagcttcccaagtttaatttcccacaccaaacctcagctcccaccgatcggttccatcaacctaacaatccctcgcttgttagcccgcgcgcgtgtgtcgtgtgcgctgcgtgcgtcccatggct

SEQ ID NO: 378724 - DNA, 273 bp, Zea mays
ggcctctgggcatcgcgggagtaaggcatttcttggttttcctttcctgagatgggtctgagaaagagaagcgccatggttggtgaggcagccgtgttcgccgcatcttggtagccctcactcagcattggcatcctctcgttcttggacttggagttaactcagccatgaggaagcatgggtggcagctgccgtaccaccctctccaggtggttgcgatagcagtgttctcggcactggggttcgccttctacgtcttcttcgtgccgttcg

SEQ ID NO: 378725 - DNA, 170 bp, Zea mays
ctccattggcgtggaaggtgaggaacgcgcttccgtgcgtgcaggaaggtccccctatttgttgggggacgggaaagttggccagtccgtgtaccgcgcggtcggcccgaaatttcacaacaccaaacccgccaggtgagaagcgcaaagccacgaggagtgcgatgcga

SEQ ID NO: 378726 - DNA, 237 bp, Zea mays
cccacgcgtccgctcatccactcgccgcacgacgaagagagcggctcccattccccaccacctactcggaccggagcagcaggttctcgaagcgaccggtgaaacattctcgcgccaattgtgggggccatgggcgccaacggacacccgccggcgagcaccgtcgcgcagaagggatcccactctggcggaggcggagtagggggaggggggtaccccttagaaaggtcgcagggg

SEQ ID NO: 378727 - DNA, 147 bp, Zea mays
cccacgcgtcacccacgcgtccgggacgctggcaaaattgttggccagcagcaggagcgcccccgtctcgctccaccctcctctgtcagggtcctccgattcggacttcctcacggccgccgcgcgaaatcccgtctcgttgctccg

SEQ ID NO: 378728 - DNA, 168 bp, Zea mays
agccactccgccgccaccacctcgtccaaactttcgtttgtcatcatggcgcccttcctcatctaatcttggtggcgccccttcctagcgtttgttctgccgtccgcgctgcagtctgcttctcccgtttcactcctatcttagctgcacggactagttttgcatcgt

SEQ ID NO: 378729 - DNA, 177 bp, Zea mays
gacgaccaacaagctaagggtcgtcatcggcttgccggacgtacgtacggcggcgagcttgctacctctgttctattcatacatcgatacattacattacggtgcgagtatactatatataccatggcgtcgagagctccggtgatcgtcgtcatcgcggccgtgatcatggcggcg

SEQ ID NO: 378730 - DNA, 123 bp, Zea mays
ggactgcaggctgaggccatcaagcagaagcttcagggcgactctgcaccggtcacagacggagaccaacctgcccgtctgctgatcacctcagaccaggttatggtgagcaaaggggtgata

SEQ ID NO: 378731 - DNA, 236 bp, Zea mays
gtcgtggctacgcagccattacgagcttatggccacgagctctcgtaaagcgacctggcgaatgagagctgttaattttccgacgtacagtactgtgtaaaaagggacaggtgggagcgggcttgtccatttcgcgccgagaaattcttttttttttctttctgcacgctgcgcttttgccagccgttcagtgagccagtgactcgtttgactgacaaggaaagaatacttgtggc

SEQ ID NO: 378732 - DNA, 133 bp, Zea mays
gacctctcggacatgcttgttgaggtagccaacaagtacagttccgatttggaggaccctgcctgatcgtagtaggatcagcgacgtatggtttctgaatcggtggtgatcgggaagatgttcaaatcttatt

SEQ ID NO: 378733 - DNA, 101 bp, Zea mays
ggccaaagtagctgcccctagctctactagcagctagcaactatggcgtcctcctcctccaaggtgctcgcacttggtgcgctcatcttctccctccttgt

SEQ ID NO: 378734 - DNA, 133 bp, Zea mays
cacaaaacaaccagcagctaactgaagggataggttctgtagtggaagtactgaatctggaagagaaatacggatcattggatctgatgaagattgatgttgttgtgcagctcctcttgcatgagatcaagtg

SEQ ID NO: 378735 - DNA, 239 bp, Zea mays
tgattatgtcctcaggactcaggtgacgtatctggtaataccctagctagcatgggccgagatcaagctgcatcgcatctgatcgggcaggggccggagttcctgatgaacaagatacatatataggtagtagaaactaaacagattaaagacacatatgcagtggcttcagctaatcttcaagactgcaaacgtaaggatacagagctagctgcttgaggtgggatcatgcaagactg

SEQ ID NO: 378736 - DNA, 151 bp, Zea mays
gactggcagaggcaggcgctctcggctctcctcgtggacaaaaccaccagctcccgatatccaaattggaacaggggattctgaacttggggtttgttccggggaccgattctggcatcggcagacgggatgtcagcccccctcgaccgat

SEQ ID NO: 378737 - DNA, 191 bp, Zea mays
ctccatcacgaggtagaagaagcctgaggactaccctcggccggcgatcgacagagcaagatgaggacgccgcggggtgtctcgtcgtcgttccttgccctctacgggttccttctcctcgtcgccgtctcggtggccgcgaccggctacgccgcttcgcctggggagagttccaacggttacggcgctgc

SEQ ID NO: 378738 - DNA, 174 bp, Zea mays
cccacgcgtccgattcagtccaattgccacacactgcctgacgcaagctcgctcgtccaagtccgacgttgataccattggccgctgcgccgccatggccgtgtcgccggaccagcagcagccacctgcatgggtagggtctcccttgccgtctcctctcctccgcgtccgcgt

SEQ ID NO: 378739 - DNA, 220 bp, Zea mays
aactactcgaaccgatcaccgacgcgacgaaccccgaacccgaaccctccaaggcggtaggccggagcagagcgcgctccaagctgaatccccccatctcctatcgccgtcgaaagtcgcaggtccattataactttttatgaccttgtctgggatggctgttgctttcaaagcaagtacaagttctgtgacacagcaacattggtcaagtccaacaaag

SEQ ID NO: 378740 - DNA, 174 bp, Zea mays
aagacgtgcaaggctgccctcaggttttgggccgcgcttgacgcggggatcgcgaggaaagtgacctgttgcctcttcggctcccaatctctctgctccagtacttggacatcacgtccggccgcaccgcacggcgttgctctcgcgagagcaagaagcatcgtcctccggagt

SEQ ID NO: 378741 - DNA, 142 bp, Zea mays
cccacgcgtccggccagatcatactagtacacaccacactcccccggctagcaccgtgctctctagctagctagctaagctactactgcccgctcctttccaggcgactttgcaaccctagcaagagcattttcgccatgtc

SEQ ID NO: 378742 - DNA, 126 bp, Zea mays
cccacgcgtccgatcctccacttcttcctcttggtctggttcgggcagagcatccgcacctgctcggccgattaccccggcgttttctgttccctttcaccccgcgtgcgggcgctatccttcccg

SEQ ID NO: 378743 - DNA, 155 bp, Zea mays
ctcaaataggacaactcagagcgatgaaatatatctcaaaggagaatgcggacctgatacactcacagaaatgaaggaaaactatgggcgcatctcagactctagagatccttgtgaccctgagagagaaattgttgagagatctgaacagacat

SEQ ID NO: 378744 - DNA, 163 bp, Zea mays
ggagttttcttggcctggccggattttatccaccaaaatacctagggctttgatcgcaccaaatacctagggctcttatccccacttccagttccacctcatgcatggcactcaatttctatggattttatagaggggctaccaaagtcaagggctgtggatt

SEQ ID NO: 378745 - DNA, 253 bp, Zea mays
gaaagcagtgggactgaattactgattgctttgactaatggaagtcaaaatatcgtggaacgtccagctgagcgagaagacagcattgatgaataccaggatgcatctccgtttcttcatccatcagattctgaagatggcgctgcaccaagttctgcattttctacagaaatgagtaatttgaatgctattccatcagggtcaagtgtaactacagatgtaaattctctaggaacaaatggattactcaaag

SEQ ID NO: 378746 - DNA, 262 bp, Zea mays
accctaaatgcccagtaagtctgcaactcattgctatgcagttcacttatgctgtaatattatttttttgtgaggatccgttttgatccagaacactgctcatctatagatgttctggatcacttataatcaataactggattatcctttttttatatggctgtatatatcctagcaagggaccacttttgtactcacttagtttcttgagagctgggaccacacttagtgaaggaaactgtgttcaactaacagaagtggc

SEQ ID NO: 378747 - DNA, 249 bp, Zea mays
ggcaaattgttgcagttggcactgctggaagcaatgcatcaagctctaggccaagttcaaagccaaatacaccaagcaagcagcggaagcctgacacactgctcgtgtccaaatgaagtcaaatgcgctacatctagcaagagtgtttgcttatggtgaagagtttctttctgatgagtgctgtttgtgtgccacatgaatattggtgaaagttcagtagaccttggaatacataaaatgttattattg

SEQ ID NO: 378748 - DNA, 249 bp, Zea mays
ctcctctcccaaaggctcgccctccccggcacccctcgtatcttcgccgtcgggatcaaaatggcggtgcccatgtccgccatcgagtccgcgtggcagatctctgtctctctctgctcttcctcgccgggcgaaacgtaacggaaatgaatgcagctcctgatcgccaacttcaccgagttccagctcgccagcgtcatcaccttcctgctccacgagaccgtcttctttctctctggccttccctcc

SEQ ID NO: 378749 - DNA, 234 bp, Zea mays
atacaattgtcgcatcagttaatagcaattagcaaacaaatacaagtgcatttgtctgccaattgctattaactgatggatattgtatcgcaacatatgcacctgtatcgatcttgctatcaagcttacatcatctatgctcacacataatgtgtgactcctacagcgatgctgccatgcttgctttcatcttggcgggctacatcgatgagctcgtctgctgcacgtataggg

SEQ ID NO: 378750 - DNA, 225 bp, Zea mays
ggtgagaagggtgagctggcggagaaattaggggaggccaaggaggcggttcggattgtgtcgagtgaaaaggcggaggtggagaggagcctgcaggacttcaggaaggcggctgaggcttatcgggtggacatggagggaaaattgaaggcaaagttggatgaattgaaggtgttgggtgccgagaaggcggagattgaggccagagtagagtcattggaggcg

SEQ ID NO: 378751 - DNA, 236 bp, Zea mays
gttttgagagttcggagacccaattgacacaacatgccaagttcgataaccgttgatgcattttactctcctaacttaaatagctaagcaactctaacgaaccctatctggtcggtactgttcacacactacagtacccgctcgcggctgacctagcactgtgccgtgggcctagtgctcataacattccacccctccaaaacagcttgtcaacgagctatagtccagaagacttg

SEQ ID NO: 378752 - DNA, 149 bp, Zea mays
ttcatcggaaaagctgttcgtacgtgaagctaaaaacctcggaacaacagctccacttatgaaactgaggggttttcgtgatcttatttggcaaatcagctttgcattggacaacaaacaaataaaatgaccgtaatgctctctgcttt

SEQ ID NO: 378753 - DNA, 230 bp, Zea mays
ggaacagctgaaacagtgtagtggtttggttgcttttggttttggttcacagatttgctgttctgattcacccagcctgtgagacgtgcaggtagcgtcttgaggaacaaagtgcacttcacctggagtaaccaggaggataatgctgaggagacggccatgccagacgcctggtacgaggtgctgtccatgctgcatctgatggccatggtctgcctgctgcaggccaa

SEQ ID NO: 378754 - DNA, 245 bp, Zea mays
gaagaataagcccccgggcctgggcatcctgcgtgcgacacttgcgagcagaacaggccaacacagctagctagcaggccgtccggccggcaaggcatgaagggcgacaaggcgggcgggagggacaggggcggcgccacaggccgctgcgcctcgagtcgcagcggttcaggctgctgtccatcgtcgtcggctgcttcgtcatctccctcgtcttcctcctctcctcccgccccgacgccgcc

SEQ ID NO: 378755 - DNA, 235 bp, Zea mays
cggacgcgtggctggaagaatctgggactaaggtgagagtgttaatcaagggaaccattgttacagcttcacttaatggccggctatctgtggtacgaatatatctacaagctggacaaacatacatataacaagtaccatccctacacgtcgtggattcctataactatttatgtctgcctacgcaattgcacccaacaattgaggagtacccatttgtctctttttgtttggc

SEQ ID NO: 378756 - DNA, 169 bp, Zea mays
ggttccccaagggagtgggtaaaggaggttggtggtgcagcatttgccaggttatcatcacctacagcaagacatttaagggcatcttttacacccagaaggcacacatttgacagtcccaagagtcctggaaggcaattctccgatagccccagaagacaaactattg

SEQ ID NO: 378757 - DNA, 234 bp, Zea mays
aggcaggccctcgctctcccgtggatcctccgccgcgccgccgcccctttatctgagccatccagcggacgggagatccatccgttggggcgtggattcagtcccttcccttctcggtggttactcccacagtgagggtaactcgaataactgtgagtgctactgtgagatgggtggtgtgctctctcttttagcttggtgatcatctgaaaaaaaggaagtgctgtttatttc

SEQ ID NO: 378758 - DNA, 152 bp, Zea mays
tgaactcaatcatcctcagcggaggaaagcagagcacggcacagcgagtcgcagagggatagatccgagcacaagcaggccccgatggcgacgacggcgacgaaccggcgggtgatcctcaaggagtacgtggagggataccctcgcgagga

SEQ ID NO: 378759 - DNA, 126 bp, Zea mays
ctacagttcagctcagccttggatataacctcgctcacacagcccagcacaagcacgctacgctgcagccctccagctctagccaagcatagcacagggtccattgcactgcattgtatcgcagca

SEQ ID NO: 378760 - DNA, 253 bp, Zea mays
gagaagatcagccagcggatgaagcttctgcaggatctcgtcccgggctgcaacaaggtactcgctcgctcgctcactcagttgatggaataccatgcgctcgctgtcactccactagtttggcgtgctcagctcagattgggatttgggggaatgtttctcgtttcaggtggtcggcaaggcggtgatgctggatgaaatcataaactacgtgcagtccttgcaacggcaagtcgagttcctgtccatgaaa

SEQ ID NO: 378761 - DNA, 245 bp, Zea mays
agagactcccctaaatttgtgaagcatgaattgaattctaaatttggcatgagaagccaagttgctgatacatgaaactcttctcattgccaatactgatctctagatttacgctacggatgtgattttgatgtcttcaaaggtgctccagatgacttagcattgtcagtctgatcaacatcctttgccttgatttgcttgtgatatttagccagaagttgctcaatagtaacattcgacctttt

SEQ ID NO: 378762 - DNA, 240 bp, Zea mays
aatctctccatctccggctctccaccttccacaaatccccaaatcgccacatcaaatcgaatccacccaccacggaccacgcattcgccatggagtttcccaagcgagggcgagcttttctccaaggttccctgcgaaggagccccaaggcgacgatacctggagctgccacgggggccgacgagaacgcaagctctaagcatctcgtgccggtgggggccgcgtcgccgaagaggaaga

SEQ ID NO: 378763 - DNA, 238 bp, Zea mays
gaacaggtggttgctcgttttgtttgttttttgaggaggtgattaagtaagtgactgattagtgagtggctgctgcctagtgcttggttactagtagtggtagaactcagaactacatagatccaggaagcaagcaagcaaatccttcctgccatggcggcctccatgtacatagatcccatgtttttattaatttcgtctagctgggggtgggggggcgtgcacctgccatggcggc

SEQ ID NO: 378764 - DNA, 231 bp, Zea mays
cccacgcgtccgcccacgcgtccggaacgatgccttcaaatccatcagctgaaaatggtgcatctgaatcacctgttgatggtatgtcaattgttccacatgatccagagggaattaatggacaaacaacatgtaggaagggcaaaaagagaggcaggcattttgatagagaggttcgagcagagattttacagggaagctatcttactaaagcagataagtgggtacaaa

SEQ ID NO: 378765 - DNA, 138 bp, Zea mays
ccatggagctcttcgtcactacacctgagctcccaaccccgctgctgctctccaccttaacgatagtgtccgtggtcgtatgctatgtcctcttctggaagcagcaggaggcggcgaggcgagcgccgctgccgcgcg

SEQ ID NO: 378766 - DNA, 139 bp, Zea mays
aaacccgttccatgtcgatggtctgaaggagttcagtggaccttacaacacaatggttgaggttcctatgattagccgggacagtcggaggctgaaagaagccgaggacctgctccagacttacaagttgattttgtat

SEQ ID NO: 378767 - DNA, 133 bp, Zea mays
gctctctcggagtctcagtccctctccaggcttcagccttacttgtgcgcagcgcagccgcagccgctgcttttccttcctcttcatcccgtacccttgccgatccatccatcggcgatgactctgggaagct

SEQ ID NO: 378768 - DNA, 250 bp, Zea mays
ctccacgtcgcctcgcctcgcctcgccggtaatcgacttccttctcttggcccttatgcaatcggttgggttgtggctgagccgatctgacccgatcgggtgggtccttgcgccgccgctgcgtgggctcatctcggtcgcccgcctgctcggctcgatcggccggggacggcggcggctagatctgcgatggagggcaacaaggacgacgcggccaagtgcctgcgcatcggcaagggcgcgctcgaag

SEQ ID NO: 378769 - DNA, 247 bp, Zea mays
gaaccatttgatgtgaatttggaaggcgctattgaaaagagctgtgaactggcaaagaatagttttgacaacacattagaaaataggtatgaactggcaaagaatagttttgacaacaccttagaaaataggtatgaactggcaaagagtaattctgactacataaatatggtaagaaatggattacaagagcaagacttagcatgcttgtcaaacagtcacaatgttaactacctgaagccttccc

SEQ ID NO: 378770 - DNA, 245 bp, Zea mays
ctctcccttcgcgatgccgacgatttcctcgcgttgcctcccttcgcgccgccgcctccctcgcgtcggccgtcgcctccccccacatcggccgtcacccctcaccggacatgaaccaattagagagctcaagtgttactcggggaagagggaaaaacaaaaggatctggacttattatgaggatgaggagttaattaaagcactatatgagatatctttagatccaaagtggaaaagtgaggga

SEQ ID NO: 378771 - DNA, 244 bp, Zea mays
cccacgcgtccggaactaataacctgttcgctttaaggggttcttcaatcgaatcttatatagtgcttatattttggttgagtggtttatcttttttccgccgggttctaatcctccttggataatgtgcagatggagagggtttgtgagaacaacttcgtcccgttcatccggtcaggggagtggtctgatattggaggtcgcgattacatggaagatgcccatgtgtgcatctctgatctgg

SEQ ID NO: 378772 - DNA, 240 bp, Zea mays
ctagggtttcggtggggttcttgccgctgcggttgttcgtgcggcgcggatttagggagggttctgaggcgagggcttttgccccctcgagcgatttgcagctttgggtccgatacagtgctcatcaaggctcactaaatggagtctcacaatggcgaggccaatgacttgcctccaccacctcctctgattgctggtgttgaaccacttaaagctgatgaaacaaagatgccattgaaa

SEQ ID NO: 378773 - DNA, 240 bp, Zea mays
ctcctcgccggagccagtaagcttccggcgaagaaatccggcgggcacatcacaagggggccgagcagggggacctaggcgagcgccggaatgggggccagcgcccgggggctcgccgtcgtcgtggctctagggttagataggtgtccgtagcttttttcttcgctcgccctcccccacgcggccagggtgtgcagccccggcgtcgcattgggtcccgggacgaccgtaaggccgcgt

SEQ ID NO: 378774 - DNA, 235 bp, Zea mays
gagaaagtgcgcaagtttgaggagtctcgaaaagagaagaggcctggagagggtccagtttctgctggtaaaaaaggggcgaagttttcgaagccatccacacaagaagttggcaatacaacatcagtttcgactccgactgaagcagtggcttcggtcacagtggtgtcatctcctccaatggcggcagcccaacaatgatggctatggcgccaccttcagcagctgtggccgg

SEQ ID NO: 378775 - DNA, 238 bp, Zea mays
cgtacggcaatcgcataggttgacattgactttgagaaagagcccattggagttggaaaggttgggaaggaagttttcttgagggacatatggcctttaaaccaagagttgatgaggttgtggagtccagcgtgcagactcacttgttaattcaagaaagtgtacgactccatcatggaactcaaattttggtggttgcactagtgtggagacttgaattcatgtatacacttagtta

SEQ ID NO: 378776 - DNA, 106 bp, Zea mays
ccttcctccttccccacgcgtacacactcccacggcggcgacaagcccaaggacgccgccaaaccggcggcgccgagaatgacgcggtaaggccgggaaggagggc

SEQ ID NO: 378777 - DNA, 104 bp, Zea mays
ggagtgccacgcctaggagctattctctctagtactgcggcgacttcactccaagcctcccccttcagcgatcagcacacatcacgtaaagcgcaaccaaatga

SEQ ID NO: 378778 - DNA, 127 bp, Zea mays
gagctcccaagtcgacgtggcggggatggctgcgacggccggcgtcggcggtggtggaggggctaacgcggcggtggcagagcagatagcacaggcagtgcggtccacctccaatctcctccagctc

SEQ ID NO: 378779 - DNA, 99 bp, Zea mays
cggattagttgtactgtacattgttcctgcgaagacactgggtcgtccgggtcaatcggcagcttgaaccagccatggcggcgcaccggccgaacgccg

SEQ ID NO: 378780 - DNA, 219 bp, Zea mays
ggcatccatgggttcttgcgtgtcggtgtcgtcgacgaggcaccggcggcggcggtcgaggaagctgtcggtcgcggcgaggaagttccggcggaagctgtccacggcgatcgccgccgacgcgccgatcgtccgcagcgccggcagcgcggcgacctgcctcgcccggcacggtgtcgtccacttggaggcgccggactccaacgtcaccctgcgcct

SEQ ID NO: 378781 - DNA, 218 bp, Zea mays
aaactaaagtagactcagtgctcaatgacaatcctggagagcatcctaaagagatatatgcaatgaaggcagctgttaacataccttctcaggatttctcctgcggtgccatatctagtgaagatccaacacaagggccagcagatcatgtgaacagtaaagatgcacctatagtgaactgtggtaaagttcatgtatcgagggagagtaatgatgat

SEQ ID NO: 378782 - DNA, 251 bp, Zea mays
cccacgcgtccgcccacgcgtccgatgaaggagtgtatactagtctagcaccaaagcgaccgagccgcggatttcacccctgcctttccttctccccgtgtccaggccctggtgcccgcgcgttcccgtgcggcaactggccgccgccgccgcactacgccaggtgcccaattcctcgtcgggtcctccgccggcgacgagcactcaccagaaaactggagtggactctacatgtcaagacagtatggcgc

SEQ ID NO: 378783 - DNA, 251 bp, Zea mays
cccacgcgtccgctcccctgttctctcgcccgaacacggcgaccgtcgctccaaaacacgaccttcacgtgctcgccttcgtcctcctcgtcaccgccgtcaaggacgcgtacgaggactggcgacgccaccgctccgaccgcgccgagaacggccgcctcgccgcggtcctcttcccggacgcccccgggggcgcccagttcgtcccgacagagtggaagcacgtccgagtcggcgacgtcgtgcgcgtc

SEQ ID NO: 378784 - DNA, 243 bp, Zea mays
atatcattctgtggcacaactataagtatgttggaataaagttctcactgccgtttgatccaaggcataattcaaggaaattccatgccattgattttctggcatttatttcttaccaggagtgctaattgcctttctgattatttttttcagttcctatacttctattggtcatcaatggagcacccagcacctgcaataagtttgctaatgtattatattattgtatataattgcagggat

SEQ ID NO: 378785 - DNA, 246 bp, Zea mays
  unsure (1)..(246): unsure at all n locations
acacgtccgtacacgcgtccgcggacgcgtgggcggaccgtgggtgttgctacgctaagcatgccgagaaatattacgtctgaagtttagnggttggcgtcaaacttgtcagactttggggttatgttataatatgttgagcatgaataaagatggatgctggtgactctgtcgccatcgccgtccatcatgagtgtcctgtaattcaacttatatctatcatgtatgtatgtatgtatgtatgta

SEQ ID NO: 378786 - DNA, 241 bp, Zea mays
ggtttgtacacggtggctgatgattcgtactgggaggacacacatctctatatatcggtttgtacacggtggctgatgattcgtgctgggggacacagaaaggggatcctaatactcagggcagttgaggaaaaataccaccgccctttcttgatgagctttacactttgtttggtcgaaccacacgcaacaagggcaatttgattagtgctggaggtgtccgtgagcccccgcgaactat

SEQ ID NO: 378787 - DNA, 233 bp, Zea mays
cgtgcagtacctcctggtggcctcgccgacgacgtccccggccggcgtgccccccggcgccgcctacctctccctcaacatcacgctgctcttcactgccgagaaccccaacaaggtgggcatccggtacggcgccacggcgttcgacgtcatgtaccacggggtgccgctcggggtggcggcggtgcccgggttcgagcagcccgcgcacagcacccgcctgctccagaccc

SEQ ID NO: 378788 - DNA, 229 bp, Zea mays
cccacgcgtccggcggctgaaagccgcctgctcgctgctgcttcgtgcggctgaagaagacgagggggctcaccacggtgatcgtctcccacagcgtgaagcagatccagcgcatcgccgacctggtgtgcctcgtcgtcgccggcgaggtcgtggaggtgctcgcgccgtccgacctgtccgacgccaagcacccgatggccagtcgtttcttggagctacacggctg

SEQ ID NO: 378789 - DNA, 233 bp, Zea mays
ctaagttctagatcgcgagcggccgccctttttttttttttttttttttttttttttttttttttttttttttgagacaatgaaaggataattaattaatacaaggttctcctgaccacttagcacagtatgcaacaagtattgtggtaacatatctcccatgatgaagagatgtgctagtacacacacaatcgggtaacttgttcggcatgatgaatagattgactacatgt

SEQ ID NO: 378790 - DNA, 229 bp, Zea mays
cggacggtgggcttcctttgagtatccatctgtgttcctataatttaaacaccagtatgctcatgcccacctgcagggtgttgactccaccttctagtgcctccttatccagctctccatgtagacatgtccaatatttctccagtgcctttaaataacctaatgagggcatgtaaacattttgttatacaatgactcatttatgtcctacagatttggtaatgccata

SEQ ID NO: 378791 - DNA, 115 bp, Zea mays
atcgcggtaagcttaccacctaggcaccggcggacccgccagtccgcccctgcatccagtgatccagtcaatcgcggacgcccgcttggccgcttccatgggttccatgaggcgg

SEQ ID NO: 378792 - DNA, 158 bp, Zea mays
atttcaccatctctccgcggaagcagatcctctccgctcgccagcctccccctcctgctgctgcctcctcgcttcaagcaacacccgaagcggcaacaaccaccaccaccaccaccaccaccggacctgcctgagcgaccccttggcttcccactcca

SEQ ID NO: 378793 - DNA, 245 bp, Zea mays
cccacgcgtccgcccacgcgtccgaagatcacgaggaagggagctgcgagtgggggttcatggtggggttcggcccggggttcaccatcgatgtaatggcattgcatgcgtgcagtggtatgtccacagttccacactgataccaagactcgagtattttgtaatgatagccatggcgcacaaagggaagctagaaatactttggttcccactacattaaaaaaaaaaaaaaaagggcggccgct

SEQ ID NO: 378794 - DNA, 229 bp, Zea mays
ggagagactagacccgctagctgaggccggccggcgcgctggacacgaacatgatggggagaaaggcgccgctcggctgtgctactactcttctcctcctcttggccgccgccgtcgctccggccgagctcagcgtattaggcctaggcggcggggcggcggctgcctcgggcgcggtcacccgggccgacttccccgccgggttcgtcttcggcgtcggctcctcggc

SEQ ID NO: 378795 - DNA, 236 bp, Zea mays
caaagccgaacaccaccaacaaggcagcagccgaacaccaaacaaggcagcagccgccaccacttcattgcgcgaatcggagcccgtggccgtcgcctccgccttcgcgattcgccgccgttgcccacgagcgaggcttcctcctcttcgtcgccgccgtcgcaggaggggaaagaggataaactgccatggcgggcaggcttctcgcgaatctaatcgtcatgggcggaaccgtg

SEQ ID NO: 378796 - DNA, 129 bp, Zea mays
ccaacattacgagacgcctcgccggccgcgccgcgcccaactcctctgatcctcttccttgtccccaccctcttctccgatggcgacgctgcagctcaaccacatcgcgcgggagacctccgacgtggc

SEQ ID NO: 378797 - DNA, 176 bp, Zea mays
aagtgatcaattcaagcaacacacggacgaagcaagcaaagccaagcggtcagcgtcagaatagcatggcggtgtccgcggccaggatggcgtcgccacggccgtctccttagccgtgcactggctcctccggtccttcctccaggcgcacaccctgcgctgggcctgctcctccc

SEQ ID NO: 378798 - DNA, 252 bp, Zea mays
aacgcactggtcgcacgtacacaagggatcaaatgaagaataggtgggactcgttgaagagaatgttcacccagtggaaaactctaaatgaaagggctacaggtcttggtcgagaccctcatactggttcaatcagtgtgccagatgagtggtgggccaagcaaaatgatgtaagtagatctttttttttgttttgtagactaacaatagtatttgaccatctcaaactaggactgcataggagcaattgat

SEQ ID NO: 378799 - DNA, 208 bp, Zea mays
cccaaatgggaaggaggttcttttaagttacagtggtgaacatgtttatctgtttgatgttgacccagataatctgagttcagttagatacacagcagactatgtacgggaacaattatttgtacccccttttcacaaagtaccagcaaaagaacatgcaaaagaaaagaagacttcagtaaatacagctccaagaatgtgtctaggg

SEQ ID NO: 378800 - DNA, 246 bp, Zea mays
  unsure (1)..(246): unsure at all n locations
ggtgttgatccgtgccccgctcggatctcgggactggtgccggctcggctcggctctgccccaggctccaggccagctccctcgacggttcacggcgagttcgcctgccatggagggcgacgcggacggcgtgaagtcggggaggcgcggtggcggacaggtgtgccagatctgcggcgacggcgtgggcaccacngcggagggggacgtcttcgccgcctgcgacgtctgcgggtttccggtgtg

SEQ ID NO: 378801 - DNA, 131 bp, Zea mays
agacttgttttttccgttcatccatccatacgtttcgtttgttccacctgcgcaactgcgacggggataagtacgtcttccagatgacgacggcggcatggccgcggccacgcttcctcgtcctcccccag

SEQ ID NO: 378802 - DNA, 232 bp, Zea mays
gaaacctaaactgacttgcttggctgcttctcaagcaaccgaggatgctaccgtacatgataatgtacctttggctgctgctgacactatcacccaatcagctccagtaccgaattcagctggtacagaggattcgttgaaggtggacatatgtttaaatgatctacagttatcagataagcagcatgtgataattccagatcatcttcaagtttctgagtctgaaaagtat

SEQ ID NO: 378803 - DNA, 235 bp, Zea mays
  unsure (1)..(235): unsure at all n locations
cgcagtaccgtgcgctgtaggtgtgtgtgcgccaagttcctgtgtccattgtcttgtgtacagctactgttcatctctgtctatctctgttcttggcgttccatcgagtgtgtagcgctagtagattccaacatttggtatcagaggcagtttatgcccaagatcctgcgctactacctcgagtccgaagctatggcgatggttccgcacggcgccgnggggagttcggtctcca

SEQ ID NO: 378804 - DNA, 156 bp, Zea mays
cggacgcgtggggtggaaagcttgagcgcgacctgtttgtgtggcgcagtttagggaaatttggtttaacggactaaattttagtacctaaattgccgaacacagatattaaaatagagataaaaaaatagagagaatttctcttttagtctagtc

SEQ ID NO: 378805 - DNA, 128 bp, Zea mays
cccaactcacggtcacggcaaacagccgccgcgacgccatcaacggcatcaccccatttccacttggatcccaagttcccaacttcccaagccacctctgcttcagtgcttctcctccgtctcgtcgt

SEQ ID NO: 378806 - DNA, 244 bp, Zea mays
cccacgcgtccgggagctacgcggccagctcggcgcggttcagtagcgacttcgccgcagccatggtcaggatgggcgccattggtgtcctgaccgggagcagcggacaggtgcggcgcaactgccggaaggtgaactagccagctcgcagaatactgcattgtatgcatcacactggtggaagaaattgtgtgtgctgagttatccaaccatggttgaacgaattgtaaagattaaagggcaa

SEQ ID NO: 378807 - DNA, 244 bp, Zea mays
ccacgcgtccgcacatgcagaagttgataatcttttctacaaatctgatcaaatttgaagtagagactaaccggtttttaacagtccaaattcttaaattggtaatatctaaaaaggtcgtctgtgcaagttgagataaagatccgaaaaatttgggccttggcctaacaaatctacacacgcaagtgcgatctgggcaatgatattgattgggcccaataaatctattgagtctcggacggga

SEQ ID NO: 378808 - DNA, 235 bp, Zea mays
cgcagtttatatccctactgtttcggactttcgggttttggccgacacccgacaatcttaacatcaaactcgtcgtccacgcctcctcggcaaggttgcgtacggcgtggccctaaggcataccagcgggatcaagctattttgctggccaaccgaacggtcaagccgacgatgacgctcggatcggcggcacacaagattccgctggaggttgcgcacaccctcgtcgagatcg

SEQ ID NO: 378809 - DNA, 231 bp, Zea mays
ggcatgaatgttttagaattgaaacactgaggtctaaataacatgctagccattttcattgtttttttctaactccaaggcaataagatgattgctttagtcatttcaattctagcataatgatatacgtgtggtattccttggattattttggatgtttccaaggaaatgactatctgtactctaaagaaaggaaatgcattactttataattttgtccatgaaatttaa

SEQ ID NO: 378810 - DNA, 162 bp, Zea mays
atgaggagtgtttcaggcaatagatatctctagccgccgcatgccgctgcggcggtcttacgcacagcctagtaatctcgccgcagctgcatgtgggctaggtatatatgaggagtgtttcaggcaatagatatgctaagttatggtaaagctatttggtct

SEQ ID NO: 378811 - DNA, 201 bp, Zea mays
gaaactgtgctttcagctacagtagacttctgtttgaatatgattacaaatcctgaacagactggcacaacttttgaggagttccttatacaaagcatggttttggttaaatcagtactggagtgcaaagaatacagaccaagtcccatgggacgtgtgatcaatgaaaatgagcctttaagtctggagcaaaggaggaaa

SEQ ID NO: 378812 - DNA, 228 bp, Zea mays
ccacggtccggatgaagatgaaatggcagatttcattgtggaggaagatgaaattgatgggaatggacaagttgtaaggaggaagaaatttaaaaagaaggtaccacgacaagcagcaggtgtatcatcgtctgctctgcaagaggcccaagacatatttggcgatgttgatgagctgttggcactaagaaaacaagagcttgagagggaggcccttaactctggtga

SEQ ID NO: 378813 - DNA, 234 bp, Zea mays
cccacgcgtccgcttccgacctcgtagcgaatcggaccggggggctagggttccggtgcgcctctgcaatcggacgcgaggctaggctgggcatggagggaaccgctgcggcccggaagaggtcccggccggagacggcgaacggggctgccgccgccgggaagcgctccaaagacacggagtcatttcaaactggtctatcaagcaaatcgaagctttgcaccaagtttttca

SEQ ID NO: 378814 - DNA, 222 bp, Zea mays
gagagagacttcctcgcctccatcccatcccgccgccgccgtctctacggtcgctaataagccgccgcatccagggatggagatgaagaagatcgcctgcgccgtcctcgtcgccgcctcggccaccgtggcgctggccgcggaggcgccggctccgtctcccaccagcggctcctccgcggtcgcacccgccatcgtcggggccgccgtggcctccttctt

SEQ ID NO: 378815 - DNA, 216 bp, Zea mays
cttgctttctgtgcctctcagcaaagggcagcgttccttgctatgtcatctagctagatagcacagagcaagctgcctgggcaggcagctagaaaattaacaacaaaaaaaaaggtcaggagcagtgggatttggtcgcttgctgttgcttttggcttcgtctccgggcacatctcactgctgaagcctcatggggagagctccgtgctgcgacaa

SEQ ID NO: 378816 - DNA, 235 bp, Zea mays
aatcgattgaaaaaaggtaccccaagaacccaaagtcacaagacactttaggcacttcattcagcttcaagaaagcggacaatggagatggtgccatggcttctcggcttcctcggcaggtacccggagctcatggtgtccctcgcttgcttcctcctgctgtttcgtaggctgaaccagcgggacgggctgccgacgaactggccggtggttggcgcgctcccggcgatcaccg

SEQ ID NO: 378817 - DNA, 170 bp, Zea mays
tgcatctttccatcttgcattcccattcaaggctagatctttgggtatattccatcctttcaggtcttgttttactgcatctttccatgtcaacttcgaccttcccctgcctctcttcccattgctatcacgccttaggattccacacattgttgcttctggaggtctcc

SEQ ID NO: 378818 - DNA, 187 bp, Zea mays
cttacattgtatggtgtctagaatgttttgtttatatcaagcttttgatagctacatctttaattaggtaaagaatctaatctgctactatgaatttataagaaagaaaagatctgcttctttgtgttatctttgttggtgactctttccagtcatatgtagccttttttttataccgtatgttcat

SEQ ID NO: 378819 - DNA, 132 bp, Zea mays
  unsure (1)..(132): unsure at all n locations
tttcggtgccgccgccctcctgacttgttcgcgagatccggccgcatattgacaaatgccggcgagctccngcacccagtgctcgcgagattcggccgcgcatgggcttgcagtctggcaccgatgccgacg

SEQ ID NO: 378820 - DNA, 279 bp, Zea mays
cagggagccacctttgcggaggtgatggaaatgaccgacatatttgaaggaagtgtcataagacttgctagaaggctggatgaatttctgaatcaggtagactgtcatctttatccctcttccaacataagtgtgtattgctttccacatttttaacgtcgcttgggttgtatggatgcattcctttgattgcagacttcagtattaggcttagtgcacatgccatttagagtttagtaaggctgcttgggaaatgtccactttatgatgctactctct

SEQ ID NO: 378821 - DNA, 284 bp, Zea mays
gttccataaaactggcattcatcccatttattccaggttcacacacatgtccagtctttctagcaaatcagatcagtgcaccaatcggttcttgtttgactgctgtcagtctgtttatggttcaagctataacttgagtgtcacgtatgcccatgagtcttatagtggtcatctttcagtatgcctaacatccttttggtgttatgtgatgttttctcaggaccatggaagaaaaatcttcacttttgcaagaaacagtagattatgtcaccaatattttaaaa

SEQ ID NO: 378822 - DNA, 202 bp, Zea mays
cgcttgaaccgcggacacagaccgctcttgttctcttctctgcttgaactgcggagaaagaccgaatccgaagggacgttgggactttctggctgggaagactacataccatttctctaattcgggcgtgtttttctgcagagtttgaatcgattaggatgatcggatctgagatgtggtactggcgtactgcaggtttgtg

SEQ ID NO: 378823 - DNA, 189 bp, Zea mays
  unsure (1)..(189): unsure at all n locations
ctcctcgccagtcgcctcgtctctccctgccgcgtcgcctcgactctccctgccgcgtcgcctccagttccgacgccagcgcgcctcccgcctccgccgcgcctgacgaacgcagtgnaggtacgggaatctctcagctccatttgaccctccttgaggtcctcccgcgttggtctgattgccaccctc

SEQ ID NO: 378824 - DNA, 324 bp, Zea mays
  unsure (1)..(324): unsure at all n locations
cttgaacgagatgatgaggtaatacttcagggcgaactatgtctcctttattgctatcctgctcatcttagtttgttgtaacatgcaatgtgatagttgcagtttcctgaatatgaaagatttgatgcaatcagctttttatgtagaaaggagagacataattaacttgttcttttgtgttgnggggggggatttggccattttggatatgaagtgcaataaatatgaactatattgtttttgctcaagtagaaaaaggttgaacttctatatcagtggactgtttttcttcattctctttcaggatgtgtattttgatgatga

SEQ ID NO: 378825 - DNA, 203 bp, Zea mays
cgatcatcttgccttgtcaaagttgacggtgagagaagatacgtaagggaatacgtcgtggaccttgtagttgagccggggagcatcagctgcccggactcatccatcaacggccagctgctgtccaccgtgccttcacctttcaagacttcgtccgcagtcggctcagggaactacacaacaccagtcgcagcctggaacca

SEQ ID NO: 378826 - DNA, 131 bp, Zea mays
cgggcttcaattgtccagaaatcttctttacagtatgctgatgatcctgatcaacaagagacgtttcggcctcttgctgcgcaaatggcagcatcaccacatctcttgagtacacatgcatctgatatgaa

SEQ ID NO: 378827 - DNA, 160 bp, Zea mays
cagtgaaaggctgccattttaaaaccttgctctccggtataaaaaaaccttgctctccttctgcgctcgattcccaacccacccgcacggcaccaccaccaatccatccatccttacgcattagctacactcgccggcgtcgagcccccgcgaaccctag

SEQ ID NO: 378828 - DNA, 226 bp, Zea mays
cgggaaatgcggcgctgcgcgccaagtggaaggccgcggcctggatagcacggcgcccggtgggtcgtcgtgcgagagcctcgacaggctagtggaggatctgcggctgtaggctgcggacgccgagctcgccaccgccacgccgttgatcaggtgatgccgtgagaccatagcacgcccccacacgcggacttcacgtcggacgtctcattccgtctcgatgtcg

SEQ ID NO: 378829 - DNA, 265 bp, Zea mays
agagagcctagccgcctcttgccgctgaatctgtgttgatttgtttggtttccgtcgtatccataggaaaccacccgttgtctgctagatgtagtccatttgatcaccgatctgagctaagctagtggttgtccaccttttgtttgtattggtttttgtctctacgaccatttgcggccactggaatcggcagtacgcaagtctttttgtaatttagttcgtcagtcttcgtctggactaatgtgcatctgaaacggacttagct

SEQ ID NO: 378830 - DNA, 308 bp, Zea mays
gtttgctgctgatctttttgtatcaaaatttaaagatgacttgctcaatcagcatgctggattgcggttcagaaataaggtgttggctccaggaggctcaaaagatcccctggagataataacggactacctaggaagagaaccatcactccaaccttttattcagagcagaacaaggaacagtctgtgagggatcatttatgatgtaaccgttgagttttttctttcttttttcctttttgaatttagctatagaaggcctgctgactgtctcgagttatttttttcgtaacggactgacaagtctg

SEQ ID NO: 378831 - DNA, 99 bp, Zea mays
attccacaattgttatctgcaattggggatttctatttatgatatacacattgtgcgtggttcctgattaaatgggtcgtgaatacatgtttctgatac

SEQ ID NO: 378832 - DNA, 253 bp, Zea mays
gctacaacaatggccacggtgccttgccggccttcacgttcccggcagcagctggcgaaaccctatactagcaggaggaggaggaggcgttttgatcgaccagctgaactaatcatctaatttagttggatggtgatagatttgtaacacgcgcgcatgccatgttgttgttaactttcttttaacgtttttttgtccaatatgtgcatgcatgagagaccatccatcttatgaaatggagtatttcatcatc

SEQ ID NO: 378833 - DNA, 265 bp, Zea mays
  unsure (1)..(265): unsure at all n locations
agttaccagaaattgggcgatatagatttactaggtctggatctgtaatcctccctgcatagctcttattcgtaactcgcagtcggcacgaaagttggtgtgtgttttagcagaatgctttctgtccgtgaaagtaaacttgaaactacttattacgactgaanaaaaaaaaaaaaaaaaaaaaaaaaaaaaaaaaaaaaaaaaaaaaaaataaccaaaaaaaacaccccaaaaaaaaaaaaattgaccggaaaaacacaagatt

SEQ ID NO: 378834 - DNA, 276 bp, Zea mays
cgacttcgctcgtcccgtcctctcgcagctctgtcctcgcgtggagctcacgctagggttgccaccgcctcgcctggacctcgcctcgccgcctcgcctggagctcgcgctagggccagggtcctctcacagcagcctctgtcaccgcctagagctcgcgctagggttcctctcgcagtcgtcgctgttgaccgtcctcgcctggagcttgcgctagggttcctctcgcagtcgtcgctgtggagaacggaaaacagaatgggtggctgcaatgga

SEQ ID NO: 378835 - DNA, 272 bp, Zea mays
agttgaagctcctgattgcatttggtgatttgggtctccaatgattgctttccatgtctacacaagaagctttccacagcctgctctcgcctaagcaagtgctacttgatgtcttgatcaaagtgagtggaaacctctcaacctcacattctccttgcagcatctgtattcagcccatgtggaacctttgccactgtcctagcaagctggtcagtcatgccgctgttcccttcagtggaaattaactgataggaagacagtgatttgcggag

SEQ ID NO: 378836 - DNA, 247 bp, Zea mays
actttccaagaaataaaccttcatacccagccagcttcatagtttctttcgctgtaccacacagacatctatgatttttggagcaaacactgatctgtattgacaagtttacacgtttgtatgtggaatctgaagagctgtactgaaatgttacatcccaaaaaaaaaaaaaaaaaaaaaaaaaaaaaaaaaaaaaaaaaaaaaaaaaaaaaaaaaaaaaaggcccggccgccgcccaatgacccct

SEQ ID NO: 378837 - DNA, 221 bp, Zea mays
accagaccgaagtggttgtgattgtgacgaggtgcgcgactagcaaacgagattctcgcacggctaccctcaactccaaattaactaggctcagtctgtctattgcttacgcgatttcacctccatcgtgtgcttcgatcgagagcctcacttgtattttccctttcttttttctaataaaaaagtcgaccatcgtgtgatatatatatatatatatagat

SEQ ID NO: 378838 - DNA, 281 bp, Zea mays
agcctctcctgacggcgtgtatcagaattctacctccattccttaattcatcatattgagaggctcattttgctcagcaaattgtgaaagtggaacagaagttaagaaatactcactaggtaaccatcataattcaaaagtctgatgcttctctttgctacctcgtagctgagcatttagtttctagttccattagttggatcttacaaagacactgtttcaaagatttttcatgtcatgggttttgggggatgacactctgttgcgtagactaccataga

SEQ ID NO: 378839 - DNA, 279 bp, Zea mays
  unsure (1)..(279): unsure at all n locations
cagtgcttggtgcaaaaagacgaattccgttaaaaagacgggaccccctcccacgggcatccatactatcttgacaaaaatgaaaaccgntgcttggtgcaagatccgtgtggtgtcgaagaatcgcagttcggcatcttctctgcggggaccgcgacagaaacgaggtcatcagaagagagaaataagtcacacctaattgcgagcaggcagggcagtggtggctggcatatattaagtggtggacaatcaagaacatgctctgcatgcttagcttaa

SEQ ID NO: 378840 - DNA, 192 bp, Zea mays
cctaaaaggaataagctccctgaaattaaagcatcgaagggcacacgtcaatggttttatttgcaacttttgtatgcaaacttgtacttgaaaagtaaaaaaaataaaaataaatctgtagtatgtcgatgcaaaacaaaaaaaaaaaaaaaaaaaaaaaaaagaaaaaaaaaaaaaaaacaaaaaaataag

SEQ ID NO: 378841 - DNA, 247 bp, Zea mays
aagagacgagacaggcatatgatggtaacgctacctgcagatttgtgctgctagtagaacctaaaagagcttgtagtagacaaataaaaccttttcttttgtcttggaaattttgactcgctaataaaaagtgaagctatcaaaaaaaaaaaaaaaaaaaaaagaaaaaaaaaaaaaaaaaaaaaaaaaaaaaaaaaagaaaaaaaaaataaaaaaaaaaaaaaaaaaatagaaaaattaggaaaaa

SEQ ID NO: 378842 - DNA, 121 bp, Zea mays
gagatgcggtgcgactccctcagggtgacgtcgacgtacgggacatgcagtgcgactccgtgaccatatgcactacgcagagaacctgcaatcgggccaatttcgcttcaacggggccgaa

SEQ ID NO: 378843 - DNA, 187 bp, Zea mays
actttccgcgcctcttcttctgcgcccctctcctcccaaactgcggatagagcagcagaggcagcgacacgatcgcgagcgcacgcacgtaagcacgttgtcggaagctccagttaaaaggaagaacaaggccttattcgttgcgggccaagctcttcttttcgggcggcaagttgttgggcggccc

SEQ ID NO: 378844 - DNA, 123 bp, Zea mays
agggagggcgaccaggtggagaaggccggcgcctggctcaacaagtacgaggtagtcagtccatccatcgtagcgtcgtccgaagtccgaactgtccagtgcttgctgactgataccaccaac

SEQ ID NO: 378845 - DNA, 273 bp, Zea mays
gaggccgctgcgctggcggcggcggccgggctcagggagctgaggctggacaaatgccttgctgtcaccgacatggggctcgccaaggtggctgttggctgccccaggctggagaagctcagcctcaagtggtgccgtgagatctctgatatcggaattgatctgctggccaagaagtgccccgagctccgcagcctcaaaatatcttacctcaaggtgggtaatggatcccttagatcaatttctccacttgaaaggcttgaggaatgggca

SEQ ID NO: 378846 - DNA, 131 bp, Zea mays
ggtaattaattcatcctcgtcctccgctagtccgccgggtgagtgctcggcggccatgggccatggccatgcaggtcagcatgcatgcagacggttgccagttgtcagatccgaatattcaggacactgga

SEQ ID NO: 378847 - DNA, 110 bp, Zea mays
ctttctattcgtcgtcccagttgcaagggaattctcgtaccaggagctgtctgcagcgaccagcaacttcttcaaggacaggaagctcggctcgggccagttcggggagg

SEQ ID NO: 378848 - DNA, 202 bp, Zea mays
gatttacacaatggtcataggtgggttttgtagggctggatcaatgtcagaggctctaagagttagggatgagatggttggctttgggatgccggcagatgtgggaacctacaataacccggtggaatgggcccggaaacagccaaaggttgcttgacgccgagaaacttttgaatgagatggccggagaaaggggtaacac

SEQ ID NO: 378849 - DNA, 192 bp, Zea mays
gtcgcttcgcttctgcgcgtactccctggccgtcgcgcccatgccggccagagctcgctcggtcgcggtctcgtcccggctccctgctgcgctcgcccagatcgccgctgtcgagttccatcgccgagtgtagactctgttgctgcgtcctcgtcgcgttcgtgaaactgccgtggaattgcattcgttttt

SEQ ID NO: 378850 - DNA, 100 bp, Zea mays
ggttattgcaggccgtgagacaggaaaggttggagaagtcacacgccttttcaagcacaacagcacggtgatcgtgaaggacctgaacttgaagtcgaag

SEQ ID NO: 378851 - DNA, 296 bp, Zea mays
cgctcgagttcgcaaccacctgcacttcctgcccttcctgctccaaatgcaccacctccacctccaacgcttcaaaaccaatcatcattacagtttccaagtcatttacaacattcacaggtaccatctgtgccttctgttgcactggcacccacagttccagctttaccaagggatgcttactatgccccatctgctcagccgactgagaccatgcaccagcagtatcaagctccgccagttccacagccacaggcactcctgcaccacctcagcagtaccaatcccaaacccag

SEQ ID NO: 378852 - DNA, 228 bp, Zea mays
ctcgagccgtatttttttagaagcaggtatgaattaaagctaagataacatggtataagtgttgtttttacaagatgcgcagtgtgattcgttctttaaatgaacagatgagctagtaatattatggacaatccatttagcattcggacgatggagtcgagtcagtccccaggtgcaacttgcagctctgcacagatgatcagtaagtatccgcgacctggaaggctg

SEQ ID NO: 378853 - DNA, 297 bp, Zea mays
gtagtattagtgattttaaatggcttcagcaagaaaagtaagaaacgcgaataagcgttatgccaaaatcaatgaagactggcaggataaagatacaccaagtgtacctaaaagtaaagtgcgaaagaaaaagttatcggacatgcttgggtctcagtggagcaaagatgagctcgagcgcttctatggtgcctacagaaaatatggaaaagattggagaaaggttgctggcactatccgcgatagaacatctgatatgtgaaggctctttacaacatgaataaggcatatttatct

SEQ ID NO: 378854 - DNA, 217 bp, Zea mays
gcactccctggtgctcagacccagcttcgcgcgcttcctgctcccatggcagcgcatcctcgcgctttggccaagttcgtcccatggcgcccggacttctgctcgccccagctccctgttgtcgcgagcttcagcccggatttctctttgtcacgcagctcggcgcctgctgctcgtccctgctgcgcgtgtcgcattcttctattgcgcgcacgaa

SEQ ID NO: 378855 - DNA, 283 bp, Zea mays
gcttgctcaagcccagacatgttatgagcgtgctttgaagatagaaggacgtgttctgggggttggtcacccagagtattcaagtacaatgtacagtctagccaaggtactagtgctgttttgctcttaaacttactgttttgttttttagattagtgattcttatgtgatctatcaccttcccgacgaaggtatccaacaaggacactgctgctccctttgtgctgtttaagttattgttttctggatctgatttcgtgtcaataatctttctcatgaaatc

SEQ ID NO: 378856 - DNA, 211 bp, Zea mays
ggagacctctcccccgttcccctcgaagcctacgggctcggggggcttcggtcggatcgaatcgggtcggatcgggagcatggaggtctcgctcagagcgtcgtgggtgggcgtgcaacaacacgggcaggacctggcggaccgcctcgcgcgaggcttctcggggctcctcctccacgcgcgccgccgcagctgcccccatggtcgccgg

SEQ ID NO: 378857 - DNA, 278 bp, Zea mays
tcgagctcgagccgattcggctcagcaagcacttcgacgtcgcacgggcgatgcacactgacaactccagcgtcggcaccaatggcttaataccaagaggtggactactgctcggaggaagtgaggtcggtggccccggccggcttcggcagccacggaggcggcgtccagcagcacgtcgtcaaggtgaagtacgaggaagtcgacacggtctcacgcgccggcgccaaccacaaccaacaccaccatgtcaccacggcggcaacagcttcgtggtg

SEQ ID NO: 378858 - DNA, 166 bp, Zea mays
catccactcacccgccgcgccgccggcgaggccgcctttccggcgcacacgacgggagtagcgcgcccctccgggaaccctcacagccgcaaccgacgccaccggcgcctccgagcctcacctcccgccgcgccggtctcgtcgcactcctcgtggcagcggtggc

SEQ ID NO: 378859 - DNA, 266 bp, Zea mays
gacgcctccagcggcgactccgaggacgagcaggaggtggcggcgcgggacgggccctgaagcgtgagcttgctcgacgacgacgaggactccgacgggtccggcgagtcggaggaggacgagcccctcgcggccatcgtcaccgccgccaagaagaggcgcgcgaggaagctcagcgacgagttcgaccgcatcgccgcggagcagcagcagcagctggtgttggagagcaagcagaagccgggtgccgcgacgccggcgacgac

SEQ ID NO: 378860 - DNA, 251 bp, Zea mays
cggacgcgtggcggatctggggcccttcctcctcaagccatggtattgggcgaggctggcgccgcctcgcgtgcttgagttcgccgagcgcgccgccaggctgctcgagcgaagaggtgagggcaccgagctcgagctcgccatgaatctccacatcgctgctggcatccactgcggactcagccaccaagccctgacattgtagccagtttcttgcaatcagaacgaatgccagttgatacaagtttgtg

SEQ ID NO: 378861 - DNA, 282 bp, Zea mays
ctcgaagttgcagtagacatgaaatagttgaagatgaagagactagatggaagattgaagatgttgtccatcattgttctcgtaggctttttacagacagtgataacattgggaaacatttcttcacatcaaataacaaagattccatgtgtaatgatcctgaacagagcagtggcttggattgtgaaaattttgagtcactaatatctgatgctgtgatggatacagctagaaatggcagtaggtcacctgattgtttcttggaggatattgagacatccc

SEQ ID NO: 378862 - DNA, 265 bp, Zea mays
atattttttccttatctcattggcttcatatggttatacatgattaacatgaacaatggttaaccatcttattagcttatatcacatgctaactctgccttgtactaagaagttgagatcttttatgacttatgggccttatataggttccaaaggaatagtgagtttgtttctatccaaagagttttacagctctctcaccggtagggttatctaacttacaagctaaccacgataatccatcatataaagttaatttaggatt

SEQ ID NO: 378863 - DNA, 258 bp, Zea mays
gagcttcctagctcacccaggtcgccgccgttcgcctccagctcgcaacgccccctgcttttctctctctcccacacggacgcgccttgccaagaaccgtgctgagctcccatcgccgcgcgcccccttctcctccatagccgtgcgagctgagctccctgcacgcgcccgtagccctgcctgcacgaacgcgcgcacggacccagctccaaccttcctcccatggctctcgggcttctccaggtccgaccggagctt

SEQ ID NO: 378864 - DNA, 256 bp, Zea mays
cccacgcgtccgggcatcttctagacttgaactatacagtggacatgttaactgttttcagttaactgttttcagtttctgttcatgttttcagtggacatgttttcagttcatgttttccgttcatgttttcagttcatgtttttagctagacttgatagtgggcatgtttcagttcatgtttcagtttctgttcatgtgatctgtttataaatctgtttataaatcagtttctgtttataaatctgtttataaa

SEQ ID NO: 378865 - DNA, 259 bp, Zea mays
cgtcagcccagtacccaccatccccaccaacggccggccgccgcggcggagcggagcagagagcaaccatggcgtcgaagcagatggaggagatccagcggaagctatccctgctggagtacccgcgggcgaacgcccccgcgcaatccctcctcttcgccggcgtcgagcgctaccgcctcctcgagtggctcttcttccggctcctaggcgacagatcgcccttcacgcagcagaactggcaaggggatagcctgga

SEQ ID NO: 378866 - DNA, 279 bp, Zea mays
cacgttctcgcagctgacgccgccccgttcgcctccgtcgccgccgccatcgccaccgccgaaccatggagaccacggagccgtcgcgtggcaccaagcgccctctcaccgccactgcaggcgatgacgacgatgctggcctggagcgcaagccgcggttccctaaggggaagaaggccaagtaccgcgacgtcggtgcggagggaggcccctctggcaacgctgtggacctcgacagcatgctgaatccggagcttgcggcggacggcgggcgcggca

SEQ ID NO: 378867 - DNA, 273 bp, Zea mays
cgaacacctgaaactcaccgcccgccgatcacgaagcggcggcggcacagcaagatgctatcccgcgcgcagcgcctccaccccgccgttcgccgattcctcctcccaaacacgcctgcaccctcccgtcatcctccgctccctcctcaacacagcgcttccgccaaaacctctaaacccttctcgattctcttccgccgccacctctgctcctcaccaccggcaacgccaccgccaacatcaccgcctccagcggtggtatcttctgacctt

SEQ ID NO: 378868 - DNA, 271 bp, Zea mays
gccctgaaggcgcccgagaaggcggcggggcacaagggcggtcgcaaatggcgtctctggcggactcgtcggccacgtccagggccagcgccggcgagggcagtgcgctggcgtccgagtcttcttcggcgtcggccgactcgttcaactcggtcctcgccgccgtggtccgcgcgccgcccagggatttcctgctcatcaggcaggaatgggccgccgtccgcatccagaccgccttccgcggattcttggtatcgcccgaattccttct

SEQ ID NO: 378869 - DNA, 278 bp, Zea mays
gaaagataaagagtcaattcttgagcccaatacaactaaccatcagtcccctgccaaacgaccgagaaagagtgacaatccatcacgattaccgattatcacaaacaactcagcagcatctgatgtaactgggccaactaataatctacgcttctgccaaaatttagcttgcagggctattctcagggacaatttttgcagacgctgttcatgctgcatttgttttagttacgatgataacaaggacccaagcctctggttgtcgtgtagttcagacc

SEQ ID NO: 378870 - DNA, 127 bp, Zea mays
cggacggtgggctgacttcatgtgaatgaaggttgtaaatgatcagccaagaaccggagattccagtatctggccttctctgttgtcaatatcagatttttttcgcacggatggttggatactgcgc

SEQ ID NO: 378871 - DNA, 249 bp, Zea mays
tgttgtttggtgtccgaaatgtatgtgtgtgtgtgtatgctatgaattcaattatttctggcagaatgtcgcagtctagcgagctggcccatcccattgagaaacattccatcggctgcatgagtgcgccatggacgggagatggatgtgccgaattattggagggaaagggttcactttattcgtgcctagtcatcagtgtcatcagtacggaggttacagcgtatccacgtggtctgccacgtcatg

SEQ ID NO: 378872 - DNA, 254 bp, Zea mays
cagtaccgtccgattccgggtcgccacggtccggcgagcctcaagcagcgaactagcagctcgagtggtgatgtgcatcgccctgtctgcaggcttgctgctcggctctaccatgattctcctgcgcaggtctggggctacatgtacagcaacgaacctgaagtcgtcacgtacattgctaggatgatgccggtcctggcgatttcgtttttcacggatgggctccacagttgtctatcaggagtgctgactgg

SEQ ID NO: 378873 - DNA, 155 bp, Zea mays
ctccgttggaagatgacactagtgtgtaataatctgtattatatcggttgttgttggttcgttgtagtgtattggagcactcttgcgaactcaatcccacatgggaggattcatcttgtacataaattaccgagaaatattggggtttgccattt

SEQ ID NO: 378874 - DNA, 210 bp, Zea mays
tggtctatatgtgacagtctcaagcagaagatgctagtttctcaggacccggagatgaaccaagagatgatgagccatgtcgatgacgaattgaagctgcgtatacgatagttcgttcagtatcttctgagactcggtgagaagagaaccagcagcagcgagaccaggcagagctttctgagcatcgtgaaaagctgttactacgctgct

SEQ ID NO: 378875 - DNA, 227 bp, Zea mays
cccacgcgtccgcgtgatccaatccgtgccctacatctacctcggcagcggctccacggtggaggacctacctgaaccggaccacctccgcgtccgtgttcagcagcggctacaaggccacgtccgactacgtccggcaggccatcccccgggacgtgtgggccaacatattcagcaggctcgcgcacccaacgcggggctcatgattctggacccctacggcgcgc

SEQ ID NO: 378876 - DNA, 263 bp, Zea mays
ggacggtgagaagggcaaggatcttgcggtttgcgatgatggtgaacctgagcctcgcccagtgttgcaacagaagcatggtgccttcggggacagcttgtcggagtgcagtggggtgcacaccgacaacgatttcgtcgaggagttgccatggttgaagtaccacggatacgagtatgatgatagcttggacgatgagatcttggaagaacagagaattggggaacaggaggttgttggagcagagttttctgtggagcaag

SEQ ID NO: 378877 - DNA, 129 bp, Zea mays
gtgtcaggcttcattcgtttattttttttaccctgggattttgtctttgtaaaggggtgtaaacagaagtatatgatatggttaggttctcatacggaatggacgtttgcgactttgcagtctcttacc

SEQ ID NO: 378878 - DNA, 128 bp, Zea mays
gaaagaaagcagtcaggagccattgaaagaaagcaatctgttgagagctctgggacagcagtcacggataacgagctgtcagccgatggacctgggctagagatcaacgatgctgctacaaccaccac

SEQ ID NO: 378879 - DNA, 263 bp, Zea mays
cgagcagagttaggggggttaagttttaggttttaggttgtttatttagggtacatagaagcagaaaggaaaaggttgatgccttttacttagatgtcattaatttggagcactccttttcttgctctatccattttctgtttgtaattttcgttgggcttcggcaaaaaaactaacaaacaagttgtgctccaacttctaatatctgattcaatgtgaaatggaattattcctttaaaaaaaaaagagaggggagaggtggg

SEQ ID NO: 378880 - DNA, 144 bp, Zea mays
gtgccgcactgtgttgtaatgaactatttgtggtcgttggagttgtgtccactacctccagaagccaataactggtcgacgaatcgtgtaacgggtttggatcctagagaaagaagaaaaaaaaagaaaaagaagaagaagaag

SEQ ID NO: 378881 - DNA, 259 bp, Zea mays
cccaaatgtgactttctgaactttgcaaagaatatcaaatgtttgcgctgcgatggagaattccaagagaggtatcagttgttgcatgaagaccgagagcatctgcctctcaaaaagggtgactggatatgcaaaaggtgcaactttttgaattttgctaagaatacaagatgcttgcaatgtcatgagaaaccaacaaaccgtttactcaacccaggagagtgggagtgtgtctcgtgtaactatgtgaacttcaaga

SEQ ID NO: 378882 - DNA, 261 bp, Zea mays
gagactttatcaaggtttatgctaacgggcagaggaaaatttcatgtgatcctgaaacaaaggagcttattaagagaacccttgacattgggcatgtgacctatgaagtccaagtccaactgcctcaggtcagatttttagacatatgggaaccagctgttctagcaataaagagggaaggttacagcattaaatgtaatgggcagcgtggtgttctaatcacagagaagtttcagcaaggaactgctattcatattccat

SEQ ID NO: 378883 - DNA, 261 bp, Zea mays
  unsure (1)..(261): unsure at all n locations
gcaatctggataagtctccgaatatatttagcaaccgagcattcaaaaaacaggcgattagttgattcaaatagaccacaaaaacagcaatcagtcccacctctccagtttctattttttaaatttcctttcgataggattctatttcttatgatcaaccanaggaaaatctttattttctgagggatcctaactttccaaagaaatctgtaaggancattagccaattcacttctaatttgagagcataatgatttaaca

SEQ ID NO: 378884 - DNA, 251 bp, Zea mays
cctaagtgtagcacttttcccctgtttttttttctggaaaattcacgatcctttttctcaaacaagcaagagagttgtgtgtctttatattaaaaagatgaaaaggggcgtaaaaaacccctaacaaaagaaaacaacccaagcatgataactctcttatctgtagttctgtaccatatgacaccagacataactgatacagctcaacaggaccttggaggtgtagcatgcactcatccgtcgagataaaa

SEQ ID NO: 378885 - DNA, 250 bp, Zea mays
gctacagatcgtagatactgctcagttttggtctagagtttagacctcagatcagatgcatagatcattatattcgttgtagctgtataggagaacaagaagttgtttgatgtgtgcgatttgtagtttgtctaaatacgttttggtcgatgtggtgtgtattggtgtttgaatatatgtggctgtgatgattcatttatgtgttacgaggatggttcgtggatggtattaatcgtttgttaaaatactt

SEQ ID NO: 378886 - DNA, 247 bp, Zea mays
actttggagaggtgtatacaattcagcagtactaatattatcacagttatttttcatgccttcaattttttcttgcaacattattttcaaactattaggggcagcttgatagatccacctggaaaaactcatactcaatgtcatgatatttgtctttgtattggttctttgtgaggggttatatataatttgagaaatttcaagatgtgatgattacccggagtcagcaaaaaaggtactgttttca

SEQ ID NO: 378887 - DNA, 163 bp, Zea mays
agacaatacaagtgtattctagttgtctttttcatagtgggtcagtgaaaaaaagtgttttgaaccattgttccttgacccatatgttcgacgcacacaatttgccaagaactatctgcacatatggttttgtaaaaaaaaaaaggaggaaggaaagaaagaa

SEQ ID NO: 378888 - DNA, 186 bp, Zea mays
caaaaagaagcacataaaagtttcttcaaacatgctatgaaatttggtatcttattgttaaaccttgctttacctgctagtgtttatgcgcaaaattagaacttactgcctaatgtttatgattttaagattataatatttttgtcaatatgtgccaaaataaggtaacgttcatcctgaatcagc

SEQ ID NO: 378889 - DNA, 272 bp, Zea mays
atttccgacgcttcaagcagcgatcgcgaccgctgcaaacgaagccctggagcgattccgggaggacgggcgcacacggcgcttcgtctggtggacatggaggctgcgtacgtgacggtggagttcttccggaagctccctcaggatcctcctgctgatgcgcctgctagcaaggctggaggcaagccttcagcggagccggcggctgcgcgcctcctgaccgctacggtgacgggcacttcaggagcatcgcctccaacgtgtcccagtac

SEQ ID NO: 378890 - DNA, 266 bp, Zea mays
ggatgaaagaagttaaaataaagtcgaaatttttgaaatgaagctctctaaataagcccttaattgcaaagtttattgtcgtgttggctttggagagcttcttaatttcaaagagttggatttaaaaaatcatttatacgttacgtctgattatttaacatatttgaatctggttgttttgattcacatgaaatctctcttcgcaagcaaacagaactaacatgagactgtattttcttttttctttcttacatgaaagtgtattg

SEQ ID NO: 378891 - DNA, 256 bp, Zea mays
  unsure (1)..(256): unsure at all n locations
gagacgcgtggttcacggcttcaccttcgcaacttctagaagcttctttctaggctacctcgctcaccgtcccatgggcaacggcctctccccttgtctgtgccccagagccgagcgcggcgagacggcgcggctggtgttctggggtgggtcggcgaggatggccgacgagcggctgtccatcaccgccgntgacgtcactgcgcactctccgaccagcacctcgtctgcggcgcggactccttcttcatcggcc

SEQ ID NO: 378892 - DNA, 197 bp, Zea mays
cagatggataagctgcctaatacatgtggtttgtctgggaattgaaattctggaacgcgagccagccaatccgcaattgcacggtcagaatatctggccgtgctgcccccgttgaagtctgcggcaacctcacacacaccatcaagtgcgcttgagcctcaagtcccaacatagttgtaacttgtaacatgaataca

SEQ ID NO: 378893 - DNA, 170 bp, Zea mays
tgataaaccaaaggagtccagtgaaaaaaatattgacgatttaattgatgaggacctgaaagaaataggggacaggaaaaagaggctctttgcaagcctcgagacaggctgcaatggatgcatattcattcaaatgcataaaagagcaggagaccctggtccagttgaga

SEQ ID NO: 378894 - DNA, 147 bp, Zea mays
accgtgcccaaggacaacgaccgcaaggcctacggcaggcttatcaccatcaccaattaattagttattaatcatatatatgatgtcattatatatgtaagcggcatgtgtatcgttatcatcaccgaataaaaaaatgattatgcc

SEQ ID NO: 378895 - DNA, 261 bp, Zea mays
gcctgttactaaactgacaccaatggcgatgagttccgtggccaccgcattccttgtttccagtaatctccgaaacgacgagtgttccatcattccgatttggcgtgtttttaactggcaatgttgatggccatccacaggtcatggactacgagtcacttccgcacttctgcaagagagaagggtcaggttcatccagcgactcgctggatggagtagattgctactcctacgaccaccctttccaccagcagctgtaca

SEQ ID NO: 378896 - DNA, 263 bp, Zea mays
ctcggcctcctgcgacctccatggctggcaaagctgctgcagacactgggagcaacgaccgagtcgttgaggttgaggggtcctcctcctcctccatggcggacgtgtacaaaggcgagctcacgccgctgcagaggcacgtctccttcttcgaccgcaacaaggacggcgtcatctacccctccgagacataccaagggttccgagctatcgggtgtggcgtcgccctgtctgctgctgctgccgtcttcgtcaacggtgga

SEQ ID NO: 378897 - DNA, 263 bp, Zea mays
gcaatctatcatagattccgagcagatgaggcagaacatatctactaatgcaaatgctattggcaattttctagaggtgatgttttcagaagctgaacaagttctaaatgatgttctgaaatctacttcggatctcaaggaactattagccttttctgcagaactacaaaacactggattgagaaggaatcttgcttctgttcaagcaatgtcaaagcaatcaaatgatttctttgaagatataaggatacatgtgtctcagc

SEQ ID NO: 378898 - DNA, 263 bp, Zea mays
cccacctggatacccgtctacaacggcaggacgagcgaggacagggtcgcggcggcgaggcaggtcgtggccgtgctggagaagtttgagcgggcgttcgatgagtgctccgggggcaaggcgttcttcggcggggacgctgctggcctcgtggacgtcgtgctaggcggcttcctcgggtggctgcgcgcgtctgaggtgatgtgtggcgtgagggtcatcgaccccgccaagacgccgctgctggcggcgtgggcggaccg

SEQ ID NO: 378899 - DNA, 259 bp, Zea mays
acgacgtcagcaaggcgaccgggaagtcccgttcccccattattagtgtgatgacaaccaaagatagtggcagcagcttttctgtttttagcaagttgaaggcgctcatcagggacaaattcctggtgaagaagctgccttcatcgtgccagaggtccttgttaggcagcaaagaaacagcggcagtgagcgagctgctgcagatggtggtgtcgtcgctcctcttaacaccaacggaggtgacaggccccacgacgat

SEQ ID NO: 378900 - DNA, 186 bp, Zea mays
gccgctcagaacggcgacgcgtcgtcgtcgccgccgcccgctgctgcgcccgtgttcccgatgtcggtgtctccgtacgtgttctgtagaagtcggacacgtcgggcggtatcggctcgctcaggcaccacccgatcctgctcttcttcctgacgccgcatgtagggcccgcctactgcgcggcgc

SEQ ID NO: 378901 - DNA, 255 bp, Zea mays
atcaaattgatttactgtgatatcagcatcagtcttcttccttcggatcctttttgtttttttctctaaaccaccaataggccttgctgaacctcgtatttctttcgccttgggtttcatgcctgttgctgtaggtctaccattcttcttgttttgtttgtcatctaacaaaatagtttgaacttataattagagacagtcaacttgaaggatcatagttgtgtgatagaaagtatgtaccttgcggtatacacg

SEQ ID NO: 378902 - DNA, 177 bp, Zea mays
ggttgcagcaatattctttgatttcacacatagttcctgcacactttaccgttcctgcctgccccctttgggcagggcgcataccttttgtgccgaattatttacgagcccctgcaattgtatgatgaatgaacaatgaatgatacagattaataagattaattaacttatctcttg

SEQ ID NO: 378903 - DNA, 152 bp, Zea mays
gttgaaatctttgaacatcatcgccatcatcaagagactgggaaaatttgccagacctgcaggacaacagttctggcaaattttcccagtctcttgatgatggagagttgaaatctttgaacaatgatacatgattgttgcattttactggt

SEQ ID NO: 378904 - DNA, 249 bp, Zea mays
gcaataaatgattcaactgacatcattactgggtcgttcttaagaaaaaaaatgtggaatcgtaggcgcgccaaaggaacaaaactattgctctgaaggttgcaaaaattgtatgtttgtagcaacatctcttttagttggcaattcatgtgtttttatatttcgaaaaggaatgggtggtgaatgacagcttagatattccttcaggtaatgtgtacatagattcaaagtatgtaacttcagcagaaa

SEQ ID NO: 378905 - DNA, 187 bp, Zea mays
gtaacttagattgttcaagtgctgaacctgtggaagttgtgccaaaatttgttgtcgaacggatgaactattgtcgtaatgttatgccagcagcagatcttaatttgccccgttacatcgatgtctgattgcagtatcttcaaattgaaaggagttccgtttggtatgaatgtgtaatgttctacgc

SEQ ID NO: 378906 - DNA, 190 bp, Zea mays
gactagttctagatcgcgagcggccaccctttttttttttttttttttttaatgtactatattgtactgtctactgtgataccatcgaaatactagcttaacaatcttgttgtgtcttgtgttggttgagttcctgttctttctgtctatctattctcacgcatggcagtttgggtatggtatgggtcgt

SEQ ID NO: 378907 - DNA, 171 bp, Zea mays
agcaccaataaacatgcgatcgattgagttgtgtgtgcttctccattcattcacttgctctttctgcagctcgtgatcgagttgtgtgtgctccattcccaaattatgtatgatcgattagtagcgttaggggttaaccagtagccgctgtgtacttgtgtcacccttgga

SEQ ID NO: 378908 - DNA, 261 bp, Zea mays
ataggttgatgcatgtaggctcttcgctgtgatactggcctgtttttcaattgaaaaaggcctgtttttgtatgcgacacagcaaaatttctaatgtttatatgctggcattttaataagtacaggctgatttctggacgtaaaatcgatgaattctgttacttgcttccactcttcattcaagttctgcttgaaacttgtggttgctgtctgttccgtcgcttgatctccaggctgtgtttttaggatgctattaaacca

SEQ ID NO: 378909 - DNA, 259 bp, Zea mays
atcaaccacaggataattagccttgtggaaaaatggaaccactcagaaggaaccccacaggtacctttttttaaacatctgttatattgctttcgaacatctgttatctttttttttaaaaaaaaatgttaccttataaattactgtaacatataattagctctgttcgtcagttgtgctaccctagttggatattgctcaaataggacaaaaccgttgaataagatttgatacacgaagccatcaactgcagtggcca

SEQ ID NO: 378910 - DNA, 262 bp, Zea mays
actccaactgctcgaagaagcacttgcatctcgtaataatcataccatattgtcccttagatcggtcgaccatggcagcagcagcagccacgagactcagcggcggcggcgtcgccctcttgctcctggtgctgctggccgccggcacctccacctcgtcggcgcagtctccaccggcttctactcgcactcgtgccccggcgtgcacgacgccgtcaggtcggtgctgcaggccgccatcgccagggagcagcgcatggga

SEQ ID NO: 378911 - DNA, 263 bp, Zea mays
atgcggcgctacgggcagtcgctgtaccacccgcagagcccgatgacgcggtgcgtcaacttcctgtgcgcggtgctgctcacgctgatcctcatcaccggcgtcatcctgttcgtgctgtggttgagcctccgtccgcaccggcccaagttctacctcgccgacttctccatccccgtcgccaacgccaaccggcagtccggcctggccaacctgccggtgcgcttcaccgtcaacgagcacaaccccaaccaggagatcgg

SEQ ID NO: 378912 - DNA, 137 bp, Zea mays
gtagccggagcagtagcaactttgttgaaaaatacattcatgctgtggcgtttttcttattcaatcgtaggtccttatactgctacagtgtaaatcatcattgcaatataatcaaggtttttcttttcgtcgctgtc

SEQ ID NO: 378913 - DNA, 251 bp, Zea mays
ggacgtggccgtctcgggcgtcttcaccgtccagcaagagcaaccaccagacgaagacggtggtggtggtgctgattcttcaaccgtcgacgcgtcggacggagctgatgtcgtctacaggctgacggcagcctcccgcttcctcgtcagcgatacgacgaggcgagcacggcgaccttggctccctttgcgaggctggcgctccaccctatcgccatctccccgcacgccgtgggcatctgcgcgtggtt

SEQ ID NO: 378914 - DNA, 240 bp, Zea mays
gcgatctggattgctgcgggcggaggggaacatttatgctcgccctgtttgtcctaggctatcggttccagtgctgctgacctctcttttggctgtataagagaggattacgcaccgtttcattttatttatactacttatatctgttattcttttaccatatgtgttctttgccatgatccccgtctatggtttgcctaagcaactttagtgaggggcagcatttgataatggcacttg

SEQ ID NO: 378915 - DNA, 274 bp, Zea mays
aattataattgtttcattcaggacgcccgtctccacgtagcctggaaggttcacgaggttcattgagccgttgagcgtgtaactgccgtgaaggttcccgaagcatctggaacacgtgggcacgccactgggcgtgtgcgctgaccctgacggcaccaaaaggagaaagaggaagcgagcccccaggaaagcggtcagaattggagtgcaagcgacgcgtcgagccccatccccttcccgcgcctcgccgagagatctgcaccgtcgtcggcac

SEQ ID NO: 378916 - DNA, 260 bp, Zea mays
ccatcgccttcttcgtggcccgcgacatcaggaaacggcgccgcgtcgcgcgcggggccactggaagatgacgcctttcgtcgtggatcttggtttcggggaggagtccatactccggggcctgacggaggccaacatcgtcggccgcggcggttccggccgcgtgtaccgcgtcaccttcaccaaccggctcaacggggccgcagcgcggtggccgtgaagcagatacggaccgccgggaaactggacgggaagctgga

SEQ ID NO: 378917 - DNA, 262 bp, Zea mays
caccttttctagcataatgtggaggataagtggatccaacatatgtatgaatttcacaaatataagtactatctgttccaaagtaaagttcaaataaatgtaccatcaagacatatttcatgataactgaatgggactgatttgatgctgtagatgttggcacattttttctaacttggtcaaagttaaagaagcttgactaagaacatagataaagtgagctataatttgtaatgaagggagtaggtcaagcttagtgcat

SEQ ID NO: 378918 - DNA, 179 bp, Zea mays
aaagggaaaggtgtatcgtctatacatggatccatgccgaggaaggagttcgtcaaggaggggctccattgctgctggagctggacatggtcactttgatgcagacgacgatgcagcagcactagttcctcctccttaccgcctgttcccggagccggaggagacggccgcccgagaca

SEQ ID NO: 378919 - DNA, 255 bp, Zea mays
atagtattcacttatctttcagacggtctgtagtaggaatgtgcatttggtatagttcttgtctgaagtcattgtggtgcgcggacggtccgctggaaggaaccgaacggtccgaagccaagtggtattttcaaaaagagctcccggacagcccgcactagagcctcggactgtccatgatgtgttgtttttaagggttgatcttcttgaagaatgttttgagtacctgattcataacttagcaaactagttagt

SEQ ID NO: 378920 - DNA, 256 bp, Zea mays
gtgaccagttgcgcggcggacatttggccttgagcttcaagccattgatctgattcaaagcttgctccaccctcaaaaaaaggaccagagtttgtcaactcaaatagctggtggcttgagcagagcttctggcacgagttctcttgaaccatatttccacataagctttataggatgcatcactcttttgatgtcacttagtttcaagtataaaatgaagctgtctttgtacaaagctgcaaatgagaagtaaatg

SEQ ID NO: 378921 - DNA, 256 bp, Zea mays
atgtcgttcactccggcaacgacaggtcagtagtggttttgtcttttcgatccaccattgagactgataacaagatcattcaccagctcatttgtctgtctttctttccagtggttcttcagtggctggtttggaggaaatacttcgagtggcgcatctgggcgtccttggtgcccatcgagggaggaatccttgtcacctccgtgacggagctgagcttcaacacggctggcttctgcgccgcgctggaggggtg

SEQ ID NO: 378922 - DNA, 101 bp, Zea mays
gctgaactctccagctatggtcacagatttctgtatgtctcttatgtataagctatggtaataatgttatgctacatggtatgggcttgtgaaccgagact

SEQ ID NO: 378923 - DNA, 257 bp, Zea mays
caccccaataccgccttccacctggtcgctctccccagccgaccctaccctcgccaccgccgcttcctacctcgcggcctcgcttgcctcctgctcctccctcccgcatctccgcgcccttctcaccacctttatcaccactctgtcacaatcactcgcactcccaaccccgccggcggccctccccgccgccatccgcgctgtcgccccttacttccccgccgcaatcgcctcccttgtagcctccaaggcggtaa

SEQ ID NO: 378924 - DNA, 258 bp, Zea mays
acagcgttgagaggcgccgcgacgctgaaggcgagggctctcaaggaggtgtggaacatcgcggcggtgatcccggtggagaagggcccgggcccggtcggcggaggaggaggaggccaccaccaccaacaccaccagaagcacggcgcgcccaagcagcagctgcaccgcaagatggatagcgacggcagcagcgtcacgatcctctcgctggaggaggagaacagcttccttggcatctgcagccaggagctgctt

SEQ ID NO: 378925 - DNA, 159 bp, Zea mays
aaaattcattattatctccaaaacaattgtccaaccccccaaagataaattgtcattgttgtgatggcatggggtttctgctagtctttacaacccactcgcttgttttcccaggtgctggagaagatcaacaacccacactatttataccgcatgacg

SEQ ID NO: 378926 - DNA, 265 bp, Zea mays
ctgcattgttgaaattgtgtgctttcgcgtcatttgttgctggtcgcattgtgttttttctcaccatccttctttcttccttgtttttctccttcggttacatcaaaccctagcgcgccgcaaccatcttccttatttttctccttcggttacatcaaaccctagcgcgccgcaaccatcttccttgtttctctccttcggttacatcaaaccgagtcaacgccgcttccttatttttctccttcggttacgtcaaaaaaaacaa

SEQ ID NO: 378927 - DNA, 265 bp, Zea mays
agcttggtttcactctcatcagatgagaactacttcttaggaagctccatggatggatctatcaaactcttcgatcttcgcctcattcagaagggaggtatacagtcgtatggggggcatgtcaactcacacacacatttaccacttgctgttgatccatctgagaccttacttatgtcaggtggggaggactgcactgttcgcatctggagcatcaaaacaggcgagctaatctttgcgcggacatgggagacagtcccttcac

SEQ ID NO: 378928 - DNA, 142 bp, Zea mays
accaaatccgtgctctatggttgggagacacatgtttttatgggtacaattgttgtattggtgcttggcgagcaaacatggcaatcgttttgctgaattcaatgttgacacctatgttttgcttaatacgatttgaactttg

SEQ ID NO: 378929 - DNA, 204 bp, Zea mays
aaccgcgggacgtggcggacgcgtggcggaccgtggcggaccgtgggtgaatggaagctatatattccagagcagtatgcaaatgcaagtgttttggatcgattcgacccacttttgttttttaggctgtaaaaaaactgtgtcctagaatccaaggattcttatggtaatgagtatgactttgtggaagaaaaacgtttactc

SEQ ID NO: 378930 - DNA, 214 bp, Zea mays
acgtaacatgcgccgtcgtcgacgcgcacgaagctgctcagagaaaagtgctggaagcagagggtgtgcaagttcgaagcacagccacacagagcaggggccgcggttgcgcagcgcccacgtgcgccgttggacagcaactagcatatatagctagagctagctcgatcgatctgctgtgcttacaccaccagtccaccgcttctcttgcttc

SEQ ID NO: 378931 - DNA, 276 bp, Zea mays
agcgatccgcgaccctttattttattatattttttttattttatttttgttttgttttttttgttttttttttttttttgttttttttttttaggcagcagtgcaagctcactgaattaacatgttcatcggataaacaacttcggcaatgaagagtcttagcaattacagttcccaaaattttaaattgcaatttttcagaaccctcggcagccaactttttgttttcatgtaacaaaattaggtccctaacaaaacgaaggagctagcatcaca

SEQ ID NO: 378932 - DNA, 259 bp, Zea mays
ggatgatgcttcttcaactgtgtattatgatggtttgcatagctctactcgataatatatttttcatcaattgcttgttgtttatgcagatcaggaaaatcagtgagtgagaatccacttctgacacatcttgtttttgttgttttataggttaaggctggagacttattacgaaaatatccagtccttgttatcaatatatgatgacattattgtcaaagtaggcaccatctcttttaaagcatatgctccatcactt

SEQ ID NO: 378933 - DNA, 261 bp, Zea mays
gctgctgatctgttctctctgtgtgtatgagatgatgctcgtttacatatgtatctggttggttgtactttcggtattgtaatgttattatatcaataagtgttatgtaatctcctacgtttgagtgtttattcgatgattcattttttgtatacggttaacaagttactccatgaaaacatttctcatggagttcagttcgaaaaaaaaaacaaatcaagctaaaaaaaaaagaaaaatgagtagaaaaaaaaaaaaaga

SEQ ID NO: 378934 - DNA, 252 bp, Zea mays
ggcacttgatgctcttaaagaactttccatgaggaagtgtatggaggaaatggaagcaataggtggattcacagaagaggagaagtcatatgccgtggaggtctttgagtctgggattaatagagaggctttcatgtcaacaatgaaccacaatgttcaaagaatgtggctaaagcgcaaaatcaggtatgtccatagttaagcatataacaaaacatagctttatgattttcgtttcagcttacatgagca

SEQ ID NO: 378935 - DNA, 122 bp, Zea mays
aaaacgtattactgctacttgtacattgttaggctatttccagcggggatttcgtccgagtttcaatctcgattaaatgtgttgccacataagaaaatatgataatatggcaataatttaat

SEQ ID NO: 378936 - DNA, 254 bp, Zea mays
aacaaagataagtaattttttagcaataaaatttatcaagtgtttgatgcgttcatggcgaaacatgtgttttgattgatgtgaattttggatctaatttttggaattaatcttgtgaagagaatctcatttgttcaaataataatgaattattaaaataataaatttggtaagtatgtattttgatttgttcataataaacttgagtttatcctaattgtggaatatatatatatatatgtatattttgcaaa

SEQ ID NO: 378937 - DNA, 248 bp, Zea mays
gggtctgatgacaattttataaacatgtttattgctgatggcaaatatcaaaatctctcgattggatgtgtcactccttaaggaactccttagctcaagctgctgattagcactagagatggcaatagagatggcaacggataaataccttatgggtattgtcatcccatactggtatccaagaataaaacttgtgcttgcagttgggtacaaaatcatgttcgtattcgtgtccatgatgcagataa

SEQ ID NO: 378938 - DNA, 263 bp, Zea mays
ggggctgtcattctcggtgacagcttcctcgacaatctacccacagcatggtttatttatttgtttatttgtgttggcaccatcgtcatcttggtgtctctgtttggctgcattggagcagggacaagaaacacctgctgtttgtgtttctatgctttcttggtcatattgttgatccttgctgaagctgcagctgctgcattcattttctttgaccatggctggaaagatgtaattccagtggacaaaacacataactttga

SEQ ID NO: 378939 - DNA, 161 bp, Zea mays
gttggttaatattattaggacaatattgagggagcgccgaaagtcaactgtctgtatttccaactgattattttgctgttcgatactcaactcccgttcacttggcagcacaatggcatatctgatatttctaatgttgaattacctttacggctttactt

SEQ ID NO: 378940 - DNA, 184 bp, Zea mays
gcaaggtgttaacccgattgcatcacaaggtggggaagcaatagctgtcatgatctgggagagagcagtccatctaaatgtatcaaaggctttagcaaagtctagtttgatcaccaaagctggttgtttgcatttggtacaggtctggatcagctcaagggcttaggcgaagttttccgaaatg

SEQ ID NO: 378941 - DNA, 261 bp, Zea mays
ggccggggaaagaagagactgaacagagtgttcgacgccattggctttgtttaccccgactaccgctacccgctgcgtggacagggcaaaaagagaaaagctgctacttcggccaccccagatgagcatgtgccaaagggaaaaaagttgaaggttctgactcaccggccgcgttacatcgaaccggccgtgatacctgaatttggcgaaggggcctcttcggctgccaaagcaaaagaaactgttgctcctgcgtagata

SEQ ID NO: 378942 - DNA, 254 bp, Zea mays
ccccaagtttcttagggtttaatgttgtgccactcaaattttttgttgactgaatgcccgtgcaaaagttgttactacatttttttgtattgggtgctgcatgaagctagctatagcatagtttctttaagtagttgtcatgatcctggtattatttttcttgttcatgtttttttcaggcaatgtatgaaggcatacttgttgacttgccatttgcaacgttcttcttgagcaaggtgagacaaaaatacaat

SEQ ID NO: 378943 - DNA, 256 bp, Zea mays
caacaataaaaggatctgcaactttcttctctccatatagcttcttctcctcactgagcttcttctccttagccatcttttcctcggtcatcgtcttctcctcagacatggagcaagcacgtctttaaaccgaagctcaaaaatcaagcaagagctggtaagcaagagttaaaaatttgagaaaataacgcaaacagcagaaatggcgcatcaaatgctgccgctgtgggttcctatttatacgcctagtgctttg

SEQ ID NO: 378944 - DNA, 279 bp, Zea mays
gcttctcataactcatcatacctggtgaaactattgctaactttaattaaacaaattagtagcttctacagtaattgaactgcgtgatggacctgtctgcaattaggatgtggtgtgtacatcacataccatggagcgttattgtaaccttttttaagaattttgattacaccaacacaaaaaatattcgcatttaatggatgctcataggtcattcagttttcgatcgtataagcgagatgctcagcaaatgtgttgtggttattacgatacacaatg

SEQ ID NO: 378945 - DNA, 262 bp, Zea mays
  unsure (1)..(262): unsure at all n locations
ggaaacagtagttgcaagtcctgccgagcagcctgatgaagactatgagtcacataccggtcttgactcactggatttgcctgaagtcccaaaagctgcaattcgtccaccttctgacgcaccattgaccccagatatttgcccacatgttcagggctctcagtcacttcctcatgagttctcagatcctggtactctgangagaatccaacagctggtggtgctttcaatgttattcagatgacaagcttggagcatcttg

SEQ ID NO: 378946 - DNA, 263 bp, Zea mays
ctcatgtgtgttgccttccaatcagtaatagtaatcagcaattgtctgccatatctcctacaagtatattttccagttctattgttttctcttgatgttccagcaacatatcacattcaggtaatcgctctgcatttcaattcatgtgtacctgttatttcaattcagaggaccagaggttgagagggggccatagtggtttcaggccacttctctactatcgaccaatcagaggttatattcaagtaattgttcatatgtgg

SEQ ID NO: 378947 - DNA, 132 bp, Zea mays
aaccaaccacctgactcgatctctcatcactcgcaagtccagctatcaccaaccagacagagctcggctgcaacctccaacgcaaggagacagatacgttcgcagatggcgggtgcagcgagggcgtcgtgg

SEQ ID NO: 378948 - DNA, 136 bp, Zea mays
gaagggcgcgtattgggaggcgagctcaagcgatggccgtcgtgcaccccctactaattcggggggaaaggtagaaaaggaactaggtattatatggcctacacatatcacaagaaggccagattcagatttcaag

SEQ ID NO: 378949 - DNA, 135 bp, Zea mays
aaagcgtcgaacagtgtgccgatgataatcagagacataaggacagcacatgattagctcttaacatgtttggcttccgaactggcttttctcgagatccccaaggaagaagaagatccggtcagatatgtgtcg

SEQ ID NO: 378950 - DNA, 273 bp, Zea mays
cttgaatggacccgttaaggccgagccaactgccggtggcattgccaaggtacatagtatctgccagttcgtctaatttcctgtctgtccgctgggctgttgtgtatatatgatcccctttctctccaccaattcctacacagggaaaatcgagttctttgacaagacgttttgtttatcctttgacagggaaaccgagttctcgacacgatgtccgccgggtggacggacgagagacacatgctgtatataagctccatggaggcttctttc

SEQ ID NO: 378951 - DNA, 129 bp, Zea mays
cgcgcccactgacaccatacgcacacgggtgggccgaagcgacgttctccgtcaattacgtgtcgagctaatcttattattgtttctattattataataatgcttctccctgttcctatggacctatag

SEQ ID NO: 378952 - DNA, 155 bp, Zea mays
tccactcctcctgcagctcctcctcgcacagcacgtctcctctccccagcctccctctctttctctgtccttggtcctctccccagcagcgtccgtctctctttctctatccctggtcctctccagatacattgacacagtggtcacgcttgaca

SEQ ID NO: 378953 - DNA, 114 bp, Zea mays
gttggagaatacaatacatgtactgatgcaagacagcaagagtacagaggttatggagatgatagacatcattacagggttgttcataagacccaggacaccatcacagaggac

SEQ ID NO: 378954 - DNA, 254 bp, Zea mays
agttgtatgggtttgttcttttttctataatgatacacaactgtcttttcgattctaggtacgtctatccagtcatagaaaagctcaccgaacagatattgaaatatatggagattgctaacataatcgataaataaaacaagtataaaaataaaagatttatatgcatcatatcagcaatcacatgttacgggtaagagagagtaattctatgcagataacatccatggatgctgctacaagggggggaacaa

SEQ ID NO: 378955 - DNA, 254 bp, Zea mays
gtacatgactgcattctgtcacctcgctcccagtgtgtgtgtatatatatcgtcctccgacactattgtatctgcagttccttcggttgctaacatctctagccgagacatttgacttgaacaatctgctcatctaccactccggcactcccacgccgggccgcgcggatcgcatcgagtttgagtggagtaggcggcgggcagcgaatcagcgatgaaggtgcagtgcgacgtgtgcgcggccgaggcggcct

SEQ ID NO: 378956 - DNA, 155 bp, Zea mays
ccccgatgcattggcagccctcgtccgcgagctctcctctgctgctcccccaacctccgccgcggcttcctctaccgtgagcaacggcgccgcggggccggcctcggcaattgcgcgcacgttctcctccggccttcgccgtcgctagggtgctg

SEQ ID NO: 378957 - DNA, 275 bp, Zea mays
tgagtcgctggcgttcgctcgattatgatctcggcgccgctggtcctgctgaggtctcctaggtctatgattgcggcccgctctcgcgccattcttctgtccctgcgtctcacgcagtcggtgcctatgccattgcccgtgtccatatttatcatcatgatgttgtcgactatgacgtattaccagatttaggtcgtcctctataagcgtctcagcatcactgtcgactccatacaagctcgctaatatgtattcgatactttcccaatttacac

SEQ ID NO: 378958 - DNA, 271 bp, Zea mays
ctccggttgtgcatggatgctacagccttcggtgcgtctgaaaatagatcatgtcgtcattacccaggtcttggtctggtttgtatataccaccatccttatacctggttatgtgataagtcataagtgacaaaaaaactgctcatcatcactttttccaccaaagataatcagaaacaatcagaatgaccgacaaagcatgcttatgtccatttgaaacttactattttcgcataaggcatactcggttcctcaggaaccatgcttggaa

SEQ ID NO: 378959 - DNA, 248 bp, Zea mays
gtctgctgtagtttctaattttctagatgtgctttcggtttggtctgtagaccctgcagcttgatttggttaagtttgatttgatgcaagggaaatgggtggcggttgattgctaataattcccgttgatattaacaacaaaattcaaagttgaaaaaaaaataaaaaaaataataaaaaaaaagagaagatatataaaataaaaaaaggggcggccgcctaaaaggttccaggtttaggtaggcggg

SEQ ID NO: 378960 - DNA, 256 bp, Zea mays
accaatcaaaagataacacagtataggaacataggaatagttctttctttttctttttctcttctttttattgactgtaaaagtaccagatcctaacctttacttttcgctttctaataaaatgcgcagtaggggttcccctcctgatccttaaaaaaaaagagttagcgtttgtttgactgctcgtgaattgtgtgttttaacctgctcgtgagtgtgctgtgcacgcagcaccaagtcgatgaggagtgacggc

SEQ ID NO: 378961 - DNA, 238 bp, Zea mays
atacgtacctatatagttgatccaggagacacgtacgtgagaaacaaataaactaaactagcacacaaatgatgaaatgaataagttattatgaataacttgtgcaagaacacattacattattgttcttctagcttcaaggttgggaattgaattctgtgaaataatgatatgagatacgttgtgtaccaaaaaaaaaggagaataaatagaaagaaaaaaatgattaaagaggagg

SEQ ID NO: 378962 - DNA, 106 bp, Zea mays
cggagaacttcaacgagggcgggcagcgcaactggattccacgtcctagcaattagcccattggcaattgaactggttgtgaaattggccctaatacctgaagggc

SEQ ID NO: 378963 - DNA, 231 bp, Zea mays
actagttctagatcgcaagcagccgcccttttatttttttatgttatttttgttattgtttttattgaaagattgactagtgtacccagcatccgatatcaaatttacaacattgcacacacagacaccacctaggctaaagggagagcaaacatctagcgtaatacgagaaccaaaccctacatttctccgacgcctacccctcctctacttcttcgccttccgagacgg

SEQ ID NO: 378964 - DNA, 232 bp, Zea mays
acatagaaaagtggattagggtgaacgtatgtttaaattctaactatatccacttctcacacatatggattgctaaacatgcccttaaaaaaaaaaaaaaaaaaaaaaaaaaaaaaaaaaaaaaaaaaaaaaaaaaaaaaaaaaaaaaaaaaaaaaaaaaaaaaaaaaaaaaaaaagaaaaaaaaaaaaaaagggggggcccatatggaggtccaagcattagggaggcggg

SEQ ID NO: 378965 - DNA, 230 bp, Zea mays
atcatatacagagactacgtagacgtcagtgttgctgttggcacttccaaggtgccatattgcttactccctgacccaaaaagaatgcaaccatgggttgcgttgcgtgcccgttaaactagttcacatttgatcaagtttctagtgtagtattcacgttcaaggctccaaatcaatttattatgaaaatagatttcgtagctaactaattgtatttatttgatgtttta

SEQ ID NO: 378966 - DNA, 262 bp, Zea mays
ggacgtgattattggttgctatgaagagtttaaggtctggtacacttttttcatcttttgacctgaagtcaccttcccttgtgtggtatccaaaatcacttgtagactgtatttgccagagcaagaaaataagccgaggtgaactagtgaagaagctgaggcatgtagttggtgatagagtgctaatatcgacgataatgcgtctccaagataaggtgtgaattgttctgcttgaaccttgctgatacagttatcttggatt

SEQ ID NO: 378967 - DNA, 130 bp, Zea mays
tgtgctttcacgtcatttgttgctgattgcactgtgttcttttcaccatccttctttcttccagcattcaaaccctagcgcgccgccaccatctcccgtttgatcacgccacaaaccgagtcaaagccgc

SEQ ID NO: 378968 - DNA, 208 bp, Zea mays
gtcggctcttgctgatcttgttggctttctgcctctcactaagatcaaggtccttgcgagcagtgcggtgttctacaccccgttcttgagacagatttggacatggcttggcttggtacctgcgacaaggaagaatttctactgctaccttggagctggttatagttgtatcgtagtccctggtggtgtacgggaaatgcttcatatg

SEQ ID NO: 378969 - DNA, 254 bp, Zea mays
tgtctttctttaactttattaagaactcctaaaaaactcgacccttgtattaataactccatcttagctgtgtgtcttgaactaaatggattttcttcccaagtggaaacaaaaagggatcttatggatggaccttaaagaagtatgtgtttctatcttaagataacagatgatgcatggatgatccttaaatatgtgctaatgcaatatcagatgatacaaggaagaaccttgaaagtagtatgtgtttctac

SEQ ID NO: 378970 - DNA, 258 bp, Zea mays
gtcgaacaagaagcacctaagctggggcgtgctccaagggccccctcctcaccatggatgcccttttcgatgctttttgctgctatttccacgaaagtgcctcgttcggacatggagttggtcatcagatactatgaagaattcaaggttgtaggtgtccttttcctctcttttgaggtctccgtctgaatgcgttcagcgatatgcatgctaaccatgtttggtggacttcttgattttgaaacagaggaagaggat

SEQ ID NO: 378971 - DNA, 262 bp, Zea mays
cctgcaagtccggcggcaccagcaggtgttgcagccgccggcgctggccttggtggtcggcgcacgaggatgccgctggcggcggcggtctccacttcagggtacaaattgcagcagtcgcatgggcacccgcagtcaggggggcagttgcaagtgcggcggcaccagctgcaactgcaactgcagctgagccggcccaatggtggcgcacgagaggacgacgacgacgaggcgtagtatatatgtatgtagcagcgtctaa

SEQ ID NO: 378972 - DNA, 260 bp, Zea mays
cgaataaaagccctccccgttgcgcgaccctttctctctccacggctgtcgtccagcattctcaccatgctcgttccacggatgcgtgatcaccagcagctttatccgtgagttgtatactctttatctgcacacgttttgggcgcgttatatatattattattattcccctagcccctccattattctggagtccacgttctggaagttgacctttcacgtgtttctttttgtaatcattaaaaatcaatttgttcaga

SEQ ID NO: 378973 - DNA, 250 bp, Zea mays
gagagaggctgtgcactggactcagcctgacaaacaggaacaagggcgggcagggcacccagacccagcaaggccaaactgccgccggtagccgacacagatctgaggcgagcccggtccagcggggccgcgcaccgcacggagatctgtgactgtgagcttggagtgcaagggagccagccgccagcgatgaagaggccgatgccgagctggatggaaccaaaaggcattgcgttgcgtcctctcatct

SEQ ID NO: 378974 - DNA, 130 bp, Zea mays
ccaggcacccgctccgacggctcaaccgcacgactgcgtcccgttcatcgacgagatcttcgccagcggggatgaggcgaactcgaggccctcccgtcgccgaggctgatgaacacgcacctgccctacg

SEQ ID NO: 378975 - DNA, 173 bp, Zea mays
aaaagtcgagaccagaaaaaagaagacagagatattaaataacacagttaacacatgatagcccattttaacagtaataacatattttgcataaattttactctagcctagaggctaatgagtaatgacctcattacatttacaaaagagggagcgtgttctgaatacaaaag

SEQ ID NO: 378976 - DNA, 256 bp, Zea mays
aacaccgtgaagacgaaaagctcacaaacgagctagagctcgcgtgtgtgctcctccccctccccgaaaccaagagagatcagaacccccttgataccaccacctggaactaccgctacagttgcgtatatgggtttgtgtttttttgtttacagcccttgcgccattggtggcgccgtgaactcagtgtcagtgcctgcccgcttacctgtattgctgctgatgatgtatagagacgggcggagaggagaggaga

SEQ ID NO: 378977 - DNA, 169 bp, Zea mays
cagcacgttccaggcgaacctgaatctccttagcgcggcgctccccgccaacgcctccgcctcgccggcatggttcgccactggcgcagtcggtacggcgccggaacaggtcaatgggatggcgctctgccgcggcgatacgaacgcttcctcctgttcctcctgcgtc

SEQ ID NO: 378978 - DNA, 254 bp, Zea mays
ggttgtaacaccaaaaaaatcctaattttgggtgcaggaatttttttctagaagtattagattaaagtaatccttcttaaaatgaataaataggaatattaaaattttgatagttcaaaagttagattcaaactttgaaactgaaatttaatttgaaactaaaaaaaagggaggtcctccattatttaattaatgggaatattcatttacgtgtttggaaatcttctttaaaaacagtaaggtaaaagtatcct

SEQ ID NO: 378979 - DNA, 255 bp, Zea mays
ccgttccgctcggaagtctctctaccaccttctccccattccgctgttccgccctctcgcgtcgcgtgcctccaggtccctcctctgcgtaactaggtggccgccgatccgccgccaccgccctgcgtcaggtgttccggtgacaagcgtccacctgcaagatgttggaataccaaaacgcaattggggggagactgaagctgaagggtaaagcgctggacgtaaaggatggtggggtgaagaaaaagaagaaga

SEQ ID NO: 378980 - DNA, 159 bp, Zea mays
ggacagaccaaactatccacctttgtttgatatgataaagggctatgtatgaggcacgcgtcccattatttttgtttttattataagactagacctcgttccgtaagatacatgtatcaatattatataaaaacaaaccatcagttcttgtgctgcact

SEQ ID NO: 378981 - DNA, 274 bp, Zea mays
gtgaaatgttacaatagtagagttgtaaaaaagaaggtgcctctggaaattttgaaagactacttgtgttttcacttcttgtgctgccaagaatgtcagtcacttcgtgtccgtctagaaggaatggagaagtgtgaagagattgccttccttggacggataagatccaatatttgttggcggcttttaagtagcgctgacgcaagtagggatgttaaactctacttgtctcaggtcatcgacatcttcaaagatgcatttttggaatctactg

SEQ ID NO: 378982 - DNA, 162 bp, Zea mays
cgacgcattgcactagctagaccttgggctcgcaaacctcacacacccttccgcttaacctgcagctcttcgatcatcatcagcactcagcagtagcataggcatcaaggtagagatcccgacaatgcagtacggcgcggcggcggcgtagtaggcgtggtc

SEQ ID NO: 378983 - DNA, 262 bp, Zea mays
gctgatcctgatcatcactcttttcccgacacaaagagggcaccaagaatcccctccatcgacgacgaaggcgatggcgccgctgccgcaggctgtccacctcctcctcgtcttcgccctcgcgcttggctgcctgtcgggcggcgccaccgcgacggtggtgacgacgtgcagggcggcggcggacagcgacgcacgcgtggactacgcgttctgcgtcgccgatctgggcatgcaccgcgagatccccgacgccgacacc

SEQ ID NO: 378984 - DNA, 258 bp, Zea mays
cagaaactttttcttgcacatcctcaacgcgactagtgtatatgggacagttggggagcgaaggcttgaacccaaagagttcttaaactagctcttcataggcaaaagccaagaaccattagctcaacggttaactctaaccaaagtctttgagttctgaccaatggcttggggcctcaaccaaaatggaggcattcccaacttactttggtcgcgaagggtgactttggaaggaaagcgttcgttcaattagaccac

SEQ ID NO: 378985 - DNA, 253 bp, Zea mays
gtcaagtgtgaacaatgtgtttgtgacactagaacagtcatcatctactgctatagttataggccttgtttggtacagcttattttcagcttcttcacaaatttaagcagaagttctgccaaacagttagcttctgcagcagcttatcagttcagctgcttctcagaatacactaaaagcagccaataagcagaagctgcttttcaccagcttctcagataagctgctttttcgacaagcaccagctatgcca

SEQ ID NO: 378986 - DNA, 245 bp, Zea mays
ggctcctcgccgtggagtcagcagcgccatgagcagggagcagccggcaccggcacagcggcggttcatcgccatcccctccttgtggtcctccggctgccgctcccagtccagcgtcgacgttgtcgacaccgcgcgccacgccggcaacggcaaggaagccccacccgcatagagcggtgccaggcggcgcgtcggctgggggcaagggggagtcgctggtggcgcggctcgtgcgcggtttc

SEQ ID NO: 378987 - DNA, 235 bp, Zea mays
cttggttgaaatgagatagcggctcctgagaagaggcagcgggttccgtcggcgtataacagattcatcaagtgagctcgctcgatgatcgacgacctcctcagatcagcagcttacgtttggttcattctaccaaataattaaacgctgtgtacgtgtgtgcagggaagagattcgcaggatcaaggcgaacaaccccgacattagccacagggaagccttcagcacagcagcc

SEQ ID NO: 378988 - DNA, 256 bp, Zea mays
atcagcatagaacttggaaagcaccttctccattgctgattatagttcagtttagaacttggaaagcaccttctccattgctgatgaactgaactataatcagcataaatgaatcaacgaatcgtctagctagctacgtacggatggagttctgagttgtgactccaaatgaaaacccaggttgggttgaaagtattggtgtcaatctgtgagattacttatcacttcagattgaatatatgattttggttttggt

SEQ ID NO: 378989 - DNA, 256 bp, Zea mays
cctaatcatacgaaacaagaggagaggagaggagaccacgtcctccgcggagtgcttggtcgcccgccaccaactccaacaagacagcggtcgacctcgccggccagaaccagcagccatggcgatgccccacacccacccaattccagcttctgctgtggttacctactactagctaagccctctgcgcactcgcccggcgttagttgttgcgtacgtgttcacggctgcactcgcccggcggccacgctacgta

SEQ ID NO: 378990 - DNA, 246 bp, Zea mays
gggcagagaaaggaaacaaagacgggaaggcggaggccgagacggtggagttcgacctcgacgtggacggcgtggcctccgcggcggacgcgaacaccggcaaggccatggcgatgccgcacggcatgaccaaggccgacctcggcccgctcctggagaagatgatggcgccgggagccacgcagagcgtgggcgtgccgtccatctggcccgcgtccgccgggttcgtgtccggctactacggct

SEQ ID NO: 378991 - DNA, 261 bp, Zea mays
gcgcggcctccgtgcagggcgaggtcgactcgctcaagacctacgtgccgttcaagacgaggtcgtgagctcctgctacttagttattatacatgtagcatacatactactcgtgcctcctttgtagtggcaccgaaacaaactgagcaaactcagccaaattagttatgcgggagtttaattttgaactactagtatgttgctgtcgaatgcaccaaaactaataacgtttacagtttttctatttggcatcaaccttgt

SEQ ID NO: 378992 - DNA, 193 bp, Zea mays
ctgcatctgcagtcacctttggcgtcgctcggcgaatttgagttgcccctccggttaccgcagaacataccgtgcccagaaggtaagctccagtggactctgaaggtgaagatcaggagaaaatgagcgcaggaactggggaagtttcttttgcccccccacaatctggtgtatggtaccaaaccattgttag

SEQ ID NO: 378993 - DNA, 252 bp, Zea mays
cagacagcgcacgcacgccaggaacgcccgagctctccatctctaatccagcgctcaagtagagagcgcagggacatgctcgacgcttcagcgcccagccctctgtaggagcagcgcactcctcttctgaagcacctcgcaaccaagtcttccccgcagccccacaacatcgacgcgccgtgggtgttcgacaaagtgcccgtggaaagtattgcgctgcgcagcgcattcgtgacaccgtcgaaacccgtg

SEQ ID NO: 378994 - DNA, 241 bp, Zea mays
tctctctctccttagacctatcttatttcagtagagagagatgtcaatcagccagctgaaaagggttcaagcagggattacaattctcctggtccagagagcaatgacaagataccgaacagcaggaagagcactccgcttgaccccttttcagctggctgattgacatctctctctccttagacctatcttatttcagtagatgaatgatggcgacaaaagccatccatccatatggcga

SEQ ID NO: 378995 - DNA, 243 bp, Zea mays
  unsure (1)..(243): unsure at all n locations
ggactgtttgggacagctgctgcttgttgaaaaagcagcttatctgataagctggtaaaaagcagcttctgcttgttggctgcttttagttcattttgagaagcagctgaactgataagctgctgcagaagctgcctgtttgtgtaacaccctaaatctagcaaatgcaaacaaccctatttgaattattaaatttcagtagaaagganaaataattatgtttcaaataaagaaaccttgata

SEQ ID NO: 378996 - DNA, 233 bp, Zea mays
gatccccgctgctgccgccaaggccgccgcctcgtccgggagtgtcggcgaggagaagtaggggaacgacgaggactcggcgccaacggtcatggccgcggcggcggagcacgctgtggagtacatctcgtcggaggagctggatgtcgctgccagtcccaatgccaaggccgcgtggctcgtcgctgacttgtactccaaggtatgcgtcagtgacttcgaggcgctcaacg

SEQ ID NO: 378997 - DNA, 271 bp, Zea mays
caaactgaatgttcggttacacgaactgtgaatgtttgagcgaatacctagccgggcattcagtttgagcagccattcagaacttagtttgcccccaattcattttgaaaccacaggtcttgcctgaactgttcaacatcagataacatctcgatcctaagattaaagccatccatttctacactgatcctgtcttctgaccttcctgcgctgtgcttctcaccttactccaggcatggacgaacgaccgtctatatgctccattccaccg

SEQ ID NO: 378998 - DNA, 266 bp, Zea mays
gtgccatgtcgtgttgattctccagaagagtgtgccaaaataatatatgcaaacaagaacctacgtcttggttctgggattcttattgcagtaccgatccccaagcagcatgcaacttcagggaaaattatagagtctgcaatacagacagctctaaaagaggcaggggataaaaggataataggaaatgcgatcactcccttcatgcttgaaagagaatgggaagatccgcgttgtagggttacgctcgcggatggagtagcaca

SEQ ID NO: 378999 - DNA, 265 bp, Zea mays
cgttttctactaaaccaatggacaatagagagctttacttgaacccttttgacatttaataagataacacgtgtttatacctttaaaattgatttcttctatgactaaaatagtgctaaaaacttatgcataatttattattctaagatcttcagatacaacgccaaaaactttttattatctctcgggtttctgcaggtataataaattgaatgagcttgtacttgaatcttgtgttgctgaatttgttggtaacctggaacaa

SEQ ID NO: 379000 - DNA, 195 bp, Zea mays
caagatcgttggtccattactgataaaagaaaatattcggatgcgctagagatgtggacaagcatgcgatcagcagttgcagcagcaatcgacgactcgtgcaggagaccaggctcgatcccgttcaagtgggagatctgcccggtgacgcccaagctacgcaggagcagcagcgccacgtcggctccgtcgtcg

SEQ ID NO: 379001 - DNA, 152 bp, Zea mays
agccgccgccgccgactagccctgcggcgctcgatgtagacttgctgtgctcttgtactctgaaccaccgtgtaataaagctccggattagggtactacaatactgtactatctgtttcagatcccgttcggttagctgtgattaagacctg

SEQ ID NO: 379002 - DNA, 242 bp, Zea mays
atttgagattttgacaaaatgtttgagtgtggctgtacgttctaattctactatcaatatgctactacttcagtttgaccaaatgttttattgtggatataccttctgattcgatctactatcaacctgctactctttagtttcaagttataaagcggttcaggctcttgtaggtgtgtggatagattctaactcttctatttatcttaatcccttgttctaaattataaattattgctctc

SEQ ID NO: 379003 - DNA, 155 bp, Zea mays
tcctcctccattaatattggcagcaagctatctaggatcatcagcatctgagcttattattactaaatcgatctggtgccatggcgatgagagtcggctagctggcgctggctgcggtgctgctgtgcgcggcggcggccatggccactgcgcac

SEQ ID NO: 379004 - DNA, 161 bp, Zea mays
caatttcccaagctttagaggcccatatatacaccgatgcatcgagaaggcggattctctactcatttggctggccagatttgtccaaaaggctatgttcatgcaatcaaagttcaccacttcatgttctgcccattggatctataaatcatgagaacttg

SEQ ID NO: 379005 - DNA, 234 bp, Zea mays
ctattaccatcatttgtgtgtcttgcttgtaagattgtatcacctgtctagctactgcgcctttgcccacccgcgctatgctgtttggttgtgtgaagcgcgatgccgaaaccccgttttttttttcctcttttccattcacccctgcaccatcacgatttttttttctttgccaagcgagaccaagccaaactggcttgtggtcgttgcccgttgtccccggaagcccggact

SEQ ID NO: 379006 - DNA, 99 bp, Zea mays
catggtcatggttggctctgccggatctatctgtcatgaactatctatattatatcattatcaatgttatgcaatgagtctttggcattgagttaaggt

SEQ ID NO: 379007 - DNA, 256 bp, Zea mays
tatctaggggcgccgtgccagagttatatcttgctagctacttcatttattttcttgaccattcgatccatttggaagatgaagaaggcgaccaagtacctaaagcacctcttctccgccatcgtcgcggcggtgaaggccaggtccaccgccgtgggcaccaaggccagctccctgcagatgcgcctcatcgtcctcggcatcatgcggaacaagaagctcctgctcagcgccatccagaaaaagatccacgcca

SEQ ID NO: 379008 - DNA, 263 bp, Zea mays
atgttattcaagaccatagggaatctaacatctattccctgtggtctagaatgttattcaagaaattttgattcatttgtgctctgataatatatattcttatatacgggatgaacgcacaaccgttatatcgcagcagtccttttttttgttttgttttgttttgacatcagctagtgaccatagtttccttcctgtatagctctgaatgtacttgttttttccatttaaatttccatgcttattcatggttagtaagtgtc

SEQ ID NO: 379009 - DNA, 173 bp, Zea mays
acagtatcgacagtgttttgtctctacacagattgcagatatagcggtttaaacagttcgctttaatccgaaacgaacaggctattttacctgaatcatatactgcaatgtgtcagttttagaattttccccctaaaacaaaggttgatagaatgtcatcagcaccttttgag

SEQ ID NO: 379010 - DNA, 266 bp, Zea mays
cagatgggttattcacccctgcccttctttacgatagggcggtatggttgtctggaaatgctagtgctaggcaagattcagcagtaatgcaaaggactaattcagacaggagttcagaatcgcgctctgatccttcaaccaatggtctgtacaacttgagctctgagaggcaggccagtaatagtgacctactggagcgtagatcagtttttcttgagaggaggcggaggatacggtctcaggtcagagctctgcaaaggttgggc

SEQ ID NO: 379011 - DNA, 260 bp, Zea mays
  unsure (1)..(260): unsure at all n locations
gcaagatcatcctcacaagccggtcagacaagatcgtcaagttcggaacaaggccagctctgcgtctcagctacgtgtccagcgaagtntctggtatttcttcaagactatcacatttggcagcacggatcccaaggtgcacccaaggctcctgcaccttgccatggacatagccaagatgctggacaggtctctcatcggagcaaacatcaccgcttgtttgctgagggagaacttcgacgtccactactggtccaaag

SEQ ID NO: 379012 - DNA, 265 bp, Zea mays
cctgcttctgttttgcactttctatgcgtatttttgcactctatatgtgttaaggttgacttaaatctgattattcgctcggttagatttggtatcctcatagtgtgtaggtctatctgtcttagaaatactaagtcaaatgttccgcattagcttgcaacccaaagtcttccgcagatagtaatgatatacggaatatcacatttggcagttgatattgattatttaggcgaagggaaatggcaaccgttccaggggatctgat

SEQ ID NO: 379013 - DNA, 249 bp, Zea mays
gaggcgcgctgcatgcccggcgaattcgattcggatgtcgaggcctccgactcggaggacgcggacagaagcagagcgagttcgccatgaagatctccaactacgccaatattgtgctgctggtcttcaaggtgtatgcgacgatcatggcaactctaggtttccaggtcttggtccaggccgtcgaacagctggtggagaacaaacctggcgagaagatgacatcggagcagctgatatggttgtact

SEQ ID NO: 379014 - DNA, 100 bp, Zea mays
gaaagtacttgatgtcggatgtggaattggaggcggcgacttttacatggctgcaaactatgatgtccatgttcttggtattgatctttcggtgaacatg

SEQ ID NO: 379015 - DNA, 100 bp, Zea mays
gtgaacttctatcgcaactatggtaagactttcaagaagccaaggcggccttatgagaaggagcgccttgatgctgagttgaaattagtgggtgaatatg

SEQ ID NO: 379016 - DNA, 258 bp, Zea mays
gtcacgccctacctctccctccccacgccggccaatcttctactcatcgtggctctagctgctcctcttgccaccacactatcttccaccacagccacctacagtccactcccccatcagccagtccgctcgatccggagaccacaatggcgcctgggcttaaagctgcagcaaaatcaaccaaaccatcagaagtgccactaacagaatatgacaaattgagagccgagaatttgatgaggagtaaccagaagttgc

SEQ ID NO: 379017 - DNA, 256 bp, Zea mays
gttgtaatgacaataccaaagttgtagagcactttttaagcttttcagaaaatcctggtttgctatttttggaataatatttggagagttatgattaaaacaagtgactgctgtgctgctgtcctaaaaatctgcatgtgcgcatttgattgtttagttcacccttctcgctaaaaatgtttggtttgctcttaagtaatgtagacttgccatggttaagctagagatggcatgtgtgtcttgttttatatgttcc

SEQ ID NO: 379018 - DNA, 259 bp, Zea mays
ggagtatgtcggcggctgcgactccccatacgtcaccctgtactaccacagcttcgactgatagctaggtttccccgggaacctcgacgcgtacgtgacgtaccgggtgtcgtgcccgtacacgctgggcgtgcacatgagcgcgacggcgcttgacatggcgatccggtgaacctgctgctgcacgcgtactggaacctgggcggtcagggcagcggggacgtcctgtgccacgatctccggctgcacgcgtcgcggt

SEQ ID NO: 379019 - DNA, 240 bp, Zea mays
ataatgtttttttaatagaaaaaaaataaaataacagaaaaaggcgcacaacaaccatctgcatctagaacgatgccatccatgtctttgccatctctagattacatgtacctgatttctagaatttccatcttatcgttgccctgtagtagcaagtaacctgtacttcatttggcttcaatttgctgatggagacaggttccctgtctcaactgctagagaaaaagtaggcagatattg

SEQ ID NO: 379020 - DNA, 181 bp, Zea mays
gcggcaagccctcactgccatgtccggagcggcgcccgacgccgagcccggccgagagggcttcacctgcagcgcgctgctcatgtgcctctacctgccgggcctcctctccaagaagaaaccggaggaggcgatcagcacgagccgccgccgacagcacacgcggcacgggcacggaaca

SEQ ID NO: 379021 - DNA, 256 bp, Zea mays
gattgttggtttcagcttggcgcattcagagctgtcaacagttttctatgagaagttgctgttacttgcctgggggtaagcacttgatgctactctgacaaaccccgcagccagttttcaatatgttgtctgctgctttttctttgtacttgcatgatgagaaaaatttaatgatcactactaagattgcttactctgctgttcataggtatgacagtcttatcgtgaagtttgtggggcttatagttttttcttt

SEQ ID NO: 379022 - DNA, 237 bp, Zea mays
cactgccgcttggaacttgttcatctagccgagaggttagatagatatatagatatatagtgtaatcgatcgaatccgccaaccatacaatggcgtccgatggcagtggcgtggtgacggtttacggctacaacggctctgcgctgctggagccgccgatatagcccaagtcgtcgactttctccgtgaaggtgggcctgtcgcagatgctccttggcggtgtgatcttggacgtgg

SEQ ID NO: 379023 - DNA, 252 bp, Zea mays
acgaggcctatgatcgatgtaaacaggttttgctgtgtctgatgatgaagtgtcgacctctgaaggtcctgctcctttcgagaccgagccccctggtgctggtgattgcgatggtcttgctggagatggtggagcacgaacatgggatcctgcaggtcccggagatgcttttgacaagtcattacccccccccccccttagaccagcattggtaatagagggaggagtaacacacttctgtacaactggtcc

SEQ ID NO: 379024 - DNA, 242 bp, Zea mays
gcgaccgtctgctccggatcaccggcgtcatcgagcatggcatgtttcttggcatggccactacagtcatcgtcgctaacaaggacggcaccgtcacagtcatcaacaagaagtaataatctacaagtagcctgtatgtgtgcgtccgtgtgtgatccagctacctaagttctgctcgttaccgttgtgaaaccatcattttgttttatcatctcatatctttcctactggtgattccaata

SEQ ID NO: 379025 - DNA, 266 bp, Zea mays
ggaattaactaaagtacttccaacagcatttgaggccatgcaaacgtacccaattaaactatagctcttccaacggcaacgcgaagtttggaaccatattctttgtcgatggcatggcctcaaatgctgttggaattaactaaagtaattttgaaatgcaattgttaaatggccacgatggtgtatgtattttgtacactagctcattccaaaggtcgttatgttgctggtgccacatcactttggtcaagtggaataatattaat

SEQ ID NO: 379026 - DNA, 263 bp, Zea mays
agatcgagcagtcatcgatctgatggggggcgaccagcagctcgttccggcggcggcccgcgtcaccccgcgtcggccgatgatgtccttccgggtgccgcggagactggtggccagcagagcggcgggtggagcgtcgccgtcgccgccggtgccggtgccggcggggctaaagacaaagaagaagaaggtggcggtggcgaggctcggtgggaagaggaggctcttcggcgcgatccggcggctccggatgcggtggctgg

SEQ ID NO: 379027 - DNA, 266 bp, Zea mays
ggcggctcacggctcccgctgcggacaacctgatccatgggggaggcctgaggccgagggcccggccgtgggcgcacgcaccttcaaccaggcctggctaccaaggcgcggcgagctcagaaggggcagcctgtctccacccgtcggggacccgctcagcagggagtggcccaagcgaaagatggcaggggagatggtgcttgtgggccggatgtggcattcatgggctggcggactgaggcggctgggtggtgacgggctgaaag

SEQ ID NO: 379028 - DNA, 242 bp, Zea mays
cttctttctttttgttgttgttgagaaatttggtgttttctcttctacaactattgagcatctcgtagtgtatttactagaaaaccataaaatgaaatatcttcattgtttactagaaaaccataaatttaacactatatgtggtctcactttttttgtttttttgtaccacatttatgcgtatacctcaagcatatctgttcattttggcatgtgctgcatacatctctgtatattgattg

SEQ ID NO: 379029 - DNA, 252 bp, Zea mays
ggtttgtgcaagagcagtttacaacttcaggatatgcatcatatcgctggcaggtgagcatatcggattttggtcaccatgacctatacgacatattcggggacatctcatcgaaagggctcccacaagagtcgctgaagaaactgccacactatgtggtcactgaccagacgcgcgcggactcgttcggccagatcctgtcctgccctatctgtctacaggacatcgtagccggcgacacagcaaggaggc

SEQ ID NO: 379030 - DNA, 230 bp, Zea mays
atacctttatacaccttcccaaatcctcctgcacccagcacattcttattcttaaatccttcgtctctgaattccagacacggctactgtttaaccaggcatttagccggggcctccagatctcaaggatccttgctggtcagaaggatgttagcgagttcgagttcaagtgaccaattttatccctcttgcaagcaaaccaaactcactttcatgtatttgtatacgat

SEQ ID NO: 379031 - DNA, 203 bp, Zea mays
gctttcgtgcagttaaaagacttactttctggcacaaaaaaaaaaaaaaaaaaaaaaaaaaaaaaaaaaaaaaaaaaaaagggcggccactcgcgaccttgtgttctctgacgatgttgggatcctcaagacaggctgcggcaactcgtacgccccatttcctaaaggttgcttctacaccacctccggtgggctgcagagct

SEQ ID NO: 379032 - DNA, 261 bp, Zea mays
attattagtttgctttatttattatcagttattttttaagacatttttgttatgtaataaagttggtgacatttgtctctatacactgagtcattatatgtgttgatcttaaatctgggtttgccccttaaatctgggtgtgacagtgcgcgatggcggtggaccccgggatgcgtgcgacggcggcaccatgcgtggcggcgacgacaattccttgatccagatgcacgacggtggtagctctccgatccgaaggcatgg

SEQ ID NO: 379033 - DNA, 274 bp, Zea mays
ggtgaggaagcacagcgaccgcaaggactgctggctcatcatcgccggcaaggtacgtatatttcgtcaccggccgacgatcgactccgaccgtgtttgacgcccccggcctcgctcctgctgctgctgctctgctcaggtgtacgacgtcacgccgttcatggaggagcaccccggcggcgacgaggtcctgctggcgtccgtcggtaagtaaagtagtctcagactccagaccggtggtggtgactggtgagttggtagcgcttactgatga

SEQ ID NO: 379034 - DNA, 128 bp, Zea mays
ctcccagatactgcaatgattcttggtgctggcttcgggaaaggtggaactagcttgccattttgggaaaatgtatatggctttgatatgtcatgtattggcaaagaagtaacttcaacttcagctcg

SEQ ID NO: 379035 - DNA, 166 bp, Zea mays
tccgagattagaaggctattggactcgtacaatggcgagaactgcagcatcacgctaaccggtcacatcctgggcgcggcgctctccacgctcaccgccatcgacatcgtcgccaacgtcctcaacgtccggggccccaacaacgacacggtccccgtcgccgcca

SEQ ID NO: 379036 - DNA, 270 bp, Zea mays
gctctgcactcagaaacgggtgtgacactaagtgagatagatataagtaaacatataatttatggtggcatctcatggtggagtttttgtattgcacattaaactaaagtttgaaattcaaacacaaatttaaaatttggaaactgaactaggaaaaaataggaaaaaaacaaaaggaatacaacagccacttgggtctgtttctctaccttagcgcacttcagttgcatggcccagtcccttttcacccatcatcgcgacaccagcaca

SEQ ID NO: 379037 - DNA, 161 bp, Zea mays
ccatctgctcgttgccttgattttgtggaacgaagcgatggctcgcagcggcgccatggtttcctgcatgctgctcctggtggtggcgcaactgctcatggtgatggccacgcagacagcggcggcggcgggcgaccaacgcggagctggacgccggctgc

SEQ ID NO: 379038 - DNA, 233 bp, Zea mays
tgtttacaccaagaattcagtcgatgtaggccatgtttggcactgctgctgcttgttgaaaaaacagcttatctgataagctggtgaaaagtagcttctgcttgttggctgcttttagtgtattctgagaagtagctgaactgataagctgctgcagaagctagctgtttgacagaacttttgcttaaatttgtgaagaagctgaaaataagctgcgacaaggacgtagtctc

SEQ ID NO: 379039 - DNA, 212 bp, Zea mays
aaaggtagcatcagctagcgttggagttgatgcgtaccatgttgagaaagtgttgcattcttttattcaaaaggggcaaaatgaatagacgataggttaccactttccccgtgtgattagtaattgtggtccctgcttcatgtgaaaaagataggttatcttatgaataccaaagagggttggacggctaaaaagaaaaaaggaagtgagag

SEQ ID NO: 379040 - DNA, 247 bp, Zea mays
atttcacattcaagtgcacaaaacaaaaatccagcattcatgcacattaatatttatttatttatcaatattttagaatgcataatctatgaacggagtaattcactcactaaaaaaaacctccttgtcatttttaaggaaataatttcaaaggtaggataactccctattcatgaacattctagtctaaatatttttaagacttttactaaatctcaaaatagaattttgtggtgttacaatcatc

SEQ ID NO: 379041 - DNA, 240 bp, Zea mays
tcttcttctactgtttgagcaatttatagcattcatatttaagacgaaaaggaggtgctgtgatacgaatttctttgaaagaaatcgtcgaacatttggattgaccttaactagcttaatttttttctcaaacgcgcaagagagatacacatcattatattaagaaaaaaaaagagtaaagtccaaaatagtcaaaacaggagagctgtgcatcattatattaactagcataatttaagg

SEQ ID NO: 379042 - DNA, 271 bp, Zea mays
gttcagctcatttgtggatcttatgggactcgtgacgaagctcgtcgaagaatatggtgtggccacgggagggcattcttgaatcttgatgaaccatctcatacacggcattgcggagttgattttagttcgcctgtgagcaatttggagttttggacagtctttaccagtggaactgctcttgatctgtgtcaagctaatgtagtatttgcccttgattggtcaaatcctattcggaacagttaattcttttcggcaatgccgttgcgaa

SEQ ID NO: 379043 - DNA, 276 bp, Zea mays
gaagccctaggctcccggctccagctgcatacgttccaggagctaaacaaagtaaccggcgacatgtgcgctgggaccagaacgacgaagaggatgaagacgccaatggaggggaacggtggcacgccggacttgcacctaagcttgagccccaacgacgacgacatgggaggagctgccgacaagcagatgaagaagatgaagatccaaggtatcggattaagtgaacagcaggaggtggacaacgataagatgctgcctctctcgctctccctg

SEQ ID NO: 379044 - DNA, 293 bp, Zea mays
acgcgtccgaaactctttcccttctatccttcctcccccctgatccatcccattcggccaccagcgacaggactgggctcacgctacgaggtggaggtcaccgtgggctccgcccgggacctcaagaacgtcaactggcgcaacggcgaactcaagccgtacgccgtcgtctggatcgactccggtgccaagtgctccacccgcgtcgacctcgacaacggcgagaacccgacgtgggacgagaagctcctcgtcccgctcccgcccacctcgcgcctcgacgacgccgtcct

SEQ ID NO: 379045 - DNA, 177 bp, Zea mays
ctcagatatggcagaattatcaaaacaagcacttggctctacggaggattgtctgctcgagtctctgatgggttgcttggcatctccttctcctcttggagctggcgggaggggcccccacatacagggaacttgagctacctgcctgttgattgatatcttacttccacagcgagt

SEQ ID NO: 379046 - DNA, 177 bp, Zea mays
aaataaataaacttataagtggaagttatggaattagggaacctttggatattatttggtttcttttgcttttgaatattcaattaaatgggattaagctaaccaaaataataataataataataataataaaggcagaaatatgcacctcatgaggaagttcttgcatttttgtat

SEQ ID NO: 379047 - DNA, 125 bp, Zea mays
acctcctacaactgcaaccactccaaccgttggattaggcctcctcttctctgtatacatagcactatctatgggaagtgccctgtgtgttttgtctcggtccttgcttgtgtcactaattggtc

SEQ ID NO: 379048 - DNA, 125 bp, Zea mays
gtaagagccaatagaacatatatacgcccagtgggataaactgaattacctaagtactctcgactactcatgtatctatgtctcacgagatactacctccgttgtccgttctcaaaaaaaaagaa

SEQ ID NO: 379049 - DNA, 258 bp, Zea mays
gcaacgcgattagttgccgcatgtgactactcgcaaatcagatgtgtaggagaggggcgagcggatcacgagttgctggagccggggaggaagaagcgggcatgagcttggaggggacgaggaaccaaggccagcaccaaggcgcggggcggcgctagggttggacggtgctgggtggcggcggtggtggcgcggggcggggcagcgacgaagttggttcggcggcgatgtaattggcgcgacggcggcgacggtgga

SEQ ID NO: 379050 - DNA, 252 bp, Zea mays
ccgcaatgtagtgtttgaagaagaggattagtgttcagactctcaggcttaccatctcagtaagcgtacaagcacggtttttggtcgtgtgatgtttgcatgtgtgtaagatatgtttgttctgtaccgcgtgtggtgggtgggatgaagtgacccgccggcgctggcttgtaacctcactgttgccagaaaatagaaaacgcactgcgacatgcacatgcttttgttttgtgcctgttgagcaccgcaaaa

SEQ ID NO: 379051 - DNA, 225 bp, Zea mays
gttccttgcatcagtgcaaaaaacatggatctgatagtcccaagtcaacaatgttgatataagagcaccgcaactagcaccgataccttgttgcggtgctcttatatcaacattgttgacttggctatcagatcatttccttgcatcagtgcaaaaaaatgcggaccgagtttgaacacattggtggcagcgaaaggcaattcaagcaggatttttttgcctagt

SEQ ID NO: 379052 - DNA, 246 bp, Zea mays
agaagttgaagcgtggttttggcatgcacgtccctgaagagtttagatagctggttctagtacaggatcttggttttgctaataatacactcttcaaagctgacaatggggtggcaaacgtgtggcttctgcgggacggtggtatcaaatctcagatttcttggactggagctctggaagcagcagtacttaagatccttggtgtacggcgaaggttgtctggcactcaagaaaccaagataatct

SEQ ID NO: 379053 - DNA, 137 bp, Zea mays
ggggaagctccaggagatggcggtgagcgaggcgaaggctctagtggcagtgaacgacgacatccgcggcctccgggaccggctcatgtggatgcaggccttcttgcggcatgccgacccgcggcgaccgacacctc

SEQ ID NO: 379054 - DNA, 252 bp, Zea mays
ggcgcggcagtgcgggctcagggccatcgatatctggtccaggatgcagaggttccccggctgggagaagtcgttcctgagggacgggcttcacctgacgccgcgcgggaaccgggtgctgttcgaggaggtggtgttcgcgctcaaggacgccaacctcagcctggaggcgctgcccgccgacctgccgctcttcagcgacatcgacccggataatccggtcaagtcgttcgaggaccaggagtgaagaag

SEQ ID NO: 379055 - DNA, 260 bp, Zea mays
gttttcagggacattattccttctccccaccaataagccattgctgtaaatttgagagacatctgcgttgggactagaattcacattatcatgtctgatgtgattgatggacactgttgtttgcatccaatccaatgagatgaataatatatcctcccccacaacttggccaaatctttcagcttccattcttctgcgtatgaggtatgttgcggcaaagaaaatcaacagtcaaaaggcctacagtactaccacttcag

SEQ ID NO: 379056 - DNA, 259 bp, Zea mays
ctaaactcaatttgtattacaaggattcaactctttgggctattattaattcactgatcaagcagtgtccaaacaagttcaaatttcactcaagggctagaataaacataccaagtctacccaaaagttttcataatttttgaaactactaaactatgtctaaaattataataggatctgtgtaatacccaatgtgtaaaataatgaaaagagatttgactttccttttatatttgatctcaatctattgtaacatggg

SEQ ID NO: 379057 - DNA, 243 bp, Zea mays
gctgaggattattcaagcttcccctgcgccctaccctctgttgttaactttagtgacattgattcttttcttgatggttgcgatcaattgttcgaaaaccaaactttggatataatttctcctgttgagatacaccctagcatggacaccgttgcaacactagaagatcttttcctcaagacaaccagacaagcattggcaaatgttcttgatgggctaaatgcccatactttgagagatcct

SEQ ID NO: 379058 - DNA, 224 bp, Zea mays
atacgttcgtaccatcaagtgtgttcttgtgtattcatttttagctttgatcataactctgtacaaaatatagtcgatcatcgaatcgaatacagcgcacagtaatgtatcacgcctattgctttggctgaatttacgtatactacgacgactaagaagataatgattagatgctaatctaatatacatcctgcagaacagtcgttttctggagttatcagaag

SEQ ID NO: 379059 - DNA, 211 bp, Zea mays
tgcgttttagtacgcggtggtggactgtggtatggtttatgcgggctgttatgaattcgctcgcaatcctgataggatctgaggtggttaaataatcgcggaacgctggataatctcgttttaaatctggcgcatgctgttgcaagatgttctatactagttgttattctggattgtgttatattgattggggtttgagttgctaggtaga

SEQ ID NO: 379060 - DNA, 264 bp, Zea mays
gttccggtcttcaatggattgttctacgcttcagaactgcagtgactatgttttgtgctattttggttgttttaatgccctaatcactgcaagtgttttggtgtttgatgatcaacataactatttatattaattgtttgctagtgtttaaaaatatagtttggacggtgcaacgtggatttcgatgaagacatcgtggtgatcaagaaaatcatcttaaagtagtacagtagaagatttattgaagacttatgtagatcatgt

SEQ ID NO: 379061 - DNA, 258 bp, Zea mays
cgcccgtggccgtggccgcggcgaacagagccgtagctatatatgctagggcaccacaccggacactgcaccaggcgatctccaaacagttgttatcatatctacttgtgtgcacaggcttcggctagacgaatagtttctcttagatcttgctattttgcttggaacttaacatttcataacttcctaaagtttaaacataaggttaattatattgaactcatagcgtgagagatagaaattggttatatagatctc

SEQ ID NO: 379062 - DNA, 229 bp, Zea mays
ggtgcctccaaactgcatgatttcttggtttgggcaagggccagggcagaacagacccgaactgcatgatttttggtttaggcaagggtcagggatgaacagatcctgatggcctgacccttttcttttttggtcgaggtttcacccctgtaacagactgagttctagtagctcagatcctgtttgcaggggtgctggtctggtggtcttgttttgtttttgtttgttg

SEQ ID NO: 379063 - DNA, 196 bp, Zea mays
ctcggtatctagtttggctctccgagtctctggttccctcctctctgcggctgtgctggtctctcttcatctccggcgtggctgctggcgtctgacctcttcattcaagttagctaatgtcatgttgcatggatgcgcaggccatcctcaagggcccgagtgtggttaatgtgatcttcattggactgtcctttgg

SEQ ID NO: 379064 - DNA, 214 bp, Zea mays
ctcacatcatgaagagtttcaagtctgaatttaaactctcatgagtgcaaggtcagcagcaaattaaactagtggcacctgtgtaacttattgctgtcttcttctctgccagcagccatgtggagatccatatccataattttatcagtttgatatttgtgtgctgtgaaatacttgtaccatctttcttagaacatactacctccgttctcga

SEQ ID NO: 379065 - DNA, 270 bp, Zea mays
cttcaactattgtagaaaattggaaatcctcatattgaggggctaagatgtgcacacattatcacaaacataaagatccatagttcgcttaaaacatttctaaacttttgggagagatcttcaactattgtttctgacacttgaaaggatggcttggaccctcttattatcctgggagcctgggcggtttggaagcatagaaacagagtggtttggaagcatagaaacagagtgatgttcggtagagtttcttccaacctcactcctaat

SEQ ID NO: 379066 - DNA, 268 bp, Zea mays
agcgcgcagcccgtgtcacgccctaagctcgtcgctttgatgcccggctacctggggaacgtgacgacctacgccctgtgcgacgctctggcggtatgggggtcgtttgtgtggcctttagtgggtgtaggggggcgcccatgtttgtgtagccatcaagtcggtggactacgacgagtacctccaggagatggtggactgggtggaggtgcacaagacggaaggcctgatggaggcggccgtcatcggagtcggcgcgcccacgctg

SEQ ID NO: 379067 - DNA, 261 bp, Zea mays
gttgttttggcggcgacgacaaagggctaaaaaacaatcttgccgctccaaccaattcgtcttggttgccgacacggcacctcgtcggaatcaggtggcgcgacctcctcgccggccggcgcgacaccaccatgggcccggaagcagtgcggaaaagcctggagcccaccgcaaccgccgaggaaatcactggctccacccctgcgcggctccacttctacgaccccttcgtcctcagcggcgtccgtatcgaagccgccg

SEQ ID NO: 379068 - DNA, 247 bp, Zea mays
gtaaggccaaatgcaacaccactttgagaaatggactatcttcgcctgcagagtccaacaaagaaccttcattgaagagaagtgttgctcctctgcgggacattggagggataagagcgcgaggttttacgggatcttcctcagcatgcgtttcaccccacaaaacttcaagcaggcatattgatgtgagagcaaacatgtctctcccggtgtctccatgctcaagcccgttacgccagctgaagca

SEQ ID NO: 379069 - DNA, 223 bp, Zea mays
atgattgatgattctgacaaagaaaatgcagcaatcaaagaatttcgtcttaaacatctctttgcaaaccatgaaacagcagcaaatcggataaaagtattagaattacttaaaaataaacctctaaaattaaaacattataatttgcgcagaattctcaaaaactatccaaatatgaatttgaccaaaaaacgataatttaaaaatcgtaagcgtttttagt

SEQ ID NO: 379070 - DNA, 271 bp, Zea mays
ctttattctttgttagactagtcacagtccaagggagtcacagattaacaagataatctgatgatcatcctgtgttatggacacagtgcattgtggtttaccaacctggacgacttgacaaaggtttaagccaaggtggcgtagatgtgactccctacaattttgtattgcagaaaccgttgagatctgaggcaaggcattatatatattttttgggcgagacatgctcggttcaataaatatttgtgtgttcgctttgcatatatggtaa

SEQ ID NO: 379071 - DNA, 263 bp, Zea mays
gttcatcctctgatacaagtgacaacaagaagctcttcgccatagtccagccgatgctggtgtacaccggcttgattgagcagctacaacagttcttcaagaagggcaaatcgtccagcttgatcaagacggatgagaaagattgattcttctgccagcttccagcaatgggagatccgatgaaagagaagctgggcaacatgaaggagatggtggggctgtccaaggacctgctctcatggcttgaagacatgacctcgtca

SEQ ID NO: 379072 - DNA, 254 bp, Zea mays
gtggtgacaagaaaggcaagggaacctctctgttctaagcgtatcataaacttgctcagggtctcaagtatctgtcagaatttaccattacaaacaccctgtgcttagcttctgcatatgttcttttgtcacatctttttggtacgttgtagtttgtatgagaccaagctattgtttcgtgttattattatatttaaaaaaaaaagaaaaaaaaaagaaaaaaaaaaagatagaagaagaaaggagaaaaaggg

SEQ ID NO: 379073 - DNA, 247 bp, Zea mays
gtaatctgcactgcggatagccttagtggtaaaacactgtttttctctgtcataatggctgcacagacagaattggtgcattctcatcagaatcctcagtaaatgggcaagtagcaaatgggagatggcttgaaacttagcatgtgattcacattggattatggaacagtggatgactgtagagtgttactggtcttttcccgagcagacttaagattgctataagatggcagaaacaggtaatgtc

SEQ ID NO: 379074 - DNA, 257 bp, Zea mays
ggacgagctggtcaaagtaagttatacatgtccgccgtggctcgagaagatgggcggtacgtggagagcaatgattagaggttacttttgcatgcaaaaagtggatttggatgctaatggcgaggttagataggatgttaatgcctttttaatggagtacgtgcacttgttgcatgcgagatgcaatcatgcaaagctcccgtttactgctctgccatgctatcctccctttctgccaacagtactctgcgctcctc

SEQ ID NO: 379075 - DNA, 163 bp, Zea mays
gagattttttcccttttcctttaattttcctatatcacaaagaagaaccgaaaggcgagaggatttcatttcacaggtcgacttgcttctaccatctggttgtttgtggacagtattttggtgctgatttcgttatctggagtgatgttaaaaagaagaagag

SEQ ID NO: 379076 - DNA, 247 bp, Zea mays
atgcaagtgactcggactccgatgatgcaaatgatgatgccaaccaatgacagtcagttacaaattgagttattattagttaggagattcacagggattgaattacttggtggtttatgcatttatctctacgttgaatcactgtcacactgagcttgtggtgattagccagattaggtgtcctgacctttgttgttccgtgtgtcactgttgcttgctctatggcgcaatggaattcctcaggtgt

SEQ ID NO: 379077 - DNA, 251 bp, Zea mays
ggagcttctgcacgcacacacaaaaacagatagacacgggacaacctccgccgctgagagttttcgtgcgcttgtgccatcctcttcctccgctgcgtacagtggtacgggcgtacggctctatcgacagacgatcatggacatggacttcaatggagacgccgacagcttcgccctcgacttcatccgctacctcatgctcggcggcgacagagcatccccgtgcccagccctgtcgccgcttcttccga

SEQ ID NO: 379078 - DNA, 201 bp, Zea mays
agagaaggcaccagacaccgccagtaagcatgaggcagagaaggcaccagacatcgcgctatcctccgcatccgccgcccgtcggcttcgtccgctgcgagaattctcgtgtcgcccatcggcgacaactgtccgggtgctgcaaccaccgacggtgtgcgggtacgcttacggagtcccgacggcgtggacgagccctgc

SEQ ID NO: 379079 - DNA, 258 bp, Zea mays
gctacccagcacagcagtcagcagtgtatacaattacattcatgcacacgatggcactcagcactcaggacttgctcgaagctcacgtcgagctctggcaccagtccctgtgctacgccaaatcgctcgcgctcgcagtggcactggacctccgcatccccgacgcgatccaccaccatggcggcacgccacccttccccagatcctcgccgagactgcggcccacccaagtaagcttcgcgctctacgccgcctcat

SEQ ID NO: 379080 - DNA, 252 bp, Zea mays
gtgtactgcaactgctcgtcaataattccatcgtccaagttgctgatcgaagggactcgagatcgatcatgcatgtatatggtttatttggagtagaaaactgcatgcagcgggtgtagaggacgagcacgtacgtacgtacaatgcacatgctatcgtacgggtatatatgtatgtattatactaggaaaagatgtccgagtgttgctatcgtacgggtcatgtaaacaatgttaagcttatgtgtctttt

SEQ ID NO: 379081 - DNA, 254 bp, Zea mays
aagatggtggctgacaaaacaggccgtggatgtgtttataggatggacattcaagaatctgcgacagaaaagaggaagtattctctgtcgcagattcttgaatgtccacccataaacacatcaagaatctgcgacagagaatacttcctcttttctgaaaatggccgtggatgatgaacatcatgtgtgggtttgaactatgaagcttttacctaatttcccctgaagaatgaaatagaaaggagacacttatg

SEQ ID NO: 379082 - DNA, 277 bp, Zea mays
ccaacaagtgccaacacagatggcccaggccccagggaaaatcacacactcgttttctcttgcaatgcaacattgcatgttgcgagctcgtggccttgtcccttcacagccggatcgagtggacagctgcacctcaacggcacccatgatttctccttgattcacttcctcacctataaatccatcgggcttagcaccaaaactctaccagtaagtccatcggcaagcgaagactccactccactccactccacctgttagaaacaagctagctcaa

SEQ ID NO: 379083 - DNA, 197 bp, Zea mays
cttcaaataatgttgtttggtttagggtcaaaggttgagataggattatctcagtgttgttccagttatccctcaaaattggaggaacgagagatgacgccacagaacgtcctgtctcgcaaccaaacgcaccattagcttctcaatccccttctaaacagctcaatgtatggtttgccccatttatgtgaagagaa

SEQ ID NO: 379084 - DNA, 253 bp, Zea mays
gtggaagcatcgagttcttattagaactgagtactcgctaaaaatggctctttaggggacctgttatgcttcccctgaaagaagagagggttaaacttgtcactagtactatgaatatcaaaaaacaagagtaaagatggttggagcatcaaaatggtaatactcaacatcaaattttgtgtcactcaaacatgtttgcatggattacttttgtagggtagtcagatgtctgcgtcaattttgtcaatacctg

SEQ ID NO: 379085 - DNA, 251 bp, Zea mays
gaccgtgacggccagaggagggagcgggggcagtaaggttgctggaggggacggtggcatcggcaagccggggctggcgaggatgttgacggtgtccaaggggccgaccaagttccttgatgcgcacgggctgcagcagtggtgggctgacgatgtggagctgcaggtcgccctcaaccacagcaaactcatcgaccgccagctcaggtcgctctatgccgcgcaccggcctcgccgcaagtgaaccagta

SEQ ID NO: 379086 - DNA, 149 bp, Zea mays
tattgtatatcctgctggattaacaaatactagcaaccacttatagtcagtcaacataggccatctactgccagtacctcttttcttctcatgagttgtagcagtttctgtttaattcatatgattgtaattacaatcatattttaagt

SEQ ID NO: 379087 - DNA, 252 bp, Zea mays
ggagactaggacgaccgggccttgtatttatctgcccggccggatgcagtgcatgtacctggccgccgcctcctcgatcaccatcacccccgcgcttcttccttctctcagctcgtctcctcccctgcagtgtcctgcgctgatgaccatagtagatagatcacttcgtagccggccgccgccgccgccgccgcaaaacagcttcttctcctgaaacagctagctagctagttccgacttgctgttgctgtt

SEQ ID NO: 379088 - DNA, 110 bp, Zea mays
gtttagttgagttggggggaacaaaattggcgagactattttgctgcattctgctctgctgtttttagttactgatgaagaataaaacgatggtggtgatcagttttatg

SEQ ID NO: 379089 - DNA, 255 bp, Zea mays
atcaaggacataagggacgttaaagagcttcaagatgttgagacattccgacaatgcttaattgatgaggatttgctgccaccacagcacgacgactaccgcggcgagtatcctcaagaggaggaggagcacaaggaggagttccggcctccgtctcccgccccgtcctacacggagaaggacgtgctctcgtcgatgctgagacggctcggtgagctggagggcagggtgcaggtgctcgagacgaagccgtcc

SEQ ID NO: 379090 - DNA, 281 bp, Zea mays
agcaaccagcagtaacacaggtgcagagcagccaaaaccaggctgcggaaaccagtagctctgctgctgatacggctacagaagtaactcaggaatcttctggtgctagctaacatcttttatgccgaaatgggctaatgcttgcaggttgtgtaccatatgtctcttgagggtctaagatgtgtttttctgtgtgatgcgtctcattggacgggtgttagctgctgcatctggacgcctaaatgagaactaagttatttagttgctgggggtaattctaa

SEQ ID NO: 379091 - DNA, 261 bp, Zea mays
ggtcggtctggattggctttaggtttgagcagacactttcctttttatggagcatgagctggttgtgactcttcctcttcttttttcattttttttacttttttcctttctcactttatcttcctaatgtgggttgtactttggtctttgatatatgtataaccgacatgcgcatgtaccttcatttttatatagctttagacctttttagcatgtgccacattttcagtttctagagatttcacatgttctccagagggg

SEQ ID NO: 379092 - DNA, 182 bp, Zea mays
gaagtgagtacagcaatttagcagttcttaattttccatgcttattgcttggttttaacattatgatgattattaacgttgcgcatacggtgccagatttgagacatagtaatgacccgagccttggaaacaagaggggtaacaatggtgggagacttgcaagccattcaacggttgcaagc

SEQ ID NO: 379093 - DNA, 151 bp, Zea mays
cacagcaccatcaaggaatacgggaaactatcgttcacctggttcggcccaacaccaagggtgatgattcctgacccagagttagtcaaagaggtgctgtctaataagtttggccactttggcaaaccaaggagtagccgcattgggaggt

SEQ ID NO: 379094 - DNA, 168 bp, Zea mays
cggacggtgggcgcggcgccgcgctgacgatgatgcctcgccgcgcccttctcttcgccgcggtgctcctcgctgcctccgacgccgcggtctccgggtttcacctcggcggggacgagagcggtctcgtgaggggtgtgctcgccgcgctccgcgagcgggccgagg

SEQ ID NO: 379095 - DNA, 200 bp, Zea mays
  unsure (1)..(200): unsure at all n locations
gagggaccctgtggtggccatgccgcagcagcggcgccgccgccgcgctcacgcggagggcctcgtctgcgctgctgcagcgcctccactccttctccatcttcgccgtcccctccgcctgcttcaacaccaccacgccgtttccgcaccccgacgccgtccaagaaacagnaacagcggcgacggccaggacaccggcg

SEQ ID NO: 379096 - DNA, 180 bp, Zea mays
  unsure (1)..(180): unsure at all n locations
atcgtccccaatccagtgagctgtaccaatccccatcgccccagaccagaccaacagtgagtacagcagcagctaagagcgtcacgnngagagcgtgcgaacaggagggaggacaacaagaagccgatggcggttgtgagcggcactggcgggaggctgaacccctgggcggagccttcg

SEQ ID NO: 379097 - DNA, 256 bp, Zea mays
attttgtttacccttgtaattgatgtgttaatgttgtttgtttcgaggtttctcttgaatgtaatcatcactggtaacattgtgtcttgagaggcaacaaattagagtctttgatgggcttctttctgtagctcattcagcgctttacgttgccaatagcaagcttggaataagttatcatgcattcactgtcttctcgaacagtgtgtgcatccccatgtccaacattcctcactttgcttaaacgctttgcaaa

SEQ ID NO: 379098 - DNA, 253 bp, Zea mays
gaccaagattgtcgtcagacttggtgtgttagcctgctcgccggtggcacgtctctgcgtgggtgatggattggctccgggggtgcgggggagttatctgcgcccgcggtgtgcgttccctgcaagctgcgggtctcggtagctacagattggtggcaattcctcgccagagtcgggcttcgcctcagatccgccttgcctcgtcgtacgaccgcctcatagtctaaaatctcgtgaggatacgtatcatctg

SEQ ID NO: 379099 - DNA, 246 bp, Zea mays
cgtcgagcaatggtcactgtgtcccagagctcagatcctgaggcggtcgtcagaaatatactgaaccaggtcaaaccactgtccaacaacgcggagaggcgaggcgaagatagctctggcgccgtctccttgaggaagaagaatccagtcattgcaactatattaagccgaattaggctgccgttcccaaatcaaaagcaagataatggtggcggtcgtgacaagcatgaacaaataaaaaaggag

SEQ ID NO: 379100 - DNA, 108 bp, Zea mays
cttgtattctacatgttgggagcatatagatctttcataaaaacacacgtcccatgtattgcaaatcttcatagatccaattatctcatgggtatgttcattatgttc

SEQ ID NO: 379101 - DNA, 216 bp, Zea mays
ccacgaccacggcgtcgtcgcccagcgccaggccagcggcagtgcatggccgtacggtggggagcaccacaggaataaaaaggacgcgtgatcgtccagctggccggccgatcgaggatatggatatgcatgcatgcaacttgcagtgcgaggggatcagatcaagaagtagctgtgcggaggaatggaatatgcatgcacgcatgcaatatgggc

SEQ ID NO: 379102 - DNA, 236 bp, Zea mays
acgggacagcacttcaatggcggcggcgcctcctgccgcagaggcagctcttcttctcctcctagcattactggcactcgccgcggtggctctgagacgcggcgatgcgctgagcctggatttgtacgacgtgacctgcccggaggtggaggcggcggtgacggcggccgtgcggcaggccatggccaacgaccgcacagtggcggccggactcctccgaatgcatttccacgact

SEQ ID NO: 379103 - DNA, 262 bp, Zea mays
gaatcattccagcctcatgggaaccgtgatcctatcccttttgatctgctaaagattactagtgccttgatcgagcatgactcaaattggcattttgaaagactatctgaggaaatagatcttttcagagagttacctgatgacaacagcaagtttgggaagttgacattagcccggttattgcttgcttgttctgctataaaatctcgtggaagatctctaattgaaaggaagggatactgtgaagaggcactggggctct

SEQ ID NO: 379104 - DNA, 244 bp, Zea mays
gcaaggccgcaccggccgagacgcttacgacggccgacgagctcttcgagaagggcaagatcagggcttcgaagccgacgcccaagacggccgacgaacccaaggtccgtccgctgaagccgccgccctggctgctcgacggcgggagcgtcccgccgtcgcctatgggtcgaggcggcatgcggcggaggagcagagcgagctccggtgtcgacttcgacccgttcaccgccgcgctgctgga

SEQ ID NO: 379105 - DNA, 256 bp, Zea mays
gaggtagcagcaaggatcagagctaataatatgatttgacttctctggtgcctctgtatatgtccgttacagaaacactagcctgctggcgtgcacatttgtggcttctcttccggtcttcccgcaggtccatcaatatgtatgaaagcttgacatgaagtacatacctgttcttggtatatacgactcaaaaagactaattcaatttttttaattttaggagtaataggagctaataatatccaaccatcaaacc

SEQ ID NO: 379106 - DNA, 237 bp, Zea mays
tcttaaccctgcgtgggtctgcgaggactgcacaataagttcgacggtacccacgttcttaaccttaagaacatgggtacccacgttcttaacccttttccagaaaaaaaataaaaaatacaaaaatgaaaaattagacacacataatatcacatgcaacacaatatatcacatacaatacagatttcaaacacattgatatatgtgcatatcacaaattcacacaagtccaaatat

SEQ ID NO: 379107 - DNA, 232 bp, Zea mays
cccgtatgaaagcctctggcagtgggtctgcccttttcttgtgagctttccttttaattgtactatttggttgtataagattgttgcctgcccaaatttcaggcacatgaaatataacaattctcaaccatgttcgtctgtgtgaagtggcttgtagctttaggggaagaattaagttaaaacagaatattgcactttaagttcttatatatatctaagagttcatgactcc

SEQ ID NO: 379108 - DNA, 163 bp, Zea mays
cggacgcgtggcacgttcactccagaggtaaaccatctcacgtagtcactcacatccatgtacacagttgtacaaagctggattcaaagatgtaagaccttatccagcaggttatctataggctttgtttgggagcaataataaggctatcttcagcggatct

SEQ ID NO: 379109 - DNA, 228 bp, Zea mays
atcaaaacttaataatgatcaccaatttgctgtgtctttaggtcccaaataaccaggatgttgtcataaatttaagcatcataagcttatattgtttatttcattgtgttatagttatactcattgttttatcaagttctcctatgccttctggtggaaaggtagtgtaatggattaattaatgttttttttttgcagaaccactgttttcagccactcccagactgt

SEQ ID NO: 379110 - DNA, 282 bp, Zea mays
cggacgcgtggttatagcatttatagtctggtcgcaaaggtccagcaatttgacagtgagaagagtatcatgtcacattatggcatgcgatgtgaatgacggaagtcatcagcagcaccagaagcgccatcgcatggtttgcttgttggtctgtttaattgctgtactttacgtaacagagatcacactagattaaatgatgttttggttattttatttatgctgcagcagttttggcgactagcttgtattctttttgtaacggtatgggttggtgacgat

SEQ ID NO: 379111 - DNA, 278 bp, Zea mays
aaaaagtaaaaagtatatgtatataaaaaggtcagaacggcataccaattttggaatgaaaagggagtactaacctaaaattgcttagctgctttagttcgagaagctcaatggaaaattgcaaactacttaaaatctaaaaggattagatttgaaggtaaattccactaaccgaagccagtagttttgttgcttcctatatctctgaaatctttctactgttctgtgaaaagctgaagcactcatgctgtctctattccgtgcgtgtcttctatgtt

SEQ ID NO: 379112 - DNA, 275 bp, Zea mays
  unsure (1)..(275): unsure at all n locations
ctctctccgacaagaacccgaacgagagcaaacacgcgtccaacgcatcgccagcccagcccagccccgtagtaggaacgactcgcaagccaagcagcagtaaccctagaataacggcggccccgggcatggggatggcgaaggtgctgctgctgctcgtcctcttcatccaaatcatcaacgtgctcaccatctctgcgtctgcgaggccgttcaaggcggaaccggngacgacgatccagatggtggtggacatgttgttcggcgacaagaag

SEQ ID NO: 379113 - DNA, 197 bp, Zea mays
cacgttgatgaaattaatgctcatggttttgttgtaagatattaatgtggccaaagtgatctagatgtataaaataaaaaaaaaaaaaaaaaaaaaaaaaaaaaaaaaaaaaaaaaaaaaaaaaaaaataaaaaaaaaaaaaaaaaaaaaaggggcggcccctttaagggttccaattttagttacgtttgcttgca

SEQ ID NO: 379114 - DNA, 269 bp, Zea mays
actcggcgtcggacgaggcggagattgcgcctgagggtcggtcatctttgcctatcgtattagatgtcccatcgggggaatggaaggcgtcgtgcgcgtactgtagcggaggcgtaatcatgctgttgcggctggatatgactgatgtcttgtttagccactgttgctcctgccgccgcgacgtggggtaggtatgcgcattaaaagcgagtgtcccccacctgtttttgggtgcttttgtcttatctgcctgggattagcttgggcga

SEQ ID NO: 379115 - DNA, 270 bp, Zea mays
  unsure (1)..(270): unsure at all n locations
gcccaaggaagcgaagtnatagagaccgagagggagaagcgtttctcctgggttgttcgggtgagccgctagcgagagcgagacggagcgaggctttgccgctgcagagcagagcgacatgagctaccggcttggaggcgcggcggaccgcgaggagggggacgaggagctgttcgagacggcgccgtccgccaacgggttcaggacggcccacggccccaattcagaacgggtaccaccagtgaggctgtagcctgtaggcagacgacg

SEQ ID NO: 379116 - DNA, 242 bp, Zea mays
ctgtttactttggaacctcagttcctacaatatttagaggtttaacgactgaagagatacaacaatgcttttggagaggttgttagaggcaaaaagcctggagcggcaagcgtcgaagaataataggtacatcgaagaaatatagaggagctaacaaaacggatggatagccctaaatgagatgctgacccaataagtcgccgaatcacctcgaaggtcgtaaccaatttttgaggcgacat

SEQ ID NO: 379117 - DNA, 239 bp, Zea mays
cgctgaacaaccagcgctggagctggctggaggagtgggtcggctcgcagcccttcgacaaggacgtccccgtggcgcaccagtccccgtacacccgcagcgccacaggggtgagcacgacgacgtcgtcgaccggctcggctgctcggcccgccgctccttcgcccggccgacgcgcacgccgccgaggggggactgctacggcgacgcggcgcagttcccggggtacatggcctcca

SEQ ID NO: 379118 - DNA, 238 bp, Zea mays
gccttgagcaagggcgcggcacggcaatgccccctccggagaagcgctctaaagcgtcgttctttggccggagccgcctccgtggggaggcaggccccgagctcgccggtggccggcgctcgtgcgacaccgacccgcgtttctccctggacgcctcgcgcatgtccatcgatgacgccggcttctcgtgggacgagccccgcgcgtcgtgggacgggtacctgtttggcgccggcac

SEQ ID NO: 379119 - DNA, 230 bp, Zea mays
ctcgatttacatccctgagaatcttttttcccttgttttgtagagattcggatttgattatattaccctgattcgtttaaaaggatgggttgagctgtatttgcgcaacatattttgcgacagtgacttctcttcctaaaaattagggtcttgttccgtctaccacgatccattcttgctaagacggcattgaatgtttaatgtgcagcttatagtcagtgatggaacac

SEQ ID NO: 379120 - DNA, 256 bp, Zea mays
attgaagcgtcattggagcgacgccatggagtaaggctgcggggccgggcggggcggggcgcctgcgtcggcagcgcgcagcgacgaacgacgacaacgtgaagggcacgaagcacggccccagtcgaccagtcagaggaggaaggatgcgagggacggagagatgctggggaggggaagccagagatgatggagccgcaagggagggggagaagagatgacgcgtgggggagtgttgccggctgctaactgggga

SEQ ID NO: 379121 - DNA, 257 bp, Zea mays
ggacgattcgccccttcatataaacaactgaaatcgtcacacgagacacgaagatataaaaaagataataaacctttgtcaccatacgagacaagaagatcaacctgctaatttttttcgcaactggataagtaaaatctttattataatattttttttaaaaaaagtaccacatgttttaaaaattgtcatgaatatagctccactgtatctatgacactagaggaagaagaccatgaataatgaatttcactcgc

SEQ ID NO: 379122 - DNA, 254 bp, Zea mays
tcccgctccagtgcagagacacggcgacgcaaatcccagctccaggacctatcgccttcgctccggctctgcctccactgccacccatcccaccggaatcgtccgaccctccggcggatcccacggcgatccctccggcggtggactcgccgccgttctcccagaggccagtggtggtgcccagctcggcagttaggaggtcgcacgtatccgtggcggctgtcgccgctgtgctgcccatagttgctgccgcg

SEQ ID NO: 379123 - DNA, 228 bp, Zea mays
gcaacttgcagtaggtgttaacaggagctggctgagcttctcttgcttctgcaagtagtagctgtagccgcctgtgggcagagacgacgatttttacaggtaaaattatgtactttgcaaggagggaaacatgtgggaataagtagtgagcctacgtttagctctgtatataaagtgacttgattttatatgtactattacggctggtgaaacacgcttctttaattc

SEQ ID NO: 379124 - DNA, 234 bp, Zea mays
cgcaacgcaactcgctccccagcgctcctccttaattaatcccttgcatgccttccagccgcgctcgcgcctcatcagggacggcggcggcggccatggacccgtggatcgcgcaccttccctcagcctcgacctcaaggtcggcctccccacgccggccaaggtcgtcttggtcgaggagaccaacaatttcttggccgtcagcaggacgaaagaccgggaggtggaggcgct

SEQ ID NO: 379125 - DNA, 228 bp, Zea mays
tatatatatatatatatatatagttatagtattaggagccctgggcttccatcaatgcagggagcccctaccaggctaggtgtgccgagacgcggtcgacgtggcaggtggtcggagtaccgcgcacatgcaccgagtgaaggtgggtcgtacgtgcgcacccactattaccatttatgcatccgtttcactcgaattccgtatgcataaacgcgtaactgccacggt

SEQ ID NO: 379126 - DNA, 272 bp, Zea mays
ggcacgaataaaatagggggtactatcttgccgacatcatccacccttcatgaccgatgttgatcaagggtatttgatgtgaccataccagcatcgccaatcttgccgaccattcctactggacctatcactcgaagccgagcaaaaaagatacaccaagaggtgcatgcgctactttatgaatttcaattaaacactaatgagaactttatgctacctacgtcgtgtatgttgatattgcttaggttcatcaaagaggaaggacaaaacat

SEQ ID NO: 379127 - DNA, 231 bp, Zea mays
aaatgacgagatatgtattctgaagtagtaacttgcaaagatgaaaaaaaataccgttaccgttctcttcaagccaaaaaaaaaaaaaaaaaaaaaaaaaaaaaaaaaaaaaaaaaaaaaaaaaaaaaaaaaaaaaaaaaaaaaaaaaaaaaaaaaaaaaaaaaaaaagggggggccgctcaaggggttccaggtttaggaacgggggaatgggaggtaaaagcttttcaa

SEQ ID NO: 379128 - DNA, 265 bp, Zea mays
tatatgctacaatcagaatcaagtgcaatttactaggctgttacttttttactaatcaatttaagatggactgtggttgggaaccacaaaaacttcgcatgtcatgatgcagcttgagattggctttttgaagtactgctgaatgttgtcccatgctgtaacaatctagaattggggtgtcaagtgtggctctttccaagtgagaacagtaattgcgttgtgagtgagacagcgagatatgttatttgagcttaccctcttatgt

SEQ ID NO: 379129 - DNA, 270 bp, Zea mays
acaaaatgcagctgtaagtttactgctgctctctaagtcgtgttcagtcatccagtgtgtctagtctagggaaaccccataaaaatggtgaaggtggaatcccatcccagtgtcataattaaggatgcacttcttctgtaagcaaatgtatgatgtacaatggccggccggcagtctaaatgttacaactagctcttcttggtgaaaaaaaaaaaaaaaaaaaaaaaaaaaaaaaaaaaaaaaaaaaaaaaaaaaaaaaaagggcggccg

SEQ ID NO: 379130 - DNA, 273 bp, Zea mays
gtaaagtttggaacggcaccagctctaactctgaagcacctgtctcatgaggcctactggtatttcttcaagacacttacatttggaagcattgatcctgagatgcaccctaggcttgctcagctggccatggagatagccagactgcagaatctttcaatcaatgctgcatatgtcacctcttatttgttgagggacaatcttaacatacacttctggtgtaaggtgctgagcttcttgagagggtacatccagaagcatgtctccaaattt

SEQ ID NO: 379131 - DNA, 264 bp, Zea mays
gcaacgttggaagccggctcccggacgcgcaactgcgcgacttttcctgcaagcttcttctgcaaccgaagcaactcttcaatccagaagtggctgctccagggcggcatggcgccaaaagtctccagcccgttcctcctcggcctaccctgggtcgtcgcgcacgttggatccatcaaatcttccaatgcacgctgcgccggcccgggtcgtcacgcaagagagctcccttcttgctagcgagtagcgactagcgagaggtcg

SEQ ID NO: 379132 - DNA, 249 bp, Zea mays
gtggagaagagacctgtccttccttctgctggccaaaatattaggcgagaactataaggttctcctgcatttgaagttaatttggtttgatcagtagctgttgtcatggatgggatgagttcatacaaaatgattctataagaacttatgacccccaggtggcagttgtagaaatgtagctgagatttagattttcttcataatttgttggcattatttagtagggccattgttgtaccaatgttgtga

SEQ ID NO: 379133 - DNA, 166 bp, Zea mays
ctcttctttaaaattttctcatcttccttcaccattctggcagcttgtctgttcaagacgctgacaattcttttcctttttgcccctttggcacccttgctaagccgctcataatcagggtattcaaatttagagcacccatcacccggtttaaccttcgttttgg

SEQ ID NO: 379134 - DNA, 239 bp, Zea mays
gggtattggtgctacacggcttcaccccggcgctgacattctgagttcgcctcaagcgctcaccttctcagcgttctctgagctactgccctgtggatccccgcatctatcataaggccacatataccttagtgtttagaaataaataataattatataaagcgagaatttgaacccatatcctctactccagaaattttccatcagaccatagttaaaaataaacaataattatattt

SEQ ID NO: 379135 - DNA, 256 bp, Zea mays
gccaccagcctgcgaaccacccttcagcagcagaccgtaacaagggaacactccggtacacggagcagggcggcggattcaagtcggcagcggactcatgctgtggtccgacgtgaactcgttcggcgtcaccatccttcgcctactgacagggcggtcgcagcaagggatcggtgagatggtggaggaagcgatggagaaagggaacttgcactcgatcatcgacgcctccgcgggggagtggccgctcgtgcag

SEQ ID NO: 379136 - DNA, 256 bp, Zea mays
atctcgtctcatctactcagtaccatgcattacttctgctgttcaaagcttatttgcaccgtcggttttgaaccatgctcacctaccaaaaccaaaaaaaaaaaaggtaacaaaaggaaatcatattccggtgagcgttagaggagcgagtacaagcttatatgctctctgagtattgtatccgatgggccatattcagcgcacatcgaacttcactgtgctcgactgaaaattgtgtaatgtgtattagcctatt

SEQ ID NO: 379137 - DNA, 253 bp, Zea mays
ctgctgccgagtagtttatttgctacttctttatctagacgaatctggacaggaggtcccttatgacgcgaacttcataaaattgtctggcgacatgttttcttctgtccctgccctaaactctaaacccaaaggttattcgtaacaagtgttttaagattatttttgtttatgtttgggttcgaaaaaaaaaaaaaaaaacaaaaataaaaaaaaaaaaaaaaaaaaaaaaaataaaaaaaaaaaggggggg

SEQ ID NO: 379138 - DNA, 130 bp, Zea mays
gttgctctgtgttgtctgaaacgtataagcgtctcagtggcatgttttcataactgtattgtagtgctttcatcattctccgaagtttgttgtgtgagtatgccttaaatataccagtgtagtttgcttc

SEQ ID NO: 379139 - DNA, 246 bp, Zea mays
caattgttcagtttgatgcggttcgtgtcccaacagtgcatagttcttggggtttgaaacgatgaagaagatccccccctttttttcttctcactttgatcaacgttagggggaacaagaaacaaagaaagaaagaaaggtatactgcagcagaaaaatgtttagacagcatctcttgctcaagtaactcatgcatggcatctgtactgtacatgcagctagcagtaaaatacagaatatctgcca

SEQ ID NO: 379140 - DNA, 237 bp, Zea mays
gccattttggagacgtccctcaggagtgcaacggaatgtgcgacaattgtgcttccagtaggtgagcagaaggatattgatgtcacctaccatacaaaaattatagttgcacttcttcacgatatgcaacttgatgatctcagagctacactactacagctggtggctaagttcgagtctgagtggaaaggtgtacgtagtttcaatgaagctggtgatcttagttcagaggacgtt

SEQ ID NO: 379141 - DNA, 230 bp, Zea mays
acaacgtcgtgctgctgccccacgtcggcagcgggcaccaacgagacgcgcaaggccatggccgaccttcgtgttcgggaacttgaaggcgcacgtgctcagcaagcggttgtggattcgggtggccgaacgttccctggttccaataaggaattaccaggggcttcggctgacacagcattggggattaaattcaaaaggtttggttttgatttaatcgcggctggtga

SEQ ID NO: 379142 - DNA, 220 bp, Zea mays
atgatttattatagttggtttattattgtgcatgacaagataactttgtttaattggaacatggagcttaactcgagaaaacagtgcaaccacaaggactatatggctctggtcttggctgattaattaagaaagctagtgtgagttaatcctttcccgaaaggggcaagcggggtggagaagctgctggtatagggaggttctcgggtcgatctgcctg

SEQ ID NO: 379143 - DNA, 263 bp, Zea mays
gttgtattggagaaaagcttcagcaactgtgaagagcaggcagtcgctgggggcgttcaaaaggctctgctgtgtttgattcggcaaatgctttatcacaatcggtgcaaacttagctgaatgctaccgccccacttgtttgaaaaggacgtctgcacttgagttcaactgtgtaaacctgggagctttggatggaggacttgtggatccttgatgcgcatttgttgcaaatgctttggattgaagcagagcaatgtaccata

SEQ ID NO: 379144 - DNA, 261 bp, Zea mays
gcgccgcgccgacaacatcaccgacaaagtgcggaggattccatgtctgacagtttccagacacacgacttagacatcgacaacgcctccgagctacataattgctacggtaacaacatggtgcaagggcaggccatgaccgccagacacgacattggcgtcgtgacggtgaaggaggacaacgactggttcaccgacatgaatctggatgatctgcaggcgtcctacaacatggcccatacggtgaatcggatcccggcc

SEQ ID NO: 379145 - DNA, 261 bp, Zea mays
tgttgtttggcttctcgacctacgcttcatcaccggcgctgcagcaaattgaacggggctacatcgcaacgcaacacacaagattaactgcatgtgccatatgaagacctcctgcctcatcacggtgtttgtatataagatcaactgcagtgcctacacggtggactgagtatttgtatgatgcgaaggtcactgttcagcatcgtcagtatgaaatggctatggccttcaaagctttctttcttggtcaccggacaggga

SEQ ID NO: 379146 - DNA, 128 bp, Zea mays
gtgcgttcggcacttataataataagcacatgaaattttgcttcaggtgcaaaacccaaaaagaatacacgactaagcaaacaagtactgaaaggagccgactacaagagtactatgggacaaaggcc

SEQ ID NO: 379147 - DNA, 148 bp, Zea mays
gcttgcactgaagtttttgagaactttgcttgtacttgaaatgtcggttggacaacattctatagatatattctagttacttgttttttttggattttttttttcttactcttagagcttgatccggagctacaaaaccatgaataag

SEQ ID NO: 379148 - DNA, 131 bp, Zea mays
gtagaagacgacgccgcgaacagagcctgcttctacgagagcatggacgccgacacccgcctcgtcatgcaggccgtgatccgcaagtgccctgccgtcttcgacgacggcctcacgtcgctcgtcgacgt

SEQ ID NO: 379149 - DNA, 201 bp, Zea mays
gctgatgagaggttggtgacgattcttggctactggctactgtaattagcttgagctactattctggttgcagcatctgtggctgaacacgagtaccatatctgagtgtcataagtcatgttgcgaagaaaaaaaaaaaaaaaaaaaaaaaaaaaaaaaaaaaaaaaaaaaaaaaaaaaaaaaaaaaaaataaaaagaaag

SEQ ID NO: 379150 - DNA, 267 bp, Zea mays
aaaacaagaaacacttgcaactttactagaaattatggtcagactctctttctctgtgttcgtttgattgttgctctggctgtctcctgctaaccaattttgtgggaaattcaacctttgaagcatcaatgtggtgaataatttctcaaaccctcagtatgttttccctaatgctggataaggcgctctcaaaaagcgaggctgtggtcagcgccttcgcctccatgacgccgatgctcatcggctccgtcgtgctggactccacgc

SEQ ID NO: 379151 - DNA, 100 bp, Zea mays
attgcttcagcatccatggcttgatgttggtcccctccgacagcaacctaaaacacggccagagtcagcacagagtccaggtgatggtgtttcagagaag

SEQ ID NO: 379152 - DNA, 251 bp, Zea mays
cgagattgcagctctttacgccggaacagaggggcggcggcggcggcctgcctaacacgagccacaacgccggctggatttccgggaggagttcctcgtataattttatggagtgacgtgtgtgctcctgatgatgatgccaaaattaatttgaaacaaccgttctcatcttgaactcagaagacggcgtcacgcactctgggaccttcagctagcgtgtggtggtgtccatgcatgaatgaatgcagtag

SEQ ID NO: 379153 - DNA, 210 bp, Zea mays
gcaacatctcttgttctttgtttttttactatagttgatgtatttttgacagctgttaattctattcaactaagtgaatattacctttcaggttatgcgtcctcagcatggtgtggaattctctatgaaagaggtgaattcaactagttggaatgttggtgaaacaccaaatattctagtaccaatcgctaatgggacagaggagatgga

SEQ ID NO: 379154 - DNA, 103 bp, Zea mays
gaacaaacaagagttgcttcaaagctcattaaattttgtttaacgagtctcttgtttgacagacattgtgctatttttattgttcatgtactatgcatcaaat

SEQ ID NO: 379155 - DNA, 236 bp, Zea mays
atgaaagaaaatggtgaaccggctaaattcgattggatgaaaatatccgttcacatcttttgaagtgtcatagtgcaaccaacctaaggtatgtgcctggacttcatctgttgcttttatctgtaggggaagcctggaatcagatccagaggaggcgcttgcattcttgggcaagtactgcaaatgggccgtggtgacacttgcttcaaagggatgcatggcaaagcatggcaaac

SEQ ID NO: 379156 - DNA, 228 bp, Zea mays
ctgaacaagaacaatcactacgcagctccattccaaacccacctgcaaatttcagattgagggaggatcagctgactggaagttctcttaaagcgccgcgttctttcttctccctgtcaacattccgaagcaagggaggtgatgccaggctcaggtgatcctcagaagacaccagaggtgtggtgtgtataaaatatcttgtcaagttaggtatggttatcaaatttc

SEQ ID NO: 379157 - DNA, 221 bp, Zea mays
agaagagaagaatggaagtggaaagacatggcttggcactagggatgagagttcacgggtggacttgatagctcatcagcatggtgtggtatggttattctccctgccattgctatgctattaacagagcaatgccaaggaagaagattcagaagagaccagaaatcaaacctgctgaaccatccaagtccaatcttgttctaaaatctgatgtatcaaag

SEQ ID NO: 379158 - DNA, 133 bp, Zea mays
cccttattcacttccgaggtgaatggccaaggattcactacgaagcctttacaaagattccccggggctgtagccacccgttaagtttcctaaatgtagcgcactcctccccaagggacaattaacctttgga

SEQ ID NO: 379159 - DNA, 141 bp, Zea mays
attgggtaccatgttcccggatgatgagttggaataaagcaaaacttgtgttccagtcgatctacgcttctcatcattcatcatcaacaatggacaacaaaagctacagggtttagaacgttaacggacttgttttcgagc

SEQ ID NO: 379160 - DNA, 151 bp, Zea mays
ctgatgaaggcatgttcacatttcatcagatgttcagcaccaaagcgctctgcaaatgcgatcaagtaacccaagttgtcaatgtcaaacccagcatatacagagcgctttggtgctgcacgtctgatgaaggtatgttcacatttcatcg

SEQ ID NO: 379161 - DNA, 230 bp, Zea mays
gcaccgggcccctaaaaagtcaggaacgaccctgctgagcagggcaggccacgttactaatttgtactagaaattaagccatggacgaggcgcacacacacacacacacacaccctgcaacctgcactgtgcattccgtcggttcacgtgttcagcagttggttgttacacttgtagcgctcgcagtgccagatgtggagaaatgaaatgaaatgaaaagagagagagag

SEQ ID NO: 379162 - DNA, 228 bp, Zea mays
tcctgtatgactcatggttttctagagaaaaatattggatcgttacaataatgctaatatggtgttaatctaggattgctcattttgagtattcctgtatgactcatggttttctagagaaaagatcttggactgttgcactatctccacttgtaagatctagacttatgtagttatctgccatagcaacactgaaagtgacaatgtttgaatggtatagttcttttc

SEQ ID NO: 379163 - DNA, 228 bp, Zea mays
caaggggacaacaaaaaaaaaaaacagggctcaacagtgtgtcgctggctgccaccgaaggctcactctgctttgcaagtgcaggaccagactgaagggcttcagatcgagaggggcaatgtacactcaagtgtacatgcgttatggtagacacaaggggtgtgtttttttttgggatgtttttggattaggaattggattattgtaaggggaatttttctttttttt

SEQ ID NO: 379164 - DNA, 229 bp, Zea mays
gagggcatcagtctggttgttatcctagagtgtttttgaaacagcagaagattctgcttcatggctgccggtcttttttttaatgtgggtgagaattaagcactgtgttgtaccaataaacactgaaacagtacttgatactgaactgaatcgcgtgctagttgtattaaaaaaaaaaaaaaaaaaaaaaaaaaaaaaaaaaaaaaaaagaaaaaaagaaaaaaacgaa

SEQ ID NO: 379165 - DNA, 202 bp, Zea mays
gctggtttgtcgtttgcaatatccaagcctccaaggccatgattttattagacctacttgaaatggcggtaggtgatgtactgatgtggattttgtacgaggaatagtggaataaggtattctggtgggtttgttgttggtcacaagatgccagtccggcctctcctagcataccatactagtagtaattttcttcttggag

SEQ ID NO: 379166 - DNA, 228 bp, Zea mays
acaatccacgtctcagtatttttgttcttatggtctcggtattgaatgcctaggtgagttttttttagctgtgcacaaaaaaacagttaaactcgatggtatctcaactgctggagaaatgctagtgccctatttttggctgtggaattggaaatttggaatgcatccattttgaaaaaaaaaaaaaaaaaaaaaaaaaaaaaaaaaaaaaaaaaaaaaaagggcggc

SEQ ID NO: 379167 - DNA, 103 bp, Zea mays
ggttaaggttggagggatgcgggttaagattggatggatgctcctgggctaagtggatttaatttttatccttggtgaataatgaacacggaggtgtagccaa

SEQ ID NO: 379168 - DNA, 232 bp, Zea mays
gggcggccggcgacgagttccagagcctcgccaccatgagcgtgctgcagcctgacgctcgcggtatctacagttccttaccatacgtttcgccgctgcctccgttccagtacgcggcgtacctgcactcttcgctctccctcccaccgctgaatcctcgccgccacccgcctctcctcccgctcccgccggcagctgctgctaaagggatgaagcaggcgtcgcagacgag

SEQ ID NO: 379169 - DNA, 232 bp, Zea mays
accaccgtcatgcaccgctacgtcggctgctgcgacaagctcaacgcctcctcctccggcgacgccgacgcgctccgcttccgcccgcaccagatgaacgccgcgctcgagctcctcgagaaccaccgcctcgacgccattgtctacttcgccgacgaggagggcgtctactccctcgacctcttcaaacgtctgcgccaagtcaggaggttcggcacatggcctgtgcaag

SEQ ID NO: 379170 - DNA, 116 bp, Zea mays
ggctgaagcagcggaccacgcagagcgccgagcaagcggaggaatgcgtcaggatcaactaccacggcaccaataccgtcacggaagcgctcctcccactcgtgcagtcgtcctcc

SEQ ID NO: 379171 - DNA, 229 bp, Zea mays
caaaaaatagttggatcaaaaagacccataatctgctggagctggtagggggttctatatatacaggttcctgaattgccatcgagctcggaggtgtggcttgctaggtgattgagcttggctaacttactcaaacgagttgggaaaggagacttggccggttgggtggtctatacatagaacctaactcaattctagccgtttaagaaaatctgctgcaatatgtggc

SEQ ID NO: 379172 - DNA, 192 bp, Zea mays
gtgacaagtgaattgaagaggatccatgtgaggaaatcacttgctattcacccttgggtgtttcgttgagtgtatgcaacgagttgagcatggatgaaaagtggcatatactgggatgaaaaggacaaatgttaaccacatcattcagaacaattgcatagcttgtatgtgaatccattccagtttttttat

SEQ ID NO: 379173 - DNA, 261 bp, Zea mays
gggaatcgagacatcaatctagtacgcttgtggtgcactcacaagtggacaatagcaggcagtggccacgtcggtcggcgcaagagaggtggcatagtaatggcatgagtttctctgaagatggtgtgggatccgcggaaaggagaccacgggtggagcatagacagatttcattgataaaccaaactataagcgacgacatggattccctgtcgctctcaggccgtgaatcaggcgaccagcctcgtgctagtgtgcgga

SEQ ID NO: 379174 - DNA, 247 bp, Zea mays
tctagttctggcctggatgtgcagttttaacttcaattatgaacccagatctataaagttgattctgtgtgtcatattgcaaatggaaacatctgacatttactgtcattgttctttaaccaacagttccacatatcttctgacatgattccttttaatagtctgctggaaaaatgggagaacagtatgatccatgcactgagaagcattcaactgtatacttcaatctagctgaggttcagaaggc

SEQ ID NO: 379175 - DNA, 226 bp, Zea mays
ctccaccgtgggctgcgacaaggaccacaactttgagccgccgtgccgcaacaacatcgtcgacgggtcgccggcggtgtgggacgctctggggctcaacaaggacgacggccaggcacagatcacctggtccgacgagtgagcgactgtaccaccgctgcaccggccgggtgcgctcgtgcaagtgcaccggccggcacgtctcatgttgccaatatataataag

SEQ ID NO: 379176 - DNA, 228 bp, Zea mays
cttttgactgtgtcaagatcatgaccaacctcatgaacatagcatgcttgttggtagtacaatctaattatagtctcaacaaaaggagtgctgtagatgtattatccaacattatcaaggaatgtctgcacgatcatttgtacattacgagatcaaactttgcttcacatctgcaattttgttttgatggaagttcatgctgctatctctctgaagagtgggagggtg

SEQ ID NO: 379177 - DNA, 110 bp, Zea mays
agcaatacctcccaacacgttaaaacggggtccaaaattcaccatgattatgaagaagctgtacagctgatggaaacgtaggctcattgcaaatcaataaaatgtactcc

SEQ ID NO: 379178 - DNA, 235 bp, Zea mays
gtagccatcagccttctcatcgccaccaatggccactgccgaagtccagaccccgaccgtagtggcggccgaagaagcgcccgtagtggagaccccgcagccggccgtcgtgcccgaggagtctgcacccaccgaagccgaagccgaggccgaagctgctgctcctgctgatcacgaggagcttcccgaagacgaacagcaggcagccgccgaagaggaagacgcggctcctgct

SEQ ID NO: 379179 - DNA, 174 bp, Zea mays
agaaattcaatagactctacaagcagaaactggatgagattgtcgaaagaggcgaaatatccctggacctggcactagaggtatcatcgccaggcgcagagaggcttctgaaggtgcctgaggatctggaccgcttcaaggacatggctatgagggtgcagtacctcgctgaag

SEQ ID NO: 379180 - DNA, 123 bp, Zea mays
aggattattcttgcttctgtgttcactgcctagctagtctccgggtcaaatgtatttgctcatttacttcaaaaaaatgtatttgctcattttacatgtaataataagaatggatctatatat

SEQ ID NO: 379181 - DNA, 268 bp, Zea mays
gactactcttatttcatgcacacactataccttgttgtactcatcaatgtctagaaccaagattttgttcaacaattctagtgaataataatgaagataggcatgaccctaaacgtaaatttttgttaagattcatagtgtttgggattttaaaaaaactacattgttaataaaaaatcactaattttccacatttaattgcagcgtgaacaaagagagaagcattgtgtctccactgttcagtgttacatgaagcagcatgaactaa

SEQ ID NO: 379182 - DNA, 240 bp, Zea mays
gcgagcagctccagctcgtcgtgtccttccactgacactgccgcgccgccggggcagacgcctctcgccccactactcggggcacggtggctaggctatatgatcgtgcagaagcagaattgaagtcgcaatggtcagcatgcttatattaccagttaccatgcttaattgcatagttgcactgtagtgatcaccgcaggaagatggctctgtgtggaatagagtagtagcttaagcaca

SEQ ID NO: 379183 - DNA, 156 bp, Zea mays
gtcgtcgcgtcgctggcacgggcggcgttcaccaccctcgcgcgcatcaaggccgtcttcggcgccggccgggagcatcgccacccgccgctgtaccgcagcctgacactctcctcggcggtgcacccgtcaggcgacgcgcggtctccgccgtcg

SEQ ID NO: 379184 - DNA, 255 bp, Zea mays
caggttctgcgaggcgatcgccgcggctgcgctcgccgggcttgtactgccgctcgtcgaggtcgccacggcgcgctacggccgtcggacgggacccgcggcgagggtgccgccgccgtacgcgaccgtgatgcagatgcaggctgtgatgggcgccgccggcacggtggtgtgcctgcttggcatggccgtcaagagcgacttccaggcggtggcaagtgaggccgccacgtttgggcttggcgagaccaacta

SEQ ID NO: 379185 - DNA, 249 bp, Zea mays
gcgacctcatgctcgtcggagagtgccgttcgagatgttcgctagcacctgcaagaagctgaggatcatgaagagatctgaagccacaggcctggggtcgtcgtcagcgaggcagcaatgaagatgatcccatctgatcgagaggacctgcatgcccggcaacgttgaacaacatgtcgatcgaacgtcatggtggccttattaattgtttctttcttttcttttcttccttttgtttaattatttttg

SEQ ID NO: 379186 - DNA, 245 bp, Zea mays
agaatttcttatttataacggacaacaaccactatttggctcgaccgaccctccttgggctggccggtttgcctcttagcccgcctagccaacatgggccaccaacgcctttttggaccgcccctgcctccacgagcctactttggctagttatcccttggtcatggccatggctggccactggccgttgttggctggtcgcagcttgacattactggccacgactaactagccaaatttttctc

SEQ ID NO: 379187 - DNA, 225 bp, Zea mays
agatgacctgatcaatctctccttttgtaataattacaataattaccctgcatgtacgtacgtacggccggcgatgggatgacctgctcccggtaaggtaacatcgcatcgcatgcaatgcaagtacgtgttgtgttaactacagcagttaattagcgcgatggagtagtgaactagtgacatactgtactagataggcgcggcgtacactgtactgtatatgtt

SEQ ID NO: 379188 - DNA, 245 bp, Zea mays
agaatttgttattttctgggattgaattaaaatggttcttggtgaaggtggatggttcagagagattagaagaaggtactgaccaagcatctcaaataagccaatttcttgagggatacagagcaggaagaacaacaaagaagaaaattagcggcccttctttcatgggtttcctgaattctctggtcagcttgacctcgctgtacatccttatattcgtcattgcccttctgtttgtcatggtg

SEQ ID NO: 379189 - DNA, 145 bp, Zea mays
cgcttgatcgcaacagctcgatcaatggcttcttcctggggttctcggttgccgctcgcagtagtgctgctgctcgtggcctgcttctcctccacggcagccgccacaagctacaccgtcggcgacgggtccggctggacaaccg

SEQ ID NO: 379190 - DNA, 187 bp, Zea mays
cttccgcttcctctcgctccctctgctctctcgcggtcgcagtctcgcagatcccgatcgcgcaaggagccagcgtagagggtgatcgacgatggcgggcagcacgcgcgcaggcacaaggcgttcctgctctgcaactacacgctgctgggtgcagcatcggcgtgcatcttcctcacgctctcgc

SEQ ID NO: 379191 - DNA, 258 bp, Zea mays
attcgccatcgcaatcccttgcactctcaagacctgtctgcaagcacagccccaaagtcaaacagctgaactcgtcagcaattactgatttttgcagagaatgcttgcataactttgttaaagaagctgtcagtttggcattgtctggcgggcagatggatcaaactggtaccccctgttagattgtagacaaatttgggattctttcttgtcttatcattgtgaatatctcaaagcacaaactagggacaagttgta

SEQ ID NO: 379192 - DNA, 244 bp, Zea mays
gcggcgagctcgcgctgccgcacgatgggcaggagcgggcggtcggcgatgtcctcctgcagggtggcgagccgatccgaaagggcgttctcctggtgcaccgtccggctgtggaggtcgttgatgagcaccagctgcgcggacgtgatccccagggccccggtcgggatgacgccgttgctgaggccgccgagcagctcctccacctgcgcctccaggcactccccggagaagttgtagagca

SEQ ID NO: 379193 - DNA, 179 bp, Zea mays
cacgcggcacgtgcgggcgctccacggcctcggggcgcggcggttcgggatcgtggacgtgccgcccctcggctgcgtgccgtacgtgcgggccgcctcccccgacggcgcgtccaggtgcgtcgacggcgccaacgcgctggcgcggggcttcaacgacgcgctcagggcggcgctcg

SEQ ID NO: 379194 - DNA, 246 bp, Zea mays
ctgtgttcttcagtactaccgctaccacatttgcgatcctgagttgtgattaccggtcctttaggtgatgcacaaatggtactcgtgaatattctttttattagcagttttctgcagggcctgtacattctctttctgctcgatccgattgcattgcagattgatttgtaaatgagtacatggtcacgttgaaccttgaaagcagtcaatcatttcaaaaatggtttatgaattggaagctagtat

SEQ ID NO: 379195 - DNA, 156 bp, Zea mays
atcaaataggtatccatagctcagcatagcccgttttagatacttcaggcactaaggcttccagggattgaagccttagtgcctgaagtatcaaataggtggccctgatgatagtctgcctcataacatcattgcttggttaagagttgtatctgc

SEQ ID NO: 379196 - DNA, 249 bp, Zea mays
cacaagcaaactaaaacacagcggctaaaggcacagctctccagcattcatccagaaagaagagaaggaaccaagccaacagccaaccatgatcagcgccaagagggtcgctcatctggctaagaagtggcagaggatggctgcccaagggaggcagcgcctcacctggggcggcgcaggcgcggcagcaaagcaagccggcgagagctgcagctccgtggcgagcaagggccactgcgccgtgtacac

SEQ ID NO: 379197 - DNA, 252 bp, Zea mays
attttgtcttaatgaccagtatggatttgctttccctttccgcaaaagactcgtatgtggctttttataacttttgcactgcagcatgagagcatcaactagtcaaaatcctcacagtggttttctacttttctcacaaatcacaagcttgcttgcatgatctatggtactagtttcatatgtttttagcactgcactatataggtgctagggcatagcaaagagaataggctgccaatgccttaagttgtc

SEQ ID NO: 379198 - DNA, 245 bp, Zea mays
ctcaccaccgattcggatggcatccccagttcgcatgaggccagcctctccaatgtttgcctcctcagctccagctcaagggccgaaacttgtgaggcctgttcaattgaaggatgtgcaagatcaaccaaggaaggaaacagctccatccgtgatccctgttcaggtaaaggacgtgcaataccaatcaaggaagagctcaatgtctcctgcgattcctgtcctggtaaaggatgcacaacgcc

SEQ ID NO: 379199 - DNA, 243 bp, Zea mays
taaatcgaaatacactgaaaaatggaccggtttccgtttcccggtactcccgatcagtacaggaaacggtaaattttaccggttccagtaaataccggacgagaagttcgtccctgcatcaattagatcatttagttttgtctaaaaaaattagctttatcgtagtagctcggtagccccctctgatctgtttctagatctgccactgtgcggaaccgctgctgctcggcccgttctatcaca

SEQ ID NO: 379200 - DNA, 246 bp, Zea mays
ctgaagaaatcgatgacgtaagtaatgaaaatctagctgacaacagtgacttgcctactgccagtgaagctacggtaccagattcccagcctacagaaataaatgctaagcgagagaaagatcataggacatgcaaggctgatcatacttgtgaaagatggtggaaaaagaaaaccacgtatctatttcatcatataaaaggagtgactacactctgctcagttgtggcagctggtgctgttgttg

SEQ ID NO: 379201 - DNA, 207 bp, Zea mays
cggttttctccctcgaggaatccgacctcaaggcgctggcggcgccgggtgtgcttccgggccccgcggtcgtcgtgccttgaggtcgcggtgtactacctggcccgcttcggcgcttcacgctgtggtgtcctcgcctgcgggaggaagcggctggttggcgtgttcagggtggagctcgcttcgtcggaatggcgggacggcaag

SEQ ID NO: 379202 - DNA, 239 bp, Zea mays
caaaataaatatattgaacactgacgagaagattaacagtggtggtctttctcagcagttggttatgcctcttggtagtaaagttcaaccccagcaggttcccaagactaatgatgcaatcggctctgattctgctaacacaaatgaaaaccctattcttggtggaagagtattttctcctccagttgtttctggggttcaatggagacctcaagctgctgctgcatttcaaaatcaaa

SEQ ID NO: 379203 - DNA, 231 bp, Zea mays
ctacgcatgcatgcgtttggactttggtgttcatccctggggtggggccgccgtgggggaagttaggagtttggtggctttctagctctgtcttcttgttttctgtttattataaattttctgaacccttccatgcctgatcgatacgcgctgtggggtaataattgttagaaaatgtgacattttgtacgtaatcaatccagggggtgcggtatttatcgcgtcagggga

SEQ ID NO: 379204 - DNA, 184 bp, Zea mays
aacgataccaccaccgctagcgctagtgctctactgctctgctctgtagggagagagagacgggagtgagagagcagagatggcagctgagagctagactgagcacgcacgtaacgtaacaggctcttctcccatctccgtctctctctctctctctccgctgctcacagaatcacacaggcaa

SEQ ID NO: 379205 - DNA, 259 bp, Zea mays
tgaactgaaacccttcgctctatctatctatctatataaacagatgcccttcgctctcgtctcagcaagcagcatcgaccgacgccaacgacagagaagagagtccatctgctcgttgccttgattttgtggaacgaagcgatggctcgcagcggcgccatggtttcctgcatgctgctcctggtggtggcgcaactgctcatggtgatggccacgcagacagcggcggcggcgggcgaccaacgcggagctggacgcc

SEQ ID NO: 379206 - DNA, 220 bp, Zea mays
gcggactgactggcaactactggcacgacttcagcgacatcatgatcccgctctacctccaggcggcgcggttcgagggcgaggtgcagctggtggtggagaacatccagccgtggtacgtgggcaagtaccgggccatcctgcggcggctgtcgcggcacgacatcgtggacatggaccgggacgaccgcgtgcgctgcttcccgggcgcggtggtggg

SEQ ID NO: 379207 - DNA, 204 bp, Zea mays
cacagattaccctttctttgaagaagaagatggcaagaatgaggagtcagtctgatcacaactaataatgtggagggttcatcaagtttgagttcatcattatttccaccattcattattggccattgtggcggagtcattgcgtcgtgttgtttcattatgtactagtgtaaagtgaaataaatcatgtactagtgtgaagtg

SEQ ID NO: 379208 - DNA, 263 bp, Zea mays
acctcatctgacataataaatggctagacatacatatccatataaaaaaaactttaaacaaaactttgattccctgaaccaaatgagaaactaaaattctagaccaaacttattgtatctctttttcttacaaatctcgaggacgagatttctgttaagggggtaggatttgtaaagcctaaaatatgtatagaaaaaaatatagaataaataaagacataaaatagtaaaattcaaatatctcagattagacttgagttttg

SEQ ID NO: 379209 - DNA, 240 bp, Zea mays
catgaaattgccagcacggcaacgacagaatgacaggatccacacagttgcttcaccagacagggagtgccctggtagagggaaaaggaagaggatttcctggtgttcaaaggatccaagctgcctcaaagacccaagaaaagagctaaggtccatcaaaggaccggccattttggaatgccaagaaccttggcaaggggccttgcccctggaaggttatgaagtccggaagaagaaggt

SEQ ID NO: 379210 - DNA, 259 bp, Zea mays
gttatatttgcgtgaccaaaaccacttgacttatcccaccatgatcatgatctaacccaaccaatagagtcatgatggattgcataatctgcctatccccacctaacatcaaacaaactttggacctacatcatgtagtctatctcatccatatttatcttaaccatattcccaaccgatgatatacactaaccatgaatcaatgagaccaagaccagaaaaggacaaaatcaacctcatcaaggaaggagagaagtca

SEQ ID NO: 379211 - DNA, 254 bp, Zea mays
cgaggatgaacctcacagatgacggctagaaaatacttcacatggtttagaagcctatgccatgctgctggttcacctaagcatttgttggaaggtaacaccaagcagccgtgaacagccacggtcacctgaggagccttctcgcagtgtctggatgtggttgtttgagcctctgaggggaaatgccctgcgcgcttctgtgcttctcgtgtttctacctggcaaccacgtgcacataattttaccagaatccg

SEQ ID NO: 379212 - DNA, 251 bp, Zea mays
gggcgagtgtggtggcgtcctgagcctccaccgggacgtgcagacctgcgggtaccaggacgtgcaggtgatgtggaacatgctgagctcggagaaggaggccgcggccggcgcgctgccgaagccgccgcggcggaagcgaccgtcgtcggtctggaggctgccgctctggcccgtccggtcgccccgcgccgccccggggtgaggcggcggcagcagcagcatcgccgacggaatggtactcctggttg

SEQ ID NO: 379213 - DNA, 247 bp, Zea mays
cctgcgcctgcgagctcaggagatggttcccggaggaaagatggtgttctccctccttgggcagcgcccgacgacaaaccggagaacgccctccagcttttcgaatttataaatgccgtcctacacgaaatggcgtccaagggtttgatcgacgaggagagactccactctttctacataccggtgtatgggccatcagagaaagagctgagggagatcgtagaagctgagggctcgttttcgatcg

SEQ ID NO: 379214 - DNA, 237 bp, Zea mays
  unsure (1)..(237): unsure at all n locations
tagttaagttacctgataaatttgaggttacaacctattgtgcttctgtggttatcgtattagcaaataatttggcagatggcaagcatattgtgcctaggctctcacatgaattacccatcaaggagggacactatgacaatattgcactggtctctgnagataacaagcccggaacgctctctggatgtacttaccnagattgctggcacaagcacaacagatggatatgaactc

SEQ ID NO: 379215 - DNA, 282 bp, Zea mays
ggaacttctttattccaactactaattcatcaaaggaagataagaaaacttttgtgacaactgcggtaaggaaacatgagagcgatatgcaggagaatcacaatggcacaaaaaatattgtagtatcatctgaaatgcaagtagtaccttgcagcatgaaagagatagtatcaagtgacatgaaagaagaggatcattcctctccaggttttcttgcagagaacttatttgctgacttgggctttacatgttcatctaatgcagctgactaaacaactgagg

SEQ ID NO: 379216 - DNA, 281 bp, Zea mays
aatgtccgtactagtgatgacagtgataatatcatagtgcttgtgagaactgactattctctcagtgcatcagaccttggcaatcatttatttaactggacaagaacttctttcactgcaaactactatgtgaaatacaagcaccctgacatgcttgatcagtcatcttgcctgcaaggagacattccatgcattagaactgagggtttgccacttgctttacctgatttaaattcagctaatgtaattgtcttgaaagatggtacccttttgttctatgc

SEQ ID NO: 379217 - DNA, 247 bp, Zea mays
gtaataatggatcaagagatcatcaatgatgttaacatcttgatgagaatttcctttcaaattcatgctgcactgctcaggctccgtggggtgattctactaaagaaaaggtgaaacatgggcctgaacgcataaaaatatcggtcatgcgtttgtactcacccctggggatttcttgtcaatgatctaacctgtgatataggccttgtaacttccgttgtgagtaagtttcattcaagctaacggc

SEQ ID NO: 379218 - DNA, 238 bp, Zea mays
cccgtactcgtcgccagcaagcaagcgctccccgcgtgttcacacctcgacctgcgacgtgaagccggcgtggaccaaccgccgaccacacgccttggagtctgccagccgccgaccacaagcgccgccgccgaccgccgcaaaggggaggagagatgaagtgggggctggcagccggcgtggcttccgcggcgaccgtagctgcggcgtccggcgccgagctcctcgcctgcgactg

SEQ ID NO: 379219 - DNA, 246 bp, Zea mays
ctgggttcaaaggtcattctccgacacgctcgactcgtggtggcgtcacacattggaccaggggacgtgctcgaggacgaaagcgctcgccatctacaactctacagggctgacagagtacgatccggatggggtggatgcgagggcgatcaaagagatcattgagggggttcatgtgatcaggcttggcaagtatagactcactaccagagaagctacgttcgatggattagtgcttagtatcct

SEQ ID NO: 379220 - DNA, 207 bp, Zea mays
cgtgttttagacatcataatgccacaatgaaacatttggttttaactttcaaacattgtacataagcagagggaagtacatgtaagatgtttgaaagttaaaaccaaatgtttcattgtggcattatgacgtgttttagacatcaattcatggctttaaactggtttgttcagagtcattttagcaaaaactgagtgttctgcatga

SEQ ID NO: 379221 - DNA, 237 bp, Zea mays
cctcgttcctgtcgcgcaccaccgacctccacttccacatcgcccccggcgtcggcgcggtcagttgcaacacggcggactccaaggccacctcggcggtcaccctccgcatccgcaagttcatgaccaaccgcctcctcgcgcgcatgcaatacgtgcttgaggtgatctcataccggccgtgctaacgtcttcaaggcggagttgaaggataggcttgccaaggcgtacgacgtg

SEQ ID NO: 379222 - DNA, 234 bp, Zea mays
acgacattcacctacaacgcgctcctgaacggccactgcaaggagggaaacccgctcaaagcgttcgcgctgctcatggagatgtgcggcaacaacgacgctgcctgcctgccagacaagaccagcttcgggatcgtgctgacggcgctgctccgcgccggcgagatctcagcggcgtggcagacgtaaaacgggtggaccgcgctggggtccaacgtggacgggcgcgcgctg

SEQ ID NO: 379223 - DNA, 234 bp, Zea mays
gatcaggtaaagtttgtcttttgtttagtgtttgttgaatgtggggtatgcgtgatcttgctgaatcggtgtggtgtgttgtaggcggcgcgtgccgaggtcgtggaggacttcggacccctgaacagcgtgcggcccgaagtggaggccaacccggtggtggccgaggctgaggtcgacccggcaccgcccccggaaaccggtggaggctccctcgctgctcctgcggctact

SEQ ID NO: 379224 - DNA, 238 bp, Zea mays
attgggccagtttttgatgctatgggcctcttcctgttggcacattttcgccgccttttctcactgtttttccaatggatgcacactgatgataataagacagttcttctgactttaaagcaaatacatgccattatcaagcttacctggatcaggaagtcaccttatactttgaggctggtggacgagcttgttctattatataaagaatcagccacaaggagcaaccgtgaaatca

SEQ ID NO: 379225 - DNA, 213 bp, Zea mays
ggacgctgggcaaaagaccgagagagagacgaagcggagctgataatattttttttaaaaaaaacaatactaactagctagcgatcgagcagcgatacagtacaatggcgccgaagagcctgcttgtcgtcgccgccctactcgccgtcgtcgtctccgcctgcaagctgccccgcggtgcgacggcgttggaggcgaccccagcaccaacac

SEQ ID NO: 379226 - DNA, 232 bp, Zea mays
cccacgcgtccgaaccgatatgtctctagatcgttgtatggtgcgacttgcattggccctacacaacgactgagggcatagtttcccaatgcttttatctagaatcaagttccgtggtttggtttcagttaccaaattccttgaaaatgctttttaagggcttgttcggttgcggcttgcgcctagttcgaaggagattaccttcttttaattttgactagggagggattta

SEQ ID NO: 379227 - DNA, 124 bp, Zea mays
gttttgccgccgtagcttacatttgctccccccacgaatttggagggcaatgttttattcgttttgcacatgtatagtgattcctatacgcgtgccaatgactgcggggctacgttgctaaccc

SEQ ID NO: 379228 - DNA, 228 bp, Zea mays
actgaatgttagagtggcagttttatgggtttgtatgtgagtaggtcatccagagagcttcgttagatatgtcatgtggccataggcctaaactaagatgtgaatcacaagctacaaggtaattagcgtaatattttcgggctagcttaagacgtacactcctaatatactggactgcattctaacttaggctgatgtatttcacctagagctagctccggaatgggc

SEQ ID NO: 379229 - DNA, 151 bp, Zea mays
ccaaaagctggctctgatctcaagatcccaattgggaaaatggccatggaggttttgagtggtcagagattcaaagaggcaaaaattgaccctttcgccaaagcaagaaagtcttctcgaaccaatccatttattggggccgacaaggacg

SEQ ID NO: 379230 - DNA, 228 bp, Zea mays
gatttggctggccaatcaagtagaacaataaagatcaatgaagcttctgaatctgtgactaagccaacagatgtgttaagcaaaaataacggatcagaggttgccaataaagaagggagcaagagctggatgcccaaatttattgtgaaaccgaagtctgcaagcgcagatcctcataagagacagaagattgaatccacggctgtccaagacaccgggaaaggccaa

SEQ ID NO: 379231 - DNA, 108 bp, Zea mays
gccagggacaaatttggctctttctttgggccatccaagccggtgatttctcgtcgagtgctagaagaaagaaaatcattgaaagaactgcataacacggttgcaagg

SEQ ID NO: 379232 - DNA, 232 bp, Zea mays
agagaccagctgtgagttgggctctgaacgtttcttccatgttcaattcgattgaacatgactgttttgattagctgttctgttctgtttattttttatttctcacaatttactggctgcagcgtgagttcgtctagtattggtaaaaccttctgctgttggcagtaacagagtctcactctacaaatactgcaccaaaccctgatctgttctattcccttttcctgcaaat

SEQ ID NO: 379233 - DNA, 129 bp, Zea mays
caatatgcataatttggttgaccatttccacgagcgtggtcttaatcgctcaatattcctcagcataatggaagtagaggaatcattgtcacgtgattctcctggagttgttgcaaatacgtcgagtgc

SEQ ID NO: 379234 - DNA, 107 bp, Zea mays
attagttcagagaatagctagtctctagattctgtgcaacccctgttataaccctaaaattgtagtgctagcaacactacaatcaggttcgtatagcctggcgcgtt

SEQ ID NO: 379235 - DNA, 229 bp, Zea mays
ggtagatctggtgaaagctcatcgcaaacatgtcgacgacgactcatcaaagagggaaagaagatactacgtcttcgacaatctcccagtgcacatgcagatggttaaccgcccacaactgcagagcaagctagcttcgtcaacacccacaggatccgagtcccgctatgtggctggctccacggttgacccctagacaattactggaggaacaagcttcagctcttgt

SEQ ID NO: 379236 - DNA, 268 bp, Zea mays
gacgaaactaaggagattgatgggaaccgaagcacctaaagagcaggaggcagaagacagttcgccgagtgatttgcctgaagaggttgtcacacctgaagcatcctcagaagaggatatgggagtcgtaatcgaggcttgaccagtgatctgacgtgctggcaagcgagaccagaatttctggagctgttcctgtaaaacgatattttgggtcctgaagtcaccaccgcttggatcgacatgaccctgcggtgttctggtgattcca

SEQ ID NO: 379237 - DNA, 262 bp, Zea mays
acacagttacacaggcagccagcccattgatcgatcgacacatttctcaggcccttgctcatcagttcggagatcgagtggaaaccttgtcgagaatggttccagatacagttcgtgtagcagtaggaatcctaggaaatgctgcttccatgctcctctacacaacccctatactgacgttcagatgggtgataaggaagggcaacgtggaggaattctcctgcgtgccatacatcctagcgctgctcaactgcctgctgta

SEQ ID NO: 379238 - DNA, 240 bp, Zea mays
ccagcattgcagtaagcttctctgtgtatgaaactttacgttcccattggcaaatagagaggccatgtgattcccctgttctgatcagtttggcttgtggaagtctttcaggaattgcatcgtctacttttacattcccattggatcttgtgagacgtcgcatgcaattggaaggagcagccgggagggctcgcgtctaccagacaggactttttggaaccttcggacatattgtccgta

SEQ ID NO: 379239 - DNA, 231 bp, Zea mays
gtcagtgcaaagcaccaccaatgcctgaataaatttaactacgaggtaagtagctagctctggacgatggccacgtccccacccggctttcttcaggccgtgagacgtggccttcgtccagagctagctacctacctctttcagttcgatcgtcgtcagtgcaaagcaccaccaatgcctgaatagatttaactacgaggctagctgctgaacatcgatctgctactgcta

SEQ ID NO: 379240 - DNA, 227 bp, Zea mays
acgaacgctatgcgaagcccaaggtcgtggctgggtcgggacgcccgtaacgaggctcggggcacggaagccgcggcttgccatggtgttcggtgacctgtatcccagcgcaatgcagcttcagatggtcagcgtcgcttcggttctggaggcatgggctacgaaatgaaggtgcgtccctgaaatgctgtctcgcgaaccataagctagaagtttacttgttggtc

SEQ ID NO: 379241 - DNA, 146 bp, Zea mays
gtgaaacttcgagtctttgatgaataatgtctaattcgttgctgcctctgtcctgagtgcctgctgtagtgctgctcatcgccttgttcgttgccgttgccgtcgtgccccacggccacgcgccccacttcccggggtcctgaggt

SEQ ID NO: 379242 - DNA, 244 bp, Zea mays
ttaaggtaataccctaaaatcatgttttaggtaaattagaaaaagtttatctcaagattaaaatgcgatgaaacaaatgactaaatgaaaagagctctaaagagttaaagtaatcctttcatttaaaacttatactttggaagattctttgaatgaatttcaccaaagtgtgggccactaaaggtttcatgatcatttatgagtatgtaataaacattaatttgataaaattattacttatttt

SEQ ID NO: 379243 - DNA, 240 bp, Zea mays
gaatgagcaaacagtggggaaagcagcatgcaacaggcagacaagagcgaagaaaaaagacgtgcaagctaattgattcctgcattgctgaatcatggtttcctgttggctaatagtctacaaagatcaaggttggcagaaaagcgtccatgaaataatttagctgattatataaattaaatgttagcaaggaaaatagtgttaatgcctctggaaataaacttataacaaaaaatgtag

SEQ ID NO: 379244 - DNA, 153 bp, Zea mays
attaccattaccatttacgttacatttcgtgaaccaaacggtaccttaactgtaaaccattacatagtaggctgtgcacatatatttgtgttgaaatctacagtgcaactccatatggagtcatgagttgactcttgcatagtacattccttg

SEQ ID NO: 379245 - DNA, 126 bp, Zea mays
gcaggtcccgcctgctgtgcgctgacgacgtgccgatcctcggctacctccactgcgtcctcaacgatacgctccggctgtacccggtggggcctacgctgatcccgcacgagtccacggcggact

SEQ ID NO: 379246 - DNA, 258 bp, Zea mays
ctcagatcagggatagctcgagactgtgtatttggtggtatgttcttttctacttggcaattcctacacacagtgatgctcacctggaaggcagttaatatgagccctaaacctagaaatctagaagcagcaggacctgtacccccttttgcctctagtgttgctgcaggctttgcaggagcgatagcagctgctgcttcacatacatttgatactgctaaaagtcgttcagagtgtactgtggtgcctaagtatatc

SEQ ID NO: 379247 - DNA, 139 bp, Zea mays
gaggaagactactataaagattgtgaggagttctaggccattgttgcttcgatcaaccaccatgtggatagtcgttagttttctagtttatgttataaagatattcaatttatgtaataaagtttatgatattggtttg

SEQ ID NO: 379248 - DNA, 169 bp, Zea mays
aataaatatacttaatataaatatgtcattgtaatatatgtaataggattcattgttgaatgacacaagttgtatgcttatttttttacaatttattgtacattattatttgttcattgtaattaaatatggctgggaaaataagtaggatgagaccatatggcatcta

SEQ ID NO: 379249 - DNA, 150 bp, Zea mays
gtttggtggactagctcgaagcaaaaaaaaatggcacaactctaaataattttgggtcaggccgacccaaaattatgcattggaccaggcttagaccaatgtcgtgctccacaggcgggcacgagcacgacccgtttacaaagtttttgc

SEQ ID NO: 379250 - DNA, 146 bp, Zea mays
gtacatgaggaggcacggcgtcacgggagactgacgacaatcttcgtcgtcaagcctcctccatgggcatgccttttgtccctcgttcgcctgatgtaactctccatcctcctcccccggagatcaatgagtggtaccagcaggcc

SEQ ID NO: 379251 - DNA, 132 bp, Zea mays
gtgtcactgcaggtacgtctacttgggcctgttcgacaccgatgaggaagccgccatgtagaataattggaccgcactgtgggcccgcgaagcgtttctcggagcaccgccacacccctctgggccgcgaaa

SEQ ID NO: 379252 - DNA, 220 bp, Zea mays
cgtcgccgcgtatctcccttcagcttctctcccgtatctccctgccaacggcggcggcaacgcgagggtaagatggcggcggcggtgtctcgcgacgacgagctggtgatcaagtcaccaaacgacaagcggtcttatcgcctcctccgccttggcaacagcctccgtgccctaccttgtcacgaccctgagatctacgccgacggttacccacctcaga

SEQ ID NO: 379253 - DNA, 180 bp, Zea mays
ggactcgggttaaaaccatacgcgatgtgaaaagcatgattgagacgaaggctgatgttgctccgaagctacacgtaagggagcttcggctaactggcggaaaaaggaaccgacctaaaggggaaaaggctatttagctctcattggttcatccataagtcaatagtaaatataaagggc

SEQ ID NO: 379254 - DNA, 224 bp, Zea mays
gtcttcggccagcttggcctccgtcttgcctgagctaccacaccactgtcggtgctcgagtttttctgtcggtttggtttgcctttcagcagcttcgtttccgtagctgtttgtcttggcaatctgcatctgcatcatcagctgcttctgaacctggtacacgcggtgcagctcgtgaacctggagaagtgaccattgaacagttttttttcagcattacgaat

SEQ ID NO: 379255 - DNA, 193 bp, Zea mays
  unsure (1)..(193): unsure at all n locations
gaatctttatttcagatatttaccggcattgtgtgttttcaacataacccgcagtgcaatactcccactgaattatttgggcaagataagatcttttagttgtatcaaagatagcacttatcagaaactcagaagtcagatctatcgtctgctttcgntttgtgaattgcactgtggtgatgatcttcccgtc

SEQ ID NO: 379256 - DNA, 275 bp, Zea mays
  unsure (1)..(275): unsure at all n locations
ctgaccactaggcgatccaggtcgtcgaatgttccacgcgaaccgcagccgcgagttccgtctccggctccgccacatggcagaagggtgcttcgttcgttgcagtgctggcgccacgccgtaccgtacactcgcgtttgctgatgttcatctaattactgtatatatctccgggcgaaatatctagcaatcgtcggctttggatgangtgcgagattgctgctcaagtttcatgctctgttgtttgaaacttcaagattgttaatttcggaaag

SEQ ID NO: 379257 - DNA, 189 bp, Zea mays
attttaaccgcttgcatctattcggaggaacacagtcatcaggcgagccagccagggacgggagtaagagagaaggggttcttccatttatttttttcctctcgggtgatcaaccgcgccggccggtcgaagaaaggaggaagaagtatgtttggggactgccaggtcctatcctcgatggccgcggtg

SEQ ID NO: 379258 - DNA, 301 bp, Zea mays
caggaatggtgctaaagatgaccagaaccggaaatgtaatgggactgatgatgtaggtagcgagacgaatgctcagataacaccaagtagccaatcaaagcacgtaggcaggaggaatggagctttaaaccacaagaacaactctggcaggttgatgcagcgtatgcaacctgaagcagctgagacagctattgattgtggtaatctcttgcctcgaaatgcaaatagacagatgcgacacaacagcgggcgcggtggagacatggatgaggaggacaggatgatggacaagcttttgatg

SEQ ID NO: 379259 - DNA, 300 bp, Zea mays
ctccttcgccaccagacctcaagcgcgccacacgccgccgcacgggagccgcgcgccgcacccgccgccgcttctcctcaaaaccagaggtctccccccgtcccccgatccagcgtctccatggccgcgccgcagcctgtcgcccccgcctccgaggcgccgccgtctgcgcaaatggtgggcaacgcgttcgtgcagcagtactacctcgtgctgcaccagtcgccggatctggtgtaccgcttctaccaggaggccagccgcctcgctcgccccgcatccgccgccggagccgccggc

SEQ ID NO: 379260 - DNA, 360 bp, Zea mays
cacaaagacaattatctcgttgtctgccggtgtcagcttcctccagatcaagaagcggcaggtagagcagagaagccagctagctagcgagctgaggagagatggaagcgcagaacggctacagcccgcttcttgccggggacgaccacgaggcgtcggaggtggcgatccacgccaccggcggcgctggtgatgaaggcgacgacgtcaagctcaggctgctcgggtacaagcagcagctcaagcgcgacctctcggtggtaagcaacttctccgtgagcttctccatcgtgtcggtggtaacgggcgtgacgacgctgttcgggacgggcctcagttcggcgggccggcgacgatggt

SEQ ID NO: 379261 - DNA, 323 bp, Zea mays
gcagagcgagaggagttcaaacaatcaaagagggaatttaaattgtaagatattgagatattggagtcaaacacaagatagcaatgtgatgcgattgtagagatccctcatgactcatgatgtcatgatcaataataaaaataattaaaatacgaacacaacatttaggattatgagaagcggtcagcaagtgtattctcactggctagacttaaagatcaccttcaacatgtgttttgaataggatgtaccatctatgtataaataagaggtgtgtcagtctcttgttatgatttttcaaagcacgacagtatagtagaaag

SEQ ID NO: 379262 - DNA, 347 bp, Zea mays
cgcagcggctgccccccgaaagcaaccacagtcacgtcgctatcgccagcgccaccagaaaaacgcatcccacgcagaacccctcgcactcctactccctctctgcctccctttcctctccttgtgcccgtcgcattgaaatggagcagcagcagcagaagcacttgcgccggtgctagctgcgacgtgagcccgcagcagccactgccaaggacttcctggcccgcccggcttcgctgttgccggaaaggcggtggctttgggggaagcaaaagcaagcgacggttgcggaaggttcttgcggattcgcgcgctggatgaatgtgcacgcggtcgtcggcggcacg

SEQ ID NO: 379263 - DNA, 343 bp, Zea mays
  unsure (1)..(343): unsure at all n locations
atctctctccagtttcccccagttcccgtttccatctccatccttccccccgggagcaggagctgcagccaggagtcgagtcggcgtcgtcacgggagatatcagcttcgctatcaccggatcccccctctgctccctccgcacctcccatctgcgctctctgttttcttccgcgcaccccggctgttggtgtcccgtccggcggcgttgctggtggctgaatccgagcctttgaggggtctgctgctgccaccgctgccaacgttcttgagatactttcttgatccttggaggatancagaggatcttgcttcctactcgagcaagaaaaggggagacgtgt

SEQ ID NO: 379264 - DNA, 122 bp, Zea mays
agccgaccagcaggaggtacgagagaacgcctcctaggtggtcttgctcgtacctccagctggtcgtctgaacaagataggtggaggaaaggacggcgagcgtatggtttgagggaggaaga

SEQ ID NO: 379265 - DNA, 285 bp, Zea mays
ctatctagcttagcctgctgccccttgttgtagtcctatcagttactctgctagtttgcctagatggaaatagttggaccactcaatgtgtgtgctctgagtggctgttgtgaaatctgttaattttatgccctaatgacatgacataaattactcataatacttagctatcgatgaatctccctatgtactttcattcggcttgtgaaatgaactatggcggttttcgacttcaaaaaaaaaaaaaaaaaaaagaaaaaaaaaaaaaaaaaaaaagggggggcc

SEQ ID NO: 379266 - DNA, 289 bp, Zea mays
taaagttgtaactatataaacaaagtatcagctgcatatatgtagatatgtatgcgtatgagcaatgcaagtaaggagatctatctacatatatgcagctgatgccagagttataaagttgtaactatatattattattatttgtactactaacatgagagcagttgtacacgtataccagcatgcatgcatggatgttccttctgatgtatgtatgcatggtccatgtctagctagctattgttggaacttattaattggaacaatatggccacgattggatcaggtt

SEQ ID NO: 379267 - DNA, 292 bp, Zea mays
ggaagacctgcccgacccggagaagaaggcgctcgacgagttcaagcagctgatcgctgccgccctcgccgccggtgagttcaacctgcctcccccgccgccgccgccgaagcgcaaggagacgaaggtggaggaagccaaggccgaggagcccgccaaagaaaaccccgcggcggaggccgaggctacggcggaggagcccaaggcccagatggctgcggatcccacggttgaagaggtcaagacggaggtgccgcggccgaggaggcaaggctgagacactggctgagga

SEQ ID NO: 379268 - DNA, 224 bp, Zea mays
aggttatgcaaatgttaaccttttttctgaaatgagctagcttattgagggcttctatttaaatgcctgactcatttatatctacttggcgatattaggctcccttttgaacttgaagccacaaaataattagacttctagaggagtgaggctatttgggtttctcataggaataggagtgaaacagattttgtctagagattactttccttcatttgctaagt

SEQ ID NO: 379269 - DNA, 287 bp, Zea mays
gtccacggccaaaggcgagagagagagagagagagcacgggatgggttgaggaacgagatggagggagaaagtgggcagcctgctggatcttggcatctcgccgccgccgctcacttccgctccacctgctttgtgcagtgtgggctagttatctactagacttgccactggtgcagattccgttgatcccacatctgaaaagcaggggagtcgacgaccctcatggttttgaggataatatattgcatctctgcactgttctaagcgtgaggaagtaaagcattat

SEQ ID NO: 379270 - DNA, 307 bp, Zea mays
tgtgttggcagcatcctggtgacagcgttcgtggggactgccattgcgttcgcgtgcttctcttgcgcggccatggtggccaagcgcagggagtacctctacctgggcgggctgctctcttctggcctctccatcctgctctggctgcagttcgccgcctccatcttcggccaccaatccactagcagcttcatgtttgaggtgagagatcatatggaacatattcactgacatagtgacatgcacatctgtggaacgcatatatgcgcgcggagcgcttaattaacttgaagtactttgacgctgc

SEQ ID NO: 379271 - DNA, 301 bp, Zea mays
tccccaatcaatccatcacgttagctgcacctgcgcctctccttgaggtcgcgcagcaacaatggcgtgctccaaagcggtgttgctcgccgcgctcctagccgtcgcaggagcgctctcctcagctgcggtgtgggaggactacgaccaccacatgtaccacaggtgctacaggtcctgcatgaggaagtgcgtcgacgacgatgccgatgatgcattgaagaatagcatcagccccgttgccacctccgtgtcggatgatcgtgaccacgaccatgacgaccaccacgatgatcacgac

SEQ ID NO: 379272 - DNA, 279 bp, Zea mays
gagaagaaacctccaaacacctacctctctacgaactacctgccgccggaaaaccctagagcgctcgaccatggatccgcagcagccggagcctgtcagttacctctgcggagattgcggactgagaacaccctgaagcccggagatgtcatccagtgccgtgaatgtggctaccgcatcctctacaagaagcggacccgccggaacgtttaatcgacgttccaagttactagtgggccggccttcctgggctttcgcttccaaagccgcccagcccag

SEQ ID NO: 379273 - DNA, 276 bp, Zea mays
tcccaggtcgacgaccacccatgccggcgtccccgtgtatccgtcgggcactgtggcgatgtgctcctccaacccggctctttgtccctgcgttcttccagcccccgctcgcgtcctcctacatcctccgagcggcgggggctgcctaggtcgacgacagccccgcgccggtgtcccgtgcatctgtcgggcactgcggcgatgtgctcctctggcccagcgctgcgtccctaggttcttcaaaccgcgtcctctgcatcctccgagggggggcgc

SEQ ID NO: 379274 - DNA, 274 bp, Zea mays
cattattattgtaccatgtttggttggaatatttttaaaagaatgttgaattatgaacgatatgagttattttatattctatattcttttggtttatgaaagggtgcctgaaatatcctatagatgtctttagtagaggatccaaataatggcctgcaaggtttattgaatcgttacgcacaaaactccatctgcttcagaattgagctaagcgcatcctaacatcttgactcctatatcgatccattattttggtacacatttgattccttag

SEQ ID NO: 379275 - DNA, 197 bp, Zea mays
cagaattcaacttggttcagaaggtttacttttggaggatatgggtggggatctgcaggttgttgaaatctctgcagttacaaaaactggtttggataaattggaagaggctttgctccttcaagctgagatgatggacctgaaagccagaatagatggccctgctcaggcttttgtggtggaggcaagggttgaca

SEQ ID NO: 379276 - DNA, 295 bp, Zea mays
aaatgtaaatcgtgctgtctcagccatatgtctcagatgacggtggttctcaatcattatatacattcagtatactcactggattcggcagtcggcacagagccattttgattgaacacagcaatcaggtcatataaagtaaataaatgatttgctattgcttgggacgttgtctatatcgtgatccgcccagccctaatcacgatggcatgctcttgaacgcatccctgctgcctgtcagcctgctacggtgctatatagagtgtttggtttgaagaatgagctagtccataat

SEQ ID NO: 379277 - DNA, 269 bp, Zea mays
cttcagattaggatagttgtccgttcaaaaagatttgtacctagttttcagggcatgacaagctgggtccgtgacgtctaaaaaaaaaaaaaaaaaaaaaaaaaaaaaaagggcgccccccgaaaattggccccttccccccgggatttattcccggccgggaacctggggggtaaccggtttccccaaagggggcccttttaaggctttggggaaaccagggcaaaagcttttccccggtggaaatttttacccgcccaaatttccaa

SEQ ID NO: 379278 - DNA, 260 bp, Zea mays
  unsure (1)..(260): unsure at all n locations
ggccgactagctaacggtgcaggcacatagctcgtacatgggacgccccccggatgaggcgaatggcgtcgtcgtggccatgctccacgcgacatgcgtcggcgngcgtggcgcgggggagtgcgggagagcctccgccgacagggacgcgctaaggatggcgccatgcatctcggctgccgacgacccgcagtccacgccgaccagcagctgcagctccgctgtgcacaccatcgggcagagccccagctgcctgtgcg

SEQ ID NO: 379279 - DNA, 306 bp, Zea mays
ctctagtcttctccagtacccaccccgcgccccaaatccagatccactgcccaccacccgcctattagtctccaacgcggacgcccctgcccccgcccccgcccccggctgcactcgtcgcgccatcctctggtgcctggtctctgggattctccaggttcagttgagtagaccagtgtttgagcaagggttggacataggaatgcgctgtatgtctcctagagtagcagtacaaaatccaaacccgcgcgcgatgaaaagcggcgtcatggttctcggtgtcggcagctctgaagaggcccctga

SEQ ID NO: 379280 - DNA, 226 bp, Zea mays
tgtaaattattgtgtgtgtgctgtctttacatacatacacatttgtgtgtgttcagaatacagtgctttgtgttcctggctgtttttgttgtacatggattcagacttcctactcttccaggatgatgtttgtatgtaaagcacatcttatggtattgccttatttttgttgctttattcatggcaaagtgtcagtttgagaatgtatgtttaataagcagacaat

SEQ ID NO: 379281 - DNA, 292 bp, Zea mays
gctgtcttgaggagagggagccacaccagggaggatgcgctcgtgccagggacaaggtaaccgtgctgagagagtagacgccagggaaagagggagccgagccagaatggagcttgtgttgtggaggggggaggctggtggtagggatggtaggaggcctgggtggagggaggtcaacaagattgatatacagtatgacaaggtatcaaaacaagtggatgttcatgctttaaaagaagtgctttggaatcacatccatgcatctgctgagactggtcaggaaagagaggaa

SEQ ID NO: 379282 - DNA, 294 bp, Zea mays
ctgatgaacgttaaggatctcacattggctcatgttaagagccacttgcagatgtatcgaacagtgaagggaacgacggcagacagatcatgtgctgcaggccatgtccagatgagagacatgggctttctgcacaggggttgtgaactgaatggcttcgaagcgtttagcaacggtacttctaatgctaccgccaataatagaatgcaggcagctgccgggtcgccggcagggaagcatgctgaggtagcctggttcttgcggccacccttggcacaccagagtagtggtggt

SEQ ID NO: 379283 - DNA, 272 bp, Zea mays
gataacaagccatctctgttttcccagtcacagacacactgtagagtatgcaggagattacagagatggcatgtttcgagatgttgaagaaattattagaaggcaaataaagatgtcagtacttccaagtgttcaacctttccatgccattgcttatcctattgatccattgcttgctttggaaataagccgtaaatatgcggcccactgttccttgattgcctctcgttttgggctgccgccttttgtgcatccacctcctgttcctgtaa

SEQ ID NO: 379284 - DNA, 258 bp, Zea mays
aaatcatttatgcatgcatctctattttgtctcattcatgtttagtcgcattaagctgtagtgctaatgccaccgaaagtaaactagatctagctaaagaggtaaactgttgacgagttgtcattttagaagtctatgtatttgcacagaaaaatacttggatacttaaaatgcaccaaacgcagtaaacttaacatgctaatcattgaggtgctccatatttttttaaagtgttattaactcagcgttgaactacaa

SEQ ID NO: 379285 - DNA, 167 bp, Zea mays
agattagttctagatcgctgtccgccgctcgcgatctagagctagcagcgcgccttgtcgcgctcggtagccgtcgatgccgccatggacgtcgtgggcaaaccaggcggggagcagccagctctcgcgcgcagactcgtcatgctgcttcgtaacctaacccacgt

SEQ ID NO: 379286 - DNA, 264 bp, Zea mays
caggtgttaatttggggcctctgggcctgagcttattgggtcccacgaaagaaacatgagaatccggagctccctcctcctcgtagtcctcctggctttggagactcagctgcctgttgtcttgtgtagaaagaatggagacaaattggggggctgcccaccagacgacgggccctgcagccaggtgattcctgatcagtgcgcgaatgacaaacagtgtccctcttcctggaagtgctgctcccgagcctgcttcctccagtg

SEQ ID NO: 379287 - DNA, 207 bp, Zea mays
ccttgcactgctgcctccagtatactgcgtcggcgaacttgccagaattccttgcctagggtttctccgggcagccttcgatggggcctcccttcttccttctcttcctcgtcctcacggccgctgcggtcgtgtcctcggccccccggcgggatgcgttccgccgggacccagggcacccgcactggcaccatggcgctttccacg

SEQ ID NO: 379288 - DNA, 167 bp, Zea mays
acgacaacaaggccaaggatccggagttcgcgccattcagctggattcacgggcgccaggttcagctttgattaaagatgatgactgggggattcgccgactctctccgtcctcagatgatatgttgtactgtactagcatataactaagaattgattgaagttgca

SEQ ID NO: 379289 - DNA, 293 bp, Zea mays
gaaacaaaaggaaacgagaggagagggaatcgaatacgataccttctcttctccctccattcctttccttagccccaaccatgccatattggagaggcgtcgagatcttatccctcgatccaattccaaacagaaaccgccggagctggaacaagagccgctcgcagcttgctggactctcccgctcctggccccggagccgccggccatgggcaagcacaagcagcgcagggtgtaacaagtcctggaaaggcaaaaacataatactatgtggtggaaacaagatctttgga

SEQ ID NO: 379290 - DNA, 277 bp, Zea mays
gtatatagtaatattgtatacttttgattagtccccatattgtgtttgctactgtgccttaaatcccatctgtcatgcgaaattttgaaaatcaaggaaaatcattcagctgttgttggaaatataagaaagtgtgaccttgaattcgaaagggcttcttgtttgggcacatttggtttcaagcttagatcttactaagtaaaatattgaccatgatatagtagttggggctcttctaatttagatagcgtttgaaacagaagtttgaccatacttt

SEQ ID NO: 379291 - DNA, 256 bp, Zea mays
ctgcaaagaagaaaactccagtgaagccaccaccttcaaaaaagcgtaaagttggatctaatgttgaagcccctgcaaagactactggtgttgatgatgctgaggatgaggacaggatggatgaagatgccaagacgccctctaaaggagctggaaggggaaggggaagaggatgaagatgagtagcaggagctgcccctggggggcacaggtagaagaggtggtagaggttttatggtttttggtgatgagaaag

SEQ ID NO: 379292 - DNA, 283 bp, Zea mays
aagagatatgccatcagtacagaattttgcaacacttagcccaatccctggtttgatgcaatggcttcttgctaagctggcctcccaaataaaattatcagaggcagaatcacgggaggggaattcactaggagcctgttctactttcaaagaatccatccttcttcctgatgaagagagaatgattcatgatgccatcgaacaagctgatggaaaacaagggattgaactattgcaagatatactgaaatcaagacagtgggtaaagttgcacaaattatct

SEQ ID NO: 379293 - DNA, 110 bp, Zea mays
  unsure (1)..(110): unsure at all n locations
ggctgaaccaaattcttgagggtcttattttcaaaggggtgtgtggctaagtgggcctgaacagagggaacnctagggccttggacaatgtgattaaagctgccatcttg

SEQ ID NO: 379294 - DNA, 192 bp, Zea mays
actcatcatagtggagcattatagctagctagctttgttgttactagattattcgtctgcagagaagaaaccatggttcaggaggtgaccagctagtgcaaggtacttactttatactagtaataagctatggtggtgggtgatttgtggtgcttaaaaagcgaaaaaaaatggggcgccccccgccaatac

SEQ ID NO: 379295 - DNA, 120 bp, Zea mays
gcacaggaaagggttcaacacattggttattctctgtgcttccagatccaccaagccacgagaataaccaatgtgttgaaccctttcctgtgcttcgatggcacatgaaagggttcaaca

SEQ ID NO: 379296 - DNA, 302 bp, Zea mays
gtcggcagcaggcgcatagatgcaagggtgagggcactgacggcacgcttgacgggcgacgagtaaacactaaagctttgattgcaggcggcgtcgtctgagccagttccgagtcgatacgctgtcatgcatgtcaatactactccgccaccttctgggtcgtcgtctttcgctcaggagggggcgagctacatgccgctcggtttccacctgcagcagcaccagcagccgcagcagcagtaccgccgcatatggcgcaccagctatcagcagtatcagcaacagctgcatcaagcccatca

SEQ ID NO: 379297 - DNA, 308 bp, Zea mays
gtttgcagacgctgtccaaagtcatatcacagagagtgtttaccaagcgaaatttccgttgaagcaaatgaataggacgatatcatcatacgggcttgggatattatcgacaagaatgctgatatactgcatggaccatgagattgatagtgaacttgagacacctgtcagagatcatatcaagtttccaaagattgagaaaccacttcaatttgtaaagaagggatctagcttgtagcctaagaagagaaagaggacttacagtgagacagttcgtgagcaatctcacagagatactgtgaagagga

SEQ ID NO: 379298 - DNA, 305 bp, Zea mays
ctcgtgcacagcaccttcctcattgacgctgcctccactaagcaaccgagatagggggggtcgaagcaccacctcgacgtcgccggaacgcttcaacgcgaagatgaccgccgtgccaccatggcgaagaaggcaagccctgccaaggcctctcttggctgcaccaccacgatgccgccgtgagatgcgtagagccaccgaggagaacagagccctagggtgcgcgtgtcggacccgcgaccgttggaccttgccgccccggacgacaacgatcttcccgagaggcagcgcctgcccagatccac

SEQ ID NO: 379299 - DNA, 162 bp, Zea mays
cggctcgagctgacatttaaatgaaatttgaaaaccaaatagtaagagctggaaagagatagttgtaagaatccatttaaatgtcagaatttccttttttaggaacaatgtgtatttcattgcactatttaaaaataaactcaaatttgcatgccatatgca

SEQ ID NO: 379300 - DNA, 123 bp, Zea mays
ggacttagaagagacctgtaagtaaatcctgaaaatgagccaatccccacttgaatggttactggagtaaacccgcctttaccaccccaattacagcacccgaggccgataaaccaacttggc

SEQ ID NO: 379301 - DNA, 283 bp, Zea mays
tgctggagatgcccagctcacgccggagcttagggccacacctccgtctccatggccgtcgcagccactgcgcacccttgctacccccttgactgcgtgcgagtgctctccaatgtcgagccccctccatctggtttcgggctgcagcagccgcctcgtcatcatcgcgtagagtatccaccgccgatccatgtagcccctatttggttgtcgttctgctccgtcgatctcctccatgcatgtgcgacacagccgctgcccttcgcgtcagtgtgccgacacg

SEQ ID NO: 379302 - DNA, 155 bp, Zea mays
aatcatcatagtggagcattatagctagctagctttttttttactagattattcgtctgaagaaaagaaaccatggttcaggagatgaccagctagtgcaaggtacttactttatactagtaataagctatggtggtgggtgatttgtggtgctt

SEQ ID NO: 379303 - DNA, 236 bp, Zea mays
cgcttcttaataacccagcttctgccccactcgattccttatcctgctgctcctgtagggtcaagggctctccgtctacacccgcttcttctcctccatcctttattcagagtcatctcgtacttccccatgggtgggggaacctgtgtttgattgtgtgcacatgtagatcttaaatattgtaagtcgtgagtccttacctcctgtaacatatcaataaagtacgatcattgtga

SEQ ID NO: 379304 - DNA, 203 bp, Zea mays
agtgagcagcaacggccagaaatttcagggagaccatcttgaaccatccagcctccaccaggccaacagctgacagctgtcacatgaatatgatcagcagaagaaccactcaggcaagccaagcccaaattgccaagcccccagatattaagcaattgtttgtttttttaagcatagactttgaggtggtatatagcataaat

SEQ ID NO: 379305 - DNA, 287 bp, Zea mays
gtccaccttgccatctttgtccttccaatcgccctgtttcaagatccaaccagctactcagcagagcctctggcctcctcggcgacagagcacgaggaaaccaggactgcctctaaagcttatacgtgcagcattaggaccagacgccaatggcggactcctcaatgctgaccgcagaggtgccaccttaccatcttcgcccctgtcagatgtagttcaggagttttactcctccctcaatgagaagaacagcaaacggctcgacaagttgatggcccctgattgca

SEQ ID NO: 379306 - DNA, 269 bp, Zea mays
ctgggtatcgcttcgcgcggtttacggcgcatcctctaccccgggatggagctgctggagctgtgcgagcaggtgtttagcaccgccgacctctaccaggtgctgggcgtgcggcgcgaggcttccgacggcgaagtccgacgcggctaccacaaggtgtccctgcaagtgcaccccgacagagtaaaggatgaccagaacgaggacgccacccgccgcttccagatcttggggatagtgtacgcggttctgagtcacaaggagcagaa

SEQ ID NO: 379307 - DNA, 316 bp, Zea mays
tcgtacatacggctcgaactcagcacgatcctgcctttccaactccaagggggagttgccattcctgtcatccggtgtggcctttgggagagacagagagaaggaaggggaggcttcttccgttccggcagcggctccctccgctttcggttctttgcaagatcgagcgagcgcaatcatcgatcgctgccatcatcaccagcattagcggatggagaggcggattattcttcttgggacagtgacgacgagtaccagaaattcatccaaaacatgaaccctccaagggtcaccatcgacaacacatcatgtccag

SEQ ID NO: 379308 - DNA, 299 bp, Zea mays
agcgccgcccggccaccgcggcgtccgcgccgtccagcgcgactacaactcgccgcacgtggatgctcccttcatgtggacggcctttagggtggatgccgaccagaactacgtccgcttgcacaaccaccagcgctggctccgcgccaacggcaggcaccgctactggaacaacgtcgtcaccgtcgataccaggaacggcagcctgaccacgatgatgcagtggagggtcgaggccatcccagtgagcccgcagccgctaccccttccgcctccacctcaacaacctacgattcatg

SEQ ID NO: 379309 - DNA, 285 bp, Zea mays
caggcctcacggtcttcgtcctcgcctcggcgtctcagcctcgcgacacgcgtggagctcacggcggcgaccgccagtgtagttcccggaggtcaatggaggagtcagtgccaatgtcagtaatcagcagtatttcaaacttccgcacgctgtctaccagcagtgtggtagacactgagctagtttagagatactgccggaagatcaatgaaatcctgggtcttttgaagctggtcctggatgaagttctcacccagatgagtctggatgataggatgcttgagg

SEQ ID NO: 379310 - DNA, 294 bp, Zea mays
acaacccaacggacggcaagccaagcgaagtagcaagggtttgctcgccccacacccgtcccgcggccgaggctctgcttctcatcgtgacaagcctggcgaactgccatggacctggtgggatccttgctcctgagcatggcacgtctgcttgacccatccggtctccacttcgtgggctggctcgtcaccgcgggctccattggtcttgccgcactcatctacgctctcctcaggctgcagcgtgaggcggcgttgtactggaccaaggcgaccagggagaagcgtgccgca

SEQ ID NO: 379311 - DNA, 297 bp, Zea mays
catggattaccacctcctcaccctgctatgccactgcctcatcctcaccctggccatcctgttcctctggtccaatgccacgactttcatcaacaagtgagttagtgggatcccttaaaacttgtgttgtggttttatttatgctgataatgctagtttaacccggtttacacgtttatgcagcatctgcatgtttttcatggctgccaccactattatcttcaccttatattttagtaagagcatatatcacctagtggcctgtagttgatcagcataactcttggattgtgacat

SEQ ID NO: 379312 - DNA, 285 bp, Zea mays
cgacgctccgcctcgtccaatctcgcgagatcgacgcccaggactacggcgactcctccacactcagggaacttgtcttccagaagaatccccatcctacgggcacgggcgcgggcaattcatcagtgaacaactgctcggttggggatcacaggcgccactcctcgcgcacgccgagccactcatccaggaggagccgctcaagccgtggatcacgctaaagagaaacatcaagaacatcaagtacctcccggcgctggccgatatcagcttcaagcgccggta

SEQ ID NO: 379313 - DNA, 216 bp, Zea mays
tggggactgtttttgtgtttaggggaaaaaattctgctgcactctgcttgggccttgaggtctgtggcagggctcctctggcccgcagtggcctggatctatctgtcgccatgagtgacgggcagtgaccagagggactggaggccagcggtgtccacccttgcctcagcaagagggattgcattcttaaacgaaagctgtacatgtatatatatg

SEQ ID NO: 379314 - DNA, 308 bp, Zea mays
gtgtcttctttcaggaatatgtgaagggcatatcgtcgacagggatgcaatctaattgtggttttgaagggcaaatcaatgcatgttggactcacaacatgactactaaggagctagatacaatacgatctgccggctttctagtttcagttattcatggaaggttagttttgttaacagttgataatcttgttcagagaatggtgcacatgcatttcatgtggcttacattacaaaattcaggtacgatatcattgcgcaattgtgccatgcaaaacgtctagcagaaagccttcttcctgttgcaa

SEQ ID NO: 379315 - DNA, 287 bp, Zea mays
ggcgcaggggtctcccctccattacagcagacaggcccgtggtccggcgtgattccccggtcgggcgacacaggccgagtcacttgctcggccgtagccgggcgtcctcatcgggggatgcgtgcgcttccacatcctggccaggactgaaggagctcggtccagcgagctcccgggaggtgtgtggacatcatcgctgacggggaatgcgagccacgagcctgcaggcctcaaccatggctatggtgcacatgctgaccgtcttccaagggctctcagagcatcag

SEQ ID NO: 379316 - DNA, 300 bp, Zea mays
agctacctgcatgacaaacaagtagggccaatcccttctggaagactggaacggccgaactgccacagtagactgaacactggcacacagcgccctcggatctgccgctctcgtctcgctcgctcgcgtgcattggccgacaagggacgccacgccggcgtggatgctcacgtgttctcagttcttaccctgcgctctcgccgcccgggagcaactggcgatcgagtgtcgctgccgcttcctctccgagtcaggcgccatttaataattcaattctacccccaagcccacgcttccgaa

SEQ ID NO: 379317 - DNA, 292 bp, Zea mays
acaccacagaggaaaattatctctagcatttattctagagtaatacaaagagtaatcttctgccaagattactctttgtattactctacaataaatgctagagatatacaaagagtaatcttggcagaagattagtacgttgttgcccagtttccctttgtatttgtcagtaatccatgatttcatgacaacgatgaattgctggctaaaaaaaaaaaaaaaaaaaaaaaaaaaaaaaaaaaaaaactgaagctaagaaaaaaaaaagagaaaagaatatgaaaaagaaaca

SEQ ID NO: 379318 - DNA, 306 bp, Zea mays
gtcagatgtgatgttaattggccatacatatatatgcaaacgtaagttacttcttcgaatccctcgtgctttgtgatgagtatatccactaactactcgtgcagcttggtttgattttgtccgagtgatgcggatcggttttgctttcttcttctccggcctataaaattaacgcggcggcgccgagagcctctctcctccgccacaccactcagcactcagcagctgagcccttcgtagctccagctctctccctcacactatcgttaagcagcacacgggccggggccgatcttactcgtcgag

SEQ ID NO: 379319 - DNA, 303 bp, Zea mays
accccctctagctcgtcgcctcgtcggcgtgcccagcttctggtccagcgcgtcgcctccgctgctgctgggcccgacgcccaactaccgtgccgaggtcccaggcaggaagcatcttggtgtacgtgccgccggcgacaagcacccaccacaccagtcaaatgaatagttgatttcatttcaagcaattcctgaacaactatattacagtcatgaagtcgttagccaagcaagagacacagccaaaaccgcggctcattgtgcgccttggtgtattccttgcatctcaccacattctgttca

SEQ ID NO: 379320 - DNA, 304 bp, Zea mays
  unsure (1)..(304): unsure at all n locations
cacaacccagcaagacatcgacctgtaccacaccatgtacatggaggccctggtgaagctcttcgacaagcacaagaccaagttcggcctcccggagactgaggtcctggaggtgaactgagccagccttcggggccaattccctggaggaaccagctgcaaatcacttttttgctctgtaaatttggaagtgtcatgggtgtctgtgggttatttaaaagaaattataacaattttgctaatctactcccatgntagggccttctttaagaaggaaaaagttcagtatttcaagttctttcac

SEQ ID NO: 379321 - DNA, 294 bp, Zea mays
aatgcagcttattggttaggaatatggattgtaattatgccgcaatgcatttctatttgaagaggggagagatactgggctgagccaatgaaccaatggcatttcggatcactttagctaagacaagaaaaaaacactgatatgagcagagggacttatgaattatgataactccgtttgaagatgtgagagattggaattgaacccagagaagagttgaaagaccaaagttggactctgtcctttgtttataatagatacacttatggaacaacgagggcactccaagaagag

SEQ ID NO: 379322 - DNA, 281 bp, Zea mays
gaaggttgtagactggctggatgatgtcagtagcaatggattagtcctagcatgcgtttgtcagcacatctcttagcatgtcctgcccagtttgccagctcagtcattcgttcacctaatgttagcaaactagcaccacaaggaatttaagacagatgttgcctgcttcttttgtcattgtgtcacattgcttgcacaagcctggggcacagtttagtcttagttttgacaccccccccatgtttcttttaaaaaggcaaagagccgatccccaaatcctg

SEQ ID NO: 379323 - DNA, 256 bp, Zea mays
agcagtagaattttgatttctgaagcagcaccaattggatatgtccttcctgagggtcccaggttattctactcttgccaagcaaggcgaaagctgagctgcacaaactgcgcgccgtcgagaatgattttgccgtcctgatatgtgctgagtgctaacacgtcgagatgaactgctattccattgttaatttgtcccatttgcttggcgacctcggattctactgcctgtacagtgttcttgcagtgtatatagt

SEQ ID NO: 379324 - DNA, 123 bp, Zea mays
cgagggcaaggtcacgatcggacgcacttttgcaacatttaaaagtactttatattttacaaagtagcatgtttcattttgattaaaagctaccaaaggaattttgatcatgtatatgcgagc

SEQ ID NO: 379325 - DNA, 232 bp, Zea mays
gtctccttacagacactgaaacctgttatcgacagagcaaacccgaaaatcggcataggaatgctggcatttagtcctgatatctacttcctggcgacaaggaacgacaacattctcaatgcagtctgggtctgggacattcagaagctgaggctgttcgcggtgctcgtgcagctgtccccagtgagcgcgtttcagtgggacccgcagcaccggcggatggcaatctgca

SEQ ID NO: 379326 - DNA, 204 bp, Zea mays
atccggttgaagttaacggcggcaattccctgacttgagaacgggttgcccgaccgcggtccggagatctctctgacacccctttctttgcgctgagagcccatatctcgcgtatctgtgtaaaacgatggggcgacagagggggaggcgttgtgcctttgtgtaccaggaggaggacgatatactgatgctcgctgcggacgt

SEQ ID NO: 379327 - DNA, 285 bp, Zea mays
gtggccacggttgggatcgatagatcccagcgtggtggttcgtcgcctctgatgtattcgaaagcaagaaaccctaactaggatcgttgagggcagaaggacactcctcatggtgtgcagtcttgggggaataatcgtaatctcagctggagattgaagccttcccctgggaaagctgattccaaagaggatctccttacctcctcgcctggcaatggggcctaatcagtggaaagagatggaaagaaggacggtggagctaggaaggaagttcatcagaaggac

SEQ ID NO: 379328 - DNA, 258 bp, Zea mays
aaaatattgcgcgctgcacggaggcattcatccgtcctgcgattttcgtttcctctgtgtctccgttcttcaagccgaggtcgaggacccagacgcacacgcagcgcgccttctccaccgcgaagtcatcgttccgcgctgccgccgccgccctagcaaggtgttggattctgtgttgcggcttcggagtgtcattgctacccttctcctgacaacatggtttctttcgagatgaatgacctcaagaagattgggcta

SEQ ID NO: 379329 - DNA, 276 bp, Zea mays
ctgggaagtggagaccattcagatttgctttgtagtttgggaccattgagcagaaccaatttgattctgaacatgtggagatccttagagacttcactgtctggacttctgcattcgaaatcataatcatgaggttacaatgaatcaaaggtccgaacacttcttttaataaatggtccaaaaagaaagtcagcagcaaaataatttattagaatgcaatagacgtgagtaagaaacacatgaattggcaagcacgtccaccctagctgagagaga

SEQ ID NO: 379330 - DNA, 216 bp, Zea mays
ggtgacctttcagaatcggatagagtatggagggctcgttatatgtaacatcagaacattctgacagtgaacagagccactgtccgaagaagctaagtatatcatgttgtaattataataaagggactagcattgtgcaattatccttttggcgaatgtggttttttggtgactgctaaaaaaaaaaaaaaaaaaaagtaaaaaaaggggggcccc

SEQ ID NO: 379331 - DNA, 263 bp, Zea mays
  unsure (1)..(263): unsure at all n locations
ggcggagctgcggcggctcctggaggtgctctctagggagctgagtgggcgggtggagaccacccagagctcncggcgctcgtggaggtggtcatggacctcggccggccccggctcggagcttcccgtccggagacttcctcctctcccaaggccccatctccttcgacgacctccgtcacgctacctcccaggttggggactttggagcggataatcgtgctggaatcagccgaacgctgcaccggatcagcgccattagg

SEQ ID NO: 379332 - DNA, 284 bp, Zea mays
ggctttcttacatttattcatttcatgggtgtacgtctgagacaagttgcccggagttggccggctcttgggagcccgaaactcctggagctcctcctacctctgcctcccaagtgctgggcccacagcatgttgccttggcatctgcatgaacttggggatgacctttgctcttctgaaaaagtcactgggactttagtgggacagcaggttctcacggactactgcagatagagccaaggttccatgctgatgaactggtttaaaggactggtcaggaatgc

SEQ ID NO: 379333 - DNA, 198 bp, Zea mays
gtgttgggcaccatgcaagaacttggatgaataacagtcacgaatcaatatgcataatgacccagatcatcatgttctgcaactgagaattatatttcatcattgcttctagaagtctgcaattcgcaactgcactttggagcagtaatatctaggagcaatcactggataacgtggagtgattagagaagtcacatg

SEQ ID NO: 379334 - DNA, 274 bp, Zea mays
cgctgctggttcgggcagagtccgacggtaaggttattggaactgtagaataggggatagtgcctctggttggggcacagtgtgtgtttagggccctgggcccgttaccgttgctactccttcgggacagcgcgttggttctgagactggctcttgtgtacggcaaaaacaaagtactgtacttttgactggacttatcctcagagaccgagactctctgtccttctcccatctctcttaaggattggactccttcctttccagtccctcctct

SEQ ID NO: 379335 - DNA, 158 bp, Zea mays
aatttatcaccattcctaatttattctatttcttagtatcatagcacagtatttcgctcgccctgatttcccgacccttcccgtgcctcagacagcatcggattgcttggtctcgattgtacaaataagattcagcgcaggttcggattcaccgaatc

SEQ ID NO: 379336 - DNA, 302 bp, Zea mays
ctcgagccgcgacggcgcgtctcgacggtactgctaattagccaccctagccagcctccgcctggaggtccatccccgacctcgacgcttcccggccaaacgccgacgcccctcaccctcggcgcacgccgcagcgtcgcggtgctccatacccatccccctccatgtccggcgactgcatcccccggcatcgcggtgctggatcccctccctctctcgcgttacgctagagttcgagaaggggaaaagcgacgtagggttctgcaacgacacctctgtgtcccctcctccctcgcgcactc

SEQ ID NO: 379337 - DNA, 232 bp, Zea mays
  unsure (1)..(232): unsure at all n locations
tagctaccttctcctttgttggcatcgcgagagaaagagaaaaagaaagagagagagagatgagcaacgccaaaaccgccagatttgggcctgcggccaactgggaaggataccggcgccacganactacacggaggcaatgaaggagggcatggactgcaggcccgtgtcgggacactacgctgacggtgacggcagatcttggagctggcatcagacttacgaaagcgga

SEQ ID NO: 379338 - DNA, 235 bp, Zea mays
ggccagagaatccaaccctggggaccacccatttcctatctgggcggccatggccctgcaggagctgcccccgtcacttacaagccagggcacccactgcccctccctggtcctgcaggccatctgggatgtgatgctactctagcaagctcagtttttgcagccaggcgcacgggggtacgctgccgctggctgccatcatcgactgcgaagggttcctcgttctcagctggct

SEQ ID NO: 379339 - DNA, 201 bp, Zea mays
taaaggatcacaggcatgagccaccgtgcccggccaatactccttaatataaacttcgattacttttgttttcatccagcaaaggtttcattctaattgcataaaatatggcctagttccagaagcaaacctttctgtgttaattttatttcatactgcatcttctttttaacacgacattttaactaacgtttacaacta

SEQ ID NO: 379340 - DNA, 289 bp, Zea mays
cctcattgtattcatagacaaatttttttcaatatattttgcaagaaaaatctttgaataagactaactgcatttaaaaggaataacctccttctccctttccccaactacaaaaatgtttggcaactttgtgtttacatttaaagatcatttgctactttttcaaggaaaaaaagtattgagtaaacaattgtttacatatatcatttatgcttttttctagcatgtataacttttttaaataaaggtagtatttaccattaaaaaaattttagctaatgctttttat

SEQ ID NO: 379341 - DNA, 289 bp, Zea mays
atgataaactatacgattcggcaaaaaaagctgcaagcaggaagtggcgctcttatttggcagttgatggtcgaaggcacgcagatgtaccatgatgacttctccatggtggcacgggatcgtccgtccacatataagctgatgaaggagcagtcatgccgactgcagagtctatatggaaaagagggagaccctacttggaaatgctcaccctaagggctagtttggcaacccaatttttctatggaattttcaattttctaaggaaaaataaactaatttcccttaa

SEQ ID NO: 379342 - DNA, 280 bp, Zea mays
cgatcctcttacgcgtcaaggagctacagcggactagctgccgcagcttccggaggtggaaggacgctgagggtaataccgctgcggcatccgctgggttctctgtcgacgtcttccacgtcgccgtggtggcgggcggtggtgggaagggctcggggcatggggccgcttgattgggcggaggcggccttaccgtgtgtggcgtggacacggaactacagatggaagcaggacctccaggccgacctcgcctcgggcatcaccgttggagtcatgcttg

SEQ ID NO: 379343 - DNA, 282 bp, Zea mays
cgatctccctgctctacccgcatcaccccgccgttgccggccccttcctcccgcttcccacctcgccgtcgccacctcttcctcttcctcatcgccggcgcttgcgtgccccttctccaccccgttgaccgccgcacccacggcctcgccgttgcagcactcgtgcgatccggtcacgagtggagcgcacgagctcattcgctgcttccgcctccccctcttccttgccggagcccgcgcctcctctcctcgacggcgccttcgcctgctcctgcgccccct

SEQ ID NO: 379344 - DNA, 281 bp, Zea mays
tcccgagtagccgaccacgcgaacatccagcagtgctcaactctgttcgccaccgccagtctgccacactccatgcaccatcaccacctcgccgcctcgaaggcagaaccctaggcagcccccaatgccgccccaccgcctccttccccttctcctcctactcctgcctctcggcgtctccggcgccgccgctgccggggggaacgccacgtcggcgccgctcccctgctccgagctctcgcgcgtctgcacggccttcatcgccttcccgaccccatcac

SEQ ID NO: 379345 - DNA, 273 bp, Zea mays
cttctctcgtggtaggctgtaggcaggcacctccgctcctgacgtcttctctcgtcgcttcctgcgtctctcggcgtcgaatctcctccagccaccgcgcacactctactcgacgcccggtggaaggagttctccgggatttgagctgtttctgccctcacctccgctgggccggcgtcgagtggagatccaatcgaaaatcgaactgacttcatcttctgttgcatccccgtcaggataagccatgccaggagtgatcacaaagttcgcggt

SEQ ID NO: 379346 - DNA, 258 bp, Zea mays
attcggctcgaggggaagaagccattgctaaaaccactatcttcataattgctgagaaagacatatgctttgaggtttctgagctggagagcatatttgagtcctccagtatcgaacatgcagatgctaatgataatgccagggaacaagctctggagtttctaaatgagctgggttggcttcttcacagagcgaacagaatgtctaaagagaatgtaactgatacatctgtaagtacctttagcatgtggagattca

SEQ ID NO: 379347 - DNA, 268 bp, Zea mays
ctcgagcgtgattccatagcttgatgatgatcggcagcaacgccagaaagcaggagaaagctcccggcggccggtccgggaagccgccgcactggaggcgccgggagcaggtggccacggcggtgtacgtggtccaccccacccagttccgcgccgtggtgcagcagctcacggggacaggggccgactccccgacgacgccgctgtccacacatgcgatgcttcagcgtgtcgcgggcggcggcgacaatggcgctgccgctggtac

SEQ ID NO: 379348 - DNA, 264 bp, Zea mays
gggggggggtgcagaaagtgagtttctgtttcaagaacagacttcactagttcagagttgcacagctagtgaggtatggagctgggctttgaatcaggtcagctgcctgaatgcccaacttcttcagcccttggaaggagagggtggggagaagaagaaggaaaagacaaggacgaaagaaagaagagagaaggggacaggaatggaagtccaaagagtgggacgaatttgatttcagaaccatctccagctgacccttgagcc

SEQ ID NO: 379349 - DNA, 283 bp, Zea mays
tctcaaagctgctcgctcataggcttcccattgaatcctgatttccctattttcaacagtatttgcagtgtgatattatcatttgtacgtcttaccgtcttagtaggtgcggagtgctgtgaaggtgattaggtgaatatgggtccccacatagaagtttcatggcccatagatccccaacaggttgagggtttagggataaattcattattcaatagatgaaataagtagttcgtatgagtcatgaggactgacgtatctaatgtactaatacagtacaatt

SEQ ID NO: 379350 - DNA, 285 bp, Zea mays
gagaaatccgccaaaggagtcatccccttttctcaaagaagagcccatttttagtggtttgcctacaatgagttctgatgtcaatggagaaaatgtcatggataccaaatctgttctccctgtaacgccagatgcgactctttggtcaacagcagctgatgaagagcttatatatgcagagatagaacccactaatgcaccattgacctcagatgaccctgatctttatgcacccttgttccggaatgtatccatctttaaaaggagttatgaactgatggagag

SEQ ID NO: 379351 - DNA, 254 bp, Zea mays
ttatgatgtacatataaacgcttttgttgtatggactctccatgttactgtatatatctgccagcacttcccagttacactcctgtgagtcagcttatttttaccctaacataaatagtatgttttgtagtagttatcaaatttaagagatacagcaatcattatgtttggactttcttctatcttaatgtgaatttcataattaatgtctatttattcagctattcattaaaatacaggattctttgggaaaa

SEQ ID NO: 379352 - DNA, 283 bp, Zea mays
tgtacctctcacacttctgcaaatttatttgtacagttccatcgctttatagttatcttcagcacagggtgggtacatacattctttctattaataatcacgtgtttggtgcaaattgtcttaccttttgtattttctgcgatcagtagctactaaaatggaagttaaatggtagcatgtccgaatcctcaaaattttatgagccacatacactgaagttactgatagttccaaaggttcattgatggtgatgaaggctaagatactgttcctttgcagatat

SEQ ID NO: 379353 - DNA, 219 bp, Zea mays
tgttcaagatcagggactaaacaatgccgatttgattccaggtggtttgaaggcacaaacagttagcataccagtagaagatgagcttggagactatgcacgtgcacgaggatttgagatatttgataaaatgtgctcagagaaagagagagttcaaatgagtgaggctgctctgaccgcaaaggcacgtatggcgttgtccatgggtgacagtgatat

SEQ ID NO: 379354 - DNA, 282 bp, Zea mays
cttatacctgtccttgagctacttactagcgagggacagaggaaagatctgaagtaagtgcgccatggccatatcatcctccacctcgcgaacacaagatctggtgccattgctgtgtctgttgctaatggcagcagcagcaccacagcatagttgtgcgtcgccgccgttgcctgtgacactcccagggtgccccgacaagtgcggcaacataagcatccctaccctttcggcaccaaggagggatgcttcaaacccgacttcgaggtcctctgcaaagac

SEQ ID NO: 379355 - DNA, 102 bp, Zea mays
cctcatgctagatggtctcagctggcctccaacagtataccatggaggccagctgagaccatctagcatgggtactgcgagctagatggtctcagctggcct

SEQ ID NO: 379356 - DNA, 277 bp, Zea mays
ggagcatccgagtggacctatattcaggaaggcatttggtgtacttgaaaaatcaaaggcaggagcggtggaggagaagctcaggaagttcagaatgttagagatcaggcagcagctgcgtcggatggacctgatgaaggagacagtggggttggtgcttgatgctctggagggtgcatattgatgtgctggtggttttggattgtgtccggtattggtaaggtgttgctcaaaaagggcgacctaagtcttccagttgcctggaattgcagtgtta

SEQ ID NO: 379357 - DNA, 271 bp, Zea mays
gtcagcgccggtcactctctgcccctcggattctcgctccctctcttccgcgctcgtttcttcccgatccaacaagccttcctcacttgatgctgttcggtcacggcggttgaattggggagattcagctatgccaacgcagatctccacaaggcagtctcttcggtttgctttaccttcgaacaatggtaaacgttacactttttctggtacacgagatgtagtgaagtaaaatttagtcctatgcttgaacaccagtttatgctgcgtc

SEQ ID NO: 379358 - DNA, 254 bp, Zea mays
ggaaaaccgattccccgcttcggtgcccaccacaaagctgacctgcggaagcgcgaggaggacgaaagggaccggacgagtacgtgtgcacgaccgccaaccctagcgtcgcgggtcacacgcggcgagaaagggtgcctcgcgtcgcttggtgtccccgaagtcgtcgacggtgcagctcgatccgcctcgtcgagcatgtcgaggagggtcccttgcaaattcttcttgcatggagcttgcttcaaaggaga

SEQ ID NO: 379359 - DNA, 258 bp, Zea mays
ggtttctgttcacaactcttccgagcatgccgtcgtctcctttgtcatcatcatcagctcagatctagcaacttcgccttctcaggtaagggctctgctcacatcttcatatccctgctactaggttttcgtcgtttatcctcgctcggattcttgtagatctcgctcaccttgtagatctcgctcagattcgtttgtcctcgccagacgcgctcaattcgcagctgccgctgtgcctatgctactgaatgggcctct

SEQ ID NO: 379360 - DNA, 194 bp, Zea mays
agaggacgggatgcagagatccggttcagcgtcgcctttcgacaacagccttgggatgaagatagccaagacaagggggtagtgaacgatgctgtaagcatcatgaaggcagaatcaaatgagtctattctgaggccgatcctgtgttcacatgggattgccttgctgggctattggactggcccagtacggtc

SEQ ID NO: 379361 - DNA, 207 bp, Zea mays
atccacgcttgctcgctctattgtagtcatttccttccaatttagcggactcaatttctcctgatcgtcaggcatggagcactgctatgtgggacagccgatctcgagggccgaggcaatgcccgagaggaggtccaggttttggcagatggatgcgccccctccgccccgggcgtaggtcatctgcccccagcctcgccgcgccac

SEQ ID NO: 379362 - DNA, 253 bp, Zea mays
aggcaggtacacgttatgatgttcaagttttattgggataagatcttttgatcccaaggtcaggtcgatggaattttcggactgatatctgctccttgagtcttcagggcagtgtctctatgaaggttaaccggttgaggggtaccacatacgatagtgtgaagtacgtatgatgggcagtcattctattctatagttcttaaatgtagtctacatctctcagatgtatccccattcggttttatcctcagaa

SEQ ID NO: 379363 - DNA, 274 bp, Zea mays
acttgtgttgctgcatcttattctaggcatctacgctccgacatccgccacatcagacaatcctcctctgcaggatgtatgccccatggctccccagggcgagcggcgagagttgtccatgaacgggttcctctgcaagcatccgagcaccatcctggcgtccgacttcaagactctgatgctaaaccacgccggagacctggacagcatagctcggtcgtcggtgagcatggtgaccgctgccgagttcccaggcctgaacaccctgggcctg

SEQ ID NO: 379364 - DNA, 168 bp, Zea mays
acaatttgtggtaggaaatgggcatgtatcactactctccatccattcataaatacaaccaagatgaaaatggtacacagcacttggttgtatttatgaatggatggagagaagtgatacatgccaattttgctggtaagcgaatatggagttgttgcgagagcccat

SEQ ID NO: 379365 - DNA, 176 bp, Zea mays
cgactgagatgagcgcgccgccgcacgtttcttacaccgcgctcccgccagcacctcctgctcccactgccacctccttctcgcagctcccgcctctgctcgacgtcgtcgggggatgccgcgtcagggctgtagctaaactacctgggcccggcgcaaatccacgagatccagtc

SEQ ID NO: 379366 - DNA, 188 bp, Zea mays
ctgaggctgagcaggccacttccctggagctgaccccacagctgtgtaggtacagggtggccgtgaacacttagggctctctcgggctgtgcgcttcttgttcactgcaaggagcagggtgttggctcctgaccaagccctgtcactgcgtgccagccacacgtggggccccttcacccacccctgac

SEQ ID NO: 379367 - DNA, 285 bp, Zea mays
aggaaatcttggagaggttgctgcaaaggaggaagtatgggaagtaggagctcagcttttaggcctttcaatcggtgtactcattatggtatatatgtacagttcattaagttttatatgttgtttatatctaaccacctttttgtatgccaaccttattgatcagttataatattgcactgatggagacagatgccatcatttttatatccatttacagttgctgtttttattctaggataagacaggtgtaaagtcatcatacttaactcttgttttaacttg

SEQ ID NO: 379368 - DNA, 184 bp, Zea mays
gataaaacagcaagatccagtggaggtttctgatgcagtgaagagagctgttgctagatcgctcatatcaacgtatggcggcaacgacccaaccaaggacgacgacgccgtagaaacatcgcaatggcaggaccagatgccgttccatacgtattcttgtgaacttaagggcctctctcagcgg

SEQ ID NO: 379369 - DNA, 109 bp, Zea mays
gcagcaagtagaattattcaactggaatcttgtattctattcagagcttagttttccgttaaggaaaaaaatgagcttcagtttgtgttgtgatgtgtataatttgcat

SEQ ID NO: 379370 - DNA, 120 bp, Zea mays
cacaactcgtaggcagcgagcgtctctcctcttcctctcccaagcaccgcgccaatgaaggcagagagagatcgccgctcctcttctctccgtcggtggtgcggttgactgccctcctca

SEQ ID NO: 379371 - DNA, 208 bp, Zea mays
cgcctgtccatcgcctttctataagtccttctctccagacctaaaagcagctgcagctggaagggcacaaattccactgtgtaaaataaaatattaggggcaacacacttcatcaaggcagcaggaatgagagagagcagagaagatcaaggatgaagtcttgggtactgaaaaattcagtgctgggcagaaaaactgacagggtagt

SEQ ID NO: 379372 - DNA, 178 bp, Zea mays
ggtcagcgaggaattatcaaaggaaactatggagatgctggctgagattctcctactctttctttttactgctctgttcagaaggtgaatctcagcagtaaaaagaaagagtaggagaatggtgcatttgcttgtaacgtttgttgtactatgccttgataattccaaggtttacccc

SEQ ID NO: 379373 - DNA, 223 bp, Zea mays
gctacaagggcatacttgtgctcgtataaaattgagaaagacatcaaatgatctgtacatcttgatcaactttgcagaatctgaatgaacatactgatgcttggccattcaaagagcctgtggattcacgggatgttccagactattatgatatcatcaaagatcctattgatttaagacaatgttaagaagagtcgctcggaacaatattatgtgacctaga

SEQ ID NO: 379374 - DNA, 182 bp, Zea mays
aacatagatttactagagatcatctttaacaatcacctttgattatgcatagcattttaaactaattgcagagtatccttttggtttgggggtaagtgctcattgaagttcatggctataaccattgcaggataatctcactgacatttggactcctgttagtaacagagcatagctcttta

SEQ ID NO: 379375 - DNA, 153 bp, Zea mays
gagaaaacgagaaaaggcacttcatcttccagtgcccgacctcgtgaaatgcagctacagaaaggagcttcttctggtgcacttgataaccttgcctcaaacaaaatggctggccagcctagaccgtttttgcaaccaccagaatcaaataga

SEQ ID NO: 379376 - DNA, 118 bp, Zea mays
tgcagatctgtctgcagagccagcactgtgatacatcatagtcggtgctcagtgaatgtctgtgaagtgagttactatctagacaaggatgacgctggtatgactctccatagcgttc

SEQ ID NO: 379377 - DNA, 152 bp, Zea mays
gtcccttcaaactagttgcaagaacaaatgcgaacgatgcagatgctcaccacccacctgaccagctgacacatcgcagaggccggcgggcgttgctgaagaacccagccatgtagtcgtcgtcatcgtcaggtccagcgagggggagcagc

SEQ ID NO: 379378 - DNA, 114 bp, Zea mays
ggaaaggcaacgcacaagcagcagtcgcagcaaccgcacacaccagatattcgtgaagctcatgcacctggacgccgtcgcacagttgtggccagcagtggggagctcagctgt

SEQ ID NO: 379379 - DNA, 281 bp, Zea mays
atcgactcttgccaagatactcgtggaatatgcttatgcaatctatactgccgatttgacgcaattgtttacttggacatgtgccagatgcggtgacttgatcgaggggttcgagatgatagagatcattgtggatgtcgagaactgcttgcaggcatattttggattacccagtgacataaacgcagtcgttgttgtttttagaggaactcaagagaacagcatccagaattggatagaggacttgttatggaaacaacttgatctggactaccctggaa

SEQ ID NO: 379380 - DNA, 197 bp, Zea mays
tcgtcttccacaaaccctataaccctagcaccgctgccaccatgtcctcgtctccatcttcagtgaaccgccgtcccccgggcccgctagcgttagggctggagtccttggcgaagaagaagacacatagggagaagctcaccgccaaacctcctccagatccagtcgttgccctccattggtcggatacataacgt

SEQ ID NO: 379381 - DNA, 153 bp, Zea mays
cgattggcgtcagagtccgagctgctgggattcatgaacgcgctggaagggcaatggggaagccggaggctacggacgaagtttgtgaatgctggcatgttcggtgaccacctgccctgtgcgtggaaactgctgcttgggctcaagcgaaag

SEQ ID NO: 379382 - DNA, 261 bp, Zea mays
cagctctccatatctgctccgatggcatcctccgagctatcgtcggcctccacatcccccatccacgagaagctgatgctgtcgcctctgaagctgagccgcgagtacagtccgactggtctcggcattgcggcgaacagagacgaggttagccagctagaagcaacctgggcgacgatgttccgtgactcttcgatgggcggtccgttgggggaggttctggccaagaacggcaacgtggaagcgagaaattacctgtcg

SEQ ID NO: 379383 - DNA, 134 bp, Zea mays
atttcactcgttttgcacaatgtttattagctgtttgatttgataccctaatttgcatgtagttcctactgatagaatttttggttgctcactattatatatagtttctgtcttcccattggttcattttcact

SEQ ID NO: 379384 - DNA, 248 bp, Zea mays
catatgttcaacataacttatgcttcaggtctttagcatggtatggcagcatgtttgtgtatccactctgtagaaaatatcttatgcttcatgtctttagcatggtatggcaacatgtttgtgcatccactctgtagaaaaaagatgtcatatgtactgtatcgacactagaattttgtgttgttttttcatctgaaaatgtaggtggagaacaatgaactttaattgagtatgttacctctccaatt

SEQ ID NO: 379385 - DNA, 141 bp, Zea mays
tgcaaactgtcaacttaatctgacctttaccaccacagaccttgtgtcaactctttggctctgctttctaagcacctaaggaagaagcttgcctcatccaacaacctctttactgaggaacccgcttagcccttattctcc

SEQ ID NO: 379386 - DNA, 203 bp, Zea mays
ggccggaggggcttacaacagcggtcgccaccttccacatgattggttggtgtactaagaagcgtatggcgcgagccgcctcgtcgagcagagaagctcgctctctggatctccacgtatgcaggctgaaggtgagaaatataactgagttgtatgtgtgtgtacgaactcgggtcattacatgcaggtactcaatcacaagc

SEQ ID NO: 379387 - DNA, 184 bp, Zea mays
cctgcttcgtctcttcactcgtctcgaagctagggttttgcccgccgccaccatcctagtttccttctcgtcatcgttctcatcttccccagccgccgccccgcctcacctggatccgtcgccggcgtagccgtcccggcggatccgccagcattcttaaccttcttcgagtccacggcacata

SEQ ID NO: 379388 - DNA, 182 bp, Zea mays
cggcgcggaattccggtgggacagggccatcctctccgcttgtcccccagttctgcatttccctcttcgcagacattcgagttgggcctgccgccagtgcttcagatggccggcgcgggcgacgcggccaaggagtacgtcgccggatccgccgccggcgtcgctcaggtcgtagtcggcca

SEQ ID NO: 379389 - DNA, 103 bp, Zea mays
cacaaataatgcatcttgatttgtgcattcgcgatcacctgtctaatagtcatatgagatgagtaacttttgcatttgtggagagtggtttgtgatcagtgga

SEQ ID NO: 379390 - DNA, 281 bp, Zea mays
gcttttcactagtttggattcggacttcctgagctccgccgattccttcctcctccacctcctctcctcacccagccgccgccgctgctcatcttatctttatctcatccccatcgcccggccttgctccgcccccgggaatcgtcgatggcggcgtcggcactgtggcagccgccggagcaggggctccgcgagatctgcgcccacctggaggcgcatatctcacccaactctgaccaggcccgcatctggcagcagctccagcagtacagccagttccc

SEQ ID NO: 379391 - DNA, 183 bp, Zea mays
tggcacttgccagccagccgcctacctgccgaaagagatcctcgaatggcccacctgccagcctcagcacccgcagcgttaaccctctgcccacccaacctcttccccccagctcaaagcatcctctgcggcgcaacggccacaccttccccggtcccgcctccgtctgtcccgcggcctccg

SEQ ID NO: 379392 - DNA, 277 bp, Zea mays
agcagccttatctatcccctcagctctgcagctcagtgtccagcaccgccgcctccttccagctgggtggaagaaacatgtcgcgaatggcgcccccgtctccgcctcagtccctgaagcccccgacgctgcccttctccccgcccaaaaagccaccgccgatgccggtgtacaaggacctagctattcaaccgcgacctatccgccaccaagaagctccaggccggtctggacctggtggcacggttgttgggggtcacctggggcccaaggggag

SEQ ID NO: 379393 - DNA, 228 bp, Zea mays
ggacttcatttcttgcagctgccaatccaattacaggatgctatgacgctcttaagtgatcatgaacttatacattgaaataatggtgggcctcgagaggccaggaggtggagaggagttcaacaagtactacatcttgtctgctctcctatccgtggattgggtgcctgaaatatcctatagatgtctttagtagaggatccaaataatggcctgcaaggtttattg

SEQ ID NO: 379394 - DNA, 140 bp, Zea mays
gggagaatcctttcccttggagccggcacacgccgtgccgccaccacccttcgaaccatagctgggcgccatcatactgtcccgcagagccgctcactcatcatgtgctatgcgtgcgcgtactctatgatcacgggcgc

SEQ ID NO: 379395 - DNA, 217 bp, Zea mays
aggtaacaaacaccacttagcagcaggctcttgcgtccgtcttgcacttttgcttccgcctcctgcccttaaaatctttcaccaccccctcccgtcgcggtcaaattggcgatcctcgtttggggagggccaagaaaccagagctctctctccgatgcccaccaacgtcaggtgattgaggaacgttggtgtttctggataattggagatgtactca

SEQ ID NO: 379396 - DNA, 279 bp, Zea mays
cgaatcactcagacggagacggtgagcgtcgtcgcagcccgatccttgtatctcttctttgttatcctccccgctggtggacaaaaagaccgaagggaccgaccgtcggctgctctctcgtggccatggccgtagcggcggcgttcctctccagctccctcctccccactactcccggctcccacctcaccccattcactctgcgctcccgtctccgcctcttctcacggcgcgccgtcgtggtcaacgccgccgccgccacactccgcgaggtctgct

SEQ ID NO: 379397 - DNA, 234 bp, Zea mays
gtacagaacacccattggtttggatttggaagccatcaccacctatactaaattgcacgagatttgccgcgagaccgcatctccatcccgaatcgcgcatcgcatccaccgccgccttttctttctttctttctttcttttttctgggagaagaggcagaagaggggaggcgcgacaaaaagggcgcagcgccacgcatcgcccccgacgccggcatctctgcctcgctctcct

SEQ ID NO: 379398 - DNA, 122 bp, Zea mays
gacgagcactacctagggcgtgctgttgaggagcggcttcgggtttttgcccagcagatcagtgggaagcattgcaagagtctacaggacatcgtctcaggggagcagatccgccatgagcc

SEQ ID NO: 379399 - DNA, 125 bp, Zea mays
ctccctcgcctctcaaccactcatcatcgccttcgcaggcatcgccctctcgccgggccgtccgattccgccatggcttccgatgagagcaaaaattcaaaacgagagaagccatcttcagcagc

SEQ ID NO: 379400 - DNA, 189 bp, Zea mays
tttaaatgaaggaattccaaataactcacctactgatttttagcacaaaaatagccattgtacagtgttataatttacgataagtattctattggggaggacaggtaactctgatctcagttacattttttttttcctttttaatttcattattttgggtttttggtttttgcagtcctatttatctgc

SEQ ID NO: 379401 - DNA, 110 bp, Zea mays
gaatcgtctcgcacgtaccgtacggtctcaggcgcatcggtatcgacgctccacagacgcagcagacgacggcggaggcggcgagatgacgtattccacttcctcaactg

SEQ ID NO: 379402 - DNA, 165 bp, Zea mays
gggcgcggaccgcaacacgccagctttcttgctcttgtctctaagcagcagcagcttcctgtctctccagccaccattccattctcgctccttggtaatgaggctggctagccagctaatgcagctccgaacctgttttgttggtggtcatttaaccatgcatgc

SEQ ID NO: 379403 - DNA, 285 bp, Zea mays
aatagatatatcactaatataatatagaaaatagattatttttgtgtagtaatctcaaataacataaattattgtctactttgtactaatactatatgctaattaagatttaatgtaacaaattgttgttggatcgagccacgagccagctcgcgagctgcaccgagccgagccgagtcgcttcgctcttttcacgagccacaaaaacacgtctcgctcgggctcgttctgagcgtcgagccgatccgagccgagccgagctgctgcgagcccgagccagctcgt

SEQ ID NO: 379404 - DNA, 291 bp, Zea mays
cgttcccctccgctgtctcgcctctcccttggttcctcgcggcgacgactgggcgagcgcctcctcccctccctcactccctccgtgagctcctcgccggcgggcgcgccccgcccgtcgccacgtcttctccgctgacgtgggctcaccagatccaatgaaggctgccaacttgacgcaaggtgttcaagaaatttaaaccatgcactcttcatcgtaggttcaaggcaatatctgtgttaatcttggggaccttcagtagattgctgagagttctccttgatacagggg

SEQ ID NO: 379405 - DNA, 273 bp, Zea mays
  unsure (1)..(273): unsure at all n locations
tctgaagttcaccggcaatacattgtctagtcctttgcgcaccactctgatttgtgggcacagttatgaagtttccccacatgtgcagcgcgaatacanaatcgcagagccaagcagacagtgggtctattcttcattagctcagtgacttgtccacactcgtcttagcacttacgtttcaaaagcttgtcacaaacccttggagtcattcccagataatagaactggaaatgatacatccgctaatgcctacggtctagtgtgttcttagtg

SEQ ID NO: 379406 - DNA, 238 bp, Zea mays
ggataatgtgcatgttttaacttggttttataaaatctgtaatgtttcacttcttgaaccatgtaccaaatttgccaattttctgtccaagtgtttcagatgaataacaaaacgctgttcattgaagctttcgccacctttcttaaagcagcgtatgttccaagggaaaaaggcattgacaagccatcgtttgtttttatgacgataggtgttcagattcttcagttttttgaattag

SEQ ID NO: 379407 - DNA, 147 bp, Zea mays
tgtgaatcatgcaacaacaagcgatccatataacgatgtggagatgaactgaacttggttgttgagttgtccccgaagatcagaaaccaagttcagttgagttccacctgttatgtggttcatgcaacaacaagcgatccataaatg

SEQ ID NO: 379408 - DNA, 239 bp, Zea mays
aaccactcagtgaccatgttggagaaggagagctgcttgcagcaaatcaagattcagcagcttgaagaggtgctgagccccacaggccgccagggagagaaggaggagcacaagtggggcatggagcagggccggcaggagctgtatggggccgcgacccaaggccttcatgggctggagaagaccctgcgtgacagtgaggagatgcagcgggcccgcaccactcgctgcctgtagct

SEQ ID NO: 379409 - DNA, 287 bp, Zea mays
aagggctactaccttaaagggaagatcggtcacgtgcctgtgaggttcctgctggactctggggctcaggtgtctgtggttcacccagccttatgggaggaggtcactgacgctgacctggatacccttcgtccctttgacaatgtggtcaaagtggccaacggggcagagatgaagatcttgggtgtgtgggatacagatgtggccttgggcagtttgaagttggaggcccactttctggtggccaatgcaagtgcagacgaggacattattggtaccgacgtgct

SEQ ID NO: 379410 - DNA, 271 bp, Zea mays
cttcgcgagaccggagggaggggtacgagcttcaccgctttcatcccgcccgcgctcctccccagatctcctctccattgccgccgaccttgcccagattcgcgcgctcctcgctcatatctgaaagcggctctgatcttccaagccgaccgcaggatcggtgcaccgcgccgcgtgattccggcggcttgatttggaatttgtgatctttcggggcattcgtcggtctgtctgtcggtgccggaggtgctgcgtttcgagggcagcgaaa

SEQ ID NO: 379411 - DNA, 309 bp, Zea mays
atcggagtgaagggggtggaggtgcgcaagccggagcagctcctcggcatcgactcgctcatcatcccctgtggcgagagcaccaccatggccaagctcgccaactaccacaacctggcagccgctgcgttggattgttggtgacggtcgtcctccaccgacaattatgcccgctggcgtgatcaggtcttgcttggtctcaaacagtatgccgtcatcgaccacatcttgtctgaccgcccgtcagacaccgagtaatactaggatcagatggacaacatcgccgtctgctggatcctggcaccatct

SEQ ID NO: 379412 - DNA, 307 bp, Zea mays
tgcaagcttttccctgcggatgttcaaatacaatcaatttaccccttgcctgatattgctgaactagagttacagctctcggagtataccaaaaagatgtctaatctgcagcaaatggttcaggagttagcatcgaagtatgaatataatccaaatgaagactatgcggagacagagttgaagttgagggaatacttgcaatcatttttggaaacggttaaatccttcaacacaatatatactaaggaaatccatccttggacccacatgatggaagtgccacaattgcatggcttcggtccagctg

SEQ ID NO: 379413 - DNA, 235 bp, Zea mays
gtaggttgaaggatgtatgcatggaatagaagtcagataacacttttgtgcaacaggctgaagtcattcttgttgatgggaaattaatagaggctaatgctgaccaacttgctaaggtttaaatgcaggatattacaaaagtcaggttggagaactcccttgtttaggcttttgtactgcttctgcagaaggagagatgacgtgtttcatctctgcatgacatgatggcatgtga

SEQ ID NO: 379414 - DNA, 300 bp, Zea mays
gttttctgttgccatcatctttattttgtagcttggtgtatgataaaattgcaacagcaccatcagcgaggaacaaaactctctgttgctgaccctgtttcggtgattcagtggagccttcttgcagattgtctattttatatgacaggtcactggtgtacatttgatggcctccgatatggtgcagctttcatcggttttgatcattttcatatcattcgacaaggccttctactttgcattgacacatttggtatttctcatgtcctgccaattctaagccttccacttattgccata

SEQ ID NO: 379415 - DNA, 99 bp, Zea mays
attccagcggcagccgccgtgagctctcgatctcgctctgtatgcaacgagacatggtgggctaccgtcgccgacgccgctgcaaggtgctgacgcctt

SEQ ID NO: 379416 - DNA, 276 bp, Zea mays
cttctcgttcttacaggcatttttcaacaatattgggttcaccaggtcaggaaagtgagattgcagggctattacgattttagccagaaactgaagcgtattgctcgacttccatttgctactattgcttgtgggactgctttgatgctcttaatcatggtctggcaacctcttttacaaatactatcagtttcactgcttctcaggtgcatcttgctatcttgggggagctttagtaaattgtttgaatctgtctatgcattgctctagagcagc

SEQ ID NO: 379417 - DNA, 273 bp, Zea mays
ggctggtatattttacagtaaccgtggaatggactcctggggcgcgcgagataaaacttatgatggacattcatgggccccatcatttgatcatggcactgacaatgactcactatggaactttggtcataaggatggtgagaatggtgattcagatctcatctttgggccacaaggtcttccaccgataaggactggaggttcctcatctaatagtttgtttgtcaaggaacagaaaccatcttttgattctgttcctggtactccaatgga

SEQ ID NO: 379418 - DNA, 99 bp, Zea mays
caacactcattttctccattcacacgtaaaagatagaaaggcgagcatcgcagatggcgcgcctcccggaggataattctctccccgacggcttcgtcc

SEQ ID NO: 379419 - DNA, 232 bp, Zea mays
  unsure (1)..(232): unsure at all n locations
cgganagcgaggaggaggaagaaggcgccggccgagagcctcaagggaggggaggaagaggagggagggggatgatgtggccgcatcaaatgccgatgatgcgtgggccgatgatggcaggccgtggcttccctcccaacatgatgggtttcggcggtggcttcggcttgccagacccattcggcatgccacgtggcttcccgcccttcgttgggccaaggttccctggaga

SEQ ID NO: 379420 - DNA, 116 bp, Zea mays
cagccttcaagtgaccgtgatgcaattggcctaggatgactagacatgtacgcatcctaggcaaattgcagccttcaagtgaccgtgatgcacagatagcttcatcaatatgaggc

SEQ ID NO: 379421 - DNA, 276 bp, Zea mays
gtagctagcaactcgagggatgaagactagatgatgataggctttctccttctgtgccactcataaaactgctagctagctagcaccttgttgccaagcaatgcaagatctctctgctgagatcgatctgaatacctaaaatatctatccgaccggtcatcatctcgatctaaagcagatttctgatcccaagcttgttggctaacatggcgaatgatgatgaccctgtggacggcgaaaaccctagatcttttaccgcatcaatgataacaagat

SEQ ID NO: 379422 - DNA, 99 bp, Zea mays
ctcgagcgattcggctcaggtgctgtgagggagcctgacactatgtgtgagctgtactcataccttgcggaggaactgagggcgcttcagagggcacac

SEQ ID NO: 379423 - DNA, 119 bp, Zea mays
ctgcggaggatccgaggaagtactgagtgcacatggagccatattgtttgctcgcacccagagattctataatagctaactgcaagggggcccttccttgagctcgagagctttcgacg

SEQ ID NO: 379424 - DNA, 275 bp, Zea mays
cacaaacatacgcaccctctcgaccggttcgacttcagaacttccagcatcctatcagataccgaaatctccaactcccgcatcgcatcgaaccttcggcctgcaagcgcattcgtcctcccctctcctaccggcgacgcttctccccgcccgcaaagccctaggccgatgcgtccgatccggctacccgagccgccgggtgtcgacggcatggcgacgcccgaactcttctctggcagcggcactggtggcgccgccgtcgttcgccgcgccgt

SEQ ID NO: 379425 - DNA, 268 bp, Zea mays
ctgtgagaaacgatacaagtacagcatgaagatctgacagttactgtctttatgcgcaccacaaacgaacatgctggaaggtttgacatgtcagcagagacagaacacggaattcctaagttagtcaaggcacctcttatcaatccacatgggaaatacagaagcatggagatctgacagtacctgcttctggttcaagcgggttgaacattgaagacagcagtatttgggcatgcattagatgtatcgtggtactgcatttagcccc

SEQ ID NO: 379426 - DNA, 172 bp, Zea mays
ccaaaacctaacccgcgcgcttacctcctcgtctctcatgccatggcgtcgtcccctacccccaagaagctgatagtcccgatcgcgaataggtaggatccgatcgaggcggtcatcaccatcgacgtgctccgacgctctcagcgcgatgtcgccgtcgcttcagtcgaga

SEQ ID NO: 379427 - DNA, 295 bp, Zea mays
cttgttcaaataggagcagtgcactttgattcatgaggcgccttccattatcttggcatcagtcaaccttttcttgccaagtagctaatgctatgtaacaagtgacatggcaaccatgtatagaaattatttgcatgggtttgtgttattgccaggtagctaatgttatgtaataagtgacaaggaaacaatgtcatgaattatttgcagtgggttttgttcttgccaggtagctaatgttatgtaataagtgacaaggaaacagtgtcatgaattatttgcattgggttctgac

SEQ ID NO: 379428 - DNA, 266 bp, Zea mays
  unsure (1)..(266): unsure at all n locations
cgaagagncgccgcaatcctcctccccgtcccctccttcgtcggtgctctcacccgccgctggtcgccattcctccagatcggcgcccagctcgcagcccactaggcgttgcgctccctctccaaacccaacgaaaccccaggggaaccctcatccccctgtcgtctcccttattgggggccagacatggagagcaagcaatgggggaagacgccccaggaggtggtgggcgcagcggcggtcgccaagtggatctagatgaagag

SEQ ID NO: 379429 - DNA, 247 bp, Zea mays
ctttaatttgattgatctgcaggatgttcgctagcacatgcaggaagctgaggatcatgaagagatctgaagccacaggcctgggatcggcgaggcaatgaagaaggtctgaccacgaccgagggcccgacaacgttcatgtcgatctctctctctctctctctctctctcttctttttttttttgccccattattttattttgttctcttgttcgggagaccccaagccaaaaggatgagcttggt

SEQ ID NO: 379430 - DNA, 274 bp, Zea mays
agtcgttcctcgacgaggcgctggtagtgccgggtacgcgctcacctgcgtcgcgtacccgacgtccgactgcgtcatccagacgcacagggaggaagacttgtactagaccgagctggtccccgtgcatggatcaaccttgcacttccattcagattcgatctttgagttattgacaaaaaaaaaaaaaaaggggggccgccgattagccccatcatcgaccggggatttaattcgggacgggtacctacaggggtacaagttttccctaaag

SEQ ID NO: 379431 - DNA, 133 bp, Zea mays
gtagacaatgcagcactagaggactggactgctactcgcattcaggttacgtttcggaaatacaaggcatggaagaccctgcgtcatctcaagggcgtcaaaagattccacatcgtgggtcacgtgaatctgg

SEQ ID NO: 379432 - DNA, 283 bp, Zea mays
gcggcggggaccttgtgaagagaagatggggaggccgcggaagtacggcccagatgggagcatcggcttgggactcaagaccgccgcggcgagggtcactgaagcgacaggtgcccagtccggtggaggcgggtctacccctaatcccggcggcaagcgtagagggcgtcctcctgggtcaggcaaacagtcacagctggatgctttaggatcttcggggacgtcgtttactccccacataataactgtgaagcccaatcaggatgttgcgtccataataatg

SEQ ID NO: 379433 - DNA, 155 bp, Zea mays
cttttgtagggttttaatcttttcttcccccggagataaggtcgtgtggtgtgggggcgctctgatccggatggtgcagcgccgcgggatcgcccacggccatgattgatcgcgaacgagcagaggaaatgcaagtaactaatgaggcaccacta

SEQ ID NO: 379434 - DNA, 126 bp, Zea mays
  unsure (1)..(126): unsure at all n locations
cgcgngtgcagcatctagtaacgagctaggcggccatcacgtgacaacgttgggagctagcgatgaaggtctcctcgcccgcgcgacgttccggcgtgcacgggacgacagctgatgatgggcctc

SEQ ID NO: 379435 - DNA, 141 bp, Zea mays
catatgtatttctactggcgtctgaaccttgtaacatacagttctctgaagatctacagaagatagtggatacttatcagctgagtcctttcaccgcaaaagtaatgcttccatcctttgagcagctttgatgttgtcatt

SEQ ID NO: 379436 - DNA, 118 bp, Zea mays
gtctaatagatgtcagttatcctgcaggaaagcacactctggattatattcataggatcacgagccagagagctagtataagcttcttctgattgtcggcgtaattacccagctcgtt

SEQ ID NO: 379437 - DNA, 178 bp, Zea mays
caaaacttgaggagcatcagcacatctgagatggactgggcttgggcagctaatcggttaatcgagaaggatgaagcagaaacttcagacgatacttctttgcattatttaccgcggaagaggctaattttgacaacccagttgattcagcaacttctcccttctataccagcaacca

SEQ ID NO: 379438 - DNA, 150 bp, Zea mays
cgctgcatgtatgtatgtcagggtcagtgtgctccttggtgctagaaaaaggtactggtgagatggtgcaccatgtgggtaagctatgtaacgctcgatctgtgattcagtctgtctaagaaagcagcatggaagggcctgtggaaccgt

SEQ ID NO: 379439 - DNA, 124 bp, Zea mays
cgcggaggagcggaggtaggagatctcgagcaagccggaggagaggagatgaagacgttcgacccgtggccggtcttcttccgccgggagtggaagcgcaactggcccttcctcacgggtttcg

SEQ ID NO: 379440 - DNA, 188 bp, Zea mays
  unsure (1)..(188): unsure at all n locations
acnctcaccgccttatagggagaggagctaagaaagcaaataggcgcgccatactacatcgagtgcagctcaaagacccaactagtattgccatctgctcattcatccgctaacacgcggtatcacgtgagaggcactgacggactttacttattggttcccacgtgaatttgcagaacgtgaagggt

SEQ ID NO: 379441 - DNA, 237 bp, Zea mays
actagttctagatcgtgagcagcctgcctactgcattgcatatttgcattcgacgatcgattcgacaagtcatccggtgtacataagacctctgttttcccttcttttgctccgtttcttgtttctccttgttggactcgaacgagattcaacacaacaacacatgtactagtacttctgagtaccgtcaccatccatgccgtgatggatcgaattgaatcctgcaatccccaggaa

SEQ ID NO: 379442 - DNA, 142 bp, Zea mays
tctaaaacacctgccttaggtgtgactgggtgatacaatccctcgtaccccactgtaccacttggtgtgtgaggggccgggcctttatctgttttatttcagtctccctcaaaggtgtcctgagtgaagacttggtgaagct

SEQ ID NO: 379443 - DNA, 136 bp, Zea mays
cggcggtaccaggatcctggttctcggaggccacactgtcgatgaatggatactgaacgagctgcatgagctctgcctggcaagcaggcccgacgaggacggctgatgacttcttttcgttgcacttgcacacata

SEQ ID NO: 379444 - DNA, 124 bp, Zea mays
agggaatggggaagggaacagagcatggacactactagaaaggcacgcccaagaggcgcgatgatggccctgtgcgttgtgatgcgctataaacagcctccttttaggctagaaaaagaaacaa

SEQ ID NO: 379445 - DNA, 237 bp, Zea mays
aggagcagtgggcaagggcttcaggactcaggggtggtctgagacatggtcgggtgctggctcctctgtgtctgcatggacatgttccctgaccccaaactcttgtatccttgctgctcccagaaggtgcctggtagaaaaacgtcatccatagtcccttgattactgccccaaagcaccctcacttccctctggggagccccagttttccacattctgcaagaggacctagagatg

SEQ ID NO: 379446 - DNA, 175 bp, Zea mays
caatgtctctctgaagtcatagggcagtggggaactggctgatgacctggcaatggtgtgtgcagaagcatcagtggttagagcccagcccactgagtcccaggggagtatcctttggggcaaggggcaggacagggtcagggtgagggttggcacaggccacctatgcagggat

SEQ ID NO: 379447 - DNA, 271 bp, Zea mays
aaagagccctgcatctttctatttaggacaatgcttcactctgtagcgactcatcttcatcattttagcatggttttattttccgtgttatgttgtttttctttgtcgatgccccatttgagcaaacaaggctgtatagagaaaacagcctgagggatatagtatttgtgtagaggccatgtggcatgaacctgtgctctgtgactgatccctgtggtatgtgcatggtgttgtgttggctactgtgtctacaggtctgcattacagggat

SEQ ID NO: 379448 - DNA, 177 bp, Zea mays
agctctaaaatttgccccactcgccagtcgcagcatcacctgtagcagccatggacgccatctgacgcggtaccaattattatataggggcggctgtgctcaacgcaggctgcctctatgaataattcgggtacgcggtccgtcaaggccgtgctgcagttccccgtctgccggatc

SEQ ID NO: 379449 - DNA, 278 bp, Zea mays
aacattagttcattttcctttgcggtagtattcagatctgtcctgtgtgtgcacgccacctagtggtcaatctgtgaccttggtagtgatctgtgctacttaggatcaaggccatacatgtgtagtccaggagtgagccctgtagttcataaaaatgtattgggttgctttcctggggctctcccagctagtttttccccctgaggcttctcttttcagttatttggccagaagctgaaggtttagttacccccactctgtcttgcactacgctgact

SEQ ID NO: 379450 - DNA, 270 bp, Zea mays
ctcagcatcctccttgctgctgaggccaatcaggaccaggggatcctgtacgtcacggtcaacatggactggcgcgccgtacatcaagaagattgacctcaagacttacaggtccttgtagttcttgtaagtcttgaggtcaatcttcctgaggtacaaggacctgtcgactgcgcttgagaagatgttcagtggcttcagtactggcaaggatggcttatctgagtaccgcaagtatggtagatatgttctgacttacgaggacaagga

SEQ ID NO: 379451 - DNA, 275 bp, Zea mays
atcaagggcgaatcccgaatgagggctgcgcgaccgtcattctcgctacatcaatataaagcctagcgttatactatcagccaaggccttcaccagccaataccgagtcatttttggctgttattacatttttcgaaaacattcttgcttccagtggtactgttgttcacgtctagccacagaaggatttagttcttgaaactatgttgcaattctatttccctgttcttgatgttcctgggcatcattccatgtggtactgcttctcacgtcta

SEQ ID NO: 379452 - DNA, 270 bp, Zea mays
gagcttccgggctgcgctcttcgttgcccagtttccgctcagtggtcgcgtctacgaaccgcacccaccagtcccgctgcattctcggccgggctctaggcgccatggctccccgcgggaggaagcgtaaggctgaggccgcggtggtcgccgtagccgagaagcgagagacgctggcgaacggcggggacggaatggaggaggcgaccgttgttatcgagcattgcactagctgacgcgtctatgggcgcaacgcgcggccctgagcca

SEQ ID NO: 379453 - DNA, 101 bp, Zea mays
agcacctggacctttccatcagtgagaagttccatgaactccaccgtgacttgcaccagggcattgaggcagccagtgaccaagacgatctgcgctggtgg

SEQ ID NO: 379454 - DNA, 236 bp, Zea mays
cggctcgaggtctcctgcctcagccagtagctgagattacaggcgtccgccaccactgccgaataattacggtcctattctgatcgctttagcacctttttctattaggtgatcaaaccttggatctgaagacctctttgagaggcctgcagagagggcagggttgtggaactgctgaaacctgatagcccttcctaagtgattttctttgtgacttttattctgaggacttcaat

SEQ ID NO: 379455 - DNA, 205 bp, Zea mays
cgattctgcccctctgcggctctgctgcctgcccctttttctattcccaaaactcccatctcgcggcggaaagagagagagagaggagaggtgcgagctggtgagatggatcggttggaggagcggaacattaagaagggggagacggagatggaggaggcgcgcaaggaagaggagcggaaggacgaggcggaggacaggaata

SEQ ID NO: 379456 - DNA, 136 bp, Zea mays
ggcagccttagtcccatggccctgaaacacacacatttcccccttcctttcccagaagccactggccccccatagcacccagtgcatcctttttacaagtggaagaactaggatggctttccaaagtcttctagaa

SEQ ID NO: 379457 - DNA, 183 bp, Zea mays
atttgatacctgttctctgccaaagcatgtcaatgagatacttcttgccttgaagaactttgtttactgagagagacagatgatctaggaaagatattattacaaaaagtagaaagagataaatgccagatattaggacatgctatgtttgtgggaatgtggaggtgggatggagagtgacta

SEQ ID NO: 379458 - DNA, 111 bp, Zea mays
acacatcgtaccctttatcatgtgcagctgaggagactatggagcagtctcaggaaattaggcctgttgattcttctaggaaaggtgttgacagtttcacttccaattctt

SEQ ID NO: 379459 - DNA, 176 bp, Zea mays
gcagctagctagtagcgaacccctcgacggtcctgtacgagtgtgctaatagttcttctactagtgccgtgcgtggactgctgggctcaccatgcatgtggtttaattttgagaatgtgtgctttggttctgtgtatattacgagataattaaagttctccttattagggtcgatg

SEQ ID NO: 379460 - DNA, 108 bp, Zea mays
gctcagagtgaaggaatattaatgtagcttgatgggatcaggaaaaacagtaacacttcagagtagggagaagatgctgaagtggatgtattgagggtatgattaata

SEQ ID NO: 379461 - DNA, 292 bp, Zea mays
aggctcgaggtatgaaagaaaacttgaccatttgaagatatatgaataaagaaatgtactatagatgatactttaggaaaacactgtttggtaagtgttccagtctgatattttaagtgtgtacttcctatacttgtataaaaatctttgatgtttgcaacaatactgtgatttttttaagtggatttcttttgcaagtgaacatgatcattgaaagttgatatggcagtttccaggaaataaatgcattctttgtagaatgggggtgggagattacatatttatattttca

SEQ ID NO: 379462 - DNA, 267 bp, Zea mays
ctcattcatacatgtcagttagctagaacactggtgatatagaaaaccatgcacatctttctgcttgggtgtgcaagatgcattggcaacaatgctacggttggcacatgcatgcatttacgtatgatgcgtgaagctttgatagatggatcaggatgtgcaaaggcagcgggatacaagggtgtgtttgggactattgccaggttccctagccacacgagacgctcgccagccagcctgggatttggctctctctctctctcgagg

SEQ ID NO: 379463 - DNA, 266 bp, Zea mays
gcagcctcgcaggggctcttggtctgcagcaccacgaagaggaatatatgaaatgcgtgcctgcagatgcggctgtcgtacagtcccgcagctcatatattcctcttccatgagcagtggacggactgcagcctcgcaggggctcttggtctgctgagaatcctcatatacaaggtttatgtggatggcacaacaaccatgtcgactcatgagaggaaatccagcatcaaagaattctatgctgtgatatttccttctttgctgca

SEQ ID NO: 379464 - DNA, 264 bp, Zea mays
tgtggtgggggacacatatcacctcattcaaatgatggtcctggactcacgtctgcttctgatgattgcatcattacgataagctcatctgaagggcagtcaccagaggtttatcttcctggtcttgttgttcatgttgttccagtaaagaaaggtgcttctccattgcagaatacaattgtaacacgccaaaagaacaagagttacaaagcgctaattgctcgtcgaagagattttatggaccttgttgtgaaacatcacatg

SEQ ID NO: 379465 - DNA, 296 bp, Zea mays
tgctattcttggagtgacttttgaagaattcctctttttaccttcctttggggctagcggtggtattcttttagcctggaaaaggcatgtgcaagcaacagggcataacagagtgggctcttattctgtccaattccagcagtcaaatggccaaccttagtggttatccggtgtctatgggcttcgggacattgatgacaagattccattcttccaaaagcaactgctatggtaaaaaaggtttcatttttagtcttattggccaaaattggagggattccaggaagtagtctagg

SEQ ID NO: 379466 - DNA, 272 bp, Zea mays
  unsure (1)..(272): unsure at all n locations
cctttgtgcagctctgaggtaaacttctatctcttggctgacaggacttccacacgacacacgacggggnnnntgcnnnngcngtcnannanncnnangacttcnatcacttgccccccacgccgcacaccnttnctacggcctcgccgtcgccttcggtcgcccgctgccaccgaccgagcccacctgctacccgtgctcggcgccctcgacctcctacgacgcaccgcactacgccgcctacgagccgtccccctacggtcaccacgcca

SEQ ID NO: 379467 - DNA, 287 bp, Zea mays
aaaagacgtttccacatcctgttggcgtacaccgttacaacttaaaggataagctggcctcgtcaccacgctcgatggtggctctgaagtcatctgttaaccgatggatttagtcgtcgaaagcgtcgttcatgggcgcttccccgtcaggccatcaagcggtggtgccatttgccaagaagaggaatgaatatatcgaagatccgccagatgaggaagtcgcagatgatttcaccgacgagttggaggaggacttcgacgacgccaaagaagacgaaggcgatgta

SEQ ID NO: 379468 - DNA, 274 bp, Zea mays
tggattgttcagaccagaccctttttagcaaaagggaagaagaagagaaggaaggtccgcgcacttggcatcaatctattgtagttctcatgccaaattacaatagattgatgccaagtgggcggaccttccttaacttcttcaacaatgccaactgtgcagcagctgcaaagcggctagcctgctggatctcaattcaacggtgtgacgaggatggggacaacaggctccgggtatgcgactctgcatgcgaattgtacaatacagcttgtgg

SEQ ID NO: 379469 - DNA, 289 bp, Zea mays
  unsure (1)..(289): unsure at all n locations
gtcgctgtagaagcttggggagcggaggggggtgtcaatgtgacggacaataataaggtttcgttggtgtaccagagatagttgtaataaaaacaagcccggagaccattcgtccaagcacagcacaggcatgtttttgtgcctgtcgataaagcgcacagatcatgacaggcataggccatcactgatgatcccagcatatgcatcaccaatcatctccagcagtagcttgtgtaataattgggcattgaaccatgattgatttgggaaagttcccaangcccggttg

SEQ ID NO: 379470 - DNA, 287 bp, Zea mays
caactccgccgactcgctggaaccctagccagccgccgccatgccgccgcgccgcggtagcaacgaacgggaaggccacggccgcagccaagagcgaaggccaccgagcccgagcctgagctagaggaagccgccgattccgagatcgaggcgggggacgcgaaggcggaggagtccggcgaacgaaagaagatgaatcggcaagcgacgccgagtccatggatgcagatgccaacgaggaagccgtcgagaacggagcggatgagatggatgcggacctgaagcca

SEQ ID NO: 379471 - DNA, 303 bp, Zea mays
agtcttcttttgcactgcactgcgctctcgctcttcttcctcgttcacctacctagctacctccgcatgaaaagatgaaacaaacaaaatggtgagtgctgccgcgccgcctgctgcttctcttcacattgttccttccttccctcagcagctagctctctagcgagttcgagcaacgatccactgtctatctagtaaacgggatattggcgcggttcaatcagaaagcttgcgctccaggcccgaggggctccactctttgattgagccgtgccaatatcacgtcccggccggccagcttta

SEQ ID NO: 379472 - DNA, 293 bp, Zea mays
cggttgcattgtaagtattgattgtctgagggcttgatgttttctaagtgtggagcctgtttgtgaatgtattaggggaacgagcttcctgatagcacagccatcttacttttcttgtctacaaaaaaaatgctaagtccttttttactcttactggatccagttttgaactaaatttataaattagcaatcactgcttcttagaacagcagtgactggcattgagatcacttgtcaatgcctgctggccccacagcctgacagctattgtctacggaatagtcctgggttct

SEQ ID NO: 379473 - DNA, 251 bp, Zea mays
acgtgtaggcgaggatatgaatggtggagacgacacatgtatctgggcgtttgtctgccttcccagctggttgatagcactgtagtattagtatatataataaggggttatggtggatttttacatcactataccttagtatgaggtcgtttctcctctgggagtggtcaggcattgtagtggtaccgggagttcgtgtgccgttttaatgcaaggactgcacgaggcgcaccagaaaaaaaagaaagtgg

SEQ ID NO: 379474 - DNA, 286 bp, Zea mays
cccatggttaatacgattcctcctctgtgattccgctgggggagcacctgcttttgttgatcgtttgtttttggtctgatttcggtgggtctatccgcagagaggaagaagcagaagctctccgagatccagtccggcgttgaggaagctgaatcgctgattcggaagatggacctggaggcaaggagcctacagcctagcattaaggctggtttgcttgcaaagctgagggagtataaatctgacctcaacaacgtcaagagtgagctcaagaggatatctgcgc

SEQ ID NO: 379475 - DNA, 267 bp, Zea mays
gcatctcaacaccctctacatgtgacagatgcagatgaggaggacaagagtgtgaagcagcttaacgagtgtgccacaatatatctatctctccaggactgcctcattgagtcaaaccgcaactggaaggtctgccaagcatacgtccaagcactgaaagcctgccaggctaaaagaaacaaaagtgatcaaacctaaagctttacatatgtgagtacctgatatcccaaaatggtcagcacggatgccattttgcgggggacagga

SEQ ID NO: 379476 - DNA, 152 bp, Zea mays
cttttggaatggacgcggtttgatgagttgcctacaaaaagcaactccaaataattgtacaaacatgctgaccccagccatcccagttaaacatgtttgtacaattatttggagttgcttttggaatgctcgcggtttgatgagttgcctac

SEQ ID NO: 379477 - DNA, 137 bp, Zea mays
  unsure (1)..(137): unsure at all n locations
cgaacatcgtggtcgcctctgctcagcccagatctccgatggccaccgcacccgccgccccgcagncggcatccacggacgacgagatcatctacgagtccatgcactgcatccgcgtctacaaggaacgcgtggag

SEQ ID NO: 379478 - DNA, 221 bp, Zea mays
gccatggtgacttttgcaagcaagccttcatctacctcgattgatgttcaagtggtgttcgatgaaaggcaaccaaggtatctccctgctattctcaccaatgcatactcagttgatggtgttgttgtttggttcggctctgtaaccagtggcacacatgctgttcagaagatatatgagggaattgttgctcagatcttgtgcatataaatcaaccatgg

SEQ ID NO: 379479 - DNA, 176 bp, Zea mays
cagctgcccgcgacggcgacctgcaggaggcacgcgcactcctcgaatacaaccctcgccttgcccggtactccacgttcggcggccggaactcaccgctgcactatgccgcggcgcaaggccaccatgagattgtctctctgttgcttgaatccggtgttgagatcaaccttagg

SEQ ID NO: 379480 - DNA, 213 bp, Zea mays
ctcgagcgcttttcccccacgaatttgtgctgtactgtaggttatgtgatgcatataagagtagtaggtgaaaggattctgagatatcaaagggattctgtccataacgtgtaatgttgttcagttgggggtgggatggatgcaaaggtggcaattcgacattttactacttgtcgtgacaataattttggatggatgatgatgcctgtctag

SEQ ID NO: 379481 - DNA, 201 bp, Zea mays
caggaaggaaatagcggcgagcaagagctggcggaaagaagaggaaagccaggcacgccgctaacccaccgcgccaccaaccgcagatcctaaatccgatctctctctctctccctccctccctcccgccctctcgaggttttcggtttcgatccggcaagcgggcgagatcttcatggcgacgtcgttcaccgctgggag

SEQ ID NO: 379482 - DNA, 208 bp, Zea mays
tgccgcgctgttataccagcggtagctgcaacgattcatctagttgtggcaaattttggcacatccccaacactcgagagatcaagaaagcaaaggcatgccaaccttcaaaatgcattgagaattttggaccttgtaccatccaagcatcatcatgaccaagaggaagttccgtcacaccaccgccttataatggctgtatgggtga

SEQ ID NO: 379483 - DNA, 205 bp, Zea mays
cttctcgccaacagcccaacacatggaaaagagagctgcagaagcagacgcctaaaacatggccgcagtatgctcctcattcacctgccgcgtctagtatttcggaaatattttgtatttattaaagcaggagagggaggcaagcagcagccgaggccgagctatctctctatttccccctcgcccagccagatccgaagcctga

SEQ ID NO: 379484 - DNA, 185 bp, Zea mays
cgcactctagcctcagcgcgcgctgcctcgccagcgcgcccgctgtgcgcctgcacaaaccgcgccagtcgccgcgccccgtagcgtcgctcccggactcgcacaccaccgacgacacgttccgcggtgtccgcgtcaagtggacctccagcacgcgcagcgtcgaccgcagcggcagcggcggc

SEQ ID NO: 379485 - DNA, 206 bp, Zea mays
taccaataagcgtgacacatggcggacgagtacggccgcagcggctacggcaggtccggcgccggcgacgactacgacagcggctacaacagcaagtccggcactgatgactacggccgtggcgaaggtggctacaacaagtcgggcggcgatgacgactacggccgcagcggcggcgatgggtacggagtccggcggcgacgact

SEQ ID NO: 379486 - DNA, 209 bp, Zea mays
tcgcctcactcgccatcagtgtctctcatcggcggctctccggtgcatgcccctcgccctccctctcacctatacacgcctccttccacttactgcgcgtcaatttcaccttctgctctcggtctcttcgccttagggcttcaagttggtccggggtacctctcctgcgatccgcgcgcaatggagcaaatcaaagcccagccgtcgac

SEQ ID NO: 379487 - DNA, 207 bp, Zea mays
gcaccagcaaaagcatggccatctgaaggaaggcacaaaagattctgacaggccaacctcttcacgagacaagaaagccagaaaggagaggtcgattcaagaaacaatggcacatgtgcaagcagacaaatttcagagagaacctacttcagatcctgtacggaagagtaggaggcttgctaagaaactgtggacaatgaatttgac

SEQ ID NO: 379488 - DNA, 298 bp, Zea mays
  unsure (1)..(298): unsure at all n locations
cccaaacacaatcatttattcgtcgatagcttccgctctctccggagaaggtaggattaacaaggtcattcagatgtttgagaacatccaagatgccacagtaaggtccgatgcagtgctctacaacgcagttatttcttcgctctgcaaaagaggggaaactgaccgcgctattgagtttttggcatatatgtgtccagtggatgcgttcccaatgaatctacctacactatccttatccgaggcttagcgagtganggatttgtanaggaggcgcaagagatactgactgagctgt

SEQ ID NO: 379489 - DNA, 180 bp, Zea mays
ctattgaatgtgaactgatgtgcttttatgcacgcttctgattgcagtgtatttttatatatgtgcgcatgtgtattttattctgtgtgtttcgaaacctggtgtgcttctgtgtgatgactgtaatacaatgtacgggtcacccgttttataatcacggtgtgtatttgttgtgttgac

SEQ ID NO: 379490 - DNA, 278 bp, Zea mays
cttttctagcgccgtgtttccatctcttctactccctacgcattgctccagcccgtggagtccctgggctagccaacgctcacacatggccggagctccactgcagctcgcgttcggctcctcctgcgtcgcgcccagcagttccctactcgccagccatctctcccagcgtcgcgtccctccgttctctctctctaccgcacgctgccggccttctctgcttccccatggcgcgtccggctcactgcgctcctctctgtcgcgtctcttcgtcctct

SEQ ID NO: 379491 - DNA, 296 bp, Zea mays
tggagcaactgggacaacttcgtgaagaaaatgggtctcttaaaagaagcttggagagctgtaaggcagtttcagccaattctaatggcactttggaaagatcacctagagtgcaaaggaatgcagttcaggaaaattcattgaatctcaccaagcagaacggatatggtggtggttcttctcacagtacccagacaaatggtctgcatccaatggcaggttatcagaagggaagtatatcggaggaagagagatcatcctttactaccaagcacgctagtcttggaatgaaatca

SEQ ID NO: 379492 - DNA, 170 bp, Zea mays
gcaaggggtaggagttgtagaagtaatgggactgaaaaaaacgaattcattcgcctccctgcgctccatatgcagtcgtcgtcgtatctgtggaataagtagatagcagctccggaggcgagtgactgactggcgcaactgtgttgctcgatccatacgaagcagacgca

SEQ ID NO: 379493 - DNA, 156 bp, Zea mays
  unsure (1)..(156): unsure at all n locations
gcttacttcgcagcagatgctgctgctcatgcctcgaagaaatcctcaccccgtngtgaccaatggagaagtccaaaatgctgctgctgctctcaacggctctgaccatcgccgtgggaccaacgtatagtgctagattagatgcccagcaaagaa

SEQ ID NO: 379494 - DNA, 281 bp, Zea mays
agccgcgttcccagcagccgccaccgccgtcgccggggccgccggctgcttcgcactcggctacctcctgggcttcagccgcatcgcgcgccacggcggaggcccaagttcgggaccggcctccgatgacgattccgaggatgactcggggaaagatgatgacggaaactccggccgcagtcgcgcagcgaacaggacgagacggcagaagacggccgagctccggctgctctactgggcacggaacgtggtgaccgagtccgactcttgcagggaagcgg

SEQ ID NO: 379495 - DNA, 308 bp, Zea mays
  unsure (1)..(308): unsure at all n locations
agcgtgggactcggagcttctgtgcaactacttcaaggcagggctcctggtcaggccctgggagaaacacgctgaaatcataccggcgcaggccatccaaaaggtgatcgaggaggcaatgctatccgacagcgggatggcggtgcggcagcgggccaaggagctcggggangcggttcgcgcctccgtggctgacggcgggaactcgcgtaaggatctcgacgatttcattggttacatcacaaggtgaaagtatgacgacgacgcatcacgcatgcatgggggatacaatacaaaactttttgtgc

SEQ ID NO: 379496 - DNA, 290 bp, Zea mays
attatttattacttctggtaatatgatatatatatagctacttattaggcgacatttccaatcgtctagcgtacgtgtcgtgtcgtctgtgctgtgcctaaccaagtttcatcttttatattgtgccgccccgtcgatcttgcatgtgcaggttcaacatcgtgggacaggtacgtacgtcgtacgccggcctgatcaatcttgcttcacagattcatgcgtgcatagctgactagctagctgcaacacatatagtatacactgcgtattttcatccagctgaaattaaa

SEQ ID NO: 379497 - DNA, 296 bp, Zea mays
ttgaaacaagcagacacacggacatgcaggcagcgagtgcaaccgcgagatggatcagcgatgggctccttctgctcgaccttagtgacgccacctcggaccgccgccgacgacccgaacagcgccgaggtggccgcgcactccaaagccaccgacgacgagcagtgggcgtcccatgagagcagcagctagctgatggtgatcgtcatctcggcgtcatgttgcgggccctgccgcttcatcgatccggccttcaaggcagctggcctcacgcttcagcgatgcatcttcatcaa

SEQ ID NO: 379498 - DNA, 244 bp, Zea mays
gatatatttatttcattgtaactctcttttttttcgtccatcttatttctgtagctgagaaaaaaaatgtattttggaagacaatgatactgattgcgtgcgtgccatttagttagattcgtttgtttatttttatatgtcatgcctttgtattgtgcttagatggcccatttgtttagagcaactttagtgggaggggaggagtgttaaaatactctattcagtaaagaagcacagcatgtcg

SEQ ID NO: 379499 - DNA, 160 bp, Zea mays
ggacgctgcctagccaagaaactgtaccatcagctggagcaagccagggccgagttcatccaagcaaatgtcatggtccggaggcagaccatcttcctgcccaaggttctccacttctatgcgaaggatgcttccctggagctacctgaccttgttgaca

SEQ ID NO: 379500 - DNA, 157 bp, Zea mays
cccacgcgtccgcccacgcgtccgattgattaaagaaaagcttgttcgatattgattgagcaatattgagatggcttgaacatgtgtgacgaagatctctagagacgctagtagaatcctaagaggcggtagcaataaaaagagacgacaccagcaa

SEQ ID NO: 379501 - DNA, 236 bp, Zea mays
ctacaagatttactaggcagaatacaagggatttggctttaactttcagtccagaactgcaacaagtcgaaaccttaggactctctactatcacatccacccctcaacaggaccagaacaactctagtgatcaaggtgcacttgaggcaaccatagatccaaatggaaaaaggaacaggagtatgggcagagaactggataggataagtagaggtttatgcactaacatccccata

SEQ ID NO: 379502 - DNA, 227 bp, Zea mays
cccacgcgtccgtaaggttcttagactaggtgatggaggatcagactattcagcattcgtccaacatgttggtattccttcgatgaatataatttttggagaaggaccaggatatccggtttaccactccttatatgatgactacgtatggatggcgaaattcggagatcctgcgttccgtaggcatgtggcagctgctagcatatggggaatgatggctttgaggt

SEQ ID NO: 379503 - DNA, 129 bp, Zea mays
gaagcactaaggtatgctgaagagggagcatcatcattagaggtttatattgtggcgatgcaagctcttcaagaggctgctaacagggttaatatggccaagagaggtattggacaggtagcaccatta

SEQ ID NO: 379504 - DNA, 248 bp, Zea mays
atttgcacctcagtccctgccggtctgcccggtcgccgcctcgccggaggaagcccctcgtctccttgccctgcggcgggttcatggggttctcgctgtaccccatgaagacgtccacgcggatgctctggagcactagcttcttccgccataagctcagctcctcctcctgcttcctctgaggacgccccacccgcctcgatcgcttcaacggcttcttccgaggtgttccgatggcagtcctggcc

SEQ ID NO: 379505 - DNA, 106 bp, Zea mays
cccacgcgtccgcgtttcgatatcttgaagatccattcaagacaaatgagcttgatgcgatgcattgatctgaacaagatcgcggaacagatgaatggggcctcaa

SEQ ID NO: 379506 - DNA, 225 bp, Zea mays
cccacgcgtccgagacgagagcgtttctgaagcttctcaagacagtgcagaaaaaagttatgtctagatgggttcatcatcagtacccctgatggtgcactcagtattctaggagtgcgtggttgttttcttctgaagctcaactagctcgtagtgatgctttgggtgtaaggaaatctggcagatctactctgtgcatattatgctgataagaaaacaatgtac

SEQ ID NO: 379507 - DNA, 166 bp, Zea mays
cgacgccgtgggagctcgacctcaacctcagtctctagcactccgatacgtcgtctacctacgccacgccaaggttggtaatcatgtgccgggctatccgtacgatacgcgtgtcgcttaattagctctcaggtctcagtaggcacgttgatcacgctcgccctct

SEQ ID NO: 379508 - DNA, 235 bp, Zea mays
atcaaactctagcctttgaatccaaacaagccagtttctgtttagcttttacaatttcacaagctacagacaagggttcacaattgtagtgtgtcaggcacacgcgtgaacacctatgcatagcaacaacaccataaaaaacaaacactatgcccaagtagtcgtttgtgtgaatagttcagggatgagaatgcgatgcggcacgattgacatcttaagcctatcatcgtggcaa

SEQ ID NO: 379509 - DNA, 236 bp, Zea mays
atccgaattcccaggcaggcaggtcggcgaggagggcaggaagaccgaggaccgagcagtgcaggggctcgggaaggaaacgggacaagagcgcaaaatcgcagatccttcctgcgcgcccgcgcgggcacgtcgacgcgtcgttcttaccgggcgcggtccacctccgcgctcgcctcctccatgggaatcggatacgccacacggtgcgcgatgatactgtgggtcctcggcta

SEQ ID NO: 379510 - DNA, 230 bp, Zea mays
cggctttcgaagcactgctccgcgcttctgtgtggggcgttctgatgatatgtgattgcatgtgactcgtctggtgtgggtggttggacggcactgggcaggttcagaggagaggatgagtggggccaaccagaccacgtacgagaatttccgatacagatcagacagcaggcctaacatctatagccaaggatgtctgaataactttctacaagtcttctgcagcagga

SEQ ID NO: 379511 - DNA, 235 bp, Zea mays
cggacggtgggttgtggaggcccaatcaaatgacaaaatggagtgtcaccatggttcgtgccagttatcgactcctcatattcatagccataaggtcattctgagcgtgagtgcgaatacctccgtgctttgttccagtctggatgcatgagagctttgcggagactatcagagttccggtcggatgggaagcactgagaaaactagttcagtggttctactcaggcgagctgcc

SEQ ID NO: 379512 - DNA, 256 bp, Zea mays
cactctcatcacttcgctccaagcgcccttgtgtacgggagagacggcatcgtaccgtagagcagcatccatggcggctcaggggagtggcggtgctcgtgttcgtggcagcgacgccgccgcgcgcttacgcgggtcctgctgtgcgtgctcctccacggcgagttggccaagtcggcggtgtacacggtcggcgaccgctgcgtgtggagctggaacaccgccaactggcccaaagggaagcggttcctcgccg

SEQ ID NO: 379513 - DNA, 254 bp, Zea mays
gcttgataagtcttgggcctgctgaatcctgtgaattttttcaccgttccttcattacttgatttcatggatgggtcatggaatcaagtaatgaaggaacggtgaaaaaatcgctgtcgatcactccacttggcagtgacagtggatactttgttaatataaccgttgtgaacagtgcagagaggactaatgatcgtctttcagtccctatcacaaaagctgagtttgctgtgatccgcacaactctgagtttt

SEQ ID NO: 379514 - DNA, 251 bp, Zea mays
caaaagttgtcaaggtttcataactgcacattgttctcgtaggtgtacccagtttcagtcatgggtggggagatgtacatgtcagctctgaagaaaccatttcctcttgtaccaatggttgcttctcaaggaattaaaatcggttcaatcaagggatatatggaagcaggggcatctgcagtggtcttatctgatgctatttgacagtcaattgatgagggatgggaaattcaatgaaatttcggaacttg

SEQ ID NO: 379515 - DNA, 227 bp, Zea mays
  unsure (1)..(227): unsure at all n locations
acgtgagcgacgcctacgtgatgcaggggacgacgtcgttcggcggccaggaccgccatttcggcaaggggatgggcggccaccattttgtgcatgacttggacggcagaatctcgtctttcgactggatacggcatgcantgtatcagacgattgttatgggcagcacaggcacgcacagttgaagagaccagaatatttgacagtgtggatgagggctatagagg

SEQ ID NO: 379516 - DNA, 229 bp, Zea mays
cccacgcgtccgccaattccagtcgcccccatccgttgctcatctcaccagaagcgaaccggaggagggaggaaggagatcgcgagcagccggagccggaggccgagaggaagaagacgttcgacccgtggccggacttctattgccgggagtggaagcgcaacaggcccatctacacggggattgccagtaccggcttcatcatcaccaagatgacggccaacttcac

SEQ ID NO: 379517 - DNA, 228 bp, Zea mays
gtgtgtcagaagtatggctgaattgttgcagaagactgcatctgggatacctgttaccataaaggacagcaagtgtgttatcaaaatagaagactgccgtaacactgtatgttggaaaagattgtcatgcagcatgtcttgcataggagggtttttgcagggacttaattcagcattagaaagcacattcaacgatcaccgaatagcaagcccagaggacaggaaaat

SEQ ID NO: 379518 - DNA, 229 bp, Zea mays
cctcgctccgccatttcgagggcctcggctgtttctccgccgcggcgtctagctctgcctccaccagcttcctgcccggctacgcccccgacttctgcgtattcgtggcgctccgtccgatcaagccgcccgccaccgccgtagcgaaccctctcgcctctccatctccgctggaggaggagcaccggcggcaggccgccgttccatggcacagcgatgacgacccgcc

SEQ ID NO: 379519 - DNA, 224 bp, Zea mays
cccacgcgtccggtcgggaatgggacgaaagatatgaaatgatgatgagcggaccggagagccgaatcaaatctattaatcggtggcgctggaagggtgctgccgtcgattcctctaccggtggcactggaacacaagtaaccggcagttgccgaccattaccaagatctctaaagggcttagattaattagataatccagcataagcacaaaacgttaatctc

SEQ ID NO: 379520 - DNA, 221 bp, Zea mays
  unsure (1)..(221): unsure at all n locations
cccacgcgtccggatgataccggccgacatcggggagagcatcgttggcgccggcgggtgcaacagctccagcgacgccgcgcagtcctcctccgaccnctccaggaccttctccgtcggcacccgggacgacaccaacgccaacatgntctttctgtccccatcaagaatcccaaggctgaccccgccgccggcgccgacgacatggtcaccaacttcag

SEQ ID NO: 379521 - DNA, 223 bp, Zea mays
aaacggaagaaatctgtgcgtaaacaaagggctggatctaagttgaagcatacttctggtccttccaaagcaggtcgattgggtagacctcctctgatcaaatctgaatctagttccttatctctgcagccaggaaaaagggaaaggaaggtgcctgaaggtacaggaactcttcgcgaagaaaagcaaaaaataagtgatcagataaaagccatgcttctag

SEQ ID NO: 379522 - DNA, 218 bp, Zea mays
tgtttaatcaatgaaaaacctgtaaaactggatattcaaacagcgccatttataaacatcaattttgcatatgctgttaattttatcatcatagtatgcgttggtaattggcatgtgcatcatttaattggcaagcaatttgcagcggcggtcttttaagaagcattttttacaatctcaagaacattcaaactggaacaaaagaacttaccctttga

SEQ ID NO: 379523 - DNA, 241 bp, Zea mays
ggaagctgcagctgcaggtgcagcaagatcaggtgcaggtgctcgggagctggaaccgcaaggtggcttgcttcctcaactcgtgggttgcccacgcgcctgtccgcctgcgaggtctgatcctggactggattcggagaggcaaggaaagtcagttaccagcgccaccgccagtgcaccagctggaaatctcaaccatgtgacttacatattagtttgaccgtaataggctccggatgga

SEQ ID NO: 379524 - DNA, 212 bp, Zea mays
tctagatcgcgagcggcgcccttttttgatttttgtttttgtatcggacatcatctgaatcgacacatgacttttacaacaacaacaagaaacgctagaatgacgtgtactactccagtccttaacaatcggtacatgggagtaattggtgaacgtggtaatgggtgtctgactaacccatctattctgctgcagttcagcctcctgcttgg

SEQ ID NO: 379525 - DNA, 149 bp, Zea mays
ggaggagctagaaaaaaaacttgaagaagaacgaaagaaagctgaagaggcgttgatgaaagaagcgttggaacacgcagcagaaagagctagagcggtaccaggagttggagaggcttcagaaagaaagagaggaggccatgaaacgg

SEQ ID NO: 379526 - DNA, 190 bp, Zea mays
ggggcgcccaacccgatatggttggtgggcccctgtcacactacgctataaataaaagggtgggggccggcggctaagggcacgtgtttcactagagccgtactccccaccgacaaaaccctaacaccgatctgagagggtgcgtaccagtgacgggaagacacgccgttcatcgccgtcgacaacctcg

SEQ ID NO: 379527 - DNA, 261 bp, Zea mays
ctatagtcccagtagatttatacaggtcaatacgtgattcacaacttattggcctgtcaggatacacaaaggagttttcaataggaaagttaatatgccgaatgaagatcgcactgaagaggttaaagtgttaacttatattgattgtcaaacttccacggaatgatgtcctactaactgcaacatgggttattaagggtctcccaatttttggcattggtgttggacatagcacatatgacaaagcttcggtccactact

SEQ ID NO: 379528 - DNA, 254 bp, Zea mays
tggatcaaatgcatatataatccaaccgttgttcataatattccacttctgatagattaatttagtgcttctgttctgtctgtgctatattagttcagtaaccatgctatatgctctgcagatcgttcttatagcttgcagagcttttatttatgcattcttcttggtttgttgaagtccattgaccatttaccatgttcctatttggttcaacatttgttaactgctgcctataagatgctggatttatgggt

SEQ ID NO: 379529 - DNA, 253 bp, Zea mays
agctgatacagacacacatggccgctgtggccatggagcagaagcttgctactcctgagacgacaggtgggagtccttaccggccgtttgggacgtacgtgctgtgctccccagaaggtgcggcgtgcgtggacaacgcgaccgcggcggcacagatgctgtacgccaccttcgcatctcggagttcgcccggtgcagagtccccggaggccgcgcactcctgctacggcgagctcgtgctgaaaatgccaca

SEQ ID NO: 379530 - DNA, 253 bp, Zea mays
attaaaactaaggtgaatatcacctctactattttcaatattattatttattatttttcttgttatttatttatgagaggaataaatggcttaattgaaattttctttcccattttctattcctaattccaaattcaattattcaaactcaaatttatactcctgttttaaatttcagattttccaaatgtctcaattgagatctaaatgtgaatatacaccatattattttaagtattactattttattctc

SEQ ID NO: 379531 - DNA, 251 bp, Zea mays
tgaaaggtgaagatatccaaggtcggaaggcaggaaggctcttgattggtgatctagttgcctcgtttgcaagtggtatcagaaacatgagtgacttagagcatttgggagaggagatggaaaagtattttcctgttgatatttacacttataacatgctgttacgagggttctctatggcaggaaggatggactctgcctgtaggttgtatgaaaggatatgcaggcaagggtatcaaccaaatcgatgg

SEQ ID NO: 379532 - DNA, 243 bp, Zea mays
gaaatattaaacgcaacttgaatacaacgccaaacacatttagcaatatggcagtcgaagaatagatgttgatggattcatttaacgtacatgctacacatcgtatggaatgttgtttgtagaggcattatagaatcccaatttcacataattttattagtgtacaccatggagattgatgcataagtgaagtatcaattcgacagacaacttattgcatattgatctttggagtttggacca

SEQ ID NO: 379533 - DNA, 125 bp, Zea mays
cccacgcgtccgagattgttcatgcagtcatgcacttgaccggtggaagttctgtctaaatttgttgtcgaacggatgaactatatattgtcggtgttatgccagcagcagagcttattttgtcc

SEQ ID NO: 379534 - DNA, 272 bp, Zea mays
catatgagttctcttcggcactcccaaaagacaaaagctctgcagatcctcaaggcattacggctctagcaagttcttctatcaaaactggaagtgcacaaaacactggttctattgaaccgaaaaaaggttattcatggattcagaaatcagcctggagagatctggtagggggcacggggagcgcatctttcagcatatcgcaggtgttgccgaacaacaatccagcaccagcagtgttttcaaatgttgctgggagcgagacgtcttcg

SEQ ID NO: 379535 - DNA, 271 bp, Zea mays
  unsure (1)..(271): unsure at all n locations
atgctaaggtctgaccgaaataaagttagttatgttctttgatcacttctcatgatgaatctgctaataccaaatcttttaatctacacaccttttatgtatttaatatcaaacttaaatatggtaggaacctaaaatggttcgtatctgtgatgatgagaggtagtacattgtccttttttaataattgcatgcttatgaacatctgtccatttagttgtttttgcatttatanaaaatgatagttgtttttcaatcaggaattcaagct

SEQ ID NO: 379536 - DNA, 271 bp, Zea mays
gaaacgtaattattgcgcttagtcgtatgtcgaaactaatattatcgtataaaattgtacaacgccttgccactaggtgtttaatacgctatcgtatagcactatttagatttgtgctattcttgtttatatgcattcatgtgcatcgtgcatctcaattaggtacgataattgatcgcgtgatgcggaagacaagccaagtggaccccaagcgcggactaattcgcaagatgatgctgatggattaacccgaagatagatggacgaagca

SEQ ID NO: 379537 - DNA, 110 bp, Zea mays
gcaggatggcattggccagagctgatcagctgtctgtggagatatgggatagtgctacagcagcaattggcgcaaacccctgagtagagggaggattgctttgctgatgt

SEQ ID NO: 379538 - DNA, 134 bp, Zea mays
cgattggaattcggaacttgtagtatagccttaattttatccacttcgaattagttttgtggattggtgagtgtcaagttatttgctttagattcaaaatgaagccttttccccctcgcgaaatcagaaggttt

SEQ ID NO: 379539 - DNA, 223 bp, Zea mays
cttcgatgcgaatgtagcaatagcatacggagcaggtgcagagcctgcagcaatggaggctaaaactgaagatgctccaagataaagagggcgttctttggcgtccacgggggatagactttaatgatgatgtaggttcaagccaaaggatggcttgttctagtttaaaatatgtttgatctatttttaaaggaactattggaaaaagagtttaaaaaaatta

SEQ ID NO: 379540 - DNA, 99 bp, Zea mays
cccacgcgtccgcagcatcatcgatcgccgagcgtgcgtgctctagctctagcaatagcagcgaggagacggtcgaggatggatcagaacaacagcaac

SEQ ID NO: 379541 - DNA, 233 bp, Zea mays
gccacctccctcgtccaggaaaaacaggtgaaggaaattgtgttgaaggctatggtggatatgaatatgataacaaccaagtaggttatggtgggtatgaacaccacggtggatatggacatcaaggtggatatggaaaccagggaggatatggccacaaccaaggtggctatggccacgaccaaggtggctatggcggttatggttacaaccaaggtggatatggaggatat

SEQ ID NO: 379542 - DNA, 231 bp, Zea mays
gtgtcacagcgctgcttgcttgcttgcgatcgggcttggatttggggagcatcatggaagcctaggtcttgttccacagctggagggcgcacagagttcgcgtacgcggagctatgaggaggacatcggctcggccgacgggttccgaacccccgtccacgtcgacgtcgagggagtctgctggctcgtaggcggactcgacgacgacgctagctcctctggttctggctc

SEQ ID NO: 379543 - DNA, 195 bp, Zea mays
gggccacggccgcggcggcggagcaggccgtggagtacatctcgtcggaagagcacgtcgcggacctggactccaaggactgggtcaggacctgcgaggcgctcaacgacgcgcgccgcctcgcgatccaccaccccgcgctgctgaacccgatcctggagaaggtggtgctggcggttgggaagacgatgaaga

SEQ ID NO: 379544 - DNA, 233 bp, Zea mays
gacaggaaagtcatcttacactgacgatagcatatcaccatggcattgttgagataacattgtccggttgtcccatttacaataccaagttaccaaccgtttcagtggccacctatccacaagagcagaactgcaggggtcttcaccattgtgtacagcaaaattgtgtatcccagaacaaaaggggaacacaacaatggtcaaactaaacatctcatgttttaaagcttgac

SEQ ID NO: 379545 - DNA, 253 bp, Zea mays
ccacgcgtccggagctccatcgcttatacaggatccagaagctcctgatgcgagacctcacacgggagctcaagctcaagagccagaggagcctgccaccacctcgccgaacggcagctgcgccgagtacagcagaggggctctcggcatgtgcgcctacgagcgcctctacgccgctctcggccgcggcggacacgtagcagcagcagcgacgccgacgccgacgccgcgcaccgctctcggcctcgacgtc

SEQ ID NO: 379546 - DNA, 253 bp, Zea mays
cttgggacacatgcttatatatttcagcaacttctagaggaaaaagcaagcacaccatctttgtgttcaaaatgtgtcattcaacaagaacaatatccagttgtcaaagataaggagatagtcagcagtttatgtaagactgtgggggagcaaagctaccacccttctgaggaaaatatgacatttggtcgacaccaacttttgaaggatgatttgaagaaagcagctataagtgcaagtgatatatcagaat

SEQ ID NO: 379547 - DNA, 248 bp, Zea mays
acaatgagtcatcagcaccatcaattggaaaccatgatgacttcttatttgacattagtgcacgtattgcaaataaaaggccagcaagcctggggttcaagtctgagctagaccgatacttggatgaagaaatggtgaacatgcataccaagaacttcaatgtcttagattggtggaaggtagctggaactcgatatcctactttgaggagaattgcaagggacatatatgctatcccagttaccaca

SEQ ID NO: 379548 - DNA, 235 bp, Zea mays
cccacgcgtccgcttccatggcgagagtcgtcttgcccaggccgccgaacccgacaacggacagcaccttgagacgggcggttccatccaccaaccagtccacgatgccagtcgccggaccatcgatgccgaccagctccggcacgtcggcgtagaggacgttgatccttggatcggcaaccatgcggtccccagaagcccaaacgtcgtcctcaccgccgaacctatacctgga

SEQ ID NO: 379549 - DNA, 260 bp, Zea mays
cccacgcgtccgcggacgcgtgggtgctccagcagcagcagcagcagcagatgatggtgatgataatggcacagcagcagcagcagcagcaagcttcttccaatccgtttgccgacccgtatacggccgccgccgccgcccacacgtatggtgcaggggtgcagctcaacgcgggcaaccgtactctggagctgggatgatgtaagcgttgcacagaacctgctgtctggttctgaccggcatcttccgttctttcttgt

SEQ ID NO: 379550 - DNA, 214 bp, Zea mays
caacgtgctcctcttcttctcggctcccaacggcaagccgcagaaccaggcggtgccgccgctgacggcccacggcttccacccgctgctcccgccccacgcgcaccggctggcggcggccaagtcacccgagttcgccccgcgggcgccacgcggctgtcgtcccgcgccgacgtgtactgcctcgcgttcgcgctgctggagctggtcacgg

SEQ ID NO: 379551 - DNA, 278 bp, Zea mays
gtacggtcggaatccgggtcaccacgcgtccgccaggtccgccaggtccgccacgcgtccgggacgctccgcccacgcgtccggtccccagctattagtcgggtcttcaatttaaagaagaagacatgcatggagcgatgtcgtcgtctttgctgtgcgcgctatagcctttctcgtccgcctgaggcacgcatgactcgtccgtcgattattgtgctgcagtggacatgtgtatgtgctcctgtttctagcatatccccttgctttcaggaagaaag

SEQ ID NO: 379552 - DNA, 249 bp, Zea mays
gagacgggaaacaaaaacacagcgcaggcagagagagacgtaaagccgccgcttcgtgcgcgtcgacgtcacctcgccgccggggggccagggctgtctcaccgcggtgtcccgtacgctcccttccctcgccggactgggcgggcgccggacggatcgggaggcgacgacctgaggggactggctgggatgaccgggaagaagcgcaaactcgctctcgcagctctacactctcgccatgggtgcgca

SEQ ID NO: 379553 - DNA, 269 bp, Zea mays
gaccatagtgataataatggtgaaatgtatgctagaaaagaaaaaaagagaaaaaagaaaaagaagagtagaactattgaacgggacgaggagccagacaacgatggtgaaatgtgcagtcccaagagaagaaaatctgtagaaagaagcaaatgcctgaagaagagcaagaaacagcaggtcgcatagaacatagaacaagtaccatttatctcagtatttgcattcgcttgattttgcagaattacacaattttgtgctgtagttgt

SEQ ID NO: 379554 - DNA, 259 bp, Zea mays
tttgcgaaaaagccttgaccgacagttctcttctgacgaattctacaactcttggaccgcttctttaacctagaaatgctgaaaccagaggatgatgagaaggataacttccgtcagggcgaagaattttcgttgccagagagttttctcaacaaggaagaataatatctagtaacctcgtactttgggcgtcctctggaagagaaatcagaacgctggttcttagtgattccctctttcttgtagcattgtcgtctgg

SEQ ID NO: 379555 - DNA, 261 bp, Zea mays
cccacgcgtccgaaaggcttgatttgtgttaggattggtagtatggatccttttcagctggttctagtgcaggcaacatttgcaatcattgatttcagtgtcagttctatgtttgtattgaattataacaaaacaaaaggttgtgcatagtagtgcggtctttaagcctttgacactgtagttgacaggctgtgatatttgcagatttatgccacatttcaggctctactgttttgaggaagtttcttactaccaacatgt

SEQ ID NO: 379556 - DNA, 269 bp, Zea mays
cggacgcgtgggcggagcgtgggcggacgcgtgggcggacgcgtgggggactacctgggcgtggagataacgaggcacagaaagaaagaatgagacgatgtacagtctgatcggagatgaacaattattgtacccacactgccgccataaaccacaatccacacttgttggcaacttggcatcaatgttttctcccttctcgaacacaacttgtggcatcacgtttgatgaacaaagagagtttgacagctggttgacagtggtacaaa

SEQ ID NO: 379557 - DNA, 254 bp, Zea mays
ggaagaccatggcctacttgttggttttctgtattccagtgttctcggtgcatgcaatcctagtgtttgttgggcccaagtttgttagagaggagaaccatgatctcgggagaaggaagattgctaaatacttcatacggacctacacgccggttggagataccagtgtttgcacttacccattgtttggcaccctttttcttggacttgtagatgctttcctgatgagctatgtatcatatgttggattacgg

SEQ ID NO: 379558 - DNA, 253 bp, Zea mays
gagccacgcacgctaggtcagtggcacgcaggcagccgcgcgcaccgaggggagaccagagctagcggcgaggccaagggcaagggcaaggacgcggacggcaatggcgagagctggaggcggcggtccgttcttcccggtccgcggcgcgcgctggtggtcgtgctgctaggcatcgtcgcgggcgcggcgagggcgcactgcggctgaactactacggcagctcgtgcaccagcgcggagtccacggtgcg

SEQ ID NO: 379559 - DNA, 216 bp, Zea mays
  unsure (1)..(216): unsure at all n locations
ggacctggcggacgcgtgggcggaccgtggccgtgacgctcgatcggcttcgggatagtttgcgccgtgaggtgagtcctggaagtgccgccactgccaacggcgtcggaaggggagcgccgaagcgtacancggggtcgtgcctccccaggctggtctccggcgtcctctcgggggccctcaccggcatcttcgccgttgctggaggcctgacgg

SEQ ID NO: 379560 - DNA, 168 bp, Zea mays
gcgtgtgtaataaaagtctgcacaattcggttgttccaaagacacaggcccagtgtctttggaagccgaatttggagtcatctggaaccgacggctcaggtttactgcaaccaacaccttagcaattgcgatctagcgtgtgtaataatactctgcacaattcgaagc

SEQ ID NO: 379561 - DNA, 221 bp, Zea mays
ccccgatcaacttccccatcgggaacgcggcgaccgggttcttcgtcatcttcgccgtgatcgccggggtggtcggcgcgggctcggcgctggcggggctcaaccacgtccgcgcctggagcaccgagagcctgccggcggcggcctccgccgggttcattgcgtggacgctcaccctgctcgccatggggtacgtacgttacgtatgtcgggtcccgcgt

SEQ ID NO: 379562 - DNA, 209 bp, Zea mays
atccaggggcaatcgaatataaattttcttccggcgtggccaagggaggtgccgagtctgtaccagtacgacgactcaggccagaacacacggcgtatggtatggtacacagcaaggccgtgttgttgctgtaagttttgtaatttctgtttccttctcggcttcgcaacatgcccagtaacagagtgttcttccatcatatacagcaa

SEQ ID NO: 379563 - DNA, 218 bp, Zea mays
cccacgcgtccgcccacgcgtccgacttcttctcgctccatgtcccacacacggaccacccggacgacataggatgacgcggacggtgccgcagcggacgcggaggcggcgctgagctacggcctcacggtcgttgggaaggtgcatgaggaagtattggcggaactggacacggtcctcgaggagtacatcaccttctcggtgaagcacgtggagac

SEQ ID NO: 379564 - DNA, 235 bp, Zea mays
aattccgcgggtcgactcaagggttcgaggacgttggtatcatatagagcagacacggaatcttacatcttccgccggccgcttggggctgtgtcacatgaagctctgcgcgagagcttcatcgtccgcttggagagctctctttcctgcgaggggcttcgccgtcgggatcagtgggaggcgtgacggtgcttcggtgctgctcgctactggcgatgcgtgcggctagattcga

SEQ ID NO: 379565 - DNA, 216 bp, Zea mays
ccataacgccacagctacacgtaaaccctccgcctcctcgcctccctcccttccatccaatcctcggaacgagcgcgcgggcgaggaggacccccgacggaggatggaggcggcggctagggttttacgcgggtcgctcttcctgatgtccacggcggcgggcgctcaaggcgtcggcagacgagattgagttcaaggtggctacggcggcgacgg

SEQ ID NO: 379566 - DNA, 221 bp, Zea mays
catggatccacgcgccaggtatccttcgggcatgggcaacggccgcggtgggacccctaactactacggccgcggcctaccgccgcaacagccgcatcagcaccaccaccagcagcagcagcagacatcgggggcgcatcaccaccagcagtacgcgcagaggcagcagcaacagcaccgccacagccacaaccaccagcagcaacagcagcagcaccaga

SEQ ID NO: 379567 - DNA, 222 bp, Zea mays
gcggggagccaggaccaggagaccgagcgagggtgctcatcgcagctcgggggcacgcgcacagcagccagatcagcagcgctgcatccccgaccccgagtactcaaggagcgctacgaggacgaagagcctcatcggacgccacaacaagggattcgcgcaacatctggaacagacggcagccgtttcacttcccttcctcagaggaggagtcgcagcaga

SEQ ID NO: 379568 - DNA, 222 bp, Zea mays
ggagaagcagccggtagaaggaatcttagtggtcctgtgaaccagactgacagttatgcacaacgaccgcgtgagaccgtatctatgtcattaaaggaaattgtaagtttccattccattggcctgttgtatgatcaatggtcattcggtggcgctgtgtttttgctcatgcagttctcacgtatctcatgagccttttacccgttcctccagatgcatagc

SEQ ID NO: 379569 - DNA, 218 bp, Zea mays
cggacgcgtgggaccaaatagaacaaacacgtaatctaattgggcgagggcgagggcgaggaaggaagtctcacgaacctcgtcgcacgagcttgagggtccgcttgcagagcttctttcctgcgaggggcttcgcgatgggcattagtgccaccggggtcttcttcttctccgtctcctggtcgctccccatcgccgccgccgccttcgactagtcg

SEQ ID NO: 379570 - DNA, 223 bp, Zea mays
cagtccaatcacagatcgcagtacaactgaacccgccgcacaaggcatccaggatttgttcggccttcggacttcggagggtagagaatcgaagcgacgagaacaaagcaatgaacgaggcggtgcaggaggcgaactgctgcggcaggtgaacgcgctcatcgtggcacacctccgtagccagaacctcgggcaggccgcagccgccgtcgccgccgccacc

SEQ ID NO: 379571 - DNA, 162 bp, Zea mays
ctgacagctcagctgcatgattcgtcaggtttcggggcttggaagtcatgacttgctgctgccacatgactgaccggtagcctgcaggccacagaaatggaggaatcttgcgtagaaaggtcgattgagatcggagctgacgagctctagacttgtagcgca

SEQ ID NO: 379572 - DNA, 261 bp, Zea mays
atactcgcaataagtgcgggtgtcctgattgaatttagcgagcgatttttctgatcagcctttttttttggtgggaaatcgaccgttttggaggtagtacgaatgctagctgccgccgatcgaactctgctggaaaatcgtgtggaatctagtaactgaatctggtggggagaatctcccggtcgttcatgtgaaactccggccggcgtcggccgtatgcccgtatatacacttgcaaaagcaggggaaaaaaatgtttgt

SEQ ID NO: 379573 - DNA, 264 bp, Zea mays
caatgccaccacatgaacacacatctcaactgatccaggggcaccaaggagatggtgtcagtactgctcgctttggtgcatatgcccaaggaaattctacctacctacataatgcactccctaattctagtcattatagttggagatcgcaaaggggatctggcagtggtttacctttggacccttcttctagccgtggttcttttccacccaccaattactatggctttcctttacactccgatgcgtcacagatacattgcc

SEQ ID NO: 379574 - DNA, 211 bp, Zea mays
cggacgcgtgggtccgaatcaactttccgattggctccactaacaatccaggaagctactcctaacttctcacctcggccttttgtgaacagcatgcagtttacaagcgtaaaccctcagcctagtccattgccaaggcctaacgggaaggaagttttgttctgaccgtggatgctgcatgccatgtagagtgtcatttctatcaggcgca

SEQ ID NO: 379575 - DNA, 252 bp, Zea mays
gagacaacggataacagaaatgtgcctagtaaacggctctccgtgtttctccggcgaacttcgtctacagctgtatgcgcatcaagcgttgttcaaccaggaatcaatcgagttggcattgtgttggaattttttttttatcttgtggcagctgttatgttgcaaatgtaagcctagtcatggtaacgactcatcaagtgcttgctcttgtgtgatttattgggagattggtatgatatttttttgcctgat

SEQ ID NO: 379576 - DNA, 142 bp, Zea mays
cggagggctaccgcaccctttcatcagcctgcctgtccactattggcttggtgacttcctccgctccgctacgctcccctccgctcccgaacggtcgatctttgcatggcagcagcagctggctccaaggggctggcgatag

SEQ ID NO: 379577 - DNA, 212 bp, Zea mays
atgcggtcgttcaggtccgggacctgggagtggggcggacgcgtggttgttaaaggaggctggtcagacagagcaggcagtcaccagcacagggcccttattctcaggccatcaaagcaaataatcttgtgtttgtttctggagttcttggcttgaatcccgagaccaggaagtttatctctgaaaatgttgaggagcaaactgagcaggtt

SEQ ID NO: 379578 - DNA, 212 bp, Zea mays
cccacgcgtccgagcattttcaagtcttaagaactcggaagataaatttaccttgcatcatcatctcatgaacggctgcggacacaaaggggagaaaaacaaaaacgagtgggaggtggccgtgggccatgttgctgctgctgacgaggcggcgcgacccatagtaaaggcgtacaacagctcacctccctcgtccagctccagccgccgtc

SEQ ID NO: 379579 - DNA, 211 bp, Zea mays
tgtttttatgattaactcaatagtatcacttatataacttgccaaaacttcatcatcatcaccttattgacttgtgggctaaatctacatggcacaataagggatataaaggaactatacactgtacagcgacatataaggaatcagttctatgttccttcgatttctgttttctggatggcacaatactaccatccttgctggtcatact

SEQ ID NO: 379580 - DNA, 258 bp, Zea mays
cccacgcgtccggtagattattccggacaggagaagctttttggaaaaacagaccaagcgcggaccgtccgggcccttgcggcggaccgtccgcaacaccaggatgaccctcggacagaaccaatgcaaaaatccaagtctgcactacggaccgtccggaggaaaagcaaggaccgtccgtgacctcgcgcggactgtccggcctcaggcgcggaccgtccagtaggtgaggaaccgaaaaacccgaaggtgacgggt

SEQ ID NO: 379581 - DNA, 237 bp, Zea mays
caaacaccttctcacaaatgtatttgatcttcttaaggtggcttggaataagtacatttgtgagaaggtgtttgatcttcttcagaattgtacttattccaagcctccttaagaagatcaattctgaagagcgctagtgggataggtggttctttatcaattgtttacgggggacaggatattggctaggtatctctgtagcatgtgccatactgattataaaatacattggtgaaa

SEQ ID NO: 379582 - DNA, 233 bp, Zea mays
cccacgcgtccgggtacttcctcccaatgggtgtacccatgatttatctgacatatcaaagggaaaatgaaaggttaagtatatcagcagtaaacgaatttggtagcgagaattgtttaccttccttttattatataccaagaaatcttgtttcccaggactcctatgttaactctgttgaaacaattggcgacaaggactgttgttctgattgctctggcaactgcttgtat

SEQ ID NO: 379583 - DNA, 227 bp, Zea mays
cccacgcgtccgcccacgcgtccgatgggggcaggcactctggacaccgcggtgcttttagtggtggtgactcaggcggaaggtcatggaagtcacgctctggtggcgatggggggtcaaggggacatagcagattctcccattcaacaaacacagagggatatccatccaggactgatcggcattacgataggcagaattcaggcaacgagaggcgatatgagaat

SEQ ID NO: 379584 - DNA, 224 bp, Zea mays
atcaaaagagcggccatgtcttgggtgatggagtgagtagaggtgctactacgccacaagcgcaaccctacaagagcacaaacaaagtagagttttacgggccgctagggctaggcaagcccatggaggagatgctcatggctggaaacgcgaatccaaacccaccgccagctgctgcgccctcggcacccggggcccagacccagagccagaggggtggtggc

SEQ ID NO: 379585 - DNA, 220 bp, Zea mays
atagatcatgaaagagacaaatgaatcataggcttgtaccagcatttactgcatggtacacacatatcagactagtctatacaatatacatggtctagccagcaaaacatgtgtcattgtttgggactaaaattgtaaaaccacatacaggattacaacaataacacttgagcatctttgtttgcatctatcgaagagattcttgaaccctgtaccaaat

SEQ ID NO: 379586 - DNA, 221 bp, Zea mays
cccacgcgtccgggccgacctgatgacaaaggcgggtcgtgctgtttatgttcagttttgttctcacagcaaaaatgatttatgctgcgatggctttggacctccctatttggaccatcaaagctattgacaagataagaagaggtttcctttggaaaggaagaaaacaagccaatggtggtcactgtttagtggcgtggggtaaggtcactaggcctaaa

SEQ ID NO: 379587 - DNA, 125 bp, Zea mays
tgtgtttggtggaatggattctagtcactacaagggtgatcacacctaatgtccaagtcacttcaaaagggttaattgccagtttattatgggtgatgtcctggttaatggaagtccattgggtt

SEQ ID NO: 379588 - DNA, 226 bp, Zea mays
cccacgcgtccgaaatgaggaaatcaggagaaaaattcgtgcaaaggcatatgttataacggctgcttttcgattcaaagaggctggccgagtccatgttcggtctgaagaaacaaaagtaccgattgctgatggtgcacttggctttggaatcaaagaagacgagattacagcactgacaagggatcacaactactctggtctgcagcaatatggaggggtttct

SEQ ID NO: 379589 - DNA, 221 bp, Zea mays
gcgtctctgcagggctcgcacatgctcattttccctcctcgacctgaattaacaatcgcgagatcccaggtttgacctttcacccagccttgttgttccaatggggcccactacacccatgtccccttcttcatcgcacacgcaggacactgcacctgagcctctcaagcactcagcacgccaatttgtccacgtgaccgtaatcttgatccacgccctcc

SEQ ID NO: 379590 - DNA, 238 bp, Zea mays
accgtccgggagggcgcgccccggcctcactctcactccccaccgtgccgacacaagcgggcgacgcagccacgcagggagacggaaatggccacggccgcgactgccacggcggggagtagagcagccgtgctgctgctgctctcgctggcgctggcgctggcgctgcgggcctccggcgccggcgccgacggcgactgccacttctcggccgtgttcaacttcggcgactccaact

SEQ ID NO: 379591 - DNA, 225 bp, Zea mays
agtgaatattttataatcacttgctagaatgctacgtagatgaacactatttgctgcggctaattaattaacatccggacggacgttgtcatccgtctactagtactagtagtctagtactagctagtatatatatggctgtgtacgtctccaagtcttatctaatatatgcatgcacatggtggtggacaaattaaaaaaataatgcaaagaagctccaagaaa

SEQ ID NO: 379592 - DNA, 221 bp, Zea mays
agtggtgttggatctgtagcaaactccacgtgtaggtttaaccacttcactggagttacatcctttgacctagcagacagtggatcagcactagaggaagctcaggagaacttgcctccaaaagatcagcaccatatgacaccgcctattaataaagggaatgactcaaaggaggtcctcagaaaagccagctaacagtacctgagacaccttctcctgat

SEQ ID NO: 379593 - DNA, 226 bp, Zea mays
gagaaatgcaacatgcatcagacaaatctataatcatcagcgaaatacttgattctagaacaagaaaccttgtatctgtctccaaaatcagcgattatgttctatcaaatgagcttgtaagtatggcactagcaatggtagcggaagacaaacaaataaacagagttcttgaagaactttttgctgaggagggaaatgagatgtgcattcggtctgctgaatttta

SEQ ID NO: 379594 - DNA, 219 bp, Zea mays
  unsure (1)..(219): unsure at all n locations
ccggcgacctggtgacantcgcgtccggaggtcngaagcgccgccgcgaggtgatccgaggcgacctccgcaagtaccccgtccacgcactcggcctcggcacggcgcacggccccgaggtcctgctgtacctggcccaagagtcccgcggcacctactccttcgtcgacggcgacaacgtcggcgtaggtggccggcgccctcgccgtgtgcctcggc

SEQ ID NO: 379595 - DNA, 230 bp, Zea mays
gatggctcgcagcggcgccatggtttcctgcatgctgctcctggtggtggcggcgcaactgctcatggtggtgatggccacgcagacagcggcggcggcggcgggcgaccaacgcggacagcacgccggctgctgtggcaggtgacctgccactacagcgcctgtaactgccgcacttgcccgacatatggctgggcgtgctgcagcacttgctgctagctagctagcta

SEQ ID NO: 379596 - DNA, 221 bp, Zea mays
cggacgcgtggttctgccgccaattcccttgcctccagacttcaaatccccaccaccatcgaacctccccaacccggcaaatcctaaatccaatataggctaaccctagccgcccatccgcccgccatgaaggcgtcgatcaagttccgcgacgacgaccgaccgctgctgcgcgccaaggtgccgattggcgtgctggggctgcccttcctctcgggcct

SEQ ID NO: 379597 - DNA, 216 bp, Zea mays
caaagttgatacagtatttacactcacggagacttattgatgatgcacattgtaggttgggggaagaatgattgagactattatgtggtccgatcaggcagccacaacattattagggaaacaagatctatattgcagtgtttatgcctatcacaaaatgaccagatcacaaaggtacaggaaagtgtgtaatgtaaccacactattcttacaaga

SEQ ID NO: 379598 - DNA, 241 bp, Zea mays
gtgccaactgctgtgtcctattggttttcatgagataacagagataggaaaactgacttgatattgtgccatttgtaccgagtactctaaaggactcatccctgtcagttttcacaaatttgtttacgtataaatgctgagtactagtagcattcatggtgttattggacacagtaataataagtataaggtaatactaggaaaatgtctgaaactagcacgcagaagataattccattgc

SEQ ID NO: 379599 - DNA, 208 bp, Zea mays
ggacgtgacggacgcgtgggctgaaatgatatatagttttaacccgttggccattgcgactcaaatattcagagtaatggactaatgggttcttcgatgattcgatcaaatttgtctcctttggggtattactggtttgctacagcatctaaatggggctgcctgtcacggcagcatgacatggtgttttgttcatggcttgtttttc

SEQ ID NO: 379600 - DNA, 228 bp, Zea mays
ttacattacatgagtatgtgttggtggttacattacatgacttcaaaaaaatatatggatgtggaaatacacttgggctgaggggtagaagtaaccaactgatagaaaaaggaatctgatagttttttttttcttacaagctaaggcttaagtgaacaacaaaaacattatttttagtggaccttcaccagttcggagtattcagatgactatttttgcatagaataa

SEQ ID NO: 379601 - DNA, 224 bp, Zea mays
gtactggatgacacagatcaggctggcagaggctgcttccaagcactcggtttctctgggcttctttaagcttgctcttgaatcagaatgtgagattagattgttgggtgtttttatacagcctttggaccggatgagggaagaactcaagtcctacgtagcacggcatggcctggcgacagaattggaggacccagttaaggacattctccaggtttatgata

SEQ ID NO: 379602 - DNA, 229 bp, Zea mays
cccacgcgtccgacaaaaccgacaatagtgatcatgtggacacaaccacaacatatagcactgaggatcatcaaagtgatcttccagaggctaaccatctttttgaggacgagcattatggtctggatgacctggagaaaataatgtcggagattggcaacatgcgatcaaacttaagactcatgcctgacttccaaaggagggagatggctgcaaagctagccatgaa

SEQ ID NO: 379603 - DNA, 223 bp, Zea mays
gcagccacggcgctacatgtccgcggcgacggtcgttggaggcaatggcgctccagctgcgccgagcatgggtgagccgctggccaagaagaagcgcggacgaccaaggaagtacgggcccgacgggtccatggcgctggcaatggtgcctgcttcggcggcttcagggtcgccggcgacaagggcagggttttcctgggccgttctcaccgcctgcgttaaa

SEQ ID NO: 379604 - DNA, 219 bp, Zea mays
gcctccggtggatcgtcaacgccaccggccccgtcagctgcgccccggcggcctgatggctgcgggagccagcagccgctgctccaccaaggcgttcgcaccgctttggtagcgcttatgccccaaagcgaagtgtacccgtcctcctagcgcttcagcggctgaagcgtgcgcttactgccgccttttggaaccctggcctcttcgcatttgcaggga

SEQ ID NO: 379605 - DNA, 219 bp, Zea mays
ggacgcttggcgcagttgcggatctcttccccacccctcggatttataaatcgcgcccttccttacccattaaacctggtgaggtcacgcaaatcgaggtgatgagaggccgccattgatgagttcgtggagatgtgaaggaaccactggcgccaatggatttggggcgtgtgcttcgtctcggtatcctggatgcagacggatggtgctggccattgt

SEQ ID NO: 379606 - DNA, 221 bp, Zea mays
caaccatttggtcatacatttccacggacaccgggtaattctcaaactagaggttttgttgaatcttggtttaaacagtttgattggttagagtacagtgtacagaaagatgcagcttattgcttttattgctttttatttaaacctccaagaaccaacaattgtaatgatcttggatgaggttagaaatgatgatggatttagagattgtaatgatcttg

SEQ ID NO: 379607 - DNA, 237 bp, Zea mays
aggcattggagaagatgatgaattccaaatcagcatcttccattgcgaatctggtggctttgatcatttttgtcatcttttgcttcttcgtactttggcaagggagggcgtattgtggcggctacgagggaccgatgttcctgtgtggcgatgacaacgacactgtggagccaaggcaatgtcagcaagctgatttttcagattggaatctatggttctttttaaaggtcggatatg

SEQ ID NO: 379608 - DNA, 240 bp, Zea mays
atcaagggagacaagttaatcattctccatgagagatatatcaattgagaggctgaaggaacatggtataacaactaagaaatcctctcaaaatctgaagaaaattggggcttgccacacgagcatcagtcaatgggagggcaggttgcagttcgttccactaccgggtacccaaacggccacaaggtaaaggagccccgccgggcagcaccacacaggtgataggcactgcagtggcca

SEQ ID NO: 379609 - DNA, 236 bp, Zea mays
tgaagctgtatgtgctctagagaatgctaatctcaggggactgttcatgctatccctgattctaggttcaaaaataactgatgcagctgttgcatctattgttcggtcatgtgcaagcttggagttacttgatttaagtggatctagcattagtgacaatggtgttgggatgatatgtaaagcataccctcgtactttatcaaggctgctccttgctctttgcccaaatgtgacca

SEQ ID NO: 379610 - DNA, 222 bp, Zea mays
gaaacacaaactgatgaaaaattctgagatatgcattctgcattaggtccttcaacacacatctttgtgttctgtgctcaggtagttgctgctggagacttgtgtgcgatatgccaagaaaagatgcatgttcccatccttttgcgctgcaaacatatcttctgtgaagattgtgtatccgaatggttcgagagggagcgaacgtgcccgctgtgtagggca

SEQ ID NO: 379611 - DNA, 110 bp, Zea mays
gacgcacgcgctcgtggggtagcagtaacaccagcaccggcggagacctgcgacctgagccatgacgatgaggggccttctccggtgcgtgtcgacggaggcgtgcaggg

SEQ ID NO: 379612 - DNA, 218 bp, Zea mays
gtaaatttaaacatatggaaatttgattcaaatgacttattatgtggggtttttttatgattctgagtatccaatgatattctcttttttcatctagctatcagatattatatctcaacctttgacggtgaagttttcctgcagcattgctcatagcatacctattcatccggtgtgctgcattgaacacctgatctttatagtgtttggccttatgc

SEQ ID NO: 379613 - DNA, 216 bp, Zea mays
  unsure (1)..(216): unsure at all n locations
ggacgctggntgctagcaagttccaataaactttgctgggacactgaccgtaagtatgagcttaacatctgcttgtcttcctctaggagtagcagcaaaggtgttggacaacacagctacaaggaggagacgatgggccctctgcagaagtcgatgatcacctccaagacttacctgacctacagcgatgtgaatattgacaaggcaggtagtgtg

SEQ ID NO: 379614 - DNA, 240 bp, Zea mays
agatttggccgcttcctcctctgcctcccgctaaccctagtccagccccccgagatctgctccgcgcgagcagccatggcggagacgctcgacatgaccctcgatgacatcatcaagaacaacaagaagagtaacccctcctccggcggggcccgccgcagccgcggcggatccgcccctggcgacggcagcggcggggtcgggccgaccaggcgttccttcaagagggctgggaacagg

SEQ ID NO: 379615 - DNA, 234 bp, Zea mays
attcaatttctcagtatcacagttgcagaagatgctcatatctatgtagtatgcctttccattttctgtactgtccttgcactgttgacaatgttcatgtgattttttttatctggataaacataggacggcacttatttcttaatgtggattgttacggttttagtttttccctaataaataataaattaattattgttatcgttttcattttgacataggcactaaggagaa

SEQ ID NO: 379616 - DNA, 126 bp, Zea mays
cccacgcgtccgcccaatccgatcaatataatcagagtcagtgtgactgtgagcagagcaagcagtatagggcgagcttcagccatggaaaagagaagcaatggtagtgccagcctcgtcctcggc

SEQ ID NO: 379617 - DNA, 112 bp, Zea mays
cctagatccttccgagtacctttccacgccggacgcactcctctggcccaccggacctttatctctctctctcgatcttcgctgctctgctggtatggtaggtaaactgatt

SEQ ID NO: 379618 - DNA, 217 bp, Zea mays
ggacgacacccgcctcttcgccgacaccgtcatcaggctcaacctccagaagctcaagtccgtcgccgaggccaacgccgccgaggccgccgcaaccaccaattccgtccttctgccgcggccggcggagtagcggcggctgccatcggcaagggaagaaagcaacagcaagttttgtgcgtttctgttatttcaattctctgggaaagggtttctc

SEQ ID NO: 379619 - DNA, 265 bp, Zea mays
gtgctgagacagtgcagttgcatgttgttcaagagttatgggatatgttgtctgttgatcagccagagtctaagggggagtttgaggattctgttgaccagttaatgctcttattatccaaggaatctatgtcggctaatacactatctaaggcattcagaatttgtggacaactgcaaggcatggagatgttgatgctgcttgattcagggagttcccatagttttttgaattcagtccgcaccaccgacttatcaggttttgt

SEQ ID NO: 379620 - DNA, 223 bp, Zea mays
agcacggtccgggacctggtcgaccacgcgtcgcccacgcgtccgcctgtttcaatctcatatgagatgtgtcacatatgtgcggctggatggctctgttgatccagagaagagatttgaaatcgttaaagcattcaattcagacccaaccattgatgtacttctgctaacaacccatgtcggtgggcttggcttgaacttgacatctgccgacacattggtg

SEQ ID NO: 379621 - DNA, 188 bp, Zea mays
ttccaacgacgcggcctgtgagatacccgaagccgaagtccggttcttaggctatttggcaagagggttgtggttagtaatttagaccagcagccaagctccaatactgggagcctacaacacgcggcggacatggaactggatgatgcttcagccgagacaccaaccagtggagctgggaagctgtc

SEQ ID NO: 379622 - DNA, 231 bp, Zea mays
atcgcgctgatcggggccgccgcctagcggtgccgtgcgggttagggcgcgaggctggcgctactgcgagctcgcggctgccgcaaggtcggtggctgggtccaggcgcctcccgtccggtggccgcagccctaatcgctgcctaggtgctggaaaggtgaggagtatgtcctcgatacgatttggatttgttagaagccagctcctctgttctggtcacagttcaagcag

SEQ ID NO: 379623 - DNA, 221 bp, Zea mays
atttatcataatttaatccactacaatttaaaactgaattttcttatgtaaatgaagtgtttactaaaaccttgtcttctactaaataaagagatatgacatagaaaaaacgtcatgtctctttttaatgttgtcactatgtaatgcctattatttatacataatatatactccctccattctagaatagtattcgatttagctcttgatttttatgttta

SEQ ID NO: 379624 - DNA, 215 bp, Zea mays
tttagcactaaaaggtgtgctctgatgctatttgcatcaattaaaccatctttaagaatatgtcattggttacttcatataattttgtcttgtaatttgtttgaacttgtaatgcctggagaagtctgcagtaaaaaattgttaggatgcagtcgtactgccaggttcattaattaggtgaatttttggtatttgtagttttcaaaatgatgaat

SEQ ID NO: 379625 - DNA, 214 bp, Zea mays
ccacgcgtccgcgctgatttggcctcgtttataatcgtgcaggctgccttggaggtgccaaggttacttgggctccttgccatgattcttcataatgaaatctttacatctggtggagatcagaatttgattaataggtaatgcccactggtgcataatgtcaaaacatgtaccacatcattattgccatgggcatttcttttcgtctcccaaa

SEQ ID NO: 379626 - DNA, 119 bp, Zea mays
cggagcctgtgcgtaaggaaaagtgtgggcgctgctctggcttttctccccgctcgtctcgcgcatccgcagtcggcacaccctgccatttctattcgcagcaccaggcgccgcttctc

SEQ ID NO: 379627 - DNA, 208 bp, Zea mays
cccacgcgtccgcctggcgtctccttctctggttacagctgtggaacacagctgcccttgtccctccctggctctagctctccaagccgatgctgctcgctacccctctccaagctgacgccccaaccatggcactctctgctcctccaagccggcgacccctcctctctggttcagcgcaggggactccctccatggctggcgcccc

SEQ ID NO: 379628 - DNA, 236 bp, Zea mays
gcggcagctgcgccgagcatgggggagccggtgcccaagaagaagcgcgggcgaccaaggaagtagtggcccgacgggtccatggcgcgggcagtggtgccagtgtcggcggcgacggggacgccgacgacagggcagggttcttctgggccgttctcaccggctgggtcaaatctgacgaactctctgttggtagcctcgccggacgggttcaagaagcggggccggcctaatgg

SEQ ID NO: 379629 - DNA, 229 bp, Zea mays
caacaatccaagggatcttgtagttttttcttccaggcctggtgtcagtccacatgtgggtctggaggaaagatcagtgaggagctacggccatctggatggaagcacgatacagcctgagcctctgctggtgatggcgaagtgccagagatccttggccagtgtaccattttactcggctaagaacagcacggttggcgtgtttccagattatcaacaaccttcaatg

SEQ ID NO: 379630 - DNA, 264 bp, Zea mays
cccacacgtccgcccacgcgtccgccagttataagctcgcaaataagttttggcccttgtatggattatgattctattttgctccacatcattctacaggtttcagatacttagggagctgttgccacacaatgatcaaaagagagacaaagcaacatttctcttggaggtcattccataaaaacgttttttgcaagagaaagcgcaaaaatacgaggcaacattcccagaatggaaccaagaaaatccaaagatgcttccatg

SEQ ID NO: 379631 - DNA, 183 bp, Zea mays
ctggtggctaggggtgattactaatgttcttccagaattcaagtacacatttaagtcgacgcatttagggacggaagttgaggtgaaccagaaatttctgaggcttcgatatgactgggttggtgatcaatgggaacaagaatcaaagaatgtgcccaaggcaaaatttacacaaggtgtcaa

SEQ ID NO: 379632 - DNA, 242 bp, Zea mays
aaacttttcgtcactaggagtagtatccttgaacaaaaagagacgccaccagagcattcgattcctggggcgacatttacgcctctattcggcatgagaatttggcctgatttctatttgccatgagggcataagctcggctaatccctccccaactaactctgatgcttcgagtgacccccaactaactgtggacaggacaggtgcgcgggtggtgatgagtgtcgcgagtgcgagaatac

SEQ ID NO: 379633 - DNA, 248 bp, Zea mays
ggcagattgaaaactgaatttcagtgcttttggttcaactttgggacttctttgtgcctaattcatgtggttttggaccgaggttgttgtagcaagtttgaagaccatataatagtgaacacattttctcaagcaagttttgtttggtgctacaccaaatttggagtaaactgttctcaaactctctctgtcaggcgaatggtgtgttaaacacagtttcagtaacagaagaagttcagattttagtg

SEQ ID NO: 379634 - DNA, 249 bp, Zea mays
cgacgctggagcagcttgacctctcactggtgtcgtcgtcgcctctcgccggccggtcgcgtctcgcggtgccaggcgagcggccctgttgccattggctgggtaccgttgacatggccgcccccgctggctcgcatcgccgtggctggcacacgtgacgacatgggcggccggcggtggtggctaggccctagccgctgctgcatgcggtaggcttcggcttcaatggattcggctccccttgggccc

SEQ ID NO: 379635 - DNA, 237 bp, Zea mays
cccacgcgtccgcccacgcgtccgcggacggtgggtcgactagttctagatcgcgagctagaactagtacagcatcgaagagggcttgtggagcccatgcatggattacgagctagacaccatgtcgagaccaaactttggcagctcaatcaatctgagcgagtggttcgctgaagcagacttcgactgcaacatcggatgcctgttcgatgggtgttctgcggctgacgaaggaag

SEQ ID NO: 379636 - DNA, 232 bp, Zea mays
ggaagaagattgcttcaagaagctttggcgcaagagtaagcaccatcgttaaatccatcggttcagggtccagttgatcgaatgccacttttgtcagactttctgtaatcaaacatatgtgttctctctctgtttgacaaaattactccctaccgtgtactgcttgtctggcgaacgagatgctattggtactgattgctgaataaaccactatttttctttgttcagcaat

SEQ ID NO: 379637 - DNA, 236 bp, Zea mays
cccacgcgtccggtcttctcctctgagagttaaggatcacatgtatggtagcccaatattaaatatcaaatggcaccagacacttaattgtactgaacctaaactgatcactgctgataagcacatagtgagaatctgggatcctaatacaggaaataacatgactagcattgaaccagatggtggtgctatcaatgatgtctgtgtcttccggaatagtggtttagtgctattag

SEQ ID NO: 379638 - DNA, 260 bp, Zea mays
  unsure (1)..(260): unsure at all n locations
gcagacactgctctctctctcgccgtcggcgttggagtcgtgcggagatcgtcggctatcgatcgccagcggtcccagtggcatgattcacaagacgtgtcgagatgtcttacaataacgcgtcccacctggtctcctgagacgtgatcgacgggcgcatcgggtctaagacgtgggtgatcatgaagggggagaaggacgtcgttgggatggtgtgcgcgtttgatgtgtacgctaatatggtgntggaggacgtgagg

SEQ ID NO: 379639 - DNA, 256 bp, Zea mays
cccgacgcggtcggcgaggatgcaaaggccaaggagaaggaggcgttcgacgtgaagctggagggtttcgacgctgccgcgaactcaagatcatcaaggagctaaggacgttcacgaatctgggcaaagaatgtccatgtctgtttggtagagctccccttgccccctgataatgtgtctgaaagtgattatgtaggaataaaatctttggaggaagtgaatcaggcgaagaaattttttaagctcctaatattta

SEQ ID NO: 379640 - DNA, 102 bp, Zea mays
ctgatcctgtgctggacgcgtgggctggggaccatggacggcatcatcgacacggtttcggcgtggcgtacgatcacgccgatgcggtcgctgctgaatccg

SEQ ID NO: 379641 - DNA, 103 bp, Zea mays
gctgacatggactggtacttgaaggcgtaccttcccgatgacgccgaccggtgccacccggcgtgcaacccgttcgtgcgcaacggactgcgcctcgctgtgc

SEQ ID NO: 379642 - DNA, 205 bp, Zea mays
atctgttgctccgtgtcaccaaggcccatgttcctcgtactaggcaattcctcgggcatcatacgatgcatgcgctacctcttcgtcattcgccagcggcgcatcctcccccttcgtccctcccaactgaattcccaacggtatctacggcaatccaatcctaccgatgctcgagacattctctaacggcactccgtcagagaaa

SEQ ID NO: 379643 - DNA, 227 bp, Zea mays
aagagatatagatgattggaatgcggtggtagctctgaccaaatcgatctgctggaggacagtggtataaacctctcgatagttgcctctttcctgcagttccgagttcaggtgaaggggatagttgggccgtctcgtggcctgagagacttaatattaagcagtcggctacatctagcaattcttccattcagtttcctcaagaaaaaattgattctgatacaagt

SEQ ID NO: 379644 - DNA, 217 bp, Zea mays
ggtgcctcctttctccgtcgattccctgtcgttaccatcggccgccatcgctggttatggctttgcctcctgccagctgcttctactttgcgcttgtggttctcttgttatgtatggcggatgttctaatcagtaacctgatgattggaaattgcagtgatcggttgtgtgtacgtgtctcccgtctgttaaaattgtatgatcccgaggatgagta

SEQ ID NO: 379645 - DNA, 230 bp, Zea mays
gcgcgcacgcgtccgcccacgcgtccggcttgagttatctgctgtacgcataagtgggctcctaaactgggaaatagtgggccatccttattcagcattccggtttatatcttgttcagattcgtctaacagtccagcagtgccgggttctgtggatcacagggcccaaagtgtcctacgggatttacactttcatgtgcaagaatagggtctgattgtgacctgaccca

SEQ ID NO: 379646 - DNA, 218 bp, Zea mays
atacaacacatggccatacatatggtattgttgcgcaattttttttctgttgcaacgcagggtattcaaccaggcacctcagattgggacaaggacgatgacgaggagatgatttggtgctaccaggttcaggccccatgtcctagaaatggaccttcctccttttcctaggcagcttgtgcatcgggctactcttcaccaacagtttactttataca

SEQ ID NO: 379647 - DNA, 159 bp, Zea mays
agaaaatgcatcgcatatccaggctttctgctttcctcaaatcatcctcagctcactatttgtcttcctgttgacctttaatatttagagcatatatgttaacaagaaatgtttagagcaatagagcatataataccaaacctatagctttgggtgttc

SEQ ID NO: 379648 - DNA, 259 bp, Zea mays
  unsure (1)..(259): unsure at all n locations
cggacgcgtggncgagacgcgtgggtcctgactccaactctccctctctccttcgcctggcacatcctcagcggcgcggcagactgcttcttcaccggcgcggcggcctgcttcttcgacgacgtggaggcctgcggcggacgcgacgcggcagcctaccaagcgaatggatccgcagacgaacggatcttcggcgcctggcagatcttcggacgcgacgcggaggcctaccaggcgaacggatctgcggatgaacgga

SEQ ID NO: 379649 - DNA, 229 bp, Zea mays
gttaacggcgtctccgtcgacggggatctcctcctgattctgccccgtggctgggacgtcgagatgtgcggcggcgccatcctcgactccggcacgatcctcacggtcctcttgagctcggcgtaccgcgccgtggtggctgcgctgagcaggtagctagccgggctgcccctggtggtcatggacccgttcgactactgctacaactggacgtcgccgtctacgggct

SEQ ID NO: 379650 - DNA, 247 bp, Zea mays
ctcatgaagaaccaagaagatgctcccgggagctgttccgcttgtgggtcagacaaccgggaagtgccgatgctggtgtgcggcggcgacgggaggagccagtcttccggctgtggggtccggacgcatgccgattgctgcaaccctcccgtggaaggctgcgatggtggcgagtggctgtgcggtaggtgcgaccagcagaaatctgctaagaaggctaagaagaccgctgcgaaaccgagggtgc

SEQ ID NO: 379651 - DNA, 243 bp, Zea mays
tctagttctaagatcgcgagcagccgctcgcgatctagaactagtgacgcacgcgtccgagtcggagctatagtcgatcaaggtccctgtcgagatctcctaggggaggtcgtagtgaccgtgacgataggagatcaaggagtcctagctatagcaggagccccatgcgatgtgcctcgccaccagtaaaggaaaaggagcgcaccccgcacctgatggaagcaggagcccaaggagtcgcag

SEQ ID NO: 379652 - DNA, 229 bp, Zea mays
ctagattacttgtatggaagttattttattgtctttgagggaacgaccattttatatatttggttcttatatcaattcacctgagatattaggagctgtaatatgctgaacatttggttcctagacttttacagtttctgctaatggagaggcagttgtgctgctgtagtttcatgtagtgttccacccattagctatttcttaggagacaggccaatcacatggtttc

SEQ ID NO: 379653 - DNA, 227 bp, Zea mays
gcgcacctccgcgctcgcgcgcggaaggaggggggacgagcgagccaccgtcaccgagcgcgggtacaagaaaatccaagctctcggccacgctcgtttcgactcgcgccatggaggcgcaggcgcgagacaacagggcggaggatggggacggcgcgcggcaacacgtagccggcggcgtcgcggcgacggggatggctatgggcgcgatccccatgcacggggtc

SEQ ID NO: 379654 - DNA, 149 bp, Zea mays
caaaagccacatatcaaggtccagatacgtggatagctgattttggtttgctcctattcaaggctaacaacattcatgatcataatgttgaattattgaattttgatctatgtggctagcaccagatgcctagcatgattgtgtttctt

SEQ ID NO: 379655 - DNA, 220 bp, Zea mays
  unsure (1)..(220): unsure at all n locations
cggacggtgggcggacacagacccaaactagaataggtgtctgttcttgtctgcggttctctgttcgagtccacaggctccaagcaagcaaagaaccgaaccaccgggagcaagaaatttgcccagagtaagcaagtcccaggactcaaccaagaagagccctttgcatgcagatggggggtanggagggtattgcagttggccgcgaatccggccacgg

SEQ ID NO: 379656 - DNA, 126 bp, Zea mays
tctacaccgtgtgccggcaggagggtccgatctccagtggcgtggtgggggcaccgaacgatgggcgccatcgtcctgtccgagttcgtcgggtgcgcgacgtccctgggcggcgcggttcacatc

SEQ ID NO: 379657 - DNA, 258 bp, Zea mays
cacttctaatcgccagcagaaccgcactagccgtggcagctttgtgccggacgagtgtgagcgtgagccccagacttatttctcgttcactgagctgcttgaggctgacgacgcacagcttgatgacaacgcgtttggtatagctactggtctgcaaggtgatgctaacggctccggaagctttgtccaacgaggagttggttttggtggtacgtctttcatggcagaagatggagcttcgaatatgaacgtgccaac

SEQ ID NO: 379658 - DNA, 210 bp, Zea mays
atggccgatcgagctcgtcgacgtgtcggtctcggaggggaaagcgcgggtgctcggcgccttcagctacgactgcaagatgaacgacacgtaccacgcggtgaggcggcaggagatcgacttgggctactggatgccgttctccatgtcggacgccgatgatgtgctcatgggcatcgggagcaacgtcgtcgccaagcagacatccgg

SEQ ID NO: 379659 - DNA, 250 bp, Zea mays
cgcacgcgtccgcccacgcgtccgtgtagatacacctagaacaaggccttgcagatgctcaagatattcaaggagcatgtcagcaagacgtccatcctggatgacttcgccttctatgagagtcgccagaagctgatgcaggataagaggtcgaaacagcagcaggtccaaaagcaggtgcatttgtaattctggatacaatgcatatttcatcaccttgctcgtctaatgccctgcgtgttggctattg

SEQ ID NO: 379660 - DNA, 239 bp, Zea mays
gctggggtttcttttgtaatatgtgcatggtggtacatatttctctactcctacggtcctacccaagtcattttgaagtttgctagtaccacgaccaaggcagtgatggagcaattgggaaatatgttaaaactgtgatgcagtcaaacacatttgaccaggaagtcgatgtcaatcacctgtctctcatttaattataacttgcttatgacttagaatgaagtgatttgttttcttat

SEQ ID NO: 379661 - DNA, 100 bp, Zea mays
gttgaggaagccaactggacaatgcatttgtcatctccgtcatgggttatgtgcatccatggtcaatctggtgtaaacagcaaatcctatccgttttcgg

SEQ ID NO: 379662 - DNA, 107 bp, Zea mays
cgcacgcgtccgacgaaacgccgctgcctcggctcatcccttccctcctcgctgcatcctacctccctggtgaccgtcacgttcaccacgttcgcccgctcattcag

SEQ ID NO: 379663 - DNA, 237 bp, Zea mays
ccatttcaagccccacaagctctagaagcttaaagccatccatgtctggcatgtgcacatcgctgatacaagatcaaacaagttcttgttttgactcaacatggtcaagatcacaacagtctgattcatcgttgtgactgcaaatacgaaacaatgtgtcttacaggagagcagcggagttgatgcgtacccaaggtagcggaggaggatcagccatcagggtgagcctcgtgagta

SEQ ID NO: 379664 - DNA, 179 bp, Zea mays
agttgaacattgtaaatatcagtcaattcccattctgtttgcacaaacagaatgggaattgactgatatttacaatgttcaacaaatatttgcagttttgcagcctagcctggtgctagcgcaagaatgaacaacaaataactgctgaacattgtaaatatcagtcaatgccctttcct

SEQ ID NO: 379665 - DNA, 215 bp, Zea mays
ccgatgcttggcgttgaagaagggcgcggcgtaaaacggccctttttcacctcgcccgacgagctcctcgaggagagagtactacgacgagcagctgccggagaagaagcgccgcctcacgccagagcaggtatagctagctagtcgactcctcttgccacctagctaggcaacacgtagatgcatggcgtggcctgacctgagcgagcctgacg

SEQ ID NO: 379666 - DNA, 250 bp, Zea mays
catgggcgtgtttctacacttggttttgaaacaagtattacattaagcagtaacctaactaataatcaatccagacagaacagagcaggctgacatgattattagttaggttactgcttaatgtaaaacttggttcatgggcgtgtttctacacttggttttgatgttagtactatccttgacatgagactactaccagggttgcatctgcgatctctattttctttacattggccgtgtatggcttcgt

SEQ ID NO: 379667 - DNA, 249 bp, Zea mays
gcgagctccacgaagccagatatcttgagttacgttcagctgacacaatgttcaatagcacgaacacaaggactgcatttacaattgggaagctggccaatttgctccgggacaatgacgagttttacgagttggtgttttgtaaattcttgtctgacacctcctactctgttgctgtacgagctgccactgctaggttgctcttgagctgtcaccctgcctggacgcctccgtatcctcatgtctttg

SEQ ID NO: 379668 - DNA, 186 bp, Zea mays
cactgctaaactaagttaatccttagcaagcacaagagtaacttagtttagcagtgttacagcaacccacatacccagctacactaagttactcttgtgcttgctacggattaagttatgtatttgtcgctataaaaggtgcatcctttgaatgactggttcatcaatcatagtgtcccaatttgc

SEQ ID NO: 379669 - DNA, 198 bp, Zea mays
cccacgcgtccgcccacgcgtccggaagccccgccagctgcgcgtgggtggagatgcgcgtggaacggaacctgcgccctggtgtgctcctcctcgctgttcgctactactagatcggcggagacctctgttccagctctgttcagcgaagaggtcgtcatggtgggcaccatctggtccccgcgttctagatcgcga

SEQ ID NO: 379670 - DNA, 195 bp, Zea mays
cctcagggccacggaggagagggtgtcagacctgaggacttcaccgtagatgctcaccagctcgtcgacctcgccgggcgtcatgatcatctacggggcagccagcacggccacggaggagagggtgtcagacctgacgatgaaatccgagaagaactaaccaaaagggcgaggacgacgacgataacgcctggc

SEQ ID NO: 379671 - DNA, 273 bp, Zea mays
cccacgcgtccggatgatagaactatgcgagcattgattgcatcattcacaactgcagatgaagttcagttcccaaaggattcaggtttgacaaagtcatctacctactaatgatttaattacttcattatagccaggtaacatcagtctgcttaaacgattttttgctacctcatatttagttggtaaagaatcctataggcgcactagcagtttcagtgaatttttaactattttctccacatgtttgtgctatggacttcattactctta

SEQ ID NO: 379672 - DNA, 125 bp, Zea mays
caaaggcagagtttggacgaaacacggcagctgcttgatcaaagaaaggagttgattacaaagtacagaggctctgtcgaagagctccttaagggagatcaaagataaagaaagcatcataaggc

SEQ ID NO: 379673 - DNA, 152 bp, Zea mays
cacatctccaactaggatcagccaagataagtggacatgttcctggtaggaaagttggctcagctcattaacattatctttttaccccctatatgagtaggccatggtgtttatagcaagctttgagaacttccaatgtatgagcaagttgt

SEQ ID NO: 379674 - DNA, 183 bp, Zea mays
cccacgcgtccgcgccgctctgcgcgtgcctcacctcgacacgagccttccctcgtgacacggatatggagaagggtatgaagtcaggctcgggcaggggctacaacaagggtgacagatgccaaaatgggtggaagtctcatgtctacacggctgctatcaagaatgtccgagaaaagtgca

SEQ ID NO: 379675 - DNA, 165 bp, Zea mays
atctgttgctgatctcgctgatcaagttgcagatgtgcttcatttcttcaggtggagggaagaagttttgttgaagtcccctcttagtgtggtggagattggcaaatgacctaaaaagatgctggagcaaacgagccttcacaggaaccatcacaagaaccatcg

SEQ ID NO: 379676 - DNA, 227 bp, Zea mays
agacgggctggtaggcgctgaatttaatgatctggacaaagcagtttggaagttgaatatcattatatacctccgttctattcatgaatggcctttcatcatcatctgaacatgtgccggccttctcggatccaagaaacagatgtagcatttgctttcctgaacggttgcactgataattttcactgtaggttcctatgatcttggtgtgaaccattgaatcctgt

SEQ ID NO: 379677 - DNA, 187 bp, Zea mays
gagtcgccgcgctccttccccttcccaacgcgctctgtgcatatcaaatgcggatattgcgagtaccggcgaagtgcttgcttcactctcggtcatgttttccacggagtatcgacggcagatactggcatgccctttgtagaacaactggtggcccatgttagcagcgctcatgtacgtccttgga

SEQ ID NO: 379678 - DNA, 231 bp, Zea mays
gatagagagagatagagagagagagatatagatgagttagatgagatgccacgccactccggcactctcgctggccagtggcaggctcgcgcgcagtttatgtgaagtggaggctggaggcgcgcaggacgtgcccatcctcatagccatgccacgccgtgggcttattggtctggtactctggtgcgcgtgcagttgtcgtccatccacgctctgctctgccgatcttcc

SEQ ID NO: 379679 - DNA, 214 bp, Zea mays
cggactctgggtctgctgactccctagaagatcttgcaggtcgattctgtgctcctgcgactcctgtgtcattgcagactgggtgagtgcggctaagcagaacgggtatatggttgggtgtggcttggaccccgaatggtcagtgcaagatgcaacttgagataaagcctgttgccaaatcatgatctttgcctcgggggaaaattccgtctag

SEQ ID NO: 379680 - DNA, 223 bp, Zea mays
ggccagcgtccagcacggtcgcgacgctggttcgacttggtgagaataaagccaggctcaaagcagctgatgtcggaattctaggaccatccaaggccagcgtttacgcctaggcgccatacatacgtgttaccaagtgtatccatcacaccgacctaccgcaccccctcctttaccccctccaaatccagttgtgtttggttgtatgtatggttgtggttgt

SEQ ID NO: 379681 - DNA, 224 bp, Zea mays
cccacgcgtccgcacacgcgtccgctgagcattgttattgaagcgtcgcttaaacggtaaaacacgattaatgattagaacgtccgcacgttttatgaaaaatggttagagcgtccgttttggacgttgtacagacgttctatggcgttttggacgttttacggcgttttggacgttttctggacgttctagatggtaatgggccttcctgggcctttagctgt

SEQ ID NO: 379682 - DNA, 224 bp, Zea mays
cccacacgtccgcccacgcgtccgcaaagatgtcttgttagagaagatccaatcagagctgaagaatcttgagagcagcaaagatagcattatgaatgaagttgatggattcctctcatggaagttagttgcttcctcgcaactaaaccagctggtcctggataatgctctactcagatcggaatttgaaatatttcggcaaaaacagactgacatggagaaca

SEQ ID NO: 379683 - DNA, 274 bp, Zea mays
cacattcttggcgtgcaggtccacggcggcgctacttgtgcaaacctatccatccaggcgtctgctctgttcgtgcacgggagttccatggtgcaacaaacggctggctgcagccgagccacaggaacaggaagagttcggtggtcaacatcctgtcgttgattagcgcagtgagtccatggatctgctcccgaaatgcacgacgaacgccagatacagactaggatgagtggatgacggcaaccagggccgccgaatttgtcacttgattttt

SEQ ID NO: 379684 - DNA, 270 bp, Zea mays
cccacgcgtccgggaacaccatcagtcagggacgtcaacatgaacacccagcagaggtgcatcctccaacaaacaaaggcttctgcaacgatgggctgcttggccgatgcagaatggactactttggctttcggagcctttttacatcacaacaacagtttttctgtgcagacagtgactgaagggacttcaccgaagtataacccacaactctgaagtgactgaatgatacataagtgacggcccttcccgtatcgggcgtttaaggtg

SEQ ID NO: 379685 - DNA, 260 bp, Zea mays
cccacgcgtccggctggaacgacgatgataccgccggctagcatggttcagccaaccgatgggaagatggtatggttcctggacgaggcggctgcttcgtctcttgaggcttcgaatggcgcttgcgagcatcaagaagggtactgagaacagactggatgctacctctgcgaacgccgcctacagtactctctggtttcttcagagtcgaaagtttgcatgcagttggatgtgggcaattaagagtgaagcggtttgtg

SEQ ID NO: 379686 - DNA, 119 bp, Zea mays
actggagcgtctagaacacaagagaaacatcgaacattttgatgcttggggttctctgatgctaacaacaaaatcctcatcttttcgtatcaatcaagaagtcctagctttggcagtcg

SEQ ID NO: 379687 - DNA, 122 bp, Zea mays
cacgatacgaacagacctctaaaacctagcagaggcccgcgccgccgccgccaaccgcgacgaggaaggaagcaggaacgcgatgccgaagtcgaagcgcaaccgcccagtgaccttatcga

SEQ ID NO: 379688 - DNA, 130 bp, Zea mays
gctccccggagacggccgggaacactgacgacctgtgctacggcgtggcgcacgacgacgacgtggacatggtggcgggcgacgcggacctcgccgcgctcgcggacatcgagtccttcttccggtcgcc

SEQ ID NO: 379689 - DNA, 246 bp, Zea mays
gcaatgcgccttcactgtcggagtccgtcgtccggtgccagctaggtttcacctccatacaggggaaactgctgctgggaaagatgagatagatagttgcggtcgcggatcgttggttggttgttgtatggtgtagaacattccttctatttgttattgacggtttgaccctagtatgtggtggtacactgcgaagttgctaaactagatgcctgagctttatttaggtggtgcattgaccttgta

SEQ ID NO: 379690 - DNA, 242 bp, Zea mays
gtccctccctcggcctatccggctactcagcaccaagaacagacggccaagtgcactcgcgcctttatataaaggaatccaccagcagcattagctttggtttcttctccttgtatgcacacaaacccatcgcagggcattctcgagcatagcttctctgcctctctctcccctcctctcctttcctctcgtccactcctttgtccaaagcttcgagatggctcagcagcagaaggtggtgg

SEQ ID NO: 379691 - DNA, 231 bp, Zea mays
cccacgcgtccgcaacattccatcatcatataatctcgaatattttcataaactggttgtgtaaaacggggggatctttctccatgaatctcaatggatctgttgtgcactgcatagctgcggagaagaaaaaggtatcaaatatcaagcagctttacggcagcgaaggatcattcactatgagtggatattaaactgttgcaaggaaaacatcttcattttcatcctagg

SEQ ID NO: 379692 - DNA, 227 bp, Zea mays
cccacgcgtccgcccacgcgtccggcctacgccatggcgatcgcgccctacagcaacacgcagggcacgtgcgacaagacgaccgccgcggccgtcctctagtacgccccgacgacgagcaggaacaagaccctgcctcccctaccggccctgccgctggacaacgagaccggcgcggtgtccaacttctcgcgcaatttccgcagcctgatgagcgcgcgggaccc

SEQ ID NO: 379693 - DNA, 162 bp, Zea mays
gaccgccgctgtcgcatccgggcttgccgctcagcgcgtcttgctcctcggatgcatccgcggagtcggtccgcgcccggcgggctttcaccgggaaagtagagaagggccggtcggtgccgacggctcaaccgaagcaaggcaaggctgtgggtaaagcgg

SEQ ID NO: 379694 - DNA, 165 bp, Zea mays
ggatcttggaccccttcatcattttcttggcatagcagtggaacgccgaccatgctggcctctttctacagcaacacacttatgctatttatatcattaatcgtgcaggtatgactggttgtaaaccttgctctacgccagttgatcttcaggccaagctatctg

SEQ ID NO: 379695 - DNA, 167 bp, Zea mays
cccacgcgtccgcccacgcgtccgcgcgagaggcgctcgcgacgagccactccaccgcagcctggagcttctgtccctcggtggcggcgggaaaaggaagtagtggcaatgaaagcgagcatctgaaagcgggcggaagggaagaacgcttgtttgcgactctgtaa

SEQ ID NO: 379696 - DNA, 168 bp, Zea mays
cccacgcgtccgatgagactgatataacttttacggtcctgttaaatatagagtgtgctgcactgatgctcctcatggctgtggctacatggttgacacatgaaaaaaaaaaaaaaaaaaaaaaaaaaaaaaaaaaaaaaaaaaaagaagagaaaaaaaaaaaggaga

SEQ ID NO: 379697 - DNA, 267 bp, Zea mays
cagtacggtccgaattccagatacaccacgcgtccgagaccgtggtgaccatcgcgtccacccacgcgtccgcccacgcgtccgtggaaggtcaaggaggactcagagataggacagtgcaaacgaacggaaaagccgatcgagatatatgaatttgaaggttgtccattttgtcgaaaggttagagagatggtatcagtcttggacctagatgtactattttacccctgtcctcgaaaaggcccaacattccgacctaaagtcctt

SEQ ID NO: 379698 - DNA, 227 bp, Zea mays
cccacgcgtccgggaccgtggtcgaccacgcgtccggtcgacctcaatcaccgaagccgactgcccagcgcctactccatccatggtcacctgcagctcgctagactgtctctgctcccttgccgcgacacccttgctcggtcgcgcctgaccgggtcttcctgctgctcgccgagacccctcccatggatgctcccagccgaggcccttgtctcccatggccgccg

SEQ ID NO: 379699 - DNA, 168 bp, Zea mays
cggacgcgtggcgttatcgcttgtggtcaagaccattgtccttgctgcttcgattcattaaggctatcgccggacggttcgtggcggccagctagggcggcgtctgcgacggcaacacctgcaactgcgtctccagctgcgtctgctcctgctgcagctgcatcttag

SEQ ID NO: 379700 - DNA, 197 bp, Zea mays
gcgcgctgtggaggtacttgtggagggcattgggtttgggaggcaaccggtggtcacatcctccactttggtagagctaacggctagagtaggtttgttcaaggagcgaaggtcgcgactgatgggacagcttcatagccttgagttgggacgtgggtctgctccgcgagggtttccattcaagcgaccctctcctt

SEQ ID NO: 379701 - DNA, 204 bp, Zea mays
agcctccaactatgttcgtttgccaccagaaggcgcatactgccggggggggttctgcaccgcgcgttagatcccatatgtaacgcgcggtagctttaagattattatctccagcagcttattcatatattatacatatattcaaatttcactctgtgaatagtagtctagaatacagtagtgttttgagtaaactatggatag

SEQ ID NO: 379702 - DNA, 250 bp, Zea mays
gttgaagcaaatggtcacaatgagacacaagtgagagtttctgtcagtgagggactattgtcgtgctatttgcatcatcattgacagaaactctcacttgtgtctcattgtgatgcaaatagcacgacaatagtcatcaaagttgcagaaaaatcctgcaacattagcattcacagtgcaatcacaagggagacggctggcagttgcagagtcatacggatgccacttacaccaacatacacgctactgc

SEQ ID NO: 379703 - DNA, 229 bp, Zea mays
agttcatagtatttccaatgggtcacctgtttctaaggcagatgtttctgagcaatccataacaccacaaactccaacacatccttcagtagcagaagaaaagcttgatagctctactgaggcacctgcatctaaggtgggtgatgctgaagcatcagaaacatcacaatctgcaggacatccttcaacagtggaagaaaaccagcaccatcaagttagcaaacattct

SEQ ID NO: 379704 - DNA, 157 bp, Zea mays
tgaaggtaggtattctattaagatatttctttcttatcctatttcctcgcttctttgtgttgttggcgacacccctttttgcagaacctgtgtataactgcagcacatcgtcgcataagggaaattcttgaaagagagaagaggtcagctgatattc

SEQ ID NO: 379705 - DNA, 184 bp, Zea mays
caccggcattcggggcagggtgcaatgcctatctgaagaggacattgcaagtgctgagacagatcttgagaggcaggagatggtccgtgggaaatgctttctccggttccccacactgccattcatacccaaggaaccctatgatgtccttgcaacagactatgacaattatgcaattgtgtct

SEQ ID NO: 379706 - DNA, 142 bp, Zea mays
tccagggtccgtcacggtccgggacctgcggcgctgtaatacagtagctagcctaatgcctgtaatgaaccgtcatataatcctttaattagctgccaattttatttcttatagtttcaatgtggttatctcatgtatatct

SEQ ID NO: 379707 - DNA, 148 bp, Zea mays
atatcactggattttatttcaccgtcatgttggctggctggctgctaccgtgaaggtagcctggttgttgcagtcccttgtatattttctgctgcagagttgacctgataataatgttttattgtggcttgtgatggtggggtagcat

SEQ ID NO: 379708 - DNA, 178 bp, Zea mays
cggacgcgtgggttttacaataactctgtagcttatatgtgctcgcttaatgtgattccacatcatttactgatgacatattgacattgtatattatgcagctatgaatgtggagaaagacaagttattgcttgctgcccgtaaggtcaggcgtgccacaaggacttattttgtgata

SEQ ID NO: 379709 - DNA, 221 bp, Zea mays
agctcgccgccgcgcccaccacgaagctaccatcggcctccgtcggcttctgcctcgacgtcgcggcccagccacagcgcgggcccttctccgtccaccacgccagcctgtacgtcgacggcgtcatggtgtcggaacctgagctatacgacgacggccgctacgtcgtgcacggcctccacggtttcatcccgccgctctcccgcggctcctgcgccgag

SEQ ID NO: 379710 - DNA, 219 bp, Zea mays
gctagctagttagcctgccctgtacacggcacgccccaccaacagcttcacgacttcttctaagctgttctttaaacaccttgtttaaacaccttgtctaagctagttagccggctcttttgagttcgtcaccgaatgactgaaacgaaggggcagaaaaaaaaagatgtccttttcgtcctactagcatagtacaggcttccggaaggaattccttaa

SEQ ID NO: 379711 - DNA, 240 bp, Zea mays
cactattgttgtcaatattgtgcttgatgggcagaattatccagaatgggctttttgtgtccagactacattaagaggtcacgggttactatttcatttgactgaagattctccagttttagcagctgatagaagcaatgctgctgcaatcaagacttggcagatcaatgatggcaaggatagcggtgctcttctacatacccttatgcagcagactcatgtgattgagcaacatgatat

SEQ ID NO: 379712 - DNA, 239 bp, Zea mays
attccgggtcgccacgctacttcagcgtcgcgaccgcgagggcgtcgcgtgccatcctagggtttctttccccgtcggcgcatccccagagcttggccgccgccgccgctgacccaggttgtcttgatggcgcccgctgtagaagccgtgaaggagacaggcaccttccagaaggttcctgccttgaacgaaaggatactgtcatccatgtccaggaggtctgttgctgcacacccttg

SEQ ID NO: 379713 - DNA, 229 bp, Zea mays
cccacgcgtccgctcacgcgtccggctaagtgagtgtgtggcgtcccacctgcgtcacaagagtgtcacatcagaatatggctcacgtttggaatcctctggagggcggatattcctccaaagttctccaggaactgagctttacagggagagatttgttagagctcttgcacatgagttgcaagtgccgctattggttctggacagcagtgttcttgcaccatatgat

SEQ ID NO: 379714 - DNA, 222 bp, Zea mays
ggtggtccaggtgaagctggctccctcagcgttccttccaaggtgaatgcactgcctgttccagttgctgctgtagcttgtggtggcttcttcacaatggctcttacttcagatggacagttatggagttggggagcaaattcaaacttcgaactgggtagaggaagcaatttcagtgattggaggccacagcttgtccctagtctgaaaagcacccgtgta

SEQ ID NO: 379715 - DNA, 214 bp, Zea mays
gatgtttttccctcgaatggttgatctgctgcttgctgtttttgttctaaataaagtatggcatcacatttgttaatgcatctgcttactggcccttctgagtatcacaaacattttgacaaatatgtcatctttattaacatattggagctccttcaactcacatgaccaatatttctgcagatggttgtcagcatcattggccttcttttat

SEQ ID NO: 379716 - DNA, 215 bp, Zea mays
gactagttctcgcagggctcgggatccacggtgagcatcgcgagggcgaacgggtacgctaacaactggagctctcctttcaacaacggcatggggtgacgacgacggtacggtccaacgaacggagagggcagaagctagtggctagtgatagggggttagctagctagaagatcccaagtctaggttagagttatttggtcatcgttgtcgtg

SEQ ID NO: 379717 - DNA, 179 bp, Zea mays
ctgagaccaccctcacaagtgcctccactgtttattgtacctttcagaactttgctgatctccaacataagatgaacaacaatgagcaaaacaaattatctagtgaggttgaactgcctcgtcagaaagtgcccatgacaaaccatgttaatggaagtggaggtgaaatgcattctgct

SEQ ID NO: 379718 - DNA, 238 bp, Zea mays
ctagttcaacaaagtcagcgtaccctggcgcgatacattccctcttaccattgtatccatcatcacaccgaccaacaacaacaccgcagatatccccccccccctcctcttccaaaaccatttttgtgtatgttgttgcagttcccctcccctgtagcatctggtgcgctgatccgttgttgttgccagggcgtctgtccgactaggatggtggctgtgttgtaccgtcggctatcca

SEQ ID NO: 379719 - DNA, 226 bp, Zea mays
atccgaattcccaggcaggcaggtcggcgaggagggcaggaagaccgaagaccgagccgtgcgggggctcgggacgggaacgggacaggaccccaaaatctcagatccttcctgcccgcccgcccgtgcccgtcgacgcgtcgttcttgccggccgcgcctcacctccgccctctcctcctccagggggatcggatacgccacaggctgcgcgatggtgctgtggg

SEQ ID NO: 379720 - DNA, 216 bp, Zea mays
cccggacaccgccgcctactgcgcgcccgacaacctcgaccgaatgcacaaggtaacactggaggtgaaaggagagacacagctgaataacctggctgagaagctggcagcagctggtgtccggtacaagctgtggatagagcagcctgagaacatcccaacatgcatagctacagcaccctgcccaaagtcgcaggtttcttctttcttcaagaa

SEQ ID NO: 379721 - DNA, 216 bp, Zea mays
cggacgcgtggcggcaaggacccaacaagcccaagagggcacccaacgcttacttcgtgttcatggattgcgcttggacattccgggcagcgtgcacccaagattgaccaagctgattcgacggtgctaggacaaagatcctgatgcgtgtctgacttttgcagagattactatagaactccaagatagtctacaccatatcgaggcacccaaggg

SEQ ID NO: 379722 - DNA, 211 bp, Zea mays
caaaactttacgccagaagaggatttgttgctatgcacaacttggctagaaattagttgtgatccagtaattagcactggccagacgaaggaaggactttgggcaagaattgataaacggtataacgaaatgagaggtgagtatcctaagagacttatcagggctttaacaagtcgatgggacaaaattaaggctgattgtgggaagtatg

SEQ ID NO: 379723 - DNA, 218 bp, Zea mays
agacggttcccgacgttccatgtatcaaaaaacaatcttcgtgctcaaccgttgtgtttgatcagtcgacagtaattagtcatcactctgtaccgagattagtagcacaatttgttgtcctggtttgaattttggaagatatttgaccccgtctccttattatctactcgttactggttgagcacgaagattgttttgtgatactcctacatgattta

SEQ ID NO: 379724 - DNA, 216 bp, Zea mays
cggacgctgggccgccaggtagcagcagcagcagcagcaggagcgggggcagcacgcccgtcggcggcctgccgccacgccaccacctcacgtccatccgccactgcgccacatcgcccgcatcgccgctgcctccgccgaattcgtaagcaagctcgctgccgcccaagccatctatccctaacacgaatttgatgtctgcccttctgttctcct

SEQ ID NO: 379725 - DNA, 257 bp, Zea mays
cccacgcgtccgcggacggtggtcaggaaggaacctgggaagaagggaaagctggtaatcaagtttgatgtgaccttcccgatgaggttatcgccgtcacagcgggcagccatcaggcgaatcatgggcagctaactgggggaagagaaagagaaggggcattgcattcttttacatggagaaggaacagtctctacattggcactagaattcagatggatagttggaacttggaagtaacttgagtcaatcagata

SEQ ID NO: 379726 - DNA, 262 bp, Zea mays
cccacgcgtccgcccacgcgtccggcaacttaattagggtccacttcatggtgcgttactgttcttcaaccatgggtttgttcattaaaaaaaatactatacggttccactcaagataaacatatatgtggtcacattacgtacagtagttaactccgtcagtagagatggataacttcgtcgtgaatcaaacaagatgatggataacttcattgtgaatcaaacaagatagcctttatgagggagtgcaggttggaagttg

SEQ ID NO: 379727 - DNA, 233 bp, Zea mays
ggaatagcaaaacaccaacgtggcaagaatcaactccacaagcaacttcactgccacaaaaatcgcaacagaaagaaccagttgaaatggatgctaaaccagttgaaaatgcagaggaacaatttgtcgtaggtcctcccagtgccagtgggaagcagctgcatgttgaaattcctaaagatgatctacggcatatttctcctgtgaccggtgaaagtggaatcagtacggtg

SEQ ID NO: 379728 - DNA, 233 bp, Zea mays
cccacgcgtccgcccacgcgtccgatcacgttctccaaccaggcatggctatggaagatctagaagtccacgatcattagctgcctagctggacatttagatagttttattcacagttgggactcatgagctctgttggaaccctacagtctccctattttgcatggggaaaaattcccaggtcggtatcgattgccatccccacattttttgtgtttctggcattctatatg

SEQ ID NO: 379729 - DNA, 130 bp, Zea mays
ccaagatgccaacttgttctagcaactactacattacattttcacagatacatgatatatgattgtttttttttatttttatcttctggttgtctctgtggggttatgaaatatcacagcttttctttct

SEQ ID NO: 379730 - DNA, 171 bp, Zea mays
ctcgaacagcgtccgcgacctgggacggtcttgctgcccaacgccctagccggcgagcagccatggctccggcacaagccccagctccggcgagccagactccgtcggccaggcggcggaggctcgcagctctggctcctgccgtaagacgccctcctgaagcccaggtgg

SEQ ID NO: 379731 - DNA, 152 bp, Zea mays
cccacgcgtccgattccgttcatttaattcaggtcataatattcagcagttggtttctaccatggtccccaggtatcccaagcattctaattttcgttctagacgattaagtgccagggagttaaatatgctgaagcgtaaagcaaagagta

SEQ ID NO: 379732 - DNA, 148 bp, Zea mays
cccacgcgtccggcggcgctcaccctgctccctgcgccggatccccgttcccctatgtttccatggccgaagctcccttcctctcccagttcgccggcgctcatccatggccgcgccactggctcgtcccctgcgcagactccagttg

SEQ ID NO: 379733 - DNA, 241 bp, Zea mays
  unsure (1)..(241): unsure at all n locations
gaaatctgaatgcaagtgaaatacatcatgaagaaactgctggcacaagacaaattatatggggccaaccttctgtagctcccaatgtaactaatcttcccactatctcaacaggagttcatgacatcgttccggattatccggctgctgcaaaagatagcacaggaaccgcagtggnaaacaaaatggagaaagcagatcagaatgaagctctcttctgtttttcacagcaaccaggtgc

SEQ ID NO: 379734 - DNA, 196 bp, Zea mays
aatactacttccgtgaagctgtttcacttcagagagtttcgtgctttacctttgtactgagcaacatctacaaaagctaagaaacgatgctgcctagttcccaatgtacatccagtcatctagtgttgcttggccaacacagcaaactcctattgcttccaaattgataacaaggcaggcaaccagtttgcctctc

SEQ ID NO: 379735 - DNA, 143 bp, Zea mays
ctacatcctcagctgaagaggacagctgggcttctaaggagctcattaactttgtagctcatgtgagaaatggcgataaatctgtgatcagccgatatgacgttcaaccccttttacttgactatatcaaacgcaacaaactg

SEQ ID NO: 379736 - DNA, 216 bp, Zea mays
ggcatcgtggctcgtcaagctcctcctctccaccggccgctacaccgtccggggcaccgtgcgtcatctcggtatgtccgtatgtgtgatgtatcgcggcaccgccaggcgccggtccctttttctaagagcttctcatcacgtcacagcaataaacttctctgtatctcaagtgatggcaagaatgcccatcttaagacactggaagatgccggg

SEQ ID NO: 379737 - DNA, 128 bp, Zea mays
aaaaaaagaggtatttgttgtagcagtatatttaggcgaccgcttcctttgtatctcgctcgtacagaacatgaatacagggcgtggggtttctgtgccgttggtagatccaatctgccgcagatctg

SEQ ID NO: 379738 - DNA, 224 bp, Zea mays
cccacgcgtccggtctatcaaaatatcctagcaagacaggaccagtagagaggttaccttcacttgcatctattttagctgacaaaatagatatggcatggtctggatttggtgaattagactacaatcttccacatggtttgagcaaagcaaatgaaaatacatctttgaacttgtttggcaatccaagttacaagaaggctactggtccagtccgaatccat

SEQ ID NO: 379739 - DNA, 228 bp, Zea mays
gcggcttcggtgaaggcgttctctgtcggcaggacggcctcggtcagcgggaacgacggtgggggcggcaagacgccgcctgtctcgggcgccaccggcgatggccggtcggacgagtcgtccttatatcgaccaagccgtgtgacgccgcagcagccctcggcaccccccggggctgagaccgccgcccaatacgctgcgaacgcggcggaggaggccatctgggaa

SEQ ID NO: 379740 - DNA, 220 bp, Zea mays
aataaagtcgatcatcatgaatcaaggttctgtttattaaaagaacaatgtaaacaccttgcaaaagaaggcaatcttttaagaaagaaggccttacgatacaaagagatatctgagacaagagactctaatcttcagaaagctgaacttgaggtggatttgcttggtgatgaggttgaggccttaacggatcttcttgcaaaaatctatactgcacttg

SEQ ID NO: 379741 - DNA, 217 bp, Zea mays
cacatcgtatcatggctataggttctctggccgcggctggtggccaacaagctcttccggaagacctcgggcagccacgctttcgtcgccgacttcccggccgccgatgacgatgacgacatcgtctttggaacggaggccgacggcgggggcgggtgcagccccgacgcggacgccagccgctgcgtgaagcgggcgcggccccatgagcgccaca

SEQ ID NO: 379742 - DNA, 219 bp, Zea mays
atcttctcaaaccaaacacgctattactgcatgtatttcatttctgattgctacatatatcttaggaacatttgtgtgtcgtcagcattgtctgtcttaagagtacaatttgactatgtatcctcatgtctatatttgaaaagagtagacacaattctcacttttaactttcagatatactctggtgctcggcctttgttggagaagacaatgaaaatt

SEQ ID NO: 379743 - DNA, 222 bp, Zea mays
attcctactccatctcctccccctcctttgccgtcccccttcttcgcactcacttttttctctgctctttccagctcccctgtccgggtcggcgcccaagaggctcagggcgatggcctcagacgccgccgcagtgccgaatcccccagcctctagtggctgccccgcgatgaaggcggagttcgccaagcacgccgagtacctcaacaccctgaatgacaa

SEQ ID NO: 379744 - DNA, 214 bp, Zea mays
gacccacgcgtccacagcgctgctatttctctatctggcctgctctgatccttgcttgcgtttcgcgtcccgtctgatcttctcgggaagatcatggaggcctgcatgtttttccacagcgggagggcgcacgaagtcgcgtgcgcggtacaggaggaggacatcggctcgcagtcggattccgagtccccgtcgacgtccacgtccgaggcga

SEQ ID NO: 379745 - DNA, 203 bp, Zea mays
taacgctgaaaacatcaagaacttcctgtatgaactaaatgagaagcaaataccgaaaaagagatttaacagtaagatttttttacaatgtatttgaaattcccttttgaagtccctcagctttttaaaaaataggctgcattcaggtggtgtatctcattttatatggctgactgctgctagggcaagcactttttcctatg

SEQ ID NO: 379746 - DNA, 244 bp, Zea mays
agaagaatgggaggaggatactgatgagtatatgcaaaagaatcttccttctgaacttgatgacatttctggatggactgaggatttgttcactgccagaaaaagtgcaatcaatttacttggtgttatagcgctatcaaagttatttcggtgttttgatggcatatggaggcctccaagattttctgactgaaaagaaagatttgacaattacattgatcaggaaccggattctcccattata

SEQ ID NO: 379747 - DNA, 241 bp, Zea mays
cggacgcagggcggacgcgtgggcgacgacgacggcaaggacgatgaggaggggggcgacgccgacgccgacgccgaggggcggcgggagaagtcggcgacagggtcacccgccgagttcgacttcgacccggacgtcatcgccgcgttccggaaggcgctggatgagaaccccccgccgacgccgtcagacgtccccggcaacgaggggtgtgtcgacaagaagcctgacggcccgggcg

SEQ ID NO: 379748 - DNA, 240 bp, Zea mays
cccacgcgtccggcgccgacacggacggcttcgcggcgcggcggccacgggccactgcctcgtcagctccggcgtcgtcagggaccttatggcgttcgttgactccaaggacgaggtgccgttcgcgcgtccgctgcctaggttccccgtccagcgcgtgcagccgcagcccactgccagcttggcggtggcggggcgggagactgggatgaggcacgtgccggagtggttgcccgtgtt

SEQ ID NO: 379749 - DNA, 244 bp, Zea mays
gcgctgcgcggggtcgcgccggggggcgcgcggctgcgctacgcgttcgtcgcctcgctccgccgcctcgagccgcgcgtggtcaccggcgtggaggaggacgccgacctcgtggcggcgtccgaaccgtcgtcgtcgtcggccggggaagccgacgcggatgcggcgttcatgaaggtgttcaccgagggcctccgcttcttctcggcgtacatggactccctcgaggagagcttccccaagg

SEQ ID NO: 379750 - DNA, 236 bp, Zea mays
gagaatatttggtcctgagtagtcataagtccagaaaaatcataagatcagaaaaatgcaatagttgcttcatccaaaacaaatacaggtatacttaaagaacgcagtcttcttcttttttggaaaactaacgccctttaacacttgtgtttgcagcatttggacggttgacttagcatatctgttaaacaagttttcagtcagcttttctttctgtaccgtgacccttggagcaa

SEQ ID NO: 379751 - DNA, 235 bp, Zea mays
atttcgacgaaatggacgagagcacagagaaggctctcatggagtccctgcgcaacctgcggaaaatccagagtctgcagatatggtccaagaaggagaggacaattgaccttggcggcttgttggaagactggacgccaaccccttcagatctccgtcaactgatgctgtgtggcatccatttgcccaggcgtccgtcatggattgatccctcatgtgtcccgctcctctcgta

SEQ ID NO: 379752 - DNA, 155 bp, Zea mays
ctaccatcaggttagtattggtaggagctgctttcatgaattgatttaaaacatgatgcgaaacgtgacttttgagtctgaactgaactatccattttgttttaattgatagcagtttctgctattgatttagtttaccattgttgatacttaaa

SEQ ID NO: 379753 - DNA, 157 bp, Zea mays
gagagagagagagagagagagagatagatgtggtaactcaagaactgttcttatgcatgcagcagccataagcattgctactagcgtctcctgcacgtgctgtgtcgtttccagggtttcatgcggggcgaacagctggtctctgccgcctgaacgc

SEQ ID NO: 379754 - DNA, 119 bp, Zea mays
gccgcagagaagaagcccgaagcagagtcaaagaagaaggacggcggtgacagcaagggagctgagacgaaggccaagggctcagcagagccggcaaaggaagctgccgccgtccccgc

SEQ ID NO: 379755 - DNA, 255 bp, Zea mays
cccacgcgtccgcatttctatgtcaaaactatagttatcataatgaactcaagtgttaaggtatatattagactgtcagtttgtattttttgataggttgcaaactgtgtgcaggaccatcttcttttgtgttgtaacaactatatattcttcacgggtatctttcagttataacaactaatcactgcttacatatggcaaagacagaatagaagatgggaacaggtcaatggtacaaagatttagatctcaact

SEQ ID NO: 379756 - DNA, 251 bp, Zea mays
attttggcaggtgaagcatccaagggtaacggcgatgtcgacatggaggtacggcgcccctgccctatgacttgaatttggtttcgttagtaaaactccatgtgcttgagactccgcaatgtatgtgaaagaatgaagtggtcaaaatgcacaaaacactactaatcgtttccatcttgtataaacgattttgcaatataaaagcctggatcatatatcacgacctcagcctgcatcaacagagtgaagtg

SEQ ID NO: 379757 - DNA, 249 bp, Zea mays
acggactcgcatccacaaaccacaaccagctcactctagatcaaagaacccatcccatggcttctcacaagccgctcctcctacacaattcctcgttcctgaactgcagtctcctgttgactgctgactacgctccaatgaacctgaccaatgtgaacaactgtcccaaacctttgtggttgaacatcctgtatgattcatagcacgacgtcctggagggcggcggcttcttcctcccgccgctctccc

SEQ ID NO: 379758 - DNA, 179 bp, Zea mays
  unsure (1)..(179): unsure at all n locations
tggacagatatctagctacatcagctgctgttgcgccacgttcanttctgctgatcctcttctgttgacgaatggtcttggcttccctacctcatacgctggactagcttccaagtcgactgtttccantcctgatgatgctattacggtgaaagatgcgcccgctcaggtacggtagc

SEQ ID NO: 379759 - DNA, 245 bp, Zea mays
ccgggatcatgttactcaggcagttccttcaacctgggaccctgctgctttggcaaggttctattgataagtttggaacacacatagttgtcggtgtaaaaatgggagggaaagatgttatatatttgaaacaacaacattcgtcaagcttgcaaccagctgctgtgcagaaacgactcaaggacatgtcggacatgagatttctggatggaaatggacagtatgacatgaacaacaagcatgtg

SEQ ID NO: 379760 - DNA, 244 bp, Zea mays
ggcctacgcgcaagaggaagtgcggcctccaacggttagcttcggcagggaggtcgatgaggaaccggtcggcgggcctcggccgaaagttgaggacgatcttgaaattggtaccgatcttctgaagatctctcagcggcgcaactacgaggacgtcgatgcagaaacgggaggccgtcgcagtcgcagcagcgaggtggaaggcacggccagtgccagacctgctgtggcgtgctcggagtcc

SEQ ID NO: 379761 - DNA, 248 bp, Zea mays
atgtgatgcatgaaggtcagcatcaatggttgtcaagtccaagttctttcattggtggtgttgctcatgtactgtccaatggaaatctcgaggagctagaagaataagcatggtttccataggaacaactgtttgaacttttactgcaagttttcggacgtcttctattccagttgtgttatagtaacctgaaaagctgttggagggcaagttgtcaagggtgtgctagcctcatcaaagccagaatg

SEQ ID NO: 379762 - DNA, 241 bp, Zea mays
cccacgcgtccgcccacgcgtccgcgcacgcgtccgcccacgcgtccgggcgctcctggcggcgcagtcccagctgcgggcacagcgcatgctggccctccagctccacgaccaccaccacccgacgcctcccagaccacgccagtcgccgcagcacccgaggcaccgccgctcctacgagatggaccggtcgtgcgaggacaacgccaagatcgtggaggtggacgtgggcgagcccgtg

SEQ ID NO: 379763 - DNA, 244 bp, Zea mays
gaagcctacgcgcagtcgcagagagaccatcccgccacggcagcagccgaagcgagcctagccagccaaaccggggccaggccaggccgccagggggacgggacgggaaggaaaccgaggcaggcggcggcggcggcagcagcagcagtgcagggcgcacgcgcttctcgtttcgtgtccccaggggaaggaggaggagcgagagggttggggggtcggctggcggccgagggtccgggagctg

SEQ ID NO: 379764 - DNA, 160 bp, Zea mays
cacacgcgtccggacaacgggagcctggacaagtggctccacggcgacgctctcgccgccggcgggcacccaatggcggcgagggcgcggtccgcacgccgcgcgccgctggactggccgaccaggctcaaggtggccgtcggcgccgcgcaggggctgt

SEQ ID NO: 379765 - DNA, 166 bp, Zea mays
tgatgatgccgttgaccaagtaaacatgcatagtagtgtcctcaactcttcaaatgagcatgcaatggccatgcactcagaagtgagatccagtttacactctgtagatgtacttcaaacagacaaagctgaaggtactggtactgatcctagccaggtggaagaa

SEQ ID NO: 379766 - DNA, 168 bp, Zea mays
cgttggccgaagaagaggagaagcgaacaagcaggcttcgagaacaagactgcaggcggagggggaggactaagcacatacttggagtgaaaccagcaccacagaatgcactaagcaatgttcctgtcaaaacttattcaagatcactggaacttccaaaagagtttg

SEQ ID NO: 379767 - DNA, 133 bp, Zea mays
tcatctgtgtgtggtttgtgggtggtctgtctgtcttccatttctatctcatgagcactaaccagacaacctatgagaacttcagataccgctatgatcggcgggacaatccgtacaacagagggaccgtgaa

SEQ ID NO: 379768 - DNA, 111 bp, Zea mays
ggacctggccagtggcggcacctgaacctgttggagcaatcttgccaaaaggggtattccctccggataccattatgcgaactcagacttctacaagtgttggcagttcaa

SEQ ID NO: 379769 - DNA, 103 bp, Zea mays
cccacgcgtccgggcgacaagtttcaacatgtcaaactttgctaacagggaggatctgcttggtcagagtaaaaaggcagatgacatgagcagagttgctggg

SEQ ID NO: 379770 - DNA, 229 bp, Zea mays
ctagttctagatcgcgagcggccgccctttttttttttttttttttttttttttttttttttttgactagccttaggccgttgtcgatcgtcgttaagcaaagaatcatacagtagtagaagatggatgcagatccagctctcaggattacgtacagcgaaaacctgagtgatcgatggagctggcagaacacagcagtatactagtattccagaagaagaacccgaag

SEQ ID NO: 379771 - DNA, 228 bp, Zea mays
gccaaatccaattcgccgacgactctctttattcctcccgctcgccgccgccgccaccgcctgaggggaagaagcgagcgagcgcaccgcggatctccctcccggctccgccgcgcgcaccggtgaagacgacgagcccctcgtgaatggtgggagcccgcgcgacgtccgtcgtctcgcagccgcagccggaggaggcctccttccgctgcttcggttactgcatgc

SEQ ID NO: 379772 - DNA, 210 bp, Zea mays
caagaatggcccttaaaattgcggaggtgcttctgaattccaacgcttccacagagccgccggcgccgcgtgcgttgctaagctaacccaccctctccgccacggctgacctgctcaaccgcttgctctcgtggatcttggcgtacaccctcttcgtccggacgcagagcaggacgtcgaggccgaacccgacgacgcaggcgagcgcca

SEQ ID NO: 379773 - DNA, 225 bp, Zea mays
agcaaattgatatgatgcataaaaatcatcttttaatcatttataattcaaaatgatgtgattgttgttttttattatgatgtgacacagaagaaaatgcaacgggcagtgcagaccgtcagtcacacggcaatgttcttaaatatgctgttctacaacacatcagcgctcccaagccagcaatgcttcctgctgccttttctcgtttcatgtcagtttcatctg

SEQ ID NO: 379774 - DNA, 170 bp, Zea mays
cccacgcgtccggcgacgtccgcgacgaaggatacttgtaagccctccactcccgtcaatatcttctccctgcgcagatcagatgtcccccatttcgattgcgatctcgattcagacccctcctctcttaccttgctttatagattcctcaccgctagtattctttattt

SEQ ID NO: 379775 - DNA, 202 bp, Zea mays
agacgctggtcgaccacgcgtcaccccacgcgtccgcccacgcgtccgaccatgttctctgtgactcctacaattgtgacaaaatcatcgtcgttgaggtcggctcacatgcatgtaactgttagctataacaattattgtctaacgttgtccttgttactccacccgtttgtgttggattgccatcgaccatcatatgaaa

SEQ ID NO: 379776 - DNA, 174 bp, Zea mays
cttctgcacactctgaaggagaagacaagtaaacccttgcccgttggatggtggagttgtggtgtgtgtgaagtactggctgtttgtgctggatattgcactgcctgtggccataccatagcatgcattgagttttctggcaaacccattgaattccccaattgtggtctagcg

SEQ ID NO: 379777 - DNA, 249 bp, Zea mays
aaaagaggtgtgagcactctgtatttgtacaggtcgccttccaagtcatttttatgcataataatctaggttgctgcataataatctaggttgctgcacaatggcactctaggttgttttttgcacaagtagcagtggcagcacaagctagtgcatctgctgtatagatatttgtgggccaattgtgggtaaattcatgaagccatctttcaccatgaccctgtgctaaaaccataatgtttttataac

SEQ ID NO: 379778 - DNA, 259 bp, Zea mays
cccacacgtccgcccacgcgtccggggatcatgagttgaggaagctatgggagtcagggaaagaaagaggaaaggaaaaacattgaaacaatctagctgcaatatctgggacattatgtggaagtgcagagaggccatgtgcatgcagatgtgtgaaaacaatagggggagatggggcaaggcagaagaaatttgtgggacggaggaataacactgttttttcttttgaactaggagacataggacagaaaagattatc

SEQ ID NO: 379779 - DNA, 264 bp, Zea mays
gcggtgcggcgaaaggaacagtgaaaaaggaagaatctctctgatcgaggttcctgtccggcttgcagaatcttggcggccagccatatatggatgtactgctaggttccgggaggttcttggcgcgacggcctcccctcgcgctcgtccctcgctgctctcgaggctccccggacaaaagcggcagcaacaaaggtgaaacctctgctgactgggacagggcatggtctgccttcaagaagaaagggaagaggaccctgtttt

SEQ ID NO: 379780 - DNA, 252 bp, Zea mays
atcgagttgcggatgtgaggtagcatggccatggacctgctagcaatgccagtgctcctgtccgccgactcagcagccgccgtcttggtgctcctttccgtggccacagttgttgccctgaagcacttgctctcgtcatggcgacgatctcctcggcggcggcttcccccgagcccgacgcccctcccggtgatcggtcacctccacctgctgcggccaccggtgcaccgcactttccacgagctcgcaaca

SEQ ID NO: 379781 - DNA, 232 bp, Zea mays
cccacgcgtccgatggtgagctattctaaggaagcttctgaacaatatacctgctgtcctagagtgtcacagatggcaaagatttgcgcttagagaaggaggaagaacggtcggtgctagagtcatctccaaagttcttagctgatcagtttccactttcttctctgtagtctggttgcaactgttgatgatattgtaggtgtatgaaatcttctaagcaaactgttaaata

SEQ ID NO: 379782 - DNA, 227 bp, Zea mays
tggtagccggaggtataaaggccatatattatggcgtccacctttccgtctgcgttgaggctgttgggcgccttcgccagtccgttcgtccacctcgccgttgtggccctgcgcctcataatgggtgccctactatcgcagccttgaggaccggggcaacaatatcgagcttctgttgttcacacaacccctttcacaaactcgtgtccgttcgcctccacggcgac

SEQ ID NO: 379783 - DNA, 228 bp, Zea mays
cgacgcggcggtacgcgtggtcccaggccccagaccctagacctggaaacacatttgggagctccgtaatcaaaatgggttctaccctttatagtttaggttgatggatgtttcctgtatatgcggatatccccaagtgatcaaagcatgccaagtaccacaaaatcgagtagagagttattcttagccattgctttgtgagatattgagctatagtgcacttgagtg

SEQ ID NO: 379784 - DNA, 210 bp, Zea mays
cccacgcgtccgagcttttctatatcagtttcatgacacagtttgtaatccaggacataggcacgccaaccgtcgtggccttccacgtggaccaaaggaaactgaaatatctgcaagtgtgcctgatgctaagaatgcaaagagtggcgctgctagctattgggctcatgagagacaagtatgggttcatgagtcaagtcaggctcgtga

SEQ ID NO: 379785 - DNA, 247 bp, Zea mays
ctcgttcgttccaaacggagaagaggatcaggttcgttccaagggaaatgagaagagggtcatgagagtgatagagagatagagagagagagagagagatcccgtgactcgtcgttcagcagcagagctccgattgatccgcaatgcaggcaatatgtacaacgcgccgtcggctcaggatatggccgactgggatcacgttcagaggcgccacgaggataaggtgctgtctctacgcctgtatctt

SEQ ID NO: 379786 - DNA, 249 bp, Zea mays
cgcacgcgtccgtacctctatctgttctgcttcggcaacctacaccgatattaggaagatcataatccaagatgtcatcattggtgaccctatggataacgagagttccttgggggaaaatggcaacctaggaaataaattttctgcagctactgatgatggctctcccaaaggcccaatcttgagcaaacctatcactacatctcgacttgtcaagccagtctttcgatgcaagccttccggtaagaa

SEQ ID NO: 379787 - DNA, 243 bp, Zea mays
tgcaactgcacccagtaatctggcagatcttcagacatttaaggaagatcgtgtaaatccttgccgggaacggcttgataggcttgagttaatcagctgagcagaacttagtaggactttacttcacccagtaatcagctgagcagaaagcctccagagcttccacaggataaggatcgggccatacaagattcgtttgacaggataaagtccattgagtttgatctggagaagacaaagaag

SEQ ID NO: 379788 - DNA, 241 bp, Zea mays
gcagaatgtggctcgaacagtcaatcgactgtgcagattgttaaaggaaagttctcgcaaagtcgcatgaagaagcgtaagcagaaagagaaggttgacaaaattactgaggatgccaggagcaacaaatcagactgttctcagaaaggaaacagtaagaggccagaatctggcagcgcaagttctgagggaggatcaagtgacaagggacctctgagtgaaggggctagtgctagcatgg

SEQ ID NO: 379789 - DNA, 234 bp, Zea mays
aattgaactatgtatatcagcgtaatctgtataatttgaccattctttctcttctggccatggctttataaacaagaaatctgaaattatgttgcttttcaaagtcattgttgtttgcccttttctttttccaataattctttgtaaactttgagtgtttgattagtctagtgtgtacattaacagttattcatcatgatatgaaaaggcaagatgttcctccactaatacata

SEQ ID NO: 379790 - DNA, 227 bp, Zea mays
cgcacgcgtccgcaacatcttctcttagctccagtttcttagcgtctcgtcttgtctcgtctctgacctacgtacagagatcaagcaacaagtccacccttccatcaccgatggagaaggacggcgcgccgaagccggcggcggccaccgcaccggagccggaggggacccatcagccgacgtggtgggcacaaacgcagtgggccagcatcaagaggaaggcccgc

SEQ ID NO: 379791 - DNA, 107 bp, Zea mays
cccacgcgtccgatgagatgttaatgcctttttaatggagtacgtgcacttggattcgtatgtgcgagatgcaaagctcccggttactgctctgccatgccatcttg

SEQ ID NO: 379792 - DNA, 237 bp, Zea mays
ggatcagggtgcggctgccgtgtgactccccggacgggcctcatggcggcggagaccggcgctgtcctgctgcggtcgtactcgtccagcgggcccagggatctgtggcccggcgtctccaactgcggcctgcaggtgctctcgcggggacggcgtgcccgcggcgacggtcacgaccacgacccggctctgctcatgtacttcctcgagtctggcggctggtcgtagaccgaggtg

SEQ ID NO: 379793 - DNA, 254 bp, Zea mays
cggatggaaaatggcaaatcactcacacagagtggtcaatatggcatcatgttcgcgacaccgtttgaggcgtacggcgcacctcccggccgccggatctgcgccggcgacgcgccctgacgtcggttctacgccgccgcaggatgatgtatgcggcgctgtggccgttccttgccctcgagcgtctagatccgtccctccgctggatatatatatcagtcgatgtccctgtgatatcgagctgcagttgatgc

SEQ ID NO: 379794 - DNA, 238 bp, Zea mays
cgaccgacgccagcgacagactagagattccatctgctcgttgccgtgagttttgatggagcgagtcgatggctcgcagcggcgccatggtttcctgcgtgctgctcctggtggttgcggcgcaactgctcatggtggtgatggccacgcagacagcggcgtcggcggcgggcgaccaacgcggatcagcacgccggctgctgtggcaggtgacctgccactacagcgcctgtaactg

SEQ ID NO: 379795 - DNA, 190 bp, Zea mays
gttcccagttctcgctctctcttgcccatccgccacctctgcgtgctcatctcggctcctgtactcgcacctacctctctgcctggttgctcctgcgcctgatccttatgtccccagtcgagattcctatacccgagaggaggcacaggcacctgcgcgagctgcatctgcaaatcgtcgtccccagatg

SEQ ID NO: 379796 - DNA, 236 bp, Zea mays
agttagtcgtgggtcagccagcgcgtccgcccacgcgtcgcgaggaaggtatgttcggggatagtggcaggacaccccctctgtgcagttcgccgagaagtaataatgggatttctatgcatggcccttgttgtacactaggaaattgtgcacgcagacttgtgtcattttgtccgctgttgctaaattcagtgatggtgttgtggtactataccagccggtgtcagttgtgctgt

SEQ ID NO: 379797 - DNA, 184 bp, Zea mays
acacaattaccatggggctatttggttcctagccatagtttagattagtgtgacgagtaagaaggcgcatctagaagattttttagagctgtactttactgtatctaaaaatattactttttgacactttgacatatgagaagtgatcttgtttaggtttagttgacaactaaacgcttgcaac

SEQ ID NO: 379798 - DNA, 242 bp, Zea mays
gatgaacacaaaatagacctataattgattaaacatacattatgtcatatattaatcacaaacagctatgtattcgtaataatttagaattttatatagaaataatcgtttagtataacatacatgtatgctcccaatgcttgcactcacatgaatactttccggcatccacatcagcccttattttgaattggtgttgaccccaaacaattttatttgatcttgtagtatgtttcaccacc

SEQ ID NO: 379799 - DNA, 225 bp, Zea mays
tcaaccaacattcatagaatgttccacacccatttttgtttgaatgcacagagggtttgtagcatgtacttagcttaggttgccagaaacatttggcttcatatagatggtgaattgtgcctctgggtaataagcttgttttgctaaagagcctactcttggataaaggctgcagctccacttgtgccccaactaaacatccttagcaacacaatttgacttttt

SEQ ID NO: 379800 - DNA, 122 bp, Zea mays
cacacgcgtccgggataaaatgggcttgctatcctccagtgctgtgtatatctagcgtatgttagtgaagaaattgcaaattagacaatctaattaaaaaaatttaaaccatattgacattt

SEQ ID NO: 379801 - DNA, 251 bp, Zea mays
ttttgtattagcatagcatatgtagcggtgctgcaaaagaaaacttgtttgatgtgcttgtggcaagactttgggtactcgtacaatgtggcaaacttttaaacaggtaactttcatccatttctcttcttaaaaatatgtcagttcccgctgtttgttcttaaaaaaatggtgctgtgtgcatcagtagcttttgttctgcagcaccatcaatttgtggtatctagtattctctgcacttgcctgataag

SEQ ID NO: 379802 - DNA, 209 bp, Zea mays
ctcatggcatgcaactctataacgaggtggcattacataagtgtggcgggcagtatagtggcccgggttaaggttaatttcctaatacccggcaataatgacgtcatttgcacgccaggaaaatgtgaatttgggggttaaggtcctgatgagaaccttttcctccaatcggacaatcgaactggtccggatcatggccctgttggggg

SEQ ID NO: 379803 - DNA, 221 bp, Zea mays
gattatagcatctagctcaccgtcaccgacatacagtacagtagcagcttattagcttgtgccagtccatccatccatccatggagaaactcgtctacttcgcgaccagtatatccttatccatgtcggcgctgctagtgccactccgcgtacagtgcgaagatgcagctagagttgctgctgccagaagctgccatgccggcgccggagcttctgcttct

SEQ ID NO: 379804 - DNA, 239 bp, Zea mays
cccacgcgtccgcccaggcaggcaggtcggcgaggagggcaggaagaccgaagaccgagccgtgcgggggctcgggacgggaacgggacaagacctcaaaatctcagatccttcctgcccgcccgcccgtgcccgtcgacgcgtcgttcttgccggccgcgccccacctccgccctctcctcctccagggggatcggatacgccacaggctgcgcgatggtgctgtgggtcatcagcta

SEQ ID NO: 379805 - DNA, 231 bp, Zea mays
tgcaagatgaaagggagagtgatggtgctttggctaccgttttagatgtcttgaagcgcatacacgcgactttctttgacatggctgctgaaactgatctttcttcacgggatataagacaggtgatcaagacgttacggaaggaaatactgcaaggatgcaaaatagtcttcagtcgggtgttcccaaacaatacacgcccacaggagcagatggtctggaagatggccg

SEQ ID NO: 379806 - DNA, 247 bp, Zea mays
cccacgcgtccgtgctgtgattcaatctgggctttgttgtcacctgtcataaaaactaagcattgatgttgtcttatcagatatatctattgttgggaagtgtttgcaatctgaaattatgtgaagtagggattgtgttggggggcaacattttgttttcgggtggacacacatttgtttttgtttgtcagtagccttttctttctatgattgtagtaaaccattaaatctctcatctgctagtcta

SEQ ID NO: 379807 - DNA, 246 bp, Zea mays
cccacgcgtccgcgaccccgtgcggcgggagtgcctggtgccggtcccgccgccgccggtcctcgtcgcggggaggcgcggagacgacgacgacgtcgacgaggagaggcagcggtactacctcaacctgggctacgcgctccggacgctcagggaggagctccccgacgtgctctgcaaggaccacagcttcgacatctacaggttccattccaattccatcgcctggccttttcttttacttgg

SEQ ID NO: 379808 - DNA, 230 bp, Zea mays
attagctgttgagaagctaaagaacatgggtccaataacaagaaatgaatgcatcatgattggaacgatgctttttgcactctcactacggatttttggaagcgaatggaggaggttgttcatgctttggctaccagccatgcttcaaccgatgccatgacgaagcagcctgtgaaggtgtacggggagcttttcaacattttactagatataccaaatcatacgaagaa

SEQ ID NO: 379809 - DNA, 127 bp, Zea mays
gtcaggttcaatataggttttggtgttgtagtcttacgttattactgtgatggagtgactttggatggcaacttgatttgtgctggaatgatattggttggcaattttatcctaaaaaaaaaaagaa

SEQ ID NO: 379810 - DNA, 173 bp, Zea mays
gttctcctagttttctttggcagctatttagaatagtggaaaacatttagccatttaggtgattgtacgtgatcaagaagtcacgccattcagaattgatctgttgtcagcctgattgtttccttgtcaatgtggccgagtgttgtatgaacaagaacaataaggtttgcttg

SEQ ID NO: 379811 - DNA, 120 bp, Zea mays
cccacgcgtccgcccggtctgtgtgctgcggaacacacggcagggtaccacaacacgcgggaccgcgacgggcacgcgccgatcgcgcgcatgctggccaagcgcggcgccgtgttcaac

SEQ ID NO: 379812 - DNA, 182 bp, Zea mays
cgcagacgcaccgcaaagagatcatcgagcgcctggacgtgatgaccggcgagctgctcgacgagttcgtgaaggaagtcggcaagctccccagcagaatcatattcttcagggacggcgtcacgagacgctgttctacaaggtgctgacggaggagctgcaggcggtgcggctggcgtgct

SEQ ID NO: 379813 - DNA, 225 bp, Zea mays
cccacgcgtccggcaattgttattttccgcagatgtattcaacggtttgccgcgttgcaacagtgcttcaaaccagatatacagctccaggattctggcatgttggtctgaacctcttcgttggaatagagaagctggtaagtaatcctgctgaaaaggagcacctgaagacctgcatttcgagggcccgtgagcatcttgatgaaaaggaaaatgaggattctg

SEQ ID NO: 379814 - DNA, 154 bp, Zea mays
caagaacagatggatgtctgcactgcactctacaatgctagtctatctacttacgaaatagtagtgaaatagtagtataatggtcgtgatggttgtatccttttttggattggatgtatgtcaagctggtgggtgctagttcgtctgtctggac

SEQ ID NO: 379815 - DNA, 223 bp, Zea mays
cccacacgtccgcccacgcgtccgggaagatctcaggaagatagataactggcaatatattagttgtgtcaacctatgggttcggtttctgtgttgtcactataaggattacaatctccatcccttattttctcaagttcttcaagtaataagagaagtttctcagaaagaacaaacacaaagaacaaagatcaacttttcgtcgttgttgaaggtgccaaag

SEQ ID NO: 379816 - DNA, 147 bp, Zea mays
cccacgcgtccggaagagggtacagttgagtgaaaatgctcctcacagtagccccgcaaaggaatctcaagagctagtttgttctagaagacgtacatgcatcagagggaatgggacaaatgaaattcggagtgctcaaatgcttcg

SEQ ID NO: 379817 - DNA, 219 bp, Zea mays
gaaattgcgacatcaaatcccagtcaatctaaactttgtatgcttgcttggtttatctagtcatgtattaatactcatcacatttcagtgtctgctttgcaaaccaaattgatggttaagtgcttgcctatttgttctgcctgatttcatcgcagctcagttgtatgattgctgggtttcctacttttcagcttttgttttccgtttcatgttgtagtg

SEQ ID NO: 379818 - DNA, 210 bp, Zea mays
gccatgaccaagttcccgcctgcgtgcgaacgatttgttgatgtgcttggacttaagactgcttttgcggccttcatgggcaagattcccgtgaacaagaaaaacaagagagagagttaccaggaggagctagaagagcgtatcatttcacttattaccaaaggctcacgaaggatgaggctactaggaaaatttgttgagaatgaatgt

SEQ ID NO: 379819 - DNA, 221 bp, Zea mays
ggtggtggtcggtggcctcgacatgatgcgcgaccgcaccgtcgactacgcgcaggactggcggccatgggcaagcccgtggagctcgtcgagttcgccggcaagccccacgggttctacctgcacgagccggggtccgaggccaccggcgagctgatcggactcgtcagccgattcctgcgcagttgcaaggcgcgcgcgggtgcttgattagcccggtg

SEQ ID NO: 379820 - DNA, 236 bp, Zea mays
atttcaacgtagatattaactaaatgaaaggacacttgagtagctgctgtctaaaattcatgcagctcaataagcagcagcaaggtgttgtgatcatgcagttctgttgcgttcaactattgtatatttaacttaatcatggagcattggtggtagctattctatagtttattttggaatggatttctaagtagtctactaatgttttgggttttaattttgtcaggagggaggtc

SEQ ID NO: 379821 - DNA, 226 bp, Zea mays
gcgtgctgcgcaactccacgtccacccgcgcggcgaacgagctcctcgccgcgttctgcagcgtccggcgccggcagatccagggcggcgggcgaggggactcggcgcctaatcctcaacacaactcgggcaccaagggcggcgcctccagcttcggcgtcgatgcccagtccccgtcgtccgagaccaacaaggcgccctcgtagccgtcctccgccgatgggtt

SEQ ID NO: 379822 - DNA, 227 bp, Zea mays
cccacgcgtccgcccacgcgtccggttttttgtaagcgtggcgtgcttcattccatggtaggcttagataaaaactgccactttggttcatgttataaaaggatggaatgtatctgtattgctgtgtacttctgtaccgcagctctgcaagcgttaacatgatgatccggcatatttaggggtggtaatgggctccaaattttacactgtaaaatttaaggattgga

SEQ ID NO: 379823 - DNA, 229 bp, Zea mays
cccacacgtccgcccacgcgtccgggaaaaattgcagaaagatatgatgaaatccaaaggacaaactgtggtagctcaccactggtttgaaggaaaaaaatctgtttcagacatgatggatggtgctgatgaggaggaagaagaggaagcattggaagattttgggttttctgaggatgatgaagatgaagacgaaggagaagatgaggaggtggctcattttggcttt

SEQ ID NO: 379824 - DNA, 99 bp, Zea mays
gactagttctaggctgaatcttgagttgtgttccctttatgtgtccatatggctggacttaaatggaatcctcaaactatattgcactttccaagactc

SEQ ID NO: 379825 - DNA, 219 bp, Zea mays
gtagaagctcatcaattctctatgccaagtggtccatatgttgaatccagaattccacaggatttagttagggatgagcctgaaagccaactcctagggatgtgttttctggcttcaatatttcacatgttgaggtggttggaccatcgtctccatcactccagccccatttgggtggcatggtctctcatcctgaaaaatcaacaaatccatttgaca

SEQ ID NO: 379826 - DNA, 195 bp, Zea mays
ggacgtgggtatggtcagataaagagtcggctggtcataaaatcctgtattcgcttgagctttgacgatgagaaagccagtttactggccaaaacggtaatattgttatattatccatggaaaaggcgtgtactgcacaacggatcatttcgtggtttctcaaatcttctattcatccgctgcaggctggtgaag

SEQ ID NO: 379827 - DNA, 204 bp, Zea mays
  unsure (1)..(204): unsure at all n locations
tgaattcctccatcttggcggtgtcacccagtctgtgatccatggagatgttaagtcttcgaatatcctcctttcagaggattttggggcacggctgtgtgatttcgggttagcgaacangtgtctgcatcgactccccacctaacgtgtaccgacatcaccgggactttcgggtacatggcgcccgagtacttttcacacggg

SEQ ID NO: 379828 - DNA, 197 bp, Zea mays
ctgatgtggacatgcaatgtagcaagaaggtgtagatgactaggtcgtgtggatgataccgaagatgatgcatgcgtgatgaacccggtccttgtgcatgacgtggtgtcagccgggtctcacggaagtagtaactcctgagatcctatgcttctccgttgcacgcacatcccctagtacacatgggatttagatgg

SEQ ID NO: 379829 - DNA, 219 bp, Zea mays
ggcacctgggctgggacccggcggcgaggggtatccgttcatcggaagcaacccaacggtgccgttgcccaccggcacgaccaacaccgccaccgtgctgccgctgacggacaccggggacgccgccgccgccgccaccaaggtggtggggttggcagcgtcccttggtgctcgcgtctccatgattgggcttgggatttccctcgccaccctgtccct

SEQ ID NO: 379830 - DNA, 205 bp, Zea mays
acggtgcccaccaactcccacctccgccgcctgctcgtctccaccacgcccaagtccgtcgtcgtcgtcgaggacatcgactgctccctcgacctctccgaccgcaacaagaagactaagaagggtgctggcggcggcgtcggcatcggcatcgccggcgacgaagacgccgcagcacagctcgccgtcatgtcgttgtcgtcgg

SEQ ID NO: 379831 - DNA, 193 bp, Zea mays
ttcccctcgagcgccgcagcgagccgaagaatccgaccgccgagccccctctccagtccagtccgcggtctcggtttcttgcttgcccggcgcccaatcttcagagatctccttctcgtcgtctgtctccatggccgcctcgaccaagaccgtcgccgtcctcctcgccgcggtgctcgtggcgctggtcgcg

SEQ ID NO: 379832 - DNA, 258 bp, Zea mays
gaatatttgtaattaaaatcactttcttttactaactcgtggactgctatgagacataatgactgtcttttcgactgaaatgacaaaaggatactcaggccaaataataaaaaaagttttggataatgttttgatgtagcatcttttctttggtgcaactgagcgttataaaaccaaagaaagtttctgaagtcagctttcacgagagcaactgagaagtaaaacgatggttatgtttgaggctgtttaggcatgctg

SEQ ID NO: 379833 - DNA, 172 bp, Zea mays
aaccctgcctggctcgtcttttggtagcaccacgcgaaccatgccgcttttcagccctccgctcctgcgtcctccccttccactcgtatacaaccacccacctgagccgcacccacgctcaccgtacctcctccgaatccgccgaccgccggtgagcccctcctcctcaacg

SEQ ID NO: 379834 - DNA, 246 bp, Zea mays
gaggtagaagaaggttctgtgatgtgaggggaaattacgtgggacattagacataagccaaatccattgaattctctcgtcggttgcttgagccgagttcgtctgagtggcctgctgtgaggagcaagctctgcgtcttgctattcctgactatttttcttgccttttgtctctgtttccaagcggcatcctaatttctgaaggcctcttcgagcaattctatgcttcatttctcgggcggttcct

SEQ ID NO: 379835 - DNA, 165 bp, Zea mays
gctgctctccttcgcgtgcgggggcttctccgtcatgtggtggatcaaccacctcgtcggcgacgtccacgtgggcgccacgatcgtcaggacgtggtcccagctctcgcggaccgggtacatcggcggtgcgcccccggtcaactacgaccgctccgtgttccg

SEQ ID NO: 379836 - DNA, 249 bp, Zea mays
ctagtggtcatgttgcatatggtgaggaaacacatagcttgcacactacacacgaccactctctgccacgtttaacagaattggactgtgctcggtcgctacgtgattttttgtgctcctcaaaacccgacccaaacaggaagatcgtagaattcggtgaatgtattggaaattgtctggatattcaacaatcatttgcagacgggatgtgtctggataatgtgttcatgcagtgtttcatcctgtgtt

SEQ ID NO: 379837 - DNA, 242 bp, Zea mays
ggacgcggtaggaattgcaaatgccatagacttagcagatcgagttcttcctaagctggaatccttaaattgtaagcactctttgtagtgttaattctaaatttgctgatcaaataacttggcatgcctttgacgttgctatactaattgacaggcaagcctcttgttgtgacttttcgagcatattctaaggatcaaatatctgacatagttaagcataggctaaaggtagctattggtct

SEQ ID NO: 379838 - DNA, 240 bp, Zea mays
gacttcctgcagtcctgcgctgcgcccctcctttccgcctccacgctgccgacgtccaccacacatcacggtcgagtcacccgatccctccatggcggcggcggtggcggcggtcgcggctgccacgacggcggaggacgaggcgcgcctgctgcgtctggaggagcaggcggacacggcggcggcggcgcctgggactacctctgcctcgcccgccggctccgcgcccgacgccccgcc

SEQ ID NO: 379839 - DNA, 200 bp, Zea mays
agacagcggagtttccaatcgaaccggagataaccctggagcttatgatggccgcaaactatctggacacttgatgaggagcctgaggggtataatcctagtttgttattaaatatgaaagaacgaagcaatgaatactagtgaatctttccttccattcgtttctttttctttttcttttttttttgcattacatgatg

SEQ ID NO: 379840 - DNA, 258 bp, Zea mays
tgagcttcgccttgccgttgttcgccatcctctgctcggatgaagtctgatcggtgttgagagttggtcatgtggtggtgtgcgtgaagctcgtaatgtacctgccaagcgctcgacaaattgtctagaccggaaaatcattaccgatctcgcggattcgagtcagatattggaacggtgagctgctttgctatttttattgactagttcaataaatgaattgataggtatgtatgtcgcgacgagtattccgcttgt

SEQ ID NO: 379841 - DNA, 249 bp, Zea mays
caaacccaagcagagaacactagcgttccctcaccagggcgtccatcccagcagccatggcgatggcgtacaagatggtaaaacctcccccgcgctccggccatgcgccggcgccgcagccgcttgccatcgagcagccatggctcacgatcgacgctctgtgtgtgtgcgtgcgtggtttgcaggcgacggaggggatgaacgtgaaggaggagtgctcacgctggttcatggagatgaagtggaaga

SEQ ID NO: 379842 - DNA, 214 bp, Zea mays
cccacgcgtccggctccactgcaagcagtgggccctagtggaccatcagggagctatagtgctggtgctggtagcttacaacaaccagggaatgaagggcagattacgcctgatgtggagtcagctcttctgcagcaagtcttgcagctgacacccgagcagctgagttcgttgccaccagagcaacagcagcaggtgattgaactccagaaga

SEQ ID NO: 379843 - DNA, 156 bp, Zea mays
aacatcatcttcaacattgtccctttcccagagaacgtgactatatcatcaacatggttgagcattcttagatcaaagttcatgtccttggttgtacggcagtcatcaatccacttgactgagcctctattcgggaatgcgtcagcctttgaagta

SEQ ID NO: 379844 - DNA, 226 bp, Zea mays
cttaatctcttccgtgatgccccatctgcatcattttcttcagttaacaaaagctcttcaaatcatggggcacccaggaggaccgaggcaagtaaaacagaaagccgagatatgtccatcatggaaaataattcttttaaccccaacacccaagaggatgtaaaggtgatcagtgatcaggaaatggaaaggcttaatggtatccagatcagatctaaatgtgaac

SEQ ID NO: 379845 - DNA, 220 bp, Zea mays
gttgcgcatttcgcgctgtcgaccggagcgttttcggacccacctgtatatataagctgtgttcgattgatcttctccgcctctatggaaataaaaggcagcgtgcatataataatgagtcggttgtcgcgtttgcaattgcaggtgcggctgtacacggcgaagaagatacagcagcagctggaggcggcgcggacggagttcatccggggcagcgtgg

SEQ ID NO: 379846 - DNA, 219 bp, Zea mays
cccacgcgtccgcccacgcgtccggaagcgtgctgttttactttttttaatgtaaagtcattgactaccatgcattgtaattactttttcatgatgccttttttagactactctagtacaatcattgagctatcatgcagttttattgcttttttctggcattgacatggttaacgctatttttattaagcggcctgtctcttttctgtagagtttaga

SEQ ID NO: 379847 - DNA, 213 bp, Zea mays
cttgagtcgtgccagtgacccgtgaccgtgaccgcgagcttcagggacgcgggcggcggcgatcatggcgtggcgcggcccgctcggagccggaaaggaggccctggacagcggcctcgagctcagcctcggcctcacggcatacttcgcccggccttcaggtatggacgcagccaaggaggagcccgccgaggcctctgtctacgctatcca

SEQ ID NO: 379848 - DNA, 237 bp, Zea mays
aaattattcgtaagaacacagagctcggagcagaaggttgctcatcttctgccaagggagctggtaagagacaaaatgttaggtcattaggcttccaagtgcgccactgggtaatgtcttccgaaaagcacagactgaggagaatggttaccccagtgcattgtgcaaagatgagattgaagattcatgcgatcagagtgattctgtgattccagtcaaggaccagattccacgtgg

SEQ ID NO: 379849 - DNA, 223 bp, Zea mays
ctcacgcgtccgctaatattatttctcttcgatatctagaatgctcttgagaatgctccttatggaggacatggggatagttcttttgttatgtatcaattacagtcacaatatttgtatgatattttgtaggaggatgggttggattcttctcatatgatacagtgcgttatgttgaaacaaagaagcttcctttcagtaaggcaccacatgatgataggaa

SEQ ID NO: 379850 - DNA, 226 bp, Zea mays
gactctagccattgccagaatgctgaatctctataggaaggctcgtgtgcaacaaaaaaagcttcagaggcagagaaatttgtggcagcaggttggtgcaaaagcaataaatgttgttaaaatctacacccgatagattggcttatattgctcgctaagcggtgaaggtgagcggtcgcatcgctcgcactctctgatcggtggactaacacaggacattttttac

SEQ ID NO: 379851 - DNA, 253 bp, Zea mays
acagacttcaagactcgcactcggcctgaggtaatttgagtttgtcgaaggtttgtagtgtggactggcgaaatgttgtgcaagttcaaccttaacccatgaggtttgtgcttctatgtagtcgagttattatactcacctctttctctggtactctttattgcggagctggaaaatataacagctgatgagagaagacaatatttggaaaataactttgtactagtatatattatatatatagtgtactata

SEQ ID NO: 379852 - DNA, 254 bp, Zea mays
cggtacgcttgggtcgacccacgcgtccagttttgtttcttcttatagggcatattaggacttggaaaagtctataaaaacgtagttcgatcaccagtttttcataaagtatactggtctacataaatttagaattatccaattttgagccttgttaaagaggcaccaaatgatccccgataaactaatataatgctgaattctgtttttctcgccctttgtttcatattgttagcctctgtccatctaatcta

SEQ ID NO: 379853 - DNA, 249 bp, Zea mays
cgcttctgcccgcggaagagggcgatggaggagcgacagggaggagaacaggagcgacgagtggtggcgctggcggcgcctctgagatgtcacttgttcttagagaagagggccgtggagtgacagggaagagagcgagagcgacgacgagtgatctcccggcagatgccagtgcgccaaagaagcactctgccctcgcgaagaaagctggtaaaaggaggcctcaagctgccacttcaaaggatgtgt

SEQ ID NO: 379854 - DNA, 231 bp, Zea mays
ctcacgcgtccgctcacgcgtccggatttttttcctcccttgcgtgtcgtctctctctgctcgccggccggtgcccatggccggtctgtacttgtgccatggccgagcgccctctcggccactagctcgctcgcctctgcagctttcttctccaccgcgccctggctgagctcggcgtcctcctctaccacggctcccagtccttctctgctcggcgctcctgtggtccaa

SEQ ID NO: 379855 - DNA, 194 bp, Zea mays
cgcctcgccaccgaattgggaggaatctgcggggaagggggatatggggtcgccgggtgcggggagcagcggcggccacgagtgctccttcaagttcctcctcatcggggactcgggcgtcggcaagagcagcctcctcgtcagcttcgtcgccgcctcccacctcgacggcgacatcgcccccaccatcggtg

SEQ ID NO: 379856 - DNA, 247 bp, Zea mays
aaagcgcaaacacacaagaagggcggactgttgtcatcatcctgacaatgggcgcgcgtcgtggtctccggcgaggccaagccgccgtcgccgccgtcttctccgcatgtcccttcctcgccctcgccgtcctcctcgccttgccggagctcgcagccggcgacacccactactacacgttcaacgtccaaatgaccaacgtgacacggctgtgcgtgactaagagcatcccgacggtgaacgggga

SEQ ID NO: 379857 - DNA, 119 bp, Zea mays
gggagggaggggcagataaagaacactgcaccatttgatttgtgtgctcctgcagtctacaccctcacttgctttcaaacgtgcacctgctctcttcttcttcctcccctcagctcctt

SEQ ID NO: 379858 - DNA, 247 bp, Zea mays
ggcaagccgatttttaggaaggggggaatgttagggaatgtgagcacaaagcccatgccggcccattttgctaaggaaaagactacaaaggagcagcgcagtctcaggaagggggatcgattatttcagaaaacacagacctccttccttcagattccagaagccacctcttctactgttcttcttcttcctctgcgcagtgatcttcttcctgcagatctcctcatgaatatctagccctcttcga

SEQ ID NO: 379859 - DNA, 237 bp, Zea mays
gtgctaggtagagtgaccatgcaggcggcggcggtgacggtgaatggcgcgggcgacgtgcagaagccccagcagcagccgatggtggtgggggcgccgccgccgccggccatggtgccgccccattgggttgctataccgatgccgccgcacccgatggcgccgccccagttcgcggcggctcacttcgtgccgttccacgccgtcgtgcagtcgccgccgcgggcggtacctgtg

SEQ ID NO: 379860 - DNA, 238 bp, Zea mays
cgacgcccctcaacctgccccgcctcggccgcgcccctagcgacggcgcgctccccatccgcttcctgccgctccgcttcccctgcgccgaggcaggcctccccgagggctgcgagagcctcgacgcgctcccgggcctcggcctcctccgcaacttcaacgacgcctgcgccatgctccgcgggccgctcgtcgcgctcctcagggacagggagggcgacgccccgctggcgagctg

SEQ ID NO: 379861 - DNA, 235 bp, Zea mays
attacacagttactgctgcttggggcaattgagagcatacaggtaagcagtttccactttatatgcatgctcttagatttgagtccatccatggtctttctgacaatgtggatctggacgcaccttgtctgctatacagttgaggactctcaaaattctagtagcaagtaaggctgtgtccagtagaccgtgtaaaacactgttttgcactgtagacagagtggagtttgaaata

SEQ ID NO: 379862 - DNA, 178 bp, Zea mays
ctttatgaactctgtaggattagtgcaccaaattaaggttttgtggccatgtttcagtcgtcgggttgaaaaagggaactataccatgtaatttcattacagattattattttttcctagaactccaactgtgctgtcataccagttttacccattcataatatttatgatgcattca

SEQ ID NO: 379863 - DNA, 141 bp, Zea mays
cccacgcgtccggaaagtgcttcagtacctgcctttcgaagcaaacggaagaggcgcaattaatcacgtttgcttctaaaccgctctttttcttcgctctaacaaagttttaacactaaattcctatgttctttgacatag

SEQ ID NO: 379864 - DNA, 167 bp, Zea mays
tcgacccacgcgtccgatggtggaggagttctagtcaaaggcgtggtccgaacccgatgccggcccacgcggttgccccctcgccaaaagcagcggtacaccccactgtagcatacgcacttctataccatctactataggtgttgccggatcggccggtctacata

SEQ ID NO: 379865 - DNA, 152 bp, Zea mays
agcaattggtggcgaccttcgcaaggaatcgctctattctgcgtgcaatggatgcttgtccctgctgtgcgagcaatttgtgagggcttcagagggtgatcactcagaggtggcgcggatcgcaaggcaggctgacaacctgcattggatgc

SEQ ID NO: 379866 - DNA, 235 bp, Zea mays
ccggagaaccccgcaagacacctgcagcaggtccgccaggcatggctgccgagaagcgcaccattggcatgggcatggactactcgccctccagcaaggccgccgcgaggtgggcggtcgacaacctgatcaaggccggggaccgtctcgtcctcgtccacgtcctccccaagggcgtggactccagccacaaggagctctggaagaccaccggctcacctttgattcctctgtc

SEQ ID NO: 379867 - DNA, 234 bp, Zea mays
cggacgcgtggtctgtgctgcatggttattaccccacccccatccatctcgcctgtgcagaaataataaagctcactagtgtgcgttaactattttcttgatactgttgtttctattgttctcaaggtcttggattcaacatagtactagcagtttggaatcacccgacggggatgctttccatgtaataaatatttttggaacgtttcggatttaacttatgttgtttctatt

SEQ ID NO: 379868 - DNA, 238 bp, Zea mays
agcttaccgagcccttcttcccagcaactgaccagagatacggcgccgtcgacgacgccgccacccgcaccgcctgctagcaacactgaggtcgccgtcgccgtcgccaagggtggggaggcgatggcgcagtcggccgccgacgggtctgtgcccagccccggcataggccatcacaaaatgctacaataatctgcgccaaacaaaattgtagtgtctatgtatccatatatataga

SEQ ID NO: 379869 - DNA, 234 bp, Zea mays
gctcaaggggccagtttcctgctgatgctgttcagggatgtaatacccaagctaaagagaatgctggccttagggagctgcatagcagagacatacctgtatcagtatcacacgtcggttccagagtccgagaccgggggcctcacgatgcggcgaacgtgcagtcctgaagaagtggtcacagctagagcgtccagattcgttcgattcttgcgacacttaccactcccataa

SEQ ID NO: 379870 - DNA, 236 bp, Zea mays
gtgaaatgtttagattccgagctagtgcaatgcctactgtagatcattgctagcagtagcagtagtgccaatcactttagtttacagcttacaaaagagcattcctgttgggctgttcctaacgtggagtagggtggtacgatgaccggtcaccgactcttgtggctgcaggtggagcagggacgcgccatgggatacctccggattggccgccgacttcgactggaagaagaccg

SEQ ID NO: 379871 - DNA, 238 bp, Zea mays
agcggcatcactaccactgcgagagagtaagaagcaacagatgggatgaaccagggagctatatactctccctactattccactgcttaatccttaacactatatatcttctacttatgcgatcatttgcatcgttcttgatctgattattatgctccatgcagctggatcttatgcaggatcaagaagccagtaggctccaactcccacagtacttgtgagaaccaaagctcagctg

SEQ ID NO: 379872 - DNA, 249 bp, Zea mays
agctgaatatggttctcagttgtaacatgtatctaccggttcgttttggtcgactccttttgaatgcatacatgcccggattgcgttgagctggagcccgacaaacatgccaccgaacaagctgcaatttatactgaacaagctgtaagatcagaggcgtggtccggcatcgcgctggcggtggcgtcttgtctcgctgtctcatcccaccgctacgactataaagatcccgacgccggccgaagatta

SEQ ID NO: 379873 - DNA, 242 bp, Zea mays
cactattcatacctaccagacgccatccatggttgacatgctgcagcgctctcagatcctcgtgccacccattgctgacatgctgaacagctccccaactgtggcgcctccaaatagattcagccggccatccaggtccaggacaataaaatccttctctgagcaactcctgtgatgcatcctgatcatgacacatgtctagctataattgtcaaaatattaggtgaatgtaagctgtccat

SEQ ID NO: 379874 - DNA, 239 bp, Zea mays
gggtagacacaactttgtcaatagcatgatacgtgcaataataactgaataacaaacggataggtacagtcgacaatcaaagtaagttgcatggtgtactaaaccgcacagttcacgatctgcacagcacgagtaataaggcttcccttttgtcgcaggactcgattggaaggatcttgtgcgttccgttgaagcgtgcgaatgagatcattggtacgacgaccgaagaactggtgatg

SEQ ID NO: 379875 - DNA, 239 bp, Zea mays
gatttctgtgtttttttatttgctggagccctaccctcaaggctcatagtagcatcatacgcaacagctcttgacctcatagtgcatttgcgccctcatacacacgtgatgcctaagcattggttctttgatggcactgtcacatggttacaaaatagactgttggactatctgcattttcatgtctttgacttcctggaaacaactttcttatatagtttaaatactgtaaatgaaga

SEQ ID NO: 379876 - DNA, 233 bp, Zea mays
ctcatctttaaggtttggtcttgagggacataaacattaactgtatttcattttgctgatttactatgagcagatgggtgcagtaatattttgtaattctctatatttatataagtataacctgtgttcaaaatccccatcagaagttgaggacgtattggatgtattatgtcaatattcatagcatagacttttgtggaaatattacacttgtggtgctagaaccctggtcc

SEQ ID NO: 379877 - DNA, 229 bp, Zea mays
cccacgcgtccgattttgacatcataacctacatataaagattagagactaatctgttttttttctgaactaaggaaatgaacttccatcagacttgatagacacactactaaagtggatcccaagcaatgatgaggagcttaggcttcgactgtcctcccgtagcacggcaacaccgcacgcgtccgtggcggtcgaacatgcattttggagagaccaacttgaatgt

SEQ ID NO: 379878 - DNA, 126 bp, Zea mays
gcgttcccgtggcgcacatctagccgtcgtcgtcgtcaagaaaggaggcgacacaatgacgatgatggcgcctcatccgcagccactgccgctggcacagccgccggcggcgttcggggacaccac

SEQ ID NO: 379879 - DNA, 104 bp, Zea mays
gaggaacctgtcctacgggtaactagctcgtcgctctgatgatgattaaccatccgacccggcgtgcttaattaattaactcgcagtgaaactaaaattaatta

SEQ ID NO: 379880 - DNA, 135 bp, Zea mays
ctgggctgctaggaagccaggatcaggtattcaggtttgcttttcttctagtggatagagaatgaccaacatattatcaatccaaaattcccgtttggaacttgtatccctacccaatgcacataattctccctt

SEQ ID NO: 379881 - DNA, 137 bp, Zea mays
cacgaaagtaaacaacgacggagacaaagtggcacctgttccaggttcaaggaaatgcgcgagcgtagttccagactgccttcgaggttttgcaccgtgcaagcgcacgcctcagagcaagatgctgctgcagtcag

SEQ ID NO: 379882 - DNA, 191 bp, Zea mays
caattcaaagcggcccaaacctgtataaatctacgagcaataccgacgtgcctctgcacataccatcgagtcgcaatctacaacgtcgtcctacccaaaagcatcacgtgggtaatctgtggtgcacagtcgggtcacaaacaccgacaccatgcctaattttttcttcaacttacttttctccataaagt

SEQ ID NO: 379883 - DNA, 269 bp, Zea mays
gcgatgcagactcgcgtggagtcaatgtgttgtgaacttgatttgttaagggacaaagtggcaaagcaagattcctacctatctgaaaagaacagggaatttgatgccattatgtgcaggttggagcaagctcagcagcatgttcaacacaatgatgttaccttggttgagctgaatgatagacttagaaccatttcaaactctctaaaagacctagagaaacagaatcaagctctacattatgccatggaagaaaaagagaagatgct

SEQ ID NO: 379884 - DNA, 125 bp, Zea mays
gtgacagcattctttcatttctggtctgctaattcttcaatggtcagaatatagtttgtggccttcccagagtggtcacaccactgtggagccttgagatggagtaaattttttcttcaaggttt

SEQ ID NO: 379885 - DNA, 267 bp, Zea mays
tgcgccgtccttgtccggcttcaagaagagccctctagagtcgagatggccgtctacgacaccgtcgccaacaagtgtgcgcgggatgaggaggagacctccacaagtccacagtcacgttcctcctggctcctcgaggcatcggcaccgccgccattcggagccatcccgcctcatccgcggacgccgtcgctcgatgccggcagagaggagctcaggagcccccgtgcctgcgcaacagtttcctcgtggcgctgggcctgcgcg

SEQ ID NO: 379886 - DNA, 196 bp, Zea mays
attctgaaatcaactgaagctttctttctagcttctaatctatcatgcaaaacggattcgtcggtcttttcagtcgatgtcacattgtcagatgagcagattgaagctgcaatattgcatggggatgattatgccggttctctagaagatagctctgcaaagttacaatgcgttgtcaagggaatatcatttcgtt

SEQ ID NO: 379887 - DNA, 195 bp, Zea mays
aacatacaaacacacgtccgcggacgcgtgggcggaccgtggcaggaggccccagtcgtggttgaagcaccaaccccagatcttggaggagagctatggacttatatgactgctctgcagctcgtgatgaagaagtcaagtgctcatgatggacttgtgaagggtctccgtgaggctgccaaggccatcgagaag

SEQ ID NO: 379888 - DNA, 228 bp, Zea mays
cccacgcgtccggcaaatttgagaaagtttctataacaaaaaatagataaattttctatcggacacatcatttattctacatttttattagtggataataatgaaatacatgcaatatcaacgagaaggacttgattcggttacggtttagacaagacaaacctttatatatgcttgtcgtactatggttcagaaaaaagttagtttggtgttttattagttattagt

SEQ ID NO: 379889 - DNA, 115 bp, Zea mays
gagaatggctattcaccgcaagatctgcaaaccaaacttgctaaggcacaggagatgacagatgttgagtaccggaggacaaatatcacaagttacaactcgaagcataacagtg

SEQ ID NO: 379890 - DNA, 163 bp, Zea mays
cccacgcgtccgcaagaccataagaaattgctcccatgtattccaagtgttgttttgcttgactctgaactctattcattggaacgcttccttctgcaggaagacttccatggggtattcctgcagaaggaagcgttccaatgaatagagtcagagtcaacaa

SEQ ID NO: 379891 - DNA, 181 bp, Zea mays
cttcttcctctgttcttggcgcacagacttcctcctctccttccatggcgcctccacctccctgttccctctctcccagggcgagcaggcactctccttccccatgggcgcgcccccttcaggcttggcggcagggacagcgccctccgttccctctgctgcccaagcgcggatgcccatt

SEQ ID NO: 379892 - DNA, 257 bp, Zea mays
cattctaagtttctagcatgatgttgttgcatgcaattatcctctgataatgttgcctgtatctttttacttcggcagtttgctcggctatatcccttggatcaaaaggacatgacgccagctcaccgaccaatagattttggagtcccaatacccattggtgtggaagtggagacatctgcaagagactacacacctccccaatatctcacactcctcctgaccgaccttggtgttctgacgccgtctgttgttag

SEQ ID NO: 379893 - DNA, 223 bp, Zea mays
gtcgcgctcgagctccagccgcgccgccgacctcgccatctgcccccccgaatcccgtatttccctccgtcgccttccgatctctcgctcctcgccatgtcggagacacagcgccgcgccggtgctcacgcggccggcgccgcatccagctccacgaaccagcgtgcctccaaggctgcgtcgtaccccgactcccttcgctcgacgccccgcccgacgcctc

SEQ ID NO: 379894 - DNA, 198 bp, Zea mays
cggacgcgtgggtgcttttctgggcaatggtgatgctgtggaaagaatttggaaggtgtgtgaggataatactcgtatagatgagtgcttgtctgctatagatgccttcggtaagcttggtaatgttgaaaaggcagagaaggtttttgaggatatgtttgtgaaatggaaaaacctctcttccaaatactacaccgc

SEQ ID NO: 379895 - DNA, 184 bp, Zea mays
gaaggccaggtccccttcgcactccccgcgcgcgcccccggcggactcgcccgacatggcccccgccgacgcgccaacggaggacgccgcggacaaggtcgaatctaaaaagaacggcggcgccgcagcggccgtgagcttcgcggcctcggtggcctctgtcgcccttgccgtcgcgtacctt

SEQ ID NO: 379896 - DNA, 138 bp, Zea mays
gttctttttgatgaattcgtcaagacctaaaaatgtttgccttgggacaattttataagttgatttattttggagggaggcagtatttatattttcagcaagtggctataaagtgttcattaatacttttggtgagaa

SEQ ID NO: 379897 - DNA, 222 bp, Zea mays
cccacgcgtccgcgtcttctttggcgcctcatcctcccccgcagcagaccgctccccggtctatcaggctgcctgtgttgccgccgctatggccgcgcttcctggcgccccgcagcggtacgccgtcgtcggggtcagttacggcggcttcgtagcataccacctcgcccacgcgtttccggcagcggtggagcggcttgtactagtcgcggccggtgtttg

SEQ ID NO: 379898 - DNA, 258 bp, Zea mays
cccacgcgtccgccacgcgtccgagcagctgcacgcacgccgtcgcctggccggccatggggttcccgtcggtgtgctactgcgtgattctgccgcagccgctcatcctggtgctgcagctgctggacttcctgcggcacgccgtgctgctctgcctctcctcgctgggcctcgcggcgtgcgtagtacgtgtacgtacgtccctgcaccccggcggccgattgcgaggcagagcaaggtcagtagcaaagccaccta

SEQ ID NO: 379899 - DNA, 254 bp, Zea mays
gtggctgggcgctgagaacagagatctcaggctgggcgcaggtctggggcttcacggggttcctcgggtggtggttgtggtcgtcctggtcgaagtggtgcaccaggatctcgttgatttctcgtcggggcgtggatccaggggttctcggtggtactcggcgaggagttcctgatgcgcgtgcttcggttcctggagttgtgggcgatgggaggccagggtccgcaatgtaccgtgtgctcagttctctgctg

SEQ ID NO: 379900 - DNA, 254 bp, Zea mays
tgaaatgagcggcggcggcggccttgggtccggctgctcgtaccagaagttcgtccacttcgcgctggagcagacccgccaccgctccactctcgtcccccacccgtcccaggaaaagttcaggttcataaaagcaaatgaggataacaccgttctcaatgccttgtcattcagcacttccaaaattagactgcttcggagcttgacaattgagcaaaaaaactcggttcaggttcttgattttgctgccttct

SEQ ID NO: 379901 - DNA, 251 bp, Zea mays
tcaagtacctggctgacaacaaagtcttccaagaaaccttgaggtcagttcagctggagctgaagcagcagcagcagcagcaggaggaggaggcagatcatgatctcctccaacatctcaacagcatggagcttgcatacatgacggttaaagaatcattgaggatggcgagcatagtttcctggtttccaagggtagcactggaggactgccaggtcgcggggttccacatccacaaggggtggattgtg

SEQ ID NO: 379902 - DNA, 252 bp, Zea mays
ggcaatatacggtgcgtgtgggggcggcggcgacgagggttttgctgctccgtacaccgcgtgcagcggcgacgcgaccgacagctggtcgccgccccggatcgatgagggggaggagccggcggaggctcctgtggtggctgcgggggcgggagcgggagcgccatgaggggcggtggccgacaactctctctaccgtccgataccccaagcaccagcgcggcggcggcgaccatggctgtcggaaagaac

SEQ ID NO: 379903 - DNA, 107 bp, Zea mays
gtcgtcgaccagctataccgctaagaggcgaatcctccgcctctcatccacgacgacgctgcatgggtgatgtccttggactcgaccgccttcaaggtgctcgacca

SEQ ID NO: 379904 - DNA, 240 bp, Zea mays
cacaggcctggaggaggcctgtgtgaatgatcaggtttcttatctgccaatggtttggccatggacacaggcctggaggaggccctaattatcaccttcctccctatggtggtggtggctacatgggagatccatatggtgcttatggtggcggcggtcctgcatacaaccagccaatgatatatggcagaggaccagcaccggcaggaatgaggatggtgccgatggtgcttcctgatg

SEQ ID NO: 379905 - DNA, 234 bp, Zea mays
cagtacggtccgaattccggtcgaccacgcgtacggaggcggatcgtgtcacgcgtccagaaatttcagttctattgtagcttacacaatttgtttgtgatgcttcaaaccgctaatgattttttttaaaaaagttgtgcaatgagcatatcacataatatatgagaatcttaggaataaaccaagttgctaatgagtaaaattttggctttgctttttaaaaaatatgggttc

SEQ ID NO: 379906 - DNA, 260 bp, Zea mays
gaagacccgccccggcccgtcccaggaagccatcaaggcacgcgccatccgactcctcaagcacaagcgcatttagaggttgctcatttgcctctcaggtacgaggagcaacgcaacatgttgtacaaccaaacctacaatctcgaccaagttggctttgctgccgatggcctcaaggatgctcagcagactatgaatgcaatgaaggcagcaaacaaggagctcaagggaatgatgaaaactgtcaaaattgatgaaat

SEQ ID NO: 379907 - DNA, 254 bp, Zea mays
cccacgcgtccgcccacgcgtccgcgctgttttgtttcagtccatgccagttcagttcatagaagcagaggcccctggtttgattcgggtcgaagcaaacagacggacacgggactgatttgatggattagtgactacaaactccacgctaatctaggtttaagacacggcagcatctctcaaacaaagggttaaggctcgaggctgacatcgctgattcacgtggtgtgacgtggccgtggcagctgggttgc

SEQ ID NO: 379908 - DNA, 250 bp, Zea mays
atctgcttcatgcttttccttttatatatggtcactacctcactggttagttcatggtctctgtgtgtgtgcgtgcgtgtgtgtgtgcgcacgcttctgcattcaaactcttcaaccttgtgtttcaactaaactcttgaacattcttaccttggctggtcattttatatgcagataattttatgtctgggctgaaggtcgtgtttgatcgagagaggaaggtcttgggctggaaaaactttgattgtta

SEQ ID NO: 379909 - DNA, 201 bp, Zea mays
agctacgggccggtgggacgaattcgatgacgacgcggacttcgggcgcggcgacgcgcatgccgcgcccgcatgacatggtcgcccgcgcatccgctggtggggctgggccagccgctccgttctcgatgctcgagggcgccgggcgcacgctcaaaggccgagacctgaagcgtgtgcgcgacgctgtgctcaggcaaa

SEQ ID NO: 379910 - DNA, 216 bp, Zea mays
tgtttaggcctcaaaatatattaattgatgactgccctggactgatcgaatggtgtgatgagcaagagctctactatcatgccccaaaaacggcgaatatttcagatataataagggcaaagccgtgtggtatggcttattttcaatccttcgaacagatctgtctcgacatttgcccggagcagggatcagaattggttttgtcaccagatactt

SEQ ID NO: 379911 - DNA, 203 bp, Zea mays
ggagcactagaagatgaattcagagaaacgaaaacaggttcagtgaattgtggatgattcttggacactataacttgtagtacatgcagtgtggatccttgcttaatgcataaatgaagtacttggttggttatggaagcaaggttttctagtttggttggtaaattgagttgtgatattagagtatttagctctcttaaggt

SEQ ID NO: 379912 - DNA, 203 bp, Zea mays
cctcactgtccgtgtcgctctctctctccccatccatcagatccgcttcgtcatctcgcttgcagtccaaccaagtcctacgaataacaccacggcgcaacaactcgcaccaccaccgccgcgcagtagctagctaccataccagctgcacgcctcagtgctagcttcgccgggcgggggcggctgggacaccagcagtgcgt

SEQ ID NO: 379913 - DNA, 148 bp, Zea mays
gcggcttccagcgctcagcctccagctcccacgcgcactccacctcgtccatggccgccgatcgagtccctccccatctcctacaaccggccgccctgctcgttctccctagctgcgatgtggagctcgccctggacgatcgtctttg

SEQ ID NO: 379914 - DNA, 219 bp, Zea mays
gccgcggatggtaggttccgcatgtcccgctcgactacgctcccgcttcaccctgtgcatgccgctagaatcgccgccatgacaggatgaggtgcggcgcgtcggcgcagaagaggtcccaagctacaagttcggtggcggtgagaccgtgctagagattgtgcaggccagccagttcgctcgggacatcgtgacggctgccggcgttcagaatcgata

SEQ ID NO: 379915 - DNA, 219 bp, Zea mays
acctatcggcttgctagttggttaccataccacttaaatatctgatcgattatatatatagatacagacagagagatgttgcgtgtgtgcagcagtacagtgtacttttttttatatttagcatgtttacgtactaataatacgactagtgtaggtatttaatttgctttgtaaagtggtactagctgtttgatcacagacaaagcgatgctaaatata

SEQ ID NO: 379916 - DNA, 212 bp, Zea mays
cacaaagcatagctggtggtacattggttccaatcagttggactgagatgcaatgtgatttgaccggtcaaattgagcaaaggaaagttgcaaaggtggaatagatgtgctggccctcctgataaatgttggtggcggtatacaaattgtggaccagtgataccaggtccttgggcggactgcccaattctgcgacgtccaacttcattaca

SEQ ID NO: 379917 - DNA, 216 bp, Zea mays
cccacgcgtccgcggtcccctccacccgggatccatgtggacgtatgcggatgcggtgagcaggtagcatccactgcactctgcagacgaggaaggttgatgaccgatatatatggggatggcattgccattgccgccggcgtcacaggggttgttgcgttccaggaggatgagcttcctcgccacgccgccgctgtcgctcaaggcagccggtgg

SEQ ID NO: 379918 - DNA, 219 bp, Zea mays
gcgcgatgagcctttcccttgctgctggtaatccctaaacaacaaacactgagtgaacacaaccacccaatctgcatcgaagcaaagcttttctactatccaaatcgactcccttttctgttgcttccgatggacggtgctgcagctgcaggaggaagtagggaaccggcggccaacggttccaaacctgaggagcagcagtttgatcccagccgaatg

SEQ ID NO: 379919 - DNA, 240 bp, Zea mays
ggaacacaacacactagggtacggagagggacaccggcgccatcgcaagtacacactcggattggggagcgacagatgaggcgcatccctgttgcctcgccatctccgtgactctctctctctcctctcccggtgcaagctagcaagcaagctatgcttggacaacgacgacgacgatggcgtgctgttctcgaatctggaccaacgagatggttgacgagtacgataagctagttctca

SEQ ID NO: 379920 - DNA, 238 bp, Zea mays
ctccaccgctcacctcttctgcaccccaccccaactccgcccccatgaatatgatcatcagatgcggctagcatcatatctcgcctccacttcgtcacctcctcgccattctatcccaccagctgcatatatccctggtgtgtgaggtcagctgttttagctcagcgcgcgcggcgtggcagcaaaggaagcaaggagggagagcagcggcggcggcgtacatgcggcggtgagagcg

SEQ ID NO: 379921 - DNA, 237 bp, Zea mays
ccacgcgtccgcctcaagatattctcattttctcaaaatcagcaaagaagcgccagactacaggagatcacattgatgattctgagaaacttcgtcctgaggaactaaaccaacaaacaatcgaagctctggtcgcagagagtaacttgaaaatggagattcttccggttgatgatttggacattgcgttgcatgattttgtgaacaaggatgacaagatggcattttattcatgtt

SEQ ID NO: 379922 - DNA, 188 bp, Zea mays
  unsure (1)..(188): unsure at all n locations
ggacctggnctgttgaactcatgtattaccttgtgaagtccgtagtgtctggatactacctgaccgtttttttaaagaaacagcatcagataacgaaacggtcaggtagaaaccagacacaacgacttcaaaggtaatacatgagggcaggacgcccagaagcgcgacaaggaggccctcagattcga

SEQ ID NO: 379923 - DNA, 230 bp, Zea mays
gcccgaaccctcgatccgtggccccgtcgtgcagctcgatttggagtgtgaaataaaaactatagctgaagctatgaatgctatggaggtggacgatgatgtcgcgacttgagatcttcaaacaagcatggattgcttgcactattttatgccatttgaaaactaccttttatcgtaatagtctattgtgttgaactatcttgtgctatgttagactcttgtgtgatgtg

SEQ ID NO: 379924 - DNA, 232 bp, Zea mays
atcaaataccgcgcttgcaccccgcctacccatcaataatctagccaagacctcgcaaccctgcacccgctacctcgctgagccagcaaagacaacatagcatgaggatccggatgcctaccattctagcgcgacacctgttgcctcgctgatgcacacggagatctgcccttccccataccacgaggagacacgccccctcacgcttagcctaggtcgacagagtactgta

SEQ ID NO: 379925 - DNA, 219 bp, Zea mays
cccttgcagaaagcagtacactgtggttattcttatgccaaagtcatcctgttgggcgtcagtgaagtcaatgcttagctggagttctaatggggtcagcagagatgctaagatcctcgctggcatggctggtgcactggtgttggcagtgagtttgtggaggtactctcgtagttcgctaaaatcctagtgtttgatacaacttgacgccttttgggg

SEQ ID NO: 379926 - DNA, 239 bp, Zea mays
ctggcacttcaactgtggtctaaacagatttgtggcagccatgtatgttacatattgatgatagcataagtaagtttaggctttcactgtgctcatcgttttattttttcaagttgccctaagttttttgcatcttcattaacttgcagctatgcaatcttctgaaatcaagggttcaatcgcctgaatttctcgagaagctagatactcttcagaagtcagtatatcaacatggtgca

SEQ ID NO: 379927 - DNA, 227 bp, Zea mays
cactttctgtaataactgattacaatctagaaagaaacgttgcccatagatcaaatgggagcttgaacgctgaagccaaataacagatctgatttggtgagcttttatagaggaccagagaagaccgagtaaactattccatgtggtgatgtggatttcagtttctacttatgcagtaacttccttgtcgccttgatctttttcttcctgcctctccaatggttgct

SEQ ID NO: 379928 - DNA, 101 bp, Zea mays
  unsure (1)..(101): unsure at all n locations
gtnacgtgtctactgcaaccctctctggtctctggtcgtcctactttcttcgacagagtaatgtaacttgagtcgtgagcgcagtggtgcatccaatccac

SEQ ID NO: 379929 - DNA, 226 bp, Zea mays
catctgctggcctaaagccaggggtgcctgttattctacgggagctggagccatcctcagagatgttcaagcaaggagcgtcccttcgagtcacaggaaggagttttactctgcttttaagaaagcaaatattcaagggtacaggcaaagctgggacaccatctcacaagcaagtcaaaggcctctaacaacagcaacgacaagctagatttctattacatcagac

SEQ ID NO: 379930 - DNA, 165 bp, Zea mays
cccacgcgtccggtctgggtcaccgaggctgtgttgcctgtctgcaatttcgggcaagcctaggggcccaagcggaaaaggtaagctgactccggcggcggcggcggcggcgatcatggccgcgcagagggagaagtccgcggacgtggcggtcgcccaagcaaa

SEQ ID NO: 379931 - DNA, 207 bp, Zea mays
ggcggatgcctctcacctggaccggattctcgtccgccgccttcgccgaactcggcgccatcgtcaggctctcgctctcttctggtgtcatgctctgcttggaattgtggtacaacaccatacgggtgctcctcacaggaaacataagattgcagatttccacttgacgcccttcgatatgcctaacatcaatggttgggagatgat

SEQ ID NO: 379932 - DNA, 179 bp, Zea mays
cccacacgtccgcccacgcgtccgctgttcaagtgtaagtgttcagtacccaatttttaatcatgtttagtattactacatcgtggttcatgatgttcacttggaaaatgatgacctttttttgttctttggtaggtggatcctgtttcccaccaagtcaaggtttgtgaattcgggag

SEQ ID NO: 379933 - DNA, 208 bp, Zea mays
tctcgtagttgcatttccagactaaccctattctttctgacatccagtttagtttgttcattcttcatatgccgtgcggcttttcatcacttcatctgccagcatacttgccagttctcacagcattgaaagcaatctgttctcccaatgtagcggtttttcccttgtattattgtatagcatatgctgctagaatggaaactccaga

SEQ ID NO: 379934 - DNA, 217 bp, Zea mays
ctgctgtcagcatcagtaacagcttcagttaactcacggcagtcatcgagttctgatattttacaatagccctcttggaaatactgggtaaacgatgacttgcttggaggagtttttgccttcagtgaagaaggttgaacttactatagtgccttgagattgagatacaacagaaaaaaagtgctcaaaacatccagtgtgccatagtatgtagacg

SEQ ID NO: 379935 - DNA, 219 bp, Zea mays
attaccaccgtatcatgattcatcaactctaacatgcgtgagcaacactatgcttctccacttcaggacatggatatgactcttctatgtttaagccattacaactgggggaatttatgcaaaagattttttgagcattaacacacaaaacgagcgcttaaaaggtgttttggaaggaccacctccttctggaaccatcgagggatatccaaggaggcg

SEQ ID NO: 379936 - DNA, 227 bp, Zea mays
gaggcatttgtgggaaaatgccgcctcataaccaaagtgacaagtttttgcgaacacaaaccaatttactaaacatatattctgatttctatatttgtagtatatctacaacaaaatcattatgttgcaacttattagctcctagcctcctacctcttgtatatgcacatagtctaaactttactcaatggagtgcagctttgcatattcacatcggaatgtttttg

SEQ ID NO: 379937 - DNA, 240 bp, Zea mays
tgttccaatcacattggttttgacatgcttgtatcctatgggtaggcggccgttgtgctctctagtggcgttgactcacatatgtgtaagctttgatcagttggaacgattcttgggggaatttcgggataaatgaacaggccctaatgcgtctccgtgacctggttaaggcggcataatctaggcagatgtaaaaaacaagtatattgtgtacccaatagtctgtagcctgttccaatc

SEQ ID NO: 379938 - DNA, 226 bp, Zea mays
cttaaacatcacatctgataaatggagctgcccagaatgtgtaagtccattaacagagatggagaggattctagatattgaagtgctggaagcacctcgtgaagattctagttccacagagcctcgatcaaagaagatggagcgatatcttatcaagtggaaaggattatcatacattcactgctcttgggtttcagaaaagagaatattcagaagccgcgaatat

SEQ ID NO: 379939 - DNA, 219 bp, Zea mays
gcgaagggaacggagctcgaggaagcgtagggacacggggttgaggtggagctcaggagagaagtaaggcgaagagagcgagagcgtgccgagcccggcgcggaactcacctctgcacgggataatccttcggtagcggggatctccggggaggagagggggaggcgataggaggagaggacgaatggaccgggtgcgtctcccttggcgagcgaggag

SEQ ID NO: 379940 - DNA, 215 bp, Zea mays
cctcgctgcagctaatgatggcgagcaacagtgcagtggaggggaggggagtggaggtggtggttgcacttgctgaccctccgcacagcaacagtcgcgggcggtagccttatcctgttgcctatccgggcaaaggttgttctgccggtctaatcatgtttggtcgggataaggctcgtgccgtgtttagcaacgagaatacaagagcgagattc

SEQ ID NO: 379941 - DNA, 234 bp, Zea mays
gttctagatcgcgagcggccgccctttttttttttttttttttttttttaatcttaaacacttgttgagaataatcttaattttaaacttgtttccagacaaaatcttaggggcggatgaaaacaagtagacaactctaagttcacgtcataagcaacctcatgtccagactcagcctagatatagaagtagcaaacaaactactcggcagcagcaacctcctgcacagcctca

SEQ ID NO: 379942 - DNA, 233 bp, Zea mays
ctcccagatcctgcggctgttcagcgagtctgcagagagcattaccggactcaagggggagatggaggaggcgaagaagctgcttggcaggaagaataagcacctcggccagttgtggtaccgctccctcacactgcgccatgtgctatcccttttggatcaggtcgaggatgttgccaaggttcctgctcgaattgaaaacttaatggcagagaagcagctgtatgctgcag

SEQ ID NO: 379943 - DNA, 228 bp, Zea mays
ggcaccacacctcttcctcctcttcctcctcgtagcacagctagcgcctgctccccttcgtctgtgatcctgtcttgccgcagcggcaagtgccactggggctccagctgctcctgcggcagctcatgccactggatgtcccctgacgtggagaccggcgccgcgcagcggatcacgacgatggtcctcgctgcggcgatgagcaacggcagcggcggcggcttcgag

SEQ ID NO: 379944 - DNA, 236 bp, Zea mays
gtcagtgcagatcatgagaaagtagattgatgtcccagttatgctgacgattcacattttttcctcccaaaacaaccttaaaacctgacttaaaactagcttaatgagaaatctgaaaacaagcttaagaagaactgttcttgtgctataatacctacttggttaaaatacttggtcttggtcatacccctcgttcccctgggtgtattgcatggctatctgcactgtatacttgt

SEQ ID NO: 379945 - DNA, 225 bp, Zea mays
gtcttgtgttgttcggagcgggcagcagcacacagccccatcccaatcctagtcgatcttcttcccctcctcaaggaagaaaagaagctgaaccatggggaagagaaagtcagctgctaagccacctcctaagaagcggatggacaagcttgacactgtcttttcctgcccattctgcaaccacgggagtagtgttgagtgccgaattgacatgaagaatctgat

SEQ ID NO: 379946 - DNA, 225 bp, Zea mays
ggaaccatgatctcttagttaagaagttgggtgctttccaaaagaatagtagagcacaagcaagcctttctcttgtggcttaaacagtgtcagaattctttgcttggcattatactcatggagataattttttttttaaatggaaactggatggaaggaacacgctccggtttctgaagatcttgcatgatattctgctcttttgttatttccttttgattatat

SEQ ID NO: 379947 - DNA, 157 bp, Zea mays
ctcttatacttcagctgtagctgcgatggcaacgcccgatttgtgcccggtctcgccggttcggcgggacgacaagcagtgcgctctagcgtcttcgtcgggcacaattctgatagtgcattacgcggccgctgccgatgcgtacgagcagtacctg

SEQ ID NO: 379948 - DNA, 227 bp, Zea mays
cccacgcgtccgtctgaagaacaacagaatatcacaagtggaaactttagattcatcaggaaagcaagcatcagtatttcagcagctaggaaagaacacaaaagatgccctcaactcaactgaggatgcaccaggtgatggaaaagcagttagtaaatccgagcacagctcgagatctgaagaatccaaggtgcagctacagtctgaagacaaggcacgagttcctg

SEQ ID NO: 379949 - DNA, 190 bp, Zea mays
  unsure (1)..(190): unsure at all n locations
ctagctccatccaagctttctccatctagtagttccgatggccgcagncatagacatgtacacgtactgcagtaccagcgtacaccttatcgcctcctcgtcctcctcggatcaggagctcgcgaaataacgccagctttttataacgagtgcttccttccccgactgccgctactcgttggcgcgagtt

SEQ ID NO: 379950 - DNA, 223 bp, Zea mays
cccacgcgtccgtaagcccctaaagcaccagcagaacaccataggctgctctaatacacaatagcctgcaagacaacttcgaatcttggccttactccttcaaaaacacaggcattctgatgcttccaaagttcccaagcaaccaagataattagggaatcaaagccttttttgacttccttagaagccccctttgcagcactaaaccaccagctagaaaata

SEQ ID NO: 379951 - DNA, 244 bp, Zea mays
cccacgcgtccgcccacgcgtccggggagcgcacttcttctcccatggcgctcgacgcccctgcagcaaggcgccctcttcttcttcctctgcccagcgaccccctcttctccacggtgttcagagcgggagcagttcccttggccgagctccctgggagcacgccggcgctcctgctctccccttggccgccattttctccaagtgcaggcgcccaggtcaagctgcgagccctctgctccta

SEQ ID NO: 379952 - DNA, 238 bp, Zea mays
ggtcaacaccgtgaattagcatgattgctagtactgttttttatataagtatgagctttcattgttctacggcatcactgttcattagctggtggagggatgcttatagttcatttgcacctctagcctactattcaaccacgtattagccgtccgatggatcaaaacagactctggctaataattagctagctgatagttagcaactatcagttagctaactaatggattcaaacat

SEQ ID NO: 379953 - DNA, 223 bp, Zea mays
cgcgtgcatgcgcagctctgcagccccgcccgacggcgtgagtgccctgcctggctgcctcagcccacgcgcaactccacagcaccactcgacgacgcgagtctgaacagctccattgcctgagcgtctccactgccataccttattatctgtttgcgctccgccactgataatagctctccaacagactagctatttaactttctaatctatctggctctct

SEQ ID NO: 379954 - DNA, 228 bp, Zea mays
ggtactcatgagcagcgtgtcgaggccgttcgacgagagcgtcctcgtctggcacctcgccaccgacttctgcttccacttactccaggtccagggagacccgtcccgcgccaacgccaccgcccgccgctgcatcgagatgtccaactacatggcctaccttctcttcgtcaagccggagatgctgatgcccggtgcccggcgcaagctgttcagggacgcgtgccg

SEQ ID NO: 379955 - DNA, 227 bp, Zea mays
actagttctagatcgcaaacagccgccctttttttttttttttttttttttttttttttagaacacaaatttcctagagattttataagaatcagttgattttcaaaggaaataaacaacaaacagaaattctcacattcaaaagagggcctaaacggtgagctcgagtacaccagacatcacagttcattacgatccattaatcggctcacacaattacagcacta

SEQ ID NO: 379956 - DNA, 225 bp, Zea mays
cccacgcgtccgctcgcggacccgacgcaggtggcgagccacgcgcagaaatacttcatccgcctcaactcgatgaaccgggacaggcgccgctccagcatccacgacatcaccagcgtgaccaccggcgaggtggccacggccggcgcgcccatcacgggcggcgtcccgaccgcggcggggtctatgccgatggtgccgggcggcatgaagcaccaccacccg

SEQ ID NO: 379957 - DNA, 209 bp, Zea mays
cctgccgcagaccgcagtgaggcagtgtcagtgacagccagcggcgctcgtctcaggaccctgtagccgcgttcctgaggcatgccgcgccgcctcctgccggatcccaagcactacgctcgcgtgtgggtagatataccacatgaccccccaattccgcgcccagatgccgtggttcctccactagcggagctagtcggtactcccga

SEQ ID NO: 379958 - DNA, 225 bp, Zea mays
gcaaacagggctgtcaaaagggtttataatggtgaacagacaaatacaatctcgtttcagactgaatttcagcctaatctattctgggcactggaaaaggctagtgactttttttaacctccaagtactagctttgcatgggtagaaaatgaataatgtatcagtctggtcatatgatccccttttgctttctttgatttaacattgatgccccacccaaaattc

SEQ ID NO: 379959 - DNA, 217 bp, Zea mays
agttgaccagtcaggaaggatcacataaaactaggaggatgaatggtagcagagctccaggacatgccgatactctagggggacatcctgaattctttgctcgtggaacttttccgtatagaaggaaaacatgttcatcagatggaagcgtccaccttgatttgcctgggactattgtgtattatgcgttgtggtcgcaattgcccacattgagaaa

SEQ ID NO: 379960 - DNA, 248 bp, Zea mays
gcaagaggcacctaaaggcaaggttgacatgaagaagctccctaaacatgttcgtgagatgcaggaagcacttgccagaaggaaggaagctgaggagcgacaaaagagagaggaggaagagcgattgcggaaggaggaggaagagcgtctgcgacgtgaggaggaggagaggaaagcagacaaagctgaggaaggaggagaggtggaatctgctgctgccaagaagaagaagaagaagaaggaaaagg

SEQ ID NO: 379961 - DNA, 238 bp, Zea mays
aaacacacgtccgcggacggtgggcgaccgtggcggacgcgtggcagatctactgacttcttcataaaccttgaccctaaacaactatactgtttctcgtacaattgggcataactaatttcaatgtaaaggcttatgggcatgacattggtatttaactttcttatggttcaaagttagatcacacaacaacttataattccatggtgtgctaacttgaatatatgagcttatctgc

SEQ ID NO: 379962 - DNA, 235 bp, Zea mays
cgacggggagccccccatgaccctctatcggctccaccgatgccatgagagcgcaagaaggctgacccctatgactgcgaggagggccatggtggcgagctgctaggcctcctatgatagtgcgacgtgcagtccttcgtccaccccggcgagaacgccatggggcaacatggatgcgaggagtagagtgcctcgatggcgaggcaggttcatccagacaagaagaaaccacgat

SEQ ID NO: 379963 - DNA, 238 bp, Zea mays
ctcacggtgcccttcctctatctcctccctgttcctctgccccagttcgagctgctcccatggcgccgttggccagatctccctggccgtgtgcctctgcgcacggtcgcctctccctgcagctcgctctctcctccctccatctctctcaagcgctagccgtcgtggttccctccctgttaacaatacaggagggatctagagatgaaggaagaagaggattgaggaacgaggtagt

SEQ ID NO: 379964 - DNA, 187 bp, Zea mays
cagcatgaaaattctgcattacatgtacttcacatattggttttccaagctaacttttctccccaatttatggcttctcacagtgcaggtccatcaccgcatacgacattgcttttctactgttatctgggcactgcattgctattgctttagtggacaaatcgaagctaaagtgagtgctttcatg

SEQ ID NO: 379965 - DNA, 214 bp, Zea mays
tccgcttctcttttttacacattgctgcgaattgattcgacattttttggggtcttctcctcttatcattctgtttgctgcgaattccattcattctaatcgaatcgatgctatttggggcaaatttggattttctccataattgctgagttccatggaattgacgaagctctcctgttgaagagaaaatcagaagaagttctgttctacttga

SEQ ID NO: 379966 - DNA, 117 bp, Zea mays
cagacgctgggggcccggcacgcaaggagggcacgcggtggcgttccgcatctccggcgacaaggccttcttcatcggctgcaggttctacggcgcgcagcacacgctgtgcgacga

SEQ ID NO: 379967 - DNA, 214 bp, Zea mays
agaagacgaaagagtcggattgccatggacgacggcaccgtgatcatcctcttcttcttcttggccttcttcatgttcaccttcgccgcgtccctcttcttgtggttcacgatatggtggccctggctctgccgcgttatcaccctgacgcggaacctgctgagtaacctctttaccctgtgccaagccagcatggaggccgacgagtagatcc

SEQ ID NO: 379968 - DNA, 221 bp, Zea mays
cacacacgtccgcccacgcgtccgctttcacaatggatctatttactcctcaaagtgacctggacctctctgtgaacttcaatactgatgcaaatgatcagtatcctcgcaagaacaagatttctgctattaggaagcttgcacatgttctattttctcatcagcgtcatggtcgctgttatggtgtttcacctattgtgactgctagagttcctgtactg

SEQ ID NO: 379969 - DNA, 242 bp, Zea mays
cccactttgatctatccatgttagcagtacatgttcgtccatcctatagcatcatgcaggatgcaaaggtttccctgtgctgctgaatctttctcctatatctctactattctataagagtatatactactgagcatgctttaatttttctccattgttactacaatatagactactgaacatgctttcattttttctgcagggttctatattcataagcatgttgttgcaccacacaacct

SEQ ID NO: 379970 - DNA, 229 bp, Zea mays
gtgaaagtgaaagagacgctcaatttaatgagcatgtccaatttaatgcaatgtaagaagcagatctgaaatttgaacatcctgtgcgtgtgtgtgtgatgttcgcagagacgctggagccggacgtgaagataatgagcctgtccatcctgtcgcccgggcggcccgacatcgtgctgccgctgccggtggagcccaacggcaagggcgtgtggttcaccctcaagga

SEQ ID NO: 379971 - DNA, 213 bp, Zea mays
ctacatcttctcctgctacgtgccggatctgatccatctgctctacttctactatctggacctgttcaacaacaacttctcgggcgctttcccggttgccgtggtgccgcttggcggtctgctgttcctggtcctccgcttcatccggtacgctgtgtaggtaccggctccggttctcgctctcacggtggaggcgctcttcctcaacaacaa

SEQ ID NO: 379972 - DNA, 242 bp, Zea mays
ttccgctcgcccgcccgcatgctctgttgctgtcttgcccgattccttcgtccagggtacggggcgatgctgagggcgagcatgggcatggggttccaggaaggtgttgccagtgactccctcgctggcggcggcggcggcggcggtagcggcaggctcgggggccagctgagcttctcgtcgcggcaggggtcgctcatgtcccagatctcggagatggacagccaggaggatgtcgtcgg

SEQ ID NO: 379973 - DNA, 217 bp, Zea mays
  unsure (1)..(217): unsure at all n locations
gctgaaggatgatgcttggtacaggaatacccatgagccgcatcaatgtctaggtcttagcctctctctctgtaactgtagtgactgcgttatgtctgctatgttgccgatgtcgaatccttcagctaatctcatatagcttatcaattttctangtgtttgatcattatgtgtgtatgactcgttgccattattaaatgctcaggcaatcatgctt

SEQ ID NO: 379974 - DNA, 233 bp, Zea mays
gtcgtttcagcctcaccaaccaaggcatcagctgctatcgttctccaggtcaagatattgctatattgcacgtttggtcaaaactaaatttggtttaaagtttgttcgatttatttcaaaacaaattcaattttctttttctgattaatctatttcaaaacgaacattctctgtttttttttggtttctgacatctatttcaaaacacattttaactacaatgcctaggtgga

SEQ ID NO: 379975 - DNA, 220 bp, Zea mays
aggtgaggaagtcgcaggtgtcgcgggcggcgcccaggatcgtccaggcggtcaccgtggacgacgtctccggcgacctctgccccgaccttcccatcgccaccgtcgccacggagactgacaatgagtatcagcaggcggcgcactacgggtggaccggtcggagccggcgcttgagcagtgctagaatcaggacacgaggatgaacaattcttgctcg

SEQ ID NO: 379976 - DNA, 229 bp, Zea mays
ggacatcatttatgtcacgcattttgaaggtcgttcggaaaagctccactgaagtaacccagctgcctgtcttgccccgtgcttcttggggatcaccatttgcttcaaggctcattagaactgcatacccaaggccgaactatcccggtgcaattcgtgggcgactatcactcaggggtgctgcccggagtttacagtggaagcgtggtgttgctgattcaggagatgt

SEQ ID NO: 379977 - DNA, 231 bp, Zea mays
gctttgttgtcatcttcttggttggaaccaaagagccagggcatttcttgctttctatgtaatcaatgatttagaaatgagtcaatcctccaaagcattggtacctgctattatctacatctgcagtttgatagtatctgtaatattacaggagactagatggtcaagttggcgtcttaagctttacttttcagctggagcagtgctttggatattgtcaggtcttggaat

SEQ ID NO: 379978 - DNA, 248 bp, Zea mays
ccctaccctaccctcctcctcgatccatccaacacagagaacgtcccaaggttttttttcgatcccgataagcatccaagtgagaagatatgtcaaggtatcatctgaagcagttcgagaaggagcgcatgaagatggccatgctaaggcaagaagagacgttcaggcatcaggtagcagaccagcctccagcctcctaactcacgcgtgcgtttattctcaagctgcgcgcccggctcccgatccct

SEQ ID NO: 379979 - DNA, 150 bp, Zea mays
ctggaactggaaggcagaagcgcccgcacaggcacagcactactcgaagcaagaactatagcagctgctgctcctgtacaccaagcgtacgtgcaaatacaatggccaccaaaagcatcgcctcgctgctcgccgtggccctgctgctgc

SEQ ID NO: 379980 - DNA, 230 bp, Zea mays
gataaaacgaaggacacgaagaatagattgtgtcggatcggtagcagcagtgacaggtaaactacgcgaatgaatgccttgtgtttggaatcggaaatcgggtgataacaatagcaatggcaaaagggtgtggtggttcaactgaaatcatggcgctacgacatgcatgctttattaggtttgtcacagccagactaaaaggagacaggctactgaaactgaatcatcat

SEQ ID NO: 379981 - DNA, 249 bp, Zea mays
cgacgacgtgggagattagagatcagacgagatgagatgagacccagagaggcgtcgcgagtccagcggattgtgctggatggaagggaaggagatgaattcgcgcggcgagaggtggcgcttcttacgtggcggccgtagggccgaggagggggttctccttgagcggctgaaaggagaagcggcggaggaagccgcggccgacgcatccccgccgctgcgcgggcagttgttgtagaacatgaccag

SEQ ID NO: 379982 - DNA, 252 bp, Zea mays
cttgacagcttgagaataaaaaatacattcaccttaatcatgcactaaagaaagctcttggtaattctctagtcatggtattcaggattttacagaaaagcttcagcaattaccaaagtcgaagatgttggacctttttcagaaggattatatccgtgctgttacagtaagcatctttaatatgcctttcttcatattaggacatgtctctgttgttgttttgtgatggatcaggtctgcattcaggttgga

SEQ ID NO: 379983 - DNA, 247 bp, Zea mays
agggcgcgccggggaggcaccagtgcgtgcagtcggcgtagtcctggtgcctccccggcgtgcggacacgtggaatgaagtgctctactggaagctcttcttccccagcaacgatcaggtcctctgatggaccctgcatacatacgcctggaaaccaactgctaggggctagcgcaaagacaattgtgtctagatgaagaacaaagccatggtgttcaaatgtcttgttttgatttcggatatggac

SEQ ID NO: 379984 - DNA, 247 bp, Zea mays
tgtggcccaaattttgttactctaaactggagcatagtggtctttaggggaaaaaataacaatactgccaagggcctatattcttcttttgcataacctgttgaaatagtgatctcgctcctcctagctttgtctttcatttttattacttgttgcatgttcgatttatagttttaccacttatattctattattctgtcaagacagctcatttttttcctttactgcattcaaccattcatctggg

SEQ ID NO: 379985 - DNA, 219 bp, Zea mays
cccctgcctctcggctctcatgtgtgcatcctctgtccaaaatccatcgtgaatcatccctccccaagttgttgtggtcaagccggcctcctcactcacatcattgccggcggttccaggtacttgttttttgttgtacccctgtcctcccaagcctctcgccatctgacatgctaccttgacttgaggcaatgtgctaagaatcaaagaaggagtgaa

SEQ ID NO: 379986 - DNA, 192 bp, Zea mays
gacgctgggttcgtgcgcgcggaccagatcgacctcaagagcctggacgatcagctctagcgccacctcggacgccgggcggacgtgggagtcggcttaccctccgggacggggagccgctgctgcgagtccgcgatgctgggcccggatgagctgacgccgctgcggcggtgccgtgaagactgggagatt

SEQ ID NO: 379987 - DNA, 205 bp, Zea mays
atgtgccaacggccaccacacgcacgcttgaccttgcctctgcgctcgaggttggatcaggtggaagcggcatgcgcgcttcatgcgatggttccggcaatggccaagcagtacgtcaggggcgtgatggcctccgtgcagagggtggccatggcgatcgctccttctcgcctcggttcgcgtatcgaactgaagcatccgccgg

SEQ ID NO: 379988 - DNA, 128 bp, Zea mays
catgggaggcacctgccaatgatgaatggaatcaaggggggtattaaaacactggcggccgttggattaaggagccccccaattccaggagtgggggtccaactgtcaagtcggctcaaagcgttgga

SEQ ID NO: 379989 - DNA, 207 bp, Zea mays
cccacgcgtccgtctacacttacgtttaggtcggcccataagaacaattactaagcccagggtcagatagtagcagtagaatagcagttctaaaacaacgatagatcagactgtggctagtgatgatatctagctaggccagctagaagaacccaacagaacttggggtagatgcattgcaatccgcagtgacgatagtccagtcca

SEQ ID NO: 379990 - DNA, 216 bp, Zea mays
gccacgcgctgttccatccaaccctagccaccgttggtgcctcggcggcatgccctcgtttgccttcgtctccgctcggtacgccgcggatgggaggcggacttcctccgcatctccgcctcgcaggaagaccttctcgcccgcgcccccttcatcaccttctccggctccctcccctcccttggggagtccgagtcgggagcgtttcccctccct

SEQ ID NO: 379991 - DNA, 234 bp, Zea mays
accgttggaagttttactctgttgtcatgggtagttgcagattgcagataccttttctgggctagcttcaagatgtgtaattgctcttggatgccaactgctgatagtttgatggagtggtcacatacaattcaatcctattagctgggggctgatgaactgaagctataattagtttcataatgtttgctagttgtattatattggctcctgaacaatatggactccgataca

SEQ ID NO: 379992 - DNA, 241 bp, Zea mays
cccacgcgtccgcccacgcgtccgaccacgcgtccgcggaccgtggcgaggcgaacaactaactgcttccttccccgccgccgcctacaaccaacacttcacgtgcccccatccttttccgcctcaagtcaagtgttcacggtccatcctctcgagagtctaggcccttctcccgaagccgcagacgcagaaaacggctctacatatggaggcgaaaaagaaccgttggccccgccgccgt

SEQ ID NO: 379993 - DNA, 237 bp, Zea mays
gatgacacgacaacagttgatcccagctacactatctcccttatacggcagctactaccccagggttccaatgtggagaaagagttcagtgtgaagcaatgtgccccggacgagaaggatgcaaattctggtaatggggaatcagcgcaacctgattataaggatccatgggaagagtgtggttgcattctgtgggaccttgcagctagtaaaccacaagcagaactgatgatgaac

SEQ ID NO: 379994 - DNA, 236 bp, Zea mays
cccacgcgtccgctgggacaaaaatatgtagttctccaaaagaaaattgtttctaatcctgccctgaaaatgtttgctgaaatactatttggtaaagttgctgcatagctaaaaggttctccaaatgaaaattattcctaatcctgccctgaacaacaagaaggaattctatggtttccaaaaatgagaatatgttttttattcgtacatgaagcttcttatatgactccttccct

SEQ ID NO: 379995 - DNA, 242 bp, Zea mays
cttcgctctgttttactttccatgattcgttgagtatctatgcagtttctgcacgattactatgaattacgaactaaacttaaatcaaatacttcagtatggtctctagagaggaagctctgccaaccattactaataactgagaagatgttcgcgtacagggagacggtgttggaggaggcacatcggggcatggagctgcgtgagcactgccgccatatagttgacaacgatgaccgaca

SEQ ID NO: 379996 - DNA, 239 bp, Zea mays
cggacgctgggctattcttctcaagcattcgttgattttggttttccgaacatatttatttctcgtgagacatttggttggacgccacaagaagctaagctgcatatggtttctgaattcttcagtgaacaggagttgtagtggaaagttgtcgatgaggttcttgggccaaacccacggcagttatctgagatatatatgctgaagcaaaaggcgaatagcccagaagttcttcatga

SEQ ID NO: 379997 - DNA, 132 bp, Zea mays
gtttcagctttcattgactgatgaaaaaggtagtacaagaaatgctatagacatggattctaatcgtgttctaggactagttattagggttttgatggattggggcgagaaagagccagggacgcacaatat

SEQ ID NO: 379998 - DNA, 124 bp, Zea mays
gtatgaagctgtatgggcgttctgcttccatgatgtaccatgcgataagccgaagccctccaccgcaaatgatgggctatcgtgatgactatcaccaccgtgatcgtgacgagtaccgtggcgg

SEQ ID NO: 379999 - DNA, 142 bp, Zea mays
atcatctcatgcaagctaggctcgataagtagttgaccccagcacagcttgctcatatggttcatggagagccacaagttgttcaagaatattaattcatgaaaggaatttccaacctacaagttcttggccaactccaaat

SEQ ID NO: 380000 - DNA, 217 bp, Zea mays
agcctaagcccaaggtccctaatggaagtgaagctgatgacactgatggcgcctctaggtattgtttcttcagatacagccagatgatcttgagttcccacgtggtagcttatatctgttgttttgctttctcatgttatgtttaatgacaatcttgaaaatcgtatcatgcagagttctagtttaaatttgttaatgttggttgcttcagtattga

SEQ ID NO: 380001 - DNA, 174 bp, Zea mays
aatcgacagagaaactaggcgtgggcagacaagaagacatcacaggaagacgcccgttctgttaaccgaaacaagaactctgtgtattcctgtaccgagctgtgcatgttttttttttctttccatcgtggagaatttaagttattatccgtttgctgcaaggtttgccgtctc

SEQ ID NO: 380002 - DNA, 164 bp, Zea mays
gaagcctattactaaaagtttcacggactcgcttagtgagcttggcaatttaaatgtattacagtattgacaactataaggattttggtctgtattatataaatttaaggtaccacaacttaatgttacccatgattccctttttcaacctgaacacttgccac

SEQ ID NO: 380003 - DNA, 158 bp, Zea mays
aagaattcaaggtttgttatcaatctggatccaaaatttggattctcacttattgagatgtactatgccatttgctcgtatatacttagtaccaacaatgtggtgcttcatgatgtcttttggtttgagctgttaaatatttcttaggtccttaactc

SEQ ID NO: 380004 - DNA, 160 bp, Zea mays
cgccatttaggataggcaacggccatgcttgccatctgagtcctgtatatattggtacccacttcttgtactcgtggtccatatcgatcgactccgaaacggagctgatgaacagcgagtacaagaagatgtacgccatttaggataggcaacggccatg

SEQ ID NO: 380005 - DNA, 244 bp, Zea mays
cacaaccctcagtctgttattttatgcatgatatgattttgagacaagttattatggccacccagccacttgccgcaatcaatccctgatatatttgttacaaatgatttgagaaaagatgtgagttttcaaaagaaaatgcttttcaaaatgtgtatgatgaagggttttcacccttatcacctttgagtagggatgatcagggactccctggtataggggagggcctaaggtgatggctcag

SEQ ID NO: 380006 - DNA, 244 bp, Zea mays
cacaatgcagatgaccaatggatgaaaaacatttggcgtgaatacttcaacagcagtgtgccacaagtggtcatgtatgatcctgcactaagaactctctgcctcaaagctgacaggtgctggtggaagtatgctacatgaccacttgtggcacaatgcagatgaccaatggatgaaaaacatttggcgtgaatacttcaacagcagtgttgtgtgtgtgcaatttttaattaggtcttggaca

SEQ ID NO: 380007 - DNA, 240 bp, Zea mays
ctctcgcactaaacaattcgggaatctctcttctctctgcccgttaacgttactcgctcgcgatcgcgactgcagaggctgatcaaggccggcgccacgcacctggtggtgccggggaacctgcccatgggctgctcgtcggcgtacctgaccctgcacccgggccgcaacggcagcgactacgacgccgccggttgcctcaggacgtacaacgacttcgcgcagaccacaacgctgtgc

SEQ ID NO: 380008 - DNA, 234 bp, Zea mays
cggacggtgggcggacgcgtgggcgcgatgcctcccttcccggcggcgaccaccacctcccacctcgccctactcgtgctcttatcatcttcctcccttttcttcctctacaaatccctccgcctccgccgcaaaccgtcccccgcccgcactgccactcctacccttctcttcgcctctgtaaccggcacctccaaaaccctcgctgcgcgtctctccgcccgactgaccgcc

SEQ ID NO: 380009 - DNA, 228 bp, Zea mays
aaggaagtgaaagctccatgcgatgctagccaagtacttgacgtaaagcctgaactatggtctctttatcattcttgcgagttttgagctgactatagttttggtaagcatcgtcgctgtcgaaccatagttaatgcttggttccccatccgatgttaattccttgatgttaatattgtgtgttcttgtgtgcgatcgaggaggagaaatctgaggtcaattagtgaa

SEQ ID NO: 380010 - DNA, 201 bp, Zea mays
gcggaggatccagcaacggcggctcggccaggaaccacgcgcggcgcgacgtcgacgtcccgacgaggaagaagaagagcggcgggggcggaggagggttcttccctcagatcgtcctctcgctcggcaacaggcggaagggcgcgccccatagggcgccgctcgcgtaacggacctgcatgcacagatgtcggacggact

SEQ ID NO: 380011 - DNA, 237 bp, Zea mays
gctgaaactagaactgattcaatgatctacaagctggagataatgacaattgaactgttttccatgtatggaaagcagtttaagattgatccacaagattttcaagattcagaaccagatattcttgcaaattctgcttcatcgataatagaacggatcaaagaaaacagtgatcagtgtgccgcggctctcaggtcgctctgtcgcgggaaaaagggcctcactgtcgaggaggaa

SEQ ID NO: 380012 - DNA, 189 bp, Zea mays
atgaatgatcatgttgctactttccaatatttatttatattcgttgcaagcgtactatacctgctatatattattataggagcaatttatctgcccatgtaatactatggggccaagtccaactctagcatctcacaaacatgttcccttcttgccctagcggttcttgcgcaaagatgatttctccag

SEQ ID NO: 380013 - DNA, 221 bp, Zea mays
ccgaattcccaggcaggcaggtcggcgaggagggcaggaagaccgaagaccgagccgtgcgggggctcgggacgggaaagggacaggacctcaaaatctcagatccttcctgcccgcccgcccgtgcccgtcgacgcgtcgttcttgccggccgcgccccacctccgccctctcctcctccaggctgcgcgatggtgctgtgggtcttcggctacggctcc

SEQ ID NO: 380014 - DNA, 185 bp, Zea mays
ggcctcggagagatgacgacgtggacggggccggcgacgaggtccaggagcttcctctgccggagccggcgaggcttgccttcgccgccgcggttggggcgccgcgcactgcagttgacggcgtgatgactccaaaggatggtgaaggagacatgcctactaccgctaccaactcagcagcaaat

SEQ ID NO: 380015 - DNA, 99 bp, Zea mays
ggtgctggtcggcaggctcctcctcgtcgagctcttcctccgctacgacacattcaccgccgaggtcggcaaggagctgctcggcaccagcgtcatctt

SEQ ID NO: 380016 - DNA, 236 bp, Zea mays
cagagtgtgagactccacaggatgcttttattcaaaaaactgacatctgtgaaggaaaagtcccttgggctcctcacccagaattttgtcaagctcttcttcaccatgaaggttgagacaatctcactttgacgaaggtgcaaggcttctccttggagacgaacatgtagagagcaacatgagaagttagcgcatgcattccttttgtttagttccatgtttgtgttaaatgcctt

SEQ ID NO: 380017 - DNA, 233 bp, Zea mays
cacgcgttgcaggcgttgaacgagagccgcgccagctgcacctgcccggcgagcaagcagcagcagcggttctccggctgaagcaccggccgggccggcagtccccatcggtccccggcggctgcgtacacgctccactacacagctagtgcagcaaagatggacccaccacaaggcctggacatggacctgactgagaccgagatagagaggaacaccgccatcgtctgcag

SEQ ID NO: 380018 - DNA, 232 bp, Zea mays
ccaggtgctacacaatctgtactaacggaggaaattccttcttgctcaacatcaccttctacagccaccggaaatcatttggcatacccaatcattggcaggaacgagcattgcaaggtcaccattgagaaagttcctcaatcgtcttctctgatgtcaattccaacagctggtgaagctgtaacaactccaataatggcgaaggaattgtcaaagttgaaccataatctga

SEQ ID NO: 380019 - DNA, 135 bp, Zea mays
ggacctgggtttattaaatttgcttgtttggtttaaaaaacttcattaacaaagctaaacttagatagttgggcgaccataaagtaccaagcttagctttgtgtaatgaagttattaaatttgcttgtttggttt

SEQ ID NO: 380020 - DNA, 239 bp, Zea mays
gacataaccgcacgccttcccgttgtccatttgctccacgggccagcctgccggcgccgccactgcaaagtccgtacacacagacacacaacgcacgtcaccgccatgtctgccgccactgcttgcatgcccctggtccttgatccgtctcctctccatggatcggcggcaatggcagatgccgttgagaggcggcacccggtggcatggagaccaccaagaccggttccgagggaacg

SEQ ID NO: 380021 - DNA, 235 bp, Zea mays
cccacgcgtccggtttaaccgtccaaacctaagtacccggaatccctttttgtcttcattgcatgtttatgtcacactctagaattacccttcctctttaggatgctctgttactgtgaagtataggaatctgggttatgagttgctctctttaggtttgttccattttttattaagtttatgtatgtattcatggagaagtagggggcggtggggtttcaggagcagaagaagc

SEQ ID NO: 380022 - DNA, 237 bp, Zea mays
cccacgcgtccgacgagaaggacgccggagaccgagaagcaatctctccgccccccggccagccgaccgaccgaccgacccatggaccgccgtcctgctctcgccgtctctccgcgcccgccccgggtgccccgcccgcccctcgtgccagcctcctccgtgcaaacgcctccaggatcgatgaagaaggcggcggctccgatgcgcgcgtccgtctgcgcgatcccgtcgccggtc

SEQ ID NO: 380023 - DNA, 240 bp, Zea mays
gtcgtcgggccacctcgcactcgcgcgcgcctcaaagatgcacaggcagctcagcctctccgccagcccgaagcagcagcagccgcctcctgacggcaccagcaccggcggcggcgacgcggcggcgaaggcgatggcggcggcggaggacgagtcgtcggcctcgcactccagctccaaggccagcagggggtggtcggcgagggacgagagggccatccacctcgtcccgttgctcac

SEQ ID NO: 380024 - DNA, 257 bp, Zea mays
cggtcggaatccgggtcgccacgcgtccgcagacttcaagcaaagcagactggcgaacactatgggttgacgggaggaacaaccccaactgggttatatctcagctggcggttttggactcgagaatgagttcgctgcaagacaatgagaggaaaccagtctcctatatgtatgctgacgagttcatgacattggacggcaaccgatagtcgttatggaggagggaagcttcgctcgtgccgattggctggctgtta

SEQ ID NO: 380025 - DNA, 232 bp, Zea mays
ctccaatccttcaatgcatcgtataacgacctttccggtgtcgtgccagagaacctgaggaagtttccagaatcttctttccatcctgggaactcaaagttagaatatcctgctagctcgtctggatctggcagttccccatctgggtcagcaggtggaaaatcactcagtacaggtgctaaagcagcaatcgtagcagctagcattgttgttcttgtcatcctcatactta

SEQ ID NO: 380026 - DNA, 234 bp, Zea mays
gtaccaagaattatgccccccttctttagaacgggcataattatatcagggtcctaatcagtactgtggtagattcagcaacagttccagtagtagacctcagtgcttggcagcaatggcactggggatctgcaatcatgaggcagtttcagtttgggaactggagtggcaagaggaaaaaggctggaacctgggctttttaaagaggctaatcagtactgtggtggattcagc

SEQ ID NO: 380027 - DNA, 237 bp, Zea mays
aagagctggagctggaaccagagattcttccagacatcactaggtgtatgtctacctcaggcaagagggatgatgcaccaagcgccaaacggctgaagcctaagcttcaagaaccgaagctcttcaggttcaggatttgtctaacactgtcaaagggagcccttctctgtgcagccatgaagctgtgaagaacccagtgaaaatattcactgttgaagagaccaaaaagtgtcatga

SEQ ID NO: 380028 - DNA, 190 bp, Zea mays
cccacgcgtccggcgccttggtgtcaaggctactccgtctgagcatatcattgcagtactgcaagcgtcagatattttcagtggcatcaggaaatggagcaagttgcaattggtcgccatgacaggggtgatggcatgtgtagttctggtagtcccttcttctgatgcagtcgatgctcaagacatgcac

SEQ ID NO: 380029 - DNA, 232 bp, Zea mays
gtcgtgagcatctatgttcggaagatggtatacgattcctggcccaaacagatcgaagttccaaggaagagaccagagcctactgaggatccagagccaaagaaagagcatgccaagggggttcagcaaaagaagagaaataactttgtgagagatactgaggatccagagccaaagaagagaccagagcctattgaggatccagagccaaagaaagagcatgccgaggggg

SEQ ID NO: 380030 - DNA, 100 bp, Zea mays
gtgattgattatctcaataagtatctggaattgtttatggctgatcatgatgcttggagagaacttgctgaaacatacagttccttacaaatgtacaagc

SEQ ID NO: 380031 - DNA, 100 bp, Zea mays
catcaagacactccactgttcactcttgtgctgctcctaccaatggagcaagagcatctccacttggcaatggtccactcgttgtattcatcactaagtc

SEQ ID NO: 380032 - DNA, 100 bp, Zea mays
cccacgcgtccgaatcaaggtagcgtacaccgctgcagtttctagagccctctctgccactcgtgatcccactagtcacaatgcctgccctcgccaagcc

SEQ ID NO: 380033 - DNA, 100 bp, Zea mays
gaggatattagatggttggctcgaggaccactagagattgcacgaaggcatagagcctttaacattcgtgggttcagatttcgtgccaaacggtttgata

SEQ ID NO: 380034 - DNA, 218 bp, Zea mays
caaacttcagcagtgcgtcaccaacagctcaaccttcctgtcagactccttttttagtaggtaatgttgtattcatgccgtgctgcagtatattaggatctgtatcttcttaagaaactatgatatgcttggtcccttatagaaagctggaaattatttaaggttcgtttcatatttgtgcatccttgatggtttttagtttgtgttcaatgtcacat

SEQ ID NO: 380035 - DNA, 230 bp, Zea mays
gagccactgcctgccgagccggaccgccgccgccggagcgccagagcaacaccagcagagcactgctgcagccgcggactgagccgctgcccgccgagccggaccgccagaggcccagagcagcgccactgaggccacagcgacgtttgcccctccgttgtccagccgtgatttgaggtctcgtgggaggaggtcgccgtcatcacctagtgtgcggcgctcggccccgg

SEQ ID NO: 380036 - DNA, 213 bp, Zea mays
agttgtacgagagacacctgtaggttgatcaggttcccgatgctatctggtatggagccatggagctcgttgttggccaggcccaagccagacagctctgtcagtttcccgatgtgtgcggggatagttccagacaacatgtttaatcgattctgtgatggattgcgggatttccccgtttaatcggttgtcgcggagatcaacgaacgagac

SEQ ID NO: 380037 - DNA, 215 bp, Zea mays
  unsure (1)..(215): unsure at all n locations
gttgctctagatccgttcatcctggtggttttgtgaggtcgaaagcggcgagcgnattagaagatgctggacaagctgtgggacgacgtggtggccgggcctcgcccggagacgggcctcgagaagctccgcaaggccaccaccgcccgctcgctcgtcatcaacaaaggtacttactgagctatactgctgatcgtgtcggggatcgggatgaa

SEQ ID NO: 380038 - DNA, 218 bp, Zea mays
gagaacatttcaagtgattgaatttctttaatatttggaatagtatatttattttgtatcaatagttatgcctatggatacctttaaagattgaaaactttaccttgaaagaattttcagagcctcctgatctttgaacaggtaaagatttagtaaatcactgtcacactttcttcataaattgtcaggtggtttactagctttagctttcacctttc

SEQ ID NO: 380039 - DNA, 187 bp, Zea mays
  unsure (1)..(187): unsure at all n locations
cacaggaggatattgagaatataagagaggagttgaggatagcactacttgcgttgaaggcataggagttgaaagttgaagccgacaaggagtagcgttctcngcagccactgntatacaagaaagaatatgatgaagttctcattaagcagggttctgacaaggataatttgatggaaaatgctga

SEQ ID NO: 380040 - DNA, 220 bp, Zea mays
gtaaagcttgtacaagagacaagagcataaataaagtaggtgtgtgtcacaactctcaccttgtatacggcgccaggcacggccatgctgccgcaggcttccaagaagagcctgtgctcgtcctcggtccatttctccctctgcttggatatcgtgtatggcttgcgtgcctaaacggcaagtggccaaaagtgtgaccttgggtgagaggaaaagaaaa

SEQ ID NO: 380041 - DNA, 222 bp, Zea mays
aaagcaaagcaaatcaaagcacaacgagaggtgggagaaagagagagagagagagccatggggcagtgttcgtcctcccagcacccagaagcagagcagcagaagcagcagaagcaggctgcctgtgttgacatccagaaaaggtttcttcaaactagtgtcttcctggcatatatatatagtcgagcgactcaaaccatgcatggtgggtaaggttttctt

SEQ ID NO: 380042 - DNA, 212 bp, Zea mays
ggaacatgcttgaagaattatgattacatgggtcatggaaatgactatggtaaatcagaaaagaaatggaccaccgagctacctactgactcacaccttcttctgtatctgtttgctgctttccttgaacatccaaaatggatgcttcatgttgaccctacctcgtactctggttcccagtccagcaaaaatcccttatttctgggagttct

SEQ ID NO: 380043 - DNA, 138 bp, Zea mays
ctacaccacacagagccgcagcagactcgcaagtgatagtagatggatcgtctgccctagtggagccggagcatgagggagtactggtcggaggcctgcgggcttcgcgcggctctgcgggtcccgcacgtgcggtcg

SEQ ID NO: 380044 - DNA, 195 bp, Zea mays
gagctctcggagctggcctccgcggtggagaccgggaccgggtgcctgtcctccaccacctcctgctgctccacctcgccttccccgatgcgccaccgctccgccgacagctgcgtgacgtcctcctcctcctcctcctcggaggccgagagccaggcccccgccggcgccaacacgtgcgctggtacgcgcgac

SEQ ID NO: 380045 - DNA, 221 bp, Zea mays
ggcatcacagttcaggtccgaggactagtcagtccatcgcgttcgcgtccacggtcagttgccggcgccatgcctggcgctgctcaggcgtggccggctggggtgcacgatcggcgacggcgatgtctcgcgaggcgcgtctcggagtcggagtcgagggggaccagccgagggagagaacgcggccgctgacggcggcgaaggggtcgggttcaggtcag

SEQ ID NO: 380046 - DNA, 105 bp, Zea mays
ccactctagtcattcagatgccgtcactcggtctcgacaagcacgagaccgcagcagaacgaggatgctggccatcttcgagaagcaggtggcgcacgcgccgca

SEQ ID NO: 380047 - DNA, 109 bp, Zea mays
gatcttaaaggcactactatatgtttctgtaattgttaattttagtagggtatagtctcaccacattgttattctccatgttagattctatcgatcgatgctgatgtta

SEQ ID NO: 380048 - DNA, 103 bp, Zea mays
agaagatttccagtgtggaggggttgtccagcgttaaagattgtgactttgatcaggaaaggaaccaagccattttgcttacttcagaagaggcaagtatatt

SEQ ID NO: 380049 - DNA, 129 bp, Zea mays
gtgtaaacaaaacctaaatgtcatgggtgttgcatcatgctgaagcatatatctttgtctgatgtcgtggttagtcgcgggttcgtctcgtcccgttgcggatttcggttcccgatcggattccgattg

SEQ ID NO: 380050 - DNA, 224 bp, Zea mays
ggcagcgtagtccatggccatgatgatgtgtctccagcttgagaaggccgaggtccaaatggagctccaccagttccactgagttttgcttaagtcttctggatggcacactcctgtcgtaccacaaatcagaaccaatgcgtcaataggcaccgtagttgataataatatctgccacccaacagaatttgatttcttcgtgtgcatccatgctggggccaagg

SEQ ID NO: 380051 - DNA, 184 bp, Zea mays
atgaagttcgtcattctctgaaagcaagctttccgtctttaagtggaactcctgctactttcaatgaaaactcctcatctaagcaagtgtagacctgaaagaatctccaccgctggaatatactcctgctccaagtgaagttccatcattaagtgataaagaatctaccaatgctgataatgtt

SEQ ID NO: 380052 - DNA, 202 bp, Zea mays
gaaagagtagatttgagtgcattagtaaatgatcaaagttgtgattttactagattgtgtaaatatagtgcattagtaaatgatcaaagttgtgctttgaggactgttgattcaaaaagcagtacttttttttagactggaaagagtagtagcgaaatccaaggtcctgaacttatgcattgtttagcacacagagagctaa

SEQ ID NO: 380053 - DNA, 225 bp, Zea mays
cccacgcgtccgatccaaggagaagaaagaggagaggctaaggaggaagtcagcaggtagcaacccgacgccggtagatctgaccccgtctacctccttggaagtcaatctttcggtgccaccgcctccagctcctcccccagttcttcacaagccgaagaagttggggtccctgaagccgaccaggaccagaccaagcatgtcgccgtggaggacgccctgctg

SEQ ID NO: 380054 - DNA, 177 bp, Zea mays
ggacgctccgcccacgcgtccgcacggaaagatatggaaatcgatcaactcctgaagaacaaagacaaatctccaggttcatcaatagatagaaatgacagtcgccaacagatccggcgactatcagggactggatcaagtgaagccgaatgtgaagataacatgtctgaggatggc

SEQ ID NO: 380055 - DNA, 236 bp, Zea mays
gggcggcctcgttgcaacttgcagagacccagtcctctcgctttctcaccgcgattcgcctcgcttccatccgattcgattcgggagctagaggagagagaggagaggagaggtatggtaatcgccttgagcgtgctctgcttcctgcctcttcggtcgcctccagctcgctgttcattcccgctccgcccgctgattcgccggatcgggccgtggcagtgatgccgctggctgag

SEQ ID NO: 380056 - DNA, 188 bp, Zea mays
cgctacttcgattagcagttgcccgcatccacgctgaaggggaagccggccgagtcgtcgtcgacgtcgtggactgcgctgttcggtttcggttgcatcagctcttcccatgtcgaccgtactggtgacggcccgggcaatgtggcctccgtcagtgtccaggctcccgcgtgaccatcaccggtgct

SEQ ID NO: 380057 - DNA, 216 bp, Zea mays
tgttgtcatacttgtccctcggcctcctatattttctatttttttggtgtttctatcttttagaaatcccttactcttgtcacttgtatcattcatatttgtattcactgatccccagtatggcaaatcaacaacccctctgctattgctttactgcatactccagacaataacactaaccatggattcatatacatgcaatggaaataattataa

SEQ ID NO: 380058 - DNA, 232 bp, Zea mays
gcgcaagaagccatgaacctgtgcgaagtcaaggtcagcattcattgtacacgttccatctcgtgtacattgtacttattactcccccctgtccccgaagaatctcgtgtactttggattgaccttaacatgagcaagatgaagttggtttatttaccggccgttacaccaacgtttcacttacattcgcgtggtgtgcagtcagtatatcggatgaggagttgaggacatc

SEQ ID NO: 380059 - DNA, 99 bp, Zea mays
cccacgcgtccgatgagactgatataacttttacggtcctgttaaatatagagtgtgctgcactgatgctcctcatggctgtggctacatggttgacac

SEQ ID NO: 380060 - DNA, 226 bp, Zea mays
cccacgcgtccggcagcgtttagatgccatgccccgtggtattttcgttaataaaggatcaagtgcttctcttgttgcttcttgcaacagtagtgcaactgggaagttgtctgccaagattttggtggcacccagttcgtctcaagttggtgcaaagacttccaggactgctcaggttacaccgaaaagagcagcaggacctaccagtgtaaacaatgtgtcacac

SEQ ID NO: 380061 - DNA, 200 bp, Zea mays
aaggtaatctgaatgacatatcacataactctgccatgggtcttgtcagaaaagtcctcgacatggaagtctaacgggccgaagtaaatatagtaccatgggaaattccgaaaaggtccggacccaggcgaccggaaaagttcccaggggccaaattgggggtggccaaaaaagcgaaaagccttaacccggtggtaagg

SEQ ID NO: 380062 - DNA, 236 bp, Zea mays
gtataaagtaacttccatgaaaaggtttatatggtctctggaagatgtaatccacagcaagctgctctttgcaaagttgcaagccaacttaggattagctcctttaatgcctccctttttttgcattctgaaaagttcatgcttgagaggtgttttgctgtgattttttttcttctttttgcacgtagtccaaatttgagttataatccaaacttacccaaacgataccgtcaaca

SEQ ID NO: 380063 - DNA, 203 bp, Zea mays
acaggaaacatgctgtgctggtgcagtgatgctgatgcaaatagtaggctgctctacgtatgtgtttttgtccctttttgggatgtcctgaaaactcatgatgtatagcacggtagctcctgcctacttggtagcaggacctctctggctgccacgcatgtttatgcactttcctctttattattatatcagtctattattac

SEQ ID NO: 380064 - DNA, 107 bp, Zea mays
ctcacgcgtccgcaatgcctcgcagaaccagcaatgatagatgtcagcacaacaagctggcaagacatgcttgctagtgtggcatctaatctgggggtagcagatta

SEQ ID NO: 380065 - DNA, 229 bp, Zea mays
cagacgtcctttgagcgagacgctttcagctaaggattggcagaatgagagcgacaaaaggaaggagcgaaatatgaagcactcaaggatgtattgctgctcttgaccatagggattggagcagcatgtagtttatactgtctcctggttttctccccgtcgtcgtgcgatgccgtgcatagctgctcagccaccgcccccctccgatgagacaaccactgtctaccat

SEQ ID NO: 380066 - DNA, 218 bp, Zea mays
cggacgctaggcggacgcgtgggcggacgcgtggggtcttcaacctcgagtcctcaacatcactgtcctgacgcctcattctgcggtcgccgtcgcctagctgcgaagtgctcggtctccacctctgtttcatctccctgtcggaccaaggacaccttgacgtcgacttccttcactggactgcggccaacaccgggctccaagcatcctgactcttg

SEQ ID NO: 380067 - DNA, 230 bp, Zea mays
ctccacttcgatcagcagctgctcgcacccgtgctgatgttgaagcctgccgattcgtcgtcgacgttcgtggtctgcgctgttcgaggttcggttgcttcagcgcttcccatgccgaccgctctggtgactgctcgggcaatgtggcctccgccggttccaggcatctcgcgctattagcaccgctgctttcgccggatgacctatcactgtcgctgtcgggatctgac

SEQ ID NO: 380068 - DNA, 236 bp, Zea mays
ggaggatgtatactaagtacaagcaacacctcaacttattatcgcactacactacacctccgggacagtacgtcggcactaccagctgcttgtgtaccgtaatgaactgtagtgccgacgtactgtagcggaggtgtagtatagtgcaataataagttgcggtgttgcttgtactggtatctagtcctaggaggatgtatactaagttatgctgtgctttcttctccccggaattg

SEQ ID NO: 380069 - DNA, 105 bp, Zea mays
cggacgcgtgggagcgggctttcgcccccggcctcgtaacgtcgggtaagttttccccgactcgactgcgcttctcttcgtctccttcgcgaacccgccgtcgcc

SEQ ID NO: 380070 - DNA, 237 bp, Zea mays
gggtcgcccaggtgcttggacccgaagcaggagcagcaggagagcttcgcctcgttcgtcgtgctgcgcaacctgagctggaacgaggtcctgaagaagggcaccaagcaccactgcgaggacctgggccgcttctgcgaccagaagatgagctgcgtcgtgtccatcctgaactggtcgtggccgtgggccgagcagctgctgcagtgcttcttcgtggcgtccaagtgtgtctgg

SEQ ID NO: 380071 - DNA, 221 bp, Zea mays
gctacaagacagtggagctgaacaggcctgaggtcgagcagctgcggttctggtgtcagtactggattttgctcgcgtttctcaccgtactggagagagttggggaaagtttcgtatcatggttgccaatgtatagtgaagcaaagctcgcatttattgtgtacttgtggtatccaaagacacgggggactgcctatgtatacgagtcattcttcaagcca

SEQ ID NO: 380072 - DNA, 221 bp, Zea mays
gactagcatctgtcggtaattcacattgcatacgagaatctacttaggatcaaagtcaaaggaagaatcgcagggtactgtagaaaatatcaggggacattattttctggtatcccaatcgacatttttggtcccagacttttggttgtcctttcgactccaatagatctgcctgtacaggtccaaggctagctacaactagattaatctcaccaatgaaa

SEQ ID NO: 380073 - DNA, 218 bp, Zea mays
agcaagaaagaaccgaggcggatcgccttctgttcctcctgccggctccgcgagaggaggcactgctcagtcccgtgattcctacaggggtggaagaaagaggtggaacaacgccccggggcagagcagagatgatgcgggagacgtacatggacgtgctgccgcctgtggaccacatagccgcacggagcaactggttcccggcggcggcgcgtctg

SEQ ID NO: 380074 - DNA, 215 bp, Zea mays
gctccaccgacgaactcacctcgatcgcccacctctaccagataacctccctctactattcaagcccaaaccctaaaaccacggttcccaaatgtcgacgccgccgactacgctgctgttgctcctagcagtgacagcagtattccacggtgcgacgatgtatacgatgatcgagccgtgctctagcgcaaatgcgtgcccgactcttctaggct

SEQ ID NO: 380075 - DNA, 213 bp, Zea mays
ctcctgcgcaccgagcgcgccctgggtgaccgcgacgtcggcgtggtcatcgtgcccctggctgacatcctcgccaccgctggcggcgcgtccgaccctggcccccggcctccgcagctcgcatcgtaccaggtccgcatggtgtaccgttgcgagcctcgcggtgtgctcaacgtgtcgtaccgcctgggccccatcgtcggccagcaggcg

SEQ ID NO: 380076 - DNA, 245 bp, Zea mays
cccacgcgtccggtccagacatctaaagccagggaagaaagcgaaccgcaagagaagtaaaatgataagacgtgttgtagcctgcaaggacgcggcaaatttatcttgtttgagtgagcagctgacgtcaacatcgtccactgcatgctctgaaaccgtagaatgtacctccagcccatcagaaacggtcacatgctagtgcaaggtccaaagatgacacccagtcctccggaaacaagcacaag

SEQ ID NO: 380077 - DNA, 112 bp, Zea mays
cccacgcgtccgcagaggaatctgcagttcaatcagtttcggttttcaggatgattcatgattcctgtgttcttattttccccagtctctgggagcaggatggctcagcttc

SEQ ID NO: 380078 - DNA, 240 bp, Zea mays
caagacgtcagatgcagaaaagagacgtttagcaaaagcttcccttgcttacaattgtgagaggtagatacatttctctgcaggctatttcattctgaccattttctttctgtagaaccgttacaaacccccttcaggagcagaatgcccattagcttctgaacaagcagttaatacggatactttacatgacagaacaactagattttggtcagtatgatgtgttttcaagtgtaacat

SEQ ID NO: 380079 - DNA, 236 bp, Zea mays
cgaaagaatagagcaggaaaaagtggtttaaacagatgaagtagggtaggatggtaaagtgttactggtataagataatataatgtgccgcagttattttccaattcgagaatgttgtgttctgtgaggattgttcctttgagagcactttcttgttactagtgcgacattgccgatagcctttctaacgacagagattcgaccataacagtttctctgcatttccgtcttagtag

SEQ ID NO: 380080 - DNA, 104 bp, Zea mays
ccccagacaacaggttgatggaggctaagatgggggtagagtggtcgggatccgaagatgtcgcggagcaagggatggctattctaggatcccgaccaccccac

SEQ ID NO: 380081 - DNA, 228 bp, Zea mays
cccacgcgtccgctgttgcctttctctggacaagttagttgcatcgagatttctacagatggccattttgctttatttggaacatctttgttcaacaactacaagtgtgataacagtactgaaactggggatcatgagcttggacccaatggcactgatgatgtatcaaaaaattctgaacaatctgttcacgcgccttcaatctgccttgttgagctgcatacactg

SEQ ID NO: 380082 - DNA, 239 bp, Zea mays
gatccacctgcaatcggatgggtatgcatctccgccccagggggctcgagccgccgccagcctcttcctcccgtaaccaaccgcctccttcctagtagtacgacttccgactaacgcgctctgctcctggtcctcgtcctccgcgtgatctcttcagtctcgctccgctgcgccgttggtctgtgcagcagcgctcaggttggttcgagctggccgctcttccaatccccccaccgcat

SEQ ID NO: 380083 - DNA, 231 bp, Zea mays
gttttattgagaagctgagtgaagaaaacatcgctctgttttcaaggcgtgaagagcttcgacaacgagatacacaactgaagcagacgattggagacctggagcttgagctggaggaaacaaaaaagaagtgcggtcagcttgctgctcagctcaaggcatggaagaaccagcagcatctaccctaaatgtgaagggcaccattaagaccgaggacacggaggtacacga

SEQ ID NO: 380084 - DNA, 229 bp, Zea mays
gcttctctgaatatcttctaaatcccattctcatgtgctcccattctcatctgagattgataatgttcaaaactcataaaaataatatgaagtgcatttgctaagtttagcattacattctcttgtacatcagctcctttgtgttatactttctcatatatttgctactgtgatgcattctcattgtgccgcatctgtatttgcattaactgccgcatctgtctagtag

SEQ ID NO: 380085 - DNA, 236 bp, Zea mays
cccacgcgtccgcccacgcgtccgcccacgcgtccgcccacgcgtccgcccacgcgtccggaaaaagaagaaaaaggcgtgctgatgatgagtgagacattcacactggaagagaatttgcgggtaccaaactaccaaaggctgggactcagctgttctgtaaaatggatttgcgggtagaaacgatatcgacatcagtttttttggacccggcttgtattcaagtacttgctcga

SEQ ID NO: 380086 - DNA, 180 bp, Zea mays
aacatattacctaattaccacttatattaaatgtgttggcaaaaaaggaagaatacacgtaccttctccccctccggcaaggttgaaatgaggtctatgagtggcttgtcgtactgctggaacgaccggattgtgttggggtcagtaggatcgacgccgcctccggctaggtcaatgcat

SEQ ID NO: 380087 - DNA, 127 bp, Zea mays
attacaaagtacagatgtaagcttccacaaaacattgcttttgatagatgttgatccatccactacaaattgtaagttaattagactttttttagaataaaaagtatataacttttgttatgtacct

SEQ ID NO: 380088 - DNA, 231 bp, Zea mays
cagagagagcgcagaatggaatcgtcgctcttatcatactccatgactccatcactagactagagagagaaacccttgtaccctttgttctgtttatcccccatttctccgagtcacccacccatcgccgaacttcgagtccaaggaagcggaccaccggagaaggggatatttgcctttcccgtcgggggcctagggagcaggagagatgctgcggcggcgggggcacac

SEQ ID NO: 380089 - DNA, 237 bp, Zea mays
cctgctttaggttgcgccgccgtgcgccctcgctgtgccggccgacctcgccgcggcctgacccagtcatcgtccctgcttcatctccccgtcatgctcctccatgggcgtggtgatcacctatgccgtcgtagccatgccttgggcgccacaccggccgtcagcctcatctctctgctcgcctgtctccttgcctccctgtgctcaccacgccggacgccgctcccaaccctccac

SEQ ID NO: 380090 - DNA, 116 bp, Zea mays
cccacgcgtccggataagccaaattgctccaaggacactggtaggacgacaaacttaaccacttcggatagctcctcgtgtctaagtgagggagatagagacagcagcatgacctc

SEQ ID NO: 380091 - DNA, 204 bp, Zea mays
cccacgcgtccggcgaacgcgcggaggccgagctgctacggcgctgactggccgggtcgcacggctacgccgctactcgacgcttgctgcggcttgtgggaagctggagaagaaagtttgtcgcctgtacagctgtcggagaagaaagctcgtgcttggcggcttgctatgggccgcgattgagaggaggtgcgagctgcaatc

SEQ ID NO: 380092 - DNA, 220 bp, Zea mays
ctggatcctctgaaaaacctggtgcaagatttgaggatccaatttcactgtcgaagttatccttacaaatcttataacctgttatcctctcaggagactaattttacttacctgatacagacagtaggaaagcacgagcaagaatgacacaatgagggccagcaacatagctagacgctgcccgtggtgggtcttcaacatctttgggaactgagcgatg

SEQ ID NO: 380093 - DNA, 225 bp, Zea mays
gactttttggctcccatactttatgtcatggaggatgagtctgaattattttggtgctttgcttccctgatggaacgtctaggtgccaattttaatcgtgaccagaatggcatgcatgctcagctacttgcattatccaagggagttcagtttcgaccagatcatgcttttatgggaagttctgtggtcccattatttgtcagaacatttccacttgtacttgtg

SEQ ID NO: 380094 - DNA, 239 bp, Zea mays
cggacgcgtgggcggacgcgtgggcggacgcgtgggcggacgcgtgggcggacgcgtgggcttaaaagtaccttgaaacagacgatggacttctcagacactgaggagtacaaagctcttgataactgtcttgaagaaataaagaacctgattgccgctactgcctaggttgttgcatccaagttttggacgctggttatgataatgtattgtccgtttctaattaagcatttctattg

SEQ ID NO: 380095 - DNA, 222 bp, Zea mays
tgaccttgccgtctagttccttcgatgatgatcttttgtcttcctgtgtgatggtggttgcggttgcattgcattgcactgcactgcaccgcaccgtgtgttgtgcagttgtccagtggggtatgcgacggagagaggctagtagtaccaactccacttgtaaaaatcctggtacgagcactcgtggaaggtatgtgcacgacctgctctttcatggctaac

SEQ ID NO: 380096 - DNA, 230 bp, Zea mays
cggacgcgtggcgccgcggcgggacaacgtgccctgctcccgccgcggcgtcgctactacaactgccgacccgggggccaggccaacccgtaccaccgcggctgctcccgcatcacccgctgccgcggaccagcggatccggcattccacccgccgccgagaataagttcttttgccctgttcaccccacccgagtgctaccgctaccgccgccgctgttcacaagtagt

SEQ ID NO: 380097 - DNA, 233 bp, Zea mays
cattggtgtttcaatacatgatgcccatcgccgggttcataattgggccgagtactattctgtcagggaacatctagcacctgagttcgcattcagaagaaggtatagcacaaagagcgatgtctacagcttcgggcttgtactgttggagcttttaactggccgctcagtttttcatgttgcgacacaatgtggcccgaggagcgcagttatatgggctaaaccaatgctta

SEQ ID NO: 380098 - DNA, 233 bp, Zea mays
cgatgatgggagagccagacagatactcaatgtcaagactaaggtgctgcctcataaggcgagagctgatttagctggaagcgaaatgaggaggtcccatgaggatatgcgctctgcgaaggaagcagatccatatgtatcagctgcagaattggttaagaagtttgaatcagggaccagagagcttagcatcactcacagtagatgtcgttctcatgaggatgctgcatcac

SEQ ID NO: 380099 - DNA, 228 bp, Zea mays
gaatgtggaatttatgttctttatttcatccgctgttttctactgaacaaaaaactgacagaagttcttgaaaacaaaaaattggaagaaaaatttacccagctgtttgatgatggctggtttaacccagaggaactagagaacttccgcaaggatatccattcattccaagcgaatcgaaataacaaagttgcagagtagggtatatagcaaaatggtgccaagtat

SEQ ID NO: 380100 - DNA, 190 bp, Zea mays
gttccagataattgctcactgcgtgtgccagtgcgtgcgcaagtcggtggagtcgaaggaaggagcgaaacaccggagcaccgacgggaatcgctcgctagagtactatccttgccgcggatccgcctgcatcgtggccgggagtcatcacctgcttcaacaccgagaacgatctggttgaagagcccga

SEQ ID NO: 380101 - DNA, 246 bp, Zea mays
atcctccctctctcgatctcgaccaccccccttggaccgcaagctagcccagccgtcccgctccctcggtaagcttccaagcgagtccggcggcgtcgagtcgaatggcgggcaagtcgcacacgcgcaaggcgttcctcctgtgcaactacgtcctcatgggcgctgcctccagctgcatcttcctcacgctgtcgctgcgcctgctgctgtcccggtgcggcctcctcgtgctcttcctccacg

SEQ ID NO: 380102 - DNA, 195 bp, Zea mays
gctaaggagccatcccgctcgctgccaacgcagcgactgaccaccaccaccaccaccaccatgacggtggcaatggcggcggcaacaacatgttgaaggaggcaggcattgtagatttctacagcccagcagcactaattagctacaaccaggcagcttctaacagcagggttgccgcttctgctcacctggtgc

SEQ ID NO: 380103 - DNA, 245 bp, Zea mays
ctggaatgaccgatgatatgaaagttgagcatgttgctgctctcaaatgttttaggcacaaattgccccagatttaccttaaaatgttgtaaccttactactagtcctgtccctagatttttattgtgaacctatggttacctgaacttatggttatctgaacctatggttatctaaatttgtgcctatctgattcctattgttgttctgatggtgtttatctcagatttatattatgtgaatgg

SEQ ID NO: 380104 - DNA, 137 bp, Zea mays
ctctcttcttgctgcagctgccccaagaccgccccgcgccggctcaatccggcgggacgaggagacggcattgctcgcatcgcctgccctagcctgcgctgcccccccatgcgtgttgtgcgcatgaacagaggcta

SEQ ID NO: 380105 - DNA, 166 bp, Zea mays
acagcaactggagcagcaacaaaagctattgttgcagcagcaactgctctctcagatggtgcctcacgcgcatcctaatcaacacactgatgattcttatgcattgaagtatacttctgtgccatctgatgattctaccagtcttggttttagaagaatgcaagag

SEQ ID NO: 380106 - DNA, 139 bp, Zea mays
cccacgcgtccgccgacggtccggccattgtatggagggatgaagggaaggactctgatcctcttaacttcatgtctttggaggacttgaggaagaaagtttgcctagtggccaatgcaattgatgccctggaactgcc

SEQ ID NO: 380107 - DNA, 190 bp, Zea mays
cccacgcgtccgggccatgcatggagcttgtggaacgaggagaagagcatagagctagaaggctttggttgtttgaactggaatacactcccctgttcaaacaaccaaagccttctaggccatgcatggagcttgtggaacgaggagaagagcatagagctagcagatgagagaatgaacggacaattca

SEQ ID NO: 380108 - DNA, 222 bp, Zea mays
cggacgcgtgggcggacgcgtgggcgaacacagtctgctaatgcttatgttgaacttcagcaaattcaatcctttggtggtggacatgctggagaacctattaggcctgctgtgggtggcaatgctgcctacccagttgatgatcgttcaatgatggctgctaggggtatggatagcagaaatattggtttcgttggtggaatgccagagccaccctttcca

SEQ ID NO: 380109 - DNA, 177 bp, Zea mays
cccacgcgtccgatttaatctgttacatgatttaacactagatggggatgggaatcacacatgtatctgatgtatatataattcccaattcccatggcaaggaggccctactgataaaatcattaatgaactttcttcaggcataattgtactaagaagtcacaaaaggataacttc

SEQ ID NO: 380110 - DNA, 211 bp, Zea mays
cccacgcgtccgcccacgcgtccgcttgctattaataataggtttcccttgtcctttggccctgtgtagcgaatttgcgattaaacgagggcatcccctacacctacagtttcgagatgcttagcatgcatatgtttgcgcttcgccctcatcacaaacactgtggtgttttctcgtttcataggtggtcctacactcactgctatttaaa

SEQ ID NO: 380111 - DNA, 226 bp, Zea mays
cggacgcgtgggtttagctgttcaagcccaagacaaatgaagttgcaaccctgcagtgcaacagcagactcagtctcacctgtcatcgccccaggagcagttcctgagcagagttacctcaatgatcggcgcagtgctcccgactccaggggctggcaggacgagaatgtcaagggaacctcgttcgaaggaaaagttgaggcgcacagaagactagcggggttga

SEQ ID NO: 380112 - DNA, 232 bp, Zea mays
ctaataatagttctcggcgcgtttcctaccgtctcgcacttgctcctcctgtgacagcgaaggcgacgagatacttcggtcatttcaactcaaagctttaagcaagtaaagcattcttatgctttgaaccttaggaaagaatatattaatcatcttggaataaagaaagcaccttcttgaattgtgaatttggatcgtcattgtctcaaatcagcaccacattttgatgagt

SEQ ID NO: 380113 - DNA, 155 bp, Zea mays
aattcaattgaacaagagttgtcacgagtgaattgacgaacagataagagattgcgcacaagtgcaggtgcaagtgtgcaacaagaacattgttaagacgataggtagaggtgggggaggatagtgtagatgtgccacgacaggtgatgggtatg

SEQ ID NO: 380114 - DNA, 151 bp, Zea mays
gtgggtgcgaccgtcggcggcggaggtagcgcggactgtcgtggagcttgccgcgtccgggactctctccatggtgggctcagacggctggcctctcggcgtcggcgcgcacttcgtcgcggattctgccggtgcacccgcgctctgcttg

SEQ ID NO: 380115 - DNA, 243 bp, Zea mays
atcacggtggcggccaccaccgtggatcgcaccttcccgacagtcgtcacgctcggcgacggagagacgaagctggtggggcaatcattgtattaccgcaaccgatcggcggcggcatcgacgagcaatgacgacttcgcttggcgccatttgatggctttcactggctgcgacgacgcggagaagctgcggtcggaaaacatcaccgggaaaatcatggtatgccgagcgccggagttcaag

SEQ ID NO: 380116 - DNA, 241 bp, Zea mays
cggacgcgtgggcggacgcgtgggtttttttttttttttttttttagaaggaatccgttttacatcctatattgacagttgagttgcaacattgtacaagcaactggaatccagaatgtgtctagcaaagttttattcgtcctgaactccgttgcgtcatgagacaaacatcactaaattacagaataagcacaaagccatatgaacctagcaaactaattaacacactgatgcctacata

SEQ ID NO: 380117 - DNA, 239 bp, Zea mays
tggatattttagcggttgagctatccaaaagagaatacgagttgcttaggcaaaaaaacagaggtaacaaaaattgcaaacacgctgaaactggttttgagtgatccccagaatagggcggcatatgatcagtagggcaaggaagggctgaaggcctttgcagatatccaggagtgttatgaggctgaatgggtagtagagactaggaccgaatcggagatcttaacaatcgatataaa

SEQ ID NO: 380118 - DNA, 234 bp, Zea mays
actggagcatcctggagcgcacgccagacatcccgaaacagtggccggtcgatggacggacgggccagcgcggctgcggcgtacgtgtggcgtgggattcctatatatttcttttgtgtgcacatttctttctccgcaacaatccagaagaagaaaacaaacaaacaaaaataaaggctgggagacctgatcagagcagcagagagaagaagcaggaaaagaaaagaagaaaaa

SEQ ID NO: 380119 - DNA, 239 bp, Zea mays
cccacgcgtccggaagctgtccgcctacagctggatcgagctagacggtgaggtgcacaggttcctggtacaggatacgtatcacccgaggtcagctgagatttacaacgtcgtcgatggcctgggcttgcagctggagaggactagtcctgatcatgagttaatttcagaggtttgctgattaaaattactgtcatgtcagttacaatactttctcgccaaatgtcatgcaatttgtg

SEQ ID NO: 380120 - DNA, 247 bp, Zea mays
gctcgcgcagcccgcgtgctagggttgccgagctctccctcaagctggatcccgcgtgctagggtttgccgccgcctcggccggtttcttgatcacttggaatgagaaaagactgaaatgagcgttctgtccggcagctggtagcactagatcttgattcaagaatggaggtctgcatattagatcttgattgatgttttaataagttctatcatgaaggcgatgatataccagaagccgaagtagg

SEQ ID NO: 380121 - DNA, 243 bp, Zea mays
gtttgttttgtggatagatggagatggatgtcactgattgcccaaccttcatttatataccagtagcatgacatatcatcatcagatgctttctcgcttgatcagcaaagcaaagatgcaggcctttagcttcaaccacgggcaagttacaaaaaggccttgcattgcgcacctgcttctttatgcagacatcagtagaactgaaacgggccagtgtagcttctagccttctgctcactcagc

SEQ ID NO: 380122 - DNA, 226 bp, Zea mays
gtcagaattgcaaagagcaaatatataaaaaaagagtaattgcctcagggccaaataaataatatggctattatttatgtaatcttagtcctcaccagagcattaaggaacagactgttttattttacaattgctgaacagtctgttccttaatgctctggtgaggactaaggaacagactgttcagcaattgtaaaataaaacagttcaaggctattgattgatt

SEQ ID NO: 380123 - DNA, 211 bp, Zea mays
cacgccggttgctcagacataatgtatcactctctcttcttggttggagaagtcgcgggcaatgactactaccggactctgctttctcgcgtgctcatggagataatacgtgctatcactccgagtgctgttgccatgatgtcctcaacgatcagcgaattgcatcggctatgagccataactcttgtgggtccaggaaacctcacagttg

SEQ ID NO: 380124 - DNA, 214 bp, Zea mays
agcgtgccgggctcgacagcaacttgagcccttgggtggcccgagcacggcccgttataagccgggcctgtaaaccggcccgttcacacagccacctacctaataaaattctgggctgcctctacctgcctcctcctagtcctaatggcccagcccaaataggagcagaccgcactaggcaccggcaggcgcgcagggcggcaccgcatccgcg

SEQ ID NO: 380125 - DNA, 230 bp, Zea mays
cactccagccgcttcgcaacgccgtctgtcgcctctccgaccgccgcgagaattccgttcataaggttcgctagaaatacaggcgcgtggcactgggtcaactatcggaaaagactatctgcgcctcgtcgtcatcgacgatgtgagtcgatcagcacctggcacttgtagacgcacctgatatgagtcaggtgcagattaacatcaaacagctctgactcactgacatc

SEQ ID NO: 380126 - DNA, 224 bp, Zea mays
ctcccgaagaacagggttagttagtaacttttggattctttatgtgccatgcttagtttccctaccaaaaatgcgaaggtgaggggggtatttccaatggtttcacttctccattcgatacctgatgagacgagttgttagcaacataaacacaaacattgaaggaatgttataattgtactgaggaacagctaacatgtaggattcgtcttttccatgcttgc

SEQ ID NO: 380127 - DNA, 100 bp, Zea mays
caaccatgaccgtgctgagccgccctaccccgggcacggcccagtgcttcgggcggaagaagaccgccgtcgcggtcgctgtacacgaagccggggcgcg

SEQ ID NO: 380128 - DNA, 223 bp, Zea mays
gctgtatctgtttgctgatttggatttaggggtaccaagaagccattggatgcgaaggacgggatcgcggcagaagtggaggttgcaccgctgtatgaggcaccacaggaggggccgtcgaggctaccaaacaccttggcacccatgttcccgaagagctaaagccgccgccgggatggaagcctggtgatccgatcacgctaccacttgatgagatactacc

SEQ ID NO: 380129 - DNA, 104 bp, Zea mays
gtccaatcgagctccttcgtttaaacccaaacgctaattgcgacctccgttcgcccaaaaccctacggccatgagacggcggaggcggtggtgtaggtggaggc

SEQ ID NO: 380130 - DNA, 229 bp, Zea mays
aacaatcgcagaaaacaatgaatcgacacatattgagctggaatttctacgtgaagtgcttctctcaatcgataaaattgccggtctttggaacacagcttgcaaacctcaacatggtccattgctcaagcgtacacctatacatttctttctacttttctttttgaagcatctatgcatttcaatttcactgattccatatggggccctgttggcacttcatgtactg

SEQ ID NO: 380131 - DNA, 224 bp, Zea mays
atttagggtcgtttcgagatactctctgtctgggtcgtttcttcaatcagataacagtggccatcacagtcgaactggtgggcctgctagcgtccccaatggttgtgtcctggttcgtgtggtagtgttgtcggacttttgatagctgattcgccagtacagatcatagtggaagcatcatggatgtttaatattgcagtccaaggtaagaaagtattgcagaa

SEQ ID NO: 380132 - DNA, 99 bp, Zea mays
gcctctcgggactctagagtagtggccggctctccgcctgttcttgtcgtcgctgctcctttccctgtgagcttaaaatatacacaggatgtcggaacg

SEQ ID NO: 380133 - DNA, 222 bp, Zea mays
cccacgcgtccgcccacgcgtccgcccacgcgtccgcccacgcgtccgcccacgcgtccgaaatgctaataatctgaaccaggagctgaggtttgatgtaagacaccttagtgaacctgaccctgatgatggtagtaatgaagttctggaacatggaaacacgatggaaatggatagtgaactgacaaaccacatcacagttgtgaagtatgaacttgaccc

SEQ ID NO: 380134 - DNA, 217 bp, Zea mays
gtcacgactcgccctcactctcggccttgatgaagatatggctgatatcattgatgaactaattgctatcagggatctcattcattccgtgaattgtgcttactaggctgggcttcaggagaagttccctccagttcctcttctggtgtcctacctggaggactctaagatgacgtggtccgctgcttcatataattcaagcactagcagcagcggg

SEQ ID NO: 380135 - DNA, 251 bp, Zea mays
gttcagagttgtgggagaggttacatatcggtgacactccttcaccagccccttcaagtgatacaagttcagaacatgatatgtcgcctgctcctgcccctagtaatttgccagagtttgatgttggtctcatcaccgttgatatgtctataaatgttacttacccaaatttgaaacctcatctccatgagctggccgagctgatagctaaagagctggagattgactcacgtcaggttagagttatgaat

SEQ ID NO: 380136 - DNA, 238 bp, Zea mays
attggtgttgtccctagcctgtcaacctcttggtcataatcatcaaactaattttctagaggcatgaattatagaactgacatcctatatttaacaaagtgaacactagtgcatactccagtttcagtgcaatgtctaatttgcaatgtgtttggtgcgcttaagctctgatgagtctcatgttattttattttattttttgcaatcgacttgcaccatcaattgatatctaacaaca

SEQ ID NO: 380137 - DNA, 222 bp, Zea mays
cccacgcgtccgaattttatcttctgctgaccgagaaacattccatgttttgcatttggaatgaacaaatgtggaggtttggaagtgcaaaatatctgaacactagaaagcaaactgaatgcagtgatatattttctttccgtggattattttaatcatgaataaacgacatttttgtctcttcaaaaaaaaaaaaaaagaaaaagaatatagagaagaaaa

SEQ ID NO: 380138 - DNA, 134 bp, Zea mays
cccacgcgtccggcaaagtaaacacaggctgcctttttgtttgtctctcccacctcttcgaaccagtagactactactgctactacttgtgtctatcagtctatgcgcggatccagtgttaaatgttttaccat

SEQ ID NO: 380139 - DNA, 231 bp, Zea mays
cccacgcgtccgggcagggtggcggcgtcctggacggggggccgggctgcgtcggctcacatggcagctcgtgtcgttgtgtgcctactagctggctagctcccagtccctcagcccggcctaaaccgacgacaagatatatggagatcactccttaaagaaagcttctttggttttaagcaactcgtgtccctatcacactgtattaccgtacaagtataaagaaagttt

SEQ ID NO: 380140 - DNA, 181 bp, Zea mays
ctaaactacagctcacactgcagccccaagatcgatcgagcgtccacagccccaaggaacatagtataacatggccccagccatttccaagcctctccttaccgatctcgttgcacagatcgggaaggtcccatcgagccacatcaggcctgtcggagaccgcccggacctcgccaatgtc

SEQ ID NO: 380141 - DNA, 173 bp, Zea mays
ggctaagaccctttggggtaaaaattcttgctaccaaaagaaattggtcatcggacacattgccatcttgtaagatccgctgttccatttcctccgcatcatggcctttataaatagttcctgttctgctcgacctgcttaagaaacattccaatgcagatgttgatgagcta

SEQ ID NO: 380142 - DNA, 168 bp, Zea mays
gatttctatggatttcatcgaagcactaccccgctctcagtcatttacatgcgttttggttattgtggacaccttcaccatatatgcaaattttttgcacctcaagcatccatttactgccctctctgttgctcggttgtttcatgaccaggtatacaagcaccatgg

SEQ ID NO: 380143 - DNA, 168 bp, Zea mays
gagagcgtgcaagaagagaaggcccgtgtcaggcggcggctatagcctttcagttgaggattaaagtggaggtttaagaagcttgagaattggcatcatctcaagaatacattgaagtgcaagatgccaaaaataaagagtctatctaatgcatgccgagtatcattt

SEQ ID NO: 380144 - DNA, 166 bp, Zea mays
cggacggtgggcggacgcgtgggtcgcggacgcgtgggttcggagctcagagccttgcgatctctcggctgcgcgcgcgcaagatggctgacccagaattggaagctatcaggaagagaaggatggaagaactaatggcaaaacacggtggcggtggggcaaatca

SEQ ID NO: 380145 - DNA, 260 bp, Zea mays
cccacgcgtccgacctcgtgtgcactctcattgaaggttggaaagttttggttgatgaatgggtcagtaccacaaatgctgccctgacagagaactcccctggctcttcaaatccttctgttgtggatgaagaagaggaagggcttccatctccacctttggacgaaggggccttctttgccacccaaaccacttctattcaactctctgagttctttgacgaaatggatgaagatggaaatttgagacatagtaatgac

SEQ ID NO: 380146 - DNA, 256 bp, Zea mays
cctaaaccagatttgcttttactctcggaccaagactcacctggctagccgagtagtcttccatctcggtgttttgaatgcaggcaggaaggtatggttatctgcaggttaaagtgaatgaaatgaaccatcatctgtaacaagagtgctatatcaaggacaagcagcaataaagcgcctaacacactaatataaagtcatgaacggataagtacagaggaattgcacccaagaagcccttgatatccaaggacca

SEQ ID NO: 380147 - DNA, 257 bp, Zea mays
gcatttgatgcataggatccatatgtgccttatgaaatgtcctgcttctctttcttttctggcaccttaattgtttctctgaatattctttttctatactgtagggttgtctatacggccaggccacacgcaccaagaacagaaaaggttgtaggcatagggtttcaacctgggtttgatccttacaaggtaacatcttgcattactatgttctatattttcattgttgaagcaactaagttattttctgggcttgc

SEQ ID NO: 380148 - DNA, 252 bp, Zea mays
  unsure (1)..(252): unsure at all n locations
ggagcacactactttgcggaggtcactctctctctccaaggcaagcggcacgtattttcctttgtcacgctcactgtgaagtcgttcgtgcccacgtcccttagcctggcaggtgctatcgacgccaccatggctggggtggaggatgaagacaagttcaaggacgctccagcagtcgccgatcgccatcgcaacgatgcggcggttgtgtgggcggcgcgcgccacgacacncaatcagcattcgcagccc

SEQ ID NO: 380149 - DNA, 244 bp, Zea mays
  unsure (1)..(244): unsure at all n locations
attttataatacaagtttgactattttttataccttccttcaaaatgcatgataagagntttttttaacgataggcgaaaagttaatatgatacttggtacaggagcaagcttggttcatcagatagtattattaattaggatcactgagctgttcattttgttcttgagtcaatcctaatcgtactatgtcagttaatgatcatgtgntgcaccaatgcagatgagtgcatcatgtgatctcc

SEQ ID NO: 380150 - DNA, 246 bp, Zea mays
caatttattttcgttcttacttgatagcctaaacctactaattgatgtagtggaacagtggatgggcaaaggtttactgcatctagaattctgaactaaacaagaacacaaatagttttgttaagaatgctcatccattcacatactataaaaatttcaaacatgaggcagccatttcggttggggaaattgtcatgccagtgttttatgacttttaaatattgcgtgaatgtgttatcctgtagg

SEQ ID NO: 380151 - DNA, 230 bp, Zea mays
gtctcgctctctcgcggcttccgaatcctagcgcgagtggatcggcgggcgggtggcggcgatgatggtgagggcgcgcgacgcgcgcgggcgctgctccgcctcgccggcgaccagagctggcgtccatagggactatttccctccgctagcgcgcgccacgtttgctcgcgccttcctggatttccgcaagacggggaacaaggaggccatcgagaaggataaggcca

SEQ ID NO: 380152 - DNA, 229 bp, Zea mays
ggacggtgggttcaggtgtgtgtagacaacctattttttagttgatatagatggtgctgatttgttaagtaaagctattgtctttgatggtcacacttttattggaaatctgcaattccttttatgttgtaacaaaatttaatatctaaaaatgttgttggtgtcttggtggtaccgtgtcagttgtcaacagtccaattccattctcatggctttgattctgacgtat

SEQ ID NO: 380153 - DNA, 216 bp, Zea mays
cccacgcgtccgtcagggagtggcgttgtaggaatgcagtgcgactgatgttgttgttcaatgcgcggggcgtaattaagctggttgagagataagaatgagatgttgccagtacattacaagcgctcctgtccgagctctgtttcacaattagtttgggaaatgaaagatgagaccgtggactccaatgtttcacatcctcctcctttatttgat

SEQ ID NO: 380154 - DNA, 212 bp, Zea mays
catgcattgagctaacaaacaactttatttatgcagtttgaaaccttagtagacgtcgtcttcaactaattgtggttctatattcttttgctcttatattctttgttgcgaattcatttcattatacttgtaagttgtacccatgcttcttgtttgttgacacatgtaacaattacatagtctatcgaaaacacattacaatgcaaactggg

SEQ ID NO: 380155 - DNA, 205 bp, Zea mays
cctgatgcagaacctattgatgatattgaaatggaacaggaagatttatctgaggtaccaagtgccatggaggaggtgaatgttgatgcagtagtagaggagttcgatgatgagatggccgaggaagtgtctggtggtagtagtggagaagagacggcagccttcattcagaattcagatattccttctcaatccattcccgagc

SEQ ID NO: 380156 - DNA, 207 bp, Zea mays
atgtgggactattcccaacatatatgacacgacctatagtacttcgacacggcacaacactatatagagcatgattggttgcatgcgagtccaacgcctggctcgttgtagctcaactggtcagatacgtgctcagaccgcgtcttcgcgtttacaagcaaaattgcttgatttggcttgaattgcacctgcacatccagggtttgt

SEQ ID NO: 380157 - DNA, 211 bp, Zea mays
tacacttgtcggtattatgatgccgagtgctttgagtaaagatataacctggtggggcgcccagtgttccacaaaaggattaccgggatgcgccatattcaaaggtatggtcggctcttacttatgtgcagctgctgtcaagtgctgggaacaagatctgtggtaaaatccggtgtagggcacatttgctggcctccttgctccacttctt

SEQ ID NO: 380158 - DNA, 205 bp, Zea mays
tttgtttcctgctctggccaaattccagacaagaagaacgagaacaaggaggtggccgtcaacgacttcctgcccgccgccgctgcccgcgaagcatccagtactccatgtaaagtcgccctgctcatttatctcgtggatgacttgaaaaaaaacgaggtttggattctgggactctgcattcgtacgtgttgacatggatctt

SEQ ID NO: 380159 - DNA, 201 bp, Zea mays
gtgaaactgagtctcgttgcaagactgggaacggtgctcttcgagtgccagcccggtggatcgcccgtttcactggacgaactccgtcaggccgctaaagcaggggaagatggttccaggagccagttgcgtaaaacgttctacaccagtgtgtctagtgagtgtctggatgatatggagcgaaccatggtaaagaggatt

SEQ ID NO: 380160 - DNA, 201 bp, Zea mays
gagacttgttatcagaatatgtactcttgggcaaagtttggaacaatttggatatgatttgcttagcgaaataatagttgcccaaaaaggaaaaggatttcacctatgaaatgaggacacctagtagttaagtgaagcgatgaagttgcttaagaagttttaagattttggatgagatctaagatggattagttctctggt

SEQ ID NO: 380161 - DNA, 210 bp, Zea mays
  unsure (1)..(210): unsure at all n locations
ggacgcgtggttttcttttcttacaagtgaacagccgttgcccgtcggccgncgcccgccgccccctacctccgcgccctcccgaccaccgctccttccccgccttccacctgcgctgttcgccagtcctcctccacctcgctccggcacgcagggcccacaagaagcgccccttccagaagttaatccgccccggtttgactagggttt

SEQ ID NO: 380162 - DNA, 222 bp, Zea mays
cgagctcaagccccgccgccgacgccgtcatcttgtgcccagaaccccgtatttccctccgccgccttccgatctctcgctcctccccatgtcggagaaaaagcgccgcgccggtgcgagcgcggccggcgccgcatccagctccaagaagccgcgtgcttcctcggccgcgtcgtacgccgagtccctccgctcgaagctccgccccgacgcctccatcct

SEQ ID NO: 380163 - DNA, 214 bp, Zea mays
cccacgcgtccgcctggacctccgacgcaccccaaacaccgcagagatgcagaaccctagcggccaccacaccgcgacggccgccccgtcgtcggcgccgtccaagggcaagtcgtcggcgccgaaccctagcggcaaccacgctgcgacgccggcgccatcggggacgccttcaaagggcaagtcggcggcagcgcaggccgcggctttgggc

SEQ ID NO: 380164 - DNA, 210 bp, Zea mays
ctggactttagtgaagatcatatcaacggaactggaacccatccatgtcacagtgctattgacgtgctaaaaaattcagacacatggttagaggatgatcaacttgaggcaattctgcatccagcgtgtatgacattgactgaaaatcaatggttcaggatacatgaggtttctccagaatcagcgttttcttatgaaagtacaaaggtt

SEQ ID NO: 380165 - DNA, 154 bp, Zea mays
ggccttcgctatgggagagagacggacggagaagagaaaaaagttatctacccttacctctgtgctatcgtagctgtcgccaagctgccccactgggagtctctctccgactgtcaccgttgcctagcccccttcacacgctgatcgtgtgcgc

SEQ ID NO: 380166 - DNA, 160 bp, Zea mays
gtgaactttgtttctagcagcatatgatgttagtgttgtgcaatgaaatgttacatgtttgtggaatgtatgatgaattgctttataatgatgcttgttgctattttattataataagggtctgttaatatgtaagttaatatatatttggttatttatt

SEQ ID NO: 380167 - DNA, 157 bp, Zea mays
ccacgcgtccgctttacccatttgttttctaaatccattagttgcttctctgtgcattgaaacttatggtgcagcactacatcttatcaattctgtggcatgcatgctattaagtgctaactttttatcatgggtatctaattgttactcttgcagg

SEQ ID NO: 380168 - DNA, 160 bp, Zea mays
cccacgcgtccgcaggaattaccgctactacacgtctaccgaatcgagcccatttgctcgcctcgccacagctttcgttgcgctcatcaaaggctccaatcgagacaacatgatggtgaaagaaaaccgtttgatcatcatcttggcagcactcttgcga

SEQ ID NO: 380169 - DNA, 215 bp, Zea mays
ctaataagtggtacgtgtgcggggtcgtattgtgtctgcttattaggacagtgacagtacagtacaaatgataagcaaggggcagatcaagaatcacaagtaggagccataaaaaagcatgatagagcgcaggcacaccagaccagaccagaccagaccaaaagcttatcatttgtactgtactgtcactgtcctaataagtggtacgtgtgcgg

SEQ ID NO: 380170 - DNA, 213 bp, Zea mays
gacacttgtttactcttcaaatgacctgttactatattgaaactgagagcccgaattgcaatgttaatccatagtttcataattatgctaatgcattctgtgattctgtatgcttaaccgttctcttacatgtatcatcacagaaaatgcaggcaccagggttataactgtgtttgttatagttactaaatgtcgttacacaatagactttta

SEQ ID NO: 380171 - DNA, 212 bp, Zea mays
gaacttctcgtatatggcactatctctctctttctcttctagaatatagttcaaggcattcttttacagaattgcaaactttttttgtaatttcaggcctctaactcttgttgatcacaagtcatacttttgatcatttgaaaaccacagcggctctttctgattatgtcaactagccgagtggatggaagacccaaaaatgctttggaagt

SEQ ID NO: 380172 - DNA, 205 bp, Zea mays
cgaacctggacgtccacgtgggccagtcctactccttcctcgtcgccacggaccagaacgccagctccgactactacgtggtcgccagcgcgcggcaggtgaacgagtcccagcccctctggcgccgcgtcacgggcgtcgccgtgctccgctactccacctccggtggctccgcgtcgggcgccctacccgacccgccgcagga

SEQ ID NO: 380173 - DNA, 241 bp, Zea mays
ccacgcgtccgaagaaagaaggagacacacaatcgtcgcctgcttaaccagagcgacaatgcccaagctcaggctcatcttcaccgttattcttgtggtgtctctactgttcagtggtgtgtcttcaggtagtacagtccgtttccttgctggtgagttatgtatatagtcgtacacggttgaagagcttccctgtttgcatgcaggacaaactgcagctacacaagccagcgatgcagat

SEQ ID NO: 380174 - DNA, 232 bp, Zea mays
cccacgcgtccgcccacgcgtccgcccacgcgtccgcccacgcgtccgcccacgcgtccgagaacatgaatgggaatagtactgaactttgggaggtttataatgggaacagcgtgaggctcccatggaaattggaggaattcgttgccaggagcccatatattcgggattctgttgttactatcggatcaaaagtttcaactgtttttgtagttgatgctgatagtggtga

SEQ ID NO: 380175 - DNA, 222 bp, Zea mays
catttttccagccgccaccaacagcctccttctcgcccacgctgtcttcttccttcctctgccgacgctccctgtacatggcgcccagatttgtccagcctctctccccttggcgcaggttccaaacgcggcgcccctgctcctcttcctcctgcacgcacgccagcgcagggagccctgcttcccacggcagcagtagggagccatcagcagccatggcgc

SEQ ID NO: 380176 - DNA, 249 bp, Zea mays
gcaaagagaacccttgaaattagggagtgatgctagtagaacccttacaagatcccaagtcgatgctgaattggtccgtatggcaactatgactgttgaggcggcggcggcagctgctgctcatgcagttgcagaggcagaggctatcatggcagaagctgaagcagctgctagggaagcagaagctgcggaagcagaggcccgagctgcacaggcctttgctgaagcagcagttttgacactgaagaa

SEQ ID NO: 380177 - DNA, 208 bp, Zea mays
aaccggacacgcgtccgcggacgcgtgggcggaccgtgggcggacgcgtggttgagagctcgggcaccagatctgaagccctcttgttctgtggatgtgtgccttacggctggtgtagcattgagaggaggcgctgttccagttccagttccaggatgagcaaggaggatgtgctcaaggtgcagactttgatgctgagagtgaacat

SEQ ID NO: 380178 - DNA, 254 bp, Zea mays
cgcacaccgccagccagccacccgcacacccctagcccctaggctcccctcccgcaaaaccctagcgctctctctatctctctgtctgtcggcggcgatggaggatgctgccgagagccgcaagctcttcgtcggcgggatcccggccggggcgcaggaggcagacctgcgggcccacttcgcgcgcttcggcgaggtgcgctccgtcgtcgtcatgcgcgacagggagacgggccacggccggggcttcggct

SEQ ID NO: 380179 - DNA, 246 bp, Zea mays
ccgatgcgcgccttcgagccgactccgccgccgccgctgcaccagccccagccccagccgaggtagccatgtacacggtgcgcccgcacgcggcggcgacggtcacccttaactgcacggaagcaccgctcgactgcgtccccctctggcccggcggcggggacgctgcttcgaatacgtcctgcccccaccacccccgatcccggtgatcccgcgcgcgccggtcggcgaccgccacgcgcccgt

SEQ ID NO: 380180 - DNA, 245 bp, Zea mays
gtagcacacctgctgaaggggtttcctcctgtgcactatttttcttcgaattgtttttgtttggtgtcttccaccatctagcacttcgcttccaatatgttagtaccatcttctttggtgatcccctcatctccaccacctttggcagcaaggacaaagccctcctgagtgagccagctaacgacgtcagctgcttccatcgagatattgagcagcagtaccagtctagctggggagtgacaccg

SEQ ID NO: 380181 - DNA, 138 bp, Zea mays
cagaagaaagcatccagtctgcgaagatagttgattctggagattttactaaggggatatacacttttgatgatgttgtcctacctttgcctggttcacaagcattgtttcctgggaatgaaattgccgagatttacc

SEQ ID NO: 380182 - DNA, 245 bp, Zea mays
gtcggaattccgggccacgcgtcgggacctggtcgacccacggtcggttttcttatggttatcgcttgagctgaggtggattggaaggagctgtttgcttttgcagaagaataatggtgtagtcggctggggtgaggcgatgtgcgttgccagatacagttttgtcttgttgactctacttatctgattatcatttgtaagcgatttgctcaagttatttgtcgtttatgaataacttgctttcc

SEQ ID NO: 380183 - DNA, 231 bp, Zea mays
caaagctgaaagaccttcatgaggctaatagtaatggtcctgtcaatgttgacaaaccactagggaggaaagatgatgagcgagaaaacatgatggctgcgatatggtgatattctctttggagaagttaacaagatgagagaagaaaggcaagaaacaaataaataccggaaggttcgtgatgacaagttttatgagcttgagatgaccaaggttcaattggagcgagac

SEQ ID NO: 380184 - DNA, 216 bp, Zea mays
cccacgcgtccggactagttctagatcgcgggcgcccacgcgtccgctttgccatcgccttatctggaggtcccctagtcagttttttggggaaactttgtgaagctccatacaacaagacactggattggtccaaatggtacatcttctggtctgatgaacgtgctgtggcaaaaaaccatgcagagagtaactataggttaacaaaagaaggat

SEQ ID NO: 380185 - DNA, 218 bp, Zea mays
atcttatattcgccaaagcatgctccctatgttatcaaccatatacttaagagaggtggcatcatctccatctacaccgttgctcctttgcgaccaatatgaatttgattcaattcaacggattaagataaagcacggtcacccgtattacttggtaaaatggaagagagctacccgtggtatgaattctattatgtctagcaacaagccagtaatgg

SEQ ID NO: 380186 - DNA, 241 bp, Zea mays
ctcgcgtccccgtctcgccccagccgcttcccccctcccctaccctttccttccccactcgcacttcccaaccctggatccaaatcccaagctatcccagaaccgaaaccgaggcgcgcaagctaacattttgcccttgtgttccagctcttgtctgtttggtgtgggtttcgtctcagttcgtgtgttactgtctaatcctggggagcgtgtaggggcaggagtccgagtggaggcagtt

SEQ ID NO: 380187 - DNA, 108 bp, Zea mays
ggaagaggcagagggagaggtcggggcagaggaagcagccggggtagaggacgacgagggaactcaaggtatgatgatcctaaaatgagtttccgggatttttgaaga

SEQ ID NO: 380188 - DNA, 238 bp, Zea mays
atccagccagccagcctgtgctctgattccgattccgattgattcgcgtcaccagagccagacgagacgagaggaggaggagctgtcctcgaattggcaacgcgccgtcctctctctcgcctcggctccatgattgcgaggatcgaacgagatccgcgcgcggcagaatcgatcagggaggaaggacgaccgccgcgccgcgttggttcgttctctgccggcggtgggacgacgcgac

SEQ ID NO: 380189 - DNA, 185 bp, Zea mays
cgcaccatggcggagcgaggttcgtcggttgtgcgtcgcccaccggattgctggaggggcgccgcttcatggggctgcagctcctcgatctcaagagcaggggccaccaccatctcggttcaggcgcgcccatgcctctgcggcaagccaccgatggcaaaggcagcggcatcaacgggaacggc

SEQ ID NO: 380190 - DNA, 277 bp, Zea mays
tacgccgcagtacggtcggaattccgggtcaccacgcgtccgggacctggctgctgctgctgctgctgcacagagacagctaactactgaagttgctcatgcaagtgacaacgcgaaacttggtgaagatggcacggagctgcaactgccaccaccttcaatggtagacatatctagggagcaactcagccaggaagtggaggttgcaagctctgggccttcaggaactgatgaaactgctgagatgaaacggctaaacactgaacattcacctggt

SEQ ID NO: 380191 - DNA, 227 bp, Zea mays
agatcttccattatgcgctttagagtcagatgaactcatacagattgttggagagattagtgctgctcggaatgctctgatacaagtaacaacaaaattaaggagttttctataccatgagatgtctggtcctattcaagttggcaatattaatgtacatggagccatttctccagtagcaggctcacctggaggacccaacctcggaaatgatatgccaatgagtg

SEQ ID NO: 380192 - DNA, 100 bp, Zea mays
caagcttcttggtgctggaaagagtcatgtcaccactagggttatgggtactttgggtatgtggcaccagagtatgcaaatactggactcttgaacgaaa

SEQ ID NO: 380193 - DNA, 212 bp, Zea mays
tgatagaagccatttgctgatgtattctcagcttcatgaatggatgttaaaatgccactctaagggcaatgctttgatgaatgatttggttgacacattggatctgtatagttctatgtttgctcgtttactctagacatgtatttctactggagtgtttacacttgatctaggaacattccattctggccttccaactgataccataccat

SEQ ID NO: 380194 - DNA, 203 bp, Zea mays
agacgtggcgaccacggtcgcattatcccatcccctatctcatcccctatttcaaactacactctgcaaaccatgccaagtacagtttcgcgtcccctattttacgaaatccgctgaagacagtcttagctctcttttcttgggcacaaacatatctgtccattctcctttttaatgaataaaattttattctactgcctttt

SEQ ID NO: 380195 - DNA, 169 bp, Zea mays
ggacgtggtcgcgacgcgtgggcggacgcgtgggcggaccgtgggcggaccgtggggcatttttcttctacctacaagtggcaacacacaggtattcgacaaagcagttgagtttattgttgacacaagtggaagcatgcaaggaaagcctcttgagaatgtcaagcgt

SEQ ID NO: 380196 - DNA, 128 bp, Zea mays
gaccatgacgcttggattcaattggatggaattctaccatctttgaaaaagttccgcaagctagcaggtgttctgttggttctgattacggatttcttttcatctttagatgggctacttatggtttt

SEQ ID NO: 380197 - DNA, 189 bp, Zea mays
cccacgcgtccgcccacgcgtccgaagaatcggaacatacttttacaagggtgtcttgtatggttcagttggatttgtctgtggcataattggtcaaggaattgctaatatgataatgactgccaaaaggagtgtcaaaaaatcagatgaagatattcctgttccaccacttgttaaaagtgcagctct

SEQ ID NO: 380198 - DNA, 248 bp, Zea mays
atttattcctgcagttctctgtttgcaaattcgttacctaataatgatctaattggccccgtgctaagtaagtccagtagcttttctaggaaaaacaagcagttcactattcttattgtatttgatggaattgttctgtaggttttgttacatagaatatatttttaatctgcaggcatctaacacaatttaccaagaagggttcagatcccctgtccttcaagttcgttgagcatcacaagacacaa

SEQ ID NO: 380199 - DNA, 153 bp, Zea mays
gtacggtcggaatccgggtcaccacgcgtccgggacctgggagcaggctggtggggcccagcacctgcttccccgtgtagaagaggttgaggctagcgcacgccgtccttgcccgacgacagcaggagcttggcggcgtccctccccgtcatg

SEQ ID NO: 380200 - DNA, 231 bp, Zea mays
gcatcctacacggagaagcgtgaggaaaggaagctattgaaactcggtgcagatccttttcgtttgaacgggcctagctttggcggccttggtgaaagattcaaagcgaaaagggtgcttcttgcaaggaggggcaagcacaagagaaatggaaagcatacgaaagcgcaagagggccttgcgttgtgctcatgtctgctgctggttacccatttaccatcctgtccatgg

SEQ ID NO: 380201 - DNA, 224 bp, Zea mays
cccacgcgtccgtattgatactccacatggaacatgatgctcatgtagacggtaggatgtttaattttatcattgttgccgtgttttttctgtagtgatgttgagtgtatcgtagcctgtttgtgcaagtgcaatatgtcctccctaatacgacacgtttttctggagccaaaaaaaaaaaaaaaaaaaaaaagaaaaaaaagaagaagagaaaaaagaaaaat

SEQ ID NO: 380202 - DNA, 230 bp, Zea mays
gtcgtaaccgaactaaagccacaggctgcagctgcaatacacaaagataaaatatcttagaagccacagtcgtaaccgaactaaagccacaacgaacatgctgacgccctcccgttaccaagttaaatgcaattagcactttgcttgtttgctctcactctgagttgatctttaatgccatctatattgtctgagattagtcttcttgttatcgttatctcccttgtgct

SEQ ID NO: 380203 - DNA, 220 bp, Zea mays
attatttccagtttgagctgcacatacggcacgccaagtcgtccgcgaggctggtgagaatactgtcgtccctggaccagaagaccggcagggccctgaagaaagcgccgcgtctgctcaccgcgaggcaggcggccctggtcgaggtgaggctggacagagaagcgtgcgtggaggaattctcgacgctgaaggcgctcgcgcgggtgttcctgcggtc

SEQ ID NO: 380204 - DNA, 225 bp, Zea mays
catttactcttggtctaggtgcttgcttcgcaatggttttgcttctgcttttatctatgatgctggtgtccagggcaaggcacaacaatttgatggtcacattgttatgactgtaccatgtagtccaatgctaagactatccgcagcggtttcctctaaatttttccccctataccactttttacgtcacatcatcaacatttcatcgcctactttttttatctc

SEQ ID NO: 380205 - DNA, 229 bp, Zea mays
atgctgactttgctaatgggatagtttatataaaaacttgaccatttggatctttaaagaggaaataacccacacaaactaatttagtcctgcatatttgtttggtattttatcttctctataaataacttatgtcaggatgacttcgatgtagaccagttgtctgcgtcctgcgggcagcactaacctttgttttccgataatcttcagagctgtctaagcaattcca

SEQ ID NO: 380206 - DNA, 176 bp, Zea mays
cccacgcgtccggcacgggcgcgcgctcgacgcgatcatgctggacgtcacagggttcagcaaggaccagctgaaggtgcaggtggagccgtgggggagcctcaaggtcagcggcgaccagggcgccgtcgacggtggtggcggcatgcagcggcgctacttcaccaagcggttcg

SEQ ID NO: 380207 - DNA, 227 bp, Zea mays
ctcacgcgtccgattccagtggctggccgtgccgcggctatcaatgccacatttacggtccagggagggatggaaggggtgatcatgttttctataatgtttgatgagagtcacacggagatttgtgaatttttggtggcaacgtagttctaaaaaatcgaagggacgttgttggcctacctcatcctactttaacattaaaccagacacacccttaataaaacctc

SEQ ID NO: 380208 - DNA, 223 bp, Zea mays
gctgagctgagctgagctcaccaccaccacacacgggagatagctatagctagcatagcaagccagccagtcagcgacttagcagcagctagctagccatgctgccgtccttcgtgtcgccgacggcagcgccgcggcctcggtgacacctccggcgcggccgataccaggcagctacgggccgccggtgctgggccacctgcaggaccggctcgactacttc

SEQ ID NO: 380209 - DNA, 227 bp, Zea mays
atggaaatagctgtggtggtttctacaatggtagctttatgcaggagtttagtacgctagagctgaagcacacttcatgaataaggttgaagccttacgaaccttggacggacgggatgtggcctgcacggaagccagatgcacccgaggttccagaagctccacgcgcgaccggtcggaggacgcagatggtacgtcgagggggaagctaagctcatggtataact

SEQ ID NO: 380210 - DNA, 227 bp, Zea mays
agaaactgagaataaagtttttataaactgtgacataaactagtatatcagtttataaaaactagttttttttttaaaaaaaaataggtgattccaaacaagccctcattatataagaaaccaggcatggctgcatggctccttcatgtcactttcaccttatcgatcagggtagccactagccagccatctaagtcggtttcttcttcacagtcgtgtcgcaagct

SEQ ID NO: 380211 - DNA, 103 bp, Zea mays
gttgtcagtacacatggtcaggactgtggatcccccatgacttagttgttgcctcagcttccacatttcaactgtggccttgtaataaaatgtcgttgcccaa

SEQ ID NO: 380212 - DNA, 141 bp, Zea mays
cccatgtgtccgtccacgcgtctgctgtgctcacttctaggctgttgaaagatcgctgttcatgtggaataacgatcacattgtcagcttgatagtacataactgccaattgatcatgtctcttgtttatccagcgccaga

SEQ ID NO: 380213 - DNA, 233 bp, Zea mays
ctcacgcttccgctcatgctcatcaccacgtcgaggaagtgttgatggtctactgccacccccgctatcaatgggattgctcccgctatcctcttccaccgacggcgctagcattccatcgaccctgatgcagccgtcgactggtcatcaacacccctcatagagagaacaccatcccgcccctcgctcgttgccccatctcaccctgagccttagccaccccagccgagcag

SEQ ID NO: 380214 - DNA, 226 bp, Zea mays
cttttgtaagatgtactcttaaacacgatgtttggtgctcttgggttcacaagatgttgattctacagggcacagaaatttccctatatattcaaactggatatgatggacccgttctatccctctaaattctaatcttaccagggtatttcattttcatggttataggaagctaatgaattgctgtcaggggaaaatggttgtgggcgccttaaagatctggaac

SEQ ID NO: 380215 - DNA, 105 bp, Zea mays
gctgttttatggcctttaaaccaatacttttgcttgggatatatgtagctataactattgtaatataatctctgagcttctcatgctgctattcaacatatcatt

SEQ ID NO: 380216 - DNA, 217 bp, Zea mays
ggacggtggtttttttcttttatttttttttttttcagtcactaacatgcatagcaagaaccgtagcgaaagtaataaaaaaagaagaacaaaaatggcgacatcgacgtctctctctctctcgctctctctttggtacacacagcacacaggaggttacttacaacatagagtaccagactagctcgtatcatcactctccaagaactcggcaaat

SEQ ID NO: 380217 - DNA, 99 bp, Zea mays
ttcatcgagtagaagcatcggcgctgtggcggcgctcctccttgcccattcctctctttcgattcttcgatgcccatcgtccccaatccagtgagctgt

SEQ ID NO: 380218 - DNA, 226 bp, Zea mays
ggacctggtgagacgccacaaacacttacatgcatagttcaaaatttaatgaatcgcgttcccatttaataatagctcgtgcgctaagcctgacacacgcacatccatcatataatttttgaaaataaatacataaataaattttaacatactctcttgatgttttctgcaatgctgcaaggcttgcaagtaagaaatgctattcaattcagagtggttcctatgt

SEQ ID NO: 380219 - DNA, 193 bp, Zea mays
catctactgcatgatgctgctcgtagcgtgccgccgtcgcctcgccgacgagcactcgaagaacgccgcgttcggtgacctgggggacgccgtgtacggcgcgtatgggctgttcgccgtggacgagaagcctgagcacagccaatgcatcagcggcgtcggctaccgcatctgcatctccaacaccattgtt

SEQ ID NO: 380220 - DNA, 212 bp, Zea mays
ggaccgtggtccaaggccacgtcttcgctacatctaaccctgtaccaacaaaccagtgagcagatcaattatttcatgtgtcttctcaaggattgagtgcccattccagtgttcccgtcaactacggtggttacaaccctccaaattatcctccgcaaaatctccgtcctcgtcgtggacaaccaattcttcatcagcgatataaccaggca

SEQ ID NO: 380221 - DNA, 219 bp, Zea mays
gcacgaggcaggcgccggcggggccgctccagctcagggtggtggtgacgggcggctacgacggcaagtgggtgtgggcggacgcgaggtgctgccgcggcggcggcgcgccggcgaggtctacgacacgggcgtccagatcaccgacgtcgcccgggagggatgcgtcccctgcgacgcgcgcgagtgggagtgagtgatgcatgtggacgaaccacg

SEQ ID NO: 380222 - DNA, 192 bp, Zea mays
caccagtatatctacgagataatgttggcatctggtcttctgcacaaagaacatagtgtcacagcactacctggccaactccaaccatcaaactacccaatcaatccggagctcttcctcatccttgagcaaacaagaccagtctcagtttccgccttccaaactgtcggtggagctaagagaagctgtaag

SEQ ID NO: 380223 - DNA, 224 bp, Zea mays
aggagaaactgcctatcaagcctgggccgcaggggtactacattgacagcactgaagctccgccttcattgtccatggacgacgcggggcatgtcgtcaccgtggacaggatatggtcgctttcctcatccggcgaccctctcctcgcatcctgcccgcagatcaaggacctctgcctctcttttgctctattcaagctccagctccggcggttcattgggtgc

SEQ ID NO: 380224 - DNA, 232 bp, Zea mays
cgaacttgggcagcgtggtggagtggtggctgggtgagacctatcgcctccaccaccgcggccacatcgccggcctcgacgtggagtggcgccccgctcgcgtgccgggccccgtccccgtcgccgtgctgcagatctgcgtcgaccaccgctgcctcgtattccagatcctccaagccgactacatccccgacgccctgtccaggttcctcgccgaccgccggttcacctt

SEQ ID NO: 380225 - DNA, 222 bp, Zea mays
gtcgtgccccccttaatggggtttgcctgtcgcccctctctacttggacgaccgccctgaagctcacccataccgcgacctcgccgaaccgtgcccctgctccagttctcgcctaggtccgcaccagcaggtcgtcagggtcgcccgaagatgttttccctattgctccttgtccatggccttgggaactctatattctcatctgtagccgccggttattaa

SEQ ID NO: 380226 - DNA, 200 bp, Zea mays
cccccccaacggtagtttctgtacgtaactgtgctaacatctgctagtagcctaaactttgagcgatcgaagtgacagaaggtgttgctaaagctcggttgctggcctggcacgcagattcctggtgatagcaaacgggatggcagcgtgctacagcctgctgcagggcgggaggtgcctggtgaccatcctcacgggtg

SEQ ID NO: 380227 - DNA, 214 bp, Zea mays
cccacgcgtccgccgcgtcgaccttgtcctagtgcctcgtggaccgcgactcccctgccgcgtccacgctccagttcggctgcggcgccgcctaggcgggcaccgtgacgtcgcctctcgtgcgcacccgcgcacgagcagcttctgctacgtggcgctgtcgggcatctcggtttgcgggcaccgctgtccatcccggcatccggcttcggca

SEQ ID NO: 380228 - DNA, 217 bp, Zea mays
gtccataggaacggtgagagttcttgccagcagcttgtctataagaattatgtatttctcttctttgcttgcgctagttgcagcttacatgtgtaggagatagcactagcagaagttaaaaagctctgtttcgtcgggtgcaggttgtagctgttggcccgggtcctctggacgaggaaggcaagagacagccactgtcagtgtcggcgggcagcac

SEQ ID NO: 380229 - DNA, 229 bp, Zea mays
cccacgcgtccgcttgtacttttcttttttgttcacaccctgtcatgctacgaacgtctagaacttctttcttctctttaataactttcttgttccactaccaagtgtctttatcttcacctccttttgttgctccacgcaccaccttctggatgcaagttgatatcatctccagtaacgactgctgtccaagcaagccttaggtgcaagcgagccttctgggccttta

SEQ ID NO: 380230 - DNA, 228 bp, Zea mays
cccacgcgtccgggaggctggcgtacacgacggcgctgaccacgctcttcagctacgggctgctcttcgccttcggccagctcagggatctcttccgccacctgctcggctgcttcagacccaacaaggacgacgacgtcaagcaggggtacgcgccgatctgcgtcggcctggaggatttcttcgtgcgacgactctacctgcgggttcaggattgcttcggcaggc

SEQ ID NO: 380231 - DNA, 224 bp, Zea mays
cccacgcgtccgaacatttgtttcaattagtattattcgtggaacagattaagacaataaggttgccccgccgcatggtgattaacttattgtttgggcaacaaaattccatgtaattctacacctgtacaactatgttggacgcagaacattttattcccatgtaatcacaacatcaataaaatgttctgcgtccacaatagtgtacaggtgcagaacatttt

SEQ ID NO: 380232 - DNA, 243 bp, Zea mays
tgcaacgttgcatatcttgtcacatcttgaaaagaaaggggattcagtctttgcaaagaaagagtacacacgagctgtcattttggtgactagtcagaaaacattgccagttatgataacagtggttgagcagcttggaggagccctcggggagtccggacttctagttatcccttgtgtttttgcacacattaaccagatcattatcgattctatcatagtaaattggtggcgccggaggga

SEQ ID NO: 380233 - DNA, 240 bp, Zea mays
attattatagaggactatacaatctcttatttaattcacctgaccatcaatttgtctatgtagcttaattatcggttcttctatattattgtatcctcgacgacattgctctgcatgtatgtattatccttctattgggtgtatgtgatcaagattagagcagctgagcaattgccaatttgaaggccatgttgaagacaccagcatcaattattttgattatctattgttttctgtgta

SEQ ID NO: 380234 - DNA, 239 bp, Zea mays
ctcactgaaaaagaaatgtgttagatggactcttcgagtaacaagtattcacggcctccgagcaccattgccatttcttcagtctgtcaaggttgcgcccttgtgtcacatacagtttattaacgttcttatgtaactgagtccttgcatacaatattatattaagcaaaaaattgaatatgaattactggctaatagtgttactgcactgccgtagctttatatgcaatgttaggaga

SEQ ID NO: 380235 - DNA, 226 bp, Zea mays
cgctccgctgggaagtcaaccacccgaccaacctcatcccacctcgactggagcacagttgagctccaattttggcgtttggccgttgcggacgccggagtggctgttatcggtcgcgtgggctataacttccccgattactcaattaactttaacatcaacctcacttagacctcctcttgcacctgctaagacccagcgaagcggtaacggtcctccctgggcg

SEQ ID NO: 380236 - DNA, 238 bp, Zea mays
gcgctgcctcgctcggtctggatcgctatctcgtgtctagcggctcaagatggagggaaagctagcgcacagccgagaggagaaagcagatagggagggagaacaaagagagaggggaggaaaagaccacagagggtgagcgagagccgatgcggatccgccgtttgtcgctcgtgggcgagggcgagcctgccggcgccccctcggtagatcgagaggaggcgctgttcagttgagg

SEQ ID NO: 380237 - DNA, 159 bp, Zea mays
cgccaggctctgcagcgcgttctccttgtccatcaggcatgccttcagctccgccgcgtcggtgatggacctcatcagcttcgcctccagctccggctgctgcatcgcgtctggcctgtgaggatctgcggcggctcctgccattgcctccatgagtgc

SEQ ID NO: 380238 - DNA, 230 bp, Zea mays
ggctggaccatctgtgatggaccttgctggatattgctgtactgctgctgttgttgaaccacctgtggttgtggttgccttgcctgggactgaagctgctgaccagtttgatgttgccattgatgctgcggttgagcgtagaactctggtgtctgtctggtggttacctgaggtacctcaagtactgtatgtgcctgagttttcctagtagtgtgtgtctgcacaggttg

SEQ ID NO: 380239 - DNA, 229 bp, Zea mays
agacgatctagcatagttatggagaaaagatgttcagaagatctaacaataactttaactgagaatcaggctttaagacggttaaagaaagcctgttcagatgacagacaagagaacgcaactgaatcacattgccttgacttcatttctggaaatacagataatttcatcaatcgaagcaaacaaaaaatgaatgtagatcagctagatgcaaaaaatgtggaagatg

SEQ ID NO: 380240 - DNA, 230 bp, Zea mays
atcccaggtttgaacttagaagatggccctgcacactctgcctcgacgtcatcttcaccagagcagactactgatgtcgatggaagtaccactggtgatgtcaccttctaagtataacttgggtaaccttattacctcttcctcttactccaaatgctggttcggtgttatccatgttctcagcattaacctcttaaagttctgaaaagacaaggatgaatgcacactgc

SEQ ID NO: 380241 - DNA, 224 bp, Zea mays
acctgtttcagtaaatatgtttttgatccttatgggtacgacaaaggcgactactatgatgagatagggacagatatttcagccgttaaagacaatttggcaccaatacggaacattcagttttgtctgtttggtgatacataatggtattccaatttacaattttacatcttatctgttctatttgagtgcagaagctgaaatgaagcgtgaagttgagagga

SEQ ID NO: 380242 - DNA, 141 bp, Zea mays
atgccgcccactcgtccgcccacgcgtccgggaggtggtcgaggccgcaagctagaggacccggaagaaggccgtgatcgtcggccgcgagcttcggcggcgtggtcgcgctcgagttcgtccggaacagtccgccggcgt

SEQ ID NO: 380243 - DNA, 224 bp, Zea mays
cccacgcgtccggtcgtgatagcagatatttatcaagttccagtgatggtcttcaaaatgatgtaagtgcatcttctttctgtgctattgtgaatgactgttcctgactctttatatcagctcctttcttattttggtaaaattttcatttctcctttttttgtatatcagggaaaacatcagttggataaaactattcagatgcgcgaggaccttgaaaatga

SEQ ID NO: 380244 - DNA, 230 bp, Zea mays
accacccacgcgtccgcccacgagaccgacacaaccacaattggatacattcccacagactgtggaacatcaggagggttcgccgtagaatacaaggacaaaaagatcaccgaagacgaatacatcagtgcaatcaaggaaataatcagcaaggattgtcagatacaagaggaacttgacattgatgtgctatgtacatggagagccaaagagacatgacatggttgagt

SEQ ID NO: 380245 - DNA, 220 bp, Zea mays
atttgatcagtccagctattggtgcacacttcattatgtatctagcaaacatgcaagatggttcaaaatcagccctaccaccgaaagatgttgaaaggtttgtttttgtactacaagggagcatttcattgactgtggggactggaactatccattctctgctatgtggattcttatggatatcttcctgcaaacacaaagcattctatgatctcagatg

SEQ ID NO: 380246 - DNA, 155 bp, Zea mays
cgtgttaatatgctgggcacattgaattgaatttatacacaaccaagaaacactcgccagagggataggctcaggagttgacctgaattcaaggaccgtgggaatacatgaatacatgatgctgcctgtcccagccagaaagccaagaccaaaat

SEQ ID NO: 380247 - DNA, 233 bp, Zea mays
cccactcgtccgcccttttccagagctctgagggttccgtatcaccttctaacaagataagagggaacctgcatacaacatctacggagaagtcaccgaaaactgaggcaactattcatgccaccagaaagaagttactgaagagcaatacttcagaactggagctcccaagcttagctcaatggttgaagcctccaaatcctaagaaagcattcagagatgaggctgtgaca

SEQ ID NO: 380248 - DNA, 196 bp, Zea mays
gacaatgggtgagtgattttgttttgttctgcaactatttatcttaatgttcttcaacaaaccattgagttaaacaccactgattgtcacaatgatataaaagtgtgttgtcagttggtttctgtggaagtgtgggcttcaacttgttaagataaaaaatctcaaccttaacagttgttatggttcatctttctcc

SEQ ID NO: 380249 - DNA, 225 bp, Zea mays
aattgacaccagcaagcatgtatatattgtcaggcgtattatagatgaacatattagatatttctattgtagtattttctcaaattttaaaagaatcatttcatgcagttcattctcatgtatgtatctgatatgcttgctttttcagcagcgtttttttagacaaagctcttcggcagctttgattaagaaaaaagaaaaaaaaaaaaaaaaaaaagaaaaaga

SEQ ID NO: 380250 - DNA, 181 bp, Zea mays
gcgcggtccttgctgggatcggacgctcctcccttcaactgaccgtgtggttgttttgtttcctgctctggctaaattccagacaagaagaacgagaacaaggaggtggccgtcaacgacttcctgcccgccgccgctgcccgcgaaccatccagtactccatgtaaagtcgtcctgctca

SEQ ID NO: 380251 - DNA, 228 bp, Zea mays
ggaagctaatacaccattaaataaggaatctccagaatctgctctgcatgaaagcccgattgagctgccaaaatctgttgaaaccaatggtggttcaatgacaaggtggctggcggacagaaatggtaacttgatggctaatgcaccagatgtttcccatatacctttccatggacatgctgctgatgtagctaaggttgatccttctgttggtgcttcaggccactt

SEQ ID NO: 380252 - DNA, 229 bp, Zea mays
cgcagaacagattgaagcggcgcaacctcgtcgccgtcctcgcctaaaaccttccgcctccccgcctctcgtccacgcgcgacgacgcgtcagcaagcaatcagttcaccccaaggtgctaaccccaattccccacctgttgcttcccgttttcgcctcacagttcccctctgtggctcctgtgagtcgaccaaatctagtcgtgcaaccccgattcccccgcgaactt

SEQ ID NO: 380253 - DNA, 226 bp, Zea mays
gaaattagtaagatgcatcaggcccaattaactgtgaattggttgaaaacttcgatgcagaaagagcttacagctcattggagtgcaaaagagcaccttctttaccctctcactacttcttattattgtacccttctttttcgaaaaaagatggcatcttttccccatcttccgagttagaactgagcaagatgtgtaatttcactgagatgcaggtttatgtata

SEQ ID NO: 380254 - DNA, 225 bp, Zea mays
cccacgcgtccgtataaaaatatctccaccaggcttaagcttggaccatttgaagatgatgtgttagtacggacagcctccgtggagcggcaacgtcaacaaaattctgatgaacctgaatctcctggatctagcaaaccgtgcagggtccctgttcgattatacgtacgcaatgttcaagaagaccttgagtacatagaagatgcagttcctgtcagtgactgg

SEQ ID NO: 380255 - DNA, 226 bp, Zea mays
cccacgcgtccgaagagacggagattgcatcggctgagtaaagattttgggtggaacttgcatcgtgttgacgcaaccgaagcattcttctgtaagtccattggtaccctgtcagatgcgtatgccttctctgtagcaactcataatctccctctcatattttgataggtgccactgacgactcatggcaaaagaaagttgtcaaaccatgtgtggatgtcgtaag

SEQ ID NO: 380256 - DNA, 217 bp, Zea mays
cagcagatcgatcgaacagctagctagctagctatatagcgagagggctccatccatatccatccatctgctactgctagcagctgttggctgttgctgcttgcattgagatgtggatgatcagcgcagggcgcatggagcagtgggcgccgacggcggcaatggtggccaccaacgtcgtgatcgccgtcatgacggcgctgatcaagcaggcact

SEQ ID NO: 380257 - DNA, 216 bp, Zea mays
gttcaattttgaacaaatcctctcgtctctcctacgacaaagcacatgtctaaggtcaaccttggttttggtcgggttcaaggttctcatatggcctatggtgccgttgtgtatggtcacatgagctacagggctgatgtgtatgagtggggcagttcgagggttttctcgacctatatttcttaattcaatgttcgggactatcttaccccctag

SEQ ID NO: 380258 - DNA, 236 bp, Zea mays
aggtccgggacgctggtcgccgtgacgccgttctcctacgtggattacttcctgaacaagctcagcaacggacgcagcacgacgccgaggagctgctggctcttgcagtccgcggagcttatcttgcgtgcggccagaggaaccggctgcgtcgggttcaggccgtccgagatcgccgcggcggttgcagccgccgtggccggaaacgtggacgacgccgacgcggatggcgtcga

SEQ ID NO: 380259 - DNA, 175 bp, Zea mays
caactaatctatccccgatcacacggcgaaccgccgcaccaccactatcaccaatcgcaatggagaaccctccaccgtcctccgccggtccgtactcggcgcccgcgccggcagcgcagcatcaggacgcggcgaaggaggatcaggacgtggcgcactcgtgctcaacctgtgc

SEQ ID NO: 380260 - DNA, 246 bp, Zea mays
cttggtcagtaaaaccatcaagccctgcatttatccatgccacgcctggagttcagatggtcgcaggaggagatgatcttgggcaacaatacaacactcccgaatctgtaagtacagtctgtttgtgtggccattggaatattggtgtttattcacgaatcttaatgcttttagtttgttatacctgtgtgcatacttgcagttttttgggtttggtcacgccactccactctacaatttttaaag

SEQ ID NO: 380261 - DNA, 200 bp, Zea mays
tccacgacggccgccagccatttcgccgcggcttccacttcgtgttcgttcccccaattgcgtctcctccttccaactccacgcgcttcaatcccacaaccgcgtcgccgtcccgatcccccctttctcttccatataaaaaaccctcaccaggtccatcgattgaaacccaatccagaccccatccatcgattggaacc

SEQ ID NO: 380262 - DNA, 107 bp, Zea mays
ttcccacatctcatccatccgctcagctcagctcgatcgaacttctcacacgcgtacatgaattctcaagaacgcactggttggtggtggtagtatctactagctac

SEQ ID NO: 380263 - DNA, 200 bp, Zea mays
cggacgcgtggtgcaagatgctgcaaaggatggggtgtcttgcgagctcatcgatctgaaaacactcgtaaccatgggataaggaaacagtagaggcctcggtgaagaagaccgggaagctcctcgtatgcagctcgtctcgctcgttagccacgaggctccagtcaccgggggcttcggcgcggagatcgccgcgtcca

SEQ ID NO: 380264 - DNA, 234 bp, Zea mays
cacgcctataatgattgtgctacggacaaaactggactttgaacaacgacaacatgcttttcaaaaactagtgttggaggccttcatgtgcaatttgtttctgattctttgtggtttgtctatctcaagggcttgggttcctgttgaggcgtgtctaccccttagaacactcttaacaatagagtcaacttgttagctcatataaacttaaaaaagataaaaatagagtaacac

SEQ ID NO: 380265 - DNA, 232 bp, Zea mays
gcacatccaggagaaccaaccaattgctccttggaataccaaagaagatatattacttttcttcaagctctatgatcctgaaaaagaagacctaaggttatccttttctatctgatatacctatttgtttgtgtatttttcaaccaactgaacataataggtattaaccttgttattatgaaacagatatgtcggcaatttttttgtgaaagcatcaggcaaaccatctgat

SEQ ID NO: 380266 - DNA, 228 bp, Zea mays
  unsure (1)..(228): unsure at all n locations
agcttctactactacgtaataccttaccttggagcagaacgtaacgtggcccggccggtcgatatgagatgtgtaaagaaagggaaaaaaaaagaacgcccagttgcaccatgcangccagccgcnggcgtggagtcagaacgnagcagcagcacccggctttactgactcgttntnttgtaatgtaatacctacctgcagtctcaagtaaatgtgtgcctgttatta

SEQ ID NO: 380267 - DNA, 226 bp, Zea mays
ggacgcgtggtgcaaatgccatataaacatttaaattgcaatataccatggcaactactggagtatattttcctgttatgcatttgatattagaaagttgtcaatatgcatgattccctgacagattttcagttcaaacaagttttgagacattgtatgtttgtggcaggttctgaatgaagctaaccttacaaatgctgttcttgtacggtcagtcctcacacgt

SEQ ID NO: 380268 - DNA, 233 bp, Zea mays
cccacgcgtccggcgcgacgatgtcccccctgaggcgcgcactcggcgaggtgggagtggctgcggcatcggatcccgagggcacgctcgcggcgacggccccatgaggtgcgcacgacggcgaggtggcagcggcgacagatcccaggggcacgagcgcgacacgtctcactgaggtgcacgcggctgtggcggcgcgacgacagatctcgggtgcacgtgagcaacgacga

SEQ ID NO: 380269 - DNA, 240 bp, Zea mays
gttatcatcacatctttggtgttctctatggttttgaatacttgcaggcaagatggaaacaagaggaagctggaaagattgaggtaattgcccttgtaacctcaaagaagaaagagagggagcaaattgagacctccatgaggtcagaagagaatttactgcatcttaaagcagcgaatgacacagaaagatacaagagtgagatccgtgctcttgagcagcgtattgcacagatgaagg

SEQ ID NO: 380270 - DNA, 243 bp, Zea mays
cccacgcgtccgcccaaacgcttctcgccctcccgtcctgttctcgaccatgtcggtgtccgacggggacgacgacgaggccttcctcatcgccctcgacgccgcggaggccgccgcgctggactcctccaagcgccgccgcctctccaccacctcgtcctcaccgaccccctcaacctcacccgccgccaccgaggggccctacctggccgcgctcaagggaagccacagctccacctggaa

SEQ ID NO: 380271 - DNA, 215 bp, Zea mays
cactaacgctggtgtccaatggatccgtcactcctccggagcaatggccgcctcctgtccttgttccttctcctgcttgccgcctccgattgcacggcggtgcagggccatgggctgcagcctggaccatctgggggggcatactactcgcaaagcttcagcccgtccattggccatcgtcatcgtcgtgctcatcgccgccttcttcttccgcg

SEQ ID NO: 380272 - DNA, 276 bp, Zea mays
attccgggtcgaacaagcgtccgggacggtgggcggacgcgtggggctgcagcttcagttgtttgttagcaaggttcttaccagatggtgctgagtgatgagatgcagagcggttcttggcgttcctgacttaattatgatcttgttgatgtctggatgcagcgtgtactttagactttcatgtttcttcctttctggatggatgtaggtaggtacatgatgtaagagccaatggatggattgtaggtacatgatgtaagagccaatgaattgtga

SEQ ID NO: 380273 - DNA, 247 bp, Zea mays
agctgattcttcagaggttttctcagaagcaaggaagcatgcaccaagctaatggtagcggtggatatggcagaaatggggcgattcttacatggatggtgctgatcattcccatctttattgcgtcgttcttctcagcagtcttctccaaggcactggattttgctggggtttatgcaaactgcttcctgtttgggatcctgcctcctgttatggcctggatccatcggtcacagaagaaaaggag

SEQ ID NO: 380274 - DNA, 249 bp, Zea mays
cacagagtcaaggcaaaagaaaagcttgacaagtgtgtaaaagaaacgctgttggacctttgttggacccttggcattccaactccaaaagcaaacattagaaaggaagatattgtgtcaaagctgttggactttattgctgaacctcactctgcagctgattctgggctctctgatgaccaggttacaacacatatttgtacattatgattctgttttcttatcagcgatgctgttgctgatgttttg

SEQ ID NO: 380275 - DNA, 243 bp, Zea mays
cggcggcctccccgcccgcacagccactggccgtgacggagcggcccctcccgttcctcatggattcgcgcgcgttcttcctttctgggcgagggcgaccaccggaaggcagcagccggcaaccgcgactgttgacatttgcgttagagctctacgtgcaaaagtccaacttcgctgtacgaaggcttagctgttatccttctctgggtcgtcatcaaacttcggaagttgccacagaatatc

SEQ ID NO: 380276 - DNA, 242 bp, Zea mays
atacaaacacgcgtccgcggacgctgggcggacagctggcggacgcgtgggcgacggaagatggtagagtaacaagcactagcaacattaagctcaatacacatgatcgagcttcaccagaacacatagacaaaggaagtactgccatttcctctgaagctcagcagaatggagagtatccagagaccttcccagcattgagaacttcattcttgaaggcattccgtgtaatggatagggat

SEQ ID NO: 380277 - DNA, 207 bp, Zea mays
cccacgcgtccagccacgcgtccgggacgggttaccattctgggagcagcgagatgagaaaatttttgcgatctagctggatttggatctgagcttttacaaattacaaggagtgggaggaaggaaaaaaaacagagagtaataaataattcgtgagaacgctgaagatttgatttgctacgattctttgaaattcgtcatagtttt

SEQ ID NO: 380278 - DNA, 236 bp, Zea mays
cccacgcgtccggctcctcttccgccgccgcagatctcgtatcgccggagtccatgtaccgcgccgccgggagccacctccgctccctcaagcatcatggtgcttctaggcttgccagtacaagtgttgcgaacagtcctcaggtggtccgtcaacctgcctcctggtgggaaattcaagggacttccttcccctgaaggtcccagtcccaggcattagcattccctcacctctac

SEQ ID NO: 380279 - DNA, 99 bp, Zea mays
cctcaccatgaagaagattccaacaccatcccttgaagtcaaggaagaagctgcaacagccccaccaacatcgccgccctctgaggagctacaagagcc

SEQ ID NO: 380280 - DNA, 235 bp, Zea mays
cataactccatttgctgacgctagtactaactggattaatatggtcttgaccaggctggagaagcaatgcgtattcaacgtggaggggtgatatctactcaagtagtttcgtcaacagaaaagctacaagatttcacatttgatgaaggtacactgctacatggtgagctgcatcatggaggcaatctcaggcagcggcgcacggaggagacgaggcaggatgttcgtgatggca

SEQ ID NO: 380281 - DNA, 198 bp, Zea mays
attctgtgacggcgtgactcatcttcctcctctcctctctgctaggttgcacgtgcagaccacgaacggatgcactgcccccaaggccccaatccaatgatcctggtgggcgtggctctaagaagagcagcaccgcgacgtaagggagctagaatttgtggctgacacttgaatggattgtccctctctgaggttact

SEQ ID NO: 380282 - DNA, 236 bp, Zea mays
gcgagctcgtgatcgcgtggggtaggacagcaaaagaagagcgagggcaaaagaacttgcgttgagtaaaggtgggactaaaccctagcgagctgcggcctagtatataaatgagcaccacgcgtctgtcgtccttctgaagtttcggcggcggcgtaggtagcggcggtctcaaccccaggcgagctcggctccggtcacccgtcgatccacgcaaccatgtcgaggaggaagac

SEQ ID NO: 380283 - DNA, 156 bp, Zea mays
cccacgcgtccgcaaatgaagaaactcaggttcattatcttggtcctaggattcagaatgagttgatacatttgcttgcttctgctattaagtccaaaattattaagaaaataaagagtgcaaagtatttctctgtcatacttgattgtaccccgg

SEQ ID NO: 380284 - DNA, 220 bp, Zea mays
cgagtgtgtgtaatctatagctgctggatgaatgctatttttggacaccagtgtctgaggtttacgttagtgttatttgtcaactatggttggaaggaccgaagagatgtgataatgactagcatctcatgccactggtgactgatcatccagatacagggatgctacatgcctgagttggaattggtttttactactggctccttggctgtgctcagtg

SEQ ID NO: 380285 - DNA, 231 bp, Zea mays
atcgtatgtgatattctatgcatatttacttcatttgttctcttgtatggtgtactttttgttccctaatttgaatggatggatgtatgtatgcttgcaatcgcatagagaacgatccgatcgaagaacccgaggaactcgcaagagaagcccctgagcagcagtcggttggtggatgttgtcagcattgcaaccactgctcaggagaagataaagctgtggaaggagact

SEQ ID NO: 380286 - DNA, 240 bp, Zea mays
cggacgcgtaggcagacgcgtgggctccatgggtcactttcacattactactaccatatctgtgagctgcgaagaagaaaaaggtatcaaatatcaagcagctttacggcagcgaaggatcattcactatgagtggatattaaactgttgcaaggaaaacatcttcattttcatcctaggaagttgaacgatcattctctttttgggcactgctgaaggtgatgttgttcacccaactga

SEQ ID NO: 380287 - DNA, 249 bp, Zea mays
cccacgcgtccggacccacgcgtccgtgtttacaggaagagtttggaggcaactgggtgctttgacgggctgtatcctgggtcaattgagtataagagggtcattgaagatgcaatgcaatattacaagagctctaatttgtattcccgaacaagggagatactgagtgaaccagtgcggcgaattgatgaaatcctatcaatgctgtactcaactgatgaatttaaaggcactgatcttcctcctagt

SEQ ID NO: 380288 - DNA, 251 bp, Zea mays
  unsure (1)..(251): unsure at all n locations
gtcagtctcaagagcgacaggttcatcgataagttctgccttgacacgagacatctccatctgattctgaaataaatgacggtatcatattcatcgttcaccatatttgatctcagaaagagatgcgtacaagnttgttgtgttgtgtagtttaagtacctgactagaatacggatatgacatgccagatccacgtttgtctcagtcagcttgacaagaggttgaagtgaagtgttccacagcagcagcta

SEQ ID NO: 380289 - DNA, 250 bp, Zea mays
cccacgcgtccgcatactctgctcgtcagctgaggatcgatcgcttgggctcgttggtgcgtagataggtactaggggagtatagctactagtaggacgtagagaggatccgagggagagagaggaagcaggccaagatggtgcgcgggagacgggagcagagagtggccttctccgcgacgaatgaaggcgccgcggtgcccaaggaggacgtgtggcgaggccggcccggcggggatctggtgcagaa

SEQ ID NO: 380290 - DNA, 250 bp, Zea mays
atggcacaaaggatttcgtcgaggagctttcacccaacgcaaggatcgggtacgccgtggacgacgtcgagggtgagggagacggcgaggaggaggacgacgacgaggaggacgaaggcgaggtcaaggacagaggcaacggagagaagcaaacactgaagccatggctggacccgcgtgagctcgccagggcgttggacggctgggactcgcgggaggtggccgagctagagggtgccgggctcgtctg

SEQ ID NO: 380291 - DNA, 191 bp, Zea mays
cctcctctgccaccatcacttcctctgccaccgcgccacggtacgagtacgacgatgaggtcttcggctcttcggcggccccagcatacgacgacgacctgcttggtgccggccccttcctgaaccccgtgacccccccagacgcatgctaaggtggacaagccatcccgcgacgagatcgacaagttgct

SEQ ID NO: 380292 - DNA, 178 bp, Zea mays
cccacgcgtccggaagactgtagaactacaccataagaaactcaaggaggaactggctgcatatgcagatagtgatccagctgcagtagaagcaatgaaggatgctactgatattgctcattcagcagctaacaggtggacagacaacattttcactttgcaaacatggtggtcaacc

SEQ ID NO: 380293 - DNA, 256 bp, Zea mays
gactcgccaaactgctgccccgagcggccgagccccccgacctcgaaatcctccgtcttcctcctcgccgtgtcgggcgtcgccttgcatcgtccccaaatccaacccaaacttctcaatctccgtcactggcatggcgtccgataccgagggcatcgcctccctcttctcaatgtacaacgacgacgaggaagatgaggacgccgacgagcccaaccctccgtccccagcgccgctcaccaccgtcacctcctcg

SEQ ID NO: 380294 - DNA, 246 bp, Zea mays
cccacgcgtccgcccacgcgtccggccggccgagacagcttccaatggcgaaggtttcggaaagggatgcttagggtttcgtgaccaccgacggcgctcttctcatcgacctacggtgacatttgcgaccgcatcaggttcctggaccacttgatcatctccatggtttgttggcattggaagaacttctgtgcaggggctgttatcaagaaggttaatttcgacagaacaatctcacacaagtgt

SEQ ID NO: 380295 - DNA, 229 bp, Zea mays
gagcggatccatggggccagcgacccacaggaacaacaacaccggacgaggcgacggaccacgcaccacctccggctccggagccaccgccaccgcaaccccaacggcggcaccacacgaggcggagaaccaggaggtgatcacgcagtcggcacagctcgctgacgccttcagcgcctctgaagctctacaacagcaggctcaggcagacgcttcacgccaagcagct

SEQ ID NO: 380296 - DNA, 241 bp, Zea mays
atgaatctttatacctgtaaagacatcccactgtctctttcgttttcgataagatgttttagccgttacataatgcctgtaaggtagaataccattgcagtagttgcatcagaaagcagccatttaacgccattgtaaagtgagtaatgattaaatacaaccacacttctgtctctcaggtttctgtacatggagtttttatagcacatcttcttccccagcaattagtacttgcagttag

SEQ ID NO: 380297 - DNA, 226 bp, Zea mays
  unsure (1)..(226): unsure at all n locations
agtantaccagtcatgatggagtattacatttgttgaggaaatggagagttacttgtagctactagtagcacatgttcactcaatggttttgtgcatacctgtcagtacatcttgagtttatcttgcatacctgtcagtacatcttgagtttatcttgcatacctgtcagtacatcttgagtttatcttgcatacctgtcagtacacctcgattctatcctctcgt

SEQ ID NO: 380298 - DNA, 291 bp, Zea mays
atgatcatctggtactcatgactgcaaacggacatgcaggccacattagcgccatcaaaactggtttctgttcaacaagtagccaaccaaaaaacaggagaaaaaaatagcatactagttattcgtcgcttgagcaatgtctgccagtagagatccatgtggaccccacggctcgttgcttgtggcatcaaggatctagcaaggtaaagtaataacggagtggcaaaactattccttcttgtaacaactggcaaggtaaagtaatactaacagaaaacaaacaaacgcccc

SEQ ID NO: 380299 - DNA, 307 bp, Zea mays
gtctcgtctcttgctcgcatcgtctggggaccgcggacgcgcgcggcgtggcgcacggcacggcagcctccccctcgctcctcctactccggctcttcccctctccccctcagccctacgcccctgcgcggctgcgtgacctgcgtccagccgcagcggctggtgcccatcggcggcaagtagcagagcagcagcagccgccggcggtcctcccctccccctcggcctcgctccggctctcccagtcccagctcgagctccgtactgaaggttgaagcaaggacccaaaacagattgccgccatcaa

SEQ ID NO: 380300 - DNA, 160 bp, Zea mays
acggaacttgttagaagaaattccgtccagcttttccagttggatcacctctaattgaatcaatccttgctgccagagctgaagcaactggaaaagctggacggaacttgttagaagaaattcgtaagaagattgagaagtggcaagaaccgcctcctgc

SEQ ID NO: 380301 - DNA, 232 bp, Zea mays
atctttgctcatattcacaaattcaggtgttacttcccttttctcatccttcctcattcttttctttctcatttctataggagaaaagtgcttattttatttgtaattatagtttaataggttaaactctaagggagtatgaattgttgcatcatgttgaactctagatttcacttttgcttggtgcataattcatggaaagtctaatttgaatttgtggcttattttgatt

SEQ ID NO: 380302 - DNA, 258 bp, Zea mays
gctagttggacaactggctttacctttccactctctccttgagaaatatgcagtgtcttgctgacgtgaagagcttggaatcagttctcttatttggtgtataagtgaatgttaggattctcaggtcgtcacacttcttgtggagttgcacctgccactgaataatttatcttctcaagtgaagggaagggggagtagtctgtcagaggccaccaggtgattgctgtagtgttgtcacataacgctgatctagtgatg

SEQ ID NO: 380303 - DNA, 254 bp, Zea mays
ctcgctgctcccctctctcgccggagcgagccccgggccggattgcggcggcacagcagctcctcccgcctccgcgatctcgtgatttacgccgacgccgacgccgccgcgatccgccgattgacgactccggaagggcaccaccacccgcgccaggggcggtgaccgtctccgccacctccgcactctctcctactccgccctccgccacttccgccgccgacaagtcctccctcgactcctactcgctttat

SEQ ID NO: 380304 - DNA, 284 bp, Zea mays
gaggctagagcttgcaaacaccaccagcgaagacgtcgtggcgcgcatgtaggcggtctctgcacccggcgtcccaccgccaccgctactgtcgtagtcctagatccgaccgcctcacgagctacattccctcgaggccggccttcctggtgtctcagcagcggcggcgcatggcgatggctgcggggcgtgggcacttggccctcttctcggtcgtcgtagtggctgggctcacctatgcggcgaatggtcctttcctgtccgatagcgtcttccagccgagc

SEQ ID NO: 380305 - DNA, 295 bp, Zea mays
aaagtaacatcaatgaagcaaccacagattggtgcctgaagtgtatccgctatgagatcagtatgttgttttgtcctatttaatcatttgagctataattttctaatgtgttggagatgttataacccctacactgtcaaatttaaaacattagatacattgacatttgaaataatgcatgtatagaagctccctgcccggtcatggagtgccgatgtctgtaaacccaagcacccacgccgtgaaatgccgtcggagcatcaagtcgattcaaactcttgaagttgctttcccc

SEQ ID NO: 380306 - DNA, 289 bp, Zea mays
aaggtgaaattgtagctgaaggtagtccttccaaagatcaaacggatgattttggactcaagctgaaagaagaggctatgctgaatagagtactgaaggaggcagtcttgtcaaaagaagttgccattgaacaattgcaatctgatctggcatcttcacttcgcatccaagacgttatgagaaacgagatccagagggttcaggatgagctttcttgcataacccacaaagctaagcagttggagcatcaggtatccaagaaggatgagtcaatcgatgagatccaaca

SEQ ID NO: 380307 - DNA, 287 bp, Zea mays
atagcagacgccctgtgctggcatttctcttaggttttaacacccagtatggaaccatagcgccatggatggatggatggtctcttcttctccggtttgagttttttctggtgttgggtaggcatacctgtcgtctgtcagcgtagacataaaaaaaaaaaggtctctgggacgctcgcccatgtatgtatgtatatgatgtgaagtgatccaaggtggttcgcgtactatggcaaaaaaaaaaaaaaaaaagaaaaaaaaaaaaaaaaaagaaagaataaagaaca

SEQ ID NO: 380308 - DNA, 292 bp, Zea mays
aaaagaagcacatgcaagaagaggaggtgcctaatattctctgtttaatctgtttcatttaaactgtatttaggtaaatactaacatcatagttattgattttagcacactggacattcaatccatcactgtttctgaaatgtctacatacactaagaacagaggtatctaccagtgccctgcaatacaaattcttgaatacagcatgctatttaatctgatcctctaaacatcttggtttgtagggttcagtttatgctccatcatttgatcatggtgttggcgacccagt

SEQ ID NO: 380309 - DNA, 285 bp, Zea mays
tgggaaaaaggagaggccgagaagcgctttacgataagactggtgcacccgtagcggcacggcatggcggccacggcgtactccgtggcgctcctcggcggcgcacgcctgccggccgccctcctccctcggcgcacagcgtgtgccaccagcagcttcgcctccaaggtaggagtaaacaacagcagcagcagcggtatatttcacgcgccgaggctctccctgcaccgtgccagggccgcttccgaggacacgtcggcctccggcggcgacgagctcatcgaa

SEQ ID NO: 380310 - DNA, 244 bp, Zea mays
ggacctggcggacggtgggcggaccgtgggctctcacggtctcacctcacaacctcagcggtcctcacctatctccacctcgatcgccgcctcgctgccgcgtcgggccagtgcgtgcgtgggggcgggcgtgagtgactggctctcctcggcgcgcggacccaggggcggcggcgatggggaagaatatgcgcatcaagacggcgcccaaggcgaaccgtgtccccctcctcggcgacgggga

SEQ ID NO: 380311 - DNA, 177 bp, Zea mays
cggacgctgggcgcgagctcgtcctcccgcgccaaccctatgcttccctctctcttcccctccccagcgatggacccgccgccaaccagggacagatgggaggagctggagcctgaaaaccgcggcttctccgaagccgacgacacggagacctcccgatctgaacgcgacgagggt

SEQ ID NO: 380312 - DNA, 192 bp, Zea mays
caccacacaagatctggtatccagattcaagtcttgtcctctgcacctcgaagcctagacttgaatctggataccagatcttgtgtgtgactgggtgccactgcaagagtacacacacttcgcacacaaaataaacagcttcgacacggtccctaagaagctgttggcatctgattcacggctgaggcctga

SEQ ID NO: 380313 - DNA, 260 bp, Zea mays
agcaccttcagtctggcattaggttgcagcatgtcttactgaatcaaggcagtaccaactttcacttagattttatgattgtttttttactactagtagcaacttttgggaagctggtgacacactatgtcgactactattctggtattgatcagttgtttcgtattattctagttaaggaagccatggagcacaaggaggctgggtgccaggcccccgagggacccatcctctgcatcaataactgtggcttcttcggc

SEQ ID NO: 380314 - DNA, 263 bp, Zea mays
ggcgctcctcctcaagctggcctgcgccgagctggtcgtgtcgctggacacagccgccgccgccgtcgcgcgcctcggcctgcggtgcggcctcgacttcggcggcgtgtacgcctgcctcaaggccggcacccccgacgcgcgcctggacccgctcctggccaaggggctcagggtgaaggccaagaagatggagcgcctcgtcgccgccaccgccaagctctgctccgagatggagacgctcgacgagctggaatccgccg

SEQ ID NO: 380315 - DNA, 255 bp, Zea mays
agatcgcgagcggccgccctttttttttttttttttttttttttttttttgggtaattccattcttcacatcttctttaatatatctttcttacaagggattcactaaaatcctgtgcattttccaaaggcatatcttgtgtttcctcttcaatcctcttgatcagcaaccagtttcctaacaatttgacgtatactagaattgccttctgctatgttttcaagtaaaaagaatctatgaaactgatgctgctta

SEQ ID NO: 380316 - DNA, 253 bp, Zea mays
gtggtggaggtctatctggttccaatggcggactgctaagcccaggcacatgcatgcattcaaattaaccctagctgaactgctcgcatgcatgcaatggcgtacttgtacatgcatgcatgctagctagctctcctctttgttatatctcctgcatgcattccgcgcttacacacgtttgctccaagttaagttgatgaatattgcgtccatgcatatgcatggtcgagcagaggcggcatggttcgacatg

SEQ ID NO: 380317 - DNA, 249 bp, Zea mays
cggacgcgtgggacggaactaagctgttcttcagaggatcgcgcatctgggacgcagtcgtcgatgaacagtcatgggaaaaggaatggacgccgctgaacaggccttgctcgcaggctgctctgctggcggtctagctacgctactgcactgcgacgatttccgcgcgaggtttccgcaagaggtcccggtcaaatgccttcctgatggcggattcttcctggacataaaggatttatcaggagaacg

SEQ ID NO: 380318 - DNA, 285 bp, Zea mays
cggacggtgggtgagtcttgtaatctcacttgttgacattttgttttcttattatggagtaaatgttagtttttatagaatgtggttccggtgcacatatttcttcttgagattgtgtaatgattttcaagattttatgtgtgcatatatagatatttccacactgcttgagtcatctccgttataactggacatggactccaatgagatggtgtatattgcatagttgctcaaaggattttttgcttttgaaatcattgactatcattcatgcttgttgatctt

SEQ ID NO: 380319 - DNA, 147 bp, Zea mays
atcagctcgcgcatcgtgtcctttctcgcgtcgtgcagccctcgttcttaccctcgcccgtcctccgtccctcgtttcgtccgttttcaactgcagacatcgcggtgcttttccagcttccaataaacacccccccacgagcagtca

SEQ ID NO: 380320 - DNA, 266 bp, Zea mays
gatcgcgagcagccgtccttttttttttttttttttttttttttttttatttttttttttttttcttccccatatctttcttcaatttctgatggtacacaaacatacatacgccatacttgtgtgtgtatatacatacatacatacactctgtttacatcagattaagctcctaattaaggaggagattaacaaaaactcttagcttcgcaccacaacgctaataaacgcattgggtggcgcaggcaagcaggcaaatactacaa

SEQ ID NO: 380321 - DNA, 170 bp, Zea mays
gctgattcgatctgagataaaccttatctacatcaaatctggagcctccggtaatgaagtttctggaacatccacaatttcgtagcactgacgttgttacggtggactcaatctgcacaactaaggcattggcttttggacttttttgctggatggctgtcctgcagctg

SEQ ID NO: 380322 - DNA, 284 bp, Zea mays
gagcgcgaggtggcatgccacaatgcacttgagccggagcgtgaggcgataggctcaagtggacctatgctagagcaggaccacaatgcatttgagcaagcgagcgaggcggcagaccacaatgcacctagtcaggaggacgagctggcacgcacaaggttcaccaatgcgtgatgatgatgactatggggaggactacgatggagaggccgatggagaggccgatgacgaggttgttacaacgacacaggcaacaaacttcaggtttcggcggtcccttagag

SEQ ID NO: 380323 - DNA, 275 bp, Zea mays
ggaagatgagcggagggagcgtgaggaggcggacaagaggaagcggaagcattgatgcgcgaggaggaaaggttgcgtcacaggctgaagaacggaggcggcgggaggaggctgagagcctggagaaagcttcgtgacatgatttaactgcatcgattttccaccttgtgcattgttttatacttctctccccctcccggagtgtagcagtccgcgtttccacagcaagagaagattgcttctgagttcggttgagttccagacttccaggtggt

SEQ ID NO: 380324 - DNA, 281 bp, Zea mays
ccctcgtgagatccggtcgcgagcgcccgacctaggccgctgcctcagtctctcctcgctcggtcgcatcaccaccgccggatacggaccgaggtgctctgcgagactccgcgccatagagctcctcctacggcgggttcttttccgtccggtagctgggttccctgaagccagtcatggcgatgaccaccgccgtgacgggcctcgccgtcgcagcaaccgctcccattcgctccttcctctcgtccgccgccgcctctgtcagcctgcccgccgatctt

SEQ ID NO: 380325 - DNA, 162 bp, Zea mays
ctattttctacaccatttggaggtggagctacagcttcaggttccagctttggtggtgcatcgaaaggaaggtcgaagccccggggacgacggtagatgtaaatgtggatgctattgattctcttgactgttacttcgtccattttatgcagaaattataac

SEQ ID NO: 380326 - DNA, 275 bp, Zea mays
cgctccggcttgctagatagccacaccagtgacaaagagtatactcgcccgatcccgccgcgcgccgcagctagagctaggaggtcgatctgatcgcatcggccggggtctgccgccctgcccatggccggcgccgccggggacaggtcgggggaggacgtcggcaccgactggccgttcggtggcgtcgacgccttcacggagtactcgtcctttttcgcggacccggctggccgggcgcctagccgggggactcatcccggtgctggatctgc

SEQ ID NO: 380327 - DNA, 273 bp, Zea mays
cccacgcgtccgccaaggccggcccatgtcttcatctagcggttgtaaccgcggccgagcagtcctcccagtcactgcctccctcgttcccttcctgctcctgctcctcctcctcctcgtcgtctcgtgcccggtcgccctggtggtctccgcgacgcacacgcacgtgcacgggcacggcggcgccaccgccggcgccgcgcgggcgtccttccgtgccggggacgagcgggaggcgtacgcgaggatcatggcgcgcatggccaggatgga

SEQ ID NO: 380328 - DNA, 289 bp, Zea mays
ctcagtctggagacgacccagcgtcccagctgctggccaactttcgcctttcttcgccatcatcgcctcctctcccattccttccttccttccttccttccttccacacgagagcctgccttttcccgatccgcatcgtcatcaaatgggccatcttttcctcctcctggtagccctcctcctgctcacctccacgcgtgccgccgccgccgtccacgccagagcttcggtcattgaggtcagtcggcagtggcaacagccagatggttacggaggcgagcttcgctgg

SEQ ID NO: 380329 - DNA, 274 bp, Zea mays
ttcttagttgcgctaaaacacacttagctgaagctttatgatatttgcatcaatattttataaaccactgcattgaattttccttcctctggatcctgccaattcacgagtcttggggcaaaccagttctggagaaatgataagaccctaccttcgagttgaatccttgcaaaagtgtttaaattctgcaatattactgctgaagtctttgtagttatcatggtatgaatagttgttttgctttgtatggaccattactaataatttctattag

SEQ ID NO: 380330 - DNA, 267 bp, Zea mays
gcgtgaaggacctcgcgcgcgctctcctctactgcttggtcgtctcgttgccccggccgaacatccaagcctctccatgtctggcccttcgaagaagcagcgcggcatgccggcactggggtgctggctcatggctgtcggcaccttccgcttggccttcacctggtcgtgcttcttcggctccgggtcgctctgctcagccacctactccgagatacaggtgatcggcgtgcatgggcgcacggttgcggtgtggacgctgctgtc

SEQ ID NO: 380331 - DNA, 254 bp, Zea mays
acgacctcctcgtgctctccatcggcgccggcgcctccgtcgccaacggttcgagcacgccgatgcccgcacgctctccgtcgccgcgggagctggcgcgcgtaaccgccgagggcgtcgcggacatggtggacgaatcattgggcatggcgttcgggcgcgcgcgcggaagcaactacgtgcgcatccaggccggtaaggcgctggtcccgatccgcgccgacgaagcggccgtggccggcgaagcgatgcta

SEQ ID NO: 380332 - DNA, 272 bp, Zea mays
cagacggtgggtgagaaaactacggataaagggtttgtttggtttgaagaatgaggtgacccatcagcaatcacatgccctcacattcttgttcgttttgaggaatggaatgggatgaacatcatcagcctcattcctcatgtgcacatgattaatatagggacggaatagtcccgccaaaaaatggctttttaggctttcatccatccatccatcaaacaccctcaaagtattcgtttactcattttgcatgttatgtagtacagtgtcta

SEQ ID NO: 380333 - DNA, 281 bp, Zea mays
cccacacatcaggcccgaggacatccgtggagctgcggtgataggcttcaacgggaacatgaagccatggctggacgtcgccttcaaccagtacaagcatctctggaccaagtatgtcgacacagagatggaatttctgacgctctgcaacttcggcctctgaaagactattacgagtatagctctgcgtctgaacaacgaacgtcttcagcgctgacgtgagtgacctgcgccaagcttgcggtcagcgtgagtgacgcttaacgtagtgatcagtgcag

SEQ ID NO: 380334 - DNA, 278 bp, Zea mays
cgcgtcgctctcgcccaccgaccgcaacgcctgctccctcgcctgctcgcgctggatggaggtcgacgccaccacgcgccaccgcctctccctcgacgcccgcgccgcgctgggcaacgctgcccccgcgctgttcgcgcggttcacggccgtcacgaagctggcgctccgctgggcgcgcgggtcgggcgcggacagcctctccgactacggcgctgcggcggtggccaccgcgctgccctcggggcgcctctccaggctcaagctccgcggcctaa

SEQ ID NO: 380335 - DNA, 267 bp, Zea mays
ctagttctagatcgcgagcggccgctccgatctagaactagtcggacctgggcagttctcggaggtgcccaaggcggaggggttcctctcccacgtgggccagcatcgccaccctcttctcgggctcctcgctcaccgacaactccaacacgggcgtcgtcaggctcggcgacggccgcgtcctgtgcctgacagagaccatcaagggctccatcgtggtcgacccggacacgctcgacaccatcggcaagttcgagtacacggaca

SEQ ID NO: 380336 - DNA, 274 bp, Zea mays
aaaaaacacttagatggatggttatagtaatgtacaaggaaggatagtacactgaccaccatggttcactagtaagagatgaacacttttgaaggccctccacaaaatttagtcacttaggtacaataagctgacagccatcaagcttcctatcttgaagcagccacagcttagcttctaagttgtattaatgccattgatttcctgatgaaagcaaaaggcatccttcccctgcgcttcttttgtctcttgcaaacaaaacgcaaagatcaaa

SEQ ID NO: 380337 - DNA, 284 bp, Zea mays
cccacgcgtccgcgaaggctcagtactatctttaggaataaaagatgaactaactgactgtgagttacctggcttaagtgagaatgtttctttcagttcccgacaacgcagaaaaaggaaaacaagttattcaactgaaaaaacacttaaagaagatgcttacactgttgatgagggtgttgcataccgttctcgtcgaaagaggaagaaaacagccacggattcaattgaaaaggcacttgatgaagatgctccagggcttctaaagattcttttggacagag

SEQ ID NO: 380338 - DNA, 284 bp, Zea mays
ctacgatctgaaagaaacccgccaccagctctcgtccttccttctctccaatccaaccgcgatcctttcagcttcagcttcttctgctccttctctggtgaggaggcgtggcgagagactgcgactgcgcgatggaggcgtcgtcgtcggcgttggcgctcgtggccgccgtgctcctcctctccttcctaacctagccctgccgcgccattaacggcagcctcccctcgtcttatgtctggtcgtgttcagtaccatacctctctgaacatgagccagctgct

SEQ ID NO: 380339 - DNA, 274 bp, Zea mays
cgcctcagttcccagcccccttcctggcacatcaagcaggccgaacagcatggttgtgaagaaggtttgcccgcgggagttcatcccggcgcacatcatcgcggaggcgatctcgacgctgcacgggctggacctgcggtggtcggggcccatcacgcccagcgagcggcagtacgtggagcagtacgtgctggccatgtacccgcagtactcgcacggcctcatcgaggacggcagctgcgacaaggacgactctactccactactacatgtc

SEQ ID NO: 380340 - DNA, 273 bp, Zea mays
cggacgcgtggtgtctggacagaggtagtacatactagttatatttatcctccatacgttcattgacatttaattgacttgctgtgcactgatatgcatgaaacaaataaatggtttgccagacactgcagttggtttgcatgcttgaatcagaaaattgttcacacttcgcattagtgtagaaatgcaggactgggctcgctgtgtcccagccctggttctgggcacaaaagtgcaaggaagcatacttataaaagtgtagaaattctagtc

SEQ ID NO: 380341 - DNA, 143 bp, Zea mays
cgcaaacaacccaacgtcggagacttggatcatgctgggttgatcgactcgcagcaggtctgcttaggatccccccgtgctccgccgggatttggaaactggacaggtgggagagcctcacctcagactggtccatcacacaa

SEQ ID NO: 380342 - DNA, 104 bp, Zea mays
ctggtatcaagcatggagactgcagctctggccgacgaggatgcatcgccgaagaagacgaagcagggcggcttcaggactatgccattcatactggcaaacga

SEQ ID NO: 380343 - DNA, 158 bp, Zea mays
tgcatatgtcctgaaccctggtacatgacatatgcaagtaataacatatgtcctgtaccagggttcagtcagcttgttttttttttgttgaaacaaattgcttggatattgaagcggtacttactggcggaaagtctaaatttggttgggagtttaac

SEQ ID NO: 380344 - DNA, 184 bp, Zea mays
gattggtgtaaatcgatcaggtgcagactagcaggtggcgtgaaaaagctgagagacatgttggtgtgtagaatttgccctggctttctggagatgtttggcagtgtcggacacgctagtattgtacaggaagagacctctcacggcgcccatagcaccagatggccaagcatgctgtcatgga

SEQ ID NO: 380345 - DNA, 270 bp, Zea mays
cgcccatcccctgtgttacagccagttggcaccaatatatttggagttcggcttcttaactctgctgctccttctcagcttcacagctccatcagcttccgcttccaacgtcggctttcctcccatcaggttctctgtagtcgggctggcggcctcctcgcgtggtgtagagttgttgacatagcaggagcggtttctgcttggcttcctcgtctaggacgcagtggtcacagggaggacggtgacagtgagacgacgacgacgacgtag

SEQ ID NO: 380346 - DNA, 273 bp, Zea mays
ctcctccattctcctagctccagcaacaaacacgacacaacaccttctcctgctcattcttctaccatagctagctagctagcttcacatcagcagctacatactcaccgatagatacagacctcagagcatcacactacagagtacagacctagctcagagcacacatccagccatggggctcctccctaccgaccgcatggatagcctcttctccccgcgctgcgtgtgggtgaccgggcccatcatcgtgggcgcggggccgtcggggct

SEQ ID NO: 380347 - DNA, 273 bp, Zea mays
cccacgcgtccgattctggaaaacgtctaacctataggatgtagctgtgaaatgactttacatggactcttggtgagcgcaattgctatttaaattatcaggcttagtattttgtgctgaatcctagtaattcagatagaaattcatttatccaagcaggtccttaggagtttgttttgtccccaaggatgcaaaattgtgtgtacaattcaaccattatttgatgcagaaaatggcgctcgaacatctaatgctgcattacgtgcaaggaag

SEQ ID NO: 380348 - DNA, 272 bp, Zea mays
gttgagggttctcagctggctggagactggagcatatgttttctttcaagtccaggcagcagagtcagggtttcatgggggaatcagacgtgaaggaacagcagctgaacaggctgcaggaggagctgaggaaggagaaagagaaggcacgcgccctagacgagatacaagacctgaaaggcgaactggaggcagcaagagattcagagaagaagatgctgctgtcattgcaggctcaaacaaagcagcttgagcagaccaaagtatccctg

SEQ ID NO: 380349 - DNA, 260 bp, Zea mays
cccatgcgtccgcttctcttcttcgcctcctcatttttcttttcctgcgaacgtgcgcggttcttgctgaactatccggcctccttacgaatctatggccgccgatcatgatgagctgttttaccggactcttgatacagttctccatttcggtcgcttcatttttggccgcggccagggagcgggtagcaggccgtgattagctgctacacgcgtatcggttggagtagataagcggcgccatgggtatgaggagcagg

SEQ ID NO: 380350 - DNA, 265 bp, Zea mays
tataagcgtccgcgaccgtgggtcaactctgtccttcagcagagagatcgaattctattatcatctttgtcttcccaagatataacaacttggtcactttctcccgttacagtgcatgcatcagactaggacatgcagaagagttgtgtcattttattgatggttcatgcccagaaattcttagaaaatttattccatcattccataaattcagccagttgcaagattttaaatagactgccaaactgtggagcaattggggcac

SEQ ID NO: 380351 - DNA, 246 bp, Zea mays
ctacccggaggcgccgttctcgggggcgttcaatgggcgggacgggatggcgtgggtgtccaacgtcatcggcgccggcgcgagctcggcatcctcacgtcactgatggtggccatgctggggcaggcccggtacctgtgcgtcatcggccgctccggcgtcgtgcccgcctggctcgccaggatcgacccccgcacctccacccccatcaacgcctccggcttcctcggcctgctgacggcggcg

SEQ ID NO: 380352 - DNA, 253 bp, Zea mays
ggacgcgtggcggacgcgtggggtagctagcacgctccagtcccccgggccatgtcgtcggcggcggcagctccccgtgtgcccggggccgcacggaggctgtctcagtctccgaagccgcctggagccaggggcaaggagccgcctccgccggcgtcggccaggataaataatctgctgccgtcgccggcgtcggccaggggcgccgcggcgtccatgctactgcgccgtgccgcagtcgccggtggtgggc

SEQ ID NO: 380353 - DNA, 274 bp, Zea mays
cacccaatcgccctctcccctccgctccccaggccccagcaggagcagccagcccagccctgacgcttcctccccacccggtgcaatcgctcccagtcctgactcgttcgctggaccgaacaccgcccggtggtgctcttccgccgtgcttctccgggctcctcctcgccgcccggcgcccggcggcgcgtcctggaggttccgtgcggcgccggtcaggcggatcggccgtgcggccacccggctctcaggagagatatattgtaaaatggaa

SEQ ID NO: 380354 - DNA, 103 bp, Zea mays
gaaagattttaacttgtttgaaattgaaatccatccaatcccacctaatccacatgaattaagagcaaaacgaatatgccctaaattgattaattcggttgct

SEQ ID NO: 380355 - DNA, 276 bp, Zea mays
gggagtttgtgaaataaaaggacttgtgatgatgaacccattgtagccgcaatgatttcatcattcaagtagggtgtctctctcaggtatcaagttttgggaaataatatgtaatgtagactagacgttgagcaggaaagttcgcccatctgcgttgattaaggactgatcgatgtaggcctgttgttgtggagactttgcaactagccacatgctccggtaagcctgaactcggctattccatatgtgaaaagacaaccacgcactgagcatggg

SEQ ID NO: 380356 - DNA, 268 bp, Zea mays
ggccgccctttttttttttttttccttgttattattactacaagcaatttcacaaaaaacctggcgaaaaatcgtatcgttttctcgcgattttttttcctgagcgtaattccaggagcccgtgagccttcttccttcctttttttttccccctttggctttggaaccccgagaggcgaagagcccgtgaactatagactctcgagtctcgacaggcctctctctctacttgcaggtgcatgtggcgtggcgaggcgaaaccgcttta

SEQ ID NO: 380357 - DNA, 263 bp, Zea mays
ggacgcgtgggagctctgggagcggcaccgacgacagcccagcagttccagtacagcggcaggctggttacttcttctcccccggctgctgctgctgctgatcagaagcccggcttggcctagcgacaaccaacatgcatgcatgaatggccgctagacaacaaccaccagtctctcaaccacgcacgcacgcaagcacctaccttcttcaattccttcggtacacgatcgagtcatacatcatgcatgcatctctctgctag

SEQ ID NO: 380358 - DNA, 258 bp, Zea mays
cgatcttcggctcccaatcctcgctgctgctgctcccgcgccgcgcgtcgcccgcccccgtctccctctctcagcgccgcatcatcgcggccgtcgcgaccaaggaacccgagctcggcagcggcggatcaggggccggcgacggtgccggagggagctgcggctgcagcgacccgaggggaggagggcacgaaggagacgggtaggaagagacgatggggcagggcctgtccatgtcgcagaaactcaccctcgcct

SEQ ID NO: 380359 - DNA, 284 bp, Zea mays
cggacgcgtgggctagttctagatcgcaatctgccgcccttttttttttttttttttgtgcagcacagtagacatatattacacaacattatatggtgcactacaatggttggaatttggaaataagtaccaactactgaactgaaatggacaggatattaagtacatatgaagggtggaataacagagttcttcgtgtcctacaagtagcatagcgctaatttattattacaaccaccatgcctggtaatagtagattaaagagtgctctagatcgcgggcgg

SEQ ID NO: 380360 - DNA, 284 bp, Zea mays
cagacgcgtacgcccacgcgtccgcccacgcgtccgagcatatatatccaccgatcatgatgaagggtggcagcaagaaggaagtggccggtgcggcggcggtggtggccatactgctggttctgcagctgatggcagctccaccgacggccatggccgcccgctcgccgcgcggagccgtgccggatggctccctcgccacgacgcccaaggtgacgatgctgtcagccacgctgtgctacacgggggagacatgcaaatacattacctgcctcactcctgct

SEQ ID NO: 380361 - DNA, 219 bp, Zea mays
ccattccgtgccgtcccgagtctcttctcttgacacgacctgcggaaagctagaaggcagaacctcagtgagtcctgtccacgccgatgtactccgtcgagcagcaggaccacacggctgcgacgcgtactactaccggtaccgccacgctcgacacgacgagctatctgcagccctgtgccggcgcactgcatctggccggtcgctccagctccccgc

SEQ ID NO: 380362 - DNA, 225 bp, Zea mays
ctcagatccacgctgcctagttgttcggacttcagaccccgccgtgcgctgcccatggccgcgggtcgcggcgacgccgcgagcatggtggcagtgggtctggtgtggggcgccaccaacgcgctgatgcggcggggcgcgctcgtctgggaccgccgcgcccgtgcctgccgctgcggtaacgtcctccggcggtgggcggagctgctcctgacgtggcagtac

SEQ ID NO: 380363 - DNA, 132 bp, Zea mays
cgcccagcgaggccggcgagctgctcccgcggatggtcaccgggctcatgaaggagctctgcccgctcaagatgctggacaagttccccgcgatcgacgtcagcaagaacgcgcacctgctcgaggtgctct

SEQ ID NO: 380364 - DNA, 118 bp, Zea mays
cgttgatgcaccaatccgtgttgatttcttatcagtgacgctggtcaacctgaagaccagaaagcaccggtctgttgcctggtttgatgagactggcaagcgattctttccatctctg

SEQ ID NO: 380365 - DNA, 115 bp, Zea mays
atggagcatttgttccgccgcgtagtcgagtgctagcagcggtattcctcttttggaaacccataccgatgcacggttccgttccagtctcgcccttccaattgaccaacacaag

SEQ ID NO: 380366 - DNA, 234 bp, Zea mays
cataaaaaacgggaatcattatcgaaggtaaagtttggatcacaaatcctagttgaggaaaaaaaaagagatttacaagtacgatgcaccataacctatactatgtatttactcctcccgctaaccatcaacagttgcatgtacggctcctctgttcttgtacttgtatgtcaccgcgaagaagacataggcgaggagctcgacgccgctgagcgcggcgagcagccagtagaa

SEQ ID NO: 380367 - DNA, 256 bp, Zea mays
cggacgcgtggggaaaacccaacctgctgatgtcgcggtgaccatcaggtgcctccttctctatctctctcaggtaactgtgcgcattaaggctatctatcagggcgaatgctgtgcttaattgtaggtggtcactggtcagctgtagttgttccataatatagtaactgtcatcagaacatccacttcgcccatttcattcattcatccattccttcgttcatttttgtttggcatcaacctcatctcatctgaa

SEQ ID NO: 380368 - DNA, 257 bp, Zea mays
cccacgcgtccgggacgctgggcaagaacatcgacaagttcgtgctcttcgcgtcggacgctgcgctcaagtccagcgagacgattgaccaggtgaatgccaacgccggcggttatggcaagtgggagaaagacttcggggacgccatggtgaagatgggaaagatcggggtcatcaccagccccggctacggtgccgagatcaggaaggtgtgctcgcagatcaactactagctctagactcctcctgcggtaatt

SEQ ID NO: 380369 - DNA, 274 bp, Zea mays
cgaatcccgggtcaccaccgtcgatcaggtccaacacgctccgggagctggttccagtatggctttggtgctcttgccatcctcactctcttgtactatactatagtgggatggagaaagacgaaaccaacaggaagattccagctctcaaattgatttgctctgtaagtgaagtttgacggattcatcatatgtgctccctgagtggtaggtcagttagcatcttagaaatgtatatgatcgataaaaccagaccaatccagaccaaatcatc

SEQ ID NO: 380370 - DNA, 260 bp, Zea mays
  unsure (1)..(260): unsure at all n locations
cagacgctggncgcgacgcgtgggaaaacgcacctttccttcccttctcctccccttcgctttcccacgtcctcccttacctcgatcccctcgccggaaaagatcccattccatccacctccacgtcccggcgcaatcagagtttccggcggcaaagcaggaaggcggaagcgaaaggaatgttgcacctttaagtagcgcggcgacctggtgtttcttcctggccggcgatgggctgcttcccgtgcttcgactccccg

SEQ ID NO: 380371 - DNA, 207 bp, Zea mays
ttatttttttactgagccatctgttatttacgatgtgctcaaacttttggcaccaaacgaatgcatgtgtgtgaggcttgtgctgtggccagacatagcattgcctccaggtgttttctgtgaaaaaaaaaagaaaaaaaaagggcggccgcccaaaagattcaaggtttacggacgcgtggagtgcgccgtgatcatccataaagg

SEQ ID NO: 380372 - DNA, 121 bp, Zea mays
gcttggcgtgcgcgacggctactgcgactgccgccgccctacgccctacgtccagctgcccatgtcttcttcgggccccttgccggcgggaactcaccagaccaggaatcgtgctggcaac

SEQ ID NO: 380373 - DNA, 275 bp, Zea mays
gcaaggacatgtatgtgttggccagcaaaggcgtctaccgagttgtgaggcccagcctctgcagctatacttgcccggcagagagacaggagacatcgccgcctgctgctccttcatccaacaaggcgtccatggcggagatgggaatgggaatgcttttggtgtctgtcattgtggtttgggttttggtaacataggatcatgctgtgatgagacatgtcatatgcaacgaccagtcctgaggaagaataagagtgccagtcagtcagtgatta

SEQ ID NO: 380374 - DNA, 267 bp, Zea mays
ggaggggcagcggcaatccaccctgcctctgcctgccacacggaaaggcctggcccagaccaatgcgcccgttttcactctagtgtagtgttgccacggccggaagaggaaccgctgtcggcctgctccacctccacggctccacctgtctgctctctgtctgtcccgcgtcctcctccgcagcacgacgaccgcatcgcgttctacgttctccgccctctccgctccccctactctgcttggtttcccagaagatttgattggttt

SEQ ID NO: 380375 - DNA, 280 bp, Zea mays
ggcaagctggcgaacggtgggacaccaaagaagcaaagcgccccacgtccccgtgtgctagccgttcgtccgccggccaccgtggctaaggagcacagacggctgcaccgcgctggtcagcttacccgccgatcaacgccggcgatacagcaagataataatacagcaaggaacagcaacagctactcgggtaagggcggaggcgggagaccgaacgagctcacctcttgttgtccggtgccggagcaagcgtcggcgggcagcaatggcgtcgctgtcg

SEQ ID NO: 380376 - DNA, 116 bp, Zea mays
gttcgataaaagatgcaactttattatacgtagataaatccgaaatactctagctgtcgcgagcaccaaacgtaaaacggcagtgcaaaaccctgagtttcaacctcagatagttg

SEQ ID NO: 380377 - DNA, 122 bp, Zea mays
cccagacggcgagcttgaggcctctccacgctcctcacactcttgggcgagaacatgagtgtgaggagcgtggagaggctcagccggcgatcttcaagcgctggggcctctccaccgtcctc

SEQ ID NO: 380378 - DNA, 259 bp, Zea mays
cccacgcgtccggtctggtgaccacgctcacccaactgcggagctcaccgtggccgagacgcttggagcaattgcatccccgggtaaggagtgttctgcgctctccataataccatgaagctcactgaagaagaattgttaactctaccattgtcaggtggtcagaacagtgccacgctgccgcagaacagagtcgtggacagctccaccgctggctttccaatccatgttgatctcgaatgatcttgtgcgagcactg

SEQ ID NO: 380379 - DNA, 250 bp, Zea mays
cccacgcgtccgcggacgctgggcgacgtggtcgagacgcgtgggcggacgcgtggacggacgcgtgggatctcctcgtcgtcgcctcgcgctctcctccgcacgttgcctgcgaccccgatcatggagggcgacagtaccaacctcgacgcggctatagagtcgctcctgaacgtggagaagcagatgaggctggccggcgatgtcgccgcacgcggaatgccgtcatcgacatcgtcgagctctgcta

SEQ ID NO: 380380 - DNA, 260 bp, Zea mays
cccacgcgtccggtacgctgtctgccctgggcgcctggcctttgctgctgctagctgcaacctgcaatgctcgtttgcgtgtctcacggccgccgccgccgcttaacataatcgttttaattggtttggttttgttgattagcacggacgaacaacaggcaagtaagagctcttcaatcaattcaagctgtacccggagaggcttattaaattctaataatgcttattctttcttccaaaaaaaaaaaaaaaagtataaa

SEQ ID NO: 380381 - DNA, 147 bp, Zea mays
cccacgcgtccgccgaaccgcaagaggcgagcagcagccatggatcccgcggcaggaggcgccggccagcagcgccagaacaaagcttcggcgggcaagaaggtaaagaagggcggtggcatcggcgggagatggccggcggtcaag

SEQ ID NO: 380382 - DNA, 155 bp, Zea mays
  unsure (1)..(155): unsure at all n locations
gtctctgcctctctctcctcccttctccganccacccctctctcttgctgtgggtgtgctgtggagaggagaaaggaagtagagcaagaacaagaactaataacaccaacaagagctgctgccaactcctgcacagcctgggctctcatcactga

SEQ ID NO: 380383 - DNA, 163 bp, Zea mays
cccacgcgtccgcccacgcgtccgagcagccaattcgctcgagttcagatcgagcgcgcgccaagcaagtcttccggccggccgcgaagagcgcaatcaagcaagacaagatggtgaagctcgccttcggaagcgtcggcgactccttcagcgccaactccat

SEQ ID NO: 380384 - DNA, 153 bp, Zea mays
gtccgtgcctgtgtacctgtcggagatggcgccggcgcgtctccggggcatgctcaacatcggcttccagctgatgatcaccatcggcatcctggctgcggactcatcaactacggcaccaacaagatcaaggccgggtacgggtggcgcgtg

SEQ ID NO: 380385 - DNA, 154 bp, Zea mays
ccctaaccccccgttgctactcacttccctcgtggtcaacccgaagcatatcatcgtgcagcgccatcgtgattcgtcgtccctccgcccccgcacgcctccataataccattatctcaaccctaatcgacgccgctacacactcccctcgcgg

SEQ ID NO: 380386 - DNA, 146 bp, Zea mays
cccacgcgtccgaaccgtgagtgatgatgatgttgtacttgaaactacagcaccaaggctgtacagcatcaatgatggccaattgaagctggaagaaacagctcttacaaaagccgtgcttgaaaataccagatgtttcttacttg

SEQ ID NO: 380387 - DNA, 114 bp, Zea mays
ccaagtccaacctccctaaactactcctgcgtgctgcctgatcgagtgagcggcgatggaatccttgggtgtgctgctcctgcacccgctcgacacataccgggagcaagaact

SEQ ID NO: 380388 - DNA, 249 bp, Zea mays
ccagctttatcttgatttggcatatccagagaagttgttgaattgccttgagaaagctattcaaattgattcaaggttcgaaaagcttaccatctgcgtggaattctctacatggaatgggcgcataggagtgctattacagattacggttggttgcatatgaagtcagtatagagtgctatacttacgtgctaagcatcatgcatggagattaactgcgtacagtatgatgagactgatggactgatc

SEQ ID NO: 380389 - DNA, 271 bp, Zea mays
aaacaccattgggccttcgccttcgcccatcctttcctactccaatctccacagtccacaccctccgggcgccggcctccactcctccattcttgtcccggaaccatgtcgatgcttctctcgcgaaggttctcctgcgccctcgcccgctccccgtcgctcgtacggggccggctccttcctccctgcgccgcccgcaccacccctccggctcccagctctccgccccgccgcctcatgtcgtcctcctctggcgggtggcagcactcct

SEQ ID NO: 380390 - DNA, 196 bp, Zea mays
aacgcttcattcttcctcgtactctgaaattaaacttagccacaaaaatggccgaaactcaagcacttcttcgggcagacaaggccaaagacaaggcgtttgacagaaccctgactcaaaacttgtcgaattctcaagtcgccctccgtaccacgacaaacagagattccgaaagtcaagcactgcttccggccga

SEQ ID NO: 380391 - DNA, 195 bp, Zea mays
atttattgagcacgaagatgaagaaaaccctctttatgggagggataatatgttggaggagggtgtaggttcatttgctgacattgatgatcttgctggaactttctcgaagctgaccagaatagtcaatggaccaaagcaaccagtagtagttagtcataggggatcaatttctagacatggttctagggcaga

SEQ ID NO: 380392 - DNA, 249 bp, Zea mays
ggacgcgtggctagttcatgcatatggtgctgaatcgacaccggttgttggaacctggatggagacattgaatatgctggtcaacttaacggatgaagccatgaaatgtgcttcgctccaaagtctgctgccagcttgaccacgtctcctgtctcattgccaattttcggaagtgcaggtaacctatacgccgtacgtggagtccagccagagaatccattgattacaaaagaaatatctgaatcttgt

SEQ ID NO: 380393 - DNA, 172 bp, Zea mays
gggacaccacggccgggacctgggtcgacatcatggccactctcttcgccctcttcggttggttgtctggtgcccccgagatcgacaaccccgtcgaccttgccaagcagcgtcacgatggttggaccgacattgtcaccgtcgtcattgtctggctgtactctttcggtgt

SEQ ID NO: 380394 - DNA, 258 bp, Zea mays
agcaagccacgccacactcccaatcgccgccgcagctggtcccctgctcggctcgtctgatccagcggctgaatccgtagccattgggttcgacaaggaggcgagctcctcctcctcgcggctcgacgcggcgccgctgctcccgcagcacggctgcggcgcgggcgggcacctgtcgtcgcagcccaagacggtcgccaacgtcttcatcgccgtcgtcggctcgggcgagcttggctccccctacaccttcttccg

SEQ ID NO: 380395 - DNA, 265 bp, Zea mays
gcggccgccctttttttttttttttggtccaccggtaaatggcactcatcaggcccaaatcgaagcataatttgattggtgaactaggctctgcttgtctacgctcatcaaaacttacaattcagtctaagtctagtgacattatacctactacagtttatagaagtagaaaaggcaacagaaagaaatgtaaaccaactgcagtttatggattctagctgctattcccaaataaattctcaaacaacttcggagccattggagg

SEQ ID NO: 380396 - DNA, 257 bp, Zea mays
ggacctggtgaattttatccattgttatgcttatcgatctccaaggttcggtgcaaagtactcctgcacatccattatttatagaatcatgataatacttttgtactcatgcacatatattttttgtgtccatgaatttgctcctgcaatacgattttgctggtcttctgttacaaaattgcattgctgattaaatttgaacattaaaatgcacaagcggttactgcaccaatggtcttcacatgcattagctcata

SEQ ID NO: 380397 - DNA, 248 bp, Zea mays
cccacgcgtccgcaagtatctcctaaggtttcgtataggtgatacttgaaacctagcttcaactcaatagagatcaataacaggtaagtactcaaatgaactatattgagttgaagctaggtttcaagtatctcctaaggtttcgtataggtgaaaaccagtgattctctctttttttttagcactacaatctgtgacgtttcatgcccttagtttgagctttctccttagtgagtttattaattttt

SEQ ID NO: 380398 - DNA, 255 bp, Zea mays
gcctctctctatctactcgccggcgttgcccctgcttccatggctagccgcgcccctgctcatcttccccacgtgcgcctgctccccatggccggctgccagcccttgttcctccatcggactgcgcttcggtccctcccatggcgctcggtgcccagcctccaacgcgcacccggccagagctcttgtgcgctgcggctttccttcccccaagctccctggcacgctcgcctatccgtgcttgcccagtctacg

SEQ ID NO: 380399 - DNA, 274 bp, Zea mays
cggaccgtggtcggacgcgtgggctaccagactggtcatacatcaaacattgaatctgctccctcagctgagtctccaattacatgcaaaacacaagttaaaaaagatcattcattgagggtggatgaatcgccaatttctgatatcccaggtcgtcaagacatttcacctatatccatgaatgaagggtttataagttgtgtaatgactgatggacgtgtggaaatcaacaagaccatacctgaagaatgcttagttgaaaatacgcacaaga

SEQ ID NO: 380400 - DNA, 272 bp, Zea mays
gttttatgttggttttgtagaaagcaaacaccccctaaataacatttcttatcatggtacaactgaatacacaaaagcggataacctccttcgataaataaacgaaacatgtcttcgagatagagcaccaacgcaacaaatagttgaagttcaatagacaaaatatcagtggctgcagcactcacagcagtaaacgaatcggttcttgctatcaataccggactcatacacatcatagaaggttcaggtttacactggacaatcctccagac

SEQ ID NO: 380401 - DNA, 277 bp, Zea mays
gatagaataatttcaggcgtggaagaatttggattctgcaataagggttggatcgaatctcctataaagggtgcagaagggaataaggagtttcttgcttgcttcaacaggatcccaatatcagagtcacagccagaggcagaggcaaaggaacctgtaacctaggatgtcagcagaaattactcaaagtgcgtcatcattgatcaggacaccctcataaagtatctggaagctatattgattatcaaccataacctctgatattcctgacattctt

SEQ ID NO: 380402 - DNA, 269 bp, Zea mays
atgtgtgcatggagaccctccgcgcgtacgatgagctgtttccatgggccctccttgtcctcgttaccaccattaccatcctctacctgaagcaactgttggtcgcagcgttcaagagacgcgccaccagctctccttctctcccatgcccaagaggcctcccgctcatcggcaacctacaccagctgggcacgaccccgcatgacgccctcgccgcgctcgtcgccaagcacgcagcgccggtcatgctgcttcggctatggtcggtg

SEQ ID NO: 380403 - DNA, 274 bp, Zea mays
agtagcattggaaacaaggtaaatggtgaagttgcatagctagatggcagtatcatggaccacacatagatgcagaaatgaagcactcatggcttgtagacatcaggaagctggaggcctacactggcggcagatttgttcagtatcttcttcgtttcatcagatcgatccacagctatattgtacgagagcagcagatcctggacaatcaagcatgatgtggagttaatagcgtccatagtgcataataagctgatagtacagtgctattgag

SEQ ID NO: 380404 - DNA, 237 bp, Zea mays
gcggagtgagggtttcatttacctcaaggacaactgctcatctctccagtcagagatactgaaaactgttgcagggtgtgaggaccagtgcagcagtgttgggaagagccagagcgtttgtgggcagctctcggacggtggcgattccagttgccgcagggttaggcaaagaacctgaggtcaacccagaactgacatggttagccagctcttgctctgtaaatgacgatggcaatc

SEQ ID NO: 380405 - DNA, 263 bp, Zea mays
caattcatgtgaaaatctgaaagaacgtggagcctgaaactattgtctggtgggctggtggctgattttcattcaattgggctggtacacctctgttttgactcccatacaccaaggtatttagacacccagaatcgagggcgcctgcatccgtgggagtaagactctccggctttgaaggaggagacaaaggccgaagggcagacacattgccttctgttcatgttgcttgatgttgaaacaccaaccactcaccagtcatt

SEQ ID NO: 380406 - DNA, 264 bp, Zea mays
ggcttgtccagcgagcagtaggaagacgttcagctcgatgttgaagggagcgttgtggagtgacgcctggcttgaaggttgaagaagaacacacggagcggtttagcagtggtcagaaatagtgtgaacaagtgctgtgctgtacatataataatgtcgtgtataaacgcatgaaggacgtgtgcccttcatcccctctaggtgtccataaacaattacttaagacgacgtgtttatgaacacctagaggggatgaaggttaat

SEQ ID NO: 380407 - DNA, 126 bp, Zea mays
gtcaatagcaacagcgactccctccagcgcgctccacagcaactccctcccaagttcgcaaccaccttctcctgcggtccttccacagcaccccgattgtacccacggctcacgccttctccctct

SEQ ID NO: 380408 - DNA, 247 bp, Zea mays
cggacgctggacctctgggctgccccaccaagaatgtaggtggagcagtcgccggacggccaggtcccggatatcgtgtacaagggcacgcacaaccacccgaagccgcagagtacgcgccggggcgccagctcggcgccggcgtcgtacgtggtgcagagcgccacagcgcggtgatgcccgagcattcctggggcgcgctgtccggaacacccgtggtgacgccggagaactcgtccgggtcctt

SEQ ID NO: 380409 - DNA, 228 bp, Zea mays
gggtggcgacgccgccgccgttcttgccgtcgcagccgcactgcggaaatctggtccctgcgtatccttgttgctccagggcggcgcgcaggctccacgatgctgtagagactgcatcggcggaggaggacatggcggggacgcgtagtccgcgggcggcggcggcggagcaagcagcagcctccttcttggaccggaattcccgacacctggacccttcatcgcgtg

SEQ ID NO: 380410 - DNA, 179 bp, Zea mays
ctgacggtggggtcatgaatggctgtgcaactaaggcagagattatgatttcgcattaccacagacatgcatactaacttggatgcatgttgaaggaaaggtcctggtatgggtgagattttttcggcattggccatttattgggcgtgtaatagtatgcattgttgagcctccatact

SEQ ID NO: 380411 - DNA, 265 bp, Zea mays
ttttctgccctgtatatactgagaatgagatattccgttgttgctaacaggaactgattaaggttccttccatttggattctttcttgttttttcaaggttctgttgtgcacgtctaggtagaacctcacgaatcgggtctgctattttactattttttgggtgctattttactatattttttgggagcttacacgctgacagatgttccagatgttttactggccacacaaggttaatgtaattgtatacattgtcagttgaaa

SEQ ID NO: 380412 - DNA, 248 bp, Zea mays
gcaagattagcacagagattcttttcacttttcaattttgcactctttcctcataagtcacctccttcacctatggccaatagggttcttttcactgatgcagaggacagattattagctctaggaattctggaatataataatgactgggcagcaatacaaaagcgctttcttccttgtaaatcaaagcatcagatatttgtgagacaaaaaaatcgtagctcctccaaagctcctgataatccagt

SEQ ID NO: 380413 - DNA, 279 bp, Zea mays
cggaccgtggttgcacaccgcgcttgaaagggcactcatagtagaggatgttcagaatcagaacattgcattgaagaagcatatggagatataccatgtaaatacactcattacctgattttttgtgtgtgcttttgtaaagttgtggaactaattcttttttattataatgtgtatgtaggaagagaataaattgttagagaaggctaacagacagaaggtgctagaggttgagaagctcacacaaacaattaatgagcttgaagagtccattctcgc

SEQ ID NO: 380414 - DNA, 274 bp, Zea mays
ctcacgcgtccggttcggattcccgtacgtggaaagcggaatcgattcgatcatccgcctagctagcacaagccatccgcgacagtgttagtgctaccgtcgaccgcacgccgctcaacccgcgcgcgcgctgttgtctgttgtctcagatcagctttgcagctaaggacagcgaattctcggactgggacggcgacatactcgcggtcgccgtgacggacaaggacgtgcaggtgcagccccacgtctcgggctccgagttcgagaacgccgt

SEQ ID NO: 380415 - DNA, 274 bp, Zea mays
cggacgcgtgggtttttattttttttttttttttttttactccagaatccagtctgcgtaaaccacagctcagatacaagtcaatctagataccagacttcaacgaaaggagtttcacatgacatgggtcaaaataataaattgtgacaaattggccatgtccagtgggtcaccccaaagggatcggagatttcaacagcaccaaaaacaccaagtctgggcaaatcgtcctgtttcttagtcagcatccatctcctcaagagctgcctgagca

SEQ ID NO: 380416 - DNA, 267 bp, Zea mays
cggacggtgggccccgtcgcatgattgggcttgtgcctttagtttcagccaatctggaacatggtggccaatgtatcttgtctgccaatgactgaatgctttaggttgaagcagtaccataactctagagagactgctgtacagcaacctcaggtttatagcactggctacggcagataccagtgtctggctggctggctggcatttgttgtggggagcacagaggaaaacaaattgttggttacactctgtactactgcgtcatga

SEQ ID NO: 380417 - DNA, 269 bp, Zea mays
gctgcctctcacgcgtacttcttccggtagcatgtagaagaatgagatcgatcagcttcctgtcagtgccaccatatatttcgtaggcgttgaggcagggagggagagatcagccatgcagttccgcatggcgcagaagcggagggcgtactcccccggagcgtcgcagtcgcagccgagcagcggacggaggaagaagaggaatgcggtggtgaggctcggtggccaagggaggaggaatgggaggttcttcggggcgctgcggctgc

SEQ ID NO: 380418 - DNA, 236 bp, Zea mays
  unsure (1)..(236): unsure at all n locations
tgcgatatcatagcttagcgtgcttccccaatgccaatttcatctacatcacaaattgcttccctcgccgttctcatcatttccctcgtcttttctgcgctttcctcctactccgcctcattgtcctcttctatctcactcgcttccactcctactccatcttgaccgtgtcccagttcgtccgctgcttcctgctcttanctatgcaccggcacaacgctaggaatctagcccta

SEQ ID NO: 380419 - DNA, 264 bp, Zea mays
gaccaaggtccgggacgcgtggcttctgcatcataatcatttcttcagtaaagctggcctaatttgataacaggagttccataagtcaaattgattattgcatgaataagtgctgttgagttgctttcgaggagacaattgtaatagtggcctaatttgagctcatttctgaattgttttgtttgcacacattgggggaatatatgggtcacttttctttgtttagatttatttgggggttagaggaaatctgtttgatttcag

SEQ ID NO: 380420 - DNA, 259 bp, Zea mays
agtggatcctcttggagcacagaaagaagtactgaacctggcatctgtcttgggactggagataacagttgccgtagcttatgaatcatcctttgaaactcaaggaagccctgtattgtccgatgaatcaacaggagggagagggggatgtagcacatatcttggggcagcttcaattgtacattgcttggaaaactataaaccacatgttgtcattacttcacgggttgctgatgcttcactcttcttagcacctatg

SEQ ID NO: 380421 - DNA, 257 bp, Zea mays
ctgacgcgtgggaagcagccaaacctgctagaagcctatacacggccaaggtccaccgttcccaaatctacgacttgagcaaaaaccacagctatagccatggcaaaggcaggggcaacggccgtgctggtgaccgtcctggtggtcctggcggcgtccgccgagatggcgcacggcgtctgcaacctgtcgagcgccggcatccgcgcgtgccagcccgctgcatccatccgcaacccgacagaccagccgtcgtc

SEQ ID NO: 380422 - DNA, 283 bp, Zea mays
cccacgcgtccggttaattattgggtgttcttaatgcttacctgctgcaatggcccttttttgaaaaactacatcagttgatagcagcatggcaatacatgagattagctgttgacaaatgcatcatggtacatttggggtttctcaaattagtttttttccctactttccctgtaaactgaaaacaaattgacccttactgtactaaattgcatcctaccaaaaaaaagctattttttgccctcttttgcctaaccaatatagtggcaaaaatgtaatatgt

SEQ ID NO: 380423 - DNA, 282 bp, Zea mays
cttctttttaattgttttttcttgtaaaaactttgaattgagagagagcttctgcctccttggaatagcagattttaggaggtaatggagagaaacaccttgtgtagcctagtaggccagtaggtaaccagttcggttcttcagtctctcaccttgccggcaagcccccttttgtgttcgatttttccctccaactttcaaatggtagttgcaaccgtggggcttccctccatcctttgaaatttctgttgcactggccgtgtaaggttgcacaaactgtag

SEQ ID NO: 380424 - DNA, 270 bp, Zea mays
gaagtttgtgaggtatcctgttgtgaacatgtggttagggtccagacacagcaacgtgcatgaggacaccagagctgatctctactccacaatcagcttgagcaattactggtgcagtattgtacagaatctgtggatcaagctactgatatcacaaaggcacttcctacgagtcagaacaatactgcaccagtaattgctcaagcagattgtggagtagagatcagctctggtgtcatcatgcgcgttgctgtgtctgcttcgtgcaat

SEQ ID NO: 380425 - DNA, 285 bp, Zea mays
cccacgcgtccgcccacgcgtccggaaacaattccgtctatgaagagcataaaacatgacaggataacatctttgtatggagtgggtgtacatccatttagtgcatattcggtgtcccacaacaatttaaggcctgaaacagaagagggtgaattatctcctaatggtgatttcaaagaggaacacttctgtgttttcgaagatgaagctgtagatggaacttctaaacaaaatgaaggttctaccagcagatctccccagggtagacctaagaattatctcaag

SEQ ID NO: 380426 - DNA, 285 bp, Zea mays
cccacgcgtccgtaacaaaccagtgcgtgcgcgcctaaccgcccacgcgtatcgcacgctcttttgcccggcgcacgtcgttggcgcgcctgcgcctggtgtaggtacgtccgcacatgacatatactagagtctaaagtccattgaaattttaaattatatactttcatgtatggatggtgtttggagtgcaaacgtgcctttttatgttccacaaaatcattttactattgatccattccatcttttatactctttaatctattatggcattgatttccttca

SEQ ID NO: 380427 - DNA, 175 bp, Zea mays
gtccccttcttcaaccctggtcaaaccttctacggtttcgactctcataatgctaatgagtctggtatcgctctgccgactctagcgactagcttctacccaggagctgtgggcgctcaacaggctgcgtcaaatatttcatctccttccgacctcagccggcccatgtctgcgc

SEQ ID NO: 380428 - DNA, 178 bp, Zea mays
cggacgcgtggcgcgcacgcagagggagagggggggatccgcaatgaagcgaaacgaaacacaggacaaagcgaccgagaagggatcgagcagtcagcagcgtttcctcttgcgttcgggcgggcgggcggctgctggtagcgagcgcgaggcttgccgagcgagcgagcgacatgag

SEQ ID NO: 380429 - DNA, 173 bp, Zea mays
aaacagaagggctcgcttaatgaagcgaccggggcagagcatgagctgccattcgagttccatgtgctggaggtagcactcgaggttgtgtgctcatcgttggaccttagcgtgtctgaccttgagaggcatgctactccagtgcttgacgaactgaccaagaatgtaagcac

SEQ ID NO: 380430 - DNA, 172 bp, Zea mays
cggacgcgtgggaagctactgcatatcttgctttagaggatttccttcatgcaagcattaaaggactgtggcaaactttctggggtcctgatgaatcaatgccattttcagttgcctgtatacacagcacaagctccaaattttatcctgctgagaaggctattagcagtgg

SEQ ID NO: 380431 - DNA, 138 bp, Zea mays
cctccgtcggcatcgtcggcacgctcttcgccgggcccggcccgttcgtgcagctccccacagcgctgtcgctggaagatccggcctacgcgtgcacggaggcgaccaacgtcactgctcgggtgctgtccacgtgct

SEQ ID NO: 380432 - DNA, 168 bp, Zea mays
gatcaaatcatatagacatgcttttagctggtaaaaatgcaattaatgagagtggtgatcttccgcagattgtcgaacttgctgatattgcacgatgcatagcaaatacccctctggatgaagaaagcgcattatcccaaatggttacctgcatagaagatcttcaag

SEQ ID NO: 380433 - DNA, 196 bp, Zea mays
atttcatgctccagttgtaccacctccttggcgactccgatgagcccgtgcgacgtgtcctccggctggttaagtcactcgatccatcggtggttacccttggggaatacgaggtcagcctgaaccgagctgggttcgtcgatcgttttgccaatgcactgctgtattacaagccagcgttcgagtcgctggacgg

SEQ ID NO: 380434 - DNA, 126 bp, Zea mays
gaaggatatcaagaagctgcttgggagctcttaaacgatatctggctgcaaaactgtagaaaaaactgtatgaacattgctctgagagctgaagtataaaactactttattaagacaagattgtta

SEQ ID NO: 380435 - DNA, 200 bp, Zea mays
aaatcattcctgacaaagggaaatgacccatcctgtttgcgtgagttcctactaccaaccctctaccaaaattctccatctgggaatattggtttgcagatgctagataggcagtggggtgctggttggaatcttttagccttattgctggcaacaaaaccagaggaaaggataagttgtgttgatgcattgcgacaccc

SEQ ID NO: 380436 - DNA, 154 bp, Zea mays
ctgaagggaagataccgacggttggagaaggagacgcggcagagaaagccgacctgctgccgagcgggcaggcggagctgctgaacgagacggcgtcggcggtggcggagaacggctcgttcccgacccaggcggcggaatcgagcgaggagaa

SEQ ID NO: 380437 - DNA, 201 bp, Zea mays
gagcgtgtgggagtcggagtgccgtcccatcagcaccgtcaacacatgctcgctgctcttgacgtggcatggtctggaggtgttcgacggcagcgaggaggtgtggcacggtgagaccaatacagacggcaccaacttcctcgagacgctagatctcgtggacgacggcgacatgcgcatccgctacaaggacggcgatct

SEQ ID NO: 380438 - DNA, 277 bp, Zea mays
gtcgtcatccgagctccctgatctgggctgcgtcgcggacttcgagatcggcagcttcgacgtggagagcatctggagcacggacgacagcttgtggttcacgcaagcgcagggcgtgtgaattgaacccacacgcgcggcgacatggaaatccacggcgtcaaattaaaccggtggtggatcggacaccgcgcacgtcggggactcctcgcctagcgaaggtgccgagagagctagcagagacacgggttagaagaaggagagagattattttgga

SEQ ID NO: 380439 - DNA, 260 bp, Zea mays
ggacgctggcgggttttgtaatctctgcatgtgcgtgatctgcaataagtttgattttgaggtcaatacgtgccgctgggttgggtgtgatatctgctcgcactggactcacacagactgtgcaattcgtgatggaaagattgggactgggctgacgattaagaacggcgttggccatgcagagatgcttttccggtgccaggcctgccagaggacatctgaactgtttggatgggttagggatgtctttcagcaatgtg

SEQ ID NO: 380440 - DNA, 263 bp, Zea mays
caaaatagttctgtatgtagggatagtgtaaaaattttggtacatgatgaatcattgaaagttattgagaataaattgtgaattgttctgttctattgaataaacataattgttggttagatgctgaaggagaagtataaaaattatccagtatactaatgctacgctgcaaaaggtaagcgctaaatttaaaatatattttcttttgttcctccattttgcataagtaacaggtttatatcgctagttggtggtgctgatgt

SEQ ID NO: 380441 - DNA, 279 bp, Zea mays
ggaagagagcaagaagggcgaactggactactggtgagtcgctgctgggtttgcatgtgcagctagcgtcactcagctaaccccctgtcatcgtgtcaggcaagatggcatttttcacgggccatgcatgcatgtatacacgcgcgtgtggagtccacagaagtttgtggatacgcgcacaaaaggtttacggtcaatttaattaatttgtgctagtcaggcatatatatatattatatatgtagtatgcatcgtcttattaaatgaaccaatatgcaa

SEQ ID NO: 380442 - DNA, 268 bp, Zea mays
gctccaaccccccgcctcctctttcctcgcaagaccacgtcctcatccactacatccactactactaatcatcatttgttaacacgctactactgggtcatcatcaggaagctacactacactcagaaaggcttgtcaaaggctagtcttttctccaatggctgacatgccagattgccagcagcacacatatctcatctgaagcatgagattatacatgtaccctgaactgcaatgcccttgatttgatgcatcattataaacgcta

SEQ ID NO: 380443 - DNA, 266 bp, Zea mays
tccatctcactctccgctggtctctcactcttgcatctccacccttcactcagtcttagttctcttatttagctctaggctctagctagccgcgccacttcctcgtgtagccatcagccttctcatctccacctatggtcactgccgaggtccagtccccgaccgtcgtggcggccgatgaatctcccgttgtggagacccctccgccggccgtcgtgcctgatgagtctgcccccgccgatgccgaggccgaggccgaggctgct

SEQ ID NO: 380444 - DNA, 258 bp, Zea mays
cccacgcgtccgttttttttttttttttttttttggcggaataggtataggtagattaataacaaaagataagtcattacttgcggttaaaagcgatcaaagaatgccgatcagcggatcaagtacaagctctttgccttagatctgtacaaagcatggatcttggctagcctagctgcacgccccttggacacctaggcgataccatgaacaaaatgcaccaaaagaaccaatcatatgttcgcagaacactagaaa

SEQ ID NO: 380445 - DNA, 273 bp, Zea mays
gagcatttcaggggttcgtgtgtgcttttccctcaagaggaattggacagatgggaaatgcaaatgaatcaaagggtcggacgccaaattgttgcacatgctcatgctgcaatacatgggcagaatggtcaagctcatccttgccctacatgtcggcaaccgtctccaaagatcggaaacaacaaccacctcttctgttgggcatgccagaagcatttttgtgccctgtgccataaggctgtccaaaagcccgcacagcattacggccccaaa

SEQ ID NO: 380446 - DNA, 271 bp, Zea mays
cccacgcgtccgttttaaaataatccaatatatgtcattgaacacgaggaacaagagtattaggattacattttcaggctcaacacgatgaaacaaaatagcaacaacccaaataattttaccatcctgtattgagtttgtgtccttaagcggcaacactattggagaagagttctttgtcgaatactcggtaaattttgtctttatcgagtgcccgacatttaactctccgcaaaccttttagcactagataaagaagttgtctagtgca

SEQ ID NO: 380447 - DNA, 263 bp, Zea mays
ccagactaataaccatcgccaatatcctgtgttcttgcgtgcgcgttgacctgtgctggcgactctgcgctggtccctctcttcttctgtgagaagccaccagagtacgtacgtacaatggaggaggaggagggcggcgtcacttcgccgttgctgctgcggcaggggcaggagaaggtgtaccacccaggctgcccgggctgtgccaacgaccggaggaaggagctccaggagggactgccgtacaaggagttcttgtacgt

SEQ ID NO: 380448 - DNA, 250 bp, Zea mays
gtttctctgaagaccctgaaactccagtgattttcttgcttatttatgacatcaccagtaccctgtccatacagtaaaaatgttgctgaaatgattcgaacacaggcctttgtgagcgagtacgctgtctggagaagtgacgcgggtagaggcagtcttcttgcttcgttggctgaagctgctttcctcactggtctggagaagaacagtgatatcgttcagatggcaagttacgctccactcttcgtga

SEQ ID NO: 380449 - DNA, 207 bp, Zea mays
  unsure (1)..(207): unsure at all n locations
ggacgctgggttggcaggagcatccattaacctatatcaaacattcatcagttccctcgacggatttgacgnntgnttcntatagggnnatggggcgcgcctgccnntgttcccagtaggcgncgtcgtgtgttggtccggggctgcaccagggatttctcccgtaatctggctgttagtgaacgacgggctagttctagatcgcga

SEQ ID NO: 380450 - DNA, 265 bp, Zea mays
cggacgcgtggtgcggtgttcataggctacctatctatggccgtgacggggacaggtttcctggtccttacatggtccactgtcgtcctccttggtggattcgtcaccgtactagcgaagaaggacttttggtgtctcacagtgattacactagttcagacaagagaacgatccggtcgaagagcccgaggaattcgcaggagaagcccctgagcagcagtcgtttggtggaggttgtcagcattgcaaccactgctcaggcgaa

SEQ ID NO: 380451 - DNA, 265 bp, Zea mays
cggacgcgtgggtagttctagatcgcgagcggccgccctttttttttttttttgactcgacgacgagagagacaaaaaaaacactccaagaaccctaggaattaaacggtggctcgttgcaccgggtcctacttgatcttggccgttcggtttgacggcgacatgacgtcgggcgggtcctcagccctgcgcctcgatgggcgacatcatcgccgagaaccggcgcttctggatgcgcggtggaaggtgcttgttgtaccgcttc

SEQ ID NO: 380452 - DNA, 239 bp, Zea mays
cgtcgcctgttggtggggttggtgtctggtgtggtggggtcggcgctgcagcggaggcagcagtcaccgattcacgaacccaccaaaacatcctctccgtcccctgtacatgcacagatccagagtctgcgagagatgatggccaatgggttcgtgcgtctcccgctccggcgcgatgtcgacggcggcggagtccgtgcacgcgctcacggccaaggtcgtggacctcgacggctccg

SEQ ID NO: 380453 - DNA, 281 bp, Zea mays
agctgatcgatcgagcagcagaaaccagcacgtccaatcaaccaaaacccaagatgtcgagcttcttcccatttccgtccgcccctctcgccgttcttctcatcgtcacgctccacgcctccgccatccatgcgcagatacctgcctcggcaacgaccggcgccgcggtggccgccacaaacccgcagccaggaggcagtggcactggcggcggcgtagtgggcgctgtcgggccggacgcgcctctggagctctacatgcacgacatcctgggcgggtcg

SEQ ID NO: 380454 - DNA, 277 bp, Zea mays
gtccacttcttactgtggattatattaaacagctatttggattttgtggtaaagttgttgattgtgtcatgacagatacaaagcagattgtgtatgttgagtactccaaacctgaagaagcaactgcagcattggagctcaatagcaagagtgttggtggtcgtccattgaatgtggagatggctaaagctcttcctcctaaagcaaataataacttgcctatgatgatgcagcaagccgttcagttgcaacagatacaattccagcaggcactaat

SEQ ID NO: 380455 - DNA, 285 bp, Zea mays
cggacgctgggcgacgtccggctgctgccgggcggcggcgacgcgctgtcggcgcccaagttgcgcatgattctgctggagatcacgttcagcgggttccggcagggcgccggcgcatacaccgcggcgagggccgtgttctcggagggggccctgtgctgcccgtacctgttcggcaacggcggcgacccggccgacccgttcccgctgtgggagggcgagtccgacgggctgctcgccgcgcaccgccgcggcaacgccagtaccaccggcgactgggccgag

SEQ ID NO: 380456 - DNA, 281 bp, Zea mays
tctcagtccgacagagacaacaggagctgcagtgcagcttcggcaccgccgccaccgtcgcggcggctccggctgttcggcgtaaacctcgactgcggcccggggccggagccggagacaccaacggcgatgtacggctacatgcaccaaagcccctacggttacaacaactggggcagtccataccagcatgacgaggagatttaagattatgcctgcagaatccaaacagccaaagtagtagcagtagtagttgctagcagcagcagcagccgcctagt

SEQ ID NO: 380457 - DNA, 228 bp, Zea mays
ggggctgctgaactaaattgttgcagtataaaagctcattctatgtcgaacagcgccgctagcgagatgcaagcgcacagcaggccacaggcagcggcccccggcggcgtcggccgcggacgctgagatgcagagggtgttctgccgcatcgacgcggacggcgacggccggatctcctcctcggagctggccgcagtgaccgcgccatctcccctctaacgagctcc

SEQ ID NO: 380458 - DNA, 161 bp, Zea mays
ggatgccagagacagttgcgtgcgctgcagctacctaaaccccctcgtcgagatacgcggacggccggtgtaacaaccccccgggtctctcggccccagctgggcgttcacggctccgcgcgctagtatatggaggcgtgacgccctggtcgtgctcttta

SEQ ID NO: 380459 - DNA, 160 bp, Zea mays
gcgagcttcttgacgcccaccgcatcctcgccgccgtccagaacgcgcagtaggcgcgcaagcgccgcggcgcggagcccgccaggcccgtcattgccgtcaccccgaccaccacctccgcgctccaggtgccatcgctcacgtctctggcgcacaccct

SEQ ID NO: 380460 - DNA, 277 bp, Zea mays
agctgccctcgtcgttgcagaagctcgttacgcagctcccggataaactgaccactacgctggcgccggagattctggctgctgctgcggagtcgcaggggattaaagtcgctgagggcggcatgaagggtgcggctaagagaatgctctttgggcagaatttggcaaatctggtgaagaagccaggtgctattgtggggatgctcagggcgattgtggaggttttgaagtcgagatggccagcttttattggcatgaatgttatctggagtgtcgc

SEQ ID NO: 380461 - DNA, 242 bp, Zea mays
ggccgctcgcgatctagttctagatcgcgacgatgctagaactaggtcggctgccgggcaggtaggaaaaggtatcagcgtcgccaatctccatggagcaccacaggcgccgcgctccggggatacgcgctgccgtcggcgtccccggtggccgcgatttttgggaggaggaggcgaccagccagggtggcctgcgccgggggcggggtgttcgctgaggaggggcacctcaggtactacga

SEQ ID NO: 380462 - DNA, 233 bp, Zea mays
tcgagaacggcatggcaacagttgctgccacagaagctgcagtggttgacaagaaggcagatgctaagatggagattgctgggctggaggccaaggaggaaaagctggtgaaaggctgcatctttgggactaagaggaagttccctaacacagaggtgctggaggagtcgccgtatgttggtaaatttctgaggagaggaagggtacagcagttggtaagaacctccacatat

SEQ ID NO: 380463 - DNA, 268 bp, Zea mays
atatactcgtgacaaaggaagaattgaagtacggcaagccattcacgcgatccagctattttagacactcagtcatgggtcgaccgtggcgcatcattccgactctctgtctcgctgccagcgtcgtatcagtgaggggtcaaggaaacgcagcagacgcccagaatgagcagaagccaattgcgtctcaagaacacactgcgggtggaaacccgctgacttctgaattttcagagtttgtgctcaagagattggatgaatggaaggt

SEQ ID NO: 380464 - DNA, 278 bp, Zea mays
cggacgcgtgggcaggaatgacctcagaagagagctcagcttgatgggtccaatggcgtttgcagagaaactggttttggccgttttcggggctctcatcgtcctatggatgaccaggagcctgacggacgacatccctgggtgggcggtcctcttcgacggcagagtcggggacggaaccgtcactatcatgatgacgacgctgctgttcatcatcccgagcggcaagagcggcggcgagaagctcatggactggggcaagtgccggaagctgcagt

SEQ ID NO: 380465 - DNA, 107 bp, Zea mays
ctccactccagccaggtgccagtactcacccacccatggcgtccgatgctgcgccgcgggtcgtcgtggactagtgccgggtcgtgctgtccgtgtacagcgacggc

SEQ ID NO: 380466 - DNA, 262 bp, Zea mays
tgaaaatgttctatatgcatgtgaatttgttaagcattgcatctcaatttaagttcacactttcttgaactgttttgatgtttgtcttatatccactaaagttaatctaatcccaaatagtaattggattagtagtaaagttcaaaagaattaaatcatattggaaacaatgtttgtgcaattttttgccatctcatgggtggagatttgttaatatgatatgctaatattgtctcattccaattatggagggctttacatg

SEQ ID NO: 380467 - DNA, 258 bp, Zea mays
cccacgcgtccgcccacgcgtccggccgaatggtcgggcgaatgttcgcatctctccgacctcttacctttccgactctgttttgattttacacgttttcatctggctgggggtagacaaatcgtgagaccaagtaatttgtgccttggtttgaccaaagttagcagaaatcttggcggctactccatcagttccatctacaaacattcttcgtagggcttcaaaagtccagcggagaacgtttcaccaataataacg

SEQ ID NO: 380468 - DNA, 257 bp, Zea mays
cggacgcgtgttttttttttttttttgaagtcaaataacacaggtattccttattgaaaaaattctttgtattcgggatacaaacactcttttgaagcctctcacatccactacctagaggcaaacccacaaaaacagatcaaatttataaattaatcccttactaatttatttttcttctattcgtaaaaaagtgtgtttgtatcccagatgcaaagaatattttttcccgctattattattacaacagtatagtt

SEQ ID NO: 380469 - DNA, 256 bp, Zea mays
caataatctcccccacaccgcgactctgtctaaacgccggatcctgatccgccattaccgccctcagctcgagagctcgactcttatcacagaggcgcgagttccccgctctgttataaacccgcgccgcgccttcccgtcctatcccctctctcaggctccgtcgcgggatccgaggggcgcgcgcttgcgtcaggtccaggtccgccagaggcgatgctcacgtgcatcgcgtgctccaagcagctcccgggcg

SEQ ID NO: 380470 - DNA, 258 bp, Zea mays
tcttaacctccgaaattccttccaagagcagccaggaaaccttaccaatggatttcagcatagttctcagaaggtccaagctcagaccaacattctcgatcctcatctggacgacacgaagacttcagtgcccttgaaagtgccggataaaaatggaacttcagcaagtgatgctgctgaccatcagaacatcaccggtgtttcacctttaggtggggtgttctcttttgaaagaatgtcagtgaatcaggacacgaa

SEQ ID NO: 380471 - DNA, 255 bp, Zea mays
gcgcatcgcgttgccttgcctctactacccacccgacctcccgcgcgacgccgaacctgcgagccataacgccacccaccgcctcgccgcgcagatctctggggcttatccctacccccgggctgtgattctcccgcctcctcaccgatgcggacgccggcgatgctccggtgggccgcggcgctcgcggtcctgctcgccgtcgccgcgccggccgccgggttctacctccccggcgtcgcccgaccgacttcg

SEQ ID NO: 380472 - DNA, 222 bp, Zea mays
gaaataacctttattcagaagtgtaccatgtcgcacaagttgatgccaaacaagcactgaacccacgacaaaccagagtcagcttattactactgacatacagagcaagttttgctggggaaattgaaagccagcacaagttttattactgctgacatacagagcaagcttttctgacctttatatatcgaacaggcttacatatgcttcctctctagtttt

SEQ ID NO: 380473 - DNA, 247 bp, Zea mays
ggaccgtgggccgtgtacctcgtcggctgggtcgccgcggagggcggcggcgtcggcgtatcggcctacagcctggtcgccgggctcgtgttcctcagcgtcttcggcaaggcgtaccggttcctggcgtgggtggaggccaggcaatcgcagtggaagtccagcctctgccatagcgccgtttgatcgacgacactcgtcgtcacagctaattctcgcaggaaaaaaaaatctgtaaaaagaaaga

SEQ ID NO: 380474 - DNA, 251 bp, Zea mays
aaaaatggcagcgagcagcaatgaagaactgaagaacaaggcgttgagccagatcgatcactatctggcgaacggagcatggactgcaccagttgatgaccgcggtgtggaattcaagacctgccctcacggctcgcacgagatcaacgtgtttctcggaaccaagacgatcgccacctcgatcgagcgcctgctggcggagttctgggacaacgtgaacgagagcggggtgaaggccttcgaccccgact

SEQ ID NO: 380475 - DNA, 250 bp, Zea mays
atcctcactgagttcgtctagcttgattgagatgccgcacttcgaacatgctctatcgaagatcaagccatcagtatctgaacagcaaatcaagaattatgaggcgttgtcaatgagatactcgtcaaactgatccatcaccagctgtccacatgtcacggaattccagtctctcttccagtgctgccatggctgcttcattgcccatctcccagatccaattcgcgagttctccctcctctgcggccat

SEQ ID NO: 380476 - DNA, 249 bp, Zea mays
cccacgcgtcccgttctagatcgcgggcggccgctcgcgatctagaacaaatgagacatttggcgcctgcccacagttggccggtggttagtttggacgcacagatcccttggtaagctaaggagcaggggtggtaagcttcagagttttgctcatctaatggcacatgtaggcactaggctactgtgcctgctcccatattttctcccagggcacccatgtcttgctaccagaatttgtttgcactta

SEQ ID NO: 380477 - DNA, 248 bp, Zea mays
gttggggcttggattttgcgctcaggaaatgtgtggaggtatgcattgttttgagagagtcttataccattctagcgaactgttgtttctgaatgcttttgacgttgctcgccagcctgctcatgaaaagattggagttgtcgattcgcagtggatcgttcaccaagtggttccttctctggggaaccaggggcagtcagaaaacggaagggcgccatgggaaggggtgagggcgcggtgcaggaagg

SEQ ID NO: 380478 - DNA, 247 bp, Zea mays
gaggaagaatgcgtagaaaaatgggagctccagcttcctcagtcccatgttagttcctatttctcgtggtttgatcccagcacgagcagcctccagttgcctacggatggcgtcgcacgggaggcgttcaggtggccgatagctttgtcaccagtggtttcatccatggaagtaacgggcaagacgcagtggcggtcgcattctgcgaggcaaagcttctggcagcgttgaggcgacagcaatggac

SEQ ID NO: 380479 - DNA, 248 bp, Zea mays
cctacaccgccatagctaggcagccgtcttagccacgccaagctagaagcaagagcaagcgtcgctgctaccaacccgagctacaccaccgtcccgctcagataggagatcggggacgaccaccgtagcatgccacttgagcccagcgttcggaatttctcaacggcgaggaaggccgcaagaattgctgcacgactcggctagcgtcgtctatgcctccatcgctgagcgaggttatgagtcatctg

SEQ ID NO: 380480 - DNA, 238 bp, Zea mays
ccacggtccgtatatatccaccgatcatgatgaagggtggcagcaagaaggaagtggccggtgcggcggcggtggtggccatactgctggttctgcagctgatggcagctccaccgacggccatggccgcccgctcgccgcgcggaccgtgccggatggctccctcgccacgacgcccaaggtgacgatgctgtcagccacgctgtgctacacgggggagacatgcaatacattactg

SEQ ID NO: 380481 - DNA, 174 bp, Zea mays
acgccagctccgcgacggcgcggaacggtttcggaaggatcggcaggctcgtgagcaggagcccctgcagacgaggatgtcgagctcgtcgcgtcaacgaccctcacaccacgatactgactactgttcatacgacacgtgcacgccatggaaccacgcatcacctcaagatcc

SEQ ID NO: 380482 - DNA, 258 bp, Zea mays
accaaagcgagcatcaagcagcgcctcgcacgctaatcccttcctttcctctgctggccgcccttaacagcactcggtcctcgctctccctgcggcggcctttttcacactctgcacctcctcccctccggccagtcgaaaccgtcgccgccgccgccgggaggagaagagctccatggactacaggcagtcctactgcatgaccctgaggatgaacatcgactgcaacgggtgctaccagaggatcaggagggcgct

SEQ ID NO: 380483 - DNA, 268 bp, Zea mays
cccacgcgtccgccctaaccgccactgcactgcttacccccatatagctaaccgcaactgccatttcaacaacttctcggtcagccttgtcacatttttttgacacatacatacatacatacattcaattttaatttgttgggtaaattaaattgggttcgatcgagtccgacgatggcttctttgatgatcagtctgtcgtcattcgtgatcctatcattctttcaaggtgctgccggcgggatcacgttcacgttcacgaaccggt

SEQ ID NO: 380484 - DNA, 241 bp, Zea mays
  unsure (1)..(241): unsure at all n locations
ccggatagttctagatcgcgatctagaactatcggacctggtgctatgccgttcctgcggtagagtttatcaaagtagcattgagagtaagagacaaaatggacggggaaagtaggtcttccatacagttccaatgcttgcatacttgtacatctccatttgattgtattcattgccagggggtacaaaggtgggatagtaggtcgacnaagctgatttcttgattgtcagttgggggtaa

SEQ ID NO: 380485 - DNA, 265 bp, Zea mays
aagaagctccaggtgagctccacagttttttacttatgatgatacaatgatgtgttgttgacacttaaccagtcgctaatcgtctagtcctaccttttagactggagtcaataagcttattactgcagttatgatgatacaatgatgtgttgttgacccttaacaaattggtaaaaaatgaaaattgatagaggaaaatttgtgctgaagctttattcgtcttttggttaagtgattactatgaatacaaaattgtaaacatcct

SEQ ID NO: 380486 - DNA, 264 bp, Zea mays
cggacggtggtctggacgcgtgggcgagtggaaggggaaggtttgaatctccccgcacgcgcccagcatccgcctgccgccgacggcccacatgccgaccgcctacagcctccgcgcgccgccctccaccgcgcacagcgcctcatgctgcccccgccaccgctgccgctttgcccggctggttgaggggccgcccgccggaggagggttgtcggggtatcgtccgcgtccgcgtcgcccttcgacgagctgtacgcgcggggg

SEQ ID NO: 380487 - DNA, 283 bp, Zea mays
ggaccagtttcatgcgccgtgcggcagtgtgaaatgcacaggtctctacctctcccccgttttctcgcttactaatggaccgttacaccacatagaacaatgagaaaccacacatgcccaactcgacagaaaggcacacacacaacataatgcacgagtattatattgtgttttataccagccgtatatacaacggttcggcggcagcatccttggctatcttccttctccacagtaatataccacgtgattggttggtaggtggtcgcgtccatacaggcca

SEQ ID NO: 380488 - DNA, 278 bp, Zea mays
tgcacgcctcctgtcctgaccatggctctgatgccagttcatggctttgcgtctcttcttgtcatcttcgcctgccactgccatgggggaggaagcgagcagggagcggacgtggcggcagagcggctggagcgcgacgtgacgtcgcccctggccacggtcccggtggtggacccgacggcggcggcggcggcgacgacgacgcagtcgccggccaccggcgggagctggtgcgaggcgagccccagcgcgacgcgacggcgctgcaggtggcgctg

SEQ ID NO: 380489 - DNA, 282 bp, Zea mays
cgctcctggaacccagacctcaacccttccgtccccgaccatcgacccccgaacggacctggcggtgtccagatttccagaagcatcccccatccagcccccggcgatcgtgcggaacctggcggctggggacgcgggagaagcggcgagggctagctggagatggacacggcggagaagatgcggtggcccttttcggacggcagcgtcaccgatctcctggacgcccgcagcctccacggctcccccgacattaagaaaaaagcacagtttcattcttct

SEQ ID NO: 380490 - DNA, 283 bp, Zea mays
accagattcaccaccccaaacgcagccaaagccccaaagcgggctcgcgcggccgtgcctcccactcccacccacggacccaccgcccacgcacgcacgggcgtgcggccatgcagatcctacgcctcctcgctgcgcggcgcttccgccggcggcggcgcggggtgtccacgatcacctcgacggcgactgcgccggccacccctcgcagcggctgcgtcgccggcgtgtacggatacggcgaggaggaggaggacgatgtgccgttcttcgacctcgacct

SEQ ID NO: 380491 - DNA, 270 bp, Zea mays
cggacggtgggcgactagctagctagctagctactgtgtagctactagcgtactctacgctgcagctgggcaacgaatcgacgacgccacacgatgacgacgacgatggcttatttgctcgccagtaataagtgcgtgctgctgtccctctccgtcgtcgtggtcctctgtctcggcggcggcgcctccgccatgggcagcctgcccccgccaccgccgatggtgaacttcagcatcggcgtgcagggcgtggtgtggtgcaacacgtgc

SEQ ID NO: 380492 - DNA, 280 bp, Zea mays
ccgccgacatcggcggcgcccacccgcaccagcaccagcaccgccacggccccgtcttcgtcggccgccacccgatcagcgtccgcgcctggccccacccggaccccagcgagctcctcaaggcgcaccgcatcctcgccgccgtccagaacgcgcagtcagcaccaagcgccgcggcgcgggacccgcgaggcccgtcatcgccgtcaccccgaccaccacctccgcgctccaggtgccgtcgctcacgtctctggcgcatacctccgcctcgttgacg

SEQ ID NO: 380493 - DNA, 267 bp, Zea mays
catagctaagctgagagcaaagatgtcttggcggcgaaaccagctacgtgcgtttctcgttctcgccgtcatcctcctcatcaccgcagctacctaccgagccaatgcgcaccggcgcctccagcagacccaacgccagccgctgacacctgcgccgaccccagcgtggaaggggcgtgccgcaacgtcccgacagcgctgcgcctgaagctgatcgccatcccgacgatcctcgtctccagcgtgatcggcgtgtgcctgccgctc

SEQ ID NO: 380494 - DNA, 270 bp, Zea mays
gaaggcgaaaagagaagaatcagctccatttctctcgtttgggaggagcgaggaggcgcgcgccggtgcccgaccgtcgaccagccgctacgacgcggcaccaggatagggacattttcatcgaggcttgtcacactcgatactgttgagatatttactactcatgaatggtttgccaagccaacagtggctttccggtgcaatggagcaaacaaaacatatctgccagatgtaacggaggcgcacacgccatatacctttaagggtgag

SEQ ID NO: 380495 - DNA, 269 bp, Zea mays
ctggatcttaatgatactgtgcttggctgttactataggcttcagaaacacgaaacagatggcaaatgcacaaggtaatagtacaaagattcgctttttctcaaaataagtaagtcaagagatatgaacatttgcagttggttatgtaacttcaacttcacatgggttggaggttaactccactaaatttttttttttggtttcagggttggcggttataacagttatgattgtcacaacttgctttatgtcactcgtcattgtccttt

SEQ ID NO: 380496 - DNA, 277 bp, Zea mays
gcagcaaaggaatttctttctccaccttgtactgtggaatggattctgctatcagagggatcctgcaagtgtgaaatctatatattctggacaaatggggcaaaatatgttacagccacaagtgctctgcctgtgctccattatcctcacgttattttttacccttttgcaaccgaccgctgcacagatcactgcaccatgggaagttgatgccctcaaggctattaggggcagcttgatagatccacacggaaatcttagcagctggaaccgagga

SEQ ID NO: 380497 - DNA, 263 bp, Zea mays
cgagcacatctcttcaagcttctcagaccgaacttggtacaaaggagcatcaggctgctgtagttatccaatctgcctttcgagcattcttggctaggcgggccttgcgggcgttaaaaggactagttagactccaggcacttgttcggggtcatgctgtaagaaaacaagcagcagaaacacttcagtgcatgcaagcgctagtaagagctcaagctcgtgtcagagcgagacgagtccgtgtttctttggaaagccaaggg

SEQ ID NO: 380498 - DNA, 277 bp, Zea mays
cgcacatcatcagaatcataggttaccgacctatagcgtgggtcgggaaatccgaccatgccgccaccgttgacttgtgggcggcggcgttggtgctgtcagaggaagaaggtgaacctagggccgtttgatccactggtggcgataggattagatctgggggtgtgtcatcgtttgccattgatgctaatatggtcggccacgattatatcctggcataccgattcggtatgtgggtactggccatccggtggggatcggaggaacgtagttcgat

SEQ ID NO: 380499 - DNA, 275 bp, Zea mays
gcactctcctgttccggccaccagcgtgcccagcatggtgcaacgctcgggtagaggagggcggactggtcttcaggggtagcttgaactggcgaccggattggtttggagaccggtttgtccctgatttggtgccccaagtgcaagatggcccgagtgattgaactgaggatgccaggaaggtgcccatactacagatggcagagggagtattttgagaaattggtgaaggagaggttgattgccttgttattcgatgattgggaggaagatga

SEQ ID NO: 380500 - DNA, 278 bp, Zea mays
agcgtatccatcacttacaagaaccgcaagggtaccaccgactgtggcctcagttcctgtgttgtcaccgccaccgttcagggcgttaccaaggtttcgacgacaccttcaacttctatcccattgcggccaacatcctcgccacgtctggtatctcgtcctttacagttactgttaacaacgccgatggcaccaaggatgtttacgacaacaacggccaagagtacccaatccaggatgcaatcgtcttccaggctccccagagctgcgtccttgga

SEQ ID NO: 380501 - DNA, 279 bp, Zea mays
ctcttccttctttttttttccgcgcggggatttgagttggaggagacaggcagctgggttgggcttggggacgacgcgcagacaggagcaacgcccgagggaaagcagcgtacccatccattctccggatgttccatggcaattccggacgccggagcggttcgccgcgtgagatgcccgaagtgccactgcgtcctcgaggagcccggcgccccagtgtaccagtgcggtggatgcggcgctagcattcgagcaaagaaccgcaccggcaccagctca

SEQ ID NO: 380502 - DNA, 272 bp, Zea mays
gcgacgacgaggtcggtcaaatggcattggaaaccgcaccttctccctcccttaaaccccacgtcgatggcggcagcaaatgtcccccgcacgggcacggcggtggcaaccggcggtgggacatgctgacgcgtttccacgccggctacttccgcatcagcctggcgctcagcgggcaggcgctgctgtggcgcacgctcatcagcagcgactcctcctctactacggcggccacggagcctcccctgcccctgctgctgcgctcactgccc

SEQ ID NO: 380503 - DNA, 166 bp, Zea mays
atatgaagagaaagcttcgcatgcggggctgtcttgtttgcagattgccactacctcagtacggttccaggttcctcaaggtatccgctgagcatctgttctggtgtcggattccgagttcaggtcttgtaactaataaaaaacggaaattataatgtctctcttt

SEQ ID NO: 380504 - DNA, 154 bp, Zea mays
caaaacaagataaacatcaaccccaaccccaacgactccaactccaagtcaaagagagcagcaagagcacgtgccggccgccgatcaaatccaccgagcaatcgcgcgcggccgccgaggtgccaaggcggcggcggtcggtcggtctgcgata

SEQ ID NO: 380505 - DNA, 137 bp, Zea mays
cggacgcgtgggcgaatgagagagaggatcatgcagctttggcgttttgcttgacggctcatcttccttaatgctccacgagcaggagacagggcaccggcgaatcgacgaggacgatcgcgacgccgtctcgcgct

SEQ ID NO: 380506 - DNA, 277 bp, Zea mays
cggacgcgtgggccgccgcgccttcaacctgccgcgcgacgcccggcggtgctcggggaggagaccagcgccaagcctcagatgctcatcatcgagcggaagggcacgcggaagctgctcaacctacccgaggtgtccgcgctgtgcgaggcgctcggcttcgcggtgaccgtggcagaggccgacgctgacgtgcgtgtgttcgcggagaaggtgaacgcggccgacgtgctcctcgcggtgcacggcgccgggctcacgtaacagatcttcctgc

SEQ ID NO: 380507 - DNA, 240 bp, Zea mays
  unsure (1)..(240): unsure at all n locations
ctcgcctgatcagagccaagcccatccatcattccacacctccgcgatacgagtgtccgtccctcctgccctactcgccgcgtccacgctcccgcagctcctcgtctagctccagctccagctcctcctcgcgtccgcgtacgaccgctacgtgctccactccaaggctgtgtactacacctccgcgcanaaccacacgtactactcctatgtgtacgacaccgatgccgcctccttcaa

SEQ ID NO: 380508 - DNA, 273 bp, Zea mays
cactcctcatgaaagttggttgcggcagaagctcaagcacctgtctttagggcttgcgtctctggaaagaacgatagccagaactaggtcgcgcctgaattggttaacggagggagatgcgaatacctcttatttccacctgcatgcgaaatacagaaagagaaaaaattatatggctaaagtgaaagtggacgacagactcgtgatggaccaagaaaggaaaaaggaggtagtgtgggagttctttaataatctgttgggaacagccagaga

SEQ ID NO: 380509 - DNA, 188 bp, Zea mays
atgcaggatggcatgttgcattataattattacaaaagcgacaaacacctccaatcacacgtgaaggtggggccgagggtgagagagaagtcttattagaaggaaggaggaaaatgacgaaattaagaaataattataatgcaggatggcatgttgcataaaaaaaaaaaaaaaaaaaaaaaaacaaa

SEQ ID NO: 380510 - DNA, 266 bp, Zea mays
gataaattggcagctgcaaataagttctttagacaaaaaagaaatgcagctggtgtgttgggattctccagtagacaaaagtgtactgtggctttgcggatgttggcttatggaggtccagcagattttctagatgaaggtctgcgtatgggagaaagcacagtccttcaaactatcaaggagtttgctaaaacagtccttcaaacatttttctgcttagcttgtttcttccctcctctggatggcagtagtgattcctcagacgt

SEQ ID NO: 380511 - DNA, 281 bp, Zea mays
tgttacttgagtaaccacttgcaacttgtagtatattatactgataaatataataacctttaacctttatattaggttgacatggatgaaatggtggcaacaccagttcaggatggacaacaaccgaaatcttctacataagttgtttctaatgtgctaccaagctccaatgtgttatataatgttggttttagtctgcctccatgaaaagctccacaacgacagtttctacaaacgttcaacaactttaggatcaactggaggctgagatgcaagaaaaa

SEQ ID NO: 380512 - DNA, 272 bp, Zea mays
gcctaatcctaacgagctctgttcatcagccatcacattattcgtctctaagcaatggcctctcaaagaagtggcagcttgttagtcctagcccaagcctttgccatttgcatactgatcccatgctgctcctccagcaaagaagccatggagctgttcgagagagcgtgccactgcttcgataatcccaatatatacagccagtgcgcggaggagttcaggctaaacgcggagggcgcgttccacgtgcagtagatcgtagtggacgcgta

SEQ ID NO: 380513 - DNA, 275 bp, Zea mays
ccgccctttttttttttttttaattaataaatataaatcatcaattattttcagctcaaataatgatcatctcaataaaagctaaaattcaaataaagtttaggctggtaagtctaacctaatgttggggaccacctaccgtgatgggaaaaatgtgtattccggatgcaaataaacacatctacaacctctcacatccactccatgcgacaagaattgaagcccaccaattaactgcttagttttaccttctgttagtgtggactgcaatagat

SEQ ID NO: 380514 - DNA, 118 bp, Zea mays
cgcacgcgtccggcaggccgtggatgcgtccttcgccggcagcaccgccacgtcggagaccggtagcgccgcgtataggccgagatgcgacgaatactcgtccgatggcggcagcggc

SEQ ID NO: 380515 - DNA, 286 bp, Zea mays
gcgccacgcgtccaggatcgtcggctgatcgtcggtcggcgtgcacgcgcgtggcgtatccgtggtagccagcgcagaggactacgcgtcgggggtctactctgggccgctgcgccggggggttcttgcacggcctgaagaaggatgcactggcggagggcgatcatggggtggcactagacgaggttggactggggctgttcgacgcactctttgccagcctctccatgatactagtcagtgagattggagatgagaccttcatcattgctgcgctgatggcgat

SEQ ID NO: 380516 - DNA, 170 bp, Zea mays
ggacctgggtcagaaactgcattattcctcaacagatttgcaggctcgctttgctgacattgtagaggaaagggaccacatccgagaatatttgaaggccaaggagggagagaacaaagcattgcacaaagtaattgcaagactacaaacaacatgtaatgagcaggaaa

SEQ ID NO: 380517 - DNA, 259 bp, Zea mays
catatatccgcagcatcggagcgctcgcaaaacctcgacaccttcctgaaacagtagccgctagctttagctgctccccttggaccggtcgagcttgagctgatcactaaccagtgctaccagctcgatcagcgccgtaataaactgatggagtttgacggcctgctgaattattacagcccggaagaggcgcacttggagctgatgacgaacacgatgctccagctggagcagctcaccgcgctcgacggccatcgtc

SEQ ID NO: 380518 - DNA, 139 bp, Zea mays
aataactaatcaagatcgatcgagaatggcgtttccgatgcttactagtcgtctagccgcgctactgccctcgctgctgccatggcggcggcgatgatggccgccaccgcctcggcgcagaacacgccgcaggacttcg

SEQ ID NO: 380519 - DNA, 151 bp, Zea mays
ggcgatccaaatggacaagacgtccatcatcgtttgctcggtgatcgggtctctagggttgctgagtgccatcctggggttctcggcagaggggacaaagcactccatataccatactggtgtacggcgacgactgcctctacccgcagaa

SEQ ID NO: 380520 - DNA, 293 bp, Zea mays
gtttctcaagggaggataagaatccccaaagaaattctgtaaagccattggtagatacccaacaatcagaaagtgacgtaactggtattagaggtacaagcaataagctaggtgctaataactcggttggcaaccatcaaatacgacctccaatggcagaaacttcggctgtgccgacagtgggctctctatcgacagcccctcgcttctaagggttatgctgcacttccctattgctagtagaattctccttctgaaggtttcaggacaatctacgtcgaaaacagtccata

SEQ ID NO: 380521 - DNA, 284 bp, Zea mays
cggacggtgggtttcttatgagaataatgcttattgatgtgatttattagaagccttaaaaaacaatggccattcatgtagtgattgccatgtccctagaaaaatgtcatagacttacatgattgacatagatgggaaacattgttttattgaatcaactgtacgtttaactccatgacttggcagacatgtagtattttctgaaaatcattattgaatctagtacacctctttgtatttttagtaatctttgagtagggctattgaatctagtaatctttgct

SEQ ID NO: 380522 - DNA, 256 bp, Zea mays
gtggcgatgctggcgtcgctgctgctcgtgtgctcgctgccgctgctggtcgcgctgctggagctgctcctgccgccgcggctgctctgcagcgtcgtccgcggtgaccgttctcgctcgtcgtcggctttgctccgaggctaggcctgtgtgctttcgctgttcgcgcggggagcttttcggtgtggccggaccgggtctgtctgcgcgtctgctgtcctacgctcggctaccgcgcggcggggtctgtctgcgt

SEQ ID NO: 380523 - DNA, 280 bp, Zea mays
cggacgcgtgggagcgccggctgtgggtcaaggaccggtcgcgcgcgtggtgggaccggtgcaacagcgccgaatacccggaggaggagttccggcgcgcgttccggatggggcgcgggaccttcgacatgatctgcgacgcgctgggctcctcggtggccaaggaggacaccatgctccgcgccgccatccccgtccgccagcgcgtcgccgtctgcgtctggcgcctcgccacgggggagccgctccgcctcgtttccaagcgcttcggcctcggcat

SEQ ID NO: 380524 - DNA, 276 bp, Zea mays
aaacaaccccaagtccccaacccagtttcaaacaaactagatccgcggcgaccatgcggcgcggcggcggtcgccggttccccaagccctccttggcgccctccaccgcggccgaggccaccccggctctggacgccagcgtcatccgcaacctcgactccgccttctccagccgcgactccgacgccaacagcctctgcagcagccgtcccgcttctaccgtcggcgccatcctcaacttctccgaccgcgccacgcaggtcgccgcgctccgcg

SEQ ID NO: 380525 - DNA, 143 bp, Zea mays
gatatgatgcttctctagctcatcagatcaaattagtactcgatcgataccaagttaattaagaacaactgaagaagttctctcagcaaagaggcgtcaggctggcgaaccggtggtggagcgtgcccggtcacttgggcctg

SEQ ID NO: 380526 - DNA, 282 bp, Zea mays
gacacgcgtccgcggacgcgtgggcggaccgtggcggacgcgtgggcgagcagccgccggataacttcgacgcgaagaacccagatgccgaccgggtggcgatgagcgagtaccgggaacacctggtgcgagagaagtggatccagatcgagaccgccaagatcatccgggagcgcctccgctggtgctaccgcatcgagggcatcaaccaccaccagaagtgccgccacctcgtcgaccaatacctagaggctacccgcggcgtgggttggggcaaggatg

SEQ ID NO: 380527 - DNA, 290 bp, Zea mays
gttctagatcgcgagcagccgccctttttttttttttttttttttttttttttttttttttcgtgagatgcagatatattgatgctacaagtaacaggaacccttgccgccattaagatatatgtatacatatccaagcgcaaaacatgaaaaacacaacacccagcccatttattgatacaaagggaaaaaggaaaaagtccaaaaccagtctggataatatatgccatgtaactttaacaggaaaagggagatacacaaggaatatgctaatgagtgtggtgaggctg

SEQ ID NO: 380528 - DNA, 290 bp, Zea mays
cggacggtgggtgcattagcttaatttcctagctaatttggttacatatagcccatagccttctctgtcgtgataaaaaactgggagggatgcagcgcatctagctcccgcgtacgtagcgcgtaggccagtagatattcatccggcaactgaaaaaagaaacccggtcaatgcaggggctgttcaaagtaccccttgtttattcgtccgagtgcaatccatcttggatgcttctttgaccagcgcccttggcctgcgttgttttttttaataatacctctatcttaaaa

SEQ ID NO: 380529 - DNA, 276 bp, Zea mays
cccacgcgtccgcggtggttgaacatgtagaatcttgaaaatgtatatttcttgaagttagcaagcagcaggttctcacagacgttagagttagacactcagacctctgctcctctgtcaactgtacaacggcgagctatggttccgcttgatgcagcgccgtctcatgtgacgtttaggccaggctaccgagatggagaaataacattaggtatttaaaaataaatagagtactagctaatgagctcaaaaaaaaaaaaaatggagaagtactga

SEQ ID NO: 380530 - DNA, 276 bp, Zea mays
cgcgtctcttcggagacatctagtaaaagcatcttccgctactccgccctccgcctcccccgtctgcttcgcaatccgatccggcgaccggcggccatggatcctgcgccgcagacgcacccgatcctctcttacgtgctctcccgcatccccaacctctccatgaccaagacccccaccgccgagttcgacatcgagcagccgcctgtgcacaccccgtccccgcggacgccgtcctccgcgggagagttcgagctcgtcgagcgcatgccgggg

SEQ ID NO: 380531 - DNA, 238 bp, Zea mays
ggcagcgaggttacgagaaacttggagctcgaattggagaagtatctggagtttcaccaaaaaggtcaagagcagatgctgctggaggagaatcatgaaggcgagtttagagtggtctagaccgtcgtcttctagttaactttgattatggaggatcgtcgtcgtcatatgatgtattttacttagttattttgtacaaaagctcctattatgtaataaagatgtgatgttgttttct

SEQ ID NO: 380532 - DNA, 250 bp, Zea mays
cggacgcgtgggcggacgcgtggggactagttctagatcgcgagctgccgcccgcgatctagaacattcttcaatggagcccctaggttcctggagaaaagagctttgagggactgctactgctactgctatgccgcgtcgttcaaagttaagtttcctcattgcgattgtgtttgctgtccttttctccggcgttgtacgtcgcacaaggagaaggacaggcagaatatgatgtgctattgtagtattg

SEQ ID NO: 380533 - DNA, 278 bp, Zea mays
cggacgcgagggacaacgactcagctcgcgcacattcgcccagctgccaaaacccacacgcacgcgccgatcaacagcccaagctagcgcccaaagccggccggcggcctaacaagctcggtcttccagtccactacttaattggataggtcaagctccaccggcggctgaacgcgcgcgcgcgcgccagtggctttgtcgtcgaggcagctcgcagcggccctcgtcgccgtgctggtggcgctcgccttccatactgcgtgcgcgagcgccgcaag

SEQ ID NO: 380534 - DNA, 271 bp, Zea mays
cccacgcgtccgcccacgcgtccgcacacgcgtccgcggacgcgtgggcgaatgatggaagcatgcccgcccacctcttgactgcatgcgctggtcagctgcggcttattctacacatcttgcttgtctgtactagcctgagttcaacaaggaacaagtcagtctacgcatcggttcagcagaaaacccgtttctacgtgtcctgtttcttggaatacaaacgagatagaaaacggtattgtacatgacatcagggctagttcaagagcca

SEQ ID NO: 380535 - DNA, 268 bp, Zea mays
ggctttccgagctccgatccctctcccacgcctgatggatggccgtgccggcgcccgcgaaggcggcgcgcttgcttgctgcctccgcggcggtgctcgtgctgctgtggtgtgtccatttccgcggtgggctctccttcggctcccccaccaacaagggcctcatcttcaacgtgcatcctgtgcttatgctaataggattcatcatcctagggagcgaagcataatgagctacaaaatatggccatggagtcatgatacaaacaag

SEQ ID NO: 380536 - DNA, 157 bp, Zea mays
acacgtggaacagcattaccggccacagctgcaaccgctacgaggaggagatctgtgtaaagaccgtgcacaccggcaggcagcagatgcagcggtacaagcactaccacgaccggttcaagatccacggcgactcgtcgtacggcgtggagaagca

SEQ ID NO: 380537 - DNA, 272 bp, Zea mays
cggacgcgtgggcgcgatctgccgctcggatctagaactagtccctttttttttttttttgaaaaacagccattactgaagaattattggcaaaaaccaaaagaattgtcagaccatcaggaagcagcaggagggggcgctgcagccgtgacggcgaacaagagtatagtcattcggggggaaaaggcttctacatagctacctttacagagctgttgctatgtatgtatggaggagcttcagagagttcgtatctggtatactactactct

SEQ ID NO: 380538 - DNA, 276 bp, Zea mays
cgtcacccgacggagggggtggcgccacgccaacgcgaacggggagcacgccaccgtacggtgctggacgcgcaaccgccgagctcggtgctgtacgtggcgctggggagcgaggtgccgctgcgcgcggagcaggtgcacgagctggcgctggggctggagctcgccgggacgggcttcctctgggctttgcggaaccctagcggcgtccccgacgcggacgtccttccggccgggtgccaagaacgcacccgcggccgtgggctggtgaccacg

SEQ ID NO: 380539 - DNA, 236 bp, Zea mays
cggacgcgtgggcgagacgcgtgggcggacgcgtggggtcgtgcagatgatgtatcaagttaaacttacctgacactatgtagtctatcctcccaaccgcagctaagtagcagaggcacgggtgggtggcatcaataccggcatgatacagtatcagacactgtcatctatataagagacagccaacttcggttcgttggttgcctaagctcgctactccaagtatctcggtgggt

SEQ ID NO: 380540 - DNA, 275 bp, Zea mays
ctccgaggcaaattggaattcttacacaatgcatcaaaagatagcttatagtggacaacatgggtttggaccttacggcatgggcttaaaagataggctggggttgtatcaatcttcatctggttagttttgtatcatgttgccaggtagatctttctgatggtgacaattctggagttaatagaaacaataataattctcgcaggtacattaagtcatgacatccaaatgagtgatgagcatagcggaggtgtgaagaagaggaaaggagtgga

SEQ ID NO: 380541 - DNA, 283 bp, Zea mays
gacgtctctgaaccgaggctgcgactgcgagggcatcagggcagcgaggcttcttgtcgcgtgaatcccctcgagagccgccggcggtccgcgtccgacgacgacagctacagcacaagctcttatgacagtgaccgtgaggtgtctggcagatctcggaaacataagaagagcagcagatcaagaaagtttagggagagggagcggacaaagatagacatcatagacgagacaagagtaaacacaaagaggtaaatttcctatttattcagaaactactaaa

SEQ ID NO: 380542 - DNA, 292 bp, Zea mays
ggacgcgtgggcaagcaggtgctcctgtcccttgaggccttcacgcgcaggctccagaacaacaaggagtgaagcagcagctcccgggatcgccgtgctaataataataatctctacttccttccttcagcaattagtaattcgtggtcgtcttattacaaaccaaagtatatgtgctcgaacctataataaaatacatggagaacttcgctatccgatccctgcctccatattggtcccattggagtaaatgggttggcccatctaagacaattgatatttcatgacacat

SEQ ID NO: 380543 - DNA, 277 bp, Zea mays
caaattcacatatgatcgaattcacaaacggtttgatgctggaggaatccctaactatttatcgtacgtaaaagctaaatcaattacgaaatattaaatcaacacagaagctagatgtattacggtaaattccgactttacggtagtaatatatcaatatattcatatgtcgatctggaaataacgccgtacgcatatgcctgccacatattggacttatatgcagacacaagcgtaatatccagtttgcctggacttttaataatcaccgcagcag

SEQ ID NO: 380544 - DNA, 204 bp, Zea mays
cggacgcgtgggcggacgcgtgggcgacatcaggatatctaatgagcgagttatactccttgacgctcagcatgtgtacagtcactctgttctaatcgatatgatgaggccagatggttcatccacaattcctgtccttaatggtgaacccttatcagcagacttagctcatgagctaatgggaatccagattggtgttttctt

SEQ ID NO: 380545 - DNA, 272 bp, Zea mays
  unsure (1)..(272): unsure at all n locations
ggagatgctctaactagttagatatttttcttgtttaatttaaaacagtaataagtggcctccttgtgatgcaggagagccttaagtttatggaggggaaaaaagcaaaatggtctgccaccgtccaaatttccagttcataatttgatctgcactggaaatggtaacagataaaatgcttccacaaagtaaactgaaaacaaatagaaacttatgaataatagcttttccctaaattatattctggttgccatactactanaattacctac

SEQ ID NO: 380546 - DNA, 215 bp, Zea mays
cccacgcgtccgggaattgtttttgtttcgcctgtaccggtgcttgctagtagtaacagtgccccccctgtttcgctagtagtaatgttgtttaggagtgaagtggttagttgcttagcacagctgctggttgcaggtttccagtgtcaacagcggcgatataaatttatattatatatatcttgtgtatgcctctcatggctttgtggtacaat

SEQ ID NO: 380547 - DNA, 277 bp, Zea mays
ggagtcttaatcgcgacactcgatatctcataatcgaagatctgatgaaagcgggccttcctgttgccgaagatctgcatattacattgaatgatgcggtcaacgaagaaaattctgaagatagattagtaaagctcttgctagactacggcgcttctcctttggccaacggatgcaagacgttggtcgacgccgcagaaaaggcgctttcgtcgtcactagcccgtttattggagattgaaattcctcagcatgatattgacgtggcctttagcaa

SEQ ID NO: 380548 - DNA, 276 bp, Zea mays
cccacgcgtccgcactgctacacaacagctagcaagctcatgccatcccgtctaacactctaactgaacaaccagttactatcttgcttagccacactgatcatatcatcagctagctcgtcgttcatgcgctcttagctagctagttaaagagattcagacagatcgaggatgatggtgccgggcatgaggaaggagctcaagctcatcgctgcagccttgctgctagttgtatctctgctgctgatgtcgaatgctgggagcgcacagcaggga

SEQ ID NO: 380549 - DNA, 243 bp, Zea mays
cgtacgctggtccttcaaccaagtggatcatcccctcacgcgagaccggagctggggggagccgacgtgccagcctgcgcctgtttgaccagacctgttgtgatggacggataaggtattcctgtaggagggagagatctttcggtgtagaaaataagagggtgccgcgggcttgactgagagagctgaaggaaggaaggagtcggctatgggcgggtggaactggctcttcggcggccgatc

SEQ ID NO: 380550 - DNA, 278 bp, Zea mays
gcaatgcagaagaacaacatagagttgcttcctgacctgtacagcaattttgctcagttcatatatgtggcaagtcatagcattattcaggctaaacaagtctttgtcgacggaataaatcgtgcaccttgtaaaccattgattaagggattcatacagttcatgagtacacatggagggcctaaagacatacctcttcttgattctgttatttctaatgccgtgactccaggatctgacgtatccacagctttaagcagagaggaccgcgaagatat

SEQ ID NO: 380551 - DNA, 213 bp, Zea mays
cggacgcgtggggcttcaggttagaaggttttaagtgcctcttgtagcgcacaccatagatatattaggtagtgagaaacagtatactcgtatgcgtcattactagtcctaagttaagtataatgtataaagtttttcaatgctttggttgaagaacacacgccatatgtcgtcttctccgatctgtaagttatttggcaccgaagagatgtc

SEQ ID NO: 380552 - DNA, 152 bp, Zea mays
gagagccgctttcttttgtaggttaaaattcatgtgcacatgctgcctactgaagtaaagagcaacctgactcggatgaagatccagatgatgatttggacatataagagtgtaggtgctctttacttcagtaggcggcatgtgcacatgaa

SEQ ID NO: 380553 - DNA, 157 bp, Zea mays
cccacgcgtccgatggtggccatgaagggggtcataccccgcacgggtcccttcttcgtcgccgcgatacgcctgctccccgcgggcgcactgctagttgccttcgccgccgcgcgcggcaggaagcagccctccggctgggaggcctggctcgcca

SEQ ID NO: 380554 - DNA, 270 bp, Zea mays
ggcagatgcgcagtccctacagcgtgccgaaagggaagggccttgtcaggagggtgacagagatcatgagagcaggcaatgtttccgctagcccgagacatccctggaagctgggcaaatcttcctctcatcagttcgacgacttggctggagtacttgaaggtgaaatgatcagtgctggaggatcagacctggtgagtctcaaggccgacgatctgccgtccaaccaagaattagcagcgattgtggtgagggaacagcggcgcagac

SEQ ID NO: 380555 - DNA, 215 bp, Zea mays
cggacggtgggcggacgcgtgggctgaatttcaaagtttgcatctaaaatgttgtagttagttttcgtaacataggaatacagaaaactcccaactaaaggcctagatgtgtattgctcatacgaaaatctgggccattgtgtttttgtccttggatataagtacaattgtgattttaccctctaaaaaaaaaaaaaaaaagttctaaatcgcga

SEQ ID NO: 380556 - DNA, 200 bp, Zea mays
caaacatcaaaccgaccgactccacacagggcaatgcagacctgaatcgggggcgtcgtcgttgttgcgaagatacatactattggaggagtagctaggctgccatgtccaacgtgtccacctgcctacgcgactcccccctcaccgtcttccgcctcgtgatctccagctccgagccgtggcccatctcttcctgcctc

SEQ ID NO: 380557 - DNA, 252 bp, Zea mays
gctttgctttggtggtgtcaaacgagatggcttaagcagaagaatcttggcacaactaagcagacttcgtacgataatctgtagttttttttaggcaaaacaactatgtgtttcattttttccctacagtttctagtacaagatcttttgattgttgagttactgttttaattattgttagtgcgtctaaatttaaatatttagactactaatgatatatgtaactgtacatagttgtctattttcaatttt

SEQ ID NO: 380558 - DNA, 273 bp, Zea mays
ttcaaattaaactccacatgggtacttgtacttctctatgagctgttaatcacttgcaatatttttatttctaatttgattgatcagccatgaaatcacgccacatgttcctcagatgattgtatgatcatgttacatgttccttgcttgcatgtatgatctccgtggcaaattctgaaaaatatatagagaacagaacatgtctctctctattttcagccctttcagatgtggtctgtcagtgtcaccagagacagccaaccgggatttctt

SEQ ID NO: 380559 - DNA, 275 bp, Zea mays
aggtgagctgcggcgccggacgtcgcggggaagaggatgaactggatcgggcgcaagatccacctctacaatgtcaccatcggcctctacatgctcgattggtgggagcgctacctcttcaacaatttcggcaaacaagacaatgtcattacagtgcccctacttcctcgaccctaaaactgttcaagaaattttacagccttctatttaatattttgatggtttgcctcttctggtacattctccgctatctccttgggttcttccaaagtaat

SEQ ID NO: 380560 - DNA, 118 bp, Zea mays
atcacgaccaggacacagtgctccctccccaaagacaaacaggcgatctgcaaacacacacgctcgatccgagacaagccaatctaataatggggatggctccgtgctgcgagaagat

SEQ ID NO: 380561 - DNA, 259 bp, Zea mays
gtgatttgcagcaaatgctggacacagcgacgggagtatagtttatggttcgcttgttggctggagaggctgattgctgctgtataagtaaaataggtaatcaagacagcaaccggcattcaatacaactgaccatcccctgcgaaaagtgggcattcacatatctcaggagtcttcatctgtatcatagggggaacacaattcttaccatctgtatcatactgttgcatcattcttttctatactgtaactgtggaaa

SEQ ID NO: 380562 - DNA, 261 bp, Zea mays
ccatcctcgcccttccatccacgtgttgcatacctcgtcaaggcagtcttcgcgctgccgagagccttccccacccaccgcgaggagcttgttgtggcaggtcgctccgaccttgcaaacggtgtcgcatccagcgggggctggatctccctcgactggtcctccactgacgatggctgcgccggcagggaccaccctgactatccgcccaagacagagccctggacgaccaacgcgacgtcgcctccagtccgcacccct

SEQ ID NO: 380563 - DNA, 290 bp, Zea mays
ggaccgtggcgccgatcccccctccgcatgcgactcccgtggtgggggtgctgtcgccgccgctggagccacaggccgcggtgaaatcgacgaagcgcgctggaattattggagttgcatttgaggcctactactccaagatttcgcagatgcctgctgcgtcgaaggtggatgcctgcaatgctgtggctgcgtgggcggggcagtactgcaaatgccgttttgagctggatgagaaagaactggaagaagaggaaggtgactctttggggtctgcctcgtcaatgacc

SEQ ID NO: 380564 - DNA, 262 bp, Zea mays
cccacgcgtccgacccgatcgggctccgcccttcttctcctcctccgccgccgccaccgactcgcaggcaccgtccatgggggccaccctcttcggcgggctcacggagtcccggttcgcgaagctcggccgggcttcgccgaccgccggaagagggccagcttgcgcgccgaagtgctgagggggagggttctccacctctcgtttctagccacccttggcccagcgcggcgtccgggcgtgactcgcgagatgacccgag

SEQ ID NO: 380565 - DNA, 173 bp, Zea mays
cgcgtgtctcccgtcgcatactcactcacacccatggccgcaccgtcggccgcctcgctagtggcacgcgccgccctcccgccgcgccttcgcccaaccacctcttctccccttggccccgccgtcctcggtcccagcatccgccgtcggtacctccgtctccgcctgtcgct

SEQ ID NO: 380566 - DNA, 262 bp, Zea mays
cccacgcgtccgacttgtttgacgcactacggcacctcaacttgcgtgcctgcccaagactccagtttgtgcttccagtctgggtctcctccttccccagattggagatgctccacatcgccgactgcacagacctgaggcatgtattcgtgctggatgaagagcaccgagaggaacgcatagcgttccccaatctgaaggccatgcacctgcacaacctcccatcgttgtggcagatatgtgaggcctcgatgctgatgct

SEQ ID NO: 380567 - DNA, 283 bp, Zea mays
gtccatctgactatccgagagattttccgctgtgctcttcgacggccagttactactcatgctagattgtcatactataagagacatgtatactttcgcttcctactacaaattcacctatttgtataagcctagaaattctgtcgaattcttctttttttacttttccagcatctacgcagttgaatcgccaaaaaagaagcatgacaggcgtaataccatatacagtatatagaaatagaaaaggggctcagcgaatacgtgacaccgaacagcttgctgg

SEQ ID NO: 380568 - DNA, 274 bp, Zea mays
caacggtccgggacgcgtgggaaaattgagccctaaatgccccccacttccttttgttggtgtcattctcaatattaatgaattactagcagccctctctcttcttcagaaaccttccactgtttcaagaaaagcagacccaaaaaatactaaagtttgcaatggggcttgctctgccgacagtagatgtttgaacttattgaatcatcatggcaagtgcaataactcaaagaaaaagagtcctttactgaatcatcatggcaagtgccaggat

SEQ ID NO: 380569 - DNA, 277 bp, Zea mays
cccacgcgtccgtcgcgattgggatgagagagatgagttgccgcggggagctagggagctcggccagtgttcgcgctgggcatctaaggggtcctcgcgtgtccgtcgacgcgagggctgggtttcctcgccgctgggtggcaaagatgtccgcccgccgtcgtggacctgcgtgtctgatgacattgaagcatcggcaaccatcctgggatgttccctgggacacaaggacggggtacgctgtagccagaccaactttggggccggtgcctaacca

SEQ ID NO: 380570 - DNA, 230 bp, Zea mays
gcgctgcggcctttcagggccacggaggagattctcgtgacaagcaatctcctgttgtaagtaggagcattttcaatggtgttgatgctgatgtgtttgcccgatttgaagttttgcagtcccgtattgataatataaactccttgagtgagattgaaaaaaattgagaagaaaaaaaaaaaaaaaaaaaaaaaaaaaaaagagagaaaataaaaaggaagcgttgataa

SEQ ID NO: 380571 - DNA, 291 bp, Zea mays
gttctttttggtgatagcacttggacaaatgacctgaaagggaacactgaaaaccctattctacttccatatatcgtcgtagtcctgatatcatgtggatctattggttttgcactgttccttgctgttactccactaaaatcagcatgtaatgaagctgagagagcgttgtctgtgcactcataacagagagaaacgttggatgccactcgtcacagcaaaaccgacttctctgagaatagggcacatgaagcatatgaagaacagaggtccttagccatccttgttcca

SEQ ID NO: 380572 - DNA, 291 bp, Zea mays
cccacgcgtccgccagtattcatatccaccaggaatgatccgaatctcatatcgcaataaataataaaaaacaataaacgagcagaaagatgagaaaaaaagtggtggcgtggaggatcagacgattgcgacgcaacccagcttggttactactctaatctgcaactttagttgtacatacccaactttaggatcagaggattccttatttttgcgtgtgcccgtgttttttttgtttgtttcgtccgagatatgttgatttgttctttgctagcaattgtgtaaaaattc

SEQ ID NO: 380573 - DNA, 278 bp, Zea mays
atttcagattcaatagggacatgggcggttaatcggacgcggtgcgttcaaagtcaaagtcatcaaatggaaatactggggacggagtcaagactactgaatggctgtgaccatggtttcctttccctgtgagtgtatgagaagaaatttggatatgcactgagattaaatgtgatggaatgctgtattactaatagcgtcttgttctaatggcaggcggattgggcggctgaatcatttttgtgtttgaataatatgtttaggggtaatcatacgtg

SEQ ID NO: 380574 - DNA, 263 bp, Zea mays
cccacgcgtccggaataagctaaggataatgatgaagatgcatggccttggagatctaccgtactggactatatcctattgctattttctactgttgtcgctgctctatgtgctgtccttcatgctgtttggttctgcccttggtttaacattcttccgccagaacaactacggcatgcagtttgtgttctattttgcttacatgaatttgcaaatttcgtttgcatttcttatgacaacatacttctctagtgtgaggacag

SEQ ID NO: 380575 - DNA, 238 bp, Zea mays
cttcttctcttttttcttttttttctttgttctatcgtttttcatgtctttttgttcaaaagcttccttgtgattgcccttatctgcatttaaactgagatcagtcaatgggtgttccttttccgctggtttctcctctttcttctgatttgagatatcttcagatggaattttggacccttcttgtagcttagtctgagagtttccaacgtcggccgaactctcaacatttttttct

SEQ ID NO: 380576 - DNA, 165 bp, Zea mays
cccacgcgtccggtcacgtactcggagatccgagagtgctaccaactttcaacgagcttgaacaaagacgtctgtcattggttcaactcacacgatcacagcggaacaatttgtggatgatctcaagggtctggaactttgtggagtcggatctcgtgggctttc

SEQ ID NO: 380577 - DNA, 146 bp, Zea mays
cccacgcgtccggatttccgtccatttcccaggttctcaccggttcctcaaaccctaaaacctccaaaccccagcaatggcggattcccctgcgttccggcgctacacgctcggctcctccgtcgagctcgtccgctggcgccctt

SEQ ID NO: 380578 - DNA, 144 bp, Zea mays
ctacgaagaggatggattccaggatctccctcctctgcgccctcgtcctcgcctcctccctcctgcactgcgccagatccgacggcaatgacgcggagtcctcaagggcatcaacagctacaggtcctcggtcaaggtcccggg

SEQ ID NO: 380579 - DNA, 147 bp, Zea mays
aacccatttgcctgcactagtagacagatttctcagaagccgcggccgtcacgcgtcagacccacgcagcgcaccttctcttctccgccgcgtcggcgccgaacatcagcatcggatcgatggagggctgggagaaggggagcaaga

SEQ ID NO: 380580 - DNA, 140 bp, Zea mays
gttccaatgtttgcatcagtggaaatttgtgggcattgagaagctgaaacttttcttactactatgctgcagtcctggaactttctgagaaataccagaagaaatttggtccacttcgatattttgtggctggaatactg

SEQ ID NO: 380581 - DNA, 267 bp, Zea mays
atcaactaccaactcgcccaagatgcccgcttacattgttacccttcacgacgacgcctcggatgcgcaagttgccgcagccaagaagaaggcgaccgacgctggtggcaagatcacccaggaatacagcttaatcaagggcttcgccgttgaataccccgaatgcactgtctcgactctcgaccaggacccgtcggttaaggccgtcgatgaggactctgtgatgcgaacgcagtagatgcagctttacgactacgctgtttatga

SEQ ID NO: 380582 - DNA, 267 bp, Zea mays
cggactctggtcgtgacgcgtgggtttctttgtgttttttttggaaacaagtgactagaacattttagctgcccatggatgaaaatgtatccactgtttatgctaaaatacagcatgccgacaacagaataatataatgggcatcataacatgtacacctacagcttcatcgatcaacaatagcaaaacacacctgtacacaagacacggctgctaccaagcatacgcgaccaaaataacagggaggtgcagagaacacctgacaga

SEQ ID NO: 380583 - DNA, 274 bp, Zea mays
tcggaattccgggtctacccttatcgtacatgtcctctgacgctgtgtgtggcttgtggtaggatccagttggagagtgctgttttgaatggtggtacaccttagcgattttttgcatcttgagtatgttccaaagtacattgttttttattgttatgagtgtatggtagtataaatttcttagtgcactttgatttcccatggttatcaaaatctaagagaattgcataactttcccttttattatttgctttgcttgactcaccggttcgtg

SEQ ID NO: 380584 - DNA, 198 bp, Zea mays
gggtcaggcagcaaccacttcctaacaaaactgtagaaaaggtctgggaagaaaggtcttgttgcaaaagtgtgcataaatttctagtagagaaatgaattagtagtaactaatcatgtaaaggaatacgagtagatccaaggggagtgcaaacagtgtaatgattaagattcagaaaatggaaatgtgttgtttgtc

SEQ ID NO: 380585 - DNA, 253 bp, Zea mays
ccgctcgccatcttcgccggcatcaccaccacctttgccttctccatcctcatcttccgcgtcttcgtcgtctacctcgacatcgccctctctctcgtatcgcagtctctcgcccacctcatcgagggcagcagcataacttcccatctccggcccccacggacgccgtcgtcgtcctcgtccatcaacagccgcgccaacagcgtcacccgtccgcctcgtccacgcttctcaagaggcaccgccgccgccg

SEQ ID NO: 380586 - DNA, 289 bp, Zea mays
gctggtggaacaaatggaaaaaagcaaacgtaccgagacactgcaggctcgtgctggcgtactggacaaatttagaatggtagcttgcagctgcgaccggatgaatttgttaaagaacaaagcattggataggacggcttccttcgtatcgcgtaagcagccatttgctggattacagggattatcgttccaggccgcccagagtgctgcaagaaatgtttggctggttgctcctgtggtggtggtgattggtgaggcgattcgtttggtattagaggttgcattcata

SEQ ID NO: 380587 - DNA, 105 bp, Zea mays
gcacagctcacgagctagcgatcttcctcgtgcaatcgaagcgagttctcatagctgtctacggaactcggaagctcaacgcagcgtgcgcttctggattcgacg

SEQ ID NO: 380588 - DNA, 276 bp, Zea mays
gatgtttcagagcaaccatcatatgcccgattccctagttcattggatacttcattgtgtaatgatacagaaagtaacactgcagcaacgattgacactacaatttcacatatgcagactgagttctcttcaattaataatatgtatgccttgttaaatggaggtcaagatggactcgggactgtaaatacacacggtaatgtttctgaacagcatcctggaatgggagatcatcaatgtagagcaatggattcagtaagaactgaagcaatgggt

SEQ ID NO: 380589 - DNA, 200 bp, Zea mays
attcatccccatgcaaatccttatatggctatgcgaccgggccattctacttccagtagaattgatagcgtagtggaaaagcacaacagttctacagcagatgcaaatgacaataacaagagggtccttccatcatccttttcaaatggcaacacatcaaaatctatgcatccaattgttgctagcgaaacacgcaagct

SEQ ID NO: 380590 - DNA, 274 bp, Zea mays
ggacgggagcgcagagccagcccacgtcgcccctcatgccgctgcctctccgacatgcggcgaggcggcgcacacggccacgggtacaagaggcgtcacggcgtgcagcggatccggcaggaggatcggcgctggagctccggcctggtgtggtttctggtgatcctgtgcacggtgctgaccatcggcgtgatcgtgacgggcgccaccgtgttcgccgtgtacctgctgtacaagcccacgacgccgtacctgctggtctcgtccgcgcggc

SEQ ID NO: 380591 - DNA, 269 bp, Zea mays
ggacgcggttgtttgtttcactagtcaaaaggtttgagttagaagatactccagtggagccagatagtcaagaatgcaaaactgatgaagaagataggatggatgaacttgtcaaaaagagagataggaaggatgcagaaagtactgaattcaaaaccgatgaagtagacatgaaggatggagaaagtactgaatgcaaaactgttgagataggtaggaaggacgaaaaaagtactgatgcaacagtggagctaaataataagaggtct

SEQ ID NO: 380592 - DNA, 265 bp, Zea mays
cccacgcgtccggctagtaccatcgtgcgagtgtgagcaagctactgagagaactcggaacgttgcttgacagcttgagtaggtaaataatctatggcgcgccaacagtggagcagcggcggcctcgcggtcgcggtgctggccgtgctgtcgtccgtgctcatctgctcgggccacccggtgccgggcgggctccccctgctgccgcacttctacggccacgcgtgcccgcagatggaggccatcgtggggtccctcgtggcga

SEQ ID NO: 380593 - DNA, 286 bp, Zea mays
cggacgcgtgggtacgctatatatacaatagggtgatacttgaaaatgctacagttcgagctagtgcagtcacgcacattggcaaagtttggtgccttggttgactcactcaaggtacttgcatgtttttttacttcaataatgtccttgctctgcaatgtttctgatctgtcaaatgtccattgcacttgcgatctttttatccagcctcgcatatttgtgctcctgagacgctgcctgtttgatggtgatgacgaggtgcgcgacagagcaaccgtttacctca

SEQ ID NO: 380594 - DNA, 300 bp, Zea mays
atctgatgattgtcggtgaggatttgggagttcacaatgaaatccatggggaatgcattgttggtgctggtttgttcccatccctagtatactgccagctctggggaaatgtggcgcctatagtgtttcagcgaggagccatgccacggctcagaacccttgactttcggttatctgttcaagaggtgagaggaatcaacggcagggatggtggtatcgacttgggcctcaggaacctgccatcactccagaaggtttgggttcatttggaccctgagggcgctaacaaggcagaggtga

SEQ ID NO: 380595 - DNA, 126 bp, Zea mays
ccctgccgtccacctcaacggcgccgtcgccggctgcctcttccacgacaaggaccggtagcacctcccattcctgaccaaccacaacaatggatgccagccattcagcgtcaccacgacggcttc

SEQ ID NO: 380596 - DNA, 146 bp, Zea mays
catacaaacaaaaaactcattatgtaaattatattttattacaggcataatttatgaaatcatacgacaacataacggctccctctgctgatcaaaacatatcagcgatctacctcaaaaacaagttctatgcttaggtacatcct

SEQ ID NO: 380597 - DNA, 210 bp, Zea mays
caaaagccatgattcaaatttccaactcagctacatcactacctgcagtaaatcagtcagcttcatctcatagtagggagatttgtcctgttgctagtcctcccaatagcagcaatgcttcagttgccaaacaacggatgagatggaccccagaactccatgaatgttttgtagatgctgtaaatcagcttggcggtagcgaaaaagcta

SEQ ID NO: 380598 - DNA, 272 bp, Zea mays
gcaagggtgcgccctcctccgaacacgcactcgtcctcctcatcacggggatgttatggttccgtgcgatggactacctacaataagcatggaactgagataattaggatgtaatctgtcagaaaatttccagaattgttacctccttttgtttagagtggattagtggaatcaaactggagttagttaaagcttatcctgcattttggtgtggcaaaaaaaaaacaaagaaaggggtggttggtgagagtgtgattggagtggtggtgggg

SEQ ID NO: 380599 - DNA, 278 bp, Zea mays
gcagtactcctgttgccaccgcgagaagcaggcgccgccaaggcaccgacgcgacgagccgtggctccggcgacgtcgccagcaccagcagtactcctgacaccaccgcgagaagcaggcgccaagacaccgacgcgacgacccgtggctccggcgacgttgccagcaccagcagcacaccggacgccagtgccgacatgacgagacggggcgagtccggtggtcccgtgccggcgaggaatcgtgtccctgagcaagcgtgcacggcactgatcgag

SEQ ID NO: 380600 - DNA, 276 bp, Zea mays
gttttaaccttattttggaagggagtatcacgaaatgccatagaaatttggatttagtaactatgttcatgatttccttcatgttacaggcccagacaatggagatgatgtatacgataattgcagatgagttcaagtcaatggacaataaggacatgcgccctgaagattacttgaacttcttttgtcttggaaaccgggaagaaccaccatctaatggcagcccagaatcagagaaatctacatataaaagtgcagagatagtctgtttttgca

SEQ ID NO: 380601 - DNA, 210 bp, Zea mays
cccacgcgtccgcccacgcgtccggtgcgaccagcaggaccgccgccgccccgtgccgcaaccgctgcggaggatgaactcggacagcatctacgacatggcgtccatggtgtcgcagctcccagccaagtaagtgcacgcgcctcccgcctcccttccggcgacgcgaaatcacgccaggctccggttctagtgatttttttttccctg

SEQ ID NO: 380602 - DNA, 269 bp, Zea mays
cccacgcgtccgcaactgatgagtaccgtagagaagtttgcaagattttggaggctgcctgtgattatttcctcaaatctgaggcaaatagccatgacagtgacgagattgtgatggtgtcttcaccatgaaagcctacagatgaaaaagatgtacatagtgccatgcacatatgcaagtgcagtggaaacaagtttgcaagattttgcagggtgattgtggtcacatccaaaagctggggaacagacaaccagcaatgatattgtggc

SEQ ID NO: 380603 - DNA, 262 bp, Zea mays
gacgatatcctagtcaccccccttgatcccgctgcctcagccccctcccgccgccgcaacgcctcctactaccatgtgctagtcacctcctactccgccgcgcccaaaccctatccgttgccgctccccaacccgctcccggcctccgcttcccccttcttccttgccgtctacaatgagacggcgcctccgaagcccgcctcgccgctgggcagagaattcggttttcttgccctgacaaggcgcgacgcagcggccatcg

SEQ ID NO: 380604 - DNA, 158 bp, Zea mays
ctcacgagtccgcccacgcgtccgctaagaagagggggtaaagaatcgattcatttaataaaagataatcaggcctaaaactatacaagcattaggtactgcctaggctccactctgtaaatgaccatgacgtgcattatgcaccaagtcgatagtct

SEQ ID NO: 380605 - DNA, 265 bp, Zea mays
ggacgcgtggcggacgcgtggggggaaatttgtgctatgtggtctacggaatgggagtatagccccctgttgaactacggcaaaaacagcataatcagcctactggagtagcttcatctagcaatgctaggaggacagttcccatgctgcccacaaggcatcgtgggaagcaaagaaaccaggctagcaaggataaattttcaagagttatttctatgtcgtcagcagtttgtagcttggtttcactctcatcagatgagaacta

SEQ ID NO: 380606 - DNA, 208 bp, Zea mays
ctctcaacttgctttttgttgtttgatatcctcattcttacatacctttttgatcaattgtgtattcattgtcacttatttaacaagtaaaaatggcttctactcgtttcccacaaatcggtaaaccagctcctgaatttggcggtcaagctgttgtcgacggtcaatttaagaatatcaatttgtctgattacaaaaacaaatatgt

SEQ ID NO: 380607 - DNA, 276 bp, Zea mays
cccacgcgtccggtctcttctcccttcgccttcgccccacgcgcgcgtttacgtacgtgtctagccagccgtcgcgtgccgtgtttctgcctgtcatcaggttttgtttggctcggtctgaatcgggctgttcatccgctcgctcttactcgcgctctggtttgattgttatatccgctgtttctgtttgtacgcgttgttctgtttgcttattggcggttcgattccaaggcttactttatcaagaactgtctgcggttttctgagatctctcac

SEQ ID NO: 380608 - DNA, 233 bp, Zea mays
cccacgcgtccgctttaacatcgtttgagagaaacgagctgtacagccagctacgcccatgaaatcagctgcgttcggcagtagactcgccggcattgcggtgcttggcttgagctttgcgcttcccgcgatagctgccaatggccgccgccatgggggcgagatggagatggacgacgctccgccagacgacaccgaatatcctcccacctactttgcgcatccggagcacc

SEQ ID NO: 380609 - DNA, 271 bp, Zea mays
cccacgcgtccgatatattataatttatagtataaaataatgtttgtagtgaccatactaaactgctggacactaacatgacaaatcgccggacagctggttattagctagagccagcgtttggagagttgtgcagttgacgaggcttgccaggatggacacactcagtttattgttgttggcggtgaagtaccgaaggttgcctccagcgcacagccctccagggatagcaccgctgagctggttattgtctagagccagcgttttcaga

SEQ ID NO: 380610 - DNA, 204 bp, Zea mays
ctaaaaggcacacactgccacagcaaccacctctagatatccctaacgtaagcagtggtatcacatcaggaggtgctggtacaggagatcagggacagcgcatgaataacagcgccgtaaatggtgctgccaccatctataccgggcctactagtgtgatcaacaacagcacagccagaagtaacaatttcaagtcggtaggca

SEQ ID NO: 380611 - DNA, 141 bp, Zea mays
gatgcatggtattggtagctagtcatttcttactttttataactatattaatcaggaaacatacacatatgtcgacaaataaacatgtaagtccaatcatcatttgtttgtctattgtctcaaaagaatgatttcattctg

SEQ ID NO: 380612 - DNA, 254 bp, Zea mays
cgatgctctcgccgtcgacctcaggtttcccgccaagtcccctaccctccaaggccgccacgaacgccacagctacccgatgccgcgccgcgccctcgggagacgcctcgctgtgcgccttccgcgcgcaccacagcgccggccacgccctccacactaacccggctctgatgcccgctgtcgccgcctgcgcacggctgccctccgccgtggccgaggccgaagccgagcagatccacgcagtcctcgtcaag

SEQ ID NO: 380613 - DNA, 186 bp, Zea mays
cggaccgtggttcccacccaaaaatctagccaaaaaagcccaaccaaaatgctgccttcccgccccatcctcgtggccgccgccgtcttcctcctcctcctccccgttcacgtcgccatcgtcgccgcacaggggtttcgcggcttctcttacctcctaaactgtggcgcggcgtcccccaccacc

SEQ ID NO: 380614 - DNA, 244 bp, Zea mays
acgacacaagacgatgatcacaattcacaacatacaagccctgcacatgcagattgaactgctacacattgccagccagttcgtcacacgcgctagcttgcggcctcaagaacgggcgtgaagaagtagggagaaggaagcttctatggcatctgaaacgccacgaggcagaaaaagaaaagcggatgcattgaaggaagaaaatacagaaacacctaaaagtgatgctgtggatcctccaaag

SEQ ID NO: 380615 - DNA, 263 bp, Zea mays
gtttcggtgcactctgtttctctgcagtctgtacggcccagctgctgccgttgctcaggtcctgccttcctgctgcatcacttggtcctcttcttcctttcgctcccccctggctagcttggttgtgtcaactgtctgcaagcttccttctcccctgctctgctctttgattgcttccactgtttcagctgttcttggcaggtttctctgctcccgccggtggcagactgcctgttgctgctacttcctaaccgttcttggtt

SEQ ID NO: 380616 - DNA, 256 bp, Zea mays
cggacgctgggacaattcaaggctcatttcctaccttacatgcctgccaactaatatgacctactgcactccagccaaagcttcttgccttcgaaggaggaggaggaagaagatgatgagcagctaagaagaattcggcaacatctccatgaactctccaaaaatggagctttctccatggcttgtgttctccttgggttttcttgcgcaggctctcgtcatcttggctgacacgaatgcacaagatgcttctggg

SEQ ID NO: 380617 - DNA, 100 bp, Zea mays
ggcatcataggggtgctccagttccctcgaagttagcttcggctgataaagctactccagttcttccaaaatcaactctgtcagtaaaccaagcagctct

SEQ ID NO: 380618 - DNA, 258 bp, Zea mays
ggacctgggcggacgcgtgggagcttgcatgctttctttgtaactattgacttaacaatgtcttcaaatgacttatttctacctctggcatgactctatgccttcttgccgtttctgtggtatttttctcaaggtatgttcaagtttctttatctaggattcgagtgagaagatgataaaactttattggtaatgcgtgccttatgcagatcctgtacaatatctactgaggtttcttctaatccttttttatggttc

SEQ ID NO: 380619 - DNA, 248 bp, Zea mays
cccaagcgtccgcggaccgtgggcggaccgtggtctgaagcatgccaatggcgtaactcgagcggcagccgtggaggatatgacggtcgttactgcaggccgtgtctacggtcaccgaggaggcgccgacgacattccgcgtcgtccagatggagggccttgctgtactgaaggtcatcaagcactgtgaggagtttgggccactttagttacaggtcaattgcttggtttggatgttggtagtgttc

SEQ ID NO: 380620 - DNA, 165 bp, Zea mays
ctcgctcggctggctgccttcttctttggttatccattgtcatcatgccccgcgcgttcccggcgttcttgtttgtttgtggtgtggaggaggcgctgccgccttttgtttttggttgtgtttttctccatggctggcttgttttgaaattcaagagggtggcaa

SEQ ID NO: 380621 - DNA, 261 bp, Zea mays
agcatctgctgcaggtcgcggccgtgctcgcggcggcggtggtgctcatggcaacggcgtcggagggcttcatctccaagtagacgtggagcgccatccggcgggcggaccgcgacgggcccttcgtggggctggtggtgcccaacgcctacgagatggtccccgtcctcaactcgccggacttcaaacccagcagcaacatacccatcctagacgtccaagggcgacgattccgcttcggaactattggaagccaaaacg

SEQ ID NO: 380622 - DNA, 258 bp, Zea mays
gcagtcccatattaacagcgttgggccagtgggaagcaatatgaagacagcaaacacggttactcctggtcttaacggtgccaactccttagctggcaatcccatgacaaatacccctggaatcatcaacggaatggggttcggggctatgggtggccttggtcagcagatgagaacagcaatggggaacaacgcgttggcgatgaacggaaggaccggcaccatgaatcacagcgcgcatgacctggcacagctgag

SEQ ID NO: 380623 - DNA, 270 bp, Zea mays
ccttatccctgctgtaattagaaaaacattctcaaattgagttgatcagttctaagcttgttgaagacttagtggctcttacacaagagcagggtgatagttgtcagggacagcatttggtgctgtgaagcaaaaagtgctgcttctgacgggagcaaagacaagttagcagaagaagagggaaaccagatcacaacggcctcagcaatatctgcagcagccaagaaacttgcagaatgccaagaaacaatggcgaatctaagtaagcag

SEQ ID NO: 380624 - DNA, 166 bp, Zea mays
atccattgtaaagtcagctttatgtatggtactagctaccttaatgaacttagtttgtgcatctctttatttttcctgtttttgaaggtaatgtgtgtatctttaagtgttcagctttgcaaatgctgcctttcatgtttcataattatatataaatactcctatg

SEQ ID NO: 380625 - DNA, 105 bp, Zea mays
cgccgttcccaccacgccactcgccagttcgtcactccctcctgtatccccccttgccgagacggcgcggacgccccgtcgcccaccccgatggcttccactctc

SEQ ID NO: 380626 - DNA, 179 bp, Zea mays
cccacgcgtccgcggacgcgtgggttccgttgctccatggccatggcatcccgaccgcctcttcgtcgtcgacgtcgtcttcccctcgtcccactcctcgttctgctctgcctctctccgggatgcgccgccggtagagtcccggtttcggtctactacgaagcgctgggcccgttctg

SEQ ID NO: 380627 - DNA, 255 bp, Zea mays
cggacggtggcgctgacgcgtgggcttcaaacacactccaaactccaagcctcaataatctcgacctctgtaactgaccaagaagctcatctccatctccaccatggccgggaagcaaggttgcaatgagcagtccaatgatcggaggatccaggcttcgatccaccgatacgccaagagcgtggtggtcgggttcggcggcaggctggtcacccgcgagcattagcaggaggtctccatcatcgtcgcggcgct

SEQ ID NO: 380628 - DNA, 268 bp, Zea mays
gtcccgttcccctgctcccgccggcctccggcggcgtcgccgacgctctattctggggcggcggtgtagccatcctcacggaagacaaccgcgtcgtggtggccactgacatcgaggtcaacgatcctcacccccgtcacctcgccgacccaggcatcggtgatgaggaacatgttctgtgtatggccgtggtggaggcacagtttgtcatgtcagggagcccagaagtgctgcttgctgttggcgaccgggtcattgcggttgacga

SEQ ID NO: 380629 - DNA, 260 bp, Zea mays
ggctgccgcaatttcctgccaggacaagctcagctcctccaaacttggatgaacaaaaacgtaatcaggtgcttgtggaggaacttaaggttacacctacccctgtgcaaccaactccaaaacagcagctgttgcagcagcatccgcatccgctgcagaagcaacagcatcagctgccgcagctgtcgcatcagccacagcagccacagcagcagtcaacaagaaaggaaactgttggttccagccaacctaactccatc

SEQ ID NO: 380630 - DNA, 238 bp, Zea mays
gacgaccccacatcttcctttcccacgctaatagcttcccctcctccatggctccaccaacccatcaccaccctgcaccgaccccttccctctccctctccctctcccgacggcggcggcggcggcaagggacgccactcctcaatccgtcgacgaccgctggtcggcctctgccaccgtctcgcccgcacctccgaaacctgaatctcatccgtcgaggatcgccgagagcatctgg

SEQ ID NO: 380631 - DNA, 284 bp, Zea mays
  unsure (1)..(284): unsure at all n locations
acacgcaccgaacagagncgggacctggcgacgtggcggacgcgtggtctgacgcgtgggcagaaatgattcagaggcatcacactacgtgaagaaccaattcaagatacccagctcagctccgagcgcctgattgattgcgaacaaaaaacagatatcgaacaggacagtgcagccttgctcgtaacccaagaaacggtgctccaccgcccattttcatgtttgtgtaacagttattattcatcggtaacactaggactttgggtggacgcggcagtaagcat

SEQ ID NO: 380632 - DNA, 192 bp, Zea mays
cccacgcgtccgtatgtttctagaaataactagccatgtcattccaattatcacactactgctgatatcttgtagtaatcaccgatatcaaacatcttggaaatttattttttagctatatttagtattgtgatttttgctctttcactcttttatatggctgtaacatctatgggatctagatacccatga

SEQ ID NO: 380633 - DNA, 281 bp, Zea mays
tgcacatcggcgcctggaggacgagaagcgaggaagaagacccacactctcctggaaaacgcatcacaagacttcagcctccctttccggacggagatccgactcgcgtctccgcgacagatccgggcaaacggcggctgatgcagttcttcggcggttcgtcgctgacgtcgatcgcgccggaggcaccccagccccggcggcgccccccggcacgtgcacgggcgccagcgcgcatgtcctctacgtcttcaaccgtaacggcgtctgcctgctctacc

SEQ ID NO: 380634 - DNA, 257 bp, Zea mays
ggcttccctcatcagctgccgcgtcgtcagccagctgcaagaaacaaaatctctcgcataagtccgttcgttgaaggcatgcagccatgatccctaggacgtcctctgtctcggcggcgtcttcgctctcgccgccggctttgcagagcgctactagcagcgacggcatgttccctggctcttgtagctctgtgcagcagcagctgtccatcatcaacgtggttctcctcgcctccgtcatcgtcgtcttcagggtc

SEQ ID NO: 380635 - DNA, 284 bp, Zea mays
gaggtagaactctgctgcaggtgcctgcgactgcaactaacaaggacgacgacatcgccgattcggccccaaccacgccaggccatagccccaggggtgcaaatcctccggctctccagacgaacaaatgacgaaccctacgtaggattgcatgaggcatgttgctagcttcccgctcaatcgctgtgcatctgccatcctcctgtcctgtgtgtacacctgtggttttcgagattgttccttacgtgtgctatgctttgctttgtggttctaatgcggtatgt

SEQ ID NO: 380636 - DNA, 275 bp, Zea mays
cagaccgtgggtgcgtcactacttgctactcgatcagcagtagactcacagctcactcgcaagtcgcaaccactcaccaagctagcgaaagagccacagaggcaagcagaagagcggtcgagagagatagagagaggatggcgttcatgcggtaccgcgcgctgccgcggggggagctgacggcggaggagttccgggcgtggctggcgcagttcgacgcggacagcgacgggcggatcagcagggaggagctgcggcaccgctgcggacctcaa

SEQ ID NO: 380637 - DNA, 274 bp, Zea mays
cagcaacaaacacgaccccagtagagagaacgcagagagagagggccacgggtgtagcgggttctggtggcgctgcggcttcaagcaaggtgccgggcaaggtcgttggggagtacgcgcgaacattgccgcatgacaacctggaagcgagggtctcggcttaattgtaccacggtggggatttcacagcgcacgccaggcggacgaaccgtggacgggcgcggttggcatctcactggaccggccttcatcgccaaatcgagccgagcgttga

SEQ ID NO: 380638 - DNA, 273 bp, Zea mays
gctatggaggacgactagttcgcgacaacgctgatgggctcgcgattttggccgatgtggaggaaggaggccatgttggcgctggactctaggttcacaagcatgatgacggaccaaagaagcccgagaactccatgctatctcaaccaagaggacttggtggaggaaggaaagaaggaagagaagaaggagaaaccgagtaacatgtttgtcctgatcaccgtaaaaaaacagatttgtcctcctccatctgtttctcaaaaatttttacta

SEQ ID NO: 380639 - DNA, 271 bp, Zea mays
ctagttctagatcgcaaatagccgccctttttttttttttttttttttttttttttttaagaccaggtaacagctacatcactaaagtcaagctagtccatcggtacagacatctcccagggaaggacctaagtcccttttgtacatggcttactttgaagaagattagaggtatccattgtttcgatgattaaccaaacggcttcaggtagctgtagcttgctgtgcgttgagttcttcagcgggtaatgagataaataaacttgttcaa

SEQ ID NO: 380640 - DNA, 270 bp, Zea mays
cagtgcattcatcagaagataccgttgatcttaaagtgaacaccaaagaaggatgcatctgtggtcaaccctgttctggaggattctgtttcaggcataccagtcactgcaaacaatgaacctgtgccttctcccaccacaacaaaaatggacccagtttcaaacaaagttaatggatcaagtttgaaaatgaaagtcaccatggcatctccttgctccaaatcacatccagctgatatggataaagatgcctctcttccttctaaatca

SEQ ID NO: 380641 - DNA, 258 bp, Zea mays
cccacgcgtccgcagtaatagatttgtgctgctgtggatggtgctaagtgccggtggactcggccgtcttataggttaaagtagctcttctatgcttcttattgaggattgtcattgagctagcatatatttcaaacttataaataatttataacatttcaaagtttatttctttgaatcacttttgttatcactccgataaatataatgtaaatttgttgtaacttgtaactttttgtaataaagaaattctgcttt

SEQ ID NO: 380642 - DNA, 250 bp, Zea mays
cgtctctcctcttccgttcctctcctgcctccagctctcgactgtctctgagccgcacaactgaactgcgcgattgcgctccgcgctcctcgtctccgtcctcgccgcgtgcgctcgtgctcgcgctcgcccgcgcggactcctcctcgtcgccgctcctacaccaccgcgtacgacgagctccgcgtccggggcttcccgctcggcctgctcccggccaacgtgcggggctacacggctcgactccggc

SEQ ID NO: 380643 - DNA, 233 bp, Zea mays
cggacggtgggagcgatcccactcccgatcagcagctgatcgctcactcttgcagctcgatcattctttaattgctctagctctagccctagctagtagctagccactcggtcgtgtagtcatcagccttctgatcttcacccatggccactgctgaggtccagaccccgaccgtcgtggcgaccgatgaagcgccggtggtggagaccccgtctccggtcgccgccgtgccc

SEQ ID NO: 380644 - DNA, 279 bp, Zea mays
ggacggtggcagcaacgatctgttcgcgatgctggcgttcagtgacagtaaggtgaaggtcgttcgtgtggagccaggtgagggcgccgccggtttcctccccgcagtggaagaagtgttggtcgacgagcctctgttgcccggcagtaagaggtctgcggctaacatgctgctgctctccgaccagagcagcgactcgtatggctcttgtgacttggggtgggagtgggactgggacgatgacaccatgacctcagactacgcctcagtctttgctcc

SEQ ID NO: 380645 - DNA, 129 bp, Zea mays
  unsure (1)..(129): unsure at all n locations
gtagagncgactagggaggagggtagctatccgacgctgctgcagcggtggtcttcgtcggtgtgggccgtcagcggcagcgtgcgcctgctgttggcgtgcaactaggcttggctgtcgcacttctgg

SEQ ID NO: 380646 - DNA, 254 bp, Zea mays
aacaaaatatggtcatgaataaggttgcacacttcatgaattgtgagatcaaaagttttggctaatagagcttttccgccgcggctagtataattattttcaattctgttagtccggtgctgattggttgctttctttctatgagatttgaaaagctaacgagacatgtttgtaaacctggcacaatgaataattgtcaccatgaacaaaatatggtcatgaataaggttgcacacttcatgaattgtgagatc

SEQ ID NO: 380647 - DNA, 257 bp, Zea mays
atcgaacagagtccgggaccgtggcgagctggcggacgcgtgggccggcgcatgcgtgtcaaccatgccgcacttgtcccagaaactgcacctcaaaggacagatgcgcctgcagcagaaattccaaaccacccaccgcctcctgtgttcccctttgtggcaccgccatcctctcctgcttctttccttcaatcagagaccacatcaatcgtacaatcaccaagggctggagctccagctgtttcgcccctctcacc

SEQ ID NO: 380648 - DNA, 186 bp, Zea mays
caccaagctgctcggcctcgagtggagcagggactccatcgccggcggttccttgaaggtcgcgactatgtttgatttgtcggaccaacccaaagcaccaaagctaatagcagagagcacatggaattacgagatatgatttttttcccataaaaatgagaaatcatccttctcatattacttaca

SEQ ID NO: 380649 - DNA, 267 bp, Zea mays
gggagtcagagagagagggaggagaccttgcagaggagcgaacaagcaaggtgggaaagaggcagcagcaagggcggcgggctgccggaaggggaacatgctccctcctcatctcacagtacgaactgaaaaacaagagtaaagaatttccgtgagatgagacagaatggcgcggtgatgattcagtttggccatcagatgcctgattacgactccccggctacccagtcaaccagtgagacgagccatcaagaagcgtctggaatg

SEQ ID NO: 380650 - DNA, 263 bp, Zea mays
cggacgctggtcgagcgaagtcatcctcgccaacatcctcggcttcatcttctccttcaacggagtccaatccgccggcgacaccgacatcaaccccatctccaccgtcgcaaaagcctctcagctgatctttggtggcgttgcgaaaggacagggtttaggccaagtcgacggtatgaggctcaacttggtcggtggtattgttgctggtggtgccgctgctcagagcacggatatgactggtgatctgcagacgggtcatt

SEQ ID NO: 380651 - DNA, 261 bp, Zea mays
tggaactggagaaagctggagaagctgatacgcaggattctaccccacaaggaagaaacaagcggcgatccatgcgtgtgaggacgaagggtactatggttgacattcttctgcaccatatgttgagcaatgaacttgatggatctcaaaactcggattgattactcatcttaatggtaccagatcactagtactaccctgctgttcttttaactttgaccacggcttccgttatgaacacctgtctcatctatactctac

SEQ ID NO: 380652 - DNA, 262 bp, Zea mays
gcttctactaacaatgaagaggtttccataggccagggcagtagagatcatgagaaaagaaagtcgggagaacctcctggcaatgaaggaacttcagcaacgcaagctacggaaccttctgagactgaaaccagccaagcaaccaatggactggttaggtccctcctcccctcttcggaatgcacctagaacgccttgcgggtcttgtaaattcctagttggattagtcaactgatgaattaaacagcagctgagcttaaaa

SEQ ID NO: 380653 - DNA, 258 bp, Zea mays
gctgcatatatttttgatagcattccaatcgcaggagtaccctctaacagaatcacaatgaacagagacattataagcagcattcctttttgatagctgcatatatttgttttagattttatttttttacagcaatatgggtgatagtgccgattggaatgaagataacactgctctagtgtgtgaattgttcgccgaacaagtgaaggcgcacaaccattctggtacccacttaaataaaatagggtacaaaaatgt

SEQ ID NO: 380654 - DNA, 275 bp, Zea mays
tcctctactccaaccatagccgcgcccctcagctcgcctgcacgtttctctgctcgccggcgcgcccttcctgctgcctcactcggtcttcgtctctgtcgcgccgatctgcgctcgtccgtggccgtcgaacacgcccagctccttactcgccacggccttggtcgtcgcatcgctgtgtgcagcggtggcgtggcgggtattggtcgcgggcatggtcggggcgacgcaagatctgggcacgccgtcatttcattatgcctagcgtcgtgcct

SEQ ID NO: 380655 - DNA, 271 bp, Zea mays
gttgaaacgaacaagccctaaacgtgggcttacaagtattcctacttgtgctgtcctgctgataccctgagtctaggttattgaatgaacaattttctgaatgttgtgttttttacaaaatttatactcactccattccaaactgtagttcactttagctttgttctaagtcaaactttgatcaagtttttaaaaaaatatgacaacatctacaagttctgccctattaagacataattcatggtaattgttttttctaaatgctggcaag

SEQ ID NO: 380656 - DNA, 186 bp, Zea mays
  unsure (1)..(186): unsure at all n locations
ggacctgggtccctgtaacgattggctcagtgattgaatatatatacaatactgacttactanaaaaaaaaaaaaaaaaaaaaaaataataaaaatataaaccaaaaaaaaaaaaaaggggggccgttcctaagtgtccccacttgcgcattggaggctagccatacaacagacagtgtgatgtct

SEQ ID NO: 380657 - DNA, 268 bp, Zea mays
ggctcttcccgcgggcggcaactccgggaccatccacttctactactgggacaagccgcaagtggccgtcaagagctttcctgctgagccgatccgcgcactcatcgccgatcaggagggaagctacctcattggcggtggcagcaatggcaacattttcctttgggaggtgtctagtggagagcttctccatacatggcatgcacactatcgtgctgttaggtgcctcgggctgtatgactatttgcttgtctcagggtcagaggat

SEQ ID NO: 380658 - DNA, 296 bp, Zea mays
caaaaatatctctccctaccaaattttgaggcgatataaccaacacctttcatgaaaaaccaacaaccctctctagggtcaaggcctcatcaacagcaattgataacagtttctttttttttttaaaaaaaacaaatcttcttttttgaaaaaaaaacaagatcgagagaagacatcaaatggaaaataattaacttgctcgtgaaattaatcttagtagtatgaattgaagcaatactactatggtattatactgctgagtactgatctcgtcaagcatgttgagaagcttgctc

SEQ ID NO: 380659 - DNA, 289 bp, Zea mays
ggacctggtacgtgtccagcgagcgccggtggactcgttgacgtgcctcgccaccaacaccatgatcacggtcgatgatgattccgtgaggagctgttgcggcgacagctgcggtattccagttcctactagcgacgacgccgccgccgggcgcatgatgctgacgacgatgggcgagcaccaccagcagcagctgacggtgtccaggatccggacggccgtgtctatgctcacccgccgcacgggccacgcgcgtttccgccgcggccccgtcgcggacgtcaccacg

SEQ ID NO: 380660 - DNA, 302 bp, Zea mays
ctccctccgctcgctccttccacggccgcgtggtgcggtgcagcaaggccacgcatcgggcctccgccacgctcatctccgccgcgcgccgcctcatcgccgccgcgctgctcgacgacccggccaaccgcttcttcgcgcagctaccccattcctgcgtctcgctacgcccttttcccgctctccaccgcgcgctcgccgccgaccccaatcaccgcagcttcatcgaggtcctcggcgccgcgcccacgctgcgcgaccggtacagcgcgtgcggcgacggcgccatggtccccgaggtt

SEQ ID NO: 380661 - DNA, 281 bp, Zea mays
accccaaaagcatcatctctcttcagcgagataccaaacatacgagtagtaacaatcatccgatgatggggtggtgcgaggtaggcatgatgaaggttctcgtcctcagcctcgtggccggcgccgtcgccgccgtgcggccgagcaagctgctgccggcggcggtgcctgcggtgtacgtgttcggggactcgacgctggacgtcggcaacaacaactatttgcccgggaacgatgtgcccacggctgacaagcctactacggcatcgacttgccgggct

SEQ ID NO: 380662 - DNA, 275 bp, Zea mays
cttgctccatacagctaatcttcacatctttcaaagcatttgctagggcccttcggtgagcaatagaatacgacttgcgctaccaaagcgtccataggttgaggacctccatgacacctatgttggtgtgggttgtgccgccccatcgtgaccgtcatcgattgggcctccgagtccaggagaagacctccgatgaagaaagagacatgctgcacatgcacgagggtacttgcagatagatgtcggctctatggacgaacactcgaccaagtcag

SEQ ID NO: 380663 - DNA, 231 bp, Zea mays
ccttcgtctcggcgactggggaaagggacgacggggtcaagatcgggggagatactgcgctggcaggtttcttcgacgtcccagaggccatagagctggctatccagtacgtgaacgggaggtacaagggcacgcctgtgtatattactgagaacggttactcgcagtggagtgatgccagcagggaggagctgatcaacgatgtgaggagaaagaactacctgcagggct

SEQ ID NO: 380664 - DNA, 243 bp, Zea mays
gcaaccactcgccgatggacccgcggatagctcgggattgatccggccgattcgccatgaccagactgagctgcgaccctggggttataaatcacgcctgggccgctggttacccctttttacccgcccagcttgcgactcaggagagagagaagtgagagacgcggcggcgattggggcattcgcttctgtcgccgattaacccgaagtttggactagaggggagaaggaattaggtgtgtg

SEQ ID NO: 380665 - DNA, 228 bp, Zea mays
  unsure (1)..(228): unsure at all n locations
cccacgcgtccgcatcgatgagcggactngcacggcggcgcgcgctggtcctgcggctgctggtctgcgtcgtcgcggcgcgggctgtctcggccgtcgccgatggtcctctgctgaacggcaacttcgaggacccgccgaaccagtcccagatgagcgggtcggtggtgaccggggagcacgcggtctcctactggaagacgtccggccacatcgagttcatatgct

SEQ ID NO: 380666 - DNA, 164 bp, Zea mays
ggtctacagaaatcaagtctcctatttctgtagaggccgatacttctgaacaaaaactatgggtgaaaaagtcatcggaagaagaaaagaaccctgacgattctttgtctgacaagcacaaaaagctgactgcagtcagattagatcattttgatgacaatgga

SEQ ID NO: 380667 - DNA, 225 bp, Zea mays
ggcgatcaaaccgtgtgcgggcatggcggccacgctgctcctggcctcggcgaccgcgctcctggcgctggcggcggcgtggctctgggactacgtcgtggtgcgcctcctttggcggccccgcgcagtggccggcatgttcagggcgcagggggtccgcgggccgccctacagcttcctcagcggctgcaaccgcgagataaggaggatgaaggcggaggccga

SEQ ID NO: 380668 - DNA, 218 bp, Zea mays
caactgccgaggcatattattgcaggtacgtacggtgccgccctccttggacggaccaccggtcgatcgccatgagaagagccaccgtctttctcatggcgctcgccctcgccctcgccctcatcctcatcccgccgcccacggtggcgacgccgccgccgggtcgtcttcccctcaggagaagtcgcttccttgccagcagcagcgtcgacttcccg

SEQ ID NO: 380669 - DNA, 255 bp, Zea mays
ggacgtggcggacgcgtgggcggacgcgtggcggaccgtgggctgaaagcacagaggcgcactcgaaatgcttcacgcggatagagcagaagcaatcctcgagagcgagaaacaggtatccgagctgaaccaagccatcgcccgtctcaagacgcagctggagctgctgtcttcggagaaggccgcagtcgagaacaaggcgtccgctctgctgaccgatgtcgccgtcgcgacgagaagctgaggaagacggac

SEQ ID NO: 380670 - DNA, 279 bp, Zea mays
gttcatgattcatattattgtttaatctttacctccttcctataagatccatgtcacttacagatcacgatagcgatagttccattctcagaattatggatgttagtgatgtggatcttataggaaggaggtaaagattaaacaataatatgaatcatgaacagttggccctgatgaaaggtaaacttaaaagttgttactgctcggatctgatctgaagcaaccatctagtccagatcccataacaattgagcattctggcacgttttagttaacaag

SEQ ID NO: 380671 - DNA, 270 bp, Zea mays
ggacgctgggcggacgcgtggggttctgtagcacaccggttccccatctccagtgaaggtgatcgtgtgctcttggttttgtgcctcccggaatcgttcccggaaagctacttttggccgctgcggcgatggcgtcgagcaccagcgagatggccgaggggaaggagaagctgaagaggtccggcagcttgggaagcaacgatacgtatgtgcgtgcagacaagattgatcttacgagcctcgacatccagctggagaaccagctcacca

SEQ ID NO: 380672 - DNA, 278 bp, Zea mays
cccacgcgtccgacaccatctccacctcgccgccgccgctcggatttccctctacctcaccctgtccggctccatggcgaccgccgcggtggagagcaagaggggcagcgcccggggccgcaagcgctcgtggccgtgctcgacaacgaggctaacatctccgccgggaaacgccgcccaggccgccgatctctcgtcctgctcagcgcagaagaaggcgaacgaggcgccgtcaaggagcagcaaggccaaggccgccgcggcgtcggcggccgtgg

SEQ ID NO: 380673 - DNA, 237 bp, Zea mays
acgagcccgaggggagcagcctgtcgagatccccgcagacgctggacacgacccgagacagcagcgatgtcaccatgttcgacaaggtggccgccgacgtgaacaaggggcacatcgacctcaacttccaccctgcagcccctgcagcccgtggcgctggcgaccaaggacagaatggcgcggcgcagccccgggccgtgagcatgattgggcttcttgaagttgccaaccggcccc

SEQ ID NO: 380674 - DNA, 265 bp, Zea mays
  unsure (1)..(265): unsure at all n locations
cggaccgtggcaccgaccgagccagaaaaaacagagaatccaatagaaaggaacaggaaagggggccccgtctcatcacgtcccgcaccccccgcggccgccatggctgccctgggcctgctcctcctcctcctcgccgtcgccggtgccgccaacgccgcggcgcccggcggcagaatgtccatcatctcctacaacgaggagcacgccgcgcgcgggctggagcgnacggagccggagcccgggacctgtacgagctctggct

SEQ ID NO: 380675 - DNA, 239 bp, Zea mays
  unsure (1)..(239): unsure at all n locations
gtctcaccagacgaccttctcgcctcagggcctgcttggcatcacttgccaggtccgttggatcggtcatcgtctcgtcaacacgagttctccaacgaacaagttcgatcccgctgctcatctatcgcgcgcgtcgtcaatcgtcatcaccatggttggaagcagccccctgcaggccgtgctggtggccccaggcgtcaaggacaagaangtgctcgcgttcaagcgctacggcctca

SEQ ID NO: 380676 - DNA, 269 bp, Zea mays
ggacctggtcactatgcctcgcccatggcgccgggctggtcacctattactccccagcgctggaccaccgcgccaccattcggacccacctccaccgcgtcacctccctcctgcagctgccctccagtctcgccgtccttgggtctgactccgctcctgggcttcacgtgtacgactttctcgatggcaaacatgtcgcctccgttcagtggtcggatcccactgacactcgcaccagcaaggcgaaggtcgtcgccattgcggcccgt

SEQ ID NO: 380677 - DNA, 273 bp, Zea mays
cacaccgggcactttatttttgctggtgatgcacagggttacatatatactgttagtgtgaactcacatacagggtcattatctagaactcacaagaacaaaagtagtaagagcaaatctcctattacaaccatccagtatcggaccttctctctgatggcacgctgtccagtacttctttcttgtgctcaagatggaaacctttcttttttcagcatcacgacagatgctaagggatacttgactcttatatgctccctaaaattggcctca

SEQ ID NO: 380678 - DNA, 277 bp, Zea mays
cggacggtgggttccagtgagaaacttcttaaactgttcattactcataagtttgatggaagctacttcatcgaggtgattactatatataagcacatactacttttcaagctttcacatacatttctgtatttgatcttgagctgatggaatccatgtcaactgcataatcggcacaaacaaacatcatacattttatgattaatctagcaaaccaaattgatgtgcccaatctgatatgtcttcgcataattgattgattgtcaaagcaaagaat

SEQ ID NO: 380679 - DNA, 256 bp, Zea mays
cccacgcgtccgcgaccgtggcgacctggcggacgcgtggggagggttctgaaatactcgtaaatctgcagttgatcttgaagcaagataccaacaggctcttcatataggacttgagctgcgatgcgtgtcttgtgtaatgcatgacctctgttagtaccaagtgctcagggagttcagtctgacaatgatcctaacaatacaaccatttttgttggtggtcttgaccccaatgtcactgaagatatgttgaaac

SEQ ID NO: 380680 - DNA, 254 bp, Zea mays
cccacacccagcggacggaggcaaagcgaaggaaggagctcgccgtcgccgaactgcaactgcaactgctacaggacccgattcccagagacagacaccgctgcaactgcagctgcgatggagatggcctcttcctccgcgccgaccgcgtcctacaacgtgtccgttgcacaggcggtgctgacgctctccatcaacgccatcctcctctggctcaccaccgtcatcaagtcctactcctcctcatcctcctc

SEQ ID NO: 380681 - DNA, 264 bp, Zea mays
gtggcggcttggtgaaaccctaaccttaacctagtcctttgataccatgtagaatattgtaagtggttgatgtactgataagagatggggtacaatatatagactcacaaccctaaccctaatgggccggcagcccaacagtggtgccggcccacgcacacagtctaacagagatgatcacgtcacagaaaatagggatatgattattgcatcccacatcatccctaaaccaaacacaaccttagtttgaagttacaacctgcg

SEQ ID NO: 380682 - DNA, 290 bp, Zea mays
gtccctgcgccgcggttgactccgtttgtctcgcggtctcgcccccgtctcgctctccgacgactggtgtgccgccgccgtcctgtgccaggtgctaaggccttcgtcagtatcttcgccggcgacgagcacccaccagctccttgatttctagaaagaaaggaggggttgttttcctacatcttgatcatttggagatttttctgtcattctaatggaggtaaaggaagtatgtgtccaagatatgttggttgacctggagaaaggcaagtgcttgctacccatagagg

SEQ ID NO: 380683 - DNA, 296 bp, Zea mays
agcgacgaccgcgcccggctccgctccgctcccctcccgaaccccgttccacctccacccgccgctcccgtcccgtcccgtccatacccgcgccgctctcgactcgctcctcgacctcaaggctacctacctcgacgggccccgcaccgtacccgcccgctagctcccgcggctgcagcagcaggacgagctcgccgccgccgtgcactagaagaagaggtcgctgtcggtcgccccgcccaatcctggttcctggacctgcgccgcgtcgtttcgcctcaggttccagtgtctcg

SEQ ID NO: 380684 - DNA, 275 bp, Zea mays
ctatgcagaggcactagccgatccgagccgcgccggccaccacgaccacgagtcgaccggcgagtggttggcgcaagttgtcaggcgaggggggcaccgcaccttccgcgccgcatcttgtcacgcacttgttgtagctgctgtatcctgtatgtattgcctgctgcccctggcttgtgctcatgggcgctgctgctgcggccaatgatggggcgttgccgttgccgtgctgctgctggtgttctgtagcggggccgattgtgcgctacgatctc

SEQ ID NO: 380685 - DNA, 278 bp, Zea mays
catcactccactccctccatttccctcaccttccgtagtagctagccgccagccattaaccgaaccaaccattcaattcacaggccacagtgagcgagtaaagcgtctaatggttgtgatggtggccgttcatcagcagtagctgcagcagcgcctgtacgcgtaggctgagctcaacctgcccccgggcatctggttctatccgacggttgatgagctggtcgtgcactacctctgcgcgcttgcctgcgggctgtgcttgccggtgtccatcatcg

SEQ ID NO: 380686 - DNA, 263 bp, Zea mays
gccgccgtcgtccactacaccgccacggtcgtcctcggtcgcgaccgcgcccttcgttctcatccagcgccacggtctagggcatgacctattgatcaggaaagttgtagcagacacgttcgtcgtcgcgaacatcgtcgagccgtgtggctactgcgctggccggtgagcatcgtcaagtcgtgtggctgctgcccctgaccagcacgatgcgtctctggtctcccatgatgattagatggcacctgatcaccgcgtctctg

SEQ ID NO: 380687 - DNA, 255 bp, Zea mays
cccacgcgtccgcggcctacgacggcgccatcaccaggctgctcaacgccaccgcgcgctacgggtggacacctccgccccgtccttgtctcccaggaagtacttcgccacgggccagatggcgggggtcgacccgcggttcccgaccggcatctggtccatggcgcagtgcgcgggggacatatcgccggtgcagtgccggagctgcctggacgacttgctggcgcagtggtggcagaagttcgacagcaagga

SEQ ID NO: 380688 - DNA, 255 bp, Zea mays
atcttgttcaggctttaagcattgtttgcctacttggagatgatgagatcctgctggttacagaggtctataataactgcatcatccgatacttggaggagccttcagattcagtttcattgctgagggatggagataaactagcagcataccgtctacccaaaagacatgagaaatccccccttgtggtttttacacaccaacattttgtccagcattctagtgatggtaatttaactccacaaatgagggagt

SEQ ID NO: 380689 - DNA, 242 bp, Zea mays
actggacaggtccgcgacctgcgacgggcgtgacgcgtggtcaccgagctagcacctactttccaacgactcccagcgctagcgctcaccgagtggcgcgcggcagcatggcgactgcgaacgggagcagcaaggggtcgttcgaggtgcccaaggtggatgtcaggttcaccaagctcttcatcgacggcaagttcgtcgacgccgtctccggcaagacgttcgagacccgggaccctcgc

SEQ ID NO: 380690 - DNA, 252 bp, Zea mays
ggaccgtggctcctgttcatcacccgtgcgtgctctctctctctctctctctctctctagctgcggcaactgcgaggccgccgacgcccgacggcagggtgcccaggccttcttcggtcccatcgcgaggccatagttgcatcattcgcctgagacgactgcccagcaccaggactgatctcctcactaggggcgtagaggtgaagagaagaacttgacaatgagcagcataggcacaggttacgatctgtc

SEQ ID NO: 380691 - DNA, 254 bp, Zea mays
ggcaacttgatgcattccacccctcttttatctggagatgagaatgttggcaacatgtctaccgaggcgtaacggcaaatattgcatgaagggatcggattttatctcatcaagggaataaagattaaagaaatgaatacttgctctccaaattgcaggccttcaattcggtcgtttaatttcaagccagctgaaatgttcattgttttcacacattcttatgttttcattggaatttcattccaacttgtcct

SEQ ID NO: 380692 - DNA, 293 bp, Zea mays
ggacgtgggagaccacgcccccggtcgtgcatcatcatcatcgctcgcgtctacgagttcgaggacatggagaggccgcgttgctactctccgcttgccctgcacctcctcctctgcctcttctcgctccgcgcctgttccgccgcgtccatcacagccggcacccccgacgagtcggagctgtgggggtacgtcgaggtccggccaaaggcgcacctgttctggtggtactacaagagcccgcagaagacgtcgacgccgtccaagccatggcccacggtcctctggctgca

SEQ ID NO: 380693 - DNA, 296 bp, Zea mays
aagcagcccaaggaggcgcaggcgcaggcgcagcagggacaggcggtggagctggagcctgagcagcagctggacccgcgcgcgcaccggcgcacgacgcggaggaaaccgcggcagagccccgccggccgcatccaacggaaccgccgacggcgcaacaagaggaaggcggcggccatggaggaggaggggatgctggccgtgatgacggtggcggcgccggagagcagcaccaagccgaggctgtccaccaccagcaacagcctggcggtggagacctgagctgagaatcggac

SEQ ID NO: 380694 - DNA, 286 bp, Zea mays
catctgcattactttctcgtgcagcagttcaggttgatattttattttgttccatcattcagagtggatgcacattgcattattttcgcttaaggaaactgtcaggcaacaatggaaattggagctgtggcggccatgagatatgtgaaggatggaatcaaggcagcaaagttagtcatggagcacagcgagcatactctgctcgttggagagaaagcaacagcatttgcaatttcaatgggtcttccaggaccaactaacctcagttcaccagagtcaattgaga

SEQ ID NO: 380695 - DNA, 233 bp, Zea mays
ctagttctagatcgcgagcggccgtcccgatctagactaccggatcacccctcgtccccacccagcgcgtcacgggcactagctcgagccctcgtagccctcgcgtccgcgctctccctccctcgctcgccgcgctccgatcgaactcccgtccccgcgtggaggagagcagggccccacgagggccctctcgcgcggcgaccccgtggcgttcctgcgcggctgcttctcgt

SEQ ID NO: 380696 - DNA, 278 bp, Zea mays
gtggtgcgcgtgtcgctggctcgtgcgacgcacttaccaacttgacctttataagcacttattactaccaaattccttatgtactgtacaacgcaaaacagagttttatggagtacaggaatttcgacaagtgcctggcctacatcgaagagctgatgataaaagacggccccttcgacggactgatgggtttctcccaggtaacaagccgcacagcacgggttgagatgagaccactccccttcaatttctgtggcgatgaaccagctgctcgatta

SEQ ID NO: 380697 - DNA, 290 bp, Zea mays
tgcatcctaaaaatcctcaagagctccagttcccgctgtccaatatgcaggcgcaccttatctaaagaggacctcttccttgctccagaggtaaagcatcctgatgaagatggttcaggcaaccttgagtctgacagacccctctcatccaaggtgcaagcactgctgaagctgctgacggcttcacagaacgaagacccctcatcgaagtctgttgttttttcccagttcaggaagatgctgatcttgctggaagcgcccctcagaagggcaggctttaagacactacg

SEQ ID NO: 380698 - DNA, 289 bp, Zea mays
cccacgcgtccggacagttttagcgaccttgtcaacggagcactggaagggttgtttcatcctgttggaatgggcggtgaaggtgaagccaccgtaattgaggagaataggttagatcgtgctggagaaagttcaagagcgttggacgacgtccaagcatctgaacagtgtaacgaccatagagagagtcacgtaccttattccggcaacgtctctcttcgatcggaaagtagcacaacgagcgctcggtcctttgcatttccagcactgcagaacgagtggaacagca

SEQ ID NO: 380699 - DNA, 284 bp, Zea mays
ggacgcggatcaaatcgaaacaaatattcagagatttcagcctcataacaacgtcgatctcttccatcgggcaagaaggaacattaatgatcttgtacaaatcacgacccaactgcctgggctgaggaccaagatgcctccacttactgtggcaatagatgaaaatcttgctagcttcgtgcttcctggcattacaatggatcaagttcttggaagcaacgatttgaaggaggagccaagacgatggtagatccactgccagcatgtttcagtttattggtaga

SEQ ID NO: 380700 - DNA, 278 bp, Zea mays
gcgccgtatctcaagttgcagaggcacgcagggaagaaggaatatcccatcccaattcccaacaagaaactcaacctctgaaccgcttgcatatctctctaacgtgaaggtttctgaacatgtatttcgtcgatacaggtactccatccgattaagctctgtttgatggttgctggccggattgtttctctcaaacgaacggctcctaagggattgtttcgtcgatacagtatgtttctaaaaaaaactgtaaatctcgttcaaggaacaaacctatc

SEQ ID NO: 380701 - DNA, 279 bp, Zea mays
ctggctaaaaggccagcggcgatccatgtttcatgtggcgcccctcggcgcgcggtgtgctgtatgcttgatctgatcccggcgaaaacgtctgtctagctagcggcgtctcgcggcgaggtacctgtagtcttcttcttccttttttgggcgcgtagaaaccatgggccaccaccgcccaccggtgccggcacctgcctgcctgactccgtccgtcaaaaaaaaaaaaaaaaatgttaactcagaaagtactccagcaagcatcttgccctcaaatat

SEQ ID NO: 380702 - DNA, 238 bp, Zea mays
cggacgcgtggtggtgcgaaacttgatgtaactacctcatatataccttttatgtactgcccatctgatggctcatcatatgtgagaacaccttcaactgcagctccagtggcatcatgtggatctctggaccaactatcagcttccaaattgagtaaagagaaaggtggttgtgtagtcaagttggctccagatttacctcctgtgaaccttcccccttctgtccgtggcctaactc

SEQ ID NO: 380703 - DNA, 282 bp, Zea mays
ctgcgtactgccccccttcgccgtctcccctcccatccgccgtttctgcctgctgcgaacccggcggcaaccgacctcgatcgtcgccgttcgtccggcgaccaccgccaagaggcagagttgatatggccctcaagaccccgcacctcccatccaatttcgcgaggcggccaagcagccaccacagcttcagccagtggcactcggctccgcaccacccaaagcttcctccaatgcccgacccgcagacaagagttgccattgccacgaagccgccgccgc

SEQ ID NO: 380704 - DNA, 275 bp, Zea mays
ggacctggggaggagtgggagcgagcttaccaagtgcctggagtgctccgagagaggcaggaggattcctggtgtcatgggccgggatgggaaactgcccagccccgggcagaatggtgttgatgctcccgtggagggaagtagccatgacgaatctggaacacttggggatgcaaaatgtgaccatacaagttcagatggtggtaacccatttgcccatggggaagttggatcgaacagcaaggagaagcctgatttgccggtctctggtgatg

SEQ ID NO: 380705 - DNA, 281 bp, Zea mays
cggacgcgtgggcggacgcgtgggcatggctcgacgccgcccttgagtcctgcccccaagatgaagcatgatccccctagccggcttcaccgccctatctgccgccggcctcctgctcatcttctcctccttcctgctgcaaactcaaggaggagccagaagcagcgaggaggagcggtacgtgccggtgcgcagggtggtgtaccggtccatgacaccggcggcggcgagtgcggcgacgacggcagaggcagcggcagcggcggcatcgtacgagccgt

SEQ ID NO: 380706 - DNA, 247 bp, Zea mays
cccacgcgtccgcccacgcgtccgcccagttgaagaggatgatgcctctgaccagttcgaagaaccacctgttggtctaccaagtagttaccaccagtcagataagtatgatgatgcaatatccagggtcccacaagcctcagatgctctctttaccactgcacaacagcagccgaatggttccatcaacacaacaaggtctggtgtccccgccgaagcagacgtagtggctgctgcatctgctgct

SEQ ID NO: 380707 - DNA, 276 bp, Zea mays
atttcaccaaggctccgacgaccaccggtgaaagtgaaacgtcggtgtccggcgacgaccgagttcccatcgccggaaatcatggagaagcttccgtcacagcagcaggttgtgctgttggcgagtcctggcgcgggccacctcatcccgatggtggagctcgcgcagcgctcgccgctgaccacggcttcgcggtcacgttggtcaccatccccggcatgtccaaccaggcaacggaggccgtcgtgctgtcctcgctgccgtcctacgtcctga

SEQ ID NO: 380708 - DNA, 139 bp, Zea mays
cggacgcgtgggcggacgcgtggggcagtatctccttcgcgagtgcccctgccaaggaggaacaggaacaccaggagggaccctataacagtggttgacttggaggttgaagctagccgggaagggagcaaacgccaga

SEQ ID NO: 380709 - DNA, 283 bp, Zea mays
gcctgcggctactggcagcgcagaggagcgcgagaaggggtctgcagggaatggccggtgacgtcgcgcgccgtgtgccgcggactgcgctgcagggaagccggaaggcgaggaggaagatggcggtggccaggctcggcgggagcggcaggacgcggcgcaggttcctgggcacggcgctgatccggcggctgcggctgcggtgtgtagcggccctgtacaggcgggctctgcggcggctgcgcgcggcctgcgccagcgacgccgtccagcgcgtcctgga

SEQ ID NO: 380710 - DNA, 278 bp, Zea mays
cggacgcgtgggcggacgcgtgggccgaggaggtcatggacgaggtgcgccgcctcatggacaagtacacgggcgaggagctcagcatcacggtcgtcggccacagcctcggcgccgccctggcgctcctcgtggccgacgaggtcgccacctccatccccgacgcgccccccgtcgccgtcgtctccttcgggggccccaaggtgggcaacgacgcgttcgtcgataggctcgccagcagcggcaaggtcaacgtcctccgcatcgtcaacgccggc

SEQ ID NO: 380711 - DNA, 274 bp, Zea mays
ataactacatgttcatctgtggtcaatgtttcttctttctgatctgcatgttatctgacgggtgcagctaatcaggtatcatttaccactaaactcaacatttgtcccctgtagtcttggataccagaaatagcagctgcggcatcatctgttctggataagtggcaagccgaaggtgggagccgcactgagtttgagatcgatgtccataaagcattccacactttgagtgcggatgtcatttcctgtgtggcatttggaagcagctacgagg

SEQ ID NO: 380712 - DNA, 240 bp, Zea mays
cttcaatcgcaaagaatagtattgataagccggcgctggctccagacatgcagagcctctgtgcattctcatcatctctaggtgcacttgttgggtatgctacaagtggattatttgaccatcatcttggagcacaggtcagtttctgtctaaatgctctattttgctaggtttcatccatgtctgttggttcagtgagaagttgtatgctggatgacttttggctcaatgtagggtgcg

SEQ ID NO: 380713 - DNA, 191 bp, Zea mays
agctattgccgatatgaaaaaggttattgaaatggatccttcaaatcaacaagccacaaggtctcttttccggcttgagcccctggcagctgagaagagggaaaagatgaaggaagaaatgattggaaagctaaaagatctgggtaactccgtgctggggcgcttcggaatgagcgttgacaatttcaaag

SEQ ID NO: 380714 - DNA, 258 bp, Zea mays
atttactcaactacaaactataaacaacttgcaatcacaagtaacccaaagcaactcgctcaccgacgacgcaacaatgggcaactccagctcaacccccgactcaacagacaacgacgcaggcaagaaaagcctctaccgacgctacgaagacaagaagcgcgggcccggcgtgactgacgaagacatcctcagatacactggcaagacgcgcgaccagctcaatgcctgggccgagaccgcgcccggcgtggcagg

SEQ ID NO: 380715 - DNA, 285 bp, Zea mays
cccacgcgtccgaacctccattgcaggcaggcacatcactagctagtacagaaaatggagcaggccggtgacgagacgccgggagagatctggcgagaggctgctcgacgtgaagctgcgctccggagcggcggcagagacgccggagaacgcgtagacaaggctgtggtggacggcggagaagacgatcggtttcgcgtgcatccgaaatggaggcggatcttgggccatatcgggccacggactctcgtggccattggcatcctggatcctagcaacttggaa

SEQ ID NO: 380716 - DNA, 272 bp, Zea mays
gccttcaacagcaagatcaccttcctcagcttcttcttcggcatcctgcccgccatgctggccgggatgggcgtcaacacggtcatgctgctctgcatgtactggaacgacctcgagggcgccgccgcatgcggcagccccggtgatgagaaggagatggaggccatcgaggaagggcggtcgccggcctcggtgctctcgctcaagagtagccccgccgccgccgccgcccagcacgtcgccctgcgccagcgccagaacggccgcggcca

SEQ ID NO: 380717 - DNA, 267 bp, Zea mays
ggtcaccaccgaccaacaggcgcgacctgcgagcgacgcatgcactccctcgcagccccagtaccccacaccctgctcaaccacccgtagcgctcctgctcgcccatggctcccatcgctgtcggcgacgccctccccgacggccagctcgggtggttcgacgagaacgaccagctgcagcaggtctccgtccacgcgctcgccgccggcaagaaggtcatcctcttcggcgtccccggcgccttcaccccgacctgcagcaaccag

SEQ ID NO: 380718 - DNA, 268 bp, Zea mays
cccacgcgtccgggccgcccgcgatctagaactaggaggccgccgacgcccgacggcagggtgcccaggccttcttcggtcccatcgcgaggccatagttgcatcattcgcctgagacgactgcccagcaccaggactgatctcctcactaggggcgtagaggtgaagagaagaacttgacaatgagcagcataggcacaggttacgatctgtctgtcaccaccttctccccagatggtcgcgtcttccaggtcgaatatgctaccaa

SEQ ID NO: 380719 - DNA, 267 bp, Zea mays
ctcttgcaccacacccttcctcctctcctctcccctcctctcccctctcctaaaccgctcggctggctctacacctgcagctaggcagccgacgtcggacttgggatcttgcatggacaaggcccacctcggaggaggcctgttagctctcgacgcgtcgccgcggcctctcggcttcctcaacctgctatcgccgccgacgtcgtccccgccgtttcacaggacaagaacgatggaggccgacgacgtccccgccgttccaggcaa

SEQ ID NO: 380720 - DNA, 222 bp, Zea mays
ctcagatttttattgttgaatgagtgaaaaaactgaaggctacatttgctttgcacattaatgagttcaaaaaccttccagttctgtaccatgatgttggaaagttaaatagtggaaggaaaaccgcacaatttaactggagcaagaacatgtgtcaaatagtacaatttacatcctagcaaatttagtttactacgccttttgttggtataacacagtttt

SEQ ID NO: 380721 - DNA, 265 bp, Zea mays
ggaccgtggtaaagggaacggtattttcaatttgttggcaggtggcatggaagacatcgttattttttgtgcggggaagtaatatgcacctttttacaacatattggttcagtgatgccggcccagttctagccatgtactcatgcgtaagtttgcctaggccttgaggtattagctggaacaacattaaatcaatgatcctctagggaagatgtagctgtgaatcgcaaagattcgagtatgtgaattggaacagccagcttgg

SEQ ID NO: 380722 - DNA, 265 bp, Zea mays
gaatttgctcagaggcgcggcaacggaggaggctgcctgcagcagttcggccaggaagcgccgcaagcagccagcagagcggcagggcggcctggctcctcctcctccttctcctgctgcgacgggatccaagaggatgaggtaattactactatgcagcatagctccttttgagctagttaccagcttaagtatacaacgtataatcatctactactgaatctgcaggatgagccgtggagagcgggggacacgagcggagaag

SEQ ID NO: 380723 - DNA, 255 bp, Zea mays
cggacgctgggctagggctcttatcataaagtcagtccaagtggtgaacggcacattgtctaacagatttatgtcagagagctgaattatgttgttgatcaaaataagaagcctcagaatgatgcagactcaacaagtccaccatcaatgacatctgtcacccctcaaatgctaaaagagaatgagtgtataggcaggcttcgcttgtggcaggtcttctttgcgaacccatatgagtggtgggacaaccgacaa

SEQ ID NO: 380724 - DNA, 293 bp, Zea mays
gagttgagacttagagatgatccaccaccaccgggcgagcttgctggtgcaccagcacagaaagggcgaggcggcggcagaggatgcgctgccggctgaagagtcaggcggcggcaggatgaaggagctccggggccgcttggcagactacgcctgtcaacaccgaaagcacgggcacgatgcgctgctccgtatgcttgccggcttcgcgctcgtatcctgcctcctgctgctgcttcctggcagccccgtctccgccaccatggacgagctgctgcagctagggaggaggg

SEQ ID NO: 380725 - DNA, 298 bp, Zea mays
ggcttctctgccttgtacttgcgatcgagtccagacctgcggagatagatctactagtcgaccgatccggatccttcccttccgtctcacgccgtcaccctcggagccgcagtcgccgtagcagatcttctctctaatcctatcggtcaacagctgcttgctcgggacgggaaccggaggtggcggttgcgatggcgctgcagtacgtggatgcgcacggtcagttgcgctcggacctctccgactggtacgcctcgctctgctatctctaccagctgttactatggtagtatgtctg

SEQ ID NO: 380726 - DNA, 283 bp, Zea mays
cggaccgtgggtcagaagttaaggtcgtgccggttcgcgagcaagctactttcttgagaaaacgattcgttccaggtgctttcggaactttacccgtacccagctttggccgtgtgttgtcaaaactgcctgtgagggcgaattttaacgcctctgtcacagacgatgattatatggcgggcaagctactgtctgccgcctatgagcatcggcacattgctagtttacgaacactcctattggaaacagctgaacaaatgtcgtcaaagccgcatatggatat

SEQ ID NO: 380727 - DNA, 319 bp, Zea mays
cagtacggtccgaatccgggtcaccacgcgccgggacctggtggcagctcggcgatcgccagcgccatcctgcacctcgcgctcggcgccgtcacgtacgtcaccatcgacatggggttcctcgtcgagtcccagtccgaggaggagctgcccgagaggctgttcggcgccgtgcgcatcgcgcggatggagatgggcgcggccaggtacgtggagctgcctcctaatgaggccatgcctgagacggtctgcagcggcagggccggggccggtttcagggtaagctccgggaaggtggtcaaccatagccgccaacaag

SEQ ID NO: 380728 - DNA, 284 bp, Zea mays
  unsure (1)..(284): unsure at all n locations
aaagaaaattctgttggtgatggagattctaagaaaaatcgttcatcagatgttaagaaaagaaagcgtatgaagcatgtcaatacatcaacggacagaaatgtcttaaactcgcaggacaatgtgtcaagtgtcatggaaagacattttcttcatttgtcaagtcatacaacgtccaagagcacatcaaagcagaaggataacttgtcacacttgcttcacaatgaagttcctatcaggatgggagaaaggaatgatctgtactgaaactttgaanatgatag

SEQ ID NO: 380729 - DNA, 268 bp, Zea mays
ggacctggcagagaggagcttcatcagctcattcaattctcgttccatccctcgtctcttgtgtaccgcctccgttccataattcaccagcgtcgtcctacccatatctcccatcgtcttctccctcgcgccatcagcttccccaatatgctcaagcaagaagccagcggcaaatcaattatgtcgccgctgggttttatgaattttgtgattctatatgcacgctagctgcttgtccgtcacggccaatggaaaaaaaagggggaag

SEQ ID NO: 380730 - DNA, 274 bp, Zea mays
aaaaaaaatgctattccttatttttataaagcgttacaaagcatgaaggacaatattggtatacgattgaccttatcctcccttcttattgatgacgacaagacagatgaagctgccactttgctttctcctcccaaaattccagagttgcagtctgctaatactccagaccaacagaaaccttggtggtgtgatgggaaagttaagatggcgcttgcaaaactttattacaataaaggaaatttggaagattttgtggacacaatttttcatc

SEQ ID NO: 380731 - DNA, 293 bp, Zea mays
agggaagcaaaaggagaagggcagcgggaagaagaagaagggcggctgatattgtgttgattgagaattatgctgctttccagaacagtctttatgacttggctaatgttgtgccaacgcttgcaaagttctaccatcaagccagtgaatcatatgaactagcttgcactcgccatatcagctcactcatttatctgcaatttgagaggttatttcaattcaaccggaaagttgacgaattgacttacactattgctgctgaggagataccgtttcagctgggattatcaaaa

SEQ ID NO: 380732 - DNA, 281 bp, Zea mays
cccacgcgtccgcccacgcgtccgaatatcatcagattcatattattaatgacatcatcaaagtacacattaataaggaggagccgtcagccgtgtaatatataacagaggagccgtagcatgaactccaagaccaattgagtactattagaacatcaccgtataccgtcaccgggcagccaacagatagacccagatagatgagcacagaactacaatctatactccatgtgtacgttgttaatgtgtaggaacctacacaaatagaatggaaaattgag

SEQ ID NO: 380733 - DNA, 286 bp, Zea mays
gagcgctccgagctctccggtcgctcgtcaacatccatgcgctggtacggtgctacctggtgacgaagcacgcgaccatgacgctgcacacactgcacacgctcatgcggctgcaagccgactccatcgccgtcaacaatgcatcgtaccggacatccatggaacaacaactaacccacatggacatggtctatgctcggtacgtccacgtgaagccgctcgcgacggcgccggttcaccgccgcatgctgtctgacatctcggactccatctacgatcgcagccg

SEQ ID NO: 380734 - DNA, 278 bp, Zea mays
cccacgcgtccgcccacgcgtccgcacacgcgtccgcacacgcgtccgcagacgctggggttttttttaatttttttgttttcaacaagccgatagaacagaccaacattttaggtaacaacaccagatttccaacccgagataatatacaaaagctagtctacactgtgctggcccatcgatccaacacacttttttcgtcgtcatcatcttcttcttcacacgcataccaccgttttattcatccggacggacccactgctttagttcagaagttg

SEQ ID NO: 380735 - DNA, 210 bp, Zea mays
ctgattgtggttggtgtcagttaggtactgtacaaactaagtgtgtgcccaaagtgtctcaggcggtgtgttatgtgcttagcaagttctatctatcagagtgttttagtttaacaaaaaaaaaaaaaaaaaaaaaaaaaaaaaaaaaaaaaaaaaaaaaaaaaaaaaaaaaaaaaaaaaaaaaaaaaaaaaaaaaaaaaaaaaagaaaa

SEQ ID NO: 380736 - DNA, 281 bp, Zea mays
ctagttctagatcgcgggcggccgctcgcgatctagaacttaggtcctccgactccaagacctcgagtcctcttcctctcccctcacctccctcaacctgcagcttcgacgtcccctcctctcttcccgtctgcgctctctcccctggtgcgccgggctacaggtttcctccagggctgcaggaagcagcttctgttgcagcttgaatcgagaagtggcgtggtaacatcaccagggagaagttggattgttccgccagagtgctcgatgacagatcattt

SEQ ID NO: 380737 - DNA, 277 bp, Zea mays
tcggaatccgggtgacacggaccgacaggcgggaggtgggagctggtgctgttcctggattggagaggtgatctgacgcttccattgagttgaatgacgtagcctggaactgtggtagttcgtcttttacatcttaagctgctgatagacttcaaataaaatcttgtccaagaaaacattctgtgagcgtacatgttgtcgtcgagctgtgtaattgagcaaatcgtcagattgaaactcggtgtctgccttgttcttcaaataccgcttatccaaa

SEQ ID NO: 380738 - DNA, 259 bp, Zea mays
atattctacacaaataaacaccatatacagctaaaccaaacacaccattattgctccagattccagaatgatattcatactgggcctttagaatgatatgtcctaggatatatattaacctttaatgttctctttttgtttctcttgttgctaccctaccccactccatctggctgctcagggtgggcatgttaaaatcatggatgaactactggagcgtcgaaccaaaggggcttgcggctgtgagttgacgctagct

SEQ ID NO: 380739 - DNA, 260 bp, Zea mays
ctaagttctagatcgcgagcggccgccctttttttttttttttgtttttttttttttttttttttttttttttgcaaggacgaactgattttttttttctgatcatagtttgcacaagtggtctaccgttacaaactggtttattttttttcacaaatatcaaaacgcacactacatctacatgaaaccggaaaacgataaaaagataaagaaaaacaggaagagcaaaacctcctccaagagcaactctcccaagcaag

SEQ ID NO: 380740 - DNA, 290 bp, Zea mays
cagtacggtcggaatccgggtcaccacgcgtcgggacgtggcggccaggacctgattgggctccagggcgcgatctttgagcgcagatttggtgcacgcgatctgccatggatttgatttaaggtgagctccctttacttactttggcgtcttgcttgcctggctcggattcgtgttatcggtcgacctatggcggagctgagagttagagatttggttctttcttcgcagatttagggagatcggtcgtgttcgcgtcgcgctgcgagattcgattttttatgcctgtt

SEQ ID NO: 380741 - DNA, 257 bp, Zea mays
gtgttctacgcttcgaacggccccactctgcttcttctctgctgctcttctctgtgcagtgcagatgccgaccatcatcgtctcggtggacctggaatgcagccgctgccgtgccaagatcgagaaggtgctcaacaggatccaaggtgtgtttgcgcttgcagctccgctctgttcgtactgccttgccttcctccacctgtggactggtggtgtcgcgctggttccgttgatggcaactgataccgactgagcga

SEQ ID NO: 380742 - DNA, 250 bp, Zea mays
agagacgacgacagacagccagccgccaccgtgcggtgccaaggcgagctccggtccgcgacctgttgtgcgccgccgctgctggcttctcttccgcctcgacgcgcgacgatcgatggggttccccctgctcgcgttcgtggcggcgaggggcctcatgcaggtgttcaacctctcggcgccgctcaacctccgcctgccgctcgcgcgccacctgccggaggcttcgccgtcctcttcggcgtgctcg

SEQ ID NO: 380743 - DNA, 247 bp, Zea mays
cggacgcgtggcggacgcgtgggcggacgcgtgggcggcctaggggcctttgtaattaggggttgacatgtcttgtctctcctatgttcttattttcttcttaatttaatgacacgcagctctcctgcgtttgttcaaaaaaaaaaaaaaagaagctgaccactactagataaaaaataaaagccactttcttaaaaactgaattgcttttgcttccaaacatgacctaagattagttagctgctgt

SEQ ID NO: 380744 - DNA, 289 bp, Zea mays
gcctcgtcgaggtcctctcctcgcccagagatctccctgcggcgcgccccgtcgagctcctctccgcttgtggttgcggccaccgcctctcacgtcatcttgcttggatcgctgcagcacattcccggtcatcccgtgttgagtttgtgatccaaattctgcatatggagaccgtgttggccgagaagcttgggccagagcatagcgatattagtgaccctaattagggtttgccatgtgtcgtcatttactcctcttgtaggttgccgtctacggacgacgttctgta

SEQ ID NO: 380745 - DNA, 288 bp, Zea mays
tttctattgtccgaaaatgagtacgacaatgatgatgcatcattcgggtgcgcagaacggtagtcaatgtttctctttgtcaatggcatttcaaaatttctcttctcagaattaatgtagctagtatgggtatgggcaatgccgcacacttaaaactggtgctatagaccaccaggagctttgttttgtactcactccgtaccaaaatataattcgttttaaactaatcatatattcattaagtaacatatgaatgttgtattattatcattttaatgaatgtggaca

SEQ ID NO: 380746 - DNA, 288 bp, Zea mays
ccgcggacgctggcaacctatggtgcgagggctcggagacatcgtcgcagtttgctcacggcgcacatgaaaggcgtcaaccaggactgctccgccgtctggagatcgcgagctccgcagtctcgcacgacgccggggacgatctgaagaacactcgaacgttgcgaggagctagcgacacggactcgcatacgtgccctgaggatcggagtggggccgccgtgctgacgttgcaaaggggaagtggaggagcaccgctgcagtggcagctagccgccaccgaccaca

SEQ ID NO: 380747 - DNA, 279 bp, Zea mays
ctcctcctctcgctcgtgaagcctcctctccctcgcgcacggtaccgccacccaccgcctccacctctccctcgcactcgcacacccaccgtcgcccgccacccccgctcttcctcactccctcctctgcctcgcgcaaagcgcaccgctaccacaggcggtaggaccgcacaacttgccccagatccagaacagtctcctatctcctcaactcacgcatgacgacctcctcagctcccccatccgcatctcgcgaagagaacagaagctggtgagcga

SEQ ID NO: 380748 - DNA, 261 bp, Zea mays
gccacgtcctccctgccggcagatgtcgtgccctttctcttgccaccggcgccacgttgctgccgcgtcacctgatatcgtgacggaggtgggtctggccgtgcaggaacgacacgtgtgtgaactcccactggcattagtatgatctgcgtgcttctgaattgttgacgtcacactttctgtctatcctgattcgagtattcgaccagaatttaccacccaacaagctaattgagttcaacttcttgctccaagattcca

SEQ ID NO: 380749 - DNA, 244 bp, Zea mays
aaaggtgccactgtggattatgaggaggaacttatacgttcagcgttcgtggtttcaacaaatcctagtgctgttgggggctgcagctgcaagagttctttcatggtgaaatagcttcaattaccttgaagagatcactaattggaaatagcattctgtggagcgtctcatacgctgtagatctgagtgcactagtgatattttggggtagttctgaagacgtctctttaagagttttgctact

SEQ ID NO: 380750 - DNA, 255 bp, Zea mays
ggacctggtttttttttttttacttttttttttttttttttaggataagctttaactaaatacagtttgattccactaatccactctaaacaaaaggaggtaacaattctggaaattttctgacagattacatcctaattatctcagttccatgctgtattgtaggtagtccatcgcacggaaccataacatccccgtggtgaggaggacgagtgcgtgttcggaggagggcgcacccttgcttattcctggacc

SEQ ID NO: 380751 - DNA, 263 bp, Zea mays
ctcctcctcggaatcatccgccgccggcgtacggcggggcgtacgatgagtaccatgctcatcagaagccaccagcgtatggtggtgacattggcgccggcggcgcggcgggtatcctcaaaacccaccagcgtatggtggtggcggcggcggcgggtatcgtcaaaacccaccagcgtatggtggtggtggtggtgggtatcctcaaaacccaccagcgtatggtggcggcggcgacggcgggtatcctcaaaacccaccag

SEQ ID NO: 380752 - DNA, 267 bp, Zea mays
ccaacatccccaacggcatcctgcagagcgaggccgccggcctctggtgggtgctcatcgagaccaaccagctggtgcgcaagaacttcgcccgcgtctcgctgcagtccaccatcgccatctcgcgcctggcctcgagcgacaccaccgactacgcccagctgctcaccagcctcgggcacatccagaagcaggccacgctcgtcttcgcccggcagagcgccgagatcaaggtgctcatgagccgcctgcacaaggtgatcgagg

SEQ ID NO: 380753 - DNA, 259 bp, Zea mays
caccaacccaacctggcagcacaactccttcgcctcgtcggcgctcgagaggctgcatgtgagcatgcgtctgcaccggcgccacgaggctcgcctcgacgacaacccgccgccggcagccttcaccttgtacaactacgacagcctcggtgcgccgctgtggccgagcctggctccctcgtcttctccttcgccggcggcgagtgagagctcagagatgctgccgcggcacagccaccggccggtgctactcccactg

SEQ ID NO: 380754 - DNA, 166 bp, Zea mays
cccacgcgtccgaaaacatatcatctggggagttttgaagtctctaaaagggatgcaggggaacaagtttagcaaccatatggagactcttatgggttctagtcctcaaaatgctcttaacgtgagtgacactgatgttggtcaacctggcagacatgatcattta

SEQ ID NO: 380755 - DNA, 247 bp, Zea mays
caaactcttggcattctacctctcacatgtttccaactcggatgaagcaaacaatggccatccgaaacaaaagaacatggaagtgcgcacaagaagatgaactttcagagcatccagctcagatgcaacaagccagaatgaggaaatgctacgtttagcttccacacttaccaagttatgggtgtgcacacagcacacgttaaatctgtaactgtaaagcaactaacaatgtccaattacttgagtc

SEQ ID NO: 380756 - DNA, 296 bp, Zea mays
gaacagcggaggcagagggtgagctcggccggcggcgagaacccggtcgacgacggccgtagctggaggaagtacggccagaaggagattctcggagccaagcacccaaggttagcacatctatctcactcaaacacgtattgttgatttggattggaaccgcgctctgtctgacgacctccgtcgtgccaaacctcgcaggggctactaccgctgctcgcaccgctactcgcaggggtgccaggcgacgaagcaggtgcagcgcacggacgaggacccgacgctgtacgacgtca

SEQ ID NO: 380757 - DNA, 286 bp, Zea mays
caagaactgtcaagttacatttaggatggaaccacacatctttagagagctggcaacttatcttagaaggagaagaatcatcgttgatacaaggatcacgatcgaggagaagttggggttcttcttatacatgctaagtcacaatgcctcatatcaagatctttaagtgtactttggacatagtaatgataccttccatcatcacatcaaccacttctttacgaaggtcattcctatcctctctcgtcgtttcattcagtcttctgatcctaatcaagtgcatcaa

SEQ ID NO: 380758 - DNA, 284 bp, Zea mays
cggacgcgtgggcggacgcgtgggctgcaactgacgccgccggccagagagatcggccagaagagaagacacgcaaaaaacgggggtgcagcgccaggaaagaaaagggcctcgccgccggccgccatccgtcgtgatccgagagaacaggaagcagccgtcgggagacgcgaccagagagaagccaccggaggagagtgccaaccgccatcaggaaggcatcgctcctagcattcacgccgttcagtcagagaagtcatccacgcgcagaacacatattccca

SEQ ID NO: 380759 - DNA, 280 bp, Zea mays
cgttcaaacaatggaggatagaagcctatttatgcacagaatggtcttctatcctcccatcgttcaaacaatggaggatagaagaccattctctgcataaataggcttcataagtattattgctttattgctttaatattatcatatgattgagtgcacaatgccatcaaccttacttgatgatctcactaacgaagtgctctccagtgccttgcacgggtaccattcttgttccatccgacgcttcagtaggtttgccgctcttggcgagcatcagttt

SEQ ID NO: 380760 - DNA, 259 bp, Zea mays
gacgcgcgcccgccccgccatgttcttcctcggccgggtccggaacggacggcgcgcaccaccgtgacggagtacgccaggcgcgccggcccgtcgaaggagtgcgacaaggctagcttccgtgcggcgtccacggtgcacacggtcagggtcatcgcccccaggatgagcgagagtgactggaggcgggcacgcggcggcagtgctgcaagacgaagcggacgaggtggggctccgtgctggaggtgcggatacggcg

SEQ ID NO: 380761 - DNA, 253 bp, Zea mays
ctctagagccttcgcgcctcggtggcagtcatcggatcggggcctgcgcaagtagaagtacgcagcgagccttggcactagcatgccttcagtctatgtcgaggtccaggtgggcggcgccggctagtagaggccgaagcagcagcatcagcatccccttggggttcgtcaggtttgggcgggcagcgtggaccgcggattcaagctcatccgctgcgccatcgatcagttcccctgcgtggccgttggcacg

SEQ ID NO: 380762 - DNA, 263 bp, Zea mays
gttttgtcacctccgcgccgccgcctccgtaccgcgtctgcaccatcgccaaaaactcatttcgccggctcgaagtcatcatccatcgcttgtcgtccccccatcaaaccttcgagagccatggcgaacaggcgtgcagatgcgaatgcaacaacatcagtggaggatgatgcctcactcaggacctcttccgtgcttgacacctccccatagggcagcacatctccaacggcgaggaagaggaaggacacagaagccaatgc

SEQ ID NO: 380763 - DNA, 262 bp, Zea mays
  unsure (1)..(262): unsure at all n locations
aagacgctggncgacccacgcgtccattcatccatcacgtagaacggatgtaaacttttcaacatactcaacagttgttggcaaggaattaatctgccaccaagattcccggtttgaggtttggggaacgaaaggctatggtgtccaaccaataggcacatcaagaaagcttccagagtaccagatgcatgaaagttctagttctcccaatgtaacaatacaaattgctggcagtagacaagataaagttgaaaggcttcaa

SEQ ID NO: 380764 - DNA, 280 bp, Zea mays
gcttctacgagcccttctggctcctcgacgtcgccaacgccgccatcgccgtgcacctcgtcggcgcctaccaggtctactgccagcccctgttcgccttcgtcgagaagtgggcgcgccagaggtggcccaagtcccgctacatcacgggcgaggtcgacgtcccgctcccgctcgggaccgccggcagccggtgctacaagctcagcctgttccggctgacgtggcggacggcgttcgtggtggccacgacggtggtgtccatgctgctgcccttctt

SEQ ID NO: 380765 - DNA, 273 bp, Zea mays
tgcgcacgcgtccggtggacgtggtggtggcgtcgctgccgtgcaaccgcagcgcgcccggtgtggaaccgcgacgtgttcaggctgcaggtgcacctggtggcggcgcaggtgtcggcgcgcaaggaccggcgctacggcgccgtggcggtgcgcgtggtgctgcggaccagtgcgagcccatgatggacctgttccgctgcgacgaaatggtaactcgggacggggactggtacatgtacaaggtcgacgtgccgcgcctggaggagaagc

SEQ ID NO: 380766 - DNA, 266 bp, Zea mays
cttcagtcttgtccggttgtcccagcacagctagagcagaaccaccacccatcgggctgatcctgatcagcactcgtttcccgacgcaaagagggcaccaagaatcccctccatcgacgacgaaggcgatggcgccgctgccgcaggccgtccatctcctcctcgccttcgccctcgcgcttggctgcctggcgggcggcgccaccgcgacggtgggtgacgacgtgcaggtcgtcgtctgacacgacgcgcgcgtggtactacgc

SEQ ID NO: 380767 - DNA, 267 bp, Zea mays
cagcgttccactcgcgtagaagtaacagcgctcgcagctcggtcgggggtacgtcgccaatgccgttgcgtggcggattcactctctctctctcccccctcctccgcccatccaaccaccatataacaacctagtagccgccaacgccacaccaccagtagtcctactggtccttgacgtccgtggccactcaggttgtgttctcggagttctttcgccgggtggggaggcggagtgcgcggtcgaggaatgccttagcggtcgatc

SEQ ID NO: 380768 - DNA, 267 bp, Zea mays
ctgcagcttcggcgacggtctcggttgcggcgccgagaagagcacggtggggatgctggtgcgcttcatcggggagaaggtgtggggcgcgtggaactgatcgggctgtcacctcctagctcgccggtccttgtaggttagaggagggagggaacgaaggaaggaaggaaggaaggtggagagacagacagccaacaaggaggcggagtgtctccgtcaatgtcggtagcagtagcaccgttttcctctcttcttgtagtctgatga

SEQ ID NO: 380769 - DNA, 283 bp, Zea mays
ggccgccctttttttttttttttgtttttgtttttagcgcacagagatcacagatgcatggtgtgtaacgatgccatacgattacatgcaccaacacaagcacaacagaaccgacaccaagcatgcctggcggagagccagagccagaccagacgatggctccatcctttattcttgacacgccacaagcacaaagcagacagtacgtaaaaaaagtgacaggcatgcatgccgcaaacgaaacaacgcagcaggatcagcagttgcacgggctgcacttgca

SEQ ID NO: 380770 - DNA, 269 bp, Zea mays
cagagcccttccagctccacctgcagagagcagcgcacaggcacacgccgcgagtggcgagacccaaaccagcagccatgcagatgcagctcagcgttccgccgcagtatgtcgtgtgtctcgcgttagctttctgctcccgtgccacgccacggcgacggccccggccggcacgatacggctcgtgacctagcagcatatcctggcgagcatcccgccgcactgggacgagaacccgtgctgttcctgacgtcgccgtcggggaagta

SEQ ID NO: 380771 - DNA, 268 bp, Zea mays
cggacgcgtggcaccgaccgaaccaaaaaaaacagagaatccaatagaaaggaacaggaaagggacgccagtctcatcacgtcccgcaccccccgccgccgccatggctgccctgggcctgctcctcctcctcctcgccgtcgccggtgccgccaacgccgcggcgcccggcggcagaatgtccatcatctcctacaacgaggagcacgccgcgcgcgggctggagcggacggagccggaggccggacgctgtacgagctctggctcg

SEQ ID NO: 380772 - DNA, 256 bp, Zea mays
agcaagcgaagccagcaagaaaaccacatgccccacctcgccgccactccccccacttcctccgccgccgccgtccccgccgcgggccgcatcgcgttccggcgcacgtggaaccgccacagccggaagcgctgcgcctgcgcctccgcctgcacgcgcggggcgtccggcgtgaagacggcggcggcgtacgcacggaggagcatgagcagacagcaccgcggacgttctacgacctgctcgggatctcagcgga

SEQ ID NO: 380773 - DNA, 283 bp, Zea mays
cggacgcgtggcaataatcaagagggagaagaaaattttcagtaccatggcgagtggaggttttgtgcactggagaggaaacctcgtcaacagacaggtgcatggaggggttaaagcagcatggtttctgcacttcctgacatttgtaacaaacatggtgaatgtcccaattttgctgaatctggtcacctacctccgagggacaatgcatatgggagtgtcggactctgcaactacagtcactaattttgttggtgctacatccggatttactttgatagga

SEQ ID NO: 380774 - DNA, 278 bp, Zea mays
gtaaattctttccgaaaggttgtagagtacctgttaacgacgagatgtatatcaataatctaagaaatcgtggtgtactgcctgatattagaaggcagaatcatggttcacgcatacttcactcttcctcggttgacatggggaacatgaaggttggtatggctaggcaatcttcagatgttttgttcaaaaggaattcagctgagcaatcttctttgaagaatgtgtctttggaaagacggtggagtcttgaggtggctattgaaaaatttattggc

SEQ ID NO: 380775 - DNA, 274 bp, Zea mays
cggacgctgggcagcggcagggaggaggcgaacgcgccgtccaggctcaggctcaggcccaggcccaggcgctgctgctcgccgccggtctgcaacagcagcagcagcacggccgtccctggtacgcgctccagcagggtgggtacggcccgccgccagagccgtacgtggcttcctaccccgccaccgcgtggggcgcgtacccacacaacggcctcgatgacgcctacggcggcggatggttcgggtactgagcgaccggcggagagtagag

SEQ ID NO: 380776 - DNA, 274 bp, Zea mays
ggcagaggctgcagaagcagaagcccaagccgcacaagcatttgctgaagcagcgtttttgacattgaagaacagaaatgctggaaaattggtaatagctctaattcatgcatccctttgttacatactaccatgttttatatcctatcacatttagaaccaggttttataaccccttatgcaactgattggttagttttgtatactgcaaaaacaaaatcccatcatgagcacgtttgcttagtctatcgccccacccccatgaaggtagtga

SEQ ID NO: 380777 - DNA, 168 bp, Zea mays
cccacgcgtccggttccacataaccataggaactctggtgctgtaattctcttgtatgctacccagtatgctgcaatggaacaccgaattatgatttcctgcggcatactgggtagcatacaagagaattacagcccaagaaatccttattcggtgttccattgcagc

SEQ ID NO: 380778 - DNA, 268 bp, Zea mays
atagcctcgcggacgggtacggcgacggcgcgctcggcgactggaccaaggcgccccccggcgcctccatcttcgtggacccgagggagttttaggcagttttttttctccctccatggagggatgtacatacaggatccaaaaaagagggcgggtagcttaatttagaggaaatgagattaatttagagtttgagtgtgctgttacagtaacgcttttacatcacatcaatggacaagttgcaagcaaatcttgttttatttgcacc

SEQ ID NO: 380779 - DNA, 278 bp, Zea mays
cagacgcgtggcagcagcagcaccaacccccgattctgacacctcctcttcccaacaactcccttccaatagatctcgccgccccctttctccccatttccgcaccacgcccagtcgcccacgcagccggcccaagcccaaaaacctttctccatcctctactctcatccccacgatggccgccgccgccaccacgccgcactccctcctcctccagcgcgccgcgatcccggccgcgccgtcgagggcgtccgccgccgcctctcccgtccgcctcc

SEQ ID NO: 380780 - DNA, 268 bp, Zea mays
cggacgcgtggcgagacgcgtgggtttttttgaaacctaaaagcactgactaatgattttcatgtggattgtcttgcggacaccaagctgttttccttatgagaatttgtagcgtgattgtgtggtggtggtttctactttctaatgattagtcagttaattcgtaatcttttggccatcaacacccgtatttctaatttcttcatatcttgtttgacacaggtggagcaggaccaataatgggtgatttatgggctttaaagggtat

SEQ ID NO: 380781 - DNA, 271 bp, Zea mays
cagacgcgtgggtccccaagaaccctcgctcgtacgtgtccgtccccccctctgccctctccttcgtacacaccttcctcccgcgttgccatttcagagcaaggtggcgcgcgccgcctcctcatcacacggtctcctcgcccgccacggcgtcacatcacatggatgcctcggcacggccgactccttcaactccgcgtccgtcgtcttgttccatctcgcatgattgattgaatctccacgccccccttgtccaactacccctcccact

SEQ ID NO: 380782 - DNA, 270 bp, Zea mays
attcagcgccataaagaacttggatttctctgctgactgcttcagcttgataacaatatcaattcattgctcgtcacgagcgcagatggatcgcgagagcgcgatgcagggcagcagtgggggcaaccccggtgctgccacgcaggaggagtggctctaccctggcggctggcagccggagcaagctgtcgtggacggcgcgttcctcatggagctgctggaggacgcgccggtggcggaccagctgccagaggacgtcgaccggctaag

SEQ ID NO: 380783 - DNA, 265 bp, Zea mays
gcctctgcctcggggtcgggggggcagctggtgacatcggattcggatcaggccgagaagatcgaactgctccgacccggcgcttaatttctctctctctctctcgggctagctgcccgggcaaatggacgccgagtggagcggcgacgagagcaaggctggcgctgcgggcggagtatcggcggctgattgcccatgttcgccaccgccggtgtcgccggcgccaccgtcgacgtcgccagctgctaccggtgccgggaggagg

SEQ ID NO: 380784 - DNA, 263 bp, Zea mays
cagacgcgtggatgcggtggtgaggctcggtggccaacctaggaggaaggggaggttcttcggggcgatgcggctgcggctgcggctgcgatggccgtggctcgcgtccgtgtaccggcgcgcgctgcggcggctgaggacgagctacgagcaggccctgcgtgaactcatcgacggcagcatgctcgtgggcgcgctgcacgcgcccatcggcgtcgactgcgcccacgccgcctccttcgggcccatggccaccgtcgggt

SEQ ID NO: 380785 - DNA, 278 bp, Zea mays
gttctagatcgcgagctgccgccctttttttttttttttttttttttttttttttttttcttttcccgtactttcctctaaagttgcaagtaagattcagggccgtttaaatcgttctaaaagtagactgtggttaaataaaaactcacatgactggcttacagaatgcattttgtcacatatacagaaagcaaagatatatcacactttttttccccgtcaaggaaagaaagaaaacagcaccaagcggacgggactgtggtggcagatgtggacga

SEQ ID NO: 380786 - DNA, 278 bp, Zea mays
ctagagtcctctggcttgcaggatggtttgagttgcaagaaggatctccatagttgcggcaccaaagcttcagatgaggaaatttctgatcggttgcaagagaatcatgacaacacccagccaagtgataaccataactattcggtagatcaaactcaactgccctttcttcaagccctactgagagtacagatgaaacggagtcatcgtttcttggacaaactgccagtggttcactggcatcttctcacagataagtctatagatcctacgtattt

SEQ ID NO: 380787 - DNA, 261 bp, Zea mays
  unsure (1)..(261): unsure at all n locations
aaacacggtccgggacctgcgagctggcggacgcgtgngcggacgcgtgggccccccgacacgaggcaatcccccagcttgctcgcttagcttcccaaatgcctcattccaccactgccactgccactgccactgacggcgagaccgccccggtgccgcgggccctcgcgccggcgcggaaagtggcgctgatcacgggcatcacggggcaggacgggagctacctcacggagctgctcctgtcgaaggggtacgaggtgc

SEQ ID NO: 380788 - DNA, 271 bp, Zea mays
gacaagggggtgaccagcctggcttcgggatgccctgaactcagggccgtcgacctgtgcggctgtgttcttataacaggtgagttgctttcacgtgtgttgggggtcaaattctactagtacagaactacgctggaacttacctgacctgaccgctattttggctggcccaacgcctgttcgatcttcctgccgcagatgagagcgtggttgcgctggcgaacggctgccttcacctgcgctccctgggtctctactactgccagaacat

SEQ ID NO: 380789 - DNA, 254 bp, Zea mays
gattgtacgtataaccaatatgttaatttctctctagcccatgaatgatacacacacatactctctttctctacctttttctgtatactctgctcctgctcggtcggaggaacagaagccattggtacgtacatacgggattattgtgtactacaatatatacaatatacaaaggtgtttcctttttttgtaaagaataaattagaaaaaaaaaaaaaagaacgtaggtgtgagaacataaaaagagaagagag

SEQ ID NO: 380790 - DNA, 263 bp, Zea mays
gaagagttctcactcatgaagaggcaactggataagctgaatgtggagaacacaatgctgcgtcgtgcagtcgaggacttgcgtgcagagattggagccggcaaaggcgatgatcgtaagctgccaacagcagtgccacctcaacaacattctttagtgtcgaaaccagatcgccatttccacatcaatgcgaaggaattggtagacagtgggacgaaactggcctcaaatgaagcaagtgaggagttgaaaaaggtgcttga

SEQ ID NO: 380791 - DNA, 125 bp, Zea mays
cccacgcgtccgcgttcggctggatggtggaggtggctcgttgatttgagggcaccgggtttcttggacctgcgtaggtaaaaaacaccagccccatttccctctcggccggcggatggacgcga

SEQ ID NO: 380792 - DNA, 276 bp, Zea mays
tgaagttttcttcattgtgaatgaagatggtataatggagacttttaaggctgttagaaagataagcccagcatcgaaagaaatagaatagttgtcttatttgaactatgttgtaagtattagattttctggaggcaaattttatacctatttgtggatttgaagatgtttgtaacacaagcttttgtgcttgtactgtaaggttgacaatttacatttgagatattaaaaaaatccacttattgaaacaccctagcttcaaatcctatataaatg

SEQ ID NO: 380793 - DNA, 274 bp, Zea mays
cggacgctgggcggacgcgtgggggctgccactggatctactcctgcacgtaccgctccaggatgcgcgatcactcggccaccccgaagcctgctgctgcgactgctgcgtccacttctgctgcgaaccctgcgcgctctcccagcagtacagggagctcaaggcccgcggattcgaccccgacctcggctgggacgtcaacgcgcagaaggccgccgccgccgccgccatgtacccgccgccggcggaggggatgatgatccgctaagctaag

SEQ ID NO: 380794 - DNA, 273 bp, Zea mays
cggacgcgtggcgcgacgcgtgggcggccagtacttcgtgcgcttccgcgtgggcacgccagcgcggccgatcctgctcgtgaccgacaccggcagcgacctgacctgggtgaagtgccgccgccgccgccacgacgcgccagcaccgggctacagcgccccagcgtcgaacggatcctcgtcctcctcctcgtcgctcgcgccggcggcatcctcccacgcgcgcgtgttccggccggacaggtcccggacgtgggcgctcatctcgtgctc

SEQ ID NO: 380795 - DNA, 271 bp, Zea mays
  unsure (1)..(271): unsure at all n locations
cccacgcgtccgagcagctagcgtacangcgatggccaccgaactccggtcgccgctcctcccgccgccaccgccacagcgccgactaagcccgcgggcagccgcgtgggcggcgctcgccgtctcggcgacggtcctgctcctccccttcctgatcggcagcaccaccaggaccaccagcagcagcatcacgagacaccctcggccccgatcctccccaccatccaaccccgtggagctgaccctcctgaccggcgcccgcgacaagggc

SEQ ID NO: 380796 - DNA, 284 bp, Zea mays
ctagtttctagatcgcgagcggccacccttttttttttttttttttttttttgctcgaagcacagtaccagatcaacaaacagcagtatacaagactttatttattatttgaatccacaaaggacgactcagaaaaaagaaggaaccaagaagaagaagaagaaacagcatccgggttacagtttttacacaacgctgacaaacaagggtaataagcctgaggcttgctgcgcatggaacaaggattaagtgcagcgatcgctataaggtgtcgttttgagtct

SEQ ID NO: 380797 - DNA, 284 bp, Zea mays
cccacgcgatccggtggtcacacaatgcagccatcacgagagatggctaggcttggcgtcctcgtcttggttgcgcttctcgccgctgacaccacagctcaacttgctcaagcgcaaggatcctcctcctcctacggcagtgctcctcctcctcctcctccaactagcccgccgagcgcaagcccaccagcccagactccaccaccggctcctactccgccaacgccaaagctgaggtacaacttctacaagcgctcgtgcccttacgccgaggacatcatcaa

SEQ ID NO: 380798 - DNA, 277 bp, Zea mays
aattgacccgttgctcgtcgccatggccaccatgttatctcattccggtgttgaaggaaaggaagcagttgatcatgatgacaaggtggatgatgtggttgatcggctgattgatgaacagattgcagccatagtctttgtgccagcttgtatagaatctacgcttaacgatgggataaatgcaggcaaaaccgtggaggcctttgctgatcatcagtctgctgaggatgacagtggattgaaagataaggatcagaaaatatctgatatatctgag

SEQ ID NO: 380799 - DNA, 259 bp, Zea mays
gcggactggtagtgacgggatcactgtggaagaaagcaaggaagctgatacaacaactaaagaggctactcatagaatctcccgtggaatccatgacaaggtagataaatctttgctatgtcagagctgtatttggttaatcaaaattatattgaatagcccagtgcacacaggattgtgtacagagcacatatttgacttatcaattgataatggatcaaaaaatgcaaaaaaaaacttcaatttggtccagtataat

SEQ ID NO: 380800 - DNA, 124 bp, Zea mays
tcccacacgtccgcggaccgatggatccaaacgccaacgtgccccgtcagcgtcgcgtagggttttggcaactatgcagtacgataacgtccatggacgacggcagcagcaacaaggtggttga

SEQ ID NO: 380801 - DNA, 260 bp, Zea mays
atcgagctccttggacttgtcctcacgttcaagcccttcacggcagcatgctttcttctttccaggtgaccagatggtgttctttcttctcaatgccatcgagctccttggacttgtcctcacgttcaagcccttcatggccgcaccagagtccagagcagcatgatgcagacgacgcagatggttcgtggatcactaatcgatcagaggtcgagcacacgtaaagatggcaacggtgaagattcgtcggattttgcatg

SEQ ID NO: 380802 - DNA, 264 bp, Zea mays
ggaggttgccaacatgaggcaccatgccttattcaggcggtttataagtgctcttactagaggtggacctggagggttcccaagaccaatagaagtgcatgcccatgatcctcttcgctatgtaggcgaaatgctgggttggctacatcagtggtccaacttttcgacgtcagtctggtagagatggtgattcttccaaaggagaacctgatgtaacttctgtgcttgatagaatatttgaaggagcatgtcggccatttaaag

SEQ ID NO: 380803 - DNA, 295 bp, Zea mays
gtacggtcggaatccgggtcaccacgcgtccgggacctgggagctggtggttgacgtcatcgaaagctcggcggagggcggcgaactccttgcgcgcctcgtcggtgacgagcaacttggccatgccgtcccagtcgatgatcgtcctgccggccttcaccgccgcatcgaccaccttcttcgcggaagggatcgagaggagtgaagtggacaagaggtttggtgcggctgcagcatttgctgctagtggggctggggcggctgccctgtcaaagctcgatagtgatgtgcagct

SEQ ID NO: 380804 - DNA, 263 bp, Zea mays
cccacgcgtccggtagatgcaccacccctccccttgtcgcatcaccttttctactgcaaacgggcacaaaaggtcctctaaaccccaccagcagcttcccctccgatctcaccccaccgccgccggcgagatctccaggatgccgttggccgggcggcgggacggccccctaatgctgcgaggcggcggaggcgggaaacccctgtcacgcgggtcccgcatcgcggtggccgtcgctgtcggcgtcgcactcggctgcgtct

SEQ ID NO: 380805 - DNA, 287 bp, Zea mays
gcttcactcccaggctcagcgtccgccccggcgcttacaaaccgcgagcgccgcaggcagaaggtcgaagcgtcactcaccatcatcaccactacttccagcaccatggcatgtcgttcgcgtcgcatccgttgcgacggcgaacctctgcggttgctgtcaccctgcccgacgccaagccaatcccactgacgacaaagcctgccgagtaggcgaagccgtgggtacgttagtcgatggacatcgctgccacggttgttcgagcagtcacgcgtacaatgatacaa

SEQ ID NO: 380806 - DNA, 202 bp, Zea mays
gtcctttctatgagaaaggtgtgtgttctgatgtctgcaataaatgatctggacttgagaagcaatgcaatgcaacacagcagtatttcatttttaccccccgatggaagcaggcggctgacacggccacgaccggcagcttgtcaccgtaacagcatcggatggcgaggagccgccgatctgacctgttcctacttctact

SEQ ID NO: 380807 - DNA, 239 bp, Zea mays
ctgggtggcctcagatgcagatgccccccggactacgagatggtcgatccgacgaactggaacagaggatgcaagccgatgttcttgacgactgacgacggaaaccaatcacacgaggaggagttcacgttcgttgagcagcctcacgctgactactacggcttcgacctgtcctccaacgagtccgtcccgttcaagcctgccgggacatgtgcttgaacagcagcgctgcttgtcgt

SEQ ID NO: 380808 - DNA, 283 bp, Zea mays
ctcatatgctgtctcacgaagatcattatctgtgatacctgtttcaaatagtggaaccagcaccaattattgtgtcatcgccagtcacagctaccaacttgccaaaatcacaaccatttgattctccgaccgagaaggagttaactatagatgacattgaagactttgaggatgatgaagatgaatttgatgggcgaagggcttctagaagacatcaaactgacgccagtgatctatcgttgctgttaccactatttgaaacaggtatcacagataatgatct

SEQ ID NO: 380809 - DNA, 187 bp, Zea mays
ggagaaatctccagaagaagctatcaaaatgtatgatgaggcttgttcagttctagaagaagatgggaaggaacagatggcttttgacttgtaccgtgccgcagcagctttgtatatcaagatggagaagtaagatcactttaatgcttgcctatattaatttcgatgtatagcctcacattttcat

SEQ ID NO: 380810 - DNA, 271 bp, Zea mays
aggacaagcagtagtagcaaggtaatatagcaaagctgcctacctcttttccaattatatttcccactatatatccactcaacttcagttgacgcttcagacacagaatccggtgttgtttcctactacatgacgttgttgtctagatgtcgtacgtcgaagtttaattgagtacatcaggtagtatatatacatgcatattatggtaataaattgtgaggaaacagcttaaaacacgggatattaccacaatgactactagctagctagt

SEQ ID NO: 380811 - DNA, 268 bp, Zea mays
tgtctagagagtatccacctccaaattgtataaaaactgatgaaggttgatggttaggcgttgaattttgtggtctttcggttttagttgcaacagatgtggcccctggaagcggaagcgaaagcgagggagcttcgaaccggagctgggagcttgcttgtcgaatccccctcactctttacagatgtggggatgagcaaccgctgctgctcatagttgtgcttgcttttggttgcttgctgtaaaaaggtgaactgaactgaagaaa

SEQ ID NO: 380812 - DNA, 255 bp, Zea mays
cggacgcgtgggtccgaggacgccgggctccagctgaacgccgtcacagcgctgctcaacctctccatcctcaaggccaacaagaagcgcgtcatgcacgccgagggcgccgttctcaggctgacgtccgtcgatacctagcggcgccgtctcggccggagcctatccatcgtggagaagctggtgcatctagcccacagcggcccgacaagcagcaagagaggcgcgtttgccgcactgctgtcgctggccggc

SEQ ID NO: 380813 - DNA, 272 bp, Zea mays
gtcaccttcttcctgcccaatacggccagcagcggcaccccgaccaggttgaccccgccccggcaacgaccagcgggtcgtacagcacgccgatccaattcctccgtgaaggtcgataaactgtgagatactgagattgaagctgcacactgttttagtttcttcaaggacaaggaacattaatatcaccaagtactttcgtcaatgaagcttgaagctgatttcgctgatgaagatgtcagttcagataatggattacaagatctgtggtc

SEQ ID NO: 380814 - DNA, 271 bp, Zea mays
cggacggtggggaagcggtggtggtcgtgggatgccacgcgagcggcgtggacatcgcgctggagctccgcgcggtggcgagagacgtgcacgtcagcgtcaagtccgtggacgacggcgtcgccgtgtcccccggcatgaggaaagctgcgtccaggcaccacaacctacacctccacccgcagatcgagcgcttgtgcgaggatgggcaggtaacgttcgccgacggctcgcgcgtcgtcgccgactccatcgtctactgcactgggta

SEQ ID NO: 380815 - DNA, 276 bp, Zea mays
cacagaaaaagtttctgttctctcagaaatggtagagagctctaccattattggtccagtgagagaagaaagtctacgtcttcttaagaattttcaggaccagttggattcatgggagcgttttgtagcaacacaaatggatctgacttctgagtataattgggacttcgaccattacctagaggaggatataccagccgcggtggagtatattaaacaacacagcagagcaaaagatggcaagttgcttgccattggacactcaatggggggaat

SEQ ID NO: 380816 - DNA, 250 bp, Zea mays
caggcagacgtacgcgtccgatcggggacccgtccttcaacgtctacggctgggagttctccaatgatgtgaacgccgtggatcgtgctggtgggcatgcacggtcgcgggctcaccaactcgctgttcctccctactggcggcgagttcatccagatcaacccggaaggccatatggagcacatcggggaggtagacttcggtattcccggcgttgatcatgggctctaggacaacgcctaagtcgccg

SEQ ID NO: 380817 - DNA, 110 bp, Zea mays
ctgtcagaacagcgagcgagaccatagcgcgcaagcaaccagcgcgagaacaagtcgggcccacacagccccgtctcgcaacggagtgtgagattgcattattctaccat

SEQ ID NO: 380818 - DNA, 270 bp, Zea mays
cttcagaattccctgatcacgttccagctgagccgccgtactagccggacaggaggcgacaccgcgagagcagagcagggacaccggaccgtgccatcatgttggaaggaaaggcggtggtggaggacaccgacatgccggcgaagatgcaggcccaggcgatgtcggcggcgtccagggccctggaccgcttcgacgtcctcgactgccggagcatcgcgtcccacatcaagaaggagtttgacgcgatccatggccccggatggcaat

SEQ ID NO: 380819 - DNA, 263 bp, Zea mays
cccacgcgtccgcccacgcgtccgcccacgcgtccgcccacgcgtccgcccacgcgtccggtcacggtgcgcgacggcgagccgctcaccgtcgtgtccaggtacagcagcgaccggcgccacacgggcgtcatgggcctcttctacatcctcgtggccgaccacgcccggcagctgccgcagcaggagggcctgtgcttcagcttcccggtccaatggtgcctaccgtcatggctgtcgagcaacctgtgagatctttgttg

SEQ ID NO: 380820 - DNA, 217 bp, Zea mays
cgttgatcctcatcctcatcctcctcatcagcagcagcagtgcagcaataaggagtcgtccatggacatgcagatccccgccgaccttatgatccggatcggcgagtccgttttccctctccacaaggcggtgatggtgtacaagttgggcgtacatccgccgtgccgtcaaggcttcagagagctcgctggcctccacgaccagcaggatgggcgg

SEQ ID NO: 380821 - DNA, 212 bp, Zea mays
caacctcctcgccgacgtgtgcgcgcacctggagcggcatcgcgcggcgggggcgcggcggcgcgccctcctccgcctggtgagctcgtcgctgcgcagcgggggtcacgacgcctccgtctgggtctcccgctgggagaagtccccgtcccacccggtcggcgacgacgcttacatcgacgtgctcctcccggcggcctcggaccgcggcg

SEQ ID NO: 380822 - DNA, 283 bp, Zea mays
gcgaccacggtccgggacgcgtggcgaccgtggcgtgcccctccttctcccctccccttgtccacagcccccgtagaccatggaagatgactggcttgagcatctgcatggttcttgagagttaaagctgcacgacgatggatagtggaaacagagcttctcaagaagcattcgttttcgtggtgcctttcctgacctccttggtggtcagctgaggcggaagctagaagacaaataacctaagtattcatgtgtgatggattatacgtatacattggtgaga

SEQ ID NO: 380823 - DNA, 290 bp, Zea mays
  unsure (1)..(290): unsure at all n locations
cccacgcgtccggttaaggaggtgcttggagagtactggaggttgaacgggcagaccatgtcaggtgtgtcactggagaaggggttggtgctacttgggtcgcagcaagctagtgtggttgaggttaaatggaggcgacagcttgaggcagatatgcgcatgcagatgcgccgacatgatctggaaaaggaggtctatggcctactcatcgatgccatcaaagggctanggccttagctgggatgccgttgatggagtacatagctggatacataggtgggatgttattt

SEQ ID NO: 380824 - DNA, 253 bp, Zea mays
gacacgcgtccgcggacggtgggcgacgcgtggcggacgcgtgggcaagaagcctgccaggctgggctaaacaagaaggagaatgttaaggccctggaattagaatggaactcgactggtaagattgtgccctctagtgaggctgatgtcttggatggccttgaacccaaccaatatgttaaaaagcttactgttagaagatatcgtggtgatagatcaccaaactggcttaacacaagcttgaaagtgagtg

SEQ ID NO: 380825 - DNA, 145 bp, Zea mays
aatcatttagggctagtctaggagccacaaaacctgagtggattgaagggattaaaatcccctcatttaattttaaataagaagggaaaatatcatatgcttgcaccaaaatgagtgattgcacaggatatgtcctcaagaaggg

SEQ ID NO: 380826 - DNA, 109 bp, Zea mays
agataagtacctagataggtttcaagagatggtatatctaatatgagcaacacatgtacttgatcgctctacctttacaaatgctcattgctagtattatttgtgggct

SEQ ID NO: 380827 - DNA, 251 bp, Zea mays
  unsure (1)..(251): unsure at all n locations
tttcgntcactcgtccgntcacgcgtccgcggacgcgtggcgagcgtggttttaatgttcattcgaattcatttgggtcctgcatgaccgtgttgtatatgagacatcttgttcaaatgatcagttcagctttgtaaactatcaggtgtgaatgaatttataagctattttcacctgacattggtaggaccattttgtaaggtatttctcactaccaattaatcgatgacaactctgttctattccactac

SEQ ID NO: 380828 - DNA, 247 bp, Zea mays
tcttgaccagcctgccccgatgcccaatgccgatgcggatgtagggccaaccgatgcagtcacgttgcacattgtgcctgataatgattgctttagggtgtcgtagatgacagagctcctatctcgtgctgtctccatgattaacatggagcgtttcgtatagtcatttgcgtcaagggtggtgatttgctctatgcgtgcaagtgaagctttcttaggttagtattggcgctgtttggactagtta

SEQ ID NO: 380829 - DNA, 263 bp, Zea mays
cttgatcgtgaaaagatatggtcaagactgacaacaagtgaaagcattgaggttctggaaaaggatcttgcaatatttggtttttttgttgctttgggtagaagcacacaaggatatttgtctttcaagggtttgactgatttggatgattcactgaatggtattgtaaggtatcttatcggtgggagtgtactatattatccacagctgtcctcgattagttcatatcaactgtatgtggaggtagtctgtgaagagctcga

SEQ ID NO: 380830 - DNA, 246 bp, Zea mays
ggacgcgtggcggacgcgtgggctgatatgtcaatgaactgccctgctaagttcagctatggtttctgattgcaagactattgacatgtctaaaactgattttctttatgtcctatctgcattcagtttgccctgtacctcaactactgaccgtgttttcttttttctttctttacctatgcagatgctgcctcactgttaaggtaactaataacgcctgcactgtagtgtgcaaactcgaccatt

SEQ ID NO: 380831 - DNA, 245 bp, Zea mays
cccacgcgtccggtcgcgcgcgtacatttcattgttcctgcacgtgctgccgcgaaactcctggttcagttctcctccgtcgcgttgtcgtgtgcgcgaaactgctcgcagtcgacatcgagtccgtaacacgcgcgctggacatggtgaaacgctaccgcaacctcgctttgctctccgcgtcgctgtttgccgggtcaagcccgaggttgccgctttcctgtttcagtttgccgtgccgcacg

SEQ ID NO: 380832 - DNA, 245 bp, Zea mays
ctgcattactgggtcttgcctctatacgctgggtggcgatgatcaaaattcagtggggcatactcagaaaataaatgctatggcagtgaataaatggcaatcctgtatgtcttgttgtcaccagtggagcaaaaggtgatgggaagcttctactatggaatgctttaagaggtgaacttgcttctgatctaaattcgaacttgaggtctcaggatatgatctatccctcagttgatacaatggag

SEQ ID NO: 380833 - DNA, 242 bp, Zea mays
cccacgcgtccggaatcagatcagtcgggccacacaacttcctactcgagatgtcacagacctgagtaccttgaggtcatggctgaatttcccttgggcacacaaaatggaatatgaaatatacaaggccacaaattctttacgtaattactataaggtgggaagactgaaaccagagaaggctatccctgatactatacttagacaagcaaaaggtcttgctattgttactgtggtgaagg

SEQ ID NO: 380834 - DNA, 188 bp, Zea mays
cccacgcgtccggatcagtggacagcccaaagggttaccatgcaccacaagattcacaacaacttaacatagcaaattttcaactaaacctgagcattcaccttcaacttccacatcaactaatcaacgagcattgccgacttgttagtcaagcatgtgtggtgccatgtgcggtacaactttggatg

SEQ ID NO: 380835 - DNA, 258 bp, Zea mays
aggcgttccaagctcctggccgcggcgttcgacgacctggtcccgtgcgccgcggccgaggacatgccgcggtccgcgtcgctgtgcctgcgcgaggtgctcctcgtgctgcagcgcttcaaagccctggccgccgactgcgccgcgcggagccggatgcggctgctgctgcggtcggacgaaatcgatgaggaggtgcgggagctgcaacaggacctggccacgctgctcgacctcctgccggtcgtcgagctgggg

SEQ ID NO: 380836 - DNA, 217 bp, Zea mays
ctagttctagatcgcgagcggccgccctttttttttttttttttttttggatccttaaatacttacacgctttatctcgaaatagagggagtagtgatttagatcgaacaatattttggttattgatatatttcaaatatggggctcagttttgagttttgcaccagctctcaattttttaaactcgggccctgaattcatcaaaataaagctgtgt

SEQ ID NO: 380837 - DNA, 278 bp, Zea mays
agatgcagtgccattgcttttgtttggtacctctgagcatacgagacatgatttgtttcaacaattgatgcttgttcacaatgatcactcctttgtggagtacctgaaaaacacctacagatattcaaccacagatgataatgaggacaggcctcgagagaaaaaacaatcaagctcagcctcagggtcatcccaagatgcttaaaaatcaaattcaactaaccataggacaacacgttggaatgggtgggagagcatcagatgaagcttctcgtggg

SEQ ID NO: 380838 - DNA, 201 bp, Zea mays
tgtaactctacgccaaagcaatgacatggataccattaaacatgatgatgctggcacttctggaattggtgggagtaacactggtggctctaggactggcctattcagaacacctatttcaggtggtgtgcacagtgcaactgctgttcatgatttaccaccaccagctttggctgttcgcaactcatggaacaggcaagt

SEQ ID NO: 380839 - DNA, 122 bp, Zea mays
caaagcgcacaggacgccacagaggcaagcagccgaatcaggcctttatttacgatccggccggccggaatctagaccacctctctgtctctctcctcgtacgtactcgttgagtctttgag

SEQ ID NO: 380840 - DNA, 253 bp, Zea mays
gttctagatcgcgagctgcgccctttttttttttttttttttttttttttttttttttttgcacgcaccgtggattaccacgacctcttattcggatattattattatttttctacatctacataattacatgatgcgagttgctatactccgcagccatagaacaaagaacatccatccatgatccatcccaccacctcgtcgccctcgacgactctgcactctaacgcgtgttcctacagccagctgtcca

SEQ ID NO: 380841 - DNA, 111 bp, Zea mays
gatcctgaccggcgggggcagcctggcggccctgaaggcggcgcgcgccgtgaatgagacgacggggatcgtgggccttgaggtggtgcctaacgcgcgagatgttctggt

SEQ ID NO: 380842 - DNA, 232 bp, Zea mays
cgctggttctcctcccccgtcggcaggggcggcgagcagctgctcagggcgtcgcagtgctacctgtcgaccacagccggcacggtggccggcatgctgttcgtgtccacaaagaaggtcgcgttccagagcgaccggtcgcaggcactgccgctggcgcaggcctctccggcaggaggcggcagcggcggcaccacaacggtgctgcatgtaccgtacagggtgtccgtcc

SEQ ID NO: 380843 - DNA, 110 bp, Zea mays
ctgacagtaggcagacgcgttggcgcgctgccaccgaccggtcaggcgacgccgctccaagaggaggtccatcaccgcaggcgttgcgtcccaggtctcggtggaggcag

SEQ ID NO: 380844 - DNA, 137 bp, Zea mays
ctcaccttcgctcgagcacttcccttccttcctgagctcatcgtgctggttgagagcggcatatatatggcgcgtcaggggatgggcagtgctcgtggcagcagcggcgccgtcgtgcttgcgctggtcctcctctg

SEQ ID NO: 380845 - DNA, 261 bp, Zea mays
gcagcacatccaaccaagtcatccatcagctctgctcacgactcacaagcaagagctcagctcaattggagctcggtctctcgattcccaggagggacggaaccaaattaagctccggtggttgcctggcagtagcgagtagtccggacacgggatgggcaacctcgtctcgcagtgcgtcgcgaacggtgccggcgcgcggcctctagtcgtcgagccggacggcagccggacgttggtggacaagaacaccggggtcgc

SEQ ID NO: 380846 - DNA, 281 bp, Zea mays
cccacgcgtccgaagagattattcctacattgctagttgatgaagactttgatcaacttataaggtgaatttggtgtatattgtttgagaagttggaaaaaatatgttgacgtgtcacacgcgctcgctcacctcgctaggccatggacggttgagtctaactggactgatggccatcaaggcctacccaaaggcgttcaagatggggccctggcatcgggctctgcatacacggaccaacgactatcttcgacgattgtcactagttgttttatattgat

SEQ ID NO: 380847 - DNA, 271 bp, Zea mays
ctttggtcaccgacagccaaggggtctgaaaaaaattgactttggcttgtcagaggatgatgatgaggtgggggaagttgatgaggaagatgagccatcggggttcgaagatgatctttttgaagacgagggtgataaggaggatgtgggacatataataggtaataagtctggctcatctatgttacccgaagatgagccagctaaaaatgaaagtgtacagggcagaagtgctgggggtggtgattcttatctgagccagaagaggttt

SEQ ID NO: 380848 - DNA, 204 bp, Zea mays
  unsure (1)..(204): unsure at all n locations
gccacgcgtccggccacatgttgagtgagcagacggcggctagcactagcagtagctgcggcggcgtcgaacgtcaggacaggtggctgcagccggtggcggagaacgacgcggaagaggaggaacaggagnagttcagggagtccgcgcgggcgggagaaggcacacgtccgtccgctccgtcgggtacgacaccgggcccag

SEQ ID NO: 380849 - DNA, 249 bp, Zea mays
gagattacagccgcaagggagatgtcctcgatcaaggtggatgatgtttccttgaaaatagcaaagaatgttggatctgctgttgaagccacaaataaattgccaagcactagcagaaatgttgaatttcgttacaataggaagaatccaaagcgaagacggttcctggaagcgtcacatgaaaagttatgtttctcaatagatagcacatgtgggccagattctgctgcaacttccaatcctatcagt

SEQ ID NO: 380850 - DNA, 239 bp, Zea mays
cggacgcgtggcgacagcctaattctcagacgaatgctatcttcactggcctcgacctcgagcacaaaacgctgtggccgagcggatgagaggaggatggcttccaccagcctcagctcctccttgcgcagggctactgcaaactagcaggagtcccaagatcttcgtcgtaccacacccagctgacctgttgctcgaggaatccctcccagaacgcgtgagcagagtctctccggttg

SEQ ID NO: 380851 - DNA, 122 bp, Zea mays
cccacgcgtccgtctatatcctgtttcttcaagtgttcgtgctcgtgctgtacgtgcgtacccgcgggctcagtcgaccggtggacggtggtagactgtatgcacggctcaaacttggtgta

SEQ ID NO: 380852 - DNA, 254 bp, Zea mays
acgctacgacagtagcgacacaggcgcccacggtccgggacctgcgagtggtgaatgctatgagtcgtcagctgtacgaagcaatagtctgcaagattcaaatttagcttccagcatgcatgggaacgacaatacaaatcgatctgtgaattctggacggaatgatgcatcttctattaccctggaacaacatctggagaatgtcaaaaaaccgtttgccaatcctggcatggatctgggatcctctacacgta

SEQ ID NO: 380853 - DNA, 271 bp, Zea mays
gagacgcgtggcggacgcgtgggcggacgcgtgggcggacgcgtgggcggacgcgtgggttacattactaacagtctaacgtaggatttaatgcttgcagctttacagagttagtatgtcattgaatctatatcgcttttaccgtgatgctgttgtacaacagtgtactctgccaacatactcaagcagaattgcagttagtgccgttgactacataattatggttcaccaaatagatgcagaagtagtcatgctttacgatgtgtccctg

SEQ ID NO: 380854 - DNA, 263 bp, Zea mays
gcgagacgcacctgagcgtgcattagctgtcgtgcgtcgctgggcgctctaccgccggaattcgtgcggtcttagcaggaccagccggtctcgaccacgtagcgctgtgccgccgttccggacgcgccggttatcgacatatctgagcccgggttcggctctcgcatggcctcagcctccaggaattggtggctgctccatgtggtgaaccacggcttgccctcagctgcgttggcggactccatcgcgtcgggcggtccttc

SEQ ID NO: 380855 - DNA, 260 bp, Zea mays
ctcttctacttcgccgcaattatggtgtactactacctagccatggagagcaaggaggtgatggcccatgactacgtcaacatccccaccgttgaagcaactgtgtgattgattgttgaatggtagggaaataataaatttttgtatggtgatgatgaataatatttgtccactagaaatgaacagtgtgcctttatggaggtttgtgacgagacttgtatgcaaagactttattttgcaaataaaaaaaatatccaaag

SEQ ID NO: 380856 - DNA, 258 bp, Zea mays
cttccgtcggacttcaaaccctagcggcgatggcgtccgctgcggcgggcacaccgaagcgctgctactacgaggtcctgggcctatctcgcgactgctccccgacggacatcaagcttgctttccgccgcctcgcgctctcgctccaccccgacaagcagccccccggctccgacctcgccgccgccaccgccgccttccaggagctgtactgtgtggcgtgcaataaaaagttcacatcggacaaacagtggcaga

SEQ ID NO: 380857 - DNA, 255 bp, Zea mays
caccccgacgggcgccacaggctcgcgaccccgaccccggcgtgcaggcgctcctcgcccaagcagcagcagcagcagcagcacttgatggggttccgcgcgccggccgtggcgctcacgctccccaagcacaaggccaagtgatctgcttgctgcccattgacacctcgccgcagcggcgttttccgaggtgttgctgcgttgcgccgggttaacaattttgttgattggtttgttgcgttctctgatcggcta

SEQ ID NO: 380858 - DNA, 288 bp, Zea mays
gccacgcgtccgcggacggtgggggagatgatgaagatgatagtgctgatgccgacacaaatgatcctgttgtaccttggtcattaggtagagtaggagttgggcatatggtgtacatctccggtttgacttgtgccttgagttcaacaaatatgaaagtgctgagagaggtggcatctagaggacgtcatgtcgaacgtgtgaagaatttttttagaaatatgtatatttgtgcgaaactttttagaaacttgactccattttattttctatgttactctcggcttg

SEQ ID NO: 380859 - DNA, 134 bp, Zea mays
gctaggtgtgttgagctgtgtaagcaatgtaatcctttcacaggaattcagggtggaacctacaacagagctacagatttaccagacgcaattctattcccacccaagcttctggcttgtactacacacagcta

SEQ ID NO: 380860 - DNA, 128 bp, Zea mays
cctcaggatgcgaatcatcagcggcgagcgacaagaggcatcccgacctcggcgtcgggctaagcctggtgttcctgctggccaagacgtccgacgagttcaacaagatggccaaggtgcgcgcggag

SEQ ID NO: 380861 - DNA, 162 bp, Zea mays
aacgcacacaagcggaggacaaccagacacccagagagcggaacccgcaaggcgaagggcaaggcgacggcaacgcaagccagaggcagagcgcgcagcgcgacgatcgggcagcaggacgtggcgtcgccggcggcggcgaccgtggtcctgctgctcctg

SEQ ID NO: 380862 - DNA, 261 bp, Zea mays
cggacgcgtggcgagacgcgtgggccgcgttcatcagtgaggatcggcgcgatctacgtgctctccggcgtgggcggcgacgtgctgtcgtcgctggtcgtccggaaccgcgtcaccgtgggggcctccggggcgctcttgggcctgctgggcgccatgctctcggagctgctcaccaactggaccatctacaccaacaaggcggcggccgtggccacgctcctgtccgtggccgccgtcaacctggtgctcggcgtcctg

SEQ ID NO: 380863 - DNA, 260 bp, Zea mays
ggcttccaatcgtgctattccctttttgattttcaattcaccttgcgcttttacttgatttgatggtgattactatttgcctgaatcctggccaacttatctgcctgcttgttttcgggcgattggtgtttatcgccaataattgcagcagctgttgtactgtaatatagcaacatatttcaacctctagccctgtctgctattccttttttgattttcagttcaccttgccaccgcaccctgctgggcgttttagattt

SEQ ID NO: 380864 - DNA, 258 bp, Zea mays
cggacgcgtgggcagccttttgtgattgcattataagttattagtacaatactactgcgttaagacaccttatgacaccatgtgctgcatcaggttagtaagctgtcatggttctgttttaatacacgcaggtcactcaagtagatctaaagttattctttgagtccatatgtggtgaggttggtcgttctttactccaaacacaatctcccttctgtatagctaaaagtttgcagaaatggcaccatcaagatcgat

SEQ ID NO: 380865 - DNA, 258 bp, Zea mays
agaaattgaagatttgtatgttaatgaaataaacaaattaacagatttttcgcaagctaccaacagcgagttagtttggaaacattttcgtaagatgattgaacatgtgctttctgataatcacttttactatttattaaatgagtacgattggcgtgtactcgcttcttttggatctttaacaattgcttcacagcaattattggttcgtttgttaagtcgaaagaacagatggcttcatcgtcgttctattcaata

SEQ ID NO: 380866 - DNA, 128 bp, Zea mays
cccacgcgtccgcgccgacccgcgtcggaactcgctggaggaggccgtcaagctgtgcgtcgccggcgggctgcaggggttcgtgtcggaggtccgggcgatactcaggcagccgtcggcggtggcca

SEQ ID NO: 380867 - DNA, 134 bp, Zea mays
cgagataacactgccgaaccatcagggttctgttggtccttctactccttcaaatctgaattccaggttaccagggtctcctgctatggttttgggcaacaattcaccgttcccttcaacattgagtagtccta

SEQ ID NO: 380868 - DNA, 282 bp, Zea mays
ctcagactctgatgacgatgcaaatgatgacgccaaccaataacactcaattacaaattgagttattagttaggagattcacagggtaaggaagtttggcatacactccttttcacggtttctaatacatactcccctaacccttaaccccatccctaggaattttccttggtgctgggacttcagggtcgaattacttggtggtttatgcatttattagcactgtgtttgaattgtgactgtcacattgagcttatggtgattagatatcctggcctttgt

SEQ ID NO: 380869 - DNA, 247 bp, Zea mays
gatacaggtccgcgacctggctgtgcttggcagcaatcatgttagtgttacccctgcagtacaaaaatctaaaggcaaccttatcaatggtaccccaacaatgcagccctctagcaagacgaccaatacaaccccagtagtgcagctatctcaaggcaaccctactaatgcgtccctagcagtgcagcgctgtcaaggcaacactagagctatcccagcaagtctgcctcttcacactgaacttatt

SEQ ID NO: 380870 - DNA, 251 bp, Zea mays
ggacctggtccgttggagtcgtcgtcggctgcggcggcgggctagatcgtgtgcgagctggacgccgcggtgccgctgggccacgcgctcgtggaccgcctcctccggcgcgggtacaccgtccacgccgccacgtacgctcgcgacggggaggagttcgcggctgccgccgcgctgctcggccacctgtcgtgcgccgccgacgcgtgcaggcaccggctgaagctgttccgcgccgacccgttcgacta

SEQ ID NO: 380871 - DNA, 150 bp, Zea mays
cagaagcccaatatatatgtatattgtcaaatttgtaacctgcattatatgcagaggtcgtcgtcgtacgtgtccttaattagtgtctttgtaatatctcttcatgaagcgaggaggaaggaaggaacctgaatccatgcgtaacagcgc

SEQ ID NO: 380872 - DNA, 249 bp, Zea mays
ggacgctggtgtttttttttttttttttagcagtgtaaatgaataccttagaaataaggagccacgttgggatacataggaggagccctgccacctggaccaggaggagacattccaccttgagggtcctggccccggaaaccagaacctggaggtgggtagctccctccatcaccaaatgtgcctgcaggcagcccacctgctccctgttgtatgcggtacatagagcctccaccaattccaaggcca

SEQ ID NO: 380873 - DNA, 246 bp, Zea mays
cccacgcgtccggttaaactcttgtattctgattatagcaatgcttcagaagcagatttaaggatagtagaagcgtgggcatccaaatatcgggctgaagagctgtacatgatgaagcgtcatagacgaacttactgaatgcctaagctcaggaatggacaactttccagtttcttgctcttcccttgaagggatgcggctctcatcgcttaggcgctgacttcagtatatgacatggaaattgtg

SEQ ID NO: 380874 - DNA, 218 bp, Zea mays
ggacgtcatcttcatctccacgctacgctgtgggtgtggctggcactggcacacacagtacagcttcatcgccacttaccaccgtctaacgaaaaagcatcgacgagcgatcgtaaaagatgccgccagctctgctgcgaacgatcctgctggccgcggcggctgcgacgactgctgtgctgcggctgtgaccggccgtctgcatcgcggacgacgat

SEQ ID NO: 380875 - DNA, 245 bp, Zea mays
cggacgcgtgggcggacgcgtgggttccaagccatttgcaaagctacacactcacagtacacacagacatgtgcagaactgacagagacatggaggactcgagcttattcatgcagtgggcgatggacacgctgcagcacgagaacaaccctgcgcctgccagcgccgccgccgtccacggcgcttcagcgaggctactttcccctcgctcaaagcgctccgcgaggcctcgcatgcagccgaaa

SEQ ID NO: 380876 - DNA, 261 bp, Zea mays
ctccttcctcactacgcttgtttcaagtgactcctccacggcgctaccggaagcaatggagtacctaaatgtcttgagcaggcacggctgttcgccaggagagaagttcttccgtgctgctcttgctgcacaccttgatgcacgacaattgcgcggaccatgaatctctgggatgacttggtgggcgtcgagacttcgcccgtaatggaattgtcaccacatgatcaagctcgggcatctcggcatgctgactgatagtgg

SEQ ID NO: 380877 - DNA, 217 bp, Zea mays
ctgccctcacagccacagcaccagcacgaccccgacgtgcggcgcggcggctgcggcggcatcgccgcaacttccggcgcacttctcctccgcgtcctccgcgggccacagccatggcggctgcggcagctgggccaagtgcgtgtgctcgcccgcgacccacgccgggtcgatcaagtgccggctccaccgcatcaactcccagggccactgccac

SEQ ID NO: 380878 - DNA, 264 bp, Zea mays
gtccatgtgatgttgacactacagaatctgatatggatcaacagtgtggtcgatgccattcagcttctggtgctcccaacaaatattcagaatcacgacatcagaatgcattggctgatagtcctttgcctgatgctcaggattatggtgatggtgctgcagtatgttatgcatctgtacaatatcccattattcaatttacggttgccgagcttaggagaagaagaaagaattgttttatgatatctcatataaataaatcat

SEQ ID NO: 380879 - DNA, 226 bp, Zea mays
ttttataatcagtgcaaaaggtgatgtctttagcaacattcttgctggattttactattgctggggtcttcctgcctaggcaatacggtgtgcccagcctgccttgggtgaccttctaaatcatggaggcaactattatctttatccaataaaataagtgacatattgtagtgtgtgtagtgaaactaataataatgtgtgccgccgaactatttgaagtctgagc

SEQ ID NO: 380880 - DNA, 234 bp, Zea mays
caaacttgcactgtacacacactcactagtagcagcatcgatcgccggccggccgtttccgagcaacatggggaaacgcttcctccaccagctgctagccgtcgccctggcactcttcgtctcgccggcgagatcggacgactggcttccggccaccgccacgttctacggcggcgctgacggctccgacacgatgggtggcgcgtgcgggtatggcgacctgtacgagcaggg

SEQ ID NO: 380881 - DNA, 106 bp, Zea mays
ggggagccgctccggctcgtgtccaagcgcttcggcctcagcgagtccacctgcgacaaactcgtactcaaagtctacgccgccatcaaggccgtactcatgcccg

SEQ ID NO: 380882 - DNA, 268 bp, Zea mays
gcgccctcctcgtcagtagggtccggagcaacgagaaggtcgtggtgctgtcaaacagcgtcacgctcaagatcaaagccatggcagagggcctgccatgcgagggagccaaggagttccgcgagtccctcgtggacccgtcctccaggcggttcatgtgggcggccagcgcaccacgggggtcggcctggtcctgcctggacgcgtccgcgctggcggagaactactacaacagccgccaccacgctatgaagcggagggttctggt

SEQ ID NO: 380883 - DNA, 261 bp, Zea mays
cccacgcgtccgtgtgtccacgcttgccagatagtcgttcattcgatcaaattccaagtgatctttcagaaaatcacaactcacctagtaatcgtgctgaacattcaataacatcaaattctcatacaccagttccattaagcagtactgagcaccttgctatagacgcttatattgaaaatttgctaactggtggttcttcattaacaccatctaaatttacatctcacatgaactcaactgcgccagtatctacacaaa

SEQ ID NO: 380884 - DNA, 201 bp, Zea mays
cccacgcgtccgcccacgcgtccggcggcggcggcggcgtcctggcaaaagtgagcgtgtttaggctcgcggacgccgtgtccgttgtggaggtagtgaagggcgacggcgccgacgccgcgctggtctggaccgagctgctggagccggccgtgagacccccggcgctgagctgatgaggtggggtggaagccgcgttct

SEQ ID NO: 380885 - DNA, 105 bp, Zea mays
cccacgcgtccgcgatcatcccaggatcgctcatcatctcataagctctgctagcttggtgcgcgcggttgacgccgcgcacgatagctaagctatctcttgaac

SEQ ID NO: 380886 - DNA, 265 bp, Zea mays
atcaggggcggaaggttccagccctagcgcagacatggcgggttggtgcgaggaagcggtagcgttgctgcagcgccacgcagcggcagaaatggacgtcgacgtgctgctctgagcggtgccgatctaggacgctgtcatgatcggcctcgtcgtgggctggtcctggagcccgcgctggacggggctgctcttcctcggcctccgcacccgcctccgtatcatctggctcccgaccggcctcggggcccagcggctctaattc

SEQ ID NO: 380887 - DNA, 276 bp, Zea mays
cgaccgaacaaacaacatgtatgatttcacaagccgcccgctgaaaccagagccttttgccctgtcgtcaggggcgaggtttcatcaacctcagtacctcaccctcctctcccggagagcctctcgcctccgctccgctcctctgcactgcccttccccgctacaccaacgaaggcgccagaaatagacgccgcctgtcacattgcttgccgcgcctcgtcttcgcgtaggcctcgtcgcgcgacgatatggagctcgacgaggcgccggcgcccg

SEQ ID NO: 380888 - DNA, 276 bp, Zea mays
ggagatcgtctgttgagaaatcctagcattttgttcctctcactcctctgttggaaggagcaagtgagacagacagagaagcgacgagagcttccaacagagaggctgaggtcaacctcgcaagagtcagacacagtaccaaatactacgctgcagggtcacattctgttgccgcgcgcgttacaatagggacccagcaggtgttggcagccacgctcttgtaccggtcagcatggacgccgccgcgagggaagcgcacagagtagtggtctggaa

SEQ ID NO: 380889 - DNA, 240 bp, Zea mays
cccatttttgcggactacttataataacctctgagtatctcagagtgagctgtctgaaatttgatgaactgctacaattctggtgcgccatgaggatgggatccttttgccttctatgttaataatatgctaacttctgcaaaaaaaaaaaaaaaaaaaaaaaaaaaaaaaaaaaaaaaaaaaaaaaaaaaaaaaaaaaaaaaaaaagaaaaagagggaggcaatgtaaaaggtcaaaaa

SEQ ID NO: 380890 - DNA, 230 bp, Zea mays
aaacacgcgtccgcggacggtggcgcccagcaggacggcagcaagatggccactgacttcctcgagtgcatgatcaagatggagccggaaggcgacgacggcaaggccaccttcactatgactgacgtcaagtctctgctcctggacatggtggtcgccgggacggagaccatgtcaaataccgtggaattggccatcgcagagatgctgcagaaacctggggttcttcg

SEQ ID NO: 380891 - DNA, 177 bp, Zea mays
cccagacgtccgcgagcttgtccgcggaccgcaccctgtctgcacgcatctccaccttgcgatccgcaggcgagggctacgtagaccgcggcggactaccacgatatccggcgacccctggcggatggcgccgctgctgccggcatgggcgacgcctccttgggggtcggcggcggg

SEQ ID NO: 380892 - DNA, 273 bp, Zea mays
ggacgcgtgggttcaagaacctgcttcgtttcttgctataaaacctttgttcgaggtaccatcttatttgatccattctgaatgctttctttctttggtgtaatcaaggattgttctgtgaagttgcaacgtggtttggctgcaggatgagaggtatattgttacatataacccaacaaaggacaaggtatatgctttgctcaaggaccaagcaaagccagatgacattctcaaagctgcttttcatgcacatgtgttactgcatttcatcaa

SEQ ID NO: 380893 - DNA, 261 bp, Zea mays
cgtgccccggcacggtctcgtgcgcggacatcgtcgcgttcgccgcccgcgacgcgtcctacttcctcagcggcggcggcatcagcttcgccatgaccgcggggcgctacgacgggaacgtctccctcgccagcgagaccctccccaacctgccctcgccgttcaccggcttcgaccagctcgtcaaggtgttcgccgacaaagggctcgacgccttcgacatgatcacgctctccggcgcgcacagcatcggccgctccc

SEQ ID NO: 380894 - DNA, 272 bp, Zea mays
aatgacaacagtattgatgatgcaaatataattgacataaagtttcgagatcaaaatgagccttgtattggtgctgataggccatgttcctccaaccttagtgttatttgctcttcacagaagtttgcagaggatcgtatttccatcaatattcctcaagacaaagcaattgatgcaacaaatgataaacctcttgacaaagatgaaaaagaaaagcatcctatatctaacttggttcaggaattgaatgaacatccaattggtcgtgttac

SEQ ID NO: 380895 - DNA, 168 bp, Zea mays
cccgcaacattttggtccattcttcgatgagctctggtcaccagatgtcgggcggcgtcgctttagtgcgctgtagggagtggattccggccgcgccgccactcgacttggtctggcagcgggttggaagtaagcattgttttgatcgttgatacgtgatggatggcc

SEQ ID NO: 380896 - DNA, 244 bp, Zea mays
cgagacgcgtgggttcgcatccaaccgcgccgtaggatcacagaaaacggggatggcgagcggcggtgcggtacgggaggtgggctcggcgggcgagctgcaagcggcggtggccggggcgcgagcggcggcggtgcacttctgagcgtcctggtgcgagacgtccagagcagatggacgaggtcttcgcgcagctcgccgtcgacttcccccacgcggcgcgcgtccgggttgaagctgaaga

SEQ ID NO: 380897 - DNA, 270 bp, Zea mays
cccaatcgagctaatctcacaccgccagtgccagtgccagcggcagctgctaatccgtgccgtgttccagcagcgatgggagtggagtcggagtgcgacaggataaagggcccctggagccccgaggaggacgaggcgctgcggcgtctcgtggagcgccggaggcttcgacgccatcagcgccgcagacgtgcgccctccgcccccgccagcagtcgcagacgaggacccgctcacctcgctctccctctcgctgccggggctggacca

SEQ ID NO: 380898 - DNA, 235 bp, Zea mays
ggtaaaactacgcagcagcaatcacagaaggaggctaaaaatgtaacatcagcatgctgggtttgtgccaagggaagcaaaattgctatcggatacgataatggcgatttatacattgtgggccattcctgaggttacaagtacacaaaattcctcatctaatgggtggccagaatctacctatttcagaggctttaaccttaggatacaagctcagaccaagttgccaatagtc

SEQ ID NO: 380899 - DNA, 274 bp, Zea mays
aacagattacaggtttttgaggtatagagattagatcgagagatatcaatgagcataatgaactaaacatagtttccgcctagttgtacacttgtaccacagggcacagccgactgcaagattcatgaatgaatatatattctcgagcctcacgtgagcatctcacttgtaccacagggcacagccgactgcaagattcacgaatgaatatatattctcgagcctcacgtgagcaaaaaaaaaaaaaaaaaaaaaaaaagaaaaaagaagaaga

SEQ ID NO: 380900 - DNA, 160 bp, Zea mays
acaataacctacgatcagtatagcaagaaaccagagacctggagtgctagagcagtcccatcaaaggcaaaatgaatcacaacaactacacatttccaagccaaccaagttctgacactggcaattttactacaactgcaatcaattgatttttcacgcg

SEQ ID NO: 380901 - DNA, 178 bp, Zea mays
ataacaatgcatcttctaaccatatggatgttgtagcgcaagattggattcttgcactttacttagcagaacactttgaggatgttccataattccaagactagagctagaatccaatcttgcgctacaacataacgatgcatcttctaaccatagggaggttcttcaaagagggagg

SEQ ID NO: 380902 - DNA, 267 bp, Zea mays
cggacgcgtggttttttttttttttatttttttttttttttttagtttacacttcctcttattatggccaattgtattcacaaggtatgacgctactgatgaaactgcacaaagtccaccgaattgacaggcgcccttgggtacatagcagtgagactggaaaggtaacaaatggaatacggatacgtagataaccacggaaacccagcaatgctaaggtattgtttggtcactgcataaccgacgatgatggtcacaacgcctcgt

SEQ ID NO: 380903 - DNA, 239 bp, Zea mays
agccgcgccgaggcgcagaggcagcggcgcaggcgaggccagcgctacgccttcagctgcgcgctcttcgcgtccctgaacgccatcctcctcggttacgatgttggcgtaatgagtggcgcgatcatctacatgcagaaagacctccacataaccgagtttcagcaagaaatcctagtaggctgtctgagcgtggtctcactcttgggaagcctatcaggggggcgaacatctgacgc

SEQ ID NO: 380904 - DNA, 185 bp, Zea mays
gttcttgatggcagatgccgtagcacaaggcgcagactgcatgcctgataaatcgtctcgcttggccatttcccaacaccgattcacaagtggaatctgcccaatttgccggaaggaacggaagtgtggatcaagcgagacgatttatcaggcatgcagttgagtggaaacaaggtccggaagct

SEQ ID NO: 380905 - DNA, 184 bp, Zea mays
  unsure (1)..(184): unsure at all n locations
ggacctggnttttttttttttttttatattatacgcatagtccatttctatcttgcacaacttccggaacgcatattacaggacacacaaccatatgccggtagcatatcaacagctgtcaccgggtcacgcacgatcatcggacgacaagatgctatagatcaccgcatctctggtcccgctg

SEQ ID NO: 380906 - DNA, 195 bp, Zea mays
tctagatcgcgagctgccgccctttttttttttttttttaataggaactaaataatcatgattttaatttgtcgtacttacatgatgagggttaaatatatttataatactggttcatcagatggttcgattggagtagcagcatcggcaatgggttccggatcccctcttctcctcaccgtcacgttttttttt

SEQ ID NO: 380907 - DNA, 263 bp, Zea mays
ccacgcgtacgccacgcgtccagcacgcgtcgacacggtccgggagctgggcaaatctttaaagaattttcagatgtttctaaagaaatgggtgtttcagttggaatcaagcacaagaagattaatgtctcaaatcccagagtagcatgggaacacgaacagttctcaaggtttagggtgactgcacttactctttcagaaatgtctacccctcctgaatttttggaaagcactggcggtcttcatgacactagagaatctac

SEQ ID NO: 380908 - DNA, 269 bp, Zea mays
gcaacacctccggccgacgcactagcggcgcggtcgccgaccacgagagcccggcgcatgagcaccactggcacagccacggccatggacatggacatggacatgctgggggcatcgtggtggctgacaagcccgaggacgatgaggccagccaggtgcagctccgccggaaccgcgttgtcgttcaggtcctggagatgggcatcgtcgtgcactcggtggtgatcgggctgggcatgggagcgtcgcagaacgtgtgcaccatccgg

SEQ ID NO: 380909 - DNA, 254 bp, Zea mays
ggaccgacacggtccgggacctgggagctggcggacgcgtggcgaggagggcaggaagaccagagaccgagcactgcgaaggctcgggacgggaacgggacaggacctcaaaatctcagatccttcctgcccgcccgcccgtgcccgtcgacgcgtcgttcttgccggccgcgccccacctccgacctctcctcctccaaggggatcggatacgccacaggctgcgcgatggtgctgtgggtcttcggctacgg

SEQ ID NO: 380910 - DNA, 260 bp, Zea mays
attgaaattgattggaacgctgtacctccgcggattaaacttgaactaagagatgttgagggtcattctgttcacagcggagagttccctatatctgaactgcagccctcggaagcgcatgcaatcaaaagacaaacccatactttccaacgtcactgtactctcgaaacagagctcccatggctaacacgataccggcttgctctgatgctgtttgtcatcatagctgtttttgcggtggttgtggtgatgctagcgat

SEQ ID NO: 380911 - DNA, 270 bp, Zea mays
cacactcgtccgcggacggtggggtgccgcccttttttttttttgtttttttgtttttgatgatggatctcggacgaatcgtactaagcagtgacagaaattacaagctagcatgcacaaggtactacttactaactagtagtagatgagagagattcccgtttgtcaacttaatctgcagcatgtggtttgtcccactagtcccaaccaagcagtcccaggctcccagctcccaacgccaaccaagatgtcgagggctcgtctttgccg

SEQ ID NO: 380912 - DNA, 272 bp, Zea mays
cactttcactcagcagtctcgacggagaggaggtcgtcccggcagattttcctgagggtgtctacatcagaaacggtccgaaccctctcaacccaacacagacggtcgcgggctccgtgttcggctcgacgtcgtacacgtactacgaaggccatgggatgctacacgccgtgtactttagcaggagcggcggcgcaggaggatgggaggtatcgtacaggaacaagtacgtgggctcggacaccttgcagctggagaggaggaagaaggac

SEQ ID NO: 380913 - DNA, 277 bp, Zea mays
ccgttttgaagagaagccgattttggaggagacgatgatgagtccggcgtcggagcgcacctcatcatccagagcgacgacgacgacgacgcccgatccggccacgacgtggaggagccggagcaggactccgactcctcctcgtcgtcctcatcctgcgccaccccacgacgcggcccaagctcacccccctacatccagcaatggccgcagagttacaggcaatcgatcgacattctcagcagcgtgcagtcacccaacctgagctttctgggga

SEQ ID NO: 380914 - DNA, 243 bp, Zea mays
tcaagtcgcagctagctacctcccaaccgaaccaggaaaacggacgccgtgcagctcgctcgcgcgcgccccacggaaaagagagggcagggaggaataatgtaccaggccatcccgtacagcgccggccagccgtggccgcggcccgccccgacgatcggccctgacgttgcggatgatgttgggttgctggcggctgcgcacactacggcgtcgacgccagcggatgcggaggcagctgcg

SEQ ID NO: 380915 - DNA, 272 bp, Zea mays
gagatccgcccccctcggcctcgcctccgcagccgatctcatctccccgcccacgccgcctatcgccgccgagccgcctaaccagcccctccgtgacatcatccaaccgctccatggatctaatcctcccaccgcctctgaccaccgatccgattccaatgccgatcaagagctcatcccacaaacgatgctggaagccccccaaccatcgcaccttgagactgcaatagggtgtgcaacagcaacagaggtctcggcagtgaaagtgatcg

SEQ ID NO: 380916 - DNA, 103 bp, Zea mays
cccacgcgtccggcacgctgcacctacacacacttgtctcttgtgtcttgtctcgccaccgatcgatgtagatctctgccgttccgtgcagtgcagcggtggg

SEQ ID NO: 380917 - DNA, 226 bp, Zea mays
gccggttaagcatgccgcccagcccgtctacccctacgccgctgcccagccccgcacggagtcgccccgtagccgttcgccggtcaccgtgccagcacggctgcttcgtcgacgcgtccccgcacaccccgttgttgtgtggaggagccctacagcctcgccgctcatcgtgcccgtgcctcgccatcgtcaagctcgctgatgccttcgccctcttgcagccgag

SEQ ID NO: 380918 - DNA, 188 bp, Zea mays
cggacgcgtggttttgtcaagggcagtgtccaatggtttttctgccttttgtgagagctacacacactacctccagaatggtattagaagacactggctgtgtgaagaatctaatggctgaacgacaaaaagatgttgaagatgtagttggtgagacaagtgagacttatatggaatcatttcggaga

SEQ ID NO: 380919 - DNA, 220 bp, Zea mays
agtacggtcggaatccgggtcacccgcgaccagagcggcggacgctggcggaccgtgggaaggaagttaagcaagagggagagcattctggtgtagcgtcagaagatagcaagttcttggaaagtatctttgctctaatgcagaaggaggaaacattctctgggcaggttaaattaatggaatggattctgcaaataaataatgttacagttcgtagtag

SEQ ID NO: 380920 - DNA, 221 bp, Zea mays
cacacgcgtccgcgtgtgtgtgggatccatgagcgcgacaattccgggtccggggacagcatggagtagggacggggaaggtccaccaccaggacgaagggcaagagaggcggcggcggctccgacaagccgaggcagccgcagcgagggctcggcgttgcgcacgtggagaagatcaggatccagagcgagatggcggattacttgcaccaccctcttgc

SEQ ID NO: 380921 - DNA, 176 bp, Zea mays
cagcgcccgcactccgcctccgcttccctccgccttcgactctcgaccgcatctgagcactcgcgccggaggtccgcctccgcaggcaccgccacgccatgtcgaagcccgcagatcagcagccgtcggacatgcaggtcgactcctccgtcgccgaggagaaaccggccataaga

SEQ ID NO: 380922 - DNA, 289 bp, Zea mays
gtgacgaggaagataggcaaggcgaggagagagattcaatatctgatagcgagtcattaggatcggaatcagatgaagatttgagcaccggggattcttcttcagttgacaatgaggttgttgctgattacatggagggtattggtgggagtgacgagctgttgagcagtaagtggatcactagtatgaatttgggtgatgcagatactatagagcagatgtatacaaatgacaatgatgggtttgtgaagaaggggaaggaaaagcttgagggttatgcactaatgac

SEQ ID NO: 380923 - DNA, 266 bp, Zea mays
cggacggtgggtcgattttgcagttcaacggcgaccggctgaccgccatctgccgggattggtccggcgtgcaccttcttgccatctctggcgctgctgcagggcgcccaaccagcagccagtgcccactggtggggcacccgtgtgagtgctgtacgccaatttttgcaatggagagggtcacggtcgtcagacgggcgcgtgagggcggaccgacgacgaaggaattttctcctttacgtacttaatagtagtacagatggtct

SEQ ID NO: 380924 - DNA, 272 bp, Zea mays
cccacgcgtccgccgttctccttttccgcctcctcgacgcaactcgtcgccgtcttctccaactcgcacctcgttcctcgccccaccatttgccgctcccgcctacgatgccgacgagtgaggtgtggagcttgtccgattttgaaatcagcaagtacatcgctgagggcaggttcggcaaggtctacctcgcccgcgagaagcaggtctgcccaatcagccccttccaattctcttgatttaccccaaaatatcgcatacatggaagttaa

SEQ ID NO: 380925 - DNA, 258 bp, Zea mays
ggaagagcgacgtgtacagcttcggcgtgctgctgctcgagctcctcacggggcgggaggccatatgcgccgacacggggtgccgcctcgccgccgcggtgggtcctacgctcagcgaaggagaagtggccgacgtggtggaccggaggctcggagacgagtacgatgcccatgaggccgcgaccgtggcggcgcttgcgctgcggtgcgtcacgagggctccgggatgcgcccctccatgacggaagtggttcgcgt

SEQ ID NO: 380926 - DNA, 222 bp, Zea mays
cccacgcgtccgccaagtaccagcaccactgaccaccaagccaccaatcatggccgccactttgcatctccacctcctcgtgacccttcttttcgtcgccactctcaccgtggcctctgttgccgacgactcgccgccggcacccacaccaccggcaccgccgcagccgaccgcgtaccagatgctggagcggtacaacttcacgcagggcatcctgccgca

SEQ ID NO: 380927 - DNA, 228 bp, Zea mays
gcagtagacggtgaaggtgaatctgtgctgcatattgctgtggccatgagttttattttttgtgctattgttatactggaaaatggaggctgcagatcgatgggcatatcaaattctcaacatagaacgccattgcatttatgtattgagacatggaacacagctgtggtaagaagatgggttgaagttgcatctttagacggtatagcaggatacgattgatgtacc

SEQ ID NO: 380928 - DNA, 252 bp, Zea mays
ggtgatcgggcgcggcggctccggcgtggtgtaccgcggcgtgctccccgacgggcgcaccgtggcggtgaagaagctcgcgaggccgcgcgacgacggcgacggcgacggcgactgcgagcgcgagtttcgcgccgagatggaggtgctcgccgaccggatggtgtcgtcgtgggcgcacccgaacctggtgacgctggacgggtggtgtctgtactggtcggtctaactcttgttgtacgatcacctgga

SEQ ID NO: 380929 - DNA, 293 bp, Zea mays
cggacggtgggacactggttaattcttcaattcatgattttcagtgggagcaagagttacagttagaaattactggctttattattggagactatgtcagaggtcttaaggatgaactagagaggaagttgtatgagcaaagctccattgtgaacagtctaagaaaaaaatcgcaagacactgtggctcagtgtgcttccatccgtgaagacctgattgctatttctaatatgctattaccttcagaagaggaacaccatattcctctgtgtagacatgaaagtttgggtaat

SEQ ID NO: 380930 - DNA, 286 bp, Zea mays
ggcaaacgggcctgaaggagcttggggacacgcccatcgagttccttggcgtgccgccgatcccggcgtcgcacatcatcagggagatgctcgaggacgcggaggacgaggtgcgcacggccatggcgaagatctggaagcgcgacacggacacccggggcgtcctcatcaacaccttctactcgctggaggcccaggccctgcaggcgttcagggacccgctgtgcgtccctggcaaagtgttgcctcctgtttaccccatcgggccgttggttggcaagggcgg

SEQ ID NO: 380931 - DNA, 279 bp, Zea mays
ccgagactgacctctgcatccatccatggcgaccaagagcagcgtcaccggcaatgccgccgctaagttttcggcgccaaaagcagccgatgagcaggtgtgcacgctcctctccaagcggctccagcgcgtgtcgtgccactgcctccgcatcgccgcggcggtcctcgtcgtctacagtttcgccgtcacggcgtggcgcgtgcgtcaccagccgcaggacctggccttcgtcgctgccgccttatttctccttgccgagctccaggcgtgcctccg

SEQ ID NO: 380932 - DNA, 288 bp, Zea mays
attccggcctggcagctgaatcgtgactcaattcctgacgaatttctcgtggattccgtggagaaaaagtgtgacctttccgatgcagtacaaccaccgcagccgcttgccgccgccgccgctgccgttcggccgcggagggcatcctcgcggccacaagcagccatgctacgctccgcttcctccgccaccgtttcctccggcgccgccgccgtcgctagagcgcaagtacgaggtgcttatggaggccggtcgcctcgccaccgagtatctggtcgcccagggcgt

SEQ ID NO: 380933 - DNA, 221 bp, Zea mays
cggacggtgggcgagacgcgtgggcggacgcgtggggtgtcgtatcccaagcgcaaccgcaagcaggcgcacgcacccgcagcacggcgcccgatctgcgcgtgcagtccaacggcaagcctggcggcggcttcgacgccggcgagaagcgctcccaggagcgccaccgagcgctgcaacagcagctcgcctccagggctgcctacctcgacgacgcacgg

SEQ ID NO: 380934 - DNA, 278 bp, Zea mays
aactcaggccctggaagtatagatttagaaggaaaggatgaacgggtgcctttaccggtcagacaaaatttgatcccacccccacacggctttgtggaggatcaaggaagaatctaccagatgccagttgtaggaacaaagagaaaggaacctgatggcagctgggactcagaaaggtctacatacaagcaattatcatggcaatgatggctctgaagatcgttctgcactggactggtacctgcatgtagaacttgggcggtgtgttcttcagtcac

SEQ ID NO: 380935 - DNA, 281 bp, Zea mays
gttccgggcgaagactagctataggattgttgagcctgctcatatggccagcagggaggaaggagagctgcaggggagcgagaaggaggagagctgcggggagggaggagagctgctgacggctgagagggagatagatatttgtgctggagctagcggagcctactataaaggatgcttttggaaaatgtgtgcaacaaggagcatcccgagttattatcagtccatatttcctttcccctggacgacactggaagcaagacattcctgctttagcagca

SEQ ID NO: 380936 - DNA, 289 bp, Zea mays
cccacacgtccgcccacgcgtccgcccttttttttttttttttttttttttttttagaaaaaagacaaaatcatcataaccaagataagaatagcattcgcaaaacatttacagcaggtgaaaaacactgatattatcaacattaagcacgcaacatctgtttcctcgcaggtatgggtgaccagacactagaacagctcccatagacagctgaatctttgatttacatcgaacagtgtttacttatatatggagtcggggcacgaatacatattttcttcctgtatgt

SEQ ID NO: 380937 - DNA, 272 bp, Zea mays
gcagattttgaggttcggacaagggcagtaactacacggaactacattgactccaaggaagatattctggtctatgctacaaagttgattaaagctgaaatgcctatttctttgagattgatggggttgcggatgtctcagctacatgatgagaaggacgatccatccacttcaacacaaaagacactagatatattctttcgctcatcaaacagtaactcaaatggtaatggaaccactgttcagagaatcactaatgccccagggcagga

SEQ ID NO: 380938 - DNA, 292 bp, Zea mays
gtacggtccggaatccgggtcaccacggccgggacctggccttcctgtcctgccttctcttctctcgccttctcctcctctcagcacagcagcatctgtgaccacatcaccacacacacacacatatatacttggtcatcatccagcttccagcagtcagctgcccgccgattaacgtgtatgcggttcaaagggaaatctgctgatggatatggcgcacgatagatcagacgccagcagcgaggaggaggtgatggccggctagctgcggcgcggtgtctcgacggttgag

SEQ ID NO: 380939 - DNA, 268 bp, Zea mays
gctttttcgaaattcctggacgctgttaggttgttggtatggcctgtacaacccaattatctgcaggtgcaattgtcagcgttgatatatactctttgctatactgaatcaagaaattgcacgaaggaattgttagcctgactagtataatcatacggtggatggagttttaatgttcattcgaattcattgggtcctgcatgaccgtgttgtatatgggacatcttgttaaaatgatcagttcagctttgtaaactatcaggtgtga

SEQ ID NO: 380940 - DNA, 212 bp, Zea mays
cggacgctgggcggacgcgtggggaaataaataaaggtgcccaaatactagatgttttgcgttgaaatctaacttgtgctggagttggatctgttacgtcccaattttttttgttcattgttgtgagcatggggacacgtgcaggaatgtcttcgtgtctttttacccaacccaatggacactatgttctgcaaaaaaaaaatagatcgcga

SEQ ID NO: 380941 - DNA, 273 bp, Zea mays
atagaaaagacagcttgattgcacggagtacctccaagagaaataaaacaacagtaaaatcccaagggcagagtagaactacagaggatatctttgtatatggaggctacatgtgaacaagaaaggagaggaggaagactgtagatctgaagaacctaaggagaaacaatcagagtacttgctggaacacatatatcttccatgataaaagttagatttcttgtttggtgctcatgcatgggttccatatgttcttcccgtcttattagaaca

SEQ ID NO: 380942 - DNA, 280 bp, Zea mays
cccacgcgtccgaagacgccaaggtggattccagcgagcccgtcgtggcatcttctggtgccctgcagcatctcatcgccaactacctcaacggcaccctcacaaacctctcggccgccttccaggagtcgagcgagtacatctcagggacgctgggagtcccgcccacatacgtctatagcggcctcgctgcccttgtggcccttcccatcaccatgtcgcgattcggctggtcgctcaaccgtgagcagagcttcggcgccatgcccggcggcgtgcg

SEQ ID NO: 380943 - DNA, 282 bp, Zea mays
cccacgcgtccgatggaaccaagcgagcagcagtatagccgggcgagcagactgttctctagcaacagtggcagccggccatccagcgcccagagagtcaaccctgcgccgggcgagtctagggccacctccctttcgcgggcagcggtcgcgagaggctcccgcgacgagccactccaccgcagcctggagctcctttcccttggcagcggcaagaggaaatagcgggaaggaagccgatctgatagcgggagggacaagaatgcctgttggcgactctgt

SEQ ID NO: 380944 - DNA, 270 bp, Zea mays
ctagttcctagatcgcgagcggccgtcctttttttttttttttttttgggcagagcaggagagttctattatttcatagttcaggttttgcttaattcctctccgagtcacaacacttctcatatatgccttacaaccccacggcaactggcccacacacagtccaacccgagacaacacgttacatccactcgggattagacacacggggattcttgcgacgaatacggcgcccgcgtccttcagttacaatgtcttcctgttgcttgt

SEQ ID NO: 380945 - DNA, 273 bp, Zea mays
  unsure (1)..(273): unsure at all n locations
cggacggtggncgtgacgcgtgggtgcgtcttcagcggcctcatcacggagttcacctccgacgaagccaccaccacgactggtgctgccgctgctcgccgagctgggcaagtccatcggcgtgcacccgctgcttctcatggtccccggcaccgtcggcgcgcactgtcgttcctgctgcccaccgcgacgccggggaacgtcgtcgggttcggcaccgggtacatcaccatcagggacatggtggtcactggcatgccaatcaaactcgtc

SEQ ID NO: 380946 - DNA, 265 bp, Zea mays
cggacgcgtggcggacgcgtgggcaagtacagaaagagcaaaaagatgagagatctttggatgagacacttagttttaataatggggatggaggttcaggaggcaggaaagctaccaagagtaagaaaaagaataaaaggaaggatcatgttgagaaccccccaaaagctgactctgagcctgtaaatgcgaatccttatgcaagatgatgccgagtacccttttgaagatgctgacctcgatgatggacttgatcctgcaatga

SEQ ID NO: 380947 - DNA, 268 bp, Zea mays
cggacgcgtggatcgcggtcgatcgagcgcacaagctgtcaaaaaaaatctgaacacaagcagggccgggttcgcaggcgcgcgtcgccgttgacagcaactagcatatatagctagagctagctcgatcgatctgctgtgcttacaccaccagtccaccgcttctcttgctttgccggtgtcgtcggccagcgcgcgcgctagcgctatccgatccgatccggccggccggcgacctaccgatggggttcatggacgccgaggagct

SEQ ID NO: 380948 - DNA, 258 bp, Zea mays
accgaagctattttagatgaagctgtttctcgactgttgaacgaagctgcggaagcagttttggaagaatagttattattgtaaaacatttggaatgtaatatttgctgaacaaagtgtgtaatatttttataactttgaatgtaatatataagttgcttgtaaaaaaaaaaaaaaaaaaaaaaaaaaaaaaaaaaaaaagaaaaaaaaaaaataaaaaaaagatagaatcgtctacgacaaagagggtgacgtctta

SEQ ID NO: 380949 - DNA, 256 bp, Zea mays
cctggtttgcccagccctgcgcgctctgctcgcccatggagtttgccgagctccatctctgctcggccgtgcctaccgagtctcccatggccgcgccctaggatttgccggagtctgcttccctcgccgcgctgctctctagccgtgcgcagttctttctcatggcacgactgccctgctctgcatggcacgactgccctgctctgcttgacggacgcgcagtcgcctagctcacggagcttccttgccgtggccg

SEQ ID NO: 380950 - DNA, 262 bp, Zea mays
caagtggctactaggtccccatactgtcaacctcatatggatattatgcatgaaagaactgcagctgaggcaaccctgatggatccacttccggtaagagatcaccgagcactgccaggagagcttgctgcacggtctgaacgcgtggatgagctgtaccgttcttacaaactctctacacgcgggatggacttcaatccgggagcatcctaccagacaacttatcacccgtctagtagtgtttatggtgaaggcattcaga

SEQ ID NO: 380951 - DNA, 262 bp, Zea mays
ttctagatcgcgagcagccgccctttttttttttttttgtgcgtaacaactttcatatttataccccccaaccagacaaatcaagaaatcaggcctttgtgcgacctactatcccacctttgtacccccatggcaaatgaatacaatcaaatggagatgtacaagtatgcaagcccccccccctctcgggtcacacatacgggctggcaattctctgctccctgcttcgttttccagcggccacgcacgcggtcgggttgcg

SEQ ID NO: 380952 - DNA, 247 bp, Zea mays
  unsure (1)..(247): unsure at all n locations
gccacgcgtccgaacacacatccaacacggtccgggacgctggcgacctggcancgccctagcgcacgtcttcgtcggtcccaccccagccttcgtcgcgtcctacgccgtcgaagagaacaaacgacgaattcaaggaaacacttgcaggactgaagaatagagaaacatgtcgtctggtggtgtgaaagatttttaccggcagaaaaagaaaggaggcgtggcgaagacagcttcatcctcaaag

SEQ ID NO: 380953 - DNA, 249 bp, Zea mays
tgaacacgtcggtctttgttttctacaggcatctgactggtatcctcttcttggtgcctattgcttttgtgcttgagaggaaaactgcccctccactgtcattcagagtctctctgaaattgtttttccatgcactatacgggatctctggagcaataaacatatacggcctcggtctcagctattcttcagcaacatcatcgtctgcgatatttaacctcctgccagctgtggctttctttctggctg

SEQ ID NO: 380954 - DNA, 264 bp, Zea mays
ccagcgtccgcacgatccgcccaccgtgccgggggccgcagggcggtgacacgagcgcgttcttcgcggcgaacctagtgctctgggctgtgtctgtggggttcgagatcgagcgtccgggggcgacgcgagctggcgcccgtggccgccggcttcgccttcttccaggccgccaacgccgcggtccgcgctcggtctcacgcgacccgcgcttcgtcaacaccgccgtatcgctcctccactcctccctcacatccggctccg

SEQ ID NO: 380955 - DNA, 270 bp, Zea mays
caaaacagcaaaaccaaagcgctcagccgctcgcgaggagcgaaaggcgagcgcgcaccgtggcgcccgtggcggaggcgaaacccccgccgccgcatcgccctgagaccctccggttcggcccgggccgaactctagcccgcgcaatctcgccgccggcgtgcttgatctgatccaaggccaccgcgcgccggcgagagcagcgaggtatggggagcgtggacggccgcggggtcgaggggatccacgatactaatcggcgcgcgcagt

SEQ ID NO: 380956 - DNA, 265 bp, Zea mays
cccacgcgtccgactagttctagatcgcaaacagccgccctttttttttttttttggtttcatgatgatcctctgcaacttgtgcaaggtagggaatagaaataccgatctcgagattgagggagatgtaagggcgtctgggaacagctcattaacacaatggctacggtgaatgaatcgaatgagcgaggatgtattttgagaacaaccaggcgtcatgaaacgacagtttgttcaataaatttgtattccacccctgtaacga

SEQ ID NO: 380957 - DNA, 290 bp, Zea mays
acacacgcgtccgcggacgctgggcaattccagcttcatcaccaagtctcaaactttcaacaatcttctacgccacatagataccagcaatctctcaaaatgtccgtcttcaatggaacctacaatatccgcagcgccctgtcccagcgcaagcctgttgatctcgaggcctccaaccctaccggccgtctgatcgaatacacattccacggcggccccaaccagcaatggcgcttcgctcacgtccataatgacgagtttagcattcaaaatgttgccaccggcaccta

SEQ ID NO: 380958 - DNA, 305 bp, Zea mays
cggtcggaatccgggtcgaccacgcgacgacacacaacgacacgcgtccgcgacgctggcgacgtgggtttttttaatttttttttttaaacgacgcaacagtatatgacctacgaaaacgcacacccgccaccatggcatgcacgcacgtcggccggtggcagggcacagctacacaaaagaagaaagagcaacgccacacacgcacgcacacatacggatcgatcaatacaaccaaaaatcaacaacgaagagcgatcgacggcacgatctggacagacacgtgtacaggttttatttttttt

SEQ ID NO: 380959 - DNA, 290 bp, Zea mays
ctccgattcggccgtcgtagcgtatagccgaattgccccactccaggactctcgccagcttctccggccgactagaggctgtatccggcgagtgctcggctgatctcctccgcgcggctgaggagatcacgcggtctcgctcgggggggctggggcgtgcatgatgggactttggttgattccgacgatggagactccggcgaggcttctgtggagcaccagcttcttccgccacaaaatcgccgacatgcttgcatccaaatctattcctagggcacatcgatcgagct

SEQ ID NO: 380960 - DNA, 265 bp, Zea mays
gcattccattccatccagtaccttccttgtcaccttgacctaccccctctcccttcctagtcccctaccccctactcgccagtccacatgacctcgaccccgctaagcaagctccaagagcgatcgccgcagaagatcccgcgatgcaggccccgccggcgccctcctccgtcgacctgccgctggcgttggcgccgccgccggtgagaggctccgaccccgcggcccccgctggctgcctcgctgcagcccgaatccccggggg

SEQ ID NO: 380961 - DNA, 253 bp, Zea mays
agaacttgaacatgtataccattataaagtgaatttattatgtttaaaacaataacaaatcacaattcacaattacatgtacatatcataattatatctacatactaccagttggtctaagtcgtgcttaatcgtgacaatcatctaatcgtgtcgtgcttgtactaggcaagcatagtactagacccgtgtcgtaccagcattggcactatatggatcgtgcccgtgcgccgaagcactaaaggcaatggtg

SEQ ID NO: 380962 - DNA, 284 bp, Zea mays
cggacgcgtgggcggacgcgtgggtttttttttttttttactaccaataatcaatcgacctataaaattgagcaggaatctttgacgacaaacattatacacatgacacatacaggaagtagttttaggttcatggtcttcacaagtagactctgtggtcagaatcatctgtgctatgtctccagataacctgttcatcaatttttgagagcttttcatcatctagcagcttccaagtcgagatcgagtcaacttccaaccacgacctctgcccctttttgagt

SEQ ID NO: 380963 - DNA, 272 bp, Zea mays
ccagcagctgccaggagtagtggtttctcttgcatccgcttcagggctcgcttcttgatctgtggcgccaaggcggcgagagcggcttgcccggccggggagagagtgactgagtgagagctgcgaggacgacactcggaggtcggtcgaggagaggccaacgatcgaggaagatgtgcatggacggcgccgtgccggtgaagagggtctggctcggcatcgccgcgcgcctcggcctccgccgaaagaccggcctgaggaagctgaggaag

SEQ ID NO: 380964 - DNA, 273 bp, Zea mays
catgcccttccttccttccttccccacacaccatctctctttcacatgaggatttctttcccttctttctttcccacaaatattcccaaagaatcttctgtgttgcttctctcctcggattcctcttcccctcctcgcctcccactccaattattcctctccttactgacttgcttcgcttctctgttatctctgtcctctcctcgtgtttgttcttcctaccagcggagcgcgagctacgcgctgtgcctcgtgcctagacgaacggcatag

SEQ ID NO: 380965 - DNA, 280 bp, Zea mays
gtcttcgtgacaataaccaaccgactgagcgatcatggcgtctctgctcggtctgtacaccagcggcagcgcccggggcaggagggtccacgccgccaggagcagtggccgccgccagtcggctgcgccgttgaagcagcagctgtcgaggttgaggtgctcctggaggagacgcgcggcgcggccgaggcgcacgcggtcaggttcgggtatgacctgcatagctactcccagaacttcgacgatggcgttgcctagtcagccgggcggccaggactag

SEQ ID NO: 380966 - DNA, 279 bp, Zea mays
aaatagtagtggttgattgtgtaattccagagatataaacgaatatctctagagatctgcctcgtcaatagctgcagtatttgctagccacatatatatacacagttccacacgtagttataacagaagagagaaggaaagagagaggcagagttactgcaaaccatcagtagttctatgattttatttttgccgttttgttgctgtttatcatggtgtttgattgtagggtggaggagaggtgaaagctgacagaagagagtgagcacacatggtgcc

SEQ ID NO: 380967 - DNA, 276 bp, Zea mays
gacaatagaagtagatggaggcaaaatatcagtcaaattttctctgctaccaccaccacggcaccgcaccaccggcggctgtagactgtagcacgagagagaaatctgtagcccagcagctcgtcaggcatggcagccgtcgtggcgctgactccggcctatccagcgttcctccatgtccccttccgcgtccgccgcgacggccgggtgcgcctctcgccccgccgcccccgctactccgcggggcgctgcagagccatggcccagaccttccag

SEQ ID NO: 380968 - DNA, 265 bp, Zea mays
caaaaaggtagcttcttggtccccacgtcattttttttttgtttccttaaaaatggccatcctcagcattcatgttatgatgggggaccaaaatggaacaaattgtctgacctttcccagcattccagttagtcgagaaacagattgtgtgaatttcgatggtttgtttgccaggtggggttcttctccggtcgcaagaaggagagcatcttcaagtcaccggacgaccacagaggtaaggtgggtgtcactgggagtggcaaag

SEQ ID NO: 380969 - DNA, 119 bp, Zea mays
agtacctgagttttaacagccgccggtgtttctgcttgaccttgtaattttgactcataagaagtctggacagatagcttatatttctttgtgtatccaaagcacgcacgtacttcgtc

SEQ ID NO: 380970 - DNA, 254 bp, Zea mays
ggtgtattctattttttagtactctgtcaaagaaccatgaagagtgaaacataagtatttggtatgttaagatgtctaggcctgcagtcccctttgtacttgtcatactgtttttttctgtctagaactggcacaaccaaccgagaaggcaggccgcagcgtagctgcctacatgcatatttttttcacatccttatcaccgttgaaatgtttcgttgcagactttgggttggtgaggcattaggaaagaaaag

SEQ ID NO: 380971 - DNA, 277 bp, Zea mays
cccacgcgtccgcacgagctcgcgtgtgcccctcgcgctccgccgccaccaccttctactaccataccgctgcgtcgccgcccggaccacgcccgccaccaaggcctctcctccgcctcgtccccatcacgggcgcggcccctcgacctcggtggccggccggttcgacaccgcaccgtgaccctcggctacggaggaagaagacggagtggtggactgggccatagaaccatgtcaagttccataatttcaacagtggccacagagttgtcggtgg

SEQ ID NO: 380972 - DNA, 267 bp, Zea mays
aaatcgtacgtagagaggcgtagagctagcaagctgtagctagctaggagctagcgatcgagctcaattcgttttcagtcgagctcgtcggcaatcgacgatcagtagtccgttaggacaacaatccatggcgaacgcgggcatgaggccggtggccggcctcctcctggtgctcaacttctgcatgtacatcatcgtggcggcggtgggcggctgggccatcaaccacgccatcaactacggcttcttcatcggcgccggcctgca

SEQ ID NO: 380973 - DNA, 254 bp, Zea mays
aaaatctcgaggcctgcctcctaccgcgcttcaagtggtcaagctctcgcgggtgcagatcagggttttggtcagtgccgctgcggcttcaatccatactggagtgcttaatcgatcttatgccgaagacctcgaagatgacgtttatcctgcctttaatgagctccaatttcccccagaaggactttttatgcgccttggagcatgctctccgaaagatggtgcgcactaacgcctgggaagctggcgattca

SEQ ID NO: 380974 - DNA, 271 bp, Zea mays
catttctcccctcgattctccgggctgatccggtcgctgtccgggcctgttcgattggaggagaatcgcctggtttgaaggaaaggcttgggaagaaaggtaattatcactgtatctgacatggatgagcacatgggaagacgaacagtcggcggcctcctcttcaccaagggaggatccatccttctcttcagagaagacggctcgcgccccaaggccaagaactgctgcacgcgccatggctgtagcggtcagcatcctgctgacagag

SEQ ID NO: 380975 - DNA, 253 bp, Zea mays
  unsure (1)..(253): unsure at all n locations
gagaggatacacatagacaggcaagattaacgaacagctaggatggaacagaataagaactatgaaaatttccctcaatcaggagagctcaaggataagatgagcaagcaagaggagaagagcagcaagtattaagagattcagcacnacactagatcagagaagacatcagttctccatattcagcttaggaaatagataagggcaacctcgaggacagatgaatattttatgacaaattccacagataccc

SEQ ID NO: 380976 - DNA, 275 bp, Zea mays
ctatcactagagaagtgtgctaaaaaaagaactgattttatatagagagaaccactgttgtgaaaaagcaaactttaggtgcaaatctagtactgaacaccatcagttattttctaggcttacaggaacgctgacaaggcttgtattagaagcaagaggctctaagaaggtactacctcaaacaacttctgtatcagatagacaagttacaccgtgtgtaccttaaaaatctagtactggacaccatcaggtattttcttttctttcgaatacac

SEQ ID NO: 380977 - DNA, 223 bp, Zea mays
ctcatgcttggcctgccgggctcggaggaggaggaggccgaggagtcccagatcaaggcgccgccgccgccgctgtcgacgcccagaggctagaagctcgacgtcgtcgccatcagcgggcccgaggatgcgtctaagaagcgcgactgcgagaccgacaccgttgctgcgccgccgctggccgccatggctcagctggttggatggccgccggtgaggtcgt

SEQ ID NO: 380978 - DNA, 278 bp, Zea mays
gaccgtctgatatgagactggcggtccggattgctagcctcggcgatcacattttcctgctgccgttccacatgcgaggagctaatccgacggtcggcttgctgtcagtgtgaggctttcagattccttcggtttggttgaatggataatatacttgcgttgacgcgtgagtaccaatgagataagatggtgttcgagcatccaccgtagttgttacaacttgaaattgggatatttgcaatgctctctctctctttctttggttggaccttttttta

SEQ ID NO: 380979 - DNA, 264 bp, Zea mays
tttttattttttttttttttttttttttttttttttttgattcacatcatatagggctacaacgtttccagattcacggtgcaactgtgcaaggatacagcatttccgaactcgtttggaataacaattttgtagcttccgctgacgccaaatcttcgagcccactcttgacacacattgaggtacagagcacgctggatgctgttctgcaaacaagcagcaaaatcccacaatccaacagttgaaattacataaggctagtac

SEQ ID NO: 380980 - DNA, 264 bp, Zea mays
gactctagcaaacgtcggcagaggagcacccccagtgctacgtccactccggtagaagatgaacgattcaggctaggtgatctcgatgggacaaagaaaagaattcgggatgtctctttgccaaggtaggatcacgatcctcttgtcacagtcccctttagatatctgggagaatctaagcggcaactacataacgcctgaaggtggcgacgattaaggggtccggctctggtaacgtccgttgcaagcggaacaacgggttat

SEQ ID NO: 380981 - DNA, 253 bp, Zea mays
cagaaacctgagtccattgccatttacagcgtctcgtctcgctgtatcgttcggtcttcgacgcctttcccctcttcgtcgatctcaccaccgcgctgaccccgatggcctccgccgtctcatcggctgccgccgctggcatatcgctgttccatgggttccgcacgttcctcaaaaagccgttggagatcactggcccctgcgcctcgaccgagtatcgcaacgcgctgcctggcgcgctcgattaccgcgt

SEQ ID NO: 380982 - DNA, 194 bp, Zea mays
ctcactcttctgtctacgtgttcgttgacgcgtgggttcgcccggcaactcctcatctctgaggccacaactgccaacaatccaatggctctcgtccgccagtgccgccagctgctgcacctgaccctccctctggatctcttctccctgcgtgtgctcaccgtagcctcagtccaccgctgcgttgtccatct

SEQ ID NO: 380983 - DNA, 301 bp, Zea mays
agaggacatgcgagcccgtggttaaagaagggtgtgtcactcaatgcaagacagtctgcactacaggcacatacattggttgcacttcgccttcttctccttgatgagaatgcatgcccatggcgctcctgcttctctttgggtacctagtacttcatattgtttgcggcagaataaaaggtgagtgcaagcaaccagcaggcctcttccccatacacacactgcaggctatagctgaccggcagcgcgaggggaggaagcatgcaataagctttcatgatgatctatctacgtactagct

SEQ ID NO: 380984 - DNA, 294 bp, Zea mays
aaccgccccgcccccaagcgcggacggtagtccagtcctccaagtccatgaaatgcgcgctagatccaacgagcggtgaagtgactctgatcttccaagatgctccgccgagcaagggttccctgcgccgcggcgcctgcactcgcgccctcagtcgtcgtggcgtttgcgctcctgtccctcagcgccgttgccgccgccgacttcttctctcctctcgcccccatcttctcccccgtcatcatctccatatgcagcacggtggcctgcgtgcagggcaactgcactgtggcg

SEQ ID NO: 380985 - DNA, 293 bp, Zea mays
  unsure (1)..(293): unsure at all n locations
gccacgcgtccggccacgcgtccgcggacgcgtgggcgagcgtgggctctctctctcctttctcgacgacgactgggccaccgtcgctgccgcctgccgccctacgccaggtgccaagcagccaggtgttcttggggcccttcgccggcgacgagcaccaccagctgaaatatggcgaggataccgtctctgaagagcctcaatgcgtttccacatgcggaagagcacttgttgaagaagacttactctggcgctgttgtgacaatttntgggctacttataatgattacact

SEQ ID NO: 380986 - DNA, 152 bp, Zea mays
atacgtctctatggaaattaaaatatttgaaaggtcttaattgcttctctgactgttcctagaactgtctgaaacaattaagacctttcaaatattttaatttatacgtctctatggaaattgtcttatttccattgagatgtttgcccctc

SEQ ID NO: 380987 - DNA, 288 bp, Zea mays
ctgtcctcgagcttttacttgtacactggctagagctagcaaggttgaagcaacgatatgatggcgacctctaagctcgctgtcctcgctctgtttgccctgctcggctccgtgtcatgccaggccggaggtactacgactactactaccctaccccgcagcgacctccaacaccaagccctgcagggacgcacctcaaggtcggatactacaggaacaagtgtgccgccgcttacgtggatgtggaggccattgtcaagaagcacgtcaaggccactgatgctggca

SEQ ID NO: 380988 - DNA, 285 bp, Zea mays
gtcgaaaggggaaaaatgagttaaacccaaatcgacaccaaacccactccaggaacacccgcctccgccgccgccgccgccatcgccggcggccactacaagcgcggcgtccggagacagtactgcgctaccaacccctagagcctggattctgatgagccctccatggcctgtcatatctgtcccctcttcaatctccgactcttgctgctgctcggcgcggttctcgggaacggcggcctcggccggggcggcggacggaggcttcagatcgggcggaccgga

SEQ ID NO: 380989 - DNA, 286 bp, Zea mays
ctttgcaggtagagcatgtgttgtctccagaaggttctgaccgtgaaaatctatggcaaaattgcaggatggatattagcaggtgtagctcaaaacagcttgaagttcttcaaggttgcagtggaatcttatgtgtctcttgtgtttaattgtgtcacttaggcctgcatcttgcaactcagtatactgaggataaggaattttcaggtttcaggaaagcgctgcttgatgctataaatgaattcaagaagagaagggactggggtatgttcattgactcctgctt

SEQ ID NO: 380990 - DNA, 218 bp, Zea mays
aaatgatgaattacgacatctttataatcatttcctgctagaatcagcagaatggaaattcaaatgcacctttctgtttagacgaaattcaaatacagaaacctgacagtgagaacaaatatccttatgcataacaacggtagtgccagtgtgccattatacaggaacattgcactaatccttcctcagttcaatgcactctcggtgtgtgccaaagc

SEQ ID NO: 380991 - DNA, 286 bp, Zea mays
ggcaagcaaggggatcgaagcggagagcaagggagcggtcgagcgggtgacatcatcgtcatccagggtttctcaaacggcagcgatggcgaccagggcggcggcgaggttcctgcagcgcggtttctgtcttctggcggtaaggtcctcagcgaggaggagaaggccgccgagaacgtgtacatcaagaaagtggaacaagagaagctggagaagctcgcacgcaaggcagcaatgctaccatgaacactgatgtacagcccaatattggaagcattgctaacgg

SEQ ID NO: 380992 - DNA, 231 bp, Zea mays
cttctcttgatcgaggcagggatcaagcgaccgatacccgccatggaccttgcacggagcggcggtgccgctgccgcggacgacttgggggagatcgagaggcacgatccggcgcccgatgacatggagtccgaccccgcggctgcgcgcgagaatgagctggatctggatcgtgtgcagccgtggcgggagcatgtgactctgcgcggcgtggtttctgcgctgctgatc

SEQ ID NO: 380993 - DNA, 269 bp, Zea mays
cggacgctgggcggacgcgtgggtgccaacaaccaggtcgaaaggacatctgaccggcagcaggcagacataccgtcgtccgccatggagtcctcatggctcctcctgctctcgtgccttccggccgtatgggtgcttgccgcggcggcggggcggagtcccggctgcgcgacgaggtgcggcgagatcgacgtcccgtacccgttcggcctggacccgcagtgcgcgatccacgccggcttttggctcaactgcaccaccgtggatgg

SEQ ID NO: 380994 - DNA, 269 bp, Zea mays
ctgagcatagcaaacataaatcaaaatgggcataatttttcttacatgtatttctgcatgtggttgttcaacttatatggttcttaagatcctaacactgagtaaataagtcggaagtgcttatttgttcaacttatgtaagtgtttgtacagtatgaggatacgagcaatggctggctattggctaaatccagaccatgttacattcattagtgtactcaccgcgtactcacacacgcaggggaagttgagatgaatctatgatacct

SEQ ID NO: 380995 - DNA, 266 bp, Zea mays
ggacgggggcggacgcgtgggcggacgcgtgggcggacgcgtgggcggacgcgtgggcggacgcgtgggcggaggaggatgcctcggtgtacgcctacgacgagaggtacgacgaaaagaaagagaaggaagcccgccctaagatgcaggataaggtcgtccgcgagtcaaagtatattgcacaacttaaggaaaaagcagagctacgcaaacgagaacaagatataatatacgagaggaagcttcagaaagagagaagcaaggag

SEQ ID NO: 380996 - DNA, 268 bp, Zea mays
ggagtgccgctgccgaggcgaagggtgggtctggacctggtcctggacgcccgagcggtggttcagcccagaatggcacatcggctaaaggaagagtgcctgttctgatcaacggctcttacgcgaacgcgaattccgcggatgccggagatggcaacggaatgagagcgagtgcaaggaatgctgccggctccacgcaccaattgagaagcggaactgcagctttaggcaataccgctgctgtttcatcccttaatcagactgcgag

SEQ ID NO: 380997 - DNA, 128 bp, Zea mays
ctcacgcgtccgcggacgcgtgggcgggcgcgtcggtgcgcgttgtgcagctggacagcgccttccccatcggcagctgcatcaacggcacggtgcatccaggaccctgcgttcgtggacttcttcac

SEQ ID NO: 380998 - DNA, 266 bp, Zea mays
gcgggatctaagctgaggaaaatccggtccaagtcccacgtcataacgcagtcggaaatactgaagctcatctctcctgagacgtgggaagcctcctccttccctggggcgtctccgatgatcggcggaggcacggctgaggacggcgtccatgggaacaagccgccgccgccgtgctgctcgtctgtgagctcaaaccagcatgttctgtcacggtgcccgtcgtccctcagcgcatgccttctacagtgcatatggaaggatgg

SEQ ID NO: 380999 - DNA, 224 bp, Zea mays
ggagaaacaggtgaaacaaatgttggggctcattggcgatggagagttctctacagaaaaagctgaggtgttctatgagaagcgacctttacttatttctcatgtggagaacttctatcgtatgtatcgtgctcttgctgcacgatatgacagtgtaactgaacaactggggcaaaacattcccatcatctcttccatccataatggcccattgggggcccctg

SEQ ID NO: 381000 - DNA, 255 bp, Zea mays
gaggcctgtgcgagtccttcttcgcgtacaaccgcgccaaagggacgctctacgacggcgagacgcggctgttcctacggggcaacgggaagccggtgtacatgtacagcatgggaggccttgcggagtactgcgtggtgccagccaacgcgctggcggtcctccccgcctcgctgccgtacacggagtcggcgatcctggggtgcgcggtgttcaccgcgtacggcgccctgaggcacgccgccgagatgcggg

SEQ ID NO: 381001 - DNA, 199 bp, Zea mays
gtccgtccctggtcctcccgttccccgttcctcctccctcccactcttcaccggttcccttccgcacaagcgtttctatcgttccttcgtaacctctggcaagcccgtatcatcagctgacgcaaagagctagctgccggtgtgccggtttctatgcataaccccaggccggtctgcggggacatcgtcgagatgtcgt

SEQ ID NO: 381002 - DNA, 235 bp, Zea mays
tctagtcccagcactactcactcacttccagtctctagagccatcgagatcgtagctgagcgagttagtattcatggcaggaggcacgctgcaggacagatcggaggccgaggacgtgcgcgtgggcgttgaccgtttcccggagcggcagccatcggcacggcggcggacgacctggagcgcgactacagacgacccccgtgggcggcgctgttcgaggcgtcggagctctcct

SEQ ID NO: 381003 - DNA, 178 bp, Zea mays
ggcacgtccctgtccaggagcagcaagtcggagacgctccggagcctgcagtccatctacgagcaggactccgccggcaccgtcagccggcggcggaggagggtgcggttccagatcgacgaggaggagcggatcgagccgcaggtgagggacgagctgtccgacctcctggaggcca

SEQ ID NO: 381004 - DNA, 171 bp, Zea mays
ttttgttcctctgacaagaccagcacaaaaccagcacaatatctacccacacttttgtgctggttttgttcctctgacaagaccagcacaaaagtgtgggtagatattgtgctggttttgttcctctgacaagaccagcacaaaagtgtgggtagatactgtgctggtctt

SEQ ID NO: 381005 - DNA, 259 bp, Zea mays
ctgctggagctggtgtggaggctccacggcgccgggcgcctcctggaggccgtggacccgcgcctcgccgccggcgggtacgggtacgacggcgaggaagccgagcggctgctgctgctgggcctggcgtgcagccaccccaaaccgtggcagcgcccaaggcgcatgccatcctgcagaacctgcagacgcggtccgtgccgccgctccccgtgcccatgtccaagccggtgttcatgtggcccgcgccgctcgccga

SEQ ID NO: 381006 - DNA, 289 bp, Zea mays
cttaaacatgccatgagctgcagccaatcctttgtcccaatttcaggcagctggtacatatttactcacactaatattatctaatcaggtgttgtattgtatgggatagaatggttatgttgtaccccttgcagatgaaattatgggcagtgccttcttagagctgaccaagtcatggtcttgattctcctaatatcccttttcattgtttttgttgatggacacctcttgtatttgcaggtgctacaaagtgcatccggtatgtatagaagcttgaacgcacttgcaa

SEQ ID NO: 381007 - DNA, 248 bp, Zea mays
tgtgtgctcatttccctcgccacatgctgctcatctcatcctcatccttgcttgcaaagatctgtctctctctctctctccctccctctcttcttcaatggcggcggtctcctgccctgttgccctcgtattcttctcctcctcctgtatgctcctcctccttcaaacaatctgctgttcatgagtatttgtggagctatcatacgtctcgacacaggtcttggtacaggtactgtccacctcagtgg

SEQ ID NO: 381008 - DNA, 288 bp, Zea mays
ctgattttactagtactagtatgcgccctgctgtcaaactgtcaatagtgaattccgcctagccgcccacgttattgactgacgctcgagcgctgctgctgctgctgcagctggcctgctgcgcttgccctgcgcctgcacaacccgccctcggttttttttttgataaaggggagtttatttcattaagctaatgaaaaaacagtgctcggtctcaaaaaaaaaaataaaaaaaagaaatcaaaaaaacccacgcgtccgcggacgcgtgggctgatggtagcacga

SEQ ID NO: 381009 - DNA, 272 bp, Zea mays
tgtcaatcaactgtttttgtgcctaatattttttacaagcttttgcaataacttctcacactagaagctcctaatggacactttcttcgtgagcactctgatgtgcctcgatatgcgcgatgaagtgggtttaaactcattctttctacagtgatatgcgcagggagggttcagggtttatgtctacgagcacaacatagatccctcagactggaagagccagggttgtgttcatacattccttgtgtgcagcttgcaacattaccatatct

SEQ ID NO: 381010 - DNA, 257 bp, Zea mays
actagttctagatcgcgagcggacgcccgctatctagaactagctagatcgcgagcggccgcccttttttttttttttttttacagaacaatgaattgatatatgatgcacatgattgtttcatacagaatctgatctttaagcccaatagtttgacaaagacacagttcttgtggagggctacttctacagggaagtattttaaggtccgatagagcggttccactgaccagtacttccactactaacatgttgcc

SEQ ID NO: 381011 - DNA, 285 bp, Zea mays
gtctggattacttctcaccactttgttgcagtccttgagtcgtcgagtcatgtatgatattgagtccttgagtcgtgctcgattacagatatgtgcagtccttgagtcgtgctgttattgacaaataacgtattttgtttgtcatgcttgaaatttttaaaatagcttacttgcatgaccggaataagaaacattactgagcaaagaaacttgaggcatgaagatggaagtccttgagcaaatgtagatttattcgataggttaactaagtgtatgtaactacct

SEQ ID NO: 381012 - DNA, 261 bp, Zea mays
gtcgcaactcaaaaacatacattctcctggatggacgcaactattcacttggcactgccggccgaacacatggcaacgaagccaatgacaactactagtaccacacacacacacacagctttaatagcggccccgttcaagttcaacagtaacacacgcgcttaattgcctagttaacgtacgtacctttattacgcactaatcagagagccggcatctcctccgttcaactgaccagtgaccaccggccggcgttaccac

SEQ ID NO: 381013 - DNA, 282 bp, Zea mays
cccagtgctgtccgtctcggtgcctctggtggtttcagcgaaggcgagcggttccggaaaggaataaaaatggtgctgtctgtcttcgcctcttggctactggcattgggggtgtataagttctgattacgctacatgattcagagttatatattatcaccttttcatggtacggtcccaaaggttgagctagcacaactacctcattttcccatatttttaccagagcttgtgtggaaggatgccaaaagacaggctccctgaaggagacttctattaaac

SEQ ID NO: 381014 - DNA, 279 bp, Zea mays
ggaccgtggcggacgcgtgggcgcgagcggccgccctttttttttttttttttttttttttttttgaaagtgaataattcataaaagacaggtcctaggagtggtaagcctataatgttacagaacaaacttgcatattcacaagtattacaccatgcctaccggggagttactcttccagagatcatgccgctgctcgcatcaagactcccagaggcctgtgacgagacgaagagggtcctggtcgctgaagatgacaacgacttactgacatcggtc

SEQ ID NO: 381015 - DNA, 216 bp, Zea mays
caccgtctcccgtccccgcgacgaaaaaacttctctgcagggatcccatgaacgctttgcagagaatatttcttcctcattcccgttcctcgcggggataaatccccaacgggatcccatccccgtttaaattacaattaagacatacgtactttactattaatgttaaatattatcacttatatacattgtcagatataagaaatcattatgcat

SEQ ID NO: 381016 - DNA, 279 bp, Zea mays
agagggtccaaaaatagatcaattacaaatataagaaaaagaaaaaaggacaccctatggcgtgtcgggtgtgtgtaggtggtggcctttttaggtgttccttcatggatgtttcatgtattccaagtaggaaaaattatagtatgcagaatctagcaggtgctaatagatttttgcttgagttgacatactctcaaatttcaattatgtcacatcgtaccataagagcattctgatacagtaccaccatttatggaatggtgtttagaaacagctgta

SEQ ID NO: 381017 - DNA, 209 bp, Zea mays
tccacttcaacgtgcacccgatccgcgcggactgagcaagacgtcggacatgaaggtggcagtgcgcgtctcgctcgtgctctgcgcggccatctacgctgccgtgggcttcttcggcttcctcctcttcggggacgccaccatggccgacgtcctcgccaacttcgaccgcagctctggggccggtgtcccgcgagcgctcaacgacg

SEQ ID NO: 381018 - DNA, 129 bp, Zea mays
cccacgcgtccgcggggccccttatttcattgaggctcacgagcaatgttgatgctcagcattctccctcaaagcagcaatcacacggaagcagaggtgcagagcaagcagaagagcgatccaacaaga

SEQ ID NO: 381019 - DNA, 269 bp, Zea mays
ccaagatggatctgatacagtatgtggaatgtgcaatggtaaaggaatgttaccttgtatagcatgtggatcacgtggattagtgacatgcaacacatgtactggatatggttccctccttgctcaaagcatggctcatgttcaatggaagacgctgtcagctagaaaagttagtgctgctagaggggctgcctcggtccctgaagaagttttccacagggccaaaggagtgcagctatgcaacatacaggcataccagtgcactcctg

SEQ ID NO: 381020 - DNA, 279 bp, Zea mays
agcatacagacacacgtccgcggacgctgggcgacgctggcgagacgcgtgggtggtcgtatgaattctgttatcatgggaaaatcaggcaggatccatgtagacaacgataaggttatccaagaatttgttctaggcgaattcgatgacgacgcgactgctgcataccatgaaaatatcacttctgagttagttgacgatgaccatcatgtgaaagatatatctcagaggtatcatgttcacttgtatacaaatgggactgtatgcgatctcacagat

SEQ ID NO: 381021 - DNA, 255 bp, Zea mays
ggaatatgaattcatgcatcattataggaatacaaggaatctcataggaagcaatcattttttccaaaagggcatacattttcctacaggattgtagtcatccaaaatacttatggttttctaataaatccgggtgaatgcctttgatctaaaaaattcatatggttttccatttgttctgaagagagcctaagcatctgcaatttagcacatcaatttgtgcaccgcttgttcagataagcactagatcaagaa

SEQ ID NO: 381022 - DNA, 269 bp, Zea mays
gtctgtgtgaccctttgcttgcgcgcgctgtgggcaacagcgcagacggcctctcgccctctcctatatatataccagtcgacttgctcacgcatcagcgtcactctcccatccccgcccccaaggcacggacagagaaagatctaagcgccgcggcgaacggcaacatatatgatggtgaagaacccaagcagcaatggagttctcacggcgaccgccttctccgacagcaaaaccaggccggagcgcgccgtaggttgcgatgcggc

SEQ ID NO: 381023 - DNA, 267 bp, Zea mays
cggacgcgtgggcggacgcgtggggctccggcgcctctgcgcgcaggagatgctgagccccgcaggcctcacacagcctgtaccgccttcgccggcgcgagttcaggtctaccctgcgctacctctactcccagtcccacgccggcgagccggtggacctcggcgccctgatgttcgtcaacatgatgaacgtggtcaccagcaccctctggggtggcaccatcgggagcgagactagcgagctgccatagggaaggagttcagggc

SEQ ID NO: 381024 - DNA, 264 bp, Zea mays
cgttatgtctccctgcccgtcgttgcgtcgttcgtcgtcctttggtcctagtctggcccatccgtgcgttcgctcctcatccatcgggcttcacgcgtgctcgcgtttgtcgtcgagctgttgaacccgtcctcccttgctcgtaacttcgtcgtcgctagaatgctcactagattcgtgtgctcgccagcccgctccatattcaatctcgtcgtcgttccgcgcgtcacagaaagatcctaagaatcgggtgaagactaagct

SEQ ID NO: 381025 - DNA, 156 bp, Zea mays
aggaatggtcttgcattccaatctctagagaatgaattttcaaatagtaactttcctggtctattagatatggcaactactggtacatcaatgtctaaaatatctgctccccaaggattttcagcaccaacaagagtaccccctcctggattttca

SEQ ID NO: 381026 - DNA, 103 bp, Zea mays
gtttttatccttatcctggcattgtacaaataatttctccagtgcttgtagcttgtggacttgggttgtccaacatgtcatgaatacaaactgagtttgcttc

SEQ ID NO: 381027 - DNA, 228 bp, Zea mays
agggacggtgggcggacgcgtggcgagcgaccacacgcatctcaccacggaggctcaagtccagctcggcaacacactagccaagtacgtatttggaaacgctgtaattttcaaataccggtatgcctaccaaaaacaaggcattcccccacgatttggaaacggacagagcaagcaatatgtacactcaaattacgatgctgcgttgagattaatattttccgtgct

SEQ ID NO: 381028 - DNA, 277 bp, Zea mays
agaaaatgtccaaaaaaaaaaaaagaaaaccgctccaatcgaagaagaaggtatttcttcccgaaatacctggtctgcatctatctacaaagatagaccattccccaagaagcaaatgctggccatggtatcaatttccatgctttcttgggggctggattctcggcaagtagttgacttgccaatcatgcctcagcgaatactggttcaggtcattcaacttccagtattctgataactcatatcaggcatctcgggtcatttcataagatatctt

SEQ ID NO: 381029 - DNA, 271 bp, Zea mays
cccacgcgtccgcccacgcgtccgcaaatccctgtgtgctcatacttccctttgaccagtattttgctaccgtggcgatgcgacgcggcctcggcagctctatctccgccacacatagcggtgtgcggcccgctgcgcgcctccttagttctcctgcagcaacggtttatcacacacaccaagcgctccgcacacaagcgcgggtcgcgttgcaggttcgaacgacagttcgtgacgcagcgtggtgactgggttcgtgagcagatgcgga

SEQ ID NO: 381030 - DNA, 269 bp, Zea mays
gctcaggacgcggcggagagaagggagaaaatccccggtaggaggggggaaggaagccaaaggcccaaaggtctcggcgctgccgtagtaccggctgaggcaagatggtgaaggcacgaatgacgccgcctcatcggcatgcgcctagccaacgtctacgacatcacccccaagacataccttttcaagctgatgaacagcagtgggattactgaatcaggggaaagcgagaaggtcttgttgctcatggagagtggtgtcaggttcca

SEQ ID NO: 381031 - DNA, 114 bp, Zea mays
gtgtttagcagttcaccctgcgaacagtacaatctacaaacaatacaatctatagtactgttcgcagggtggatttttgaatatgagtataagaatgtgtaagctgttgaagat

SEQ ID NO: 381032 - DNA, 184 bp, Zea mays
cggacgcgtgggcggacgcgtgggcgggcacgtcgagcaccaccgcctcgccggcgtcgtcctcttcgcgggacctcgacgacgtgctggacctccgcctcttcgaccagatcagggagatcagcgcgttcggtgcgtggccggtggcgacgatgtggcgggacgagagggaggtcgtcgtgcg

SEQ ID NO: 381033 - DNA, 271 bp, Zea mays
caaatcaatggctgctcaatggcctcgtcactgatcgccatcgaacacacacggtttattcttcaatttgctgcaacactacatatgcgtcacgactgatcttagcctggggccaaagcttttccacctacagatcgcactggagcatttcaaaggctggaagatcccagaaaacctaaccaatgtccatgcctacaccaaggctcttttcagccgtgaatcttttgtcaagactaagccatccgaggagcacgtgattgcgggatgggcg

SEQ ID NO: 381034 - DNA, 274 bp, Zea mays
gtcctttccaaatacccagcctcgggtgtcgtgttgaggccaggcttcatttacggtaaaaggaaagtaaatggcttcgaggtaccactcgacgctgtcggacaaccattggagaagttgctctcctctgtcgaaaacttcaccaagccgttgagctcgctgcctgcctctgacctaatccttgcaccccctgtgagcgtggatgatgttgcctatgctgtaatcaacggagtcatagacgacagcttctttggggtgttcacgattgaacaga

SEQ ID NO: 381035 - DNA, 138 bp, Zea mays
aattaagcagccaacaagacctgtctatagctgcctcgctagccaagcctgactgctacctagcaacgaccagctggacctgggactgggagggggagtccatcgagctcgccccaggccgacgatccgctcgatctc

SEQ ID NO: 381036 - DNA, 254 bp, Zea mays
cccacgcgtccgcgctgcagcaggccgtagttgcccgagctcacgacgcccagatgcgagatgatcgacgcgttatgcacctgcgcagtgtgtcaaacggatttagtttccttcttcttacgttgtggatcgatcgatcaatgaccgtacgtacgtgtacgtacctggaagctgtacgttacttcctgcggcgctgtttatgagactgaaggtgaagccggagtaggtggcgttgtcgggcacgccggtgaact

SEQ ID NO: 381037 - DNA, 255 bp, Zea mays
cactcgagcccgcccgggtctcttcctcttccattgattccattcaagatcactactgttaccagccagccagtcgttcgttaagaagagagcgagcgagcaagagagagagagagggagaagggggaagatcagaacgaagagagggagatgagggggcaaacgcagacagcttccgcggggggccggtggcgaggcgacggcgctgcggcgtggtgttggtggtgggtggccgtggtcctcctgcttggccat

SEQ ID NO: 381038 - DNA, 255 bp, Zea mays
aaaaaaatgctaaaagccggcttttagcattttttttaactccagaagatacagcctcacgacaactgttgaaaagggaaaatcagtacatgatggccacaaacatgcaagagctggaagtagattccgagtagaggtccaacgtccaaggcgagctatctcgagtccacaacagtgccttctgcccacgcgtccgcacgtcctcatccatccaaccaggcgagccaacaagcaagcaaaagtaaacggggcgag

SEQ ID NO: 381039 - DNA, 252 bp, Zea mays
cccacgcgtccggcatcgcgttctacgttctccgccccctccgctccccctactctgcttggtttcccagaagatttgattggtttccccaaatccggtgactccattcctgttgttcttcacgtcgaccccgggaacctcccagaaggctctagcgaccccggcgctctgagtgctgtgctgccggcggcgagatccaggagctgcctgccatggtgaaggacagcgcctactacgacgtcctaggggtca

SEQ ID NO: 381040 - DNA, 273 bp, Zea mays
cctaggctcctagcaagtgaactccccagagtgaaaaagctaggaatttggatgtgatattaactctcttggatttggtgcaaatatatcgtcgatctgtccaagaaggaaccatgacgatcgtagagatgcatgtgagcatcgactgcgacggctgcgaggacaacgtcaggaaggccctggaaaagctcaaaggagtgcaccacgtaagcatcgacaggatgcacggcaaggtgacggtcactgggtcggtgagccagaggaaggcgctcc

SEQ ID NO: 381041 - DNA, 274 bp, Zea mays
acaggatcagggcactggcaggcccttgctcggcgttgccggactgggaatccgacgacgatggctggatcgaagtgtccagcggctactccgaacttcctaacgccgccgccgccgccgttgctggccaagaagtgagatttccatcgacgcagtgtgaaattcccagcacggcggtggcgacatcgtcggagcaggcgcccgtggctgcgccggcatctgagacgacgagctacggaattttcgggggaggagacgaatcggagtctgagct

SEQ ID NO: 381042 - DNA, 273 bp, Zea mays
accaagtggaactgatggacaaaccaatacaggttcgggctcgggttgatgatggaggtatcatgtggagtgagaatatagttccaaactgtaactgggagtctggagaaaccatgttttattctgaattcaaggtgctgctacttaagggaattacttctgacattgagtgggctggtgacgaccacctcatttacattacaacggagagtatacttcggccaggccttcaagcttccgaaagcaagagatatttatttgttaaatctggaa

SEQ ID NO: 381043 - DNA, 266 bp, Zea mays
tgattatcatgaactattatgtgtgctaccatttccttttgtgcttttctaattactagcgggaatgtttagcttctacaaaaataataggaatgagtttctgtacaccggtggctatgtttgaattgttaatagtgagactgagagagtggtatggttaggatgttagatttgtgcttccagtgattgattagtatcttttttggtagctggtatgtgttagttttaccataagctaaaagtttaagtagaatgaagtggatgtg

SEQ ID NO: 381044 - DNA, 177 bp, Zea mays
cccacgcgtccggaccctgtttcctgttgattatggccgaggctctttcagacctcagatgtgtagaaaaagcgaacaacaattaatttatttaattacgctaactaggattaaaacttgagacttcatagttgcaccaaccgattccatttgaaaacctaaggtgatggagagaga

SEQ ID NO: 381045 - DNA, 232 bp, Zea mays
gggaggtattgctggcaaaacaagcaaaggaaatgtttccaaagaccagatgagcacaatgacacagatagtgccaaagggcagtgctgctgtggcattgtgctcatctggaccttggtcaatttctttcttgtttggaggtattgctggcaaaaacagcaaaagtgaattccaagctccttgccgtaccacaaaataactcagggagattcctcaattccgtggtacggag

SEQ ID NO: 381046 - DNA, 281 bp, Zea mays
cccacgcgtccgtttttttttttttttttttttttttttcatatcaaagcctgattgtcaggcacatgaaattgtactaaaattaagaaaatataatacagattagtctgactggctgcgattcagccgcagcaataaggtcgtgctagcttggcgccgtctcatcgtctaggcataactgtccgatcacagcgtcttcaacttcataaagtaaaaagcaaatttggatatcaatctcccatagtcctcttgtccataccgaacgccgggccgacccgatc

SEQ ID NO: 381047 - DNA, 274 bp, Zea mays
ggcgacggcatcaggtggttgtctcaatacgtttaaagaagggaagcgaggagtgcgtatgccgtgggaagaaagaatgcaatggtgcggaggatatgaggtcacgagctatatgtagtggctcctggtgatgacacgattaccgagaagggaggagggaagaggcgttgggccatgaagagttattttatgagactcagcatactcttttttttaggcgaaaaacaaaaaactcataaataaagggcggccgcccttttgttttgatttttga

SEQ ID NO: 381048 - DNA, 277 bp, Zea mays
tggaaactccacagtacctccgccgccgcctctttccgatgcacaagaacctgaagtttgtgggactgcttccaccgctcgatgcaccacaccatgtgcgcaacagaatggtccgagtttcgtgaaggtgtaacattggaaagtgatccctcaaaggggactcttgttgatgtcggattaagtaagaatgttctggttgaacaaaaactagaaccaggcaaaagagttactgtagccatgggaacaaaccgtgacctaacgacagcttgcataagga

SEQ ID NO: 381049 - DNA, 274 bp, Zea mays
cccacgcgtccgagcgcagcgcgccgaccctgccgtgctgctcgtcacctacaccttcgaccacaaccacgaggcgccgcggcccaagagcagctgctgccaccagcaaggcaggccgccggcgccgaagcctgatgagcccgtcgtggccgtggccgtggccgagcaggaggatgagccggaagactggcaggagccggagcagaaggtcgtcctaggtctggccgggccggaaacggcgccggcaaccgcaacgttggcgccggcgggagag

SEQ ID NO: 381050 - DNA, 265 bp, Zea mays
gaataatattacaccccccttccagcctctgtctttgccaacttgttgcagttccatgcatctcacaaaaagtgctctcaaggcatcttgatgtttatgtagacttttcaaagtaaggaatgtggcaaaacgagtggctgctggtcttaaaggatccccctcctatcttctccctcattgcacttagaattcctccatgcctataaataaaagtggtgactcttttggcttgtgcaattagtctttcaaatatccaatatcctcc

SEQ ID NO: 381051 - DNA, 247 bp, Zea mays
cggacgcggtaacaatacaaggcttttaacctttaaaaaaaaaaaaaaagggcagccgctcgcgatctagaactagttgttttcgcagcgtgctggcgcgaactgcaggatcagttaagattctaactagatattgtgtcagggaattatatagtagctattcactaagaagtacatttgcagtacacaatgagaagaagcaacgcagtacttaattggaagaagcaacgaatatgaactgcagcat

SEQ ID NO: 381052 - DNA, 174 bp, Zea mays
acgacagcgcgacacggcggagcaggcgggacctgcgggcttacatgggcttatagagcggcaaaatttgttgcgtgacattataggttaccatgctgatattatctgccttcaggaggtacaaagtaatcactttgaagattttttttcaccggagcttgataaacatgggta

SEQ ID NO: 381053 - DNA, 139 bp, Zea mays
  unsure (1)..(139): unsure at all n locations
cacatcacaaggttggcgatgcgaccaatgcggacttcctggagtccgcgtgtccacacgcctcgataactccaatgaatccacccgccgtgcatactacaaatgcgtnccatgcaatcgctctctaggcctttggccc

SEQ ID NO: 381054 - DNA, 121 bp, Zea mays
attaatcacccactctactactcgaagttactaccagcagcttgcttcatcagtagaatagagctagccgaggatggcgtcaccgaatccctcgtcggctgccctgctcctcctggcggcg

SEQ ID NO: 381055 - DNA, 123 bp, Zea mays
gctcgtcgtcaccgccatcggcataccgctcatcggcaagatcgccttctagcctgctgccagtgtatgctgctaatagtgtactgattaatcagctagcagctagcgtcgttccgatgtatc

SEQ ID NO: 381056 - DNA, 173 bp, Zea mays
ctcgtttttgggatctccttccagagctagccattcatggagccagcatcagttgccttccttggtgagcaagccgtcctgggctgggcagttgccacaacctactaacgtacggtacggctataagtaccggccacccctttgtcgtgaatataccacaccgtaccacaagc

SEQ ID NO: 381057 - DNA, 299 bp, Zea mays
aggaaggccatgtcctcacctcgaagtactccatctacaactttgtgcacatgctcaagtgcttcatgccggacgacctcaacctcagcgtcctccgcatccttctagcgctcaccgcgctcgccaagccactagacactgtggtctcggtcatcagggagaactaccgcggccattctatcatcgagctcatgggctcaccaacggaggtgctcagcctcgccgcgacaaggctgctcatcaccctgtctccacacattggacacaccatcgtagagaggctctgcaagacacaagga

SEQ ID NO: 381058 - DNA, 286 bp, Zea mays
  unsure (1)..(286): unsure at all n locations
aagctgacaagaacaagaaacaaactgaggctgatggcagtggtgctacagaattggaaaaagaaaaagaagaaagtcgaagcagaagaagctgacaagaacaagaaacaaactgaggctgatggcagtggtgctacagaattggaaaaagaaaaagaagaaagtcgaagcagaagaagctgacaagaacaagaaacaaactgaggctgatggcagtggtgctacagaattggaagaagaaaaaaatgcagtcgnacagaagaagctgaaagaacaagaacaaact

SEQ ID NO: 381059 - DNA, 279 bp, Zea mays
aactagattgttgtgatagcttctgttcccttttggtagttttaaaactaggccttcctacaagtgtgtggaacgtagtaaggtgtcagcttggggggagcaaaatcagttttctccctcccttcctgtcttgtttctgtccctggctttgtacttggtcttttgcgcccagcctcatgggaattgggtcagtctcttggccttgttgatgttgcaacatttatctagtagtcgatttttttctttaaatgtgctaatcaaattgtaaaaaaaataaaa

SEQ ID NO: 381060 - DNA, 293 bp, Zea mays
aggggggggagggtggtatagggtaactaatcagtaatattgtcttgttgctttctatcgattaatggatcggaggagatgatttttagcagttaattgtttgacttcatttgatatcaaattggacaacctctacattgaacatgtttattttgtctgcaatgctactgatccaagaaacggaaggacgaaccgagtgaagcatagccatacctgttggaagaattctagcttagatctgatcactggaaagagaaggcctgtcctctattgcgtcttttatgagttgtact

SEQ ID NO: 381061 - DNA, 300 bp, Zea mays
agacacggtccctcctccggctctggtggagagtgaggagcggacgtccaacgagggcctcgtcccatcagcatcggcagagcgggaaccgaacgccatgaccgtcgacgaggctggcgagaaccagcaggacaaggctgccgacgacgacgacgacgccgtcgctgccgccgctacttgacgtgattttttttcatggagctgcttctcctggaggctgggagtaacttacgtgtacgtatgaggcttgtgttggttggtgttgtaatctgacgcttaaacattggcttcaataactca

SEQ ID NO: 381062 - DNA, 184 bp, Zea mays
agcatccacattgctagcccattatgggaattggtaattgaagcctcctccacagcaatcatcaccgcatcatcatccatcgttgctgaatgctgctgtcgtctcagcacttctttttctcccccctttcatcctttcaatgttcatgttcttccaagtcatcatataaactgggttgttagtt

SEQ ID NO: 381063 - DNA, 288 bp, Zea mays
acggtgttgctcttgctggagtgttcctgtactcgcagttcaaaaagtcaaaaccaaaggctacggctgcatgaagagactatagaatgatggaggatttggaactatcagtcgacgtggtgaagcagactggccttcacggtagcaaacacatatagtttccccatgttgcatcttaaaaaaaatgtgttctcttgtcaggttctttggatgtgagaagcttgtacgtaagtttcatcgacaaggtgtggtggaacacgtgaacaacggagatatagcattcttaga

SEQ ID NO: 381064 - DNA, 228 bp, Zea mays
attagtcgactggtcactattctgtatattgtgcagtagtgtaatgccttttagatttcctagtgctcgcatttttattttcttcaaggctcctcgttaacaagttggttacctctgatccccgagatataaggtgcgatgtcagtatgtctcggtagctgaatagatcgttcttttggctagaaaaaaaaagaaatggaaaatagtaaaaaaaagagaaaagtaaaa

SEQ ID NO: 381065 - DNA, 181 bp, Zea mays
tatcgcagtgccgatcgatcaagatcttgaattgcttcagatgatgccataagaaagcatactgaaaagaagtgtatgccgtgtgctatattttacgagtttatgggttgcttttgtctttctagtggcgtcgtgtaacaaagtccgctgttcttaatttgttcaggtaacaattaattaa

SEQ ID NO: 381066 - DNA, 305 bp, Zea mays
caggccaacgccaccgcgccggcgaccgagttcttcgccgacttcgccacgtccttcgtcgccatgagcaagctgggcgcgctcacgcaccacaatggagagatcaggcaggtctgctccaaggtcaacccgccgacgtcgtcccagctgtccaacgcagccgccgtccccggtgggttggcagtgtcactcgctctagctgtggtggctctcgtgctaaagctctgagtctgacagctgacagcaagcgcctgtttattatgatttgtcccagtttggtgattcaaaaaaaaaaaaaagggggg

SEQ ID NO: 381067 - DNA, 317 bp, Zea mays
cggagtcgacgcctcacagcctccctcgacgcgacgccgctggccactcgacggagtcggcgcctcagtcacagcgtcgggaaaccagtgccaatgtggcggcgtcgtaggccgcggaagccatctcgggcgtcgagtacgtgacgaggcagatcctgctgggtttgcgcactcgcggccggatctccgataccacttgatgaacgtatggagagaagagaggggcatcctcacttctagtattcgtagcaagagagagacagagagagagacagtgattaatggcctgcgtcctaaatttaagctagggcctggca

SEQ ID NO: 381068 - DNA, 313 bp, Zea mays
  unsure (1)..(313): unsure at all n locations
atctaagagatatcatggcattggtgaaggagtgtggtgcagttctaggaacaaaagaacacttcatagcatctcaagtttttgtcaagagggcagagagggaaatgtttatgactttggacacactggaagaacgcttcaactggcttacaatgaaacatgattgggtcactaggatgattcactaggatctgtaattttttgtagcactgctgtgttgtaccatgcgcttgaagctgacgaagatttatttccacacccccctctaggaaagtactatgttgttgatgctggatatccanatagggatggg

SEQ ID NO: 381069 - DNA, 293 bp, Zea mays
caggtcgaatgcatgcattgctgtaggagaataagtccactggaggtacatgagcctacaataatttgtggagtggtggttgactccagtggtaagtgccttccagagtgtaccggcatgcccaaaactgaaatttccggtttagatagaattgggggcgcggaagagggtgccatgtgtgtgtttgtgtgtgctgcctgtggatggaggaattgatgggagtatgtgaaaaaaaaaaaaaaaaaaaaaaaggggcgccccccaattagggaccccttcaccccgggatttat

SEQ ID NO: 381070 - DNA, 133 bp, Zea mays
ctacactgtaaatttgtggtggcaaccgtcactacgcactagtacaacgcagttaaactgtcttcgattcttcaaaaaagaaagactcagctgctacagtaaagaactccccaaagacaggagttacggagag

SEQ ID NO: 381071 - DNA, 269 bp, Zea mays
attagcctggttggtgtggtagcgttttgcttggttgttttggaattggaagtggtggtaaggctggcttgcagattaacggaggtaggccgccttttatcacccgccaattaagcatttgtggggtctcatggtgatggcctctttcggatgagatgttttgcgtgttacccaagtgtgttggttgtaatgaaccctattaagtttgtgctggaaaatcaaagaaagaaaaagagaaagaaaggaaaaataggtagtgagagagggag

SEQ ID NO: 381072 - DNA, 302 bp, Zea mays
gtgccggagaacagatggacgtgtacactctgccgggccaagtgctacactgaattgaactactacagccatctcgggggcttgtggcaccgggagaaggcacaggccaggcgcgaggagcacttgaggttctactgctcggtgtgcgacctgcaatgcaacagcgagaaaatgctggagtcacacctcggcggtaggaggcatcgggagactctggaggcgcgcgactaggatgccgaggcacggctgcaggctgacccgtccttgttcacggggaagctgttgtggctgggttccggcgg

SEQ ID NO: 381073 - DNA, 303 bp, Zea mays
gtgattgacgcagattttactgacagcaaatgagggggcatgctaggtttagatggaggcggtttgccgtgggagctgttttgccgcgagggggataatttgtttccacaagattgtgtaggatgtggatgttctactttttggtagattggcacctaactgtggaatgaatatacataggtctttttcttctgctatcaagagcattcgacgtttgaccttgcagtgtttctgggttaatctacatcttccataaaaaagaaggaagaaagaaaaaaaaaaaggggggccccccgttttttg

SEQ ID NO: 381074 - DNA, 300 bp, Zea mays
accagcgtagtgcaagcagcagtaaattggctggtggccatttttgcctgttgatgttggtgcttggttgatgcagtattttccattgatctggagcactctgctgcgttagtggatggaaatcggtttgcaacttgtctcctagtgatctcggggttttcgctacgtgcaatcggatgatattatatggttgtgtaattatctttgcactcagcagataatggcgctttatttgtcctaggtctatattggctatcttaaattgatttgtagttagcttagagcatctacaatcgacca

SEQ ID NO: 381075 - DNA, 173 bp, Zea mays
cagcgacaatcacgctccagcttctgaaacgttgctgtagccttttgttgatgttcaggactgggagctagattgtcacgatttgacactgaggacgttactgtgcctgcaagcctaacctaagatgtatcaagcatcaagtgctgcttgtgctgctatggaaggtcttagcc

SEQ ID NO: 381076 - DNA, 156 bp, Zea mays
taggagaaaagacaaggtttgatgtgttgtgattttgtcaataaggttctatgtgcgtttgaattttatttcatatatgcatgtgtttgatgtggttttcaattttgttcaatgtaatcatagttatggagttaatgcaagttttaatttattgtc

SEQ ID NO: 381077 - DNA, 277 bp, Zea mays
agggttaaatataaaataacagtcatcattagatctagatcggatgcaccagatcgcttgattgcatgcttgcaccaggataagtgatggcataggatattttcccgcggttaagtgcccattaatcacgagtttgcatcgaacacaaaattggaaggcagcttgctgctaattacccttaatcttaagttatgccaagcacacacaatttgaaggcagtcattagtgtctaaactgcgatcttccatgatttcaggttctcttctatatttatgct

SEQ ID NO: 381078 - DNA, 275 bp, Zea mays
tgtcgcggagaggccgaaagttggcctgatggtgacgcctggtttcctgatcgggaccagtatcatacagtcccgtgtgtacctttcaggtgccaagtgtgctgactgactgactgactgaagatgcagcagctacacaaggagctagatagagggtcatttgcttcttggaatcttgggagagcttcagagctaccagctgcataagtttaaggtggactgtgctgtcctgtatgtaacgcgtgagagacctgttgtttatctgccgtgctggg

SEQ ID NO: 381079 - DNA, 280 bp, Zea mays
aaatatcctcccttgggcaagatgtaaacatctatttaatctctgtgattggtacatagatgtcattagtgctctattttatgaatgtttatactatttcataattacaaattaaaaattaaatgaaaaagaaagtgatggaagaatatattccaggcaagtgctaaccataagaaagctgggaaacagaattaatatcagacatagaatactaagaaaagaaattaaattgttatggaaaaagagaataccaaagacgcagtatcacatagataacatt

SEQ ID NO: 381080 - DNA, 284 bp, Zea mays
tccgagctcaccgagccccggtacatgctcgagatgagttgaggcagaccgcaagggccgagtttgagaaatatcgccattgtgataccaaacaaaagattaggtttttgattagtgaagggaagcagagactaaaaggtcttgatgaactgcttgacatgacagggaacagctaatctgagttgcatctttgtctttgcttctgcaataagttcgctcaagaaaccattcctgatatgtaaacaactacattgtttgaaaaaaaaatgttttgataaggaaca

SEQ ID NO: 381081 - DNA, 271 bp, Zea mays
agtgatcttaacaaagcctcacaacactttggaaggatggcagaagtgatggagatggaagcaaaaaaggatcaaatgcaagagttacaagagaagtctgttgttgagttgactagacttggttttggaggtagtgaactgctcaaagccgtgtatgcactcccaaatgatcttgtatgtactcatgtttatagacctatatcctttcttcagatgaagctcaaaggaagtgacttgtcaaattatcaatgaagaatgtcaggagcatttg

SEQ ID NO: 381082 - DNA, 234 bp, Zea mays
caacggcgttgagagcaatagcaatgtgatttgcctggcaggctcacaatgctgcgcggaagacgatttgcttctttttggataatacacgaagcactcccgtgtttacgttgacttgacttgcagtgtgcatgtattctgtttttgtttgtaattcagatgatttgctggatcaaaaaaataaaaaaaaaaaaaaaaaaaaaaaaaaaaataaagtaaaaaaaagataatata

SEQ ID NO: 381083 - DNA, 106 bp, Zea mays
cgggtggagtaatgtgcgcaattacatctgcgtatacatgtagagtacgttgacaccgatgaaagaggtgactggggagacgccgggatctagcctgacaatagcc

SEQ ID NO: 381084 - DNA, 310 bp, Zea mays
tgaattctcggtgatatggatcgagttgagtgtcgatctagtttgtattaataccctcttttatcttttttacgctgtagtttctctgatgttagggattggaactgatcgtgtaagcttatactaatgacaggttcctaaaggaccatgcatgagagtgaccgatagaaagaagtgtacatcttatataaattattaaaagatctatatatttagaagttataatagatgctcaatcctcaattatattactccaatatttttccttcatcaagctctatatatttttcgtgttattcttactctacta

SEQ ID NO: 381085 - DNA, 203 bp, Zea mays
tcaggctttaacttgtaaattatgtttgattgatgtcgaagaagactacgagcgattgtcttgtctagttgcatggtaacttcagggactaacatcttcttccccatttgtaattcggctagaatgtaccatggtttgtgaacaatgtaaaagaactaaagatgtgattcacggaaaaaaaaaaaaaaaaaaaaaaacaacaa

SEQ ID NO: 381086 - DNA, 278 bp, Zea mays
ctttgccaaggttaccaactataaatttggtatcctttttttccacgttgccaataccactgttgctactggatgtttgaagtttccatgagctattttattggtttcatgtataagcatccttgccaacattgttcagtaaaggaacattgtacttccaaatctgcacaaacttgtaatcgtaatggtttgaattctcatgtacttttccatgcagcacaatcatcagtttcgttttgcgtgacattgtgtagtctatttgttttttcattagtgac

SEQ ID NO: 381087 - DNA, 291 bp, Zea mays
gttattccaaattgcggcagtgggaataatactaagtcaccctatccgcaaccctggtagatccacccttgttcagtgcagaggcctagattaatgctaaattttcatgtggcataaatcttacagtttgttttgctgagtcttctattcctgtcttcttggttgacatttaaatagttcactgtattcattattatttgcatatttggtgagaagttgtgttgcttcttttttaacacaaattacttctgcccagtcaccaatcatagtaactccataatgcatagctgc

SEQ ID NO: 381088 - DNA, 120 bp, Zea mays
ggcagatgaaggatattacgtacacaagcgccgactagaactagacccaagtcggttacttcgtatatcactcaatagcggctagagcgtatatgcatggttgttgtagactgctcgtaa

SEQ ID NO: 381089 - DNA, 275 bp, Zea mays
tggattttagatcttctcctgcaataaggaaagatttttgatgccttggctttattagttgcttcttatggaggtcttgaagcttagattacttatgtgcatcttttatggaaaggcttcacctttccaggtattgtagttaagttatgcactctgaagactatcaggacttgtaacaatttcaaccccttttatgttgtaaaacttgagttctggtattttgtaaaagtcttccgctctatctccaaaaaaaaaaaaaaaaaaaagaaagaaaa

SEQ ID NO: 381090 - DNA, 285 bp, Zea mays
gccagatcaaatgggtatgttgtttgcacttccagaaccactgaggagggaatacattgtcgacatgctacgtgatgaagcagcaaggagagagagagagaggtcaaagtgaaggtgctggtctagatgttgaatgatggagctttggaagttgctgttggtttggttggtctcaatctgtttacctttagtgttcttcatatgttgctgttgaatgacggtgaatgatgataaaaactgaatttttatgatgttgaatgttgttgaatgttcacgaatggtgtt

SEQ ID NO: 381091 - DNA, 283 bp, Zea mays
gagaaaggaaaatggcgagttttaagaggacggtaattttggctgcatcttcatgaatgagttgttacattgcagtgcttctagtcgtgcccttgtacatcgccgtcgctgcctcgtgcttgcaggtttcacgctgaaacctgctccggctactgctgctggtctgtactgtacagtcgttgattgtttttgcaccaaaatgcaagatcagattctgcacccaaaagaaaaaaaagaaaagaaggaaggaagaagagaggaaagagaaaaaaagaaggggggg

SEQ ID NO: 381092 - DNA, 240 bp, Zea mays
cgcaaactcaatgttgtccaagtgaaacagggtgtgggcagaatctgtcacgtttcagacaccggtagctttgaagcagatatgtgctagtgtagtgtttttttttactaccatggttgaggaacctgctttgtactgtagctcctgcaaacggaataatgggcaaagcaaaaaaaaaaaaaagaaagaagaagaaaaaagaaaaaaaagaagaggagagaagaaagaagaaagaaaagg

SEQ ID NO: 381093 - DNA, 288 bp, Zea mays
gccttatattgccagggtcaatgatgtggcgtgcaaggaatgtattggtgggatctgctcttggtgctggcatctgctatccacttggctgggtacagttaaagctggcagaaaaggccaatcttgagattgcaaattcaaaaccatcatccgatttgacagagggaaaagaaaatcaaagccgtgtgggtgctgctatcgaacgacttgagggtagtctgaagaagtgagtgaagcctacgcatcgatggcatttttctcgttgtcttggttccataaatgtagcag

SEQ ID NO: 381094 - DNA, 309 bp, Zea mays
acacggccgactttgacatcaatgtgtatgcagagagaatgaaacggcgagatcggatacggggagcttcgacagaggataatggcgaggccacctcttcccgatgttggacgaagaccacgagaaactccagttctgtttgaagagcgcagtaccactaatctggacgaaggttgaaactttagtgttatcctatatactgtatatgctctgagccacgcgagcgcggttatatgataaaactgcttagcatttatagttatgaacacaaagagtgttaactttaaggatctgcgactcgactcctaa

SEQ ID NO: 381095 - DNA, 146 bp, Zea mays
atagagaactgtacttgtgggtgttgattcttgtatggtgatgtgaatctgttttctatctgaactgttgcattgcttactactagcttgatttgaaaatgggttgtaattaccgctgttttctttggaatttactcctaatagat

SEQ ID NO: 381096 - DNA, 305 bp, Zea mays
cgcgcccccgaggaagagcaggagaccggggacccgcggtggggacaggctcaggttcagcatcccgcggtgcgtcgaggcgatgagcgccatggcggagctgtcgcccgtggagaagtcgcttgcgcccgacgtgttcttggacgagagcaaccgcgagatcttcctctcgctgagcgtagatgttaggcccatctggctgaggcgtaagatgaagagccttgtctagctctagttttttttttaatttttaattgtacccagtgctaatttatagtgcatgttatattttcgagtcctgcaaa

SEQ ID NO: 381097 - DNA, 176 bp, Zea mays
acgctatctctatattcgaacaccttaatataaaataattacaggggcccctcctatttctcaaaaaaaaatgaggaaggaactgacataggttcgagtaccctttgtctcgtctatcatgaatactaatctattttaccatgaatactaatctattatttggatgtttggttttc

SEQ ID NO: 381098 - DNA, 290 bp, Zea mays
acactccgtgacaattctcactgaaggcagcaagcctaacgggagtgcagaaccgttgcagcgctgacgttttatgggcctgctgttgtatctaaatacaggcttgcatgatattagagactattagttcatagcttgtattctttttgacaattgtaacatgctgcctgcttgtaactggtgtacttggtgttcgtttcatcaaatgttgatactcgttaacagcaaaaaaaaaaagaaagaatgtaggttaatgcgaggtagtggcggtggttgtgtgtggggtgttt

SEQ ID NO: 381099 - DNA, 305 bp, Zea mays
agtttgcggaaataaattcccccaattttctcaccgcttggttgattgacgcgagatttgctgttgcgcgacttgtttgcttgccttgaagcgaggtcggagtgccatctgttttctgcagcttctgtaattatcacctggtttcgtttcctgtggttatgtaattaccatccgcttcacccccgatcaaaaccacctgtggtaaggggaaaaaaaaggcaagaagcgctgtgttgtcgtaaaaaaaaaaaaagaaaaagagtgtttctggagaaaagtgttcgtaagtgtagagagtgagagtg

SEQ ID NO: 381100 - DNA, 249 bp, Zea mays
accgaggcagaagtagcaatggcagaagctgaggaagcagcaagagttgcagaggctgcagaaaatgatgctgaagctgcaaaggtgttcctgtttctcattgacaaaatgacagcatcaagaaaagcctttgcagctgtcattttgtcaatgagaaacaggaacgctgcttccatgatacttcgagcttgctgatcctttacccatgcagcacaccgatgttctgctgcaaagattttctggatagac

SEQ ID NO: 381101 - DNA, 244 bp, Zea mays
agtgaggagtctatcacggacacccaaacgcatcagagttgctaaatttggagctgaggcctgcggtgaatgagatcgtctcttttgtctcgacttccacgactttctttgggctgaggtctgcggtgaatttggagctgaggtctgcggtgaaaaaaaaaaaaaaaaaaaaaaaaaaaaaaaaaaaaaaaaaaaaaaaaaaaaaaaaaaaaaaaagaaaagaagaaaaaaaaagaaaagagga

SEQ ID NO: 381102 - DNA, 294 bp, Zea mays
atgattgatgctgatgagcatttgcaactgccacgagttctgcgatcgctctctaacagaatgttccgatatcatctgacctgtacatacagtagctacgtattatatactatggcagcgatgcccgtttgtacaaagaggaatgtagcacacattgatagaaagggaaaaggttgtgtgactgggaggcttgatgcgccctaagcctaaaaaaaaaaaaaaaaaaaaaaaaaaaaaaaaaaaaggggggcccccccattaggggccccttcccccggggatttattcccggcc

SEQ ID NO: 381103 - DNA, 295 bp, Zea mays
agcgaggaagccggtagtgttgatgtgatggacagcatgatcaggttcgccgtggctccggctgcagcagtagctgcatcatttgaccagtgagatttttgttttcctgatgtttggctgatgagagagtctctgccaacggtgatccacgcgtcctggtgattctgctacgctctgttgatcacattgtgctttgtataaccctggctgatttgtggtaacaccgacagtcactgtacatttcctggtactgatccactgaacttaactatcctgctgtcatggaacatgaggg

SEQ ID NO: 381104 - DNA, 294 bp, Zea mays
agtaggtataactggtcttggtggtgatatctaggacctggaacttgcttgctcacatgtagtagagagtatggtttaggggtggactgctgagagagttctctctcggcactatttatcgccaatctaaatctaatgataggtttaccgcatcataaatatatatgtaacggctatatcgtctttcgctgattgttctggcatatcatgataggtttacccaaggacgaaagctaagtaccaattggtttggaactgtaaaaaaaaaaaaaaaaaaaaaaaagagagggagaa

SEQ ID NO: 381105 - DNA, 290 bp, Zea mays
atctaattgatcttcttcaaggacttcttcggtatgatcctaatgagcgcctgaaagcacatgaagctctacaacaccctttctttaccagatgcatcagaagatgtggtttctgaggctacactgagattgaaaatgtcaatgctgtatttcttcattttgatgtgtaagaactacataaaagtggagatgttctacgaaaaatgaaatatgctaacttaaaaaaaagaaaaaaaaaaaaaaaaaaaaaataaaaatggaaaaaaaaaaaaggggggccccgccttttt

SEQ ID NO: 381106 - DNA, 292 bp, Zea mays
gtggttattaccccttacataccctgtttcttggagtcatcggttcttgccaccaaacactgaggttgttgtttctgggggacttctctgcatgttcaacaagagcttgatcatccaagtgtttggcaaactagcagtgtgggtaaatctactagaattaggtggtgcaaagttggattacatgtctttaggtgatctagtctgatgatgctttaatgtcctttcgtaatgctttgagaaagctgtttacaggacaacatggttagttccatgatatatcagtgagaaagct

SEQ ID NO: 381107 - DNA, 293 bp, Zea mays
agactcccggccggtgacggtgagccgttgggagcgcggtggttgtgtggcggcttcttgtagttgtagcaacaggttggagctggaaggcgctacggggctggagggacacgcgacgcgacgctcacgcagctgcctgcgccgctggcccgttgcgcgtcgggagtggcaacgcgagtacgaaagagatgggctcggctcggtcgggcaatataagattggctgacaggacagtttggaagggagcgggttttggtgtgattaggccataattcggtcgcctggcaacggcg

SEQ ID NO: 381108 - DNA, 202 bp, Zea mays
cttgaattcaacttatgatgtatatcggacagttccaccacattctggcgccgccttcgtctgatcctggaggcaattggagccgctgcaagtcggatcctggtggatgcagcgcaacacagatcgcaaccctccaaggttaactctctgttaagcagatggactgagaagtggaaggttgccattctgagacagtctgaaa

SEQ ID NO: 381109 - DNA, 147 bp, Zea mays
ctaaccttagagctaaacttgatcgttggatgatcatgtccatcattagttctagtgattagtccttgcattttgtttggttggacttggacatattgctagtagctaggcctagtggagaagttcttcgatcgtgtcctccaagtc

SEQ ID NO: 381110 - DNA, 293 bp, Zea mays
actcgatggcttgcagtataggtgaatttgatggcttggaaaggctgagggaagataaacttctttcggaacttcatccttcgtttgcctctagcaacggtgatctggagttgcgatatgctttgaaaactcgagactagatcagttttaatcttcagctactaatttatgaagtcactgtccatacggtggtgatgcaaatgagatctgcatctggtgaacggatttatgtaaaaagaatattcaatgtgaaaaaatggtgaacctgtttttctgatgagtcttgctaggtt

SEQ ID NO: 381111 - DNA, 291 bp, Zea mays
agtcaaagttgcactaactacatggaaatggatcgaagggagaaagtacctgattttctggatgttcttgatgaacttctggccgtacttcttccactcgtacccgtcctcgggcaccaccatcagctggctgccgttgccggcctctgcctccgccgccgccgtctcctcgtcgtcgtcctcctccctcctttggtttctctcttctcctccgctcactctgcatgcatcactacagttgtggctagaaacgttagctacgcataaatcgtcgtcgtcgagaacctaacc

SEQ ID NO: 381112 - DNA, 289 bp, Zea mays
ctttaactagatctgtgaggcaaatcactatttttgtagcatgttcaacgaggcaatttgttcaagctagtccagaactctcctttttcttgctcggtaataaaaacgagattgtagaacatgtacatcaccgaaattgcttgccaaagacggattattgcagcctgcattaataggaatactgacaatgagcgtgccacaatcaaaggtggtctgttttgaatgataatgtttgaatgaagatgggactgccgagatgtgtgttaaattacaaacaaacgaatgtcga

SEQ ID NO: 381113 - DNA, 281 bp, Zea mays
aagatacttgaaccgcaaaccagctaatgagggcccaggtggtggtgctggtggttcttgaggcatggatttctcctagtgcggttttggtgtagaaacaaattatctgttctgtattgatagtaaaaatcagatgtatttgcaaagagaattgttcagtgttgtgaaaggatgttcaggctagtggaggttgttatgttcctgtctgattaaaaaaaaaaaaaaaaaaaaaaaaaaaaaaaaaccaaaaaaaaaaaaaaaaaaaaaaaaaaaaaaaaaga

SEQ ID NO: 381114 - DNA, 297 bp, Zea mays
gaagaagatagtcttgtttcctagtgtagtatatttgatgagaagttagggtggcggtttcttcttgcgtggtagcccgcgtgggagatccccagtatgtggaggaaatgcggttagtactcttgacctgcgtgaggcttgaggaagttcgcgttgtgcttgtgatgcttcgtatgtatgtcaagatctctgaattctgggtgcagaatttgtatcgtcaggcatctgttttgatgctctgttctgcttcaaaaaaaaaaaaagaaaaaaaaaaaaaaaaaaaaagggggggccccc

SEQ ID NO: 381115 - DNA, 298 bp, Zea mays
attttgatagataacagagttgtgttggaaggagggttcatcggagagtggccactaacatattctgcaagttacattctaccttttgccactcactactgctacagcaaatgagcaatcttattaggatatagaggatttgatatactaaatttacttcttgttgtgcagactgttgatccatatatttcagatgagagagtgggattagctgagcctgcagaaggaatacagactgtgccctcatgggaaaaaactagacaatttgaacttgttgctttgagttgcttgtactgac

SEQ ID NO: 381116 - DNA, 278 bp, Zea mays
tagccatatgtccttaactcggatgacaactccaagaaataaaggccaaagaagaccaaccatgtcaaagaaggataagcatcaacacaagacttcaaagatcaagttgaaccgccagcggaatcaagatccacagttcaggatgaagtctttccttattatactcttccttgccacaacctattatctatacttgccataatcgtacctcatttgacctaatagatggctagacgtatatgtctatattttccaaatcatctactatgccttccgat

SEQ ID NO: 381117 - DNA, 304 bp, Zea mays
  unsure (1)..(304): unsure at all n locations
aaccncntgggctatcgtcgaaatccccgcaaccgtgttggtccgcaacagcacgtcgtcgatctgcaatccctggccttgtggtcgaccttggtacgctagttgatcacgtgatgtggaagtcgagctgagtcgaccatgagatgctgttaagcgtgggtttcttagcaagggatactgatgaatgaacttgaagatttgcgtgatcggatcaagcgccaggatgtgagatgctcgccaagtggacgtcatctaacaacactaaagtagtgtttatcctaggcaagccccggtgcatttgcca

SEQ ID NO: 381118 - DNA, 288 bp, Zea mays
acttaatgaaatcttttgagaataacttgcctatttaactagtagtcctttttgatggtggcgttgtttgttagctacaaaatcatcaatcaaagattgtaattatatcaaaaaaaaaaaaaaaaaaaaaaaaaaaaaaaaaaaaaaaaaaaaaaaaaaaaaaaaaaaaaaaaaaaaaaaaaaaaaatgaaaaaaaaaaaaaaaaaaaaaaaaaaaaaaatactagaaataaaaaaaaaaaaaatcatagagaaaggggagtgcacaagaggaacttagtttggggct

SEQ ID NO: 381119 - DNA, 134 bp, Zea mays
atttcagaagacataaacattagcacataaataggtttaattacttaatggtgcatatttcacgtggtacaatcgaattcaatctgttgtacattggcaatattaacgagcattagtgatgtactatgttgaat

SEQ ID NO: 381120 - DNA, 295 bp, Zea mays
cgtggagggagcttctgtagggaggagcaccacacgtgttgttgttaccaggcttctctgtaaggtctgttgtgcccgtgatgcttgtatgctaatcctgccgtgccaacacctctgcgcatgcgagtcgtgcggaatcagtcttacagtatgccctctctgctaccttgcaaaggacaatgtgattcaggtggaggctcggtttggctgataaggaaagaggcaggcagggggggaagaagtcgtcatgcatgttttgttcttcataaggtgttagttgtaaccttgtatgagt

SEQ ID NO: 381121 - DNA, 294 bp, Zea mays
gtgaagctaatgccatggaatggaattctcaccacgtttgctggctgtacgagtacacaaatctgatgaatggattcagctaaaatgtcatagaatggacccggaatttatgctctttttttgtgctctctcagcatgtgctagctggttaagtactagcattgctattgggcgctattttgtatgcttgttctgctgtcttttggatgtaaacgaacaagtttgcatgcttgttctgctattggataagaagtattagcattgctatttgcatgcttgttctgctggttaaga

SEQ ID NO: 381122 - DNA, 278 bp, Zea mays
ggggcgtcggtcctcgagtgtcccctttagggcaattttcaaggtccacgatgcagaaaaccttttgacacgggcaggcttcacccctccaggagttgatgttgatcattataccgttagatacaataatggtttgtagaaaaagaaagcttcagtttcttactcgtaggacactgactatttcctgtgatgcgaaagtgatgtggggttcaagcatcaagcaacaatctgtattatgggaggaaactgatccttttgtattcattttgttcaccttc

SEQ ID NO: 381123 - DNA, 145 bp, Zea mays
aaagcaaaagatagcaggaaacaggtttactgattgtaagaatctgatagtttatactcccgtttacattcctgcactaggtttctactgataacaacaaaattatcctatggtgtaatgaagagcatagtggatgttaacaggg

SEQ ID NO: 381124 - DNA, 294 bp, Zea mays
agcgcatgcatatacgcggatgtgtgtgcggctttggttctgtaagacgacgactagtagctaggtcttttttagcagcagcacagaagctaaggagatgcatgctgatgacgagcggttgtttcggcttagctctccgtatgctgtgtttgtacaaaccaaacaatacagttatcttcaccgtaaaaaaaaaaaaaaaaaaaaaaaaaaaaaaataagaaaaaaaaaaaaaaaaataaggaaggaagaactaaagaataggaaagagcaaagaaaaaaagggggggccgcccc

SEQ ID NO: 381125 - DNA, 285 bp, Zea mays
tcgattcgacgaatcggctcacttgtacataaatatagcatcaccatgcacgtaatagtcaatcaaatgtggtgatctatttatctggtttcctttccagaactgcacctaggaggcatagtaataaatgtaatcacactttaaggctagtttgaaaacttaaatcccctccaggattcccaaggattgagcgagaaattagctcattttctcactcaatcaccgggaatcccggagaggatttaactttccaaactagcccttaatcatgctttccataatcta

SEQ ID NO: 381126 - DNA, 294 bp, Zea mays
aagagtctgagactgagagagaataattaaatcgctgtgcttctataacaaatcatgctgttttgttcaccagagatcccgaattatgattattcagtttctaaaaaaaaaaaaaaaaaaaaaaaaaaaaaaaggggggccccccgacaagggaccccgccgcccgggaaataattccgggccgggaccctgggggggacccagtttccccaaaggggggccgtataaggcctgggggaaaccagggccaaggcggtccccgggggaaaatttttacccgcccaaattcccaca

SEQ ID NO: 381127 - DNA, 305 bp, Zea mays
caaaaaagctcaatatgacccacatgattcactttgtttctgaagcaccaatctttcaccttagtgatcagttaaaggtatcgagccatgtaagatgcaatatacacttttgaagttctatataaatataaaaaatagttgcacattccttattttttttcctcgaacgcccaagagaactgcacaccattaatattaagtaggaaaaaaaaaaaaaaaaaaaaaaaaaaaaaaaaaaaaaaaaaaaaaaagggggggccccccatttaatgcccctcccccccggggaatttttccgggggggg

SEQ ID NO: 381128 - DNA, 235 bp, Zea mays
agtaatatgactatttgttgtatcagggtaacaactggagcaaatgtaccatgtatattaagcattaatttaactgcatcatttgtaccatgtatattatgactatgtatgagatattgtctcttattagtactggatgtgatgtgtctaaaaaaaaaaaaaaaaaaaaaaaaaaaaaaaaaaaaaaaacgaaaaaaaaaaaaaaaaaaaaaaaaaaaaaaaggggggggcccca

SEQ ID NO: 381129 - DNA, 313 bp, Zea mays
ttctgccgtgtcgcaggctgcaacggcactgtggccactgctgcattcgcggccagtgctggccaccatgtgtttgttcatgatgctatgtttgaggatccatcacaggcactgccattctcttggcagtaggattgttttgttgtcctgtttttatgtgctcctgttgtgttctcgatcgatactctagtgtctgatggctgggaattcggggtacctgtgcacttgcagactcaggttgtggtccgtcagagatgtatacaagtgacacgacgactagtgctggcatctgataagaagtggtagctgctgt

SEQ ID NO: 381130 - DNA, 299 bp, Zea mays
taggttcttgtcgtcgtcgtctgtgcatgcatgtaccatgtcgtcgtgcatgtctattatgtgtgtgtcgtcgtgtcgatcggtacgtatagatgcctgttgttagcatgtgtgtcattacctagtcgtgtgtagtgtatgtatgtgcttgccgggcaaaagttgcatctagctaaacagtagtattacttttgtttgtcttcgatctcaggtgaatttgtatctgcaggaagccaaacactactggatctctgcacgtacaacgaagcgttattattaaaaaaaaaaaaaaagggcgg

SEQ ID NO: 381131 - DNA, 105 bp, Zea mays
ggctgttaggatactgtcttgctgattttaaagcgaacgtttactcacatcctgccatgctggttactgaatggtcaaccgggatatttgcttttttgttccttg

SEQ ID NO: 381132 - DNA, 291 bp, Zea mays
cctgaagtgagtaccctgacacacactgcatgagctaactgaggtagggtatgcagagaagcaatgcaaagcaatgtaattgttctgcggacattcgatgtaagtgggtgtaactacttaatctttaaacgtatatcgtcatgtgttctggtggagccacagatttagcactgttgtaaattggaaatagtgactgatatgatccctcagatacttagcacacacccaaaagaaggaactagccatggtgacatccttgagtggatgattttttgttgtcaatagagcgcg

SEQ ID NO: 381133 - DNA, 281 bp, Zea mays
ggaaaaacaacttgcggctgagttaatgaagcttagtagctaccaccgttgtatgacagttgctcagagatggtatcctcaataagtggctaaaataacggcaagtccgctgtgaaaaaaaagaaagaaagaaaaaaaaaaaaaaaaagaagagggaaagagagagagaaaaaaaaaagtagaaagagggaaaagaagaaaaaaaaaagaagagaagggggggcggcggacgtgggaggagcgggagcgggagatagtgtaggcgggggagggaagagggg

SEQ ID NO: 381134 - DNA, 233 bp, Zea mays
tcgttttgatttttgaatgtgtgcagtcaggtccgccagtttgtagtatcctgttgctgttggtttcgggtgtcttggttgttgagtgagatttagaatgtgctgatacttcgtttcagtgcttgtactttagattcgacctgttacgaaaaaaatgaagagtacccactgaattttaaattaaaaaaaaaagaagaaaaaagaaagagagaagaagagaaaagaagaaggaa

SEQ ID NO: 381135 - DNA, 217 bp, Zea mays
caacaatgtgttttacgatatccccactacaacttttttttaacacgatattatcactataacttgatatgtgtggtgggctgaaaaacggtttccttcgcccttgtgggtcctcggcgataagggtgaacaagccctggtcttctcaaaaaaaaaagagagtggaggagtgtgagaggaggaaagagaggagttagggggtgaaagagagggtgtg

SEQ ID NO: 381136 - DNA, 200 bp, Zea mays
catctgatcttcagactagtaggccttaccatgggttggcttagctagctagtctgtgtatcttcattgtatggtaagtgtctctgtgtgtgtgtggaatatggcaggtccgaatactggagatgagtgactgtcataccggccggcggcattggtctttggcaaaacacaaaaaaaaaaaaaaaaaaaaaagggggggg

SEQ ID NO: 381137 - DNA, 241 bp, Zea mays
attggatgttcctcctacgatggctagctgatgcttctaagatgttcctgacattgtcattgacatagtacgtgtacaacagtcctgtgtgaaacaatgttctttttttttggaatgtatccaacccattaggtgacatatgtatagaaacgttactggttgcttaggtacttgaagttctacgctcttgctcaaattaacctacagattaattcagattaacaaaatccagaactggtcc

SEQ ID NO: 381138 - DNA, 295 bp, Zea mays
tgtggagaactgctacgcgtgtttattagctatatgtttacgaaggggaatgcttaataataaatgtttgtcagcctgtgtaaaaaaaaaagaagaaaaaaaaaaaaaaaaaaaaaaaaaaaaagaaaagagatgaaaaaaagaaaaaaaaaaaaaaaggggggggcccccactttttaggaccccccccgggggtattttttcgcgggggtggttaggggggggagaccttctccccaaagggtggggtattagaggagggggaaaagaggggagaagtgttttccagagagaa

SEQ ID NO: 381139 - DNA, 242 bp, Zea mays
tgaaatcttgcgccgacggagagttggagcgtgtatgtattgctatctctatctacatgtctcatgtagagtggatataccctggggtccccaaaagatgggggcctgtatgtaacactacgtgtaatggttaaggtgaatgtgccgtgaggcccccaaaaaaaaaaaaaaaaaaaaaaaaaaaaccaaaaaaaaaaaaaaaaaaaaaaaaagaaaaagaaaaaaaaaaacttaaaaagaaa

SEQ ID NO: 381140 - DNA, 247 bp, Zea mays
agcagagaaagactccaaggacgtggaaatggaagaggaggcagggaagcactccaaagacgtgaatatgaaagagaaggcagggaaggagtccaaagatgtggagatgaaagagaagatagggaaggaatccgaatatgcaaaaatgacacataaggcagggaaagaatccaaagatcgtggagtgaaagagtaggcacggaaagactccaaagacgtggaattgaaacatgaggcatggaacgac

SEQ ID NO: 381141 - DNA, 284 bp, Zea mays
gtgcaatggagtcagtacttgtttgaagaagccacatggtaagtggaagtcacgataggaagcaatatccatatctcttcgactcaagataactagaagccattgttttgtagcaaagtttagtttgggttcaaagggatagctaggagggaacgaaaattgctaatttctctcgattttgattttcaatgcataacacctattttggttaatctcagggcacattttttccccaaaggggaggttggtcatgaccctatcatgatagtcatttccatactcat

SEQ ID NO: 381142 - DNA, 285 bp, Zea mays
ggcgtggggagtgtcgtcgtgtcatcggctgtggtgatggacccgtacccgacgcccggaccctacgccgccttccccgccggcgcgccgttcttccacggccacccgagacagtgaccggcggctcgctcgccagcagccgtcccgctgtgtaacgacatcacgactcccatctctggctcgctcgatctgtcaatttcgttagcttcctaatttcttagcctcttgttgagatgcataaattcatgttccttctagagcctagctagctagcttaggcgccgg

SEQ ID NO: 381143 - DNA, 288 bp, Zea mays
gcctaagaatcttccgcctggagtggactgtactttcaggaaaaatcgttctaaaatatccggtctgcatcttcggggaggacgattgggcgcgacgatgcctcggtaccccaagaaacaggatcccatcgatcggtgctcaagctcgccagcaaccaaagaaaagatgcctccaagaaaaacaatttccagcttccccgattcaacacatgtggattagcacaaactctcttgtttagctttgatttagatctagttcctctgaattggtcccacctaattcttgac

SEQ ID NO: 381144 - DNA, 293 bp, Zea mays
ctttggagccgtgaagtatgcggtcacctttgcagctgccggtaccgcattagactacgctgcactgaagttggcccctgaatggcattcgctgaaagaacaactgtctgaaaagaaagactggtttacactacccgagtggtcacctatccaggtgttggatgaggaagctttggctaagaaaaaagctcgagaagagaagttgtttgcccaacgagcactaggtaaacttgacaaggaggatcctagctatacggccttttggacgactgcgcactaacagagatacgatg

SEQ ID NO: 381145 - DNA, 116 bp, Zea mays
tggagatgcaactacaagaagacgctgaagaaatgtatttcgtactgtgaaggtttagttcacgagcttcccttgcaactaaaccagcaataataatcaaggtctcaattcatgtt

SEQ ID NO: 381146 - DNA, 293 bp, Zea mays
cactgattgtggcaaacaagatagacgaagagggagctgaagagatgtacgaggagctgaagaggagagtgcagggtgttccaatatttccagtttgcgccatcttgcaggagggggtgccagatctgagagtgggtctaaggaaccttatggatgactcagatccacagggcgttgattttgaggaaaacgactgttgaatgaggttcgatcttttctctctcctcatgacactgacgcatatgagtgtgttgtggatatttcttctgagaatcagaggcttatatggatag

SEQ ID NO: 381147 - DNA, 284 bp, Zea mays
cgctgctgtgatcgatccgccttaaggaaaaaagctgtaaattcgcacgaagcattcggatggaagatcagatttaatttgcagaggtggcactcgtggcaaacagacactgactttgctttcctctgaagccgaatacacatgcattgacatggcctgcttttatatagcaatccaccttgtaagaaatatgacctttgggttacttgcatagctgtgggccgccccacatgaaactatgaaagcatctcgctggccactgtacatctttatttaagctctgt

SEQ ID NO: 381148 - DNA, 117 bp, Zea mays
cttgaacgctgattttgtttagctgtgttgattgcagtatgtaggaaggcgactgctgtatgcatttctctcttacttttgtgcaacttacggatgaaagcattggcaggccataca

SEQ ID NO: 381149 - DNA, 284 bp, Zea mays
atcccaagcccgtggacagcacacacgcgacccgagtttgattctgccaggttgtttaatgtgattttctatccatgcgatttgtcgatgttgtgtatatgtgtggttgaacggagtacgcgaaggatgaattagtagaatctgtcggtgtcacttaaaaatttgaaatacaagcgagtacatatgcgtgttacatgtgtgtttataattctagtgctccaaataatttgaatgtaattagtaaatcaaatgttggttctcatttggttgtttgaactctaatg

SEQ ID NO: 381150 - DNA, 267 bp, Zea mays
cagattggtcaaggttactgtattcagaatacagctcctgaagacgtaggcgggtttcagagaattgccattctggcatacagttgactctggttcgttaagctggtagcccgctggacttcctgcggccagaactgtccacaacattttgatggccgtggaatataacattttgcttaatgtgtccagtgtccaacagaatcagggacattttaagaagaaaaaaaaaaaagaaaggaaaaaaggtggaggacgacgatgggagga

SEQ ID NO: 381151 - DNA, 211 bp, Zea mays
ggcggatcatcctacatgaatttggagaagctgatagtccaatcttcggtttcgagaccgaatacatgtggcatttaattagtacagtattatatttgctgaataacgtacatagctggtgctcatccatgtcatgagtgactcacaaataatcaaattcaatttgtttgatgtcttcgtgtgaacatatgcatttacatttaattagttt

SEQ ID NO: 381152 - DNA, 123 bp, Zea mays
gttagtagtagcaatagcgaagccggacaagacaaatccattcagtcatgacgcatgtacttgctcagctgtgtaatgtagtataatgccgttatgcaatgcaatgtttacctgactgactgt

SEQ ID NO: 381153 - DNA, 284 bp, Zea mays
cttgtttccgcacaggagtctggatcttttttttttgcattaaaccattgtgctacttggtctaaagcgttactgggtctttcgtttcaggagtctggatcttttttttttttgcattaaatcattgtgctacttggtctaaagccttactgggtctttcgtttcaggtgttgaaaggtttcatctactttgttggaaggagtttttcaacattcccattgtattatgattccgttgatcaagcaatttgtgtatgcgcaggcgcacgcacagcgtacaccttt

SEQ ID NO: 381154 - DNA, 296 bp, Zea mays
ctttccggtttcagtcagccctgcaaaagtgctcctccgttcgtacgcgtttggtgttggcttctgcggctccggtgcccagagttgctgccggcggaggccgagcaggagcgcaactaacaagagcggccaaggcgccagtgatcctcaccatggacaggagatcgatggagatgagcgtgagcttccgatgcttcggtacccgaagaaaagaacgggaacaaaggcgagaaacatgatccacctctatgctttctcggcaacatatcctatgcttaaacagttatggtgttcaa

SEQ ID NO: 381155 - DNA, 164 bp, Zea mays
tatatatatattttttgtgttagagaagtgtggctcagactgccagcattggttagtacgtatagctcttgggatattggctcttctattcatcggctactgtaacttccattttcttttgttctgaagactacctgtaccagactttgatccaggttccaggg

SEQ ID NO: 381156 - DNA, 110 bp, Zea mays
ccaggtcggaaggagaagtgtatgtacccaagttcaatagcaacgatgtctatctgcatgtgtgaagtatatgacttggtaataaatatgaatccatgtacatatatata

SEQ ID NO: 381157 - DNA, 288 bp, Zea mays
atgatggccccgtgacaatgcaaatcgactcaccctcactgcaaggtgctgctcagtcaagcaatggttatgatgatttggttgcggatggtgaagcaagagtagctaaagagacgtgttaaaattctgggtctcctgctgacctagttggatctgaaagccctcctgctgtgcacttggtatgaactttgcgtctatctggtaggctggtccaaagaaaatatcagaattgaagttggtattagtcatgtgatttgccgttaatttttttaaacagttctagcgctt

SEQ ID NO: 381158 - DNA, 146 bp, Zea mays
gcaagacctagttcaaagtgccttgcggcctcaggatttgaccgtcacggtggttcgacaacagatgtgataactggatgtctctgcaaggcaagtttagaaagccagtgagtcattgttgattgaagactcacgtcatcttggga

SEQ ID NO: 381159 - DNA, 299 bp, Zea mays
caaagacggtacctctgaagcagcaactcagttgcagatctcggaatcaaatactggtcctccgcaactaagaacagccgaagaaagtagcaccccaatgaacgcactcaagagcgccttgtacgaattcgtcaaaggctgtgtaagacctctgtgggaagacgggctgctgtcccgcgaggtccacaaatttgtcgtgaagaaggccgtggataaagtgctagacgtctgggctcactcgacggagataaacgtcccaagaatcttgtccgatgaagctgaacgtataaggacccttg

SEQ ID NO: 381160 - DNA, 243 bp, Zea mays
caggatctctagtacatctggggggtttgtcatacatctctgaataacgtctgtatcagaacagcggggcaaccacgccgatgggtacccgtaataatgcaataagtagcagatagtttctgcatttagattaatgctacttgtacacaggagaacatatcaataatatttttttggctgttcgattgagggtgcttaaaaaaaaaaggaaaaagaatgacaaaaaaaaaggggccccccccc

SEQ ID NO: 381161 - DNA, 239 bp, Zea mays
catggcacaggtggtggaattgggcatgacatgggtggtcgattcggcaaaggcggtcggggtcttggcggcggtagcggacacggtgctggttgcggcgggggcgttggtcgtggaagtggccgtggcatgggtgccggattcggcacgcgtggtggtcttggccggcggggtggccttggcggtggaactgggcacggcgtgcgcgccggattcggccagggtggtcatcttcgtgg

SEQ ID NO: 381162 - DNA, 203 bp, Zea mays
ataggggcctaccatgttggtgagtgaccgaccgaccgtcggcgggtgactggactgtatgtaattcgtacgtacattagttctaggctctttgtgtagatattcgatggaatggaactacgaactaccgctcactgctaataatcattgggttcaaaaaataataataacaagcggttccatcgtttggaacttagaatggt

SEQ ID NO: 381163 - DNA, 99 bp, Zea mays
atgtcttcacaactgacgatctgtgtgtggtacgcaccacgcacgcaagtcgcggttgtgcgtgtacgtctgaactctggagcattggtttgttgtacc

SEQ ID NO: 381164 - DNA, 150 bp, Zea mays
ataaactgatgtagtttgtgtggccctcaaagcatctatgtcctgatttgtgtggtttaggtttccttcggcacagtttctaatctaatatgagttttgtcaattagagagaagtggctatgctgaatttatgagctgattttataaagt

SEQ ID NO: 381165 - DNA, 136 bp, Zea mays
acacattacacgcgtgcctcagtgtgtggttggcgtgtgtgcgacgtacggaggcgtgtggaacgcatgaaacgggcacgtacgccattgacgcgcctctctccgtccctagaagaataagctaagcctctgttct

SEQ ID NO: 381166 - DNA, 201 bp, Zea mays
agaccagaaaagtaaactcttggcggtgtggtactgttgtgatttggaagcacgagcaatacaggcacaatctaagagttcaaaagcccaggcatattaactcttagattgtgcctgtattgctcgtgcttgaggaccagaaaagaaactcttggcggtgtggtactgttgtgatttgcaagaataaaaataaatttctgt

SEQ ID NO: 381167 - DNA, 276 bp, Zea mays
atttgaagtatgaaactgttataggcttaaaggttatgtgcatctgcaattcagatgactcagttgatctttttatgtccaactccaacggagacctccagaagcaccaatgcgttgtgtggtcctaaggcgcagtagcgatgggaagagaggcaggagaaggccaaatttgacatgggtagaggtagtaaaaggagacttaaaaggatggaatatatccaaatatttagccttaaataggaatataggagtgcatacaccataggaaacagttat

SEQ ID NO: 381168 - DNA, 268 bp, Zea mays
attaccacacgttatgatgcaactttggaagagagtactgctggttccagaacttcacaaacagacatttgttaacgcagacgaccttctgaatggccatcctgttaccacagcgccacaaggctccagagataccgacaagcacatccattggctagtgagaaaattagcgatagagcagaagacgccatcaacaaaagttctctgaaaatttcgacaacttagtgaagagagcctaggcactaatggctcccatcagaatggtttc

SEQ ID NO: 381169 - DNA, 141 bp, Zea mays
agggcctaccatggtggtgacgccgtgatttgcagggagatcgagagaaacacatgagttcttcttcgccgtctcggtgcttgcttcctttctcgagtagtattatttcttgcttgtgcttcagaattcctcgtgtggttc

SEQ ID NO: 381170 - DNA, 101 bp, Zea mays
actcaagctgctgtaaccgaaccaatctcatgtagcgtaggcctagcgcagtcttctcatctgttcgtagctctcgaaattgattgaatggaattagagtt

SEQ ID NO: 381171 - DNA, 301 bp, Zea mays
ctgaggaggagccgaggaggtactgagagcacatggacccatattgtttgctcgcccccagagattctataatagccaactgcaggggggcccttccttgagctcgagagctttcgacgacctaccgcagcgcatttctacagcgaagaaagagcgttgtgtgtcttgattgatgtcccgtgtttttacagttttggtgtgacaagttctgaaacccgtgtttttacaactacactacaacttcacatgcttattcgaaacatttgaactgatgtgtcaaaaaaaaaaaaaaaaggggggc

SEQ ID NO: 381172 - DNA, 107 bp, Zea mays
accacccttggcttaaatcagcattagaaaattctccatgtttcctgttattctgtcactagtcgggaaatggatgaattccgtggtgcgatcgatctctctttccg

SEQ ID NO: 381173 - DNA, 296 bp, Zea mays
aacatatctaggggtgggcattccatttattaggttaattcggtttataaaaaaacggtttctccgccggtacgggaaagacaccccccgatattatattaagaagaagctcaatcggaaccccgaccgagaaaggccacgaaagctggccagaaccgaaatatatgttgaaaaagcagaaaccggaccatactaactgaatatttcggttcgggtatttctattttcggttttaaaccaaaatcttagaaacgtcacaaaaacatgtgtggttggctcttgactgtatgagctac

SEQ ID NO: 381174 - DNA, 276 bp, Zea mays
  unsure (1)..(276): unsure at all n locations
cgcagatcccttggggccgtctcgcctccgcgcgacgccggcagcgagctgagtttggtttcgccgggttgctcggattttgggtccgatccggtcttaggcgttcgtcatgagcgtcgtgtggcgaggagatggatccaggggcaacaaagttttggaagtagattgaggcgttgactggactgatgttcatagtatncggagaagatcgttcggatatatatatttacctaaatcgctcatctgttagttcaaaaaaaaaaaaaaaaagggcgg

SEQ ID NO: 381175 - DNA, 137 bp, Zea mays
atatgatcattagtatttcagtcacagactcacatgcatggatgtaaagctaagaattcactttccagattcgaaatccactcagtcacaatcagcttgttgatgcgacacaaatcaaacatccattttttttttgc

SEQ ID NO: 381176 - DNA, 253 bp, Zea mays
agaaagcagatcagcgtctgaagaaggcggtattcagggaccgaagtcagtccagccaagcagcaacaaggagcaccggttgtcaaaacgcgtcaggaagcccaatgtccgtgtttcaggcccagaatggagtatgtaaggtgttacgtgtgtgtgcgtgaggctggatacttaagccgcgcaagtggcgtggtgtaatcatcttggacaagaaattcctaaatgaaactctgagccgccggctctctaccct

SEQ ID NO: 381177 - DNA, 157 bp, Zea mays
cgagcccgagaccgagccgcagagtcacgcgacgccagtctgtagccagcagcaggctatccaggagcatcatgacgacgatgacgaagaactcgcgctggagctcacgctctggctggagctgctcgtcaggcagaggcagcggtccaagtcttcg

SEQ ID NO: 381178 - DNA, 296 bp, Zea mays
cggctcgagatagacaagcaccgagttttatgcataaccgtcatatatgatattttacaacacttaatatttgtaggcttgtaccgtgcacatacgtgtcgaagttgtctgcgaacctagttgcatgagctcagaattccttttgagctggatactagtatgctaggtcgagtagctactatgactaaatcaggctctacggtagtagtcaaatgattttactagcactcgagcgaagtcaggaattggttgtatccattctgatacttgcatgatgatggtctatggacacggat

SEQ ID NO: 381179 - DNA, 288 bp, Zea mays
cagaaagatcctactctaagaccaacctttgcagagattgtggatacacaaactttataaacaaggtggtttggagttctgtgcatcaccagaggcatctaggtcgatcccactcttcttcgtatttatgcccgctacgcaggatggcactatagcgctgatggagttggacgatatcatcagactcgactgggtgtagatgggatgaactctgctcgtgttgaaggcgcgagagagagagcgtgcttagcttgcgtgagaccatatttcggttcatattttttcatg

SEQ ID NO: 381180 - DNA, 306 bp, Zea mays
aaacgctgaagctaccagacgactccatggacggctacgacctcagctttggcaaccctgagatgaacgcagggatccctggtttggattttccccacaatgctgaaatgaacttcggttttcgtggagatatactctgggattcatggtagttcagctgatttttgtgttggaacttggaataatgcttgaggtaggtgacaatctgtgctttcatatatatgacaattgacaagttgaaaagttgcctggctgtgttttactatcaatgttgtacttgtacatagcatgaatattattagaaaa

SEQ ID NO: 381181 - DNA, 308 bp, Zea mays
tcgaaagactggttgtctgctcgatgtgctgcaatccgtgcatcgcccacccgtcacgagcaacaatctgtttgtgttgtacacagaatggcaactggatgtataggggatttatagtcattttaccatagattgaggtttgctttgtgggcatcgtgtaaaattcgtctcagattgatggaaactaggaagaaaaagaagatggcagtgtctttaggatttggcgagttgtaatggggattaggcggtgctgtagcattctgtctagtttccaggaatttgtagaagacaaatgtaatctgttgttc

SEQ ID NO: 381182 - DNA, 155 bp, Zea mays
cgtaaattccttttgtagcactgagctgttttcagtcaccttattttgtatacaatgaaacagaacgctgtgttcatggcacagtgatttggtgacaaagaaaagaaaggaaaaaaaaaaaaaacaaaaacaagacgagaggtagcaacaaagaa

SEQ ID NO: 381183 - DNA, 214 bp, Zea mays
gagttttgtggcatgcgaaaagtgacttcgtacctgaagcctatcttattgtctgtttcggtactgtatgtcctactacatgctagtagagctgtgcggtatgtggaaaggacaacagagagcttcttgtatagccaattagccacctagtggaacttgcaaagagcttccatgagaactctcgagatacttatgtattgtaaatacttgacat

SEQ ID NO: 381184 - DNA, 182 bp, Zea mays
tcgtcgggaactacatgttcctgcaggtggcgccgtcgacgatgacgatcacgggcggctgcaccgtggtgccttcgcgcatcacactacggctgtatggcaggcgtgcattgaccgctacctatgagcggacctacgagactgcgacgtgcactaactccgtgtcagcaacgaggtgactt

SEQ ID NO: 381185 - DNA, 290 bp, Zea mays
tgggagactgctgcagaggcaagtagttatcgcggaactagtgtttgttcatcctccgaagtgcagtgcaagcgatgagagacccatattgctggttaaagacatccttgaggaatttgctgatgatgataaaatggactaatccagagaagaaaggatttgatccgaagtggctaggtttagcagactgcatcgacagggcaggcagggacattgagagaatagtaaaagctgacctgttggaagagctggttggtcgatcacttcttgttgtgattactccatttacg

SEQ ID NO: 381186 - DNA, 294 bp, Zea mays
atgatatgagcttggcggccatggtagacctgcccgagctctctgcccctcttgctaaattgatattgggtctgtctctcgtgcggctggctcctgattcagacaacaaaattcaggttggggcatttttgactggtaaggaactaaggatgcaggatgtaaatagtttccaaattgatgcttatcacatcctgtaggcttttaatgattccccacattttctctgttgtactactgatggatgggttgctcgctgtttttttggggcctggtaggacctttatggaagatgca

SEQ ID NO: 381187 - DNA, 121 bp, Zea mays
cttgtgctcatgtttgcttagggcctcctgacaattcaaatgatcgggcttgtccaagcttgaccatgtaacatacattgtactctgcgtgcttgcgtagtgcatttgcgtcgcgaatgca

SEQ ID NO: 381188 - DNA, 280 bp, Zea mays
tgttgtagtactacccaagcctcaaccgttcaaagtgttgctcgaaggggatatgtacaggtaatgcatccatcgtactattgatttagccatcccaacctgcaaataacctttgcatattctgtttgacatttttacatattgttttctttaaatgaaaccgactcatactgctcggcctacacagtgagtatcctttatttcatcttgtcgtaatttcatactgtttggtgatttatacaagccttcttatgaaaaaaaacttgatcactgaaggtgc

SEQ ID NO: 381189 - DNA, 138 bp, Zea mays
tgaatactttataacatttcaaattgtaattattttgaatcactttcttttgtaatcttttgtaatcactccgatgaggtataataatatcttgataaacttgtaatcattttgtaataaagaatttatttccgctgc

SEQ ID NO: 381190 - DNA, 259 bp, Zea mays
gcgacgaacagctgcacggcaagacgatatgtgtatgcacctgcaagccttgctcccaccttttcattagtgaagatctcaacctaacttaattatcgattgcgctgcgcagcgtcaagttcgcaaccaaatgcttcatggacgaagaggagggctctgttgcgattgaaggcgaacaatggctgtcctgcctacactggagctcagctctcagtcgactagaaactaggagtggcctcaaaccgggtcactagtcaca

SEQ ID NO: 381191 - DNA, 253 bp, Zea mays
tgaagacaccccctcaatcaccctgactagggaacaagctaaacggtgggaagaatggcataagggcaaagaatccgagtgtccaaccagcactcctcttggttctgtggcaactacatccacccagcacttcggagaagagaactgggaagaggattgggactgaagtcaagcgtaatgggctatggttcatcaatcaagaggagcaagctttgtcagcaacaacagaaggaaataaaagggaaatcatgct

SEQ ID NO: 381192 - DNA, 169 bp, Zea mays
gtagactgcccatgcgtggagaagatcatatgttcgaggataggtcgagaaggcttcacacctgcaaagtgcaaacacattattgtatcttgagtaaactgtacatgtggaagcacgatgttgttccccgcttctgcagaaactcgccaataataacaatcttgattgc

SEQ ID NO: 381193 - DNA, 124 bp, Zea mays
ctcgagtccatgggcggttgtaaaatctgacaacaaagtggtgagtgtgaatttggatctggtggtgagtgtgaatttggatgagtgtggtgtctttgtcccgaggtgcaggacacagactgtt

SEQ ID NO: 381194 - DNA, 306 bp, Zea mays
tggaagaagaagctgtttgctctctctggtggggttgatctttcctcgtcttcttgttccccgaggaatagtggcaaagctctacgtgcaaaagtccaacttcgctgtacgaaggcttagctgttatccttctctgggtcgtcatcaaacttcggaagttgccacagaatatctttttccagagcccagatctggggggaaaaaggcgaaagcaacagccgatcaggcgcccaagattcgcgtttccagtgggcacttgtggagggagtggcaggtgcatcgaagagcactacacactcatcttgg

SEQ ID NO: 381195 - DNA, 188 bp, Zea mays
gtcacattcagttaaacgctttgcatacgattcattatttcattcagagggccagatggtagaggctgagaggttgtcatagtgttttcaggccactgctctactatacccttatgttatgttcaagtaattgttcatatgtgaagttattgaccaatcaactgatcttgctcctcgtaggaggaagc

SEQ ID NO: 381196 - DNA, 302 bp, Zea mays
  unsure (1)..(302): unsure at all n locations
cgagcccgagaccgagccgcagagccacgcgccgccagcctgcagccagcagcaggctaaccaggagcatcaggacgacgaagacgaggagctcgcgctggagctcacgctcgggctggagccgctcgtcaggcagaggcagcggcccaagtcttcgcgcagganctgcgatcacagcggactgagcgcggcgtcgagcctcatgtgcttgcgcctgcagctgccggcctgatctctcacatgctagttcctcacaacagttctcgtattctctggccctgctgcctgtgtcaagatcaaga

SEQ ID NO: 381197 - DNA, 298 bp, Zea mays
cgtgtaaggccatggccgatgccaacgcatcttctagtggtgctgatgtagtgcttgattgacatgtgaagctaaatggaccaattgatgtgacttggagccatggtgagccatatcctcgacctcatggggctgtctttaagtgcttttattgttttaccaccaaaaaaggtgggggtgtgtaacacccaggtgtttgtcacgagctaaaccttaattctgaacctaagcaagtagtttagataatgaactctatgtcgcatccatctttgtctatctcggtgatatcaagggtctt

SEQ ID NO: 381198 - DNA, 184 bp, Zea mays
ctcgagcgcttactgatggtgtaagttggatcctatagtaaatctgtcaagttcaaaaggtatttttttttcttcaccctttaccatttgtcgtggattatactctggtcttgttttggttagaccttgaggccggcgtaatcctcgtggatgatatttgcaaataaatgtaatatttgctttc

SEQ ID NO: 381199 - DNA, 295 bp, Zea mays
tgcacgcggggcgcgaccaggtgcagtcgctcggcctgcgcttcgaccgcctcctggcgctccccgccgcctgcagcctccccaacgccaacgtctcgctctacatcaaccttctgaacctgaagccgggctcgccagactacgcgctcttcgccaacgcctccaagatcacgccatcagccggaggagcccggcgagcgacacgacgttatcaggctccaggctggggtccgaggcagcgtcgcgctcgccgtggtctctgcgatcgtctcgtcagtcttctgatccgaccgat

SEQ ID NO: 381200 - DNA, 283 bp, Zea mays
  unsure (1)..(283): unsure at all n locations
ggccacagacggaagcaacttcgacgcgaacgtggtcatgatcctggctgtgctcctgtgcgcgctgatctgcgctctcgggctcaactccatcgtccggtgcgcgctgcggtgctcgagccgggtggtggtgggtcctgaaccgaaccaggtgacgcggcttgtccagagccgcacgnacgaggaaggcgctccgagccatgccggtcctggtctactcgcctgggctgaggatcaatgctgccaacccgacatgcgcgatctgcctctcggacttcgaggc

SEQ ID NO: 381201 - DNA, 109 bp, Zea mays
gtcccttggagacgatgtgtggtgtaactaaatctgctgaatgtagcacaacagtgcctactgtgacacggcaaaaagaggtagcatcgagttcagaggaccaaagaga

SEQ ID NO: 381202 - DNA, 215 bp, Zea mays
tcggattcggctcgaggttaatcctgtgaaactttagcattctgtaaccgtggatgtcgagtttatggagttccttgtgtggagcctcaagtcaagttctcgtcaaagattgtaatctgatggcttccattgtgacttgtaggcggctgcaataaacttacttgatgcaaaaaaaaaaaaaacaaaaaaaaaaaaaaaaaaataaaaaaaacaaa

SEQ ID NO: 381203 - DNA, 213 bp, Zea mays
ggatgaacgacttcgtttctttaaccaaaacatcccgtacattacaaacatggcggctcgtacttgagctaatgagtccatgagcagagtggtagatcgtttcagtttccgtctgccaattttttttctctgctaataagtatgtgctgtttgtgttgatcttagaattatgactcatggtccgaactcacttgaattgaagtctggttttct

SEQ ID NO: 381204 - DNA, 278 bp, Zea mays
catggtagcatgacggacaagactacatacatccatccctttgtatgttttctcagagtttgcagcatggaccgacctcaccgaacactggcgcgtgtctcttgcatcttctgcctgaatgttaaatagaggctacttaggcctggtgttaatgtacttcaaacatgaatctacctttaatagtggactatgcgaatttgttcatgttcttattgcgtttaaaaaaaaaaaaaaaaaaaaaaaaaaaaaaaaaaaaaaaaaaaaaaaaaaaaaagaaa

SEQ ID NO: 381205 - DNA, 152 bp, Zea mays
gtaacatttttttttgtttaaaaacacagagatgggccaatttagaatcgctttctgcttgttcagttgatctgcgatggtacttgctaattaatcttgttttggtgctggcagtgcaagatgctggttctgcaatacattcccctcatctt

SEQ ID NO: 381206 - DNA, 243 bp, Zea mays
  unsure (1)..(243): unsure at all n locations
gtgagatttgattttatgtatcactagtctgaatattctaacttgtttgagattgcctatgatttatatatcacagtggataaagcctnttcttcgttttttcgggcagtgaatttcagaagaagattacgagatgttctggaagatgattacaataacctcattacacaatgtaataatactgtgatttcggatgaggatgatagaacactgtggttattgggcaataaaggtttctctgtt

SEQ ID NO: 381207 - DNA, 206 bp, Zea mays
gtagttaacatctttttgaatcactgctagatgtcctacactccaaaagacgccctggaatgggctgttcgggagatggaggaccacacctgtcaaattaggtagcttgtcggcagtgctacaagcacaccaatgccaaccgagcatctgaaatgtgttaacctcaagatttttaagctcgcggactggcttgacaaggtttcaat

SEQ ID NO: 381208 - DNA, 109 bp, Zea mays
gttttattatgatgcactgagactgatttattaagcagtgtggagttctcggctgctgttctcatttttaatgcaagtgtgttcaatgagcagtgttcaatgacaaaaa

SEQ ID NO: 381209 - DNA, 222 bp, Zea mays
gttttgttcttcgtcgccacatcgttgctcgggaacttgggacttggttttgcttgctggccacttttctgtaagctagcacctgtcgaatggggggaatcgctagctgctggatattgggttggccactgtttgttcttatgtacgtacaacagattcaagagctaaaccatgctgctgttgtctgtaaaagagttgcaataaatacggccagaattcctg

SEQ ID NO: 381210 - DNA, 110 bp, Zea mays
cggctcgaggtttttcatttcaaattgagctgcgcatgttactttgagcctttggaatagttcggcaacgaaaaaggctccttttacctttctgataacagtgttgtgca

SEQ ID NO: 381211 - DNA, 231 bp, Zea mays
catcgatcgtctatctgcgacgtctttccatgacgatgcatgacgacgcgcccgtctccttgtctggtgcagtagtagtagtgatgcttgctttctttgtcgttgtttgcacccttgtctgcgtgcagtagtactcgcgccgcttgtttctctctcgtcagcgctacgtaccggttgttgagatgcaatcataataattgtttggctatagaaaaaaaatgcgataataat

SEQ ID NO: 381212 - DNA, 150 bp, Zea mays
tgcgctgggtcaggtatcaccgagctgaatagcctctgggttattgcctggacgggacccaaataatgttgttctgaataccaatatattgtatatttgatcatcttttgacattgaaatgttgttgctgttgtaaaagcagctttgagg

SEQ ID NO: 381213 - DNA, 261 bp, Zea mays
caatcgagtctgaagggaggcgatttgcgttgaggaggtgctcacctgccactcgaatcgacggtcacagtcttcgttggggagatcgaaggtagctggttcttcggctagggagaaaaagacgggctcagctcgggttgtggtgcacgacagcgagttgaggaggtgccaggcatcacggtgcggcgtcgggctcgctttatagacggggaaaggcgattcgcctgagaaaaatctcagcagacgactgtgcgcgacgac

SEQ ID NO: 381214 - DNA, 109 bp, Zea mays
gggggcacacgaacaaaagaatcgctaggaataaatgggcgaacaaggttaccaaaaagtgggcgacatagattattaggtctggttctgctgccactctgtaatcccc

SEQ ID NO: 381215 - DNA, 168 bp, Zea mays
aagagacacaagcatccgtttttccgttatgatcaaaatgttgtacatgagaatgtatgcccacctttatatattgtgagcgtgtaattacagcttttggacgacgaacaaatgagaatataagtcccaatggaaggcaggcaattccgacaccaccaaatatctacc

SEQ ID NO: 381216 - DNA, 105 bp, Zea mays
acttggagtatcagttgcctatcacagttcttatttctaacaggcaactgataggctgcagtctcctggtcaatgcaatgcgctaatcctgaattgcggatttaa

SEQ ID NO: 381217 - DNA, 154 bp, Zea mays
cgagctggtatctgatgctacttctgagtgtagatcgcgtttgtgcagccccaatccactttaaggaatgctatcttattgactggagatggctgtgattgtgctaccgaatctatatttccatatgcagttcgaatgcagcatatgagagtct

SEQ ID NO: 381218 - DNA, 130 bp, Zea mays
gcggctccagcttcttcatgtactggtagagggaatactgagatacatttcgagaagacacaggcaaggagctaagccactggactgtgtcaggtcgttgattctatatactttttgtactagtaaaggg

SEQ ID NO: 381219 - DNA, 153 bp, Zea mays
tgaatcatcttctagcggtctgtgtctcatggtgtttatctgcatctctttatatcattatagacaattcttgtgtaaagaaagtgctgcttttattcccagttttgtattgtaaattctttgagaacatggatattatctcttcatgtgttt

SEQ ID NO: 381220 - DNA, 192 bp, Zea mays
  unsure (1)..(192): unsure at all n locations
gtctctgttgcttgggacctctttctgtactctatatatgcagtgtatatattacctgtgttattaaacttatgcatgttccatgagctgtatatatatcgcttccgttgttaatatttacatgttccctttgacaatgactgtacttgatgagtacatggatgttaattanaaaaaaaaaaaaaaaacaaa

SEQ ID NO: 381221 - DNA, 298 bp, Zea mays
gagtcccgcaaaatctcgctaggtgagctcaccacggctgagggagcagagattcttgccattcttaaccgtggagctgtccacgaggtgtttcgtctccgcatcggtttggtgaacgtagataagtgatctggagtacaaaaaaagtacacacacaatatgtacttggcttgttttgcccattgtaaatatgtgtaatctttctgtgttgaaagtcatctgctgctctctgggttcttctttgttgtaagtgcaactgtggggatggatcgaagtatggacccatttaaactttgtg

SEQ ID NO: 381222 - DNA, 210 bp, Zea mays
aaaacagtatttattaaaatgacatgattatttatttagaaaatctgcatggaatgcatgaaaaactactagaggtaataaatgaagttaacaaggttgcagatataagcccaatatacaaaaatcaattgtatttctatgttcctccagtaaaaaaattggtcattgaaataattaaaataccattttacaacagcattaaaatataag

SEQ ID NO: 381223 - DNA, 235 bp, Zea mays
gcatcgacaagtacgttggtgggaggtgaaatctcaatctgggccactagccttggacttccatatgtagacggatgggtatgtgtataccgttcatatcgaactgctgttgagtagttgtatgtagataataatgtgatgctcactccaataaatgcgattcaaggatgggcaagtcatctggaaaaaaacaaaaagggcaagacaaaaaagaagacagaacaagagaggtgag

SEQ ID NO: 381224 - DNA, 297 bp, Zea mays
cggctcgaggtcgatgatgatgagctagcagtgacacctaagaaaaatgaaaagccaagtgcaagtacctttgttggttaagtttatacctacagttgcagctcctattctgtaaaattgaagcttgcttttgggttttaacctatctagtgtctgtagtttgatttctgaaagaaaaacggaatacatgtggtccaacaagactgtcaaatgaatagagcaatttgccgatggtctacctgtgtaatttcagtaggttacttctgttaacttttttttggaccgggatactgctgt

SEQ ID NO: 381225 - DNA, 265 bp, Zea mays
tgtggcgaggatggtgcggagtttggagacagcggcacacacctgagggcctacgtcacgctgctcaggtttgctgtcgtggttgttgaaagtagataggattttactagtttcgtataataaaaaaaccgtaagcatacgtccgcaaccgcaccacaaacactaaacatgggttgtctcgaacgcttcgcggaaactattttcaagtaaaatgattgggttatcaaaaaataaagggaaggaacaatggtagaagtaagaaaaa

SEQ ID NO: 381226 - DNA, 207 bp, Zea mays
agcacttacccataaagcgggcacacttagggcgcggttcactgcaccaaaacccaattttccaggtcttatgggtaagatcggcgaatggaatgctattgtcattttcaaaggatgaattgagcactactcagccttctattgtaagtctactggttcttgttctctgtggttaaaaaaaaaaaaaaaaaaaaaaaggggggcccc

SEQ ID NO: 381227 - DNA, 305 bp, Zea mays
cagcgactggatgggctttttctctccgaagagaggctccagaccagaggctcggggaggccaggccaggcgagatgggcaccccgggtatgtaccaagggggtgcctgcggtgtggtttgtccgtatccccaagagttacagtacacagcatgtagatctcgtcacaataacattctttcgtattcttcgttccgcattggcgtgtgtgcagtaatatgagatctaatagttctttcttaccctctctggagtgtgttgtgctgtataatttccatggtgtcattgtgttgtggagttaggaaa

SEQ ID NO: 381228 - DNA, 289 bp, Zea mays
atcagtagacagcttgctgttcggattcttaacagaactttgtatgcaggcatacgaattttgttaagaaactaaatagcaggaagcacacacctatgccagacactcctcgttccacaagacagcatttgcatcatgcagtgcttaacatacccatatctcattcgcagtgtttggttatcttgtaatactatgtggaaaaacagtggcatagctcaggaatctaggccacaatcagatccttttcaggaaccaggtgatatccaatgctttgatggacaatagatgt

SEQ ID NO: 381229 - DNA, 244 bp, Zea mays
gattcctgttctgagtggcaatgtagagacagagcgcagattcctagggtcaatcaggattaagggttgcggatagggcagaggggtggtaatggatgacgatctaaatgttttttcataaaatagtagagtattaaataaattataaattttagtgtaaaatgaatataaataggatttgtttctaatccgatctttatatcttatagtgtaaaattatatcttatagtgtaaaataaaattt

SEQ ID NO: 381230 - DNA, 122 bp, Zea mays
agttgctgcatctactgagaaacatgctgctgatgtttcatcacatgctaaagagatcccacgaaacattcagccagcaaaagttactgatgatcactacaagagaagtgatggcgcccttg

SEQ ID NO: 381231 - DNA, 138 bp, Zea mays
cctagagataaagtgaacggatatcaagatagaaatgcattaatgtttttgtgctgtgtagtataactgctatttaccccttttctttttttgagagaggacgcatgatgtcgtttgagcaataaagtttaatttggg

SEQ ID NO: 381232 - DNA, 111 bp, Zea mays
aaaaaggtgcaaggtgcaaaggccaagtcaaggactggtgtacgtgtcatagaatttggggaagaaatgagtgcttcctccttgggtgaggtgaaggagcagggctcgtgt

SEQ ID NO: 381233 - DNA, 189 bp, Zea mays
ggataggggcctaccatggtggtgacgggtggccgtcgtacctgtcgtcatctcagctctccgggccgagatagcgaagaatggacacgggatactttctagcttagagtgtactccgacgaatctattcttgattttgttctggtggtaaaaaaaaaaaaaaaaaaaaaaagtaaaaatataatctat

SEQ ID NO: 381234 - DNA, 121 bp, Zea mays
gtcatctcaggattcccagcaagccaagcgaaccgcgcgggaaggcgcaggaagtggtccacggcgagccgagctcgagtggagcgcgagccgctagacgacaaggtccatcttatttccc

SEQ ID NO: 381235 - DNA, 287 bp, Zea mays
gctgggagctaccagaattaactgataaccagcaactgatttcgggcttcctctacagcgacaatattcattaatccaagctacaatttcactggatcatagaaaatcataccaatccatgcttgaaatttcactgccgcgcaacagacatcgtgctgaagcaataagacatcatattctagattgaatcaatcattcaattgtcaattgggcagactacagaacgatacatagttttggcaaacaagataacggaaggagctgtagtgctgtacagactacctaga

SEQ ID NO: 381236 - DNA, 283 bp, Zea mays
gtggtccgtcgaacaaacgttggcactaagcggaacctgagtcatcctgtgacggcatctgctcatgtgttttcctttcagcatatcatgcgaacagtcaaccgagactgttcgtcgacgtcaaaagagttcaagatagtatctgagcaactgaagtggcttcagcatatctgaccaagacctaccgattctcacctctgctagggccatgcttagccctgcaaatcacttgagttcgtctgtcttccgccagctatgtgtcagctccgttagccttcacaat

SEQ ID NO: 381237 - DNA, 292 bp, Zea mays
gcgtcctggtgccagacgacgctggcatcttgctccacttgtgaagctgagagagtagatccagatcgtgggcttgtttgtccacgtgtgtttgttgtagcctgtctctccggctctccccgctcgacgccggggaaagctggcagttgtcgagcgcggtgtgtcacatgactggggaagacgaagatctgtgtctcctgcatatgccgatgatcattgtgcatcaaggttccaggagtagcttgtctcatcgaactggttagttctgtcgggatatgtaacctttttttct

SEQ ID NO: 381238 - DNA, 244 bp, Zea mays
tatgggaaagctggcagatacacggaatcacataaagtattcatttttttaatatataccagcaagtttccaagtgcaaatatctctataacagtgagcaatttcaagagtaatgtacaagaactgcttgttttgtaacaattccatgactactaatactactattaaaaaaaaaaaaaaaaaaaaaaaaaaaaaaaaaaaaaaaaaaaaaaaaaaaaaaaaaaaaaaaaaaaaaaaaaaggga

SEQ ID NO: 381239 - DNA, 290 bp, Zea mays
gttagggttcttgataaaaccgagtcgctgttcatatggagatgtcacacccgaagataagaagattgtaatctagcatgacctcagatttaaatctgtgtagtggagcattttatatcaattaattgttgtatatcagcctctgttgtaaaattttattgttgacaagatagtctaatgaatagttcgtgaaaaaaaaaaaaaaaaaaaaaaaaaaaaaaaaaaaaagtaaaaaaaaaaaaaaaaaaaaaaaaaaaaaaaaaaaaggggggggcccccctttttttttc

SEQ ID NO: 381240 - DNA, 264 bp, Zea mays
atgcacctatcccgggttatttttagtgtggaaacctgttttgttggatttatttctctgtagattgctccgtttgtcttgagtgctactgaattgatggcacaaatggctgataacccaaagtagcgttgctggtgcatgatctgacatgtttggatttggacttaggtgtggtatatcttttgccttatgtacagtagaatattatctacaaaaaaaaaaaaaaaaaaaaaaaaaaaaggggggccccccaaaaagtgaccc

SEQ ID NO: 381241 - DNA, 282 bp, Zea mays
ctcgaatgggagctgtctcctcctgaaggagcgcgaatctttctgctgtgccacaatcatatctgccctgagtgaggaagaacctgatcagtctgatgatacctctgaagatgaatgagtgatctcatggtatgtctagcagcttatgcgaatggaactgggaactaacagtacaaatgatcttgtgatggtgaatgagtgacactgactgactacttagctacttgtagaatccagagtggattgcgataccatgaatcgataaggtcatttcgctgctta

SEQ ID NO: 381242 - DNA, 297 bp, Zea mays
gcgtagtgatgttggcatggaaaagggactggaatatggttgagattcagactagacgtgacctgggatgctgccacaggcgtccaatccgaaagaaccggcggcctatcctgagctcacattcagaacgatgcgacggcgatgatgggtgactccggccattcacccatcctcttgtccagctagcggaggcggccttttgtttgcattgcaacgcatggctgtgtgtgaatccagcttcctcaaaaaacctttctttgcaatgcaatgcaatgcaatcgagtggtggttgttttt

SEQ ID NO: 381243 - DNA, 204 bp, Zea mays
ttataattcttttgaatcactttcttttgtaatcactccgataattgtataatgtaaacttattgtaacatgtaatcattttgcaataaagaatttatttccgctgcaaaaaaaaaaaaaaaaaaaaaaaaaaaaaaaaaaaaaaaaaaaaaaaaaaaaaaaaaaaaaaaaaaaaaaaaaaaaaaaaaaaaaaagggggccccc

SEQ ID NO: 381244 - DNA, 292 bp, Zea mays
ggcgagtatgatgagacggggcgtctattgtgcaccagaagtgcttttagagacaaactgccttgaactagcacggttgtgcaccatttgctgctgttcatgtcacagctgtgctcgtacctgaatgttgcaggtgccgatgcttgagtccactgtacgccagccacagttcataccgctagccacagttcatacctgactgttgcgaagtgttggtgcatctaggtcggttgggtttatttagagtgcaatagagggtaacattgacgtgtattcgttaggagttttagcc

SEQ ID NO: 381245 - DNA, 243 bp, Zea mays
atagtttctagatcgcgggcggccgctcgcgatctagaactagtgaaaatggaatttatttccatttgtagtttgtttgggtgccacaaggaggcaaaagtatagcaaggaattgtaccttattttttttagggattgtgtacttttctgctgttgagaggagtttggtggttggataaaaaaaaaaaaaaaaaaaaaaaaaaaaaaaaaaaaaaaaaaaaaaaaaaaaaaaaaaaaagaaaa

SEQ ID NO: 381246 - DNA, 148 bp, Zea mays
atgcaaacattgttctccccacatgcataacctgatactagtattgggtggcaaactggcaatcttgctgtttctgtcgaacatgtgatataagttgtattattctgttgcaattttaatcccaaatagattttgtttggatgcagat

SEQ ID NO: 381247 - DNA, 298 bp, Zea mays
gtatattagaacactccgtcagatgatcctgactgatatgccaaaggagttagttgaaagcctgcgaggaagtgacgcgcacattgttcagcatgttcccaacatccatatttttgactccagtgatcctgaagcagtaaataacttcatattctggcctcatcttgccaagaagtacggctctggtgtaactaagtatgaccctagaaaatgaggatcatctggaacctggaaaattattgggaggtttcagcaataaatatgtctctgatttgtaggacaacccttgagcagtgag

SEQ ID NO: 381248 - DNA, 203 bp, Zea mays
ggttattcaaaaaaaaagtctgcctatagactcaggtttcttgtacacctatctgctttagtaatagagaaacgtgctctatttaagtggctctgatgttaatttatgctcatcatgtggtttgtttcgcttaatgttgtatgcttcttatgcctgtttgttgcccaagccttatcgaatatcgtgaaggatgtgttgttgtt

SEQ ID NO: 381249 - DNA, 188 bp, Zea mays
gtggggggaaactttgttcctcctctttggtagaggaggcatcatgaggatggtgggcgggatgagatgttttgtagcatagtagcaggagggaaggagagggatgatggcagtttttccaaggattgttgcttcccttttgctttctcatctgtctgctctggcaaaaaggaataacattcttgttc

SEQ ID NO: 381250 - DNA, 281 bp, Zea mays
ggcagcacggcggcggacacataacgatggtcctctcgcagttcaagaagatcagcgactggctggaccaggtagggaagatcgcggcggcggaggaggaggagcagaggaccaaggaaaagatcgagctcttgaagcgcaagatctacgggtttgtcattagccacatggggtctgcgttggagagcccgcatcggtctcggtttcttcgaggacctgagggctgtaagtggatgcttcatgctctagaactcgctctctctctctgctcgaagtttctg

SEQ ID NO: 381251 - DNA, 188 bp, Zea mays
gccaaacggagacgcttccctccagaactctggggtgcttgtagaagtcagtctgtccatcaaagacaaggtgaccagcaatcgcaaaacaatgacaggccggtgccagttccaagcgacggagggcgaaggctggggatggtcaaatttcatggcgacgaatctgtgaaggactggtaccttgtgaa

SEQ ID NO: 381252 - DNA, 268 bp, Zea mays
tgatgaaggtgttttccgggtatttggcttcgaaacacataattgatgctgacttagactaccctcatatagaatggtttgcattgtagattcactttcgaattttgtttacactgatacattttgtagatgttcagtgtaacttggatgctaatcaatcttctgtaggcttgaactgaacgtcattgttgtagtgtatcacaggatacccatgtgactaacgtatttccgggatccaattctatttttattacacttactttttatt

SEQ ID NO: 381253 - DNA, 286 bp, Zea mays
attccaaagaagagattggattggtggaggatgcagatacaaaagatattgtacgtgttagatatgatcagatggcagaatacactggagatccagagttgcttggctactgattaagtttttttgggggaggatatgcttaccgggagccttctgctatgcttggtattatatttttcttctttacaaactgtcaagaattgctgcaatgtaaaaccttgaacaaactggcggttgctatgcatttcttacttgtctttgtaagcttgctacttatttgtcagcc

SEQ ID NO: 381254 - DNA, 290 bp, Zea mays
ggcaagaccggcggcagcgctgtcaagggaggaggctcctactccgggggaggcgcgggctcgggcaactcaggtgtcggagttgcggggcatggtgatggtgctgagaagtcgggctccggccgcgacggcatgatgaaggctcccggcggcggcggctacatcctccgctccgacttcgaggccaacccgaaagagttcttccagggcctccaccagggaggaggcaaaaagtagataaatcttgctagacttgttagcaagctagctgcttgttgcatgacaagcta

SEQ ID NO: 381255 - DNA, 282 bp, Zea mays
ggttcgtggtcgtaaaattttctcaggtcctggtcctggttcttggtaattgatggccgaagtacaaggcctcgacgacgccggtcagtggtctcctgaggtagacgtttctcccctctccctcccctcctccagtacatttcaacagctaggttggaggcgttgttgctttgagagtttgagtagtgacttgtgattgtgagcactcagctttcaccggggcatcaatgccacgagactgagaagtgtccccctccgctctgatgccgctagaatcaggca

SEQ ID NO: 381256 - DNA, 281 bp, Zea mays
tgcaagcaaaccatggtctcagtgtcaagcatcgaatagaactgacccatgtcagatcatcaccgaagaacatatatgatatggtgcatagggcagatttttatcttttctatggtgtgggacacagttgcaacctttcagtgattatctttctttaaatttgtgatgctttacgatgctgccaatgttgtaagctgtacagagggtgctgcagttagaaagtatattggtattttctctattgtcagccaaagtttacagtgatgatggaaatacagaga

SEQ ID NO: 381257 - DNA, 310 bp, Zea mays
tatgaaccagtgttttattgtatatatggcttctttcttcacgccgcatcttatttggacattgatacatatatatggttaataagtaaagcttagcatctaattcgctcgatccttttaggttaattttctgcctttattttttcttcttctctacaagcattacacgtacaaactatttttttacagtagatatttgtacaagcattacgctttggtgattatttgttagtttttttaaccaaattgtacaagaagcattacatgatatttgtacgaacgcgaaaaagatgttcgccacaaattcctg

SEQ ID NO: 381258 - DNA, 295 bp, Zea mays
gaagaagttcaggtttttcttggatgtgatgaagcttgagatagctgatgtgatggcgcacactgactctggcgttgagcttggagaagaatatcatgccaaggtgcgccgtgctgagcatattgatgaaggagggtaagcttaagcggacacagaagttgattccaccactgctttccaattctagggtcttctcggagaggtatgtgttgaggcatgctaaggatgtgcctgatgttgttaaggcatttgagggcaagattaaatttcaagggtttggggaatcagaggttag

SEQ ID NO: 381259 - DNA, 289 bp, Zea mays
catgttatcaatggaaaaccggttgaaattaagagaacgatccctaagggagctgctcctttgaaagatttcaagacgaagaagatttttgttggtggattaccctcagctctaaaagaagatgaattcaaggaattcttttccaagtttgggaaggttgtggagcatgaaatcatacgtgaccatgcaaccaaccggtcacgtggatttggttttatagtctttgatgcagaaaaagcagtaaacaattcaaataacctaaaaaaaaaaaaaaaaagagagagaagag

SEQ ID NO: 381260 - DNA, 260 bp, Zea mays
tgtcgaaggcggcgccgcgggcgggacaaggcagaggccgaggccgaggacaaggaggagtgacgggtgtagtcaggggggaacgggaacggctggagttgtttgcgtctcgcgttcttttcacctgtacgcaggaaatactcctcctgcataagactactgtacttttggataaaaaattttatttctacatgactatcacgtagatgtaggagcagtatctataactgtaggagtatatactagcacctattatctac

SEQ ID NO: 381261 - DNA, 296 bp, Zea mays
gtcaggactcacgtgtatgatggggatcgatactccttggaggtttgaagctccccaggaatcttcatctccattggactgcagaatctctggggttgagatgactgatgagggcacagcgtggaggggccgatgttctgttggtctgcactgtggattttgtttagcttcccatttggaagaagtgccttgcgtgtgtgttttttaccgagccaactgtcattctaaagctgagccattgcagataaatccgtgtgctgcgtgatgcttgtgtgtggtgtaccagacatgtagca

SEQ ID NO: 381262 - DNA, 156 bp, Zea mays
gtcagaatggaggagttgaaaaacatctggcaacatgttgttaggaaaaaatttaatggaaacaaggatcatgagcattctggtagcctagatgataccgatcgtaacagaccaaccaataatgataatgaatatgcttcctctgcgaatgatggg

SEQ ID NO: 381263 - DNA, 113 bp, Zea mays
atctgactcgcatgtacttgtaaattcacttgaaatgttgacatggtcaggttttccccccatgtttatgcgtatctggtaatctcacggttcaagggctcgaatttgtgtgg

SEQ ID NO: 381264 - DNA, 293 bp, Zea mays
cggctcgaggggagagcaggaccgggtctttccattggaacttggattacggctgaaaaggtttgtttatttatatgtgtcatcaaattcaagtctttaatttgattcattaatctttgctctgttaagagggacaaaacagacattttaaccttctgtataaaaaatctcaggcatctgggtgatacttccgaactaatcattgtcaagaatgccggtcatgccataaatcgcgaaaagccagcagaactttgcagactgataaagcactacatcgttgatccctcagtcaa

SEQ ID NO: 381265 - DNA, 297 bp, Zea mays
tggctaataagcgcatcttgtccaaagatggtagtaatcctcaaagtcacaatacatgagctgctactcaactcagaaagcttgtgaatgttctggatgtccattggtggtggtggctgatgatcaagtgtggcaaacatgttttgccttgaagaacttgtgaactactccatacttcgcctgcgctgcgaatctccacatcatatcaaacggcagaaccaagtccgcgatgcagcagtcgtttggtgaggatggaacattgtcaaatagcgatcttctgttggcatatacatttta

SEQ ID NO: 381266 - DNA, 289 bp, Zea mays
tctcgagcgaattcggctcgagaacaagagaagttgaatcatactaggagttgttttacataggggagatctttaaattctagggggatagttgtatgatggtgccagccatgatgcagtgttttctgaatttctcagattgtatggcaatactaaggtatgatgatatggctgtactgcagcttccaggactgtaggggtgcttcagctctgtgaagtgtgaactgtgtggtatggggagaattctgatgcctgttgcaatttgtcaatggccaagtcctaggtgatt

SEQ ID NO: 381267 - DNA, 235 bp, Zea mays
ggatattcagttttcagttcactctgtattaggcatgtgatattattttacgtgggtaccacaactgctttatgaactcttagattgtgcctgtattgctcgtgcttgaggaccagaaaagtaaactcttggcggtgtggtactgttgtgatttgcaagcataaaataaatttctgttgatcattccaaaaaaaaaaaaaaaaaaaaaaaaaaaaaaaaaaaaaaaaaaaaagaa

SEQ ID NO: 381268 - DNA, 272 bp, Zea mays
ctcgtggttgccgttgcctcgatagatgatgttgaagctgcgaataaggtaaacccgctattccctgaagtaaagaactgtctgtgcggtccaccaccacttgataaggattctagtcgggaggtgtttttttaccagtgaatgcgagtgtgacaatatacgtaacatattgcaagatcaaaaaaaaaaaaaaaaaaaaaaaaaaaaaaaaaaaaaaaaaagaaaaaaaaaaaaaaaaaaaaaaaaaaaaaaaaaaaaaaaaaagcatagtc

SEQ ID NO: 381269 - DNA, 287 bp, Zea mays
  unsure (1)..(287): unsure at all n locations
actgctcgagctcgaccgggcgtgcttcgtggcaccctacagcacatttctcaaaagttcagattgaccagcaacagtatagttacatatggttatacatagtagatagatagtgtctatttagattacgtgcaaagataaaaattcagtactatccactgctttttgccaataatttacaatacatgcaaagtacanaatacagacattttgcaaccatgctcatgtttatctagatgattaaacagtagcaggttctttcattgctanatgcttggcaacaggtg

SEQ ID NO: 381270 - DNA, 281 bp, Zea mays
agaagatggaaagagcatggtcgtgccgcccagtgcttgccggggcgcgctagcgacttgtgcccatggcctggccggcggcggtgtcctctgttgccaagcgttctctgttgccggagaagaaatgtgcgtgcgttctgaaggaagaagaagacccctttgagtctatgacgtgtgggcccaaggcagggaccgagagatgatgatcgagccagtgatgtggtgccaaccacaagatgcagttggtggacgacctgaagactgatggacttacccattga

SEQ ID NO: 381271 - DNA, 237 bp, Zea mays
aatcagtagcacaacataaccctctgatatgttcgtagtttatccgtggtttctgaactgtagaattctgcattgaagctcgtgctactgtatgtattccaatgtttgttcacaccaacagctatatgcagataaaaaaaaaaaaaaaaaataaaaaaataaaaaaaaaaaaaaaataaaaaaaaaaaaaaaaaaaaaaaaaaaaaaaaaaaaaaaaaaaaaaaaaaaaaagaaaaa

SEQ ID NO: 381272 - DNA, 278 bp, Zea mays
gttccttactggctgcggacgatgcttggcatgttccaacagctaaagtttgagttaataaattctatcaccctgcatgggactcatgttgtttgcaactggtttagcacgaactggtcttgttactattgtgctaatgtatttgtttcgaagtttcagttaatatgctgtggaaaaaaaaaaaaaaaaaaaaaaaaaaaaaaaaaaaaaaaaaaaaaaaaaaagggggcgccccccaattttgcccccccccccccgggttttttttccgggcgggg

SEQ ID NO: 381273 - DNA, 277 bp, Zea mays
  unsure (1)..(277): unsure at all n locations
attccgctcgagtggtaacgtctccacaataaaaccaccgatgtgcttttccaaccacgatgcacacttcttggtgcactccatcgactaccccaatcccaaggccccgtatgancatgctctgagttcgacaatgtgtctgcgtgcaaacaacacttcctgcaaccgcaagatgcatgcgctgaaatgaaactgaaacgcagatgatttaatgggcatgctccccgggtggtacgttgctgccgttatcgtgaagtttaatagtccccctcccccg

SEQ ID NO: 381274 - DNA, 209 bp, Zea mays
aggacgaggcaataacgaaccgaacaacacatcaaggtttctcagagatcgttcaagtgccaagtcgttagccaaccatagattaaacgaacccacaccaagccatgaatgtccacccctaccttacaaggcctagagacgtgataggatgctgcaagaagaagaatggtggggggcagaaactctttttcgatcaattgacggaagag

SEQ ID NO: 381275 - DNA, 235 bp, Zea mays
gacgcatcgaggttagcacgcgaacaagcgaccacgagggccaagtggaagaagaagcgcatcacgaagctcaagaccgaacccaacaaagatgaggcagagatccaagtaggcagatcgagatcggattgtggacatgatgacatgcgtgggtacacacatttcatcggatgcgaaggagagcatgtggagacatcgtcaacatgccatggagacacggaccgccatcagttga

SEQ ID NO: 381276 - DNA, 243 bp, Zea mays
agccaattggacttcgctgacctgggattatctaactactagcaactctgagcagactcaacctggactgggtaagcaatcggccccaggaaccgttgttgcgaaatttgtctactaatgaaaaacaaggactattcatgaaccttttgtcacaaaaaaaaaaaaaaaaccaaaacaaaaaaaaaaaaaacacaaaaacaaaaaaaacacaaaaaaaaaaaagacaacaaacaaaaaccacac

SEQ ID NO: 381277 - DNA, 270 bp, Zea mays
cggtccgtatcaccacgatcggagcagtgtagtactcctgggcgtcatctgcataatgccgttgtatcagtcctgtgatgccgagcaagtacgtactgtgctatagtaagctagcattatggggagcatcagctttcacagcatgacgaaagcacaggttagctgatgtgatcacatttggttcgtcatagtgacgtacggtatcgcaggcgtcagtgtcgcggccacctacgtgatctaagcatactactatctcacgtgcttttggtt

SEQ ID NO: 381278 - DNA, 254 bp, Zea mays
gagaaccccggacgcacatgctgtttgttgttgcgttttggcacccattggtgagggaggattacgtttagaaacccttatccgtggtcggaacggtagtccccattagttgtcgacgatgtgacgttttgggcagttttcgtagaacatttgaaacatttgttcggttgtaacggagtgctgtttagttgagttggggggaacaaaaaaaaaaaaaaaaaaaaaaaaaaaaaagggcccccgccaataagtga

SEQ ID NO: 381279 - DNA, 311 bp, Zea mays
ctcactcatattggttgggattgcattctagtgagattgagagccatctagtgcattgcatcaagttgttgatctttgaggcactagggagatcaacaagtgaggtcgttggcttgttactcttggaggttgccgcttcctagacggcttggtggtggtttcccgtgagctcttcaaaggagattgtgaagaggccacggtggtgattgtgagaggcgttgtgcttgcatcgccggagcggtgaaaagcaactctagtggaatcgaggtttgagggttcattgaccaatctagctcaagagatcaagtgga

SEQ ID NO: 381280 - DNA, 117 bp, Zea mays
ctcgagccgctgtgtatttgcatggagacaatctgtcggtacatgcagtgatggtttgtagtagtatatgttacatatattgcatgtgtcaatatcacgccttgttgaaatacaaaa

SEQ ID NO: 381281 - DNA, 300 bp, Zea mays
aagctgcatcgcatgagaactgtaaatagcacggggcaggtaaaacatctatttgtgggatgttcatcgagaacattgataatcatgtaaatgtgttgtaaaagtaaatccaaaatggaccgtctcttgaggttagctcatgcatcatgagtttggcacttgtcgtagtacgagtctcatacaagctttgatgtggggaacgtatccggtgaaaatcaacctctccgtgcaaccatgtaaacttctaatctgaaccacatgatgtccaaccaaatagacgtgcggaggagtgagagaggg

SEQ ID NO: 381282 - DNA, 302 bp, Zea mays
aaaacagatagaagatctgaaggcctcataccttgatttggctcggctatgctctgatactgaagagaagtttacccagagccaggctgacttgagccaaacctctgctttcttggacagtgctcgcgccttaaactcttctcggaatgctcagcttgactctgagaagatggcttatgaggaggaaaagcgagtgctcgttgcttctcgtgacaatctggacaggctatattgtgacgccagcacttgattgaccaatctggaaaggagtcaccgcttcagcatgtcggacttggacatca

SEQ ID NO: 381283 - DNA, 237 bp, Zea mays
tgcgaggccgaagcttttgatgaaatccttagtgataggggggatttttgtgcatgcatcgacgcccgaggagctatctcgctgctcgaaaaagctggctatgagcatgtgaaagctgtaattcagccagaattctcagtttcagcgagtgatgtcaaggatccttcagccgaagcgatcgcctttagtggaaaattttattctgaagtatgcgtgaatggtggccgtaaaatggca

SEQ ID NO: 381284 - DNA, 266 bp, Zea mays
cgggatctcgctgacggaggtaggagggctgctgcaggagtgggatggcatggaagagccagcatgacagcatgccctggaggacagcctcgcatccgatgttctagggagcatgctagagtccatcagagtacagaccggcgacaacgccgtggacgaaatccgcgcacaatccaacctgcagacgcgtggggtgtgtgcctgacgcgctgatgcaggaagcacggtgcttagattgcaatttcgttacgtcgtcgggatcctaa

SEQ ID NO: 381285 - DNA, 292 bp, Zea mays
  unsure (1)..(292): unsure at all n locations
caggagatggccgatgcgcctactgctgttccaccggagttttctgaaccgggtagtagtggtagtgcagctccccggttcagacatctccggttgaacaggagatggccgatgcgcctactgcttctgcttaaaccatgtgctgagaagaccttgagcggagccgcatgtatccatgcaacatganatgtagaagcgccatgtttatgaacgaacttggacatggttgtctcacaatcgttagatcactctttgtggtctgttgattgatatcttaaatctgcggaacagt

SEQ ID NO: 381286 - DNA, 112 bp, Zea mays
agcgagcttcatggtctcgtcgcaaagttgtactattctagtagtcgcatgttgcaatacgatatgttttccattccaaccaaaccacgcattcgagtatgagctgttgctt

SEQ ID NO: 381287 - DNA, 228 bp, Zea mays
tatagatgtagagatatagtaaccatctactatgtgctacctgcagtgagtcctcaccactgagcgaagtaggtattattatctccttattacaggtgtagagactgaagtttcataatgagagaactagcccaaggtcacagcaactactaagtgatagatttggcatgcaagcccagatttgtctgaccgtcaaaccgagctctcgatttaggatgaggagagtga

SEQ ID NO: 381288 - DNA, 234 bp, Zea mays
  unsure (1)..(234): unsure at all n locations
tgcacaggcaccaggtaaatcaaagtttttatgatgaattggtgattgtcttgttttgacaatatatttcccgttttgaccaaatttattcactagtgcacaaccgttgtttattggttagctctgcccccgctggtgtccttactcgtgagctttcatgagatgatacagataaccttgagtgttgcttgtaggttgtaatattatcagtgacaatgaantcctgtcattaag

SEQ ID NO: 381289 - DNA, 168 bp, Zea mays
gctggatatgctgcttttgcgcaacaaaagagaaaagaagctgaagaaaagagaagcgatcataagtcagacagaagatcgtagcaccactttttttttttcattctgagcagtcagcgtatcatttagtttttcagtaacatagttttgtattgtgggtaaggaaaa

SEQ ID NO: 381290 - DNA, 219 bp, Zea mays
gcaagagctgatagcgaactttgcttgcttggcttggcttcttgtttatgctgtttgttgtatgcatatctcaatagttgtcaaacacaatgtaaacatagcagttttgtattgggctacagcagtggcgtttacactttcatgtactactacaaaaaagtctaaatgtgaatacactcggtgcaaggaaaataaaaaaaaaaaaaagggcggccgccg

SEQ ID NO: 381291 - DNA, 273 bp, Zea mays
atttctcggagcagaggacatttttctttagccgtggttagtcaggaaactaaagctaatcaacgacatataaatatagcagtaataaagtggtgtgtggcagctagctagcgttaatagactagctagcaccatgtccttgatcccagtcgtagttgatgattgagttgcttgcttgtctacgagctatggccacaccaatccctggatgggagaagggcgtgacgagatcagccgagtctacacaatccgtagctgtaatctgtacacgta

SEQ ID NO: 381292 - DNA, 231 bp, Zea mays
gtcattttttggttacctgttcgtactattatgttgtacggagctacttttgctttcttgttgaatatttttttattgtaattgtggagtcattaacttggcaaccaatgcttatacgtaagcatcaaggattatcacatttcataaatgagggcacttgaaaaaaaaaaaaaaaaaaaaaaaaaaaaaaaaagaagaaaaaaggcacagaaaaaaaaaaaagaagagaag

SEQ ID NO: 381293 - DNA, 224 bp, Zea mays
  unsure (1)..(224): unsure at all n locations
tgcaagccttggtgcttttgttggctctaagaaatcgtgatgttcaccatcactatcctgctatcgataattagtattgagattagtacgtaggttgcgtagttaattttatgcacgtactattgtcgagaactcgctattctgtgatgttgaaaatgtctaatgatcctgcagtactgtcgcattagacccaaaaaaagaaaaggaaaaaaggaagtttanat

SEQ ID NO: 381294 - DNA, 155 bp, Zea mays
gttctagataaatttgagtgcaaactgtgtgtgccaaccaaggtgttcttgtaaccaagttcagacagttcagcaaaacaaatgctgatgattgctgcagttcattgaaaaaaaaaaaaaaaaaaaaaaaaaaaaaaaaaaaaaaaaaaaaagaa

SEQ ID NO: 381295 - DNA, 298 bp, Zea mays
ctgacaaggctgttcagcgaaaggaaattcagaattccctccagccatgttctgctgctgtcaagaaagaagttcagaagaaggggctgctcaacaagaccaaggccccaatctcagtcgctgccctgcgcaagctggtgcgcgctgctggcctgggttgctctgcggctgacgccgtgggagtggtgccgccggccgtggaatgaagatcttcagcctatgttccaagcgcacgttggaggtcggcgtccgtgcgtttgtgtctgtacgcgctatctgctcgtactgttgtgctgtt

SEQ ID NO: 381296 - DNA, 236 bp, Zea mays
  unsure (1)..(236): unsure at all n locations
ctcgagcgctcgagggggaatccttgagccggtccttcaaccaacttcaagcctggactttgtggattgctgattgacacaattttatgctaatatttctactattcatcacctcaacatcaaagtgagcccggcattccagatcgtgtgctcctcgagccaagcaatggaaaggcactgtcactgtcagcagcagtaggataaccanaaaaaaacattgtgttatttgctaagtg

SEQ ID NO: 381297 - DNA, 258 bp, Zea mays
gtagaggaggcgaggagcagccgtgcgctttgcgggcgtgttggtgttgccgatgaatctatgatccactccgtctccggggcatgacagtcaggacaggcgggctctctctcctctttgtgactctgtatctgtacaggtttaggtcttgttctgaagcattgcaaccttgtactgctgcccttactgcgttgtggctggcgagcggcggctggtggatccgtcgtggaattgttgctgctgatccctgttgatgtg

SEQ ID NO: 381298 - DNA, 262 bp, Zea mays
atagaagtcggccttctgattgtagaattaagaatgcactctctgctagaaggataattttgtgcctctaaatttagcattagaagatactgtagaccgcagactagtcttggtattgcgaaaatttctgggcaaagcatattgggccttctgtgaagtagttatccagtgcttattatttattaatactctctactgtgcctgcttctataaagatatacatgatgaaggttacatcacaaagaaaaaaaaaaagggcggc

SEQ ID NO: 381299 - DNA, 188 bp, Zea mays
gcagattctaaacagcttttcgaggatagccaagagttcagggccttggacagtgagacttatgctagagagctttttgaagagtgcgttgtccacctgaaagaaaggttaaaagagaaagaacgtttgagggaggaagaaaaggcaaaaagagagaaagagcctgaggagaaagagaagaaaaaaga

SEQ ID NO: 381300 - DNA, 177 bp, Zea mays
ggaacgccaaaatcatagcagatatgcagttagagaaagaggaaaaacaaaccaaggagatgacaaaacttatgcaggaacagatgaaaatgcgaagagaaatcatgatgacaagagctgaggctgcaagcgtcgagtccagtgatactaaagcgggtggaaaagtggctaacaccc

SEQ ID NO: 381301 - DNA, 183 bp, Zea mays
gtctgcgtgcccgagacgggcggcaagacgctggaggagatcgcgtcgctgttcggtggcggcggtacgtgcgtgacgcacggtggctccggcgaagtggagctcggcgacgcgagcggcttgagcacatgaggctagtgtcgcacgggcacgcgtcgagctgagtgcctgcgtgtgaacacg

SEQ ID NO: 381302 - DNA, 200 bp, Zea mays
tggggaggcacccaatatcccaggagagtttgatgatgatttttgagcgacgagagatagggagagtagctattgctagattgcattagcaatttagcatatttagtgcattactaactgcagctagttactattaattatgccattacaaactatctatgtggctatttcagatttggacatttggtattgtgctgtta

SEQ ID NO: 381303 - DNA, 179 bp, Zea mays
tgttatcttatcctaatagatctaactgagctcaaaagattctaccttatcgttatggattcatcttgccctaattagcatatttatcccactctagaataacaaccatgagttaatccaaaaatttatttagatcttaactagtctaatctaatcatatccaacctgatctagattct

SEQ ID NO: 381304 - DNA, 170 bp, Zea mays
gtccgttctgtgtatgttggaaatggctagtgtgcttgagcaagcctttcaaattgactataatggcctaatgggcactgggtgatgttttagagttagcatagagtgaaaaagaaaaaaaaagaaaaaaagatagaaggacctctgaaaaaatataaaaaagtgcatgg

SEQ ID NO: 381305 - DNA, 136 bp, Zea mays
gtgagttgctgtagacatgctttgttactctgcaaatttaggttgcatccgtgaataatagtaacttctgcgagcctgcggccgaaaaacgttacacaatatgtagtgtaaatgacatatttatacttagttatat

SEQ ID NO: 381306 - DNA, 270 bp, Zea mays
ggacgggaagctctggatagggtccgtcctgatgccgttcatcgctgtctttgacctcgcgaaggcgtcttagccgcctcaagtttgattggaaacattgttgctttaagacatgaagtccatggttaccgctgcacgcttctctgagaggatcagtgatcccaataatgctccagcttcttttagtagcaaatataagttgctgacaatgacatgttctttagattgtcactagaactatgaacgaacagctcgtgcttccgaatccag

SEQ ID NO: 381307 - DNA, 167 bp, Zea mays
tgcgttgcaacggcatacaaaatattcgacaaaatattagtgcatttcctcgactgaaaaagctaaatgacgctattttacttttcctcataaatagtacaatgtagaggagcgtttttacatctgtaaggtaacacaaagtatgaaaaacaaaagcaagataacac

SEQ ID NO: 381308 - DNA, 245 bp, Zea mays
atctgtctccagaaacagatacccatgcagtcttgctctgcatgggtatctgtctccagaaacagatacccatgcatggcaagactgcaggaccagcaggtgaaagtcgatagaacttagagcatgtaaacgagtcgtgctgttgttcttggagtctggaattgttacgtttctttctagtacaattcatgtgttgtcatcattcagagttaaatcctttgtgctcatcatcatcatacgtatgt

SEQ ID NO: 381309 - DNA, 154 bp, Zea mays
gtactgtatgcacaaggaaatatgctacttcaaatgtttagcgcgccttagagaggtctgcacacttttaatgtagcaaattgttgtatcaagtgttaatggaacctcttctttacaccactagacaaggtacagagagctgtgtgcatgctga

SEQ ID NO: 381310 - DNA, 187 bp, Zea mays
tgtagatattgccgcgatccgaataatctgaggaggatggctagagcagctgcaaagcggaagtaggcggggaaactgaacttggttggagattagcacatcaacttttgctgtggtatttggttccgtatttgatgtgcagcagcatcacatcagttagtacttagtattagtgtagatacatgga

SEQ ID NO: 381311 - DNA, 191 bp, Zea mays
gtaggtgaaaaccgctccatcgttcaagctgacgaggacgatgacaatactgtttggatccacggcagcagtgattctgatgacttctttgacgacaatggtttcggtttgacggtcatggaaccgatccatttatatgaaaacagcgataatgattcatatgaggaggatacatcgtcagaggaacatga

SEQ ID NO: 381312 - DNA, 150 bp, Zea mays
gtcggatattacctcatagaatgtatgtggttttgtgctttgaactgttgattcttgattcccaatcaatcaaatgcaaacgatctaatccgagagcggcttctaaaggaccgggtggtcgaggctgtgttaaagaaatggattacctcg

SEQ ID NO: 381313 - DNA, 179 bp, Zea mays
ggcatgccgatcacgagggagccgtctaggaaggggagcctgaggatcaagttccagatcaagttccccactagcctaacaggcgaccagaaggcggccatccaacagcttctgtcttgaagctctctctctctctctctctgtgtgtgtgtgtgtgtgtacaatgcgaggagtgtttt

SEQ ID NO: 381314 - DNA, 175 bp, Zea mays
ggctgcggccgcggcggtcatggatcgccaagacgagtctatgtccgcgcggccggccctggagatcgaagtgctgcgcttcctgtacaccacggtgggctccctgctggccttctatggcttgtacatcgtcttcagctgcatccttctctacgtggtcattcaggactttccg

SEQ ID NO: 381315 - DNA, 109 bp, Zea mays
gtttaaatgtggcagatctaatgtgggaacttgattatcaagggcctagaaaagttagggggaccagaaggtcgaggagaaacaagcggttggtgatgcgttatatttt

SEQ ID NO: 381316 - DNA, 270 bp, Zea mays
cgactcacctggaggctcttcgaagcagccagaggtcaactttcgacgagatactgaggaagatcgatcagagctgcagcatcaaggaagcgctggagcgcatcgtgtcggcggtgagagagagagacgacggagccttccagtggatgagctggctccggcacctgccgcagcaaggaacagctgcaggctacatcatcgacttctgcaatgtcttgggcgccctcgaggcgctcgtggaggcgttcgactctgaccctggccaagtct

SEQ ID NO: 381317 - DNA, 264 bp, Zea mays
cgtgatctgctgctgcttcaagtagaagtgcattggaatgttttttcacggtttgcctgtggagcagtcaataatggtcttgacagataacccagaggccgctggaccgtgttcactcagaattctcagcaggatacatcgtgtgactgtaatggttgtttttagggtttcttattcatgaagttgccgtgaatcttgtaaaaaaaaaaaaaaaaagaaagcaaaaaaaaaaaataataaaagtaaagaatatggcatataatg

SEQ ID NO: 381318 - DNA, 198 bp, Zea mays
agcctaggcattcattctctgcacgcaactgcactttcaaccctggagaaaacataataaatgcacgttcccctgtacttgagatacatggtacttggaccggaacgtcggacaaaaaaaaaaaaaaaaaaaaaaaaaaaaaaaaaaaaaaaaaaaaaaaaaaaaaaaaaaaaaaaaaaaaaaaaaagaaaaaaaaca

SEQ ID NO: 381319 - DNA, 223 bp, Zea mays
gttgtgcatgtctagtgcgatgttcagttcacaggagggtgaatcgtggcgcgtgcgtatgtgtttgttgctgtagtgtgtatgttgtctcaattgcattcgagattgatcatttgcttgtcaactggtcattcactcgttgtccctgttatctattatcaacaattcttcagcatttttaagataattgaaaaagttgacttcataaaaaaaagaagaaaaa

SEQ ID NO: 381320 - DNA, 102 bp, Zea mays
gtcgagccggtagtatttatgctggatattgtacctctattctggaatgttctatatttagtggttgtattgacatatggtattatcaacattcatggtttg

SEQ ID NO: 381321 - DNA, 291 bp, Zea mays
gttgggctaacgatttgattgattgatatgtggaagacacaggctttttaaggcagtgaaactattctgtatgacactgtgatgagggatggatgtcattatgtatttgtccaaattcatagaatgggtaacactacgagtgagccctaatgtcaatgctgcgctccaggggattatgccatgtccctgtaggttccccagctgtatgtcccactgtgggtgactgggatctcgacagtcggggaggttgccctggggaagtttggaaatctgtaccctccgctcaacttt

SEQ ID NO: 381322 - DNA, 199 bp, Zea mays
  unsure (1)..(199): unsure at all n locations
ngattttgttctgcttgctctgcacatcggcatgacgacgtctgatgatgctagctatccacaaatgagcacaggctaccgcatgctactactgcatctactgcacgcaaccttagagccaaacttgaacgcgccgctgatcatgtncatcattagttctagtgattagtccctgaatgttgtttggttggacctggac

SEQ ID NO: 381323 - DNA, 283 bp, Zea mays
ggacgtacgggtgctgtggagaagatggatcgatgctgtttctagggtttacttcctcattgttcgtggtgctgccgtagttcaggctaaggtgcctgtgcctgctcgcagtcgtagctagagaacacagagatttgttgcctctgatctttcctttttggatttgcaaagatttgtagatcagtcatttcgtaaaccgatgcgccttggctaaaacgcgcccgttcgttgttgttcgatcgtagctgccttttgctattcataaaacgatgcaatttcaacc

SEQ ID NO: 381324 - DNA, 164 bp, Zea mays
tagtgagctcgcgatgatggttttcattgacagtcctagtattatgactatcttcctcatataatgaatgagttgcttggcttcacatgcatgttatggtttccctaagatgtaatgaaccttgagttgttatggtttccctaagcatgatgaactagtgtttg

SEQ ID NO: 381325 - DNA, 247 bp, Zea mays
gtggaagctcagacaggtaaaggcatcttagggcaggagctgatgacacctgcaatggaatgatgagtctattgcttcgatttaacgtgtgattacatatatcttgaacttattataagccagtatgtcgcctgtagagtgtagacaggtacttttataatatataatcacaacttccatatgtactgatacatttgatctttgttctgcttgctactgttttaattgaatacaagacatactatgg

SEQ ID NO: 381326 - DNA, 210 bp, Zea mays
tttcaaatcttcgacttcaactttatgggcctcggtttgtgcattaagcttggcttcactggttttcagcctatccactaaggaaaacagtatcctatctttttcaagagcttcgttccttagcgtgatgacctctgatcgaagatttccaagagctatctggcagctctcgtcgtcttcttccttttgagcccttaaagatttacttag

SEQ ID NO: 381327 - DNA, 277 bp, Zea mays
gtggcgtcggaggaaggccagaaggaggcggcggcggccgaggcagcgccgcgtccgtcagacttaggccagaataagcaggtggctgaggcggcagttgcggaggagagcagagatcctgcagcctgattgggcgaaaaaaggcagcggcgtcttcaattttttgtgagggatttgaggatatgaattccgtttgtaccttaggagagcatcaattaacattttgtgaaggggatagatttctgtccttttctctttacatgaaacatgtgattct

SEQ ID NO: 381328 - DNA, 99 bp, Zea mays
gtcatgtattatggttgcatgggcaccatttcttcgtgggatgtgaattgaaacagtccaaatcaattggtgtggcagatatctggtttgcccttctac

SEQ ID NO: 381329 - DNA, 109 bp, Zea mays
gtcggatatctagctcatagaatgtatgtagagttgtgttttgaactgctgattcttgattcccagtcaatcaaatcagactatctaatccagaagctgaaaccgacat

SEQ ID NO: 381330 - DNA, 286 bp, Zea mays
gcgcagtaccaagtcgtgaattgcaatgaagaatgagtaaagtgcagtgctgataagaatacatgttactgtatcttgagacttcactagtgatgaactagatacgactgcgttggagactgacgttacttctccgttgggatggccactgggacatctttctcgacgaggatctcgacactgcacgcatgccatgtgacgcggaccttgcagctgccagcaagtgaggatcatgccatctatgtgcagtgatggcaacgcttctgaaggtgctatgctcacatat

SEQ ID NO: 381331 - DNA, 269 bp, Zea mays
ctttggtttgcatttccgccaattttgtatgtgacgaaagcttagagcatctacaggaagtttgtgtaattcacatgctatgagcgccgacgtcggcaacttagcggtggaggagaagcagatccagcagaacatccagatgaagcgtgagcttccttgtttcccttctgacagaagaactggcagaatgtgagatgcctctacgtcaagagggcatggggaagccatacagggtgttctaagtatgctcgtttgtgaagtctgctagg

SEQ ID NO: 381332 - DNA, 134 bp, Zea mays
cctatgtacagggacaggaaggcagcagcagcagccgtgtagagactctgaaggtgagctactagcatagcacagcatagcatctcgtatgatagacatgatctaccggacaaagcgtgagaccgcgaaacatc

SEQ ID NO: 381333 - DNA, 263 bp, Zea mays
cagattcttgagtttctccagcttcactttgaagtccagtttctatgcctgaaggcagagcagcctcagccttgcttgtagcatgactgccatgttcaagagtaaagacctcgtgtctctaaggaacaccatgaaaacacagttgtttcgtgtcagtttcgaaagcctccacagggctgcaagaatcatttgtgtagtagtggtggttgacgtactctctctcaaagaaagaacatcatgtttcttaggttgttttttagtgc

SEQ ID NO: 381334 - DNA, 226 bp, Zea mays
acggctcgagctcgagcgttcatggctctgcttttgtttttccagcgtccaagagttgaaaagatacggtggcctagggggtgtaaatggtatggatattttccgatgatattggatatcaaatccaattaggcctagtttgttttcgcctgaacagcccgttctgggcctcgttctgggcggaaccaatcagcctggtttggtttagtctgatatagtttgctgg

SEQ ID NO: 381335 - DNA, 272 bp, Zea mays
cccgagtgcagaagtccacttcgtgcagaactgtctcagtgatgtttgtatttctcacggaatagctctatttatctcaagattgagcaagctcgcagcttactcggtgtaccggcgttgtatccttggggcatccaggatcttgtacgatttgaaacagtctgaaccaatgatgtaacccaagatagtacaaaaagaaagtttctttctttttagcagtacttgtacaaaaagttactaccctctccgtctcaaaatatagcttttctagt

SEQ ID NO: 381336 - DNA, 315 bp, Zea mays
cgcgttcagcgccgcgctgcaggtcgtgctggcggcgcacccggcgcgttgacaaaccgcgaggtggtgtgccgcgccagggtggtgttgagcgaccaggcgttccaacaacacccctgcctctactgcagcgacgccaacgctgacgcaccgttcctgggacaggacggcaccaaggccaagagcaaatgagcaaggagaggggttccatgcatgcatgatccacacgctcgacactcgcttgcttgatccgctgcaatttatgcgtacgattattatcattatttattaatagaataactacatatgcgtgtg

SEQ ID NO: 381337 - DNA, 301 bp, Zea mays
agagtgtcgaattggagaagaaggtgcaggaccttgagcagaagctgcagctagcttattccaagtctgacgaacaggcaacggatgtcttggagtcgagatcccgtgagtttagcctggactcgttatcaagtttggtcaaacagcaggacagaactcaggctgccgacaaggcctcgccgagcccgaccctgcaagaagtacaagaaccttctggcaccatggctttcaagttcatcctgggagtcgccctgctgtccgtactcgccggcgtgtttctcgggaagcggtactagcgctc

SEQ ID NO: 381338 - DNA, 267 bp, Zea mays
ggaaattgattgctgagacatgtggtgctgaagaggtcacaaaactacgtaggagtgcaagattgactgttgaaagagaggttgaagacacaccgctgtctgaaactgaaagtgaagaagaagcaccacaagaggaagatgttgactttgagtcggatcaagatgatgtgatcacagctggatatgactatgagctagatgcggaggaagacaatgatggctgatgggaggctttagctgccatcatctatcttatattagcactat

SEQ ID NO: 381339 - DNA, 224 bp, Zea mays
aatctagttcctctgaattggtcccacctaattcttgaaccttcgggcggtgtatagtcggacggaggactctcgttaattattaccaaaacgctgcaagatgatatctcactgaaaaaaaaaaaaaaaaaaaaaaaaaaaaaaaaaaaaaaaaaaaaaaaaaaaaaaaaaaaaagaaaaaaaaaaagaaaagaaaaaggggaggacgcgaagcgaagaatgag

SEQ ID NO: 381340 - DNA, 176 bp, Zea mays
atggaaacgagcttcgcagatgagtgaatgaagcgggagatcttacaggacaggaccggatccgatccatgcaggtttctgctgtctttctgtgatctgtggaagaagatggtgtgcactgtacgttctagactagctagctaggactatatataaacgagaatctgtggaatcat

SEQ ID NO: 381341 - DNA, 279 bp, Zea mays
aagtggcgtgccatgaaaatttacgttccgtcttttaactggatatcctagtgtcgtgctcagcatattatggatattgtttccgtaatgcttcctttggtcgccaatcatgtggtgaagagtttgttttaaaaaaaaaaaaaaaaaaaaaaaaaaaataaaaaaaaaaaaatataaaataaaagataaaaagcaaaaatattgtaaaacagcattgaaagtggccggtgcacacttgtgtagcccgcctcgagaattcatgcctctgcatctggtcag

SEQ ID NO: 381342 - DNA, 317 bp, Zea mays
agaggttacacaaatggctaaaggaaaagaatctgctcaaggtaatgacttctccatcatgagatgcatttatgttcttagatccatgaacgtgacagaagatgagaagataaaagcagctgaggtgttcgacataccaaacaacagagagactgttattagttttagtattgatgagccaaaaactgccctcctatggttaagacggaagatagataagctctaagtttggacttctgtagcaccgttggtctgaatctgaaaatctacatcgtgctagttgctagttgacgcattgaactatgttgatttgtgct

SEQ ID NO: 381343 - DNA, 285 bp, Zea mays
agcatggatactggtcgtagccaagctgatgctcaggctctggcctgtgcctctggtggcaaagctgtgagcagcgcatggatcatcgactctatagcggcttgcaaccttcgaccttccatgctaccctagatgtgtacttgcattgcatgcacggtaggtttgactaatggacagaaaaatagtgtaaggccctgtttcaaatcaaaaaaaaaaaagaaaacgagtacgaaaggcaaggtgagggaagggtgtgtggaggggtgtagaggtggttgagagaaa

SEQ ID NO: 381344 - DNA, 229 bp, Zea mays
atcttctgcagcttaagttcagtattttttgtgaagtctagatgtccagaatcttttggcatctgctatagctatgctttgctttgctttgagcacttctgttttggggctttctagctgaccctgttgtccaacgttgctggcatggaaatttttggttaatcttaaaactggaaagagcgtgtgaaaaaaaaaaaaaaaaaaaaaagaagaacaggaaaatagagaa

SEQ ID NO: 381345 - DNA, 234 bp, Zea mays
cttaggcaaatgcgttagcatgatgtctcctacacaccctactatctattgtctcatcagcatgatcattatgtacacaacctcgagaaattctttagcatctcaattagttgtgattcagattaattgtgtgacagtctgtttttgtatgcatcagacgtttatgtttaagaaaaaaaaaaagaaaaaaaaaaaaaaaaaaaaagaaaatataatgtgaactatgtggaaaaa

SEQ ID NO: 381346 - DNA, 194 bp, Zea mays
ctcgagcgaatcggctcagggcgaaatgctagaattatgagcactcttgtcgataccagtgtatcgtgtgtgactgccaacatatgcactggctggaaacgttcccatgtgtgaatggaggatgctgatgatagcttgactgttgtttacgaaaaaaaaaagaaaaaaaaaaaaaaaaaagaaaaaaaaaataa

SEQ ID NO: 381347 - DNA, 305 bp, Zea mays
cttcttttagcagggatcgagagagctgtcggctcttgggcgacgctctaagataaactaaaccaggggaagcagagctacccgtctaccccagcaggctgcagcaagctaatcttgacagccaaagcccaaaggggattgtgaattgtgactggagagtgcttctgccgctacgctactactgctacgcggcacggcctttgaccctttgtcagccttgggtgcttttgaggggaaaagaatagtacatgatctgatgatcacggttgtttttgtctttgtgattatgccccagatgaccgtta

SEQ ID NO: 381348 - DNA, 211 bp, Zea mays
tcgctccactggaggagagttctttaactttttcaattttctggtcagtgtgccttagctccggaatggccgagttgtaaatacgaactacgaactttgtgcgtatttatggttgttgtattaaaaaacccaaaaaaaccccttggcccccttctttttaccccaaaatccccaggagtcccaaccccagttctccccccccatttctccc

SEQ ID NO: 381349 - DNA, 99 bp, Zea mays
ggctcgagccgctcgagcggggttgttctggtgcagatctctcaggtaattgatgctttaggcatgacgccaaagtatggttttataagtaacaagaac

SEQ ID NO: 381350 - DNA, 277 bp, Zea mays
ctttttcatttgtaaatatatttgttggcccaaaataggacatgtaagatctcagagctttggaactaggcagagcagcgaaaatctattataactcgaccagactactattatgatatggaattaggtggagtgtacgtgttaggttcattctgtgtgaattcaggcagaagctttaaaaccaaatgaccaatcatggtcacttgtggaaatgtagactacttcgtagattcaaaagagagtcaattccgtcgtgtcgctcttgaaaaagaattgg

SEQ ID NO: 381351 - DNA, 297 bp, Zea mays
aaccatttcaacaacccaatgtggcaatgtgaatatgagtgaaattctctgaaaatggcaggctcccaggttaaattacctccccaccaatcaaaattcgagcatatgaggatcaacatgactactttctagctcaatttcagaaggctccaatgcacaaatccaagctagataacttgacatagtcaatcattcctaacgaagccaaaggcaatgatttcacagggataaaaagccttgggaccatagctagtggaagcgtcatgatgagccagtttcgaagtggtgcaatggtat

SEQ ID NO: 381352 - DNA, 283 bp, Zea mays
acctaaggaacgtatggtttggtgcctcctccagaggaggcaaaacgcatgcgccgagagatatagttcgcttgtttttaacttgtgtatttatgcggccggcggtgtgtgtatatatactacatgtttagtgatgctttccgagacctgagacaatgcccgtctgttttaacctggcacaaggaaatttctcgatgtgtttgccaaaaaaaaaaaaaaaaaaaaaaaaaaaaaaaaaaaaaaaaaaaaaaagagagaaaaaaatgaaggtgcaaaaaaatat

SEQ ID NO: 381353 - DNA, 295 bp, Zea mays
cggtgttcaggtgagggctggcaaagggaaggtgttggtggatccacggatgaagaaggacaagcgggccagtgggactgggaagaagggtggcaaaggcgcaaaggggaagggtggccagaaaggcatgagagggaaagctgggaagaaggcagggaaagccccacggtaaggaagccgaggagctaagcatggctggaatgctggatgcccgcctccctgcggaatttttgcctcaggctacagctactcagtaggcagatgttttgaaatcgtgtgatggtagaagtttgtg

SEQ ID NO: 381354 - DNA, 239 bp, Zea mays
cggcgaacaaggttaccaaaaagtgggcgacatagattattaggtctggttctgctgccactctgtaatcccccctgcatagctcttatttgtaacttgctgtctgcacgaaagttggtggatgttttagcagaatgctttctgcccgtgaaagtaaacttgaaactgcttaaaaaaaccccgaaaaaacccaaaccaataatcaaaaggggccccaaaatgtgtggcaaggaccagtg

SEQ ID NO: 381355 - DNA, 138 bp, Zea mays
cacgtacggagtgtagctgttgggccctttcgcgagtaccgtcatgtgcaccggatcgtgtttgatccttcctcgcttgataacgtcggacccaaagtaattatcttcgtaataaaaactcaaaaagtatcgttatct

SEQ ID NO: 381356 - DNA, 291 bp, Zea mays
ccggggacctggagaaggagcaaagccgctcgcctttgcttttcatagcaagtttaagcaggggccattgctttccgtgtgttggagcagtgggtggtgctgtacgtatccgctgagacttcgtcctcgttgaatccagtcgtagcacctcactggttcaggactgaatgttgctggcgacttggaagaccgaacgcttcgatgtgcctgctaggagaaatgcaaagctcgagttgctgcattgtgacgttgtggctcgagaaatggcgcccttttggacagtcatctcca

SEQ ID NO: 381357 - DNA, 192 bp, Zea mays
tatgaacatgtgaggagcagaatacactagtgtcttctagaatatcgacgtcaacattactctggtcttcaacaagaccaacatttagttcgagcatgttacactttgttgtataattaacaagtctatttcacattccttgtaatctgtacaactcaagagtcagtatctagctatcaagttattgtgtca

SEQ ID NO: 381358 - DNA, 293 bp, Zea mays
gtgatggggagcagcaaccatcggcgtgaggagagccaggaaaacgacgcgcacaccaaaacgatcctgggcgtgactggacggttgctgtggcgcaggggatcgacacccgagtgcatggcttgaggagggagatagcagaggggaggagccagagtgccagacgccatggtcaagggctagagcagagggggacttggtggggaagacgcagggcatggagcggaggtacgacaagctcgtagtagcaccaaagaaactgctggtgaggagccgagctggagcaggggcga

SEQ ID NO: 381359 - DNA, 110 bp, Zea mays
cgtaatggtattttggatgtgtatgtgaactgtaattctggatgtgtggatgtaatggtgaactgactgaatggtgtcttgtgtaatggtattttggatgtctatgtgaa

SEQ ID NO: 381360 - DNA, 203 bp, Zea mays
agcttcgactactctcaaatcatcgacatcctgcatgagcgaagatatcttatggtgagcgtgctgaacacgaacgacgcgtacgggtgggcgctgattcaaccagttgcaagcttcgactactctcagatcatcgacatcctgcttgatcgagcatatcttatggtgatcgtgatgagcacaagggactggaggggtgggcg

SEQ ID NO: 381361 - DNA, 280 bp, Zea mays
gcggcatgcaggaataaccccgatgatcctgaagccctaaaggctctggatgttctctttgaaactgctatgatttcaagtggcttgtcggtggctgctgctttcctaaacttgagtgcctgccatctgcggcgctgctgcactgttggcgcgctctgctgcccgccggatgtcgcgagcgcgcctgcgccttgtgtacggcttaccgtacatgacaagtagattgactaataagcctgacaaccccgccgagctcagcgggaagtctacgagatgataa

SEQ ID NO: 381362 - DNA, 279 bp, Zea mays
gctatatttgtggctagtgcgttcctctccttgcttcttatatctgcccaatacaccaccaggcaaacagacaagcatccgattgattgatgcatcttgcccacaatgtgtgcatgttgtctttttaacaagtatccatccaaggttgacccattctttgtaccacagttttccagagcactgtttctccatacacttccatacacagttacaaaacataatacgtcagttaacttgaacaaagtctctattttgtattatgtttccgattgcattggt

SEQ ID NO: 381363 - DNA, 275 bp, Zea mays
tgcctgtgggctgtgggtctgtactgtgactcaggaccagagcactccttactcctggcagccttataaagtcatgccaatgatcatgattgaggactgggagggaaaggcctcccctctgcaaatctttcacaactacactcctaaaaataactcaagtgcatgtgcctggaagcgcagaagagtgacttcatgacataccaatcatgttgtataatataggttgtataattcacgttaaaattttaccgttctatgtcagcagtattagaaat

SEQ ID NO: 381364 - DNA, 276 bp, Zea mays
gcagtggtgcaacagaaccgccaaatgaactctgactgtaggacagacttgcacgtcggtcaggtccgtcacaatcagatggttccaacatccatgccacagagtgcagattcgtgtagcactgtactgtcatctgtaaaccagcagaagcgtgagccatcgctcaatcagacttcagttacctcgccgtctaacctgcttaggtctcctaaagatacttcttttgggtagccaagacatgctacaaaggcaagttttcaggtggcttccctatac

SEQ ID NO: 381365 - DNA, 271 bp, Zea mays
tttgaggtcaaatctaattgctgcttgtggttatcggggttacctttattctgttgttgcttttttttgatttgttgctttgaatcagttttgatgaatatggtttcagagtggtgaagccaatttgcagagcaaaggggccagataagtggcgatctttgcattgaaggttggcgacaacaaaaatgcagttctccgtgccgctcagattttcatctgttctgtgatggcctcgaacaagctgctacatcatctcttacctgtgataacc

SEQ ID NO: 381366 - DNA, 241 bp, Zea mays
tgctgaagaaggcacgccggaggaggaagagagtaacaacggccgggtcgatcagctaacgatggatcgatcattttttccccatatttattgtgttgcgtctgctgtagtttctaattttctagatgtgctttcggtttggtctgtagaccctgcagcttgatttggttaagtttgatttgatgcaaaaaaaaaaaagaaaaaaaaaaaaaaaaaaacaaaaaaaaaaaaaaaagaaaaa

SEQ ID NO: 381367 - DNA, 173 bp, Zea mays
ggagagactgtttagttgaactttcctcgtgtctaccacgatgaatcttccttgaataatcttataaccaacacgggcacaaacacacttaactgttcaggaatggttgtgttaacgagttagtacttttcactcgctgactgtatgatgcagggatgaagttcatgaacgtg

SEQ ID NO: 381368 - DNA, 270 bp, Zea mays
  unsure (1)..(270): unsure at all n locations
cttcggacgggttgaaaaagcgatgaactcagacttaaaatcccgctgaactgtgcctgtggatggatgcccaatatgacaatgaacatttctcagcgttcatcttgtgtgttatattccctcttctacttccgcctccagagtgcagcagttgacgttttttttttcgcactatggcattgcagtcagattttgttatagtgacttttcgtggcacaggtccaataacaaagttacattttttgggtgcaaaaanaaaaaaaagaaaaa

SEQ ID NO: 381369 - DNA, 251 bp, Zea mays
gtgctctgcaaaggtacaaacaatcatgattgtggaggagcgtgacggcgagggtcgattggcgtccgaccacgatttgcatgtggcttgtactcggcgccaccgcaatgacgcccacccatgtgctcaccaccttaattgtttagagtgctgagtttggcaagttagaagcataatctttcccaaacaatctacactgtctaactgtgaaactgacagatgagtggctttgaaatttataatccttcacc

SEQ ID NO: 381370 - DNA, 151 bp, Zea mays
ctagcatagacatctgaatatctgatggttagtgaaaggctggataccatcatatatacgtgtcatatgcgatttgaagtgtgccatactaaaattgtagtcccaggagtattatgctttggctgtaattaaactttaaatagtgttctgt

SEQ ID NO: 381371 - DNA, 113 bp, Zea mays
gaacgtgacagcggcgggcaaggacagtaacttgacaggtcacagcgggtcccatcggcgaaggctgacgttgtgggaaggggcagcgacgcgctgttgttgcattatgttat

SEQ ID NO: 381372 - DNA, 285 bp, Zea mays
  unsure (1)..(285): unsure at all n locations
cataattccacctaccttcctccaggaatctacaacattacatgtgtatgcctagaatgtgcaccaggcatgcagtacatactaaataaattactgtcactatcattaccagnacctccctgttctggtgtaaaaaactgaaatccaaaggaccagagctcccagagctccagtgatcagaaccaagacccctggctttttaaccaaacttatcaaactacagatgtgctttaattaaggaccattgtaaccagcaactgacatcacaggcatggacctcattgt

SEQ ID NO: 381373 - DNA, 303 bp, Zea mays
tccacatccaggaaatccagagagaaaattcgccgcggtttgttttttgtggtcatggatgaaagctgaaatccctggagcgaagtctcatgtggaactcccctttgttcatcagcgaggtgtgaatccctggcagaacgccctgctgattttgtaacatgaacacaatggcttggggacaaaataagaactgcgatcgaatgattgatacaagaagctacgtctacactcgctttatgtgactttgcctgtttctctgatcgagtgtgtggaatctatgtactgttctcacttctgagtgaa

SEQ ID NO: 381374 - DNA, 301 bp, Zea mays
aagaaagactccatctcagtacataaataaataaatacaaagcgctgcagtagctgtggcctcatcctgaagtcagcgggcccatgcctacatcactctctcccttggcagagaagcagacgtccatagctcctctccctcgcaagcgctcccagcctgacctccagctagctgctctcacatcccagtctctactcactgggatgaagttaggtcatcgaggacaccaataacctagaaataagcaataagccaaacaagcctgagcttgtgcttaaagactgaagaaaacaaagatggg

SEQ ID NO: 381375 - DNA, 294 bp, Zea mays
tgtgaagccaaccttccctgttcaggtgaaggaagtgggtgggagctggggcggcctgatcaagggagctaggtcggaggtcaaggcgtttgcacccaagccagtatggaagatgatccccagggtgcaccagaagtttccgggttgtgccgatggctctggcctgcgtgccgtccatgctgcctccatctacgtggaggaggttggcggtggctgatggtccaagtatctgcaattactatcgctagaggttttattgtctatctccatggcatcattataacctggtactgt

SEQ ID NO: 381376 - DNA, 122 bp, Zea mays
aaaccgatgaaagtatgaaacaaacagccgctacttcactctggtattctggtctagaactaaggttttgtttggatgacgaattgtaacgtaaatggtaacggtaatggtttgcactcgat

SEQ ID NO: 381377 - DNA, 232 bp, Zea mays
agcattgcttttagaatgtggtcaacttcctccccacaaaatatgtgaccttcagaagaaatgaaaaaactacatactctatgaattagtcgcaacatttgaaattgaaaaaaaaaactctcatgtgaaaaggtacaacagtgggttggtatatttggtgatgagttatcaacggtttcttcatgttgaaggactcgatgacctgtcattcctgaatgaacgattgcttaag

SEQ ID NO: 381378 - DNA, 294 bp, Zea mays
agtgacagtagttccaatgatgaaggtgatggcaataatgatgttggtgccgatggaagtggtggcactagggctgctgatggtcctgccaaaggttcgagacatggggaaccaactcctttgcgtccaagatcaacaagaaaaaggaagccaactctcaagagcattactgaattataaatgtgttgtatggctccaaggaaaagatctggatatggcaatgcttcactgattaatgtcttttggcgatgtgtcgtcggcttaaatagacgcctaacttttgtaacataataa

SEQ ID NO: 381379 - DNA, 245 bp, Zea mays
aattacactgtccgtgttattttgcaggcacttgaatgcacacttttgtattccaatgcaagggtaggatctctcgtcgggcttgcggcctttttcctgcattttgcagagtgcatcgtgtgtcggcaaacggacagtacacttgctgcaactaaaatataaacaagcctatgttagcctgctacgcagtaaaaaaaaaaaaaaaaaaataaaaaaaacagtaaaaaaaaaaaagtaaaacaaaa

SEQ ID NO: 381380 - DNA, 227 bp, Zea mays
agcgagtacaaaaccgaaagaacaattggggtaggtattggctgcaggcacacactggcatgcttggtcaggagccaaggtgatgaagcttgatgtcacctcaaccttggatggtggctcatagcatcctctggttttaccagatagatgcagaggatacatgtcatggagggttaggtgaatgaggcaatgccacagctgtggatggaatggaagaagatatccac

SEQ ID NO: 381381 - DNA, 290 bp, Zea mays
gaaaagtcggcatgtagaagagtgtggaggataacgccccttcttttgtttctcgtcgttaacttgagactccgagggcgaatgcagccattgaatcgtcgtaaatgttacagcagttgttgttttgttaataggttttttttatgtcttcgctagcgcattcctggaatctaatctcattcctgtaagataattcacatgtctgtaagatcagctaatgtatgcgcaaagctagaaatgatcggcctcatccctgtgttcgttcctgtggaaaggatccgctttgctgg

SEQ ID NO: 381382 - DNA, 292 bp, Zea mays
cccgatcgactgcgaaccatggttcgaatgcctcagcttcaacaagggtgtgccctccaaagattgcggcctttgcgtccactggagcatcctgccaccaccacccttcttcccttgcttcctgaacccctatgaatttcgcaatccacccaaaattacagtctcatcctatgctgtcgtgggctcatacatcttgatttccccgcaaccagagctagtggtaggaacctatgcttttcatgtggtgaacaagacgtgggagaagatccacgacgagaacctgccttttgtt

SEQ ID NO: 381383 - DNA, 134 bp, Zea mays
ctttcatcagcctgcctgtccactgttggcttggtgacttcctccgctccgctccgctcccctccgctcccgaacggtcgatctttgcatggcagcagcaactggctccaaggggcaggcgatcgctggaagct

SEQ ID NO: 381384 - DNA, 289 bp, Zea mays
cgtccggggcagcgcgccaggacggatcggaggagacgccatcaatcagcacttgcacgcgcgcggtcggccgcaggtggaggaagaagatgggcctgtgctcgtgctgctgctggtgcctggagctgctgtgctcggtcctcctcacgcccctcggcgtctgcctccgccacggctgctgctccgtgagtcccgctctatcctccgcttccctgcttgctttgctctgctcttacagcccgttgcctttctgggcagatggagttctggatcagtgtgctgctcacca

SEQ ID NO: 381385 - DNA, 284 bp, Zea mays
tcaaaaccccctcaaaatcctccgaaccccgccgccgacgagcgagctatggcgctggcgcggcggctgctccgccttattccctacctcggcacgctctcgctcccatcccccaactcgcatctcctccggaatcgcacctatatctctgacatgcgccgctctgccttcgtcgaccgcttgctccgttccgtacgctccgagatctccttcctcgataactccgcccggcacggcaccacgcctcctaggcattcacattgaggacgcccgggcgacatggg

SEQ ID NO: 381386 - DNA, 148 bp, Zea mays
ctcttctaaccagccaagttgcatctagcgagctgagcagcaatggcgggtgctacttcttctaggcgccgtgcagctgctctggttgtcctggcagtggcactggcagcagccgtcgtggccctgcgcgccagcggggcatgtaccc

SEQ ID NO: 381387 - DNA, 157 bp, Zea mays
atgtgctacaccagagaatgcctcacggtgttcttgaagttcgggctaatcttttggggcttgtaagacacattgaattcaggaatttcaatatcagttccttccacggtgttcttgaatttcgggctaatcttttgggggctgtaagacacattga

SEQ ID NO: 381388 - DNA, 116 bp, Zea mays
gcacccaccgcgcctgcttcagtctgcagctagcttgaagaggctgtgtaaactggcgcgccagtcgcccgtcgatgtggcgtcggttagttggctgctgttgctgtgcgtataaa

SEQ ID NO: 381389 - DNA, 177 bp, Zea mays
  unsure (1)..(177): unsure at all n locations
gctcttctctatcctcnccacacctttcttcttcgtgcacgtctgggagcaagctgctgcccttctccctggccggcgccctctcccatggccgccccctccctcagcttcgtcttcagccgccgccgaaccagggtgagctccccatgctcgctgccactcncatcccctccccct

SEQ ID NO: 381390 - DNA, 291 bp, Zea mays
  unsure (1)..(291): unsure at all n locations
tgtcncgtccgactgctcacccagcctccggcgcgccagtcccgtcccgtcccggcctgcactcattccattccacacagccctgaccccggccttgatcggtaaggtcgtcttgatcacagcatactggctccccctctctgaggactcgtcagagctgatcgcttggcaccgcgtgtgtaggcagcggcggcggcggcggaggaggagatcgacagaagcggcgcgcgcaggatgccgtagcagcggtgccagtgaccatcgtgcggtgcggctgcccgtgctagctca

SEQ ID NO: 381391 - DNA, 290 bp, Zea mays
tggcgaacgagctggtggcgaactgacgtttgtctgctgggacaagtgcgtgagggggagcgtggggagcagcctgagcaggagcgagacctcgtgcctgtccaactgcgcgaaacgcttcgccgaggtgaagatgatggccctgcagcgcttcaccactaccggacgcggctgaagtcccaaccaccacgcgcgcatctctctctctctgcctctgcgtggacggagcaatgtgtgtgtggtgtcctctggagtgtgccattgttggtgagatggtagaacatgtcaat

SEQ ID NO: 381392 - DNA, 292 bp, Zea mays
taacgaaggaggatggtgcgaccaaggggaggtagtcaagtatctcagcgtgaacctcgattccggtccagaatgcgtgatggtgaagggtctcaaggtcagtcaaatatctatatttttatagctgaatacaatgtatactggtgcttccctttggaactggagtaatcaaaagatctgcttctgtaaatattcttttttcatttccttcatacaagacattgcaactcatactttcacccaatattagaagttgcttacatttttatgttggaagaaatgccagatgttt

SEQ ID NO: 381393 - DNA, 154 bp, Zea mays
  unsure (1)..(154): unsure at all n locations
taagataggaattaagatagagagcanatacaacacaaggacaataaaaagagctagtagtggaaaagaagatgttagggaacataggaaagataaccatcataggagacatgaagggcagcaacaagaatgcgcaaataaagggcaacgtggt

SEQ ID NO: 381394 - DNA, 189 bp, Zea mays
taagataggaattaggatagaggtaatatataggggtattttattaaagaagattagtaatgaaagaaaaaagataaataagaggaagaagagatacattcattattagaagtaacgaaacagaagactacgatgagagcacagagagaagagaggtagtagatagaaggagcaaggaaagtaagagag

SEQ ID NO: 381395 - DNA, 307 bp, Zea mays
cggacgcgtggctagttctagatcgcgtactgccgcccttttttttttttttttttttttttttttttttttttttaacagaacagaaccattcaatcaatggatcaatttactgagcaccagttcagcaagcatctcgcactcatattatctctttattctctccttaccaaggtcagaaccccagaagcagcaaagtcgacaagtcacgcacccagaacatgaaacgaagggatacaattacaacacataatactagctactgtcttccacaacgcaacaggtaccctcgtatagctccccagca

SEQ ID NO: 381396 - DNA, 299 bp, Zea mays
  unsure (1)..(299): unsure at all n locations
taccacgcgtccgcggacgctgnggccgtggaagctttcgtttaccgttcccattccccgtcgtctttcctctccttcccactctcccacccgtcctccattgctcccttcctctctctcacggagtcgctgcgatctagccaccgagcacgagcgtcctactcgccgcggaccttgctcatggccgcggggtcgatccgggtcaccatggaggtgggcgccgacggcgtcgcgctcatcaccatcgccaacccgcccgtcaacgcgctccaccccatcatcatcgcggggctcaagga

SEQ ID NO: 381397 - DNA, 300 bp, Zea mays
tccacatccatcccctccaacgccaatcaactccgtcctaaactacacaatccgcggcaacagaaaaaggcgacaccagaaacagaagcaagattccctccgcttgatcgccctgtgaatcgacccgaccgagtggctccaccgcccgatggacccgccgcggcccgctgccggccgctccggcggggtcggcactggtgactcgccggtgagttgggacgacgacgacgatgactgcagcggcggcggcggccgcgtcgaaggcttggcgggactccacatatttgaccaagaggcaga

SEQ ID NO: 381398 - DNA, 296 bp, Zea mays
gttctagatcgcgtactgccgcccttttttttttttttttttttttttttggcgaacctcaaacatccctctatcctcctgagataaatctacaaattattcaatgatctgtcaaattttcacatggtaatgtacatatttttgaaaatacaccaagacaatattatcatttaggggctgctaacaagacctaacaacctcgacatgttatttgttaacatcactaacatcgatgtgagtagatacaagacacactcctcccggctccagggtttctcagtcgctccagttatcct

SEQ ID NO: 381399 - DNA, 298 bp, Zea mays
cgaccgccgaccagatccacccccaacacgtccagccatgccggcgccgccgcatccaacgccgctgctgccaccggcgggggagccgttccgcgtgttcgtggggtacgacccgcgggagcacgaggcgtacgaggtgtgccgccgcagcctgctccggcgctcatcgatcccgcttgacgtgcgcccgattcggcaggcggagctgcgtgccgcggggctgtacacccgggcgcgtcggcccacggagagcaccgagttctccttcacgcgcttcctcaccccgtacctggcgggg

SEQ ID NO: 381400 - DNA, 137 bp, Zea mays
cggacgcgtggggttgtgaactcgtatgtctcttttcttgcgctataaggttggtagaaacaatgtgaaatacgggtattgctagcttgttctctttgtattgtagagtgtagactaataaactcgactcaattctc

SEQ ID NO: 381401 - DNA, 309 bp, Zea mays
  unsure (1)..(309): unsure at all n locations
ccccgcgcggtcgtcgttccgcaagcagccgccggtgggcacgccgtcctcctcgtccgcgtgggactgggagaacttctacccgccgtcgccgccagactccgagttcttcgaccgccgcaaggccgaggtcgagcatgccagccgtctccgggagctcgatgaggaggagaaggcccgggcctacctccagcaccacacccagtacaacctcaaggaagaagacgaggccgccgaagacgacgacggcgaggtggaccatgaaccggnagtgatgcattgcggcggatgggaggacgacgagcacta

SEQ ID NO: 381402 - DNA, 174 bp, Zea mays
cggacgcgtgggtgcaaaatctgactagcctgttgtcctgtggatgatgagtgcagctgtcctaatagctgttcacaagaacaatgtatttgctgataacctgtcttgttagtgtgagtactggttgtttccaatgtatagcttcatcctggttcgattgctctattctttttt

SEQ ID NO: 381403 - DNA, 296 bp, Zea mays
  unsure (1)..(296): unsure at all n locations
cggaccgtgggccgggtcgcgctaccatgcttgccgccgtgcagccgcggcgcctccgccgtcatcaatcttgctcatgctcggcaggcagccacatgatgcgaggatatatggtccttttgctgcagagcgtgctatatattcatatttctatggcccgagttttttttgccgtggaacgtcgcgaacgtgaccaagagatcgaccttctgtgtgccatgcatgaaaacggcggaaaagcaatgaagaggggaangagaagaagaagaagaaggaggacatggcggagaaggaag

SEQ ID NO: 381404 - DNA, 303 bp, Zea mays
ggcgtatcatcaagaacctgggttactccactgatgcagcaaggattgaccaaagagcacaagacatacagtgagctgttcaagacgactatcaatgatgttcatctttctgctctagcggcgatttttggctggaggacagataaaatggatgatccttgtgcctctggtgcattggtgggtcattgagtgttctatctttcatcagtttcgtcgttctctgtctttttccatatgaatccttcaattttaatttggaatgtgagagggctcaaccagcgggactgctgcaattctgttggt

SEQ ID NO: 381405 - DNA, 302 bp, Zea mays
caccaacatggcgtcgccgccgccgggtgccgggcttactgagtatgagcgccgccgcgaggagaacatccgccgcaacgagactatcctcgccgcgctccgtcgcaaggccgccgagctctctgcctccttcatccccacggcttcctctcccaagcaccccaagaagcagcatcccctcgcgagaacgaccagccccgtcgtcctccgccgctccttgcgcacccgcggcatccccgccggcgaatcctccgcttgtgacggcgctaacacctcgctaaatacgccgccgtccccgacga

SEQ ID NO: 381406 - DNA, 301 bp, Zea mays
cccactcgtccgcccacgcgtccgctgtgtcatataatacaggcaaaactgtttttaattcctttctccaggatgaacatagttcagatgtgtcatataatattcggttcatgagagaaacattggagacattgcatgccctatatgagaacctcaagcttaatattttgcggaaagaggatctaggatgtctcgcttcattgttatgtactgttgcttcatctctgggtgaacatagttatgttgattattattgccgtgactttccactcaacttgattgaatccccatccctagtctc

SEQ ID NO: 381407 - DNA, 297 bp, Zea mays
cctcgctcggtcctaagatgctggcgagctacggaggtggtggccgcggcgtccatctctcctcccacaaggacatcctcctcggccgcggcggccggagcttcctcttgggcaacacgtggtttctcgtctccacctacccggcgcgcctcctgcacaccacggaccgccgcgcgcccgccgctttgttggccgtgatcaaccggcccccctgcatgcagccgcaccgcgctgggcagggcctgctgcagaggggtggtattgtcatggctgcttgcggctatgctcttgggcgag

SEQ ID NO: 381408 - DNA, 314 bp, Zea mays
ggtaactgcccccctttgctccatctgggctgggggtcgccttattcgaagtatgcgttgtcatgctccaatctgtgtgcgtgtggcataatagtccattccatcatttcggcaccgttgctgagtagcaggcccattcacttggttacatttgcccgttgcgcaagggcctgttttctggtcatcttggcatcatcggtcgatccattctgaaatcagtctcctgtaatcttaactggtgctgttgccccaccatcaatttatagtctagctgatatgtatcgcattgtacttgtattatgtatcctttatct

SEQ ID NO: 381409 - DNA, 260 bp, Zea mays
atcttagaacatttacatcttgagccgagctgagctgactagcagcagagggccatcttctactggtgtctcccagccccctagtccaacggttcagcctgctcaattttagtgaccagttacggcaaatgcagccctcggcggacagcaggacgaagacgccgcccccgccgacgacgaggctggcggcatactgctcatcaagacctgctgccggcaccgctcaaggccagtgtcagtgcggctcgactagccccggt

SEQ ID NO: 381410 - DNA, 301 bp, Zea mays
cggacgcgtggcggcagggtgtttaagaacaaagactccgaaccaagacccgacgcgacattttttttttggaagggggtgggggctttgttggtgctgttgttagtagagatcaaacgggtccgtgggaaaaaaaaaagaggtttcattcgcgtgcgtgcgtgcctgcgccgagcgcccgagctaatctactagtatttagcacgcgacgggagcatctcgccgctcgattcgggcctccccgtgaattcaccccacagcgagccgagcgagcgagaattcgaattggagttggacttgc

SEQ ID NO: 381411 - DNA, 308 bp, Zea mays
gcgagcggccgcccttttttttttttttttgaaatggaaatcccatcaggcttcaagaatctctgagcaccatcaaggtttacatgcatcaaatttaggaggaaagacacatcaaagtttaaggcctaatcctaccgtcctagttgtggagactgcatcatcagcaaccttatcaaccaaggccttagcaagtgctcttcgatactgctcacaagatgtaaaacaaagtatcaacaaacacaggtactggacttaataataagcaaatatgaagtcacagggaaaaaggatgacattctgttcataca

SEQ ID NO: 381412 - DNA, 305 bp, Zea mays
atctagtagtctagccatcctctcttcctcgtgcctcctctgggctttcgtcgcggcattgctcgatcttccatcgtcacacacatgggggtggggatgaaactgctcgaacgagtccggaagcgcctcgtcccgctcctacgccgccacaggatggcgctgctcacggcgccggcggtggccgcgctgctgctcctcttctggtccgcggccgcgcagggcgtgccgccgtacaaggacgccagcaaggacgtggaggtccgcgtcaggtacctcctggaccggatgacgctggccgagaaggt

SEQ ID NO: 381413 - DNA, 306 bp, Zea mays
cccacgcgtccgcacaatcgtccgctagttctagatcgcgagctgccgccctttttttttttttttttttttttttaaaaaacccaatatagaactccacttatctccgtgatgcagtacaggtaataagcgaacaaacactgatagataactaactgatatgatgaaccaaaaacaaaagagacacgatgttgaccccccaaacaacaggagactggtcggatacacaccgtaccataactctccgctcagctccctcctactcatgaccacacacacacgctatagcagtaagtagcgctacaa

SEQ ID NO: 381414 - DNA, 304 bp, Zea mays
gttctagatcgcgagcggccgccctttttttttttttttaccatatgccatttgtttcctacggtaacaccaagaaacttcactactaagcaaaaatagaagatgagatggaagggtagatttcatgatgagaagctcacaaaatctctctttgtctcactcgatcctcctctcttctacgaagtttcttttcacgctcctcacataacagttcgactgatgattgaatatcatagccagtcatcttcaatgccctttttgcagaccgtgcttcatagcccatatccattaacattgatatagc

SEQ ID NO: 381415 - DNA, 297 bp, Zea mays
ttcgagacaagatcatccaatgagcggcactaatggtggcccatataatggaggcaatgtggctattccgaagtgaactctacaagctcactgcagtcaaatccgtctacctctttcccttccccagcaccgacaacatccaataacagcatgatgcatgctcctcaaaacacaaatcagctgagctccccaactacatcatcaagcatacctcccatgcagccacccgctactcaacctcaggaggctgagccaagcgactcgcaaagctcggttcagaagatcttgcaagatctg

SEQ ID NO: 381416 - DNA, 295 bp, Zea mays
cttctgtcagctccttaaatcagaggctaatatcttgaggaggctagctgcaggtggagatggggaagtccaccattgtttcctggactctgtccctcttattcatgtgtggctccacggtttcagattcgccgaaaccgtcattaccggttaccacgcatggaaatgcgaaatctacagaccatatttgcatctaaactcttaggcctactttgaaaactcaatcccccttcaaaattgaaggatgttcagagaaaaataaactaatttctctctcaataagaaacgcaactct

SEQ ID NO: 381417 - DNA, 299 bp, Zea mays
gcagcgtcggacggggactcgccgtcggcctcgtactcgccggcatggttcccgcctcctggcccgcacggcgagggttgcaatgacgccaccgataacaatgattccccactctttcccctgagtaataatcagtcaaatcagggtaaaaaggagactgctctaaaagactacacggggtccctagcaattatctctgagattgaaccaaaggatgccataatgcaattgcttatgcaggaaacctattcaaggtccgagtgcagcaagtttataaagataattcaagagcgggtttt

SEQ ID NO: 381418 - DNA, 324 bp, Zea mays
cccaagcgtccgcggcaactccgcctcacaagtcacacccacactcccacgctcaccagaggagctagcggaccagacaaagccaaaccgcaaccgcgaagatgtatccgaggcgtccagtttccgagagtcgatcactagtgaccgcaaggtggactaaactcacggtcagcccaaccagtaatccgtcgagccaaagaccaccaacaccccggtggggcagtgtgcagaggcagcatcctctggggtatcgtggcgcagtccggggtggctgcggctgcagctacgaccaaaaaggagcagcaagcgcggagccgtgtaagt

SEQ ID NO: 381419 - DNA, 155 bp, Zea mays
tcgagcggtctaaccccaaaccctaaaccatggcgccgccggccccatccgtcggtccccggctcctaatccgccggctcctctctacggctaccgaaacagcggctgggatacctgtgtccaccggccccaagttcgtcgtcggcgcgaaccgg

SEQ ID NO: 381420 - DNA, 322 bp, Zea mays
gtgtttttttggtataccattcaaattgattaatctgatgcatttgaagctgggtattccaaataaaactgttgtcaattttctgtcaaaatttaataatctgtggtaggtatagtactaacaagagttatgagaactgtcatctcttccttaaaaaacttgactaggtctgtttatatgacttgctgcctagtgtattgacccggcttgttgaagttgatctttaactacacaggacttcctataatttacttttatttcatatattggctatgttgcatagttttcacctttttctttctcttctttggcaccctgctgt

SEQ ID NO: 381421 - DNA, 322 bp, Zea mays
gtgagtaagaatatattcttgttgaagtcactagatgatctgtttcagaagggcagggaggcaataaattatcctgctcttcaggacctaatgcaaaagacaggatttgacatggatgatgtagtaaggaagtacatccgttacacactgaatgacaaacagttcagtcctgatgtggttgtggatctcatacatcttaggaaggcatcaatgctggaagatgcagaagttgctgaaattttaaatgagatttcaagacgaattgtccgggataaagggccagtagttatggacttatctggttttacagatcaaggtttta

SEQ ID NO: 381422 - DNA, 286 bp, Zea mays
gtcactcactcacagtcgccgccgctggccagtgcccactggtcgccgctagacgcgtgtggcgagaagacgggaaaagacgaagcacgcgcaggcaggcatggcctccccttcctgggtcgagggcgccgcggcggtcgtcgtcctggcgctgctcggcggaccccagtggcgcgaggtgcgtgtgggcgccgcggacaccggcgcggagaagttcgacaccagccgggccggcgtgtgagtggcgacgctggcgggcggccggctcgcggtggtgcggccagcc

SEQ ID NO: 381423 - DNA, 318 bp, Zea mays
gcgaccctcgcgtcgcgccccaactattaaagaagatacttctagatttcgatttccatgttggaatagaaaccctaatgcactttctttggaagaatctgttacacacaaagatttagagatagcgagcacagctcccggagctctcctgttaaaatgaagaactggatttatggaatccatgggctacagacgattgatgtcgccatcctctggctcaaccagttcttacttcttgttcaggccaaaatttgtcagcctgaagaactagtttgcgctcatccatccttgtctgaagagaaggaatatcacaggaag

SEQ ID NO: 381424 - DNA, 334 bp, Zea mays
acatcgcgagccgccgtcggcccacgcgtccggaccgccgtggcccccatgggccatggaagatggtgatctcgtcaccaagcgcttgttgctcgtgcaacggcgttgacgttcccgccgcaccccactttctcggtgggcactgggcagggggggcaaggaaagcgaggtagcagaagctgctggcgcgacttctttttagtatgtgtgagctgcactcaggcaggatttgagattacgttgtaccttttagaattcgttttctagcacgctgcttttgttgagtggattgtggtttgtggacacccacttggccactgtcttctgaatgaga

SEQ ID NO: 381425 - DNA, 133 bp, Zea mays
gacctgagcttcgacaagattacgacggccaacgcgctggggcagctggtggccggctaccggtccctcctggcggtcgacctcgtaggcaacccggtgcaggccagcatcggcgacgacgccctgctccggg

SEQ ID NO: 381426 - DNA, 325 bp, Zea mays
tgcgcggctcccaataaagagctatacagctgctcgtgcatgtcctccgtcctccactgctcctcgcccccaagctccgattcacaccctgcgcatggaaggctgcactcctttctagcccatttaaagctagctagctagggacacacagagcgggcggagaacagggagcgcgtggctcagtgcgagcacgcggaggcaggcggacagagcaagcagcggggagcagttctgcctgcacacccaggtggtttgctccatcgtattggcggcagcggcagcggcgacattggcgtgtcatgtccgctgcggccgccgccacggg

SEQ ID NO: 381427 - DNA, 323 bp, Zea mays
gacccttcccgcgccaatggcctcgaacaacctcctcgaccttcctgctttcaaggtggcgctcaagcccccgccactcccgacgcgcccatcggtgttgtcggcaccgcgtcaggtgccaccgtgccgctgtgtgctccgcagcaagccggtgccgcggcaaggcgtccggtggtgtacgtctccgcagctagacagtgccaacaccccgtcgccgccgtcttcgaggcaggaggccgtcgcccaggcacggtcctgcgtcgccacggcgctgcagaagccgctcaacaactcggtggccgtcaaggagctcaagaggcagc

SEQ ID NO: 381428 - DNA, 123 bp, Zea mays
gaaattttaattccaaaaacattccattgtttagctgataattattttgagtcactcttataaatctgcaactttgatgtttaatctgcttacattattatgaaatagttccttgtcaacatc

SEQ ID NO: 381429 - DNA, 301 bp, Zea mays
agttctagatcgcgagcagccgccctttttttttttttttttttttgacccatgaagaaattaaaggggttttaaacaacataatacatttaacttgtgtgttatcaagacttaaaagcacgtcacaaaagtacgtaagtgaagcatgatacgtacggtgtgatttaacttgtaacactaccatagctagagctgctcaattaatacatactctacataatgcgcatgcaatgcacaacgtgattgacagcttgctccttggattacagaatcagaaaacgagagatggattggctaagag

SEQ ID NO: 381430 - DNA, 280 bp, Zea mays
gctgccggcagatgttcaatatttttcatccttttgatcctgtagcatacagacagtgtacttatctgttgcatagtgaggaatatgtcatatgaatctaggtgggcttttatacagagttgaaccacttgtatgtgaagattatcaaaagaagcgtcctgtaattgttccctaccatagaggcggaaagaggatacatgttggagtgcaggagttcacagaagatatttctgcacgttctcaagcgattgcctgtcaattggagtcactgaaggtccaa

SEQ ID NO: 381431 - DNA, 298 bp, Zea mays
gttatttttaggtctcacgagttcaaattgatagataaatgacgcagcaatctttttttttagaataatgaattaatgatgcagaaatctcgaactctgacactaatgcataccattggacaaaaacaaccaacctatcacttattttcgtatattcgaggtttataaaataaccgtgcaacctatgtagtttgaacgagaagagtatatgctactttcaaaatctgagctggaagaaacattggaagatgtacgtgttgaatgtacgaggtgcgcacatttcttttacattcatttt

SEQ ID NO: 381432 - DNA, 146 bp, Zea mays
cccgcctccggcaaacaaaatgcccccactctcaccgcccgcatcgctgacccccgctgctggcggtcggcgacggtggaagtgccgcctcagtcccactatcgcacgtgaccgctgctacactcgctccttccgctccgcggggc

SEQ ID NO: 381433 - DNA, 231 bp, Zea mays
ctagttctagatcagtgagcagcaagtgatacggacttttatttttattttttattgttctggtttcggcgccagtgcgttgaacaccaaaaccaaaagtgccggatgctccgatcctaaggcctgaacagtctatgcctccgtgatcagattaactcagatgattatccttatcttgtatgtggttatatatctaattgtggttatccatttaattatgtgggatttgtt

SEQ ID NO: 381434 - DNA, 101 bp, Zea mays
ctgacgcgtggggccgtctctcaacaaaagatgaagacaaatgcatttgatagtgaaattgtgaggcttcgtcaaacttctgattctgctcttccaactga

SEQ ID NO: 381435 - DNA, 310 bp, Zea mays
cggaccgtggcgggattcggtgttcttgcttgcgcggtcctcgtacccgtaaaattggcaggattgcagttggaggaggtctatgcagatctatcgcgcgactccgggagcgccggagatggactgcgggccgcccgaccagctgccgccgtcgtcggcgccggcgtgcttcctcaacctcaactgggaccagtccatggccgccgccacggctggcgaccacctcgacctggtctcctccccggcgtccaactcgacggcggctgacggcctcgctctccacgggatctcgccgcagccgcagtacgga

SEQ ID NO: 381436 - DNA, 303 bp, Zea mays
cggaccgtgggcgaaaacttttgagctcaaagcggccatggcgcatgaagcagcaatagttattgatcagctcgctggtgattcaccgtcggtgaaagcagttatgtcactactcctggtccctgtcctcctgctcttcgtcctgctgcgctacttctctacaggggcaacgactaatggtacgaaaggaaagaagaaactgcctccgtcaccgccggcgctgccgctgatcgggcaccttcacctcgtcggcgcgcacccgcatgtctctatgcggggcctcgccgcccggcacggtggcga

SEQ ID NO: 381437 - DNA, 144 bp, Zea mays
accgtggagagcatcattgcagctgccaagagcttttaagagctaacaacggtgatgccgtactccttgtagatcgtcccggcaggagcacggcatcaccgtggagagcatcattgcagctgccaagatcttttaagagctaac

SEQ ID NO: 381438 - DNA, 312 bp, Zea mays
cccactcgtccgcccacgcgtccgatttgaggatattgttccaaggcaacttaagaaggctgaatctgttgctaaggctgatgctgaggtgaaaccaagaagaaggcagttaagcaacttaacgtcctctcatttggtgatgaagtagaagaggaggagaatgaagcagctacctctgttcaggccaaaataaaaagtattcatgatgtgttggatgatccccgttttcttaaaggggaaccggaggatgtacagttgataatggttatctgtgctatgctgcggatccctgctaacgggagataatcgaga

SEQ ID NO: 381439 - DNA, 317 bp, Zea mays
gggttcgcggcctcgtcgacggacgccagcgtctgtgagcagcagctggaggaagaggacaagggctactggagcagcatactgaacatggtcaactcctccatgtcgtcgtccacgtcctcgctgacttctgatgctgtcacggaccccgccgccgcgtacttgccgccggcgacggcgcggccgagttctgagtgattgtcgtccaataataacgaacctgtgctaatgttaccttgtcatgtgtgttgcttactagtaggtgcgttttggtgctagttagtttatttacgtgctaatggggtgtcgcccacgtg

SEQ ID NO: 381440 - DNA, 306 bp, Zea mays
tgaattatgagctggagtgtaagacgtggacgagtggctgtggcatgcatttaagtcaaattgaaggggtttataaaggtgttctctagctggcttctatctataagaaagaaaaggcagatttctagtgccgaacttccgtatctattcccaggactcatatcatggtgttgtatttcaatttcatcacaatttgacagtttatgctgttcatgctaccttgcttcttggtgacaatgtgtcctcaaacctagatcctctctggtcccttccatttgccccactcaatatccctcttgggcagct

SEQ ID NO: 381441 - DNA, 310 bp, Zea mays
atggacttctcaacaatccgtgagaagctgttgaatgactcgtattctaagttggagcagtttgaggatgatgtgtttctactcacatcaaatgccatgtcttacaattcagctgatacaatctacttccgacaggcacggtctattgaagctcttgccaaaaaggattttgagaacctgaggcaacccagtgatgaagaggaacccaaaccaccagctcgaaggggtaggccaccgaagaatcccaagacagagggtgatgtgtcaccagacctatctaatgtgaaagcaaataaacctgaagacaatg

SEQ ID NO: 381442 - DNA, 309 bp, Zea mays
catcaatactaattgtgaagggaaaagtagagagtatctattgagttgtgatcttctatggggcctccagcactaccagaaatgtgaccgtgtaattactcccatgttcaagactattgaggctctcttcagtaaaaaggttttcttgaacaaggaggggtacagtgagttctacagtggactggtagattccgtgagctctgaactgaagggatccaaggattttaccaagttatgtgcaggtctctcgatccttgggtacatttcttcggagtcagatgtaacttgcaccaaggcattttcccaact

SEQ ID NO: 381443 - DNA, 309 bp, Zea mays
tgtggattttgatgctccaactcgtgaaggggcccaacttcttcctgatgacaagaagcaagatgaattgcttctagaagatatatggactcttttaagagcaggaagattagaagaggcatctgacttgtgccgttctgctggccaggcatggagagttgccactctttgtccttttggcggcataaatatgttcccttccctgaatgcattgcacaaaaatggaaagtacagaacactacaagccatggaattagaaagtggtgttgggcggcagtggcgtctttggaaatgggcatcatattgtgc

SEQ ID NO: 381444 - DNA, 154 bp, Zea mays
cagattgctgttgtggtctattcattggcgattggtctagctgtttgaataaagcaaacattagagtttgcatctgtgagtgaatacgtatttattagaattgggatgatccaataaagcattccatgaatggccaagtcctgcaatactagag

SEQ ID NO: 381445 - DNA, 187 bp, Zea mays
tgcaaatatgtatatgtgtggtgtgtgcttgctgctgagatttgtgtgcaagggcagcaagctagtgtgtgtgctatactattttgtttgtagacagtgtaataattatattatgtatatggtagtggtaattgtttaagatagggttgcgaaaacctttgaataatacgtacatcagtgcatacac

SEQ ID NO: 381446 - DNA, 108 bp, Zea mays
cggaccgtgggtgcgatgtccttgccctgcagaccgacgagaagtcaaagaatccgcactggcgcgcgatcgggtacagcccgccccctgcaatcgacgagccggcgc

SEQ ID NO: 381447 - DNA, 312 bp, Zea mays
cgagatttatcttcacttcgttttttttctcgaatacgcgggagagctgcgtatcattatattaagtagaataaagatggggtgaggtgttaaagaacctcatacaactctacacaccacccaacaaaagaaatgagcaggagcaccagtacactaagcatactagagaccaaatcctcaattagtatgccgaagtaaaaggatatcagataatccgcgagccccagccctacaccaaagatgagactcatccatgacccaatttatgaccttgctagccctaggctgctctccgttgaatacacattgatt

SEQ ID NO: 381448 - DNA, 272 bp, Zea mays
ctcaggcacaaccccaacgcaccgccgccgctcgcctggcctcacctcgccggagaagagttataagacaggagaaccccgtccccggggcgcaggcctcggcagcttccgtgacccaccgcccaatcctgccacagctgccctccctcctcccctctgggcgtggccgagttgtaggcatcacggctagcgttgcagccccccggcgcggccccgcagctgcgcaggtggagcccacgggcaccatcgcctccgctgtcgcgtcaagcccc

SEQ ID NO: 381449 - DNA, 310 bp, Zea mays
cggacgcgtggttcacatccacttggccgccaggaaactagctgccgttaacagccagccgccaggaacctggacgacggcacatctccctcctcatgcggcaagcatgacgtccgacctggtggcagttcggccaacttcgcattcctgtttccctctctttgtattctgttttctctctgtcagccgcgcagaacttcagccgccagggaactggttcctggccgaccgagtccttcatctgggctgtgcgccagagcgcgcgcgagctgacctgcttctttctcttgtttctaaatctgttcgtgtg

SEQ ID NO: 381450 - DNA, 131 bp, Zea mays
  unsure (1)..(131): unsure at all n locations
agaatccgnggcatccgggaaaagcagccctaatcacaaggccgcggctgcgagcgctgcttcccacctcccaactccggaactcctccccagtcgccgccagccgcgcgcacacacaccgagagctcggg

SEQ ID NO: 381451 - DNA, 279 bp, Zea mays
ggctctgctcctccccagcctcgcggcgcccacggacacgccgcgccggcccacaggttgctgcaccgcactccagctccagcgcggctcccttgtctctcggtccctccggcctccgcagcgtctgcggctcgcggtctcggccgtgcaagagacgaaggaggtggaggccaagacggccgacgagatcaccgagaagtacgggctcgagttcggcctctggaaggtgttcagctcaaaggtggaagatggaggcgaggggaagatgtcgcggacgga

SEQ ID NO: 381452 - DNA, 277 bp, Zea mays
gttctagatcgcgatctgccgcccttttttttttttttttttgcctcttgtaattgtgctgctatgttgtaagtcatgtcaagaatgagtattggtaagcattcaagagttcactcaaaacttcaatcgatacaaaacctaataactcagtatattagatgcagacagacttgaactgctacatctgacagggcaccacgtcaggactcgaaattacagcctccttcctcttctaccaccctttctgcgtgtgctgtctgtggggactggagtaaca

SEQ ID NO: 381453 - DNA, 278 bp, Zea mays
cggacgtggtcagaaaagaaaagatgatgaacatctaaagcagtctaggaaaaacaatgatcatcaacgaagttcgtcaaatcatgctggtgtttctacagtagatgaactagaagattttgccatgggtaagcctcagagtgtgcatgctttaaatcttctagttcatctactgtagaaacaccagatggttttgagagtagatgaactagaagattttgccatgggtaagcctcagagtgtgcatgctttaaatgcggaagaatttgagagaagta

SEQ ID NO: 381454 - DNA, 277 bp, Zea mays
gttctagatcgcgagcggccgccctttttttttttttttttttcatataataatcgcttgtatactctttctaaaaaccagtagattactccaagaaaagccgtaccctccctctctcagccgctgataaaaccaccggccctgctcctacggccgaccagaccgaacgaatcctcgagtcccgcccgacgcaccggaaagcgacgcgcctccaccgccccttccgtacctcctcctcctcctcctcgggacacacggccaagcaccaagcgaccaa

SEQ ID NO: 381455 - DNA, 273 bp, Zea mays
gtaatgatcctgaacagagtagtggcttgaatggggaaaattttgagtcactaacgtctgatgctgtaatggacacagctagaaatgacagtaagtcgtctgactatttcctggaggatattgagccatcccttgaatttcctcgaatcccatattcatgtccacttcccatcatagattcagcagccaaagagattggcatcactagcactgaggctggagatgcaaaagtgagtaaaatttctaaccggaaccaatctgccatgaatgtca

SEQ ID NO: 381456 - DNA, 276 bp, Zea mays
gcggtactcaaaccctcggtccttctcggcggcggcgtacgggatagcatacgttgccatggcggcggtggccacggcgagctctgccagtcggctccttgctatgctgcaggagccggcgccggagctgaagctgcacgcactcgacagtctcaactccgtcgtccacctcttctggcccgatcatctccaccagtgttcacaccatcgagagcttgtatgaagatgaagagtttgagcacaggcagcttgcagcacttgttgtctctaaggtat

SEQ ID NO: 381457 - DNA, 275 bp, Zea mays
ctagcgcgggcgcgcacaagttcggcaacccccacgcccgagcccccaccccccgcgtgctgcgcgtcgttggaaccaaggattgggttagcctcggcgaggaggaggtggtggtcggctaggggctcgcggggatggggatctcgaggcgcgttgtgatggcgatggcggtggcgctgctgatcgccgtcgccggtgcgaccgccgaggagcaggagcccctgctggcggcggacgcggtggccgtcgcggtggaggcggcgctcggggaggtg

SEQ ID NO: 381458 - DNA, 317 bp, Zea mays
actagttctagatcgcgggcggccgctcgcgatctagaactagtgcagaatttacttcccaacaactctaacgtggatgaacagattttactcccaaatgcattagagcatgaggactacccacactatttgctcaatagtcaccaggtgggaatgccaagtggaagcctgattggtcagcaaaatacaagcttgagcttgtgggaaccagctggatctagctcaatggagtgcttagttgatcatgacaactttttccaggcaaaaagagaacatcttgcctcttctcggtctattggtgccccgttaagtataga

SEQ ID NO: 381459 - DNA, 328 bp, Zea mays
cgaaaaccccaaccagtcgcgcctcagatcacgcgagggcgtgagggggaattcgctctcccagcctccggtcacccgtcgatcggtcgtccggggcctaggcgctctcgcggcggcgaccgggggccatgggaggaggacccgctcatcccgctggtgcacgtctggaacaacgccgccttcgaccatgcctccggctccgcctccgcggtggcacgcccattcccctgcgcccgcgagctcccgccaggcggacaaggagaagcaccgccccgagcccgacgttgaggcggaggtcgacgacgttgaggccgagatttagcacatc

SEQ ID NO: 381460 - DNA, 308 bp, Zea mays
ctagttctagatcgcgagctgccgccctttttttttttttttttttttttttgttttttttttttttttttttttgtacaagcaaacaatgcaccaatttctttcttcagttttaatacagcttgcaattgcaccaaaccgcagctccaacaagctacctggttgtatctcgaggacaagcccacgataaaatggattgtgacaccataaaatctagaactcgagtaggcttctcagcagctcgctcaaaaccgagcagtgatctgggagaacagtgccctaaagtcctttgttggcgtgcccacacc

SEQ ID NO: 381461 - DNA, 300 bp, Zea mays
gagttcaaaaaacttacccccaaaaactgtcctcccttggttccttcccgctctccagccaaagtcgccgctcccgctcggacacgcgtctagaagcttctggatccgtccctgacgccgatggagcagctcgactacaagttccacgagaagtacactgctctgaagaagcggaagctactggacgaggggctggagcggaagcgggaggcggagctcaatgagctttacgatgccatgaaagattgggtcagcgaactcagggaagaccatgcggaactccacgagaagctggtggag

SEQ ID NO: 381462 - DNA, 304 bp, Zea mays
cccacgcgtccgcgccggccgccgccgcgtcccggctagcccgacagaactccgccgcaaatacagctatgagctcagccgcttccgcggcgccacctagccgccgcactacgagccgcccgccatcagcttcttctcgcaagtctgacgactcctcggccgccgccgccaacgggaatgggaacaggaaggtcgcaaccaagcccgcctccccccaccagctcacgggggagaggacagtgaagaagttacggctctccaaggcactgacgataccggaggggacgacggtgttggatgcgtg

SEQ ID NO: 381463 - DNA, 302 bp, Zea mays
attcttacttttacatacttcagaggatcctttcttcttgtttatactgatacattggttgctcctccatacagatacgcggtctgggactgatacttggaactgaatttgtcgacaacaaatctccaaatgatccatttccagctgaatggggttcattgttttattgatctcatgtccccttttcaaacatttcagaagtaatccaactttaaggcggcccaaaattgttctctgaagagttaacttaatgttatgaattagcgtacagtgtcgaggcaaaattcgtcactatccccaga

SEQ ID NO: 381464 - DNA, 308 bp, Zea mays
ccccttacccagtcaccgtccctcagctgcaaccctcaccctgtagctgccttagacggacggaggaggggaggtcgcgcgccaggagccaacaggggacctcgccggcgcaggggaggaggcaccgtcgccaggagccaagagccagcagccaggaaccagagccgccaccacttctagagctcaatcgatcagccgctcagttgcattggttaatgttagtttattgacaaatatggctgataatggtgatgccaaagggggatctggcgcctatgcaattaatatagagaattttagtaagcggc

SEQ ID NO: 381465 - DNA, 314 bp, Zea mays
gtggggcaacgcgatggatgcacgacacagcggacatgatggctcgctgctcagcgcccgcggggaggagctaggatgctcgggtcggcgggcggcggcgcctcgacctaagcgagcgcggggccatgggcaggtctggtcaccattcagaacagggggctcggaggcgaatgcgagaggagagaagcgtatttgtttttttaaccctaccagccggtcgtctaaaaccaaaagtgctagccgcttcaagaaagtgcgatgggtaggaagcatagagattaccagctaaacatgttcgacggcggtgaagcgtc

SEQ ID NO: 381466 - DNA, 308 bp, Zea mays
cccacacgtccgctagttctagatcgcgagcggccgccctttttttttttttttgcactccgattatctttttattctttccttaccgaggtcaaaaccccagaagcagctagaaagtcggcaagtcacgcacccaaacaggaaaccaaggcatacggttgctagctactgtcttacacacctcaacaggtacctcctatagctatccccagcatgtaacttgtgccaagaacacccaccaccaccaccaccaggtcaccacactaagcatcaacaaaacaaggcgtcgactgtctctttctcttccg

SEQ ID NO: 381467 - DNA, 312 bp, Zea mays
atcgaatttaaacatggatcaagggtacatattaggaatagctggcttggtcaagaaaccaaatatataggaaatgtttctgtccccaaaacatttacttacatttagttctgttaagggcacgttgatacggctgggacgtttaggggaatggataggggagattagcagagcttgggactgagggatggagcagattggatagggagatcggcgagaacagctactatcacccacgaccgatgaagccacgatgaccaaagccctctccgaaaggaaagcaacttcttcgatgaaatccctgcctttgat

SEQ ID NO: 381468 - DNA, 320 bp, Zea mays
ccccaaccacacgcgaacgcgaagggcacgcgacggctatggatacaacattcttctctccggcgccgatctactccggtggccgcttctcaccggtatgctcattcctccttcctctctgagctttctattaccaccgtctcgtcggctccgtccgctagctccgtccgcttgaagtttcctctggccgctcgagctacatgtggctcccacggagccacggccacgcccaacatggaaatatgtttctcaccaatcgaacttggaagatggatctggatcgaaccaggcggaggtgcgggctccacgcccgcggcaag

SEQ ID NO: 381469 - DNA, 314 bp, Zea mays
cccacgcgtccgggggcaccgcctcgacgactacaagctcaagcagcgggcacgtgcgtcctcctccaagacggacaaggtgggtgcgccaaaggatagcagcccacccccaccgcctagccggatgcggtcttctacccgaactgacaagtctgggtccgccgctaagagcgcgctggacgagctgcgggcaaagcagcggatgcggcaacaagctccggaggcacgcaggatcacggacctactcccacatagtggctcatccattaggcgcagggctgggagcccaccaagtgatgggagcaacgatggca

SEQ ID NO: 381470 - DNA, 308 bp, Zea mays
acaagaataagagatgcagacctatttttcttgatgaggatgatggtcatgagcagcaggagcagcaggatactacttatgtacatcaacctagcttggggacagccgctaaaaggaagagagctgcatttcaatttagaacagcagctccacaaccatccaacatggaaaaagaaaaaagaaaggttgcaaccatgcttcggagaactcccaaacaagttgtggatgacaggcgttcctcagggtcacaccaaaccaccatagaggctgcactgaagccaaaggctgacagggaatatgtgaatgag

SEQ ID NO: 381471 - DNA, 307 bp, Zea mays
gtatgtgcactgcagttctcagctggtgatatggcggtgcccatgtctgctcagattgcagctgctgttactcctgcccgttccatgctgcagcgcagaccactaaccgtgtcggttgttcataatgaagcctttgagaaggtgaagcggacgccaaaggccaatcaattgtaccaaaattcggagttcttgcttgccaaggataggatccctccctcagattcacatgtgcgcaagaaatctaagcaccacaagaagaagcataggtccctagaatctcgtggcgcagactttgatgctgagcggc

SEQ ID NO: 381472 - DNA, 113 bp, Zea mays
cacccatacttctctatctctcttgcttccattgggcaatctgttcgtcaggacttaggaggccgcgcgtcgggcgtgacttggtagagtgagaaactcggggagagaagatg

SEQ ID NO: 381473 - DNA, 308 bp, Zea mays
ccacgcgtccgtgcaagtctgttgagaggatcaaagatgtacatgctcgctgcggcgaaggggattcagcagtttggagtgctcttgtctagcacataccctcctttgcccgtaaatatgtagcataattggtaagctttggtggtggtggacaccagcataggcgttaggcaactccccaagtaaacttgacaaaacccagagatcatgatcatgccccgtggaacattgccaatggtaactctggctggaaaaattctgcgtaattttggtctgtcactgttcatgaccttcggacttcggtggtg

SEQ ID NO: 381474 - DNA, 303 bp, Zea mays
ctagttctagatcgcgagcggccgccctttttttttttttttttcctgtcagagaagaagttcttgaacaagtaaagtcctttgcggaactccaaagccgcggtacaagtagaatctactgaacaacaatcctgcaagggatgtgttgttcttcagaacggaaatcatacacacactgggtcatcgtttattccattattcttatagtcacttgctagaccggcaagaacacgatgcaatgcaaacccaatccccagctatttctagatttaaggtttaggagtcgcagccgcagcatcacat

SEQ ID NO: 381475 - DNA, 131 bp, Zea mays
gccgccgcggctccactcctcagtcctcagtccgaagcgaactctccctccgcatccactgccaccatgagccgcgatcgctacttccaccgcctcctcgacctccacctccacgccaacgacgacctctt

SEQ ID NO: 381476 - DNA, 289 bp, Zea mays
ctcttgcttgttcgtccggttcttcgccctcgccgcgcgggactaccaatccaaactggcgacgaccctgctgccaccccacagcagatttgaggagcggacgcccgtttaaatggctattggagtcccatccatggagctccaccgctcctcaccgttgctctcgggtggccgaggtatttactcggccctgtccgtgtgattgttgatgtgaagcttgaagttcgtggatgtagaatgattctacgggcatgtattattctttcacctgttactgatttgatcgcta

SEQ ID NO: 381477 - DNA, 292 bp, Zea mays
gcaaggcaagtagccgctgcgcggtgctgccacctgacctgactgccgtcccggtccccggtccatccgaacgccgttacggggccgcccaccgcgacggaacggaaaggtgcggtcaacccaccccgtcccagtcccatcaccgccgggggccgggtggataaacaaacccagcggccccggccccctgtccgcctcattcccttccttcctttgctcctcccctgcctcgcctctctcccctctgctcgcctccagctcctgctcggcccgctcgcgtccagctgcgcgc

SEQ ID NO: 381478 - DNA, 294 bp, Zea mays
gtgatgtgtttcttgagactgccaaattgtgcaagtacacagaaaaggagttgggggctagcttgtttttcggtctcttcgctatctcctggcttctattgcgtttgatttacttcccgttttggataatcaaagcctctagctatcattccatcacattctggaggaagctggatgaattccctacagctttgtactatatcttcaatacaatgcttctcacattgcttgtattccatatgtactggtggaaactcatatgtttgatgataatgagacaattgaataataaag

SEQ ID NO: 381479 - DNA, 132 bp, Zea mays
cccacgcgtccgcccacgcgtccgcggacgtgccgccgaggggaagcgtgacacctgacgagctgagcaggcaggcggtattggccgagcgaaagcatcctcgatctcgtcgtatcgtagctggcgccgctc

SEQ ID NO: 381480 - DNA, 101 bp, Zea mays
caccaattcatcttcgccatgccgcgtccggatccgtaccgaacaccggcggcacctcctcctgtatccacttcaccagtacatctggcgcaggaagtggg

SEQ ID NO: 381481 - DNA, 279 bp, Zea mays
ggtacctggctcgatccgacttggtacttggcggctccactgctcacgtcacgtgccgcccgcgttctctctccgactcccatgcctcagctggtgagctagtctggtatccatcggcgagctagttttgtctccaccggcgagcacgcatctcatttggagacgcgctggctgctggcgctgcgctgtagtggtgggcgcgccctggggaagcggacgggtagagcttttgcggtttggaccaccggtgggcagtgggctcgttgcttcggcgtccgt

SEQ ID NO: 381482 - DNA, 272 bp, Zea mays
ggacatgatcaaggagatactggaaaaatgttggatgaagtcagtgatgtagaaaacagtaaagaacatgtgggaagcgatgctatggggaattctgaatcatatatgagtacatactgtgtagagccattgccaagcaactctaggttgacagcatattcaagaataaatgagctatcatttacatggaagcactcacaacatggcagttcccttgagaaagttttacttgacattccaagagataacttcgtgaacaccattgcacgcat

SEQ ID NO: 381483 - DNA, 310 bp, Zea mays
ggaccgtgctgacgaggaccagctggcttcactggttgcagaaagagcaacacagcacattgagaattgtgacctaccaaggcctacccagacagtacgcattaacaggacagaaccatatactcaaaaacatataggtgactttgggggaccttcatctcctgcaggaagagtgtcacaccctgttcctggacattgtgaccatatcgagtgtacctatagcacaggaagtacatatgagttggttctgttatatggtaatggagtttgggaacagcttggaagcagtgatacatatagtgcggttcaa

SEQ ID NO: 381484 - DNA, 312 bp, Zea mays
cggaccgtggagttaggaagaacactagagcgagaagcgatcagagcgaggcacggcgagggcgacgacagagccatgagttaccagaaggtcccggagtcctatccgccaccagggtactcgcagccgtacccaccgccccaggctccaccgcagggccttactacccgccgccgcagcaaccacctccggggtaccagggctactttaacgacggccagcaaccctacggctatccgccgccgcagggtgggtattaccatcacggtcaccaccaccataacgaccaccatcaccatcatcatggtcacc

SEQ ID NO: 381485 - DNA, 306 bp, Zea mays
agccgagtgaacctgcagctgggagaactttgcactcccaacctcccttgcactcgcacgatcgagtggagtgcaccatgaattgttcgatgcctggccttgtggcctatgcgctcttcttcacgctcttgttcaccgcgctggcaacctcgaccgctggcctcaccatgcgtgccgacctgacccacgttgacaaaggtcggggcttcaccagatgggagcttgtcagccggatggccgctcgttcgagagcccgtgcggccagcctttaccatcgtagcggccactacggcgacccagtgacgg

SEQ ID NO: 381486 - DNA, 333 bp, Zea mays
ctctacttcgtgctgtggggcaagaacgccgagaagaagggcgccaggaacctgctgcaggatcagctggcgcagggagcagacgtgacgcggcacctgctcggcggagaagcttcggcgaaagatgaagaagcagccccggccatgctggcgtgatgatcgtttagtcgtctgtcaattggagcacagcgtagtcctgttgcatttgggaccgtatgagtcgtgtgatttcagctgttccaatctggcaaccaagaacaagtgtgcatgggttgccggtgtggaacagtgtgtagccatgctgctgtgagtctgtactctgttgctgtaatg

SEQ ID NO: 381487 - DNA, 287 bp, Zea mays
cggaccgtgggtgctcgccagagaatttcgtcaccggactggaggtcccaggacagaacctctctggcttgctctccccgagcatagggaacctgaccaaccttgagactgttctcatgcaggacaacaacataaccggccaatcccagcagagattggcaagcttacaaagctcaagacacttgatctctccagcaaccacctgtacggtggaatcccggcttctgtaggccaccttgagagcctgcagtacttgtgagcgccaactctacagtagtactagtaca

SEQ ID NO: 381488 - DNA, 330 bp, Zea mays
gcgtctgccgtcggcataacataatcgtcgtcgcgtgcagtcccccattccctttccagtggtgactggtgagtggtctctctctgtgctcgcgcttcgtccagcttccccggcccgaagaggtagcacggcaggggcagaggatgagtgaccccaggtacgcctacccctaccctgcgcaaggttactaccaggggccgtaccagggcccgccggtgatggcgccgccacagtacgccgcgccgcggcccagaagggagccgagcttcctggaaggctgcctggccgcgctgtgctgctgctgcttgatcgacgagtgctgctgcgacc

SEQ ID NO: 381489 - DNA, 335 bp, Zea mays
ctgccgcccagcccaccgccgcccagcccaccgagttcccctgaacgccgcccctcaggttcccgggacgcagcacctcagttttcctggacgccgaccctccctcgaggacctccgtgtagatccgccacctctcccttgcacggactcgcgcccctctgtcgaggtcccctggacgccgcgctcacccctagcggctatcttgccagacaccatcaaaactccagaggagttgccccactagggagttttggagcagagcagctctaggtggagcagagctatgccaaacacgcttgtcccaaacaggacctgagtcgatccctttggcctcg

SEQ ID NO: 381490 - DNA, 331 bp, Zea mays
gccctccaagaagttgatcgatctgggcgtttgtttccttccgtttgatgtgaccatcagggagaccgtcgattgcttcagaagcaaagggctcatctagccctgtgaacatttccagattgctatgagatggagatggagatgatggttaggcatgatctttctataggttaaaagaacagattatccaacaactgatggaacctgcattagagatattatgttgatgtcacagatttagttgatgctcatgtgaaagcgctcaacaaggcagacactagaaaagtcagtatttacaacgttggaacatgaagagagaggcccgcaaata

SEQ ID NO: 381491 - DNA, 237 bp, Zea mays
cgaacatctatgtcgacttcactttggatgaatggaatgccatgttaccagaagggctgccagcagggatgatgaaagagtttcaggagacaagacggtgtgctgtgatggtgaggaaaagcttcctagatctccgggataacttccgtaggattgttgatccagctgttacaacaaacctcaaagataccagaaaacaaattgtcttggatggcccacggagttgtggtaaaagca

SEQ ID NO: 381492 - DNA, 299 bp, Zea mays
gtgttttgagaagctggtcggcgctcctagatcccttcgcctctctcgcgttcgaggctaggtagccgccaccatgagccgctcggggcagcctccggatctcaagaagtacatggacaagaagcttcagagtaagtggtactctcgattccgctatccagtcccaatagtacacctgtggttttgcttcaagaaagtttttcttcttcccatgtgcccagtacgtttgttcttagatcataatatacgtgactgttcgttgttagctccgcattagacagatgaagcagcttatgtct

SEQ ID NO: 381493 - DNA, 296 bp, Zea mays
ccacgcgtccggagcaagctaataatggcgcgcatcatgacaacaaggcggtcggacagcatcgccgacatgatgcccgaagctctgcgccagagccggtactacatgaagagctgcttccagcggtacgtctcccggggcagcaggctcatgaagcagcagcatctcctggaggagctccacgccggtagctcggacagcttcctcgggcacgtcatttcctgcacgcacgaggccgtggtgctccctccctacgtggccttggccgtgcggaggaaccctggcgtctgggagta

SEQ ID NO: 381494 - DNA, 297 bp, Zea mays
caaccattagtttttatatatattgtgaattgaaaacaaaatataaaaggttcagtcttgctcctcaagcaagattgccacatggtgaaaatagctcaatccattgtacggcttggtatgggactatatatatataatgttttttttaaaaaaaacttgtgcacgaatttctttttattctttaaaaaatcgtgtacgatagtcagttggttctcatatgtggacgagtttggatgcccgaggcctcatcattctaggcctttagttgtagttttttagttgttatgtctttgttga

SEQ ID NO: 381495 - DNA, 295 bp, Zea mays
caaaatctattatattccataacacaatcatagtggtccaattattatatcttaattgccacaacattgtgtataaacattattataattgttcgtcctagcaatgctatgcttttgctagtaactgatgatataatatgcaggtatttaattgttattgatgacatatgggacatctcagtctggaaaatgattagatgtgctttaccagataataatatcgggtacattattgttacaaccacacgcatttccgatgttgctgaaaaagttggtggtgcttataagctaaaac

SEQ ID NO: 381496 - DNA, 116 bp, Zea mays
catgagcggctggtcacgggtcatgtcatgtctactttgcgtcggtcgacctaatgtttgaactgctgcagctataatctttagagacaaaacattgtagtgtttggaatactgca

SEQ ID NO: 381497 - DNA, 292 bp, Zea mays
ccacgcgtccgcggagatctgggcatggtcagctatattcgtcgcgtcgttcggcgtcgcatgtttcaatcccacggcgtttggtaccacggcaagaacatgccttcctttcctgcttgctgctaatgtgctgggatacatggttggttctgggtaaatacgtacgcttgtataaactcgatcgatcaataggatcccaagtatgcagttagttttggactgacgtacggtctgagtgttttcaggttaccacctggcgtcaagaaagtgctgcatccgatcatctcctgcg

SEQ ID NO: 381498 - DNA, 292 bp, Zea mays
cgctagtgtcagtggcacgcaggcagccgctcgcaccgatgggagaccatatctatcggcgaggccaagtgcaatggcaatggctcggacggcaattgctatagctggaggcggcggtccgttcttcccggtccgcggcgcgtcgctggtggtcgtgctgctagtcatcgtcgctggcgcggcgatggctcactgctgctgaactactacggcagctcgtgccccagcgctgagtccacggttcgctccgtcatctctcagcgcctccagcatagcttcgccgtggggcccg

SEQ ID NO: 381499 - DNA, 278 bp, Zea mays
caccggagcttgataaacatgggtaccaacctctatataagaaaaggacgacagaggtgtacagcggaactcctcaagcaattgatggttgcgctactttctttcgtcgggacagattttcgcatgtcaaaaaatatgaggtcgagttcaataaggctgcacagtctttaactgatgcaattattcctgccgctcaaaaaaagttagctctaaatcgtttggttaaggataatattgcgctaattgcagttttagaagctaaatttagtaaccatgga

SEQ ID NO: 381500 - DNA, 289 bp, Zea mays
ggtcatcacattcgagggcacaatgataccaaacagaggccaggcggcgctgctaaccttctgcacctgcattagcctcggtagtgtcgggcttgttctatctatcgctgtcccagaaggtggcaacaactggttctggctcatgaccctgagccccttggcgtatgtctctctgctactcaactcccagcaattcagaatgaattcttccagtacaaatgcagtaactgacccttcatgatgaggtcccaggggagcgtactactggacgaaagcgtcaaggaaagaa

SEQ ID NO: 381501 - DNA, 157 bp, Zea mays
cctgccgcacggatgcgctgggtgccgcaagtccatgacctacaactactgccccgaccccaagccctcccagccgggcctccccgccgagtgctccatgcagtagcgcccggttattcctcggccgtccaacaatggcgggcgcgcccgtgtgtgt

SEQ ID NO: 381502 - DNA, 280 bp, Zea mays
gttctagatcgcgagcagccgccctttttttttttttttttttttgttttttatccatataaaacaacaacattgattagaccagcagatcagtgtagtcgtgtcaattacagtaccaacaacacaaagagccagagtacaggagggaggagggtgtacacctcttttccaaacaacaataatgagattgaatttattgttcatccatgtaccaaaagaataccaccccaaagccaagggggcccccctagtagcccctctctgcatgtgactcctccaa

SEQ ID NO: 381503 - DNA, 247 bp, Zea mays
cccacgcgtccgagtcaaccttgttcagtgcctgccaaccaactccgacagggataagatgcaggatttgctcccagcaatgatgagggcgctcactgattgcctaaactctggccaggaagtctctgcgcaggaggcactggagctgctggtggagctcgctggcgccgagccatgttcctgaggaggcagattgctgatgtggtaggggcaatgttgcaagttgctgaggctacacagctggaag

SEQ ID NO: 381504 - DNA, 153 bp, Zea mays
gtcgagcagccgccctttttttagccggtgaatgtattgtttgttttatcagatgtggttcgcattcacattcttagatttttcgtagcactctttccaacgcaaccacatcatcttaagtgctatgaaactatgaatgacacaatgtctatc

SEQ ID NO: 381505 - DNA, 104 bp, Zea mays
ggcacagcctctcgcgtcacctagcaagcaagaagcactcgggagcacttgcttcctgcgctcttccgctccgacggtccgacgaggaagaagaaattcgattc

SEQ ID NO: 381506 - DNA, 316 bp, Zea mays
gcttcttctgtggtggatggtggtgattgccagacaaacagtgggagcagtcctaattcatcgtcggggcagaagtttaatgaatcggcccgtgtgaggtacatcaacaaacctgcagatggtggtgttacagcacttcacatggcagcattgaacggtcacttagattgcatgcagttgttgattgacttgggcgctaatgtctcagctgtctcattcccctatggcactactgcaaatttgataggcaagtgttgattcttatctcagatggaatgcattgagcaatgctattcttgttagctcaaatgagatt

SEQ ID NO: 381507 - DNA, 314 bp, Zea mays
gccttcaggcttccagcgatgtgttcctgcgcctgcggcgcctcctccccccgctcttcagccccgctccaagccccaatctcagacccgccttcccgcacagcccgacgccagcccgcagccgcgccgtcgtcgcgctcgcgggcgcagctgcccgggacgacgcgcctgcgccgttgtccagcttcgacttcctcgcactgaagcgggagcttgacgaggaggaggaggcagtggtggctgtggatgcgaaggaaggtgctggagctgtcaatgaggacgatggacagttgggggcggaatggagtgcgggt

SEQ ID NO: 381508 - DNA, 121 bp, Zea mays
atactccactcctcaccgatgatggcctcgcaagctatggtaccgctgcggcacactttgtcgacggcgagttgtcgccgcccgctcagggccgccgcctccccgtcgtcaaccctaccac

SEQ ID NO: 381509 - DNA, 310 bp, Zea mays
cgccaagcctccccacctctctcgtctcttctccacccgccgccctcgtgggagtgaaacctagctagggttctgcccgccgccgccttcgatcaagacgcctgcagccttagcgcgagcccgccatggacacaggacgcaagcgcatcgcgccggggggcgccaacggcgcgggcggcccgaagcgcgcgagagaatcggagacaactcaaatgggtgtaggaagcaaaaccaagccgtgcaccaaatttttcagcactgcgggttgtccctttggttcaaattgccattttctccataacttcccggg

SEQ ID NO: 381510 - DNA, 309 bp, Zea mays
cccacccgtccgcccacgcgtccggagattttgatgaggggttaacccgaggtttgcagcaacgtctaacccaactgtactagctgtaatttctatagtttcctgttcacattccagaggacacttcaatggtttgcagtttcatttggtttcaagtcagtggatgattattactccaattcaagcagctcggattctatcaaggatgtttgcatacccttactctgcatacaggtcaaacttcactctatctgttctgtgcttcattagacgccaggacattaggaacaacagatacagtttaagagc

SEQ ID NO: 381511 - DNA, 306 bp, Zea mays
ctcacctcccccatttctgtccacctcctggcctggccagccactgccgcaagcccgcaccgcaactgcagttgagtgagaccagttcgccgcccctagataatctctcctctccagggacggcaggccgtgccgtgccgtcacgacagaccagactagaccagagagagctagtgcgtgccggcgcgcggtgggagagagagactaattcgttctagagctcccgtgaggacgatggagcgcggcagttcctggcggctcacggtggtcgccggcacccttgtctgcgcgtccctcttctcgccg

SEQ ID NO: 381512 - DNA, 295 bp, Zea mays
  unsure (1)..(295): unsure at all n locations
agaaaccatattgtagaaacgtctgcgtggttgaacaattgatttcaaagtgttttatgaaaattatagagagctattggagcattgtttttttatttactattttttagagagatcccgatanccttgttttgggagctataactttaggagttgttggagatgcttttactaattctgaaccgatgctgtaacaacatatctgatgagaattgttttggttagagctaggatctctataattcattattgtgctgttgtaataagacttgccttgcctagctatctgcttgaa

SEQ ID NO: 381513 - DNA, 298 bp, Zea mays
cccacgcgtccgctcctatatgctgcgaccctagcctgccttgtcttcatcaatcatcaccgcaccgacgactgcaccggccgtcgctgccgcgctacttcggcccctttgccggcgacgagcaccaccaggtccatgcagagtaggaaggcaccttttcgtcgctcgaacctgttgcctgacctgcaagtgtcgggcggtgcacctgtgcccttgttgccgcgatgcagattatgtgggttttgagttggacagctgatggagtgcaaatctcttgcctgccagaccatataagttg

SEQ ID NO: 381514 - DNA, 299 bp, Zea mays
accacccgtccgcccacgcgtccgcggacgcgtgcggacgcgtggtgagaagggactacaaggacgagaaggtcgaggttactgtcagcatgcctaacttagaaggaggccccgagtttggtgatgaggatcgcgagggcgatggtgagagcgctgccaaggacgacggagaagcagaagaagatgacgagagtgccggggagagcagcatctctcttaaggtggtagtttccaaagactctggcccagagctcgagttcacatgcacagccttccgcgaggagatcaccatcgatgat

SEQ ID NO: 381515 - DNA, 293 bp, Zea mays
cggacgcgtggcgagacgcgtgggtcaaccgctacatttccgtcactaccggaaccgccactcccacgaacgcgcggcggagcggaagcaaaccagagcacaggtaaaactcaaaggatgaggcttgggagtataaacggcttgcggttcacgcagcttaaacttgtcatccttgcgttcttcatgttgtttgttctctggaaatgggagaagggctcgtcatactacgattccgaaatcctccagccagatccgttggttctgactcatccagctaacttgaagtttgtaga

SEQ ID NO: 381516 - DNA, 300 bp, Zea mays
actagttctagatcgcgagccgccgccctttttttttttttttttttttttttttttttttttatacatgccgtcagagacattagccagtcaaggggtaagagttacataaacaattctttttctcctatgttctgttcaaccatgttcgagaaaataaatagcaatgtgcattcccaaggatcctgagctaaacgggtcaagactcgctcccaggctgggcatcggaatcagattgcttcttgtcgctgccgttgccgtcgttctgttcattcatatcaggaatcgggtcactgctgc

SEQ ID NO: 381517 - DNA, 296 bp, Zea mays
caaaaatgctgcatgcgagaggcttcttgaacagagggtggatgtaaagatgaagtcaaaaaagatgatggatggtgctgatgaggaggaagaagaggaagcattggaagattttgggttttctgaggatgatgaagatgaagacgaaggagaagatgaggaggtggctcattttggcttttgaggggatccaatagttacttgttggtgtgtcttacagagagtccatatggggggctacttgctgaagtggaatgaagaactgtcaatatcagtaggttgttgactttgctatt

SEQ ID NO: 381518 - DNA, 305 bp, Zea mays
gaaacgcaaaccggccaccccgcccgcactcgccgccccatctcttccgctcccgtcctctccgatccatccacgacgcgggaaccagcctccgaacagcagcttcccgccgccgggccccaagcctctgcgggcgtggttgcgtctccgcggtggcgccaccggagcggctcttgcgtccgagaggcgccctcgtgcgcgcgattttggccagattctgacagcgatatttgtcgattctgaacaagcaccgtttgatggtgccggcaaaagggtctcgaacaattaacaagaccacagtaaaa

SEQ ID NO: 381519 - DNA, 307 bp, Zea mays
aacaaagctttccttcctcagggtgactggttctgtccagaatgtatggttaacaagcttggcccaacttcctcaagaattgagcgtggtgcaagaggagctcaaatgtttggcattgatatgtgtgggagactattcttaggaacttgcaactatttgctggtgatcgaaacagcttcagatgcagagtcttatgcaagatattacaatcagtatgatgttgccaaggccctcaaagcctgctgtctcagatgcatatgtggacatatgcaagcaaatataggactactggaaacatttacttggt

SEQ ID NO: 381520 - DNA, 303 bp, Zea mays
gtgatctgatctgatctcgcaggggatcatgatgttgacctctgggttcttccgactgcttccggagctcccaaagatcttctggcggtatccagtgtcctacattgtctatgggtcatgggggttgaaggtatgtcacattgcatacagatacagatcctttacgaatccagaaatgcaagcccaatatgcaatgtcgctgctgccgcacgcagggcggtacaagaacgacttgatcgggctggagttcgagccgatgatgccagggcagccgaagctgaccggcgagtacatcatcaccga

SEQ ID NO: 381521 - DNA, 190 bp, Zea mays
gttccgaccacgctgtagtttggtcggctcggtatatagagagggggagatgagcgctgctgctgaggacgcgggctgggccgattgggggatctggaggcgggagcagcggactcgttggcgtgggaatgttgcgcgcggaccctgggctgttacgagtgcttttgcggccgttcctgacgttggttgt

SEQ ID NO: 381522 - DNA, 311 bp, Zea mays
gagccacctcctcagcaggccgcagctactccacggtgacggccgccatgagagccctcctctccctctcccgtctcgcccgacggcttccagcttctctcagccctgtgagggcgccgacaacattactcctccggcacatccatgcggacgcccctccgccaccgccatctcatgactcgacgccttcgtctcccgcatcctcgaatcggagccgtgcctgaccccgaacgacgagtcggagccggcatccgatccgaccctcgacgagttcctcgcgcgcttcgtggctgccattccgccgcgactgg

SEQ ID NO: 381523 - DNA, 242 bp, Zea mays
ttctagatcgcgagcggccgcccttttttttttttttttttttttacacatgcatacaaatcctcttcctttttccaggaaattgttatacaaatcgtaagaccagacagtacgctagtaggcttgtacagaggaccatgcattccaatgaacaccaaaagtctcggttccggagtagtgtacattgcaaaataccataaggtacggtaattgatcatacagatagtctggatccttactga

SEQ ID NO: 381524 - DNA, 305 bp, Zea mays
ggacgcgtggccgggcggggctctcgcgcggagagatctccgagcatccttgctactcccggtatcaggtaaaccgatgggtgggcaaggtacaggcaacactgtctctgttcccctgctagggaaggcactgtccctctccttgtaagttttcctgtgagctctctgctgctgttcaaggagctttatccggtgatagtatcaaagcaccaagatgaagtccagcgcggttactacaaagggcaaggctatatttgagctcaagcacaagctggtacaagctgttaacaagattgcagacagag

SEQ ID NO: 381525 - DNA, 181 bp, Zea mays
gtccaccaagcgtcccgttcaacaatgttaagcactgttggacatgttgagtccttaacggcaaaacaatttatgtcgaactctaatccttcggttttccatacaacggttactaagtacttgcgatgcattataaaattaatactccttaaaaaaaaaaaaaaaggggcggcgctctaga

SEQ ID NO: 381526 - DNA, 299 bp, Zea mays
ggaaggctgagattggtcgatggcttgctgggtgtcatgctaactcttcgtctgttgatgttactgaggccatgggtgcaaaacgctgcgagaaagactgcagtgctcgtggtgtttgcaactataatctgggagagtgcagatgctttcatggatattctggttgatcttacttctcagtattcactttctattaataagagtccatgcactaataattcaatacttgggatcttgaaaggctggcttttaagaacttaatactagaggctagagccatataaaaaaaaggtaacaat

SEQ ID NO: 381527 - DNA, 304 bp, Zea mays
gtcgttgctcgccgcggccattcccagcacttcctcccacttctccgcacccttcctcccctccttccgcatgccccgcaagaacctcaccgccccactccaccggatccgccgtccgcggccgttcaccgtcgtctcctccgtcccagaccccgcggcggggccggtggaatacacgccctggctcatcgccggcctcggcaacccaggcaacaagtactacggcacgcggcacaatgtggggtttgagatggtggatcgcatcgcgggggaggaggggattacgatgaacacagtccagtcc

SEQ ID NO: 381528 - DNA, 298 bp, Zea mays
atcaaaaccgtctcgccgctgcaataatcttttgtcaattcttaatccctcgcgtcgacagcgacactgcaaccaactcacgttgccgcggcttcctccatcggtgcggtgccctgtccttttctctcgtacctcctaaccccgtatagttaagcaccgcaccgctactactactactagcagcagcagcgctctcgcagcgggagatgcggtgttgatccgtgccccgctcggatctcgggactagtgcaggctctgcacaggccccaggctccaggccagctccctcgacgtttct

SEQ ID NO: 381529 - DNA, 301 bp, Zea mays
attttacacagcggactccttgacagtggattcattattggaacttttggatgaggaaagtttaagaaaagacacagctcttccatctcctggatggtcatcagatcacatagcactgttagccgagttccggtgcaagcctagaatcagaagttgacacattaggtcttgtagaaaaaggttattgtcatcatccttggtggtggaacagcgttccatgtgggtatgacgggacgcgggctctcggggaagcaagcagcctaggtagcagcctcagcaaggggaaggggcatgtaacatt

SEQ ID NO: 381530 - DNA, 291 bp, Zea mays
gctttgatagttcattctcgatgtgacttccatatttccatatccactagaacgacactttttacaaatctctaaatataaaaaaaccatcaatttgatttttgaaggccacaccaagtggtgaacgttatcttcaaagctgttttttcactaataactgcaatacaattgggcttatcagcccagcagcccatccccagcagcgcctccgaaaagccctagtgctccgcgccctcgacgccgccctctacaccgtgggcgcctcctgctcctccagccatctcctccaca

SEQ ID NO: 381531 - DNA, 292 bp, Zea mays
cttgctcagtgtgtatctctctttgtatttcactgtgctggcctgctttgttccttcgttctggttactattggttgctgcttccaagtgacgtaccagagtggtggttggcgtttcagtatgatttgataagtttcaggcccttccttccttttttttaacacaaaatcggtatctagtcatctacaacgtttgacacctcctcccggacctcaagatgatcggcaacgcgtcttatcagtatctgggactgggagtctacgccatgctgcgcagtgcttcgccagcggga

SEQ ID NO: 381532 - DNA, 293 bp, Zea mays
cggaccgtgggctgctgccgccaccgctcgcccagtctaggtccagccgctgccccgcccagccgctcgcggctcgtccaagtgtccgccatcgctcacccagtctagcttcagttcttgttcttgatacacgggtgctcagttccttcagttcttgttctttatacacgggtgctcagttcatgatacacgggtgctctatgcctgctagccgtgttatcattgcttatgtggtttctacgtgcatgggtacgaattttgcaagctgcttttatctgcaatcagcaagagca

SEQ ID NO: 381533 - DNA, 295 bp, Zea mays
  unsure (1)..(295): unsure at all n locations
cggacgcgtggtttccttatcccctctccctcccttcgttcgccatggcaaccgtgttcctccgttccctcgccatggccatggccgacaccgcgcttctgnctcaccacaagctcctccctacggttttcctgccgctccttcccctcgtcaacccgggcggggcggttcttcttctgggcaaccgcggcttgcggccggggcccttggttgcttcttcggaggccttcaaaagaaccattgaatgggttaccgacgaggagaaggaggctgaagaagccttcgacgaggaggg

SEQ ID NO: 381534 - DNA, 281 bp, Zea mays
ccaagcgcgtcacctccgatcagagctccctatttccaagcgcttcacctccgatctctctctctccctccagtctccacgcaccgtcgctcgccgtgctcccgctcacccacgcagttctcggctccgtcctacgaacgaacccagccccagatttcttccagtcccaaacgactcgaccggatccatcctttcccgcgtttattcatttcaattcagattttggggggtggtgctttcttccttgtcctaatttggtcaaaatgggcagcaacaagaac

SEQ ID NO: 381535 - DNA, 316 bp, Zea mays
ggcgatgataccggtgaaggcgaacgcagcaagcggtcgcggggcccggcgtggtggcggtcgggcgccccgttcttgtccgactcggcctcgtcctcgtcgacaacgaccacttcctcgtgctcatcgtcaggttcgttctcgccgttccttcgtctggactcgcccccgttcggtgggctggagctcggcgagggctattacggccacctcctgccgcggccgccgtcgaagaagtccaagcacggcgccaagggcagcaagcacaagcccaagaagcgcgggcgcaagctgaagcacctccctaccaactcgt

SEQ ID NO: 381536 - DNA, 315 bp, Zea mays
caccccaccccacccccctacctagctccggcaagcctgaaggctggctgaagcagccgccataggagctagcacaagccaagcacaaggctaaggtagtataggtagctgtggatcgacagatataaatgggcaacatgctgccatgcctggtggtgcaacaaggcacagcagcaggtgctctgccggccatgacgaaccccaagcggaggctcatctccctcaatctcctcgtgaaaggaatccacaggatgaagaagatgcccgccggtcccggcaaggcgcccgagacagatagcaagaagtcgtcgtcgt

SEQ ID NO: 381537 - DNA, 125 bp, Zea mays
catttgtttcgatcgccaatggaggagatcattcctcacccccatctccagcgtactcgacgaccttgcaatcgtcgccgtcatggtgatggtgctgccatcgacgacaggcggctgccgggtct

SEQ ID NO: 381538 - DNA, 294 bp, Zea mays
tttgaatatatttttgtattaaaattattcgaagacacaaatgttgctaatatattctataaatctaatcaaacttaagaaagtttgaccgacacgaataacatagcgaaacatttgtggacggagggagtatcagacatggattctgaatctcttgttcataatgtttaattaaaagttggaacagaaaactacctgatgttttatgagtagtgttgatcatgggctacagcatagccttgtaggtttcagtttatcatgcctgatgcaccagggttcttagcataaaagtgt

SEQ ID NO: 381539 - DNA, 298 bp, Zea mays
ggaacccgtggcccgagctagctgaggctgctgagcctgagctaacaagagatgaagcaactgcagtcgtagccggagctagctgtgtgatgcgccactgctgctgcctccggcgaccagggttacatccctgacgtaggcaagtgtgaggagtgtggagaagaatcatatatttatgtgtagtgctgatacattatgagtctacgtactcgcctcgatcttgcttctgcttttctctacaataataatccattcatgcaaccaggatcgaataattgcatgctggtgtaccaatata

SEQ ID NO: 381540 - DNA, 289 bp, Zea mays
gcaactgcagtggcggcgcctacccccgcacgcctccgtctcccggtcctcttccgcgccccgcgctccggtcactgtagacccgcttcttcctccaggcttctgcggatctcgtgcagtgccaccactatgggagacgagacctcgacctccgttgctcctcaggagcaggaatccactgtgcgggctgggagtgtcaagcaacagctctccaggctggtcctttcatccctccagactacattgcccgatgtggaggtagaaccgatggttgaagtttcagcaaagt

SEQ ID NO: 381541 - DNA, 283 bp, Zea mays
aactcctcctccccagcagacagcagagagtacataggagacgagaagatcccatccactaccgcccggtcgcggtcctccgccctccgccctccccgccgctcgttcggtgcaggtcgccctcgcgtggatcggaatgggcgcctgcgtgtccaaggccgcctgctgctgccgccagccgcacaacggggttaccaacgagaggactgatactgtgacggaggacgaggaggcatacgacctgcctgcgttccaggagttcaccttcgagcagttgcggcta

SEQ ID NO: 381542 - DNA, 317 bp, Zea mays
cgcctcgaggggcctgctcgcgcgcctccgtgtcctctcactctccggcggcgggagcacgtggctccgcttcccgccttcccggctcttctccgcggaggccttcgtctcccattccgatgacgacgacgctgggggcgagggcggcggcgggggccggatcatcgaggcacagtccggggtgatgggccccacctcgcggcgcaccggcgtcatcggcgtcaagtgcgggatgtcggcgatgtgggacaagtggggcgccaaggtgcccatcaccgtcctctgggtcgacgacaacgttgttacccaggtcaaga

SEQ ID NO: 381543 - DNA, 102 bp, Zea mays
attggttgtgtgtattttagaactaaggctgggctggcatataagaatcgagtgtccatgcattgtatgtaccagtactaatttaattttatccagctggtt

SEQ ID NO: 381544 - DNA, 128 bp, Zea mays
gttccagcagccgttcgcccaaatccattgccgctcctgccccaacgacgcacgccctcacctcttctgccatggcgctctcccaaccccttgttgccgctccctccacggccgctctccccctgctc

SEQ ID NO: 381545 - DNA, 117 bp, Zea mays
cccacgcgtccgcaccgcccagcgctcgcctgtttctgcggccgtcgatggagctccacctcgccaccatcgcccaccgcctgcctttgccggtaccggcgcggggccaccacctcc

SEQ ID NO: 381546 - DNA, 304 bp, Zea mays
ggaccgtgggaaggctatactctgaaatgcagtctcactacataattgactaataaaaatatgttttcttattacagctattctgtttagtagaatctatggttttaaggtcatggtagttttacgatcgtatacttgaagttctggtccgattcaggatcactattttaacaaccttgtgtggttaatttgcaggatcgtgatagctattgcaagatgatgcacaagtacataggatcagatgttacataacttgtgacacttccagtcataatttttgagccaatgacaatgcttcagaaaa

SEQ ID NO: 381547 - DNA, 99 bp, Zea mays
gaagcatccgcttgaccgcttcactcggtttccacacgcagcgccatgagcaccgccggctgcatgtacgctgccgccgtctccctatcattcccgtcg

SEQ ID NO: 381548 - DNA, 294 bp, Zea mays
ccacgcgtccgcgaccgtggttttgctctctctctctctctcgtggcaacgactgcgcgacgccggcgcctacgccaggctgccaggtcactcgtcggtaatttcgccaggcattcgtcgcgggctcttcgccggcgacgagcacacccaccaagttgagggttagtcctttacgagcatgttataatgggagagaacggagttcagctgacactgacctccactttgaagagcacaggcaagccacggatcaatgcggacgggctgaataatggatcacatactaccaaagag

SEQ ID NO: 381549 - DNA, 302 bp, Zea mays
aaatccacagcgcgcgcctcccgtcctcccagtcccaggtctcacccctagcgatgcgccactcccggcgctcgtgatccatggcctcactccccgttcctcacactcttccgcgggcctcgccagcgatagtgggcgccgcgagcgggaggaccgcggtgcgcgtacgcactgccaccgcggcattgggcggtaggtgcggcggcggcggcggaatggagcagcgccacggggaggccccgcacagcccagggaaaagtactcttgcatgtgcactgagtcgtgagttgcattgcagaggg

SEQ ID NO: 381550 - DNA, 287 bp, Zea mays
caatccatctccttgagcttgattgggcaaagaacatcgaaatctgcgagctcgtggcgcaggatcctgggaaagcgaaggatgtgatcaagtctgtaaagaagtgtatagggagaaaaacccagaccactcaactctttgcaattattcagaagcatctccaatagcggagaccctgtccataggcaggtcattgataatggcctgcctatggacaggctctccgcaattagttcagaagcatctccaatagcataacagcaaagagttgagtggtcttgctcctg

SEQ ID NO: 381551 - DNA, 318 bp, Zea mays
cccagagcgcgcggcagcagtaggaaggcgagacgcgagaggagttgcaagatggtggcgatgggcgtggacgaggacgaagagcggcggctggacgagcgacccatgcaccagggctgcatggcggggttcctccacctgttcgaccgaccccagatcctctccggccgccgcctccacagctcgcagcgccgactcacgtcggtttccagtggctccgcgactccgtccgagcggtcgatgccgctggaccgggcgccgtcgtcgccgggcacgacgccgccggccgcgccgcggcgttcgctgcagctttcgccg

SEQ ID NO: 381552 - DNA, 302 bp, Zea mays
ggtgcctcttggctaacaagtgcattcactttggtaacaaaagcagcaggtgacatgacctccatggccaaagacaaggtagagagagctgaggaggagagaaaggccatcatgtgggaggagaggaatgggctggtgagcgactatgcaaagatccatcttgacgagccctcttcatgggagcccgcagttctgcctttggaatcagtggatgaacagaagctccaggctgtctgatccacaaaaccgaatgccaatcgttgtcacacgtaattcttttgcagctcgccctatatatagat

SEQ ID NO: 381553 - DNA, 293 bp, Zea mays
cccacgcgtccgttttgttgctgacgcctgagacgctggcactgccgccgcgccgtctggagagaaagagcagagggacactgaagcagaggagccgaggggtagcgacgagagacgagcgagagcgaccgacggagatggaagcaggaggagcaggagctgagggggtgatgagggtgctgctggtggacgactcccccgtcgaccgccgcgtggcgcagctgatcctcagcagcaactcctgcgccggctcattccacgtcatcgccgtcgacagcgccaagaaggcgatg

SEQ ID NO: 381554 - DNA, 319 bp, Zea mays
cccacgcgtccgtagttctagatcgcgatctgccgccctttttttttttttgtaccttctgctacctctggcagattagcccgtcatagcaagcagtttgttgttgtatcggtttgttcaactttttacggtgtgggaacattagtagaaatgtcatttcactgccttcttttccccgctggatcgcatttcacaaaatatttccaccattcttgcagagaagccttgctatcgccaaactacttggaacattttgtcccgcctcggaactttaggacttttttccccgtgtttcttgcgtttttctagtaagaaaacg

SEQ ID NO: 381555 - DNA, 316 bp, Zea mays
cctgcaccccctcgcccaaacctgcttcgtcgtccggagaacctagcatcgagagccgctgcctgaccttcttttctctccgccgccgccgctttggtgcccaccttgccgccacctccattccgtcgggccgccaccgttctcgtaggtggaaggaagctggcagccaccacggtggcacggtgaagggacgcacgggacaagcgcgttaggctctacatttgggggcacatcttacggtggttgcggtggcggctgtgctgcaggtccaagtcgaaggaaaccagtatgagaccatgtcgctcgttcagatcga

SEQ ID NO: 381556 - DNA, 301 bp, Zea mays
gcagttggtgcgtcatgtccgtggctgcctgcctctgcctgccttccttcctccttggcctgctggcctagcttccccttcaccccaaaggcaccaaccagtggtggtggtggtggtggtggcagcagcagcagccccagccggcaggaggaggacctgcgcatcatcgggagcccgggaatctagagggtgagagtgggcgaggaacgaaaagccgcggcagatagagagacttgctctggacaaaagcgagagcgactgccgcgggatcaggaggaggagagaggccgggaccatcgct

SEQ ID NO: 381557 - DNA, 299 bp, Zea mays
gggctttgcggcggctgcggagacggcgatggcaggcgcggaggggagaggtccgaggcggatctgcgtggcgttcgtgctggtggacgggatcggtgacgtcagcgttccgtcgctgggcgggctcacgccactggaggcggcgtgcacgcccgggctggacgctgtggcggcggtcggggtgacctggctcatggaccccgtggagccggggctcgcctgcggcagcgagtacggcgcacctatcgctcctcgggtacgacccacgggtgtactaccgcagccgcggcgcgttcgag

SEQ ID NO: 381558 - DNA, 148 bp, Zea mays
gcggtgcgagcggaggaggcgaccgaagcgccacttgcttgagtagcgaacgctgagagcaatggcgtcgctgtcgtgcgcctccacgctgccctggacccccgcctcctacccgctgccctcggcggggcgctgcctcacggcctct

SEQ ID NO: 381559 - DNA, 204 bp, Zea mays
attgaattcgtgtttgtgagagccattgatcctggcccacttcacgtggctgggctacgaatctgaactaaatttctggcccgccaacatgtaatgggtcaggattgcaccatcccaaacaggctgttcggtgagcgttcctcgcccattagaaccagagttgtacttatcttctttccatataatttgttgtgatgcattggg

SEQ ID NO: 381560 - DNA, 287 bp, Zea mays
aattaatccagttgaatttcttaaaggggtttctggggaaaggctttctgaagcatgttcaggagaatggacttcttcaggatatatttgacattaaggttgacaaaaccgaaaccctgtcgtccactaacaagaaaatctttaggtctgaagaggaaaaaggaagagctctgaaattgaacaaggaacgtcgtctagcccaggtaaggaagaatgctgtcatgttggacgactaacaaggtcacaagggtgggaaggcaacagccattccgcgtctctgtttaaac

SEQ ID NO: 381561 - DNA, 279 bp, Zea mays
atacgaggggtgtggatgtcggagcggttctggaggagaagaggatgttggattcctcggttgcaacgcggccgatttgaccgaggactctgtcgtgcccaccagccccgtaccttgtcctgagacttcaacagacccatctcatcctgatcatagctccgtttcccaagacgatagagatgttcttgaagatactgctggaattggcgattccacggccgaggaagaacacatctttgtgcctcaagcttcagtatcggaagccgtttccgaggatga

SEQ ID NO: 381562 - DNA, 104 bp, Zea mays
tcccagtcccagctcccaaaccatctgatctgctctgctcccaccaatctccgtcgccgtcgctttcgccatggcttcccatcgccacttcctacgcctcctcg

SEQ ID NO: 381563 - DNA, 299 bp, Zea mays
ccagaactcgtgcgaaaagtgcaaagatctccaccctactgcggaggagttactggactgccaacgatatgtgaattggagcgacccaaacgagacgcagctggaggagatccttctcaagagtctgggcaccacctttgacaatgctgtgagtctgatcaccacaatgggctactctgaggcggttgcacgggctgctgttgtgcgggcagctgcgcaatacaactggagggagagccttgcagggtttggagaggcagcagttgaggttctcaagacggaaggggacatgttgccga

SEQ ID NO: 381564 - DNA, 294 bp, Zea mays
ggcagcgccgccagctgcaacaacagcatcagcaagcgaggagtagccaccagcccaccacgatctcatcagactcctctcaaatcctcccgcccactctccatttccctcccctcccccgccaccctgcaatggccggtctcctccacctccagtccacgcttctcccatcggcgtccgcgctccgccgccgtgcaggcgtgccggtgccatcctcgtcccgccgccgatgccggattgaggccaagatccgggaaatcttcatgccagcgctcagctccaccatgaccgagg

SEQ ID NO: 381565 - DNA, 290 bp, Zea mays
ccgacgccgacgtcttctgcggtctgggccccaagataagggtttcgtatcagtgcgctgggcgggataccgtgttggaaatgatgcagtccccgaacttcaatgacgttatcgggagctgcaggggccctctgtcgctggatatcacctgcaagacttgcttgaattatggcatcgtgtacctccatcgcctcatcggttcagacgataatgtcggcctcagcgtgtgccgcaatgcggtttttgtaacccttgccactcaagggggtattctttcatatgaagatatc

SEQ ID NO: 381566 - DNA, 317 bp, Zea mays
gttctagatcgcgagcggccgctcggatctagaacagcgcttcactcccctccgcgccgcgcgaccatggagctcgccaccgtcgccgctgcagtcgcctccgccgctgcgcgcccgcacgggcctttctccactccccgcgcagtctctgcctccgtctcgtggaccagtctctcgctcgcctacacctcccgctgtctctcctccacgtcctcgcgacggcggctgcgctggctccctgtcacctcggccgccgtggagctccgcgaggccactgccgggggcggagactcgctccgtgtcaccaagacgccgca

SEQ ID NO: 381567 - DNA, 318 bp, Zea mays
gacgatggatgctttggttggtatatacaatattaattcctcgctgctgcctctgaaaattcatattgtatataccaaccaaagcatcgaggaattaatagttatggaatgatgacctaggggtatccacatcttttgatcttatttgaatcctttttattcttcatctcttgtaatatgtcccgtgtttctttgtggtcgtgtaccttgcaacgcacttagcttaattggtgcttgtcagttacatatactaagttactactttcatatattagccatatatacggcatggattttccagcgtcaaaaaaaacaaaa

SEQ ID NO: 381568 - DNA, 212 bp, Zea mays
gtactgtcttatgcggggacctgtagtactgcaataggcatttttgtttaagttttgcgaggtgaacaaaactgtttctgttagtttcgagcttgagctctcaatgtttactctttacattgaaatgctgccgtttggacatgttttttctgagttctaaaaaaaaaaaaaaaaaaaaaaaaaaaaaaaaaaaaaaaaaaacacaaaaaggg

SEQ ID NO: 381569 - DNA, 282 bp, Zea mays
caactgcgaataggacgcctcgtttcatgataggtcgcgcgcacccagttatccggcggggcccagctcgacgccggcgcagcttgctgcggcgccgctcctcagtccgccgcctctgcgggagcggcgtcgctgcgaccctggtctaggggcgtgaattcgacacccatctgggcgtgtatagtattattcttccctcgaattttgtggtttatgtggagatctaggaggccaatccacccatccgtggttcgattagaggattgtgacactgaaacagca

SEQ ID NO: 381570 - DNA, 314 bp, Zea mays
ggcgtatacaacgtcagcgtgtccctcgagttccacggcgtccctgcttacctcggcgacgcggggtcctcctcagctgccggctctgcggaacccggcggccaggcgacactaaaactgccggcgtcgtacttccagccggcggatctgatcctgccaatctcggagggcatgggcagcagcaatggcttttggttccgcatccagaattcgtctggaccgcggtccaagcttgtgagaattccatcgaacacctaccgcgcaatcctcgaagtcttcgtgtcccgcactcaaacgacgagtcttggtattcc

SEQ ID NO: 381571 - DNA, 309 bp, Zea mays
ttcatataaaaagggacagacagagagagaagcaaaacaaattaagatctctcattgtgtgatgggcatggcacggagatgctttgcattgttagagtagtagtctctgtgagacgaggaggagaggatttgctttaccggtaagctgatggcgactcgtgccgcattatttagttgcctgatgaacatatgcgacgaccgtccagcttttaatctggtgcccagcccagcggccctcatgttcgtgtgccaaaccggatacttagcttactggtatgttgacagaaacattgagaccggcaacaagtg

SEQ ID NO: 381572 - DNA, 308 bp, Zea mays
cccacgcgtccggtagattaatgattcctttctagcctgaccacaggcacattgcttggtctgctggtccagtgtgtcgcagacccacccggaagtgaaacaaagtgaactagtaaaaaatcagagtacaaatgcacatgtccagtgttgctcagatacagtagtataaggcccatttggtacattactgaagggggaaaaaagaagctgacttaacaggtttcaccggcgctgtgaaaagagtgagaaaaagaacctctataaacaacaaatgaacagtgtgtaaactgtagctgtgtctgaagctg

SEQ ID NO: 381573 - DNA, 274 bp, Zea mays
gcttggtatcaaggttaagattatgctggactgggatccaaagggcaagcaagggccaaccatgcctcgcctatggttgtggtcctcattttttttgtgtaatgttcattattaacacgttgaaagtaaaaagagctttactttctatagttgcaatcagtgataatcaatgaattctttctgcttctcactttagtttttgtttgtttttatcttgctgctctgtattatcctgttattcacttgacttgcctttacagtttatactttctgc

SEQ ID NO: 381574 - DNA, 298 bp, Zea mays
ggacctttgacgcatgctcgtatgagagccaggatgtggcggcggcggcggttaacaacctcaccgtgtatcttggcggatcaggcctgggatctaggaaatgcagtagttatcctcctctcccctggtcgtggtctctctctggttcactcagcacacgggtgttctagcaatcccctgctcctctatcgttccagttcctgtttgcctgagtagatttctctgttggtgattgctcacgggagttggaggagacgctgtgttcttgcagcaaggtcctttgtgtgcctcactgctc

SEQ ID NO: 381575 - DNA, 298 bp, Zea mays
ataccccgcattgagccgtcatcgttacctgcgccgaccggcacctctgtagcctcttctccaggggttgcacgaggaggaggaggttcgggcttcgccatgtcgaagtcgaacctagatgatctgcttctgcaggcagccggccggacggggaagaaccactcccggccgagcaacccgcggtggaactctgggggaagcggctccgacggcttcgacgacgacgactcggacgccgcgccgacctactcgaggaagaagccttcgtcgcaggttccgctcaagaagcggcaccagc

SEQ ID NO: 381576 - DNA, 296 bp, Zea mays
cttttctcgcctcgtcccctcgcgcttcccgccgccgacgccgcgtctatctggtctaggaccaaatgccgcgagatcttcgcgcgtgacgccgtcccccccgccggagccgccctccgagctccgggccacggagcgcttcgtcccggatctctctggtggctcaggacagtagaaaggaaaggagaaaagcttgttgtgtctgtgtgtgagctgcagaccccgagaggatggatcagtatgaggtgctggagcagattgggaaaggagcatttggttctgcactcttggtgagg

SEQ ID NO: 381577 - DNA, 306 bp, Zea mays
ccggcctcccgtgcgctattctctatcagcttacccagcacacattacacactctaatctcgacacgacccaataggtatacggggctgaaggacttagcttacagctaaaaggatcggcctcctggatctccttgtcttgcttgctctttgctccatcattgaagtcggcgaggcaaggagaggccatcattggaggtcgtcgatgagctcaccgggctcatcccatctcaagaaagacaagggacactagagcatctcccgacgggagtacggcgccaaccggccaggtcctaagccaccggtc

SEQ ID NO: 381578 - DNA, 304 bp, Zea mays
ggggcgacgacccggaggccgcggcgggccgggctgtggaggtggacggggtggagttccgggggaagttgctcaccgtgaggctcgacgactggaggaaagggagagccaggtcggaggagcgggcgcgctgggtcgaagccggggttgtccgggaggctagctccccgtggcacaagggcagggaggacgcgtgccgcgagttccggagagtgctggagtcgcggcccgaggacatggcaggctgtcgtctccgctttcgagcggattcccaagccatcaaggagggaatttggtctgatgg

SEQ ID NO: 381579 - DNA, 299 bp, Zea mays
cccacgcgtccgagttctagatcgcgagccgccgccctttttttttttttttcgcacaaactttctcctcctgctgctgtgtagcagtggcgcctctaataagcttccctcacgcacttaccgtggataagcaccgttcagaggatagtttcagaactttccctcagttgatgaggtcggagcccagccgacgtccggagccgctccctctacgttgacggaagcaggggtgtcgtcgggcacggcggtttctttgctgagccgttcgaacaccttctcgcggaagggtctcccggact

SEQ ID NO: 381580 - DNA, 299 bp, Zea mays
gccatggaaggctgagattggtcgatggcttgctgggtgtcatgctaactcttcgtctgttgatgttactgaggccatgggtgcaaaacgctgcgagaaagactgcagtgctcgtggtgtttgcaactataatctgggagagtgcagatgctttcatggatattctgggaaaggatgtgaggaggttctgaacttggaatgcaaccttccaagttccccagaatggcctgtaggtcaatggatagtttccatctgtgcagctcactgtgataaaacaagggcaatgtgcttttgtgggc

SEQ ID NO: 381581 - DNA, 255 bp, Zea mays
ctgaccgtgggcgggacgcgtgggcgggacgcgtggggcagacgcgtcgggcgccggctagtagtgggggactccagtccagcgctgaagggctactagcgcagcgcagtccctcgtctgctagtgtggtggctgacgccggtgggggtgtgagcaactgcgagctgctgccacccctgctggcggggtcgaccgccggccccggaccgagagtgacggtcggtgggcggtgctgctcggggtgctggtcggcag

SEQ ID NO: 381582 - DNA, 283 bp, Zea mays
  unsure (1)..(283): unsure at all n locations
gtcagaggctagaggcagtagttgtgtgtgccggtcccggggaaagccatggaggaagagcagagcccaaggctgggccgggatgcggcgaccgagcccagtcgtgcgccggagtggccggattcggacagcaagaacgacgacagtgcgaacgacccggaggaccgtgccggcggcacggcagtgncagcggcaacggcgtcaggtccttggagcagccggtggtcaagcggagcaccaccgtgacggccagccacgtggccgtggtcggcgccaaggtgtc

SEQ ID NO: 381583 - DNA, 281 bp, Zea mays
gttctaggttcgcgagccgccgccgttttgttttttttttttttgtttttgccaaagaccagtgccgccggccggtatcacactcagtcatgtccagtatacgaacgtgcagtatacacacacacacagagacacctaccatacaatgaggatacagacactagctagctaacccaacccatcgtaaggcctactaatctgaagatcagatcagctcaggtgggtatctagtgagacacccccgacgacgacgacgatgaggtatatgtatatatgttacg

SEQ ID NO: 381584 - DNA, 315 bp, Zea mays
agctgacgcagcattgcaaaagatgaacggtcaggtgcttgatggaaggaaaattcgggtgcacaagtcatccagtcccgtttgcatagtgcacccgggactggatgacttgtgatttagaaacagatagaaaatgagatgagcaggtgatgattgatgagcatccagcggctggatcttaaaaatccgcattcgccattgaagttttgttgagatctcgaagctgtaaaaactcggacgaactcaagcgagacaaagatttctcctggtgacacggactgttataagatgttttctgtgaggaaaaagttagtc

SEQ ID NO: 381585 - DNA, 110 bp, Zea mays
cccacgcgtccggtttaacactagtagtgtagcttctgcatcatattaaaagaagcttgcactgaaacctgacccgaagatgatttctcatgcaaattagtgtgtttgag

SEQ ID NO: 381586 - DNA, 248 bp, Zea mays
ggaatggaggaacatcatctttgaagctggtttcagtgactacataatcataccagttttaggtgttcgatcaatcatcgagctatacccctgaaatataatccagcttcctcagccggcggcctcatcacctacatgttgaatgctttggcgtgtggatctgtgtgtgtgttttttcctttaagaacagtgtgcatgtgtgtttaataaattggtatatatagttatatactcactagaaggatggt

SEQ ID NO: 381587 - DNA, 134 bp, Zea mays
cgtgacgctggaggagaacaagatgttcgagcgcgcgctggcgagggtcgactgggacgcgccggaccggtgggagcgggtggccgcgatgctggccggcaggacggcgtccgacgtcgcggcccactacgacg

SEQ ID NO: 381588 - DNA, 307 bp, Zea mays
atgagcatcaagaacaccaagccgctggaggccgactacagcttcgacggccagcggttcgaccgcatcgaactcgccgacaagggggacgtccaccccgcgggcaagacccgggtgtaccacctcgactccggcgcggaaggcgcgtacgtggcgctggggaacgccggcgtcgactcgaattcgggaaggagaacgcaacggggctgttccaggtggaggtggcgctcgccggcgaggtgaggtacaaggcgcacgtcaccaagtgcaagctggccgcgacgtgcccgctgaagctgcagctcgc

SEQ ID NO: 381589 - DNA, 301 bp, Zea mays
ggtttgcccgcgccgcgtcgctcggcaaggagggggacagggtgcgctgccgtcggggcggaggcgcggactcgttcgtcgccgtcgcgtccccctggcatcgctggttgtctagaggaagaagatgatggtgggctcttcccagcagcagctgctgctgcagaggaaggggaagcccgtggctggcaagggagcggcctccatgaccgtgaaggcagagaaggtggtggtcgcggtaagggcagccacgatggagatctccaagacagccgtcatctgggcgctcacgcatgtcgtgcag

SEQ ID NO: 381590 - DNA, 284 bp, Zea mays
ccgggacgggcgcgcgtgttgtgtgatcctcggatccgtggcgcgcggcaacaaaatccacgatcacgtcacctgttccaacttttcaaaggactgatcgcgtgttttgtcgcacttgacattactcaggtaatacttgataattactaatctattctattcttgtgtccaatcgttggcgttgttcggtatatcggtttattttcctagggtgtgtttagaagcactttctatcaagcttctacaaacttgtttacgagaaaaaaaaactggatgtaggtatt

SEQ ID NO: 381591 - DNA, 283 bp, Zea mays
gattatccccgcaccgtccagagtactctaacccacaagttgaggccgccctgcagcccatcagacgaggacgcgcgcgtgtataaaagctgactggactcccagcgtctgtcagcgaaccgaagcagcagccaattcgctcgagttcagatcgagcgcgcgccaagcaagtcttccggccggccgcgaagagcgcaatcaagcaagacaagatggtgaagctcgccttcggaagcgtcggcgactccttcagcgccacctccatcaaggcctacgtggccga

SEQ ID NO: 381592 - DNA, 307 bp, Zea mays
cggagaagttcttggtagcttgagcaatatcattgtaagacagtactgggaattgatgaccaacaggatataataatgatggttgttgtgcagccttttcttaatgagaacgagatagacccacatcagtagtggcatgaaaccgaatattgggatcaacactctaatgatgtagtaatgtgctactttttccctggaagcaacagggcagggggtgcatcctgaagttccgacgggaccacacagagtctccaagtgccacaagtgagacaactgaagcattttgaaatactccaccatttggtat

SEQ ID NO: 381593 - DNA, 301 bp, Zea mays
tgacgctccgcccacgcgtccgctgacttttattaaaggatgtttgtttatttgggtattctttgtcatgaccataaattgtggtgtggttatagaaacattttctttaaagcaacacatttgtactaactttgtgttttcagtaaatgttctcaacaactgatccagttaccactttgcagatggatgaatcagttaggacaaatgtactgattgagagaacactcttttataatcacaccacaacctatgatcatcccaaagaagacctaagtaaacacacatgcttcaataaaagtca

SEQ ID NO: 381594 - DNA, 305 bp, Zea mays
acgcaccaatggccgcctccagcgccgacccagctcagcaccacgcctcctcgacgccgccactcctcctcgccgtacgccacctgcccttcccgggcgtcccccgaacacgcacgttctccgtccccggccccgacgtcctcgcccctctcgcccgccgcctcgaggagctcgcgtccgctgcggccgcccacccgctcctgaagccgctcttcgccgcccactcccagctctcctccttctcccagggcaggaggcgtctggtggcggcgcggcgtgccacggtgctgtcgtccggggagctc

SEQ ID NO: 381595 - DNA, 299 bp, Zea mays
caactttaagaggttcatctgatgtgttcaggaggtccttaatttctgctggcatttctcattctagaagttcaagcatcccattgcagcaccgtggaaattcatccacatcacatgagattaggaatcatcagccaggatcaagctctcgtgcacatcagcagcaccccttaagacccggtcattcctctggttacttggaccttcagtcttttatgcagaccatagcttcaagggaaggaggcagaccaatgtcagagatccgcaatgtcttcgatcagattcgtcaggggagaaat

SEQ ID NO: 381596 - DNA, 104 bp, Zea mays
ctgccgatcccccctcctatccgccgcagatgcgcgcctctgggcctaccccgatgtatagcaacttcaaggagcaggcgatcgagtacgtcaagcaagcggtc

SEQ ID NO: 381597 - DNA, 104 bp, Zea mays
cgacggaagctgctcgaagccttcgacgctctctacaggggctgttgttgccggaacagtcgtcatcgtggcaggagcagcggcctgtggtatgtccgcattct

SEQ ID NO: 381598 - DNA, 329 bp, Zea mays
cccacgcgtccgctcatctactactactagactactagtaactccgcttcgcttcttccgaagcggcgcgggcggaagcgagggcagctcagcacgacgtgtcgcgcgcgcgcggtgtccagccagcaactaattccggcgccgaactcggcgacgcggccatccgggactggggatttggagccgtccccggtcgccgggcgaacggcgggtcgttgcgggaaaagtttctcgaggccgtctgtgagcccgctctctcgggcgcgagatcccgcgcagccgcggtcggagaatggcgcagagcaactgggaagcgggtaagatgctcg

SEQ ID NO: 381599 - DNA, 304 bp, Zea mays
ctagttctagatcgcgagcagccgcccttttttttttttttttttgaccacaaaagttgaatatacaatttaaatcttcctcacatgccatacaattcaatgacaggcagcttcagaggtaacttgtacacattacctgactcaagtactggccatcaaaaccgaaatagaataaaggaacaatggagagggaaaatagaagaggattcacacaggatccagcaagaattccaaatacaaaacaaggaaaaagattattaacaacaaacgatgatttgatgccttcaggacgatgagatttttc

SEQ ID NO: 381600 - DNA, 100 bp, Zea mays
acaacacgacgatcgtggagatggaccccggcagcttccgcaccttcgacctgagctactaccgcggcgtgctcaaactgcggggcctgttccagtccga

SEQ ID NO: 381601 - DNA, 105 bp, Zea mays
ccaccttccatttcttcgagaaattttcatgtaccgtaaaactgtgtgcttgtcgcgtgaaagatctcgtacttagcggtttatgggtttttcgcagtccaagaa

SEQ ID NO: 381602 - DNA, 100 bp, Zea mays
catctggctccaagcacgccaccgctccacagtgcgcttgactctacagctgcgacaggaaagtgatcagcagcatcagctgctggcatgtaggcgtgga

SEQ ID NO: 381603 - DNA, 295 bp, Zea mays
caccgcctaggtccgggacggtgcgcgggattgagtgtagagccatggagaggtacattaccgtcgctgccgtcgccctcagcgctgccagctcaggtggcggtggccgggtgccactcggggtcgaccaccctgtgcgccgcccccgaagcgttcccggagacgaagaggcacgccgcgcacacgagccacgacgcgatgaggacggagaggcaggagctcgaggaggcggccatggcgcgcacgtgaagagctagcagagaaacggcggcacaagcaggcagcgaacgcctac

SEQ ID NO: 381604 - DNA, 306 bp, Zea mays
cccacgcgtccgcttggcttcatcacttctagcatccagtgtcttctctgagaactttgtgcgcctaagatcgacaattgccgatgcatcccctgtgaatggaatgttctttggggatgtagggactggtcatcttctctgtcttcttgctgcattttgctggtttctttgtcgggtatgcagcagcagctataggtggtttcaaagaaaagcaaaggagagcaatatcgatcgaggatactgaaatagacgaatcaagcaagtcttccagcggacttacactcaaattaatgggcgtaaaatact

SEQ ID NO: 381605 - DNA, 307 bp, Zea mays
  unsure (1)..(307): unsure at all n locations
cggacgcgtggcggnacgcgtgggccactcgatcatcccaggatcgctcaccatctcataagctaataagctagttcatgaaccatcgtactagcaaacaaaagatggttcagctgccggctgcagccggcgatcgggcaggcgcagggtggagccgggtggcggaccagccggccgcggcgggagacaccagctgggggcggcggcgggatcgtcgccatcatcatcatcagcagcagcaggagctggtgctgcgtcggctgctgccgatcaacaaggccaaggcgtgcaggttcaagcgcactgc

SEQ ID NO: 381606 - DNA, 291 bp, Zea mays
cttcacctgctgattgctgtaccgctccgctcctctccggtggcatctgcatctgcatctccatccctcgatctgtcttctctcagggtggaataagcgagacaatggaggctccacccgtggcgctgttcgacaccctcaaggcagccaaaccgttcttcttgttggctggtcccaacgtgattgaatcggaggagcacgtcctgaagatgcagatgccaccggagcggacgtagcggcacgggccggccgccgggcgaggtgcgcgtacctgccgtcgatcgtcgccgg

SEQ ID NO: 381607 - DNA, 301 bp, Zea mays
ctcgcctaaccctagactaacctgattccgcctagcaacaaatccgtatcccgactccggcgaaggcactacccgagttcacttcacactcgtgcacccatccgggtcactggctcactgacaccgcgccccaatcacgcgcgcgccacccgcgatgatggcggcggcggcgatctccggctccagcggccacctcgtcgtctcctccccccgcttcaggcagccgctcacgctcccttctcgcagcggtcgcccaatcgccgccgccgcctcggccgttgcccgcggcggggtcgcggtc

SEQ ID NO: 381608 - DNA, 301 bp, Zea mays
ccaaaacaaaagcaaaatgaggagctccgtctctgagcgcagctcatcatcgagagcgacgacgacgacgacgaccatccccaatcccggtcatccgccgccgcccgcagcagaagacgccaccaccaacacgaggaggactccgccgcaggatccgactccgattccggttcctcctcgtcctcctgcggcaccccgcgcggtccggccaccgactcctcctacacccagcaatggccacagagctacaggcagtccatcgacattcttagtagcgtgcagtcaccagatctgagcttct

SEQ ID NO: 381609 - DNA, 296 bp, Zea mays
cagaagcgcgacgtcaggatggaacgggacgagggcgcggcggtgctgctgcacgaagacgaagccgaagacgaagacgaagacggcgatacgctggacagcagcagcgactggcgcgcaccaagggtctgcggtgccttgacaaggccgcggcgatcatcgtcatggacggagacaaggagcgggagagcgaatggtctctgtgcacggtgagcgaggtggagggcgtcaagatcctggtgcggatgcttcccatctggatgacgtgcgtgctgtacgcggcgtcgctggggcaa

SEQ ID NO: 381610 - DNA, 187 bp, Zea mays
ctagttctagatcgcgatctgccgccctttttttttttttttttttttttttttttttaaatgtgcaaatgagaagtaaatgaaacgtcctggacaaacttgtgaaagtaggattgatacagtggggctatttccaggtcagatgagacagttatgtttacaacaaaaagcaatacatgttgtttag

SEQ ID NO: 381611 - DNA, 306 bp, Zea mays
cccacgcgtccgaccgcggcgccggccggccgtctcccgtccacatccctcctcctctcctgcaaggttcctgtgcggtatggtatgctagctcggctcccttgtgtttccccccctcatccggaatgtgatggcgcggtggatggtgttttgatctgtgttcgcttttggcggatctggtcgcgcgcagtagcgcagaggggtcggagtcggagtcggagtcggagaagatgatgggcgggttcctctccagggtcctcctgtaatcgctcccttgctccgaatcttgtaacgtcggtgttcttt

SEQ ID NO: 381612 - DNA, 156 bp, Zea mays
cgggaacgggaccacatgccggggccgtgctacggcgacaggctgcgcggcggcggcggctgtctctgcgtccgccgggaggccgtcgactggatttggaaggcttacacgcaccacaggttccgccctctcactgcctacttggccgtgaactac

SEQ ID NO: 381613 - DNA, 134 bp, Zea mays
ccacgcgtccgggtttgtttatcataaaaaaaccgaacatattctccaaactctaggtacagattctcacaattatagtagtattttagaatctgtacctagagtttggagaatatgttcggtttgtttatcat

SEQ ID NO: 381614 - DNA, 287 bp, Zea mays
cacactctctcgtggccactaaaaacaatggtgctcctagagctactcatcgtcggctcaacacttgttctatcgttgtatgttaggttctggagatcaaggaacggcccgttgcgccccgtggactggccgatagttggcgttctcccggccctcatttccatgctccacaacctacaccacgaagtcacagtcatccttgctgcctccggctgcaacttcaaggcacaaggaccagtaggaagtggcatgcggttcttcttcaccgctgacccggcaaatgtccg

SEQ ID NO: 381615 - DNA, 104 bp, Zea mays
aaaggctaccattaatgtgtgggagcccaagattcagcaggctaacgaatttagcctgtcccagctctggatcttggggggttcatttggggaggatctcaaca

SEQ ID NO: 381616 - DNA, 326 bp, Zea mays
ccgtggtatgggaggtggcgcatgcggaggtggcggacttggtatcggtggtgggcttggtggcggtggatggcttggaggaggcattgcttgaggctttggggccggcggtggtatggtaggtggggcacgctgaggtggtgggcttggtggcggtggaggcggaggttttggagtaggtaagggcggaggctttggtgccggcggtggtataggacgtggcacgctctcggggccctccctcgatcccgttgcgcggccgtcgtgtgccaggcccaggggcggcagtacaccgccatccaagttcctgatgtgagcaaatccac

SEQ ID NO: 381617 - DNA, 328 bp, Zea mays
gttctagatcgcgatctgccgcccttttttttttttttttgcattcgagtccaaacgcaaccaggtactgatctcgactgggttcctaaagactactgctactgctaaaatattcgcgcgagaattgacgaaagagggctacgtaaaactccattttacaaaatttgcagaaaaccccccgcctctcgctccgaattctttactccccaccccactattcctttctgctgagctcaggaaatcccctctggtctccccgtcccccattccacccgccgccgccgacgcgccgcgcctgttcaagatgaatgtggagaagctcaagaag

SEQ ID NO: 381618 - DNA, 323 bp, Zea mays
agcaggagtctgcttccgttccattgcatcccagtcccagccaaagcaggatgccgcacgccaagacggactcggaggtgacgagcctggcgccgtcgtcgcctccgcggtcgcctccacggacccgcggcgccgtctactacgtgcagagcccgtcccgcgactcgcacgacggcgagacgatcaaggcggccacgtctgtgcactccacccccgcgctgagccccatggcgtcggcgcgccactcgcactcgcactcccactcgtccatgggcaagacctcatggacgaggaggaccacacgcggatcgtgccccgcaagt

SEQ ID NO: 381619 - DNA, 297 bp, Zea mays
cggaccgtgggcggacgcgtgggcggacgcgtgggctcaaccagccaagccggcgtcagatgcgaacagagaaatggcgggagcgaacttcctctccaccgcggcgctcgtcgcccgcggcgtcgctgcctgctcttctatttcaactccgacacggaggcacccgcaaatccgggtgttctgccgggctgacgctgaggccttggaggcctatgcccatgaagagcgcctgcgattccgtcggagagatttcatcggcacctgcgtcggcaccgctgttgctttggaaatgatcga

SEQ ID NO: 381620 - DNA, 297 bp, Zea mays
cttcttggtgagagcgatatgagtgtcccaggtcaatgctcatcccagccacaatttatcaccagcgttgggaggagtaaccgctccaatggccccggcactcctcttatcgaaagcatagatgttgatcaaattgttattccagagaaaaacagttggaagaacttattctcatacatagggcctggatttctcgtctcaattgcatatattgatcctggaaactgtaagattaacggattcacttttcttcgattctcattgagtatttcccttccatctattgtgtattcttca

SEQ ID NO: 381621 - DNA, 286 bp, Zea mays
ctcaggcccaagagtggtctgcgcacagggctgattgtatccatggtggtcgggtcagtagcgttggctgccgtgatagtgatactggcgctcctatggcgatcccggacctggagaggtgtatttacttgcagtcgcagagagtttgaagcaggaggttctctcgcgttctactcttacgcgcagatgaagaaggctacaaggaacttctccgacaaactcggcgagggagggtttggaagcgttttcaggggaacaatggcaggaccaaccgccgtcgccgtga

SEQ ID NO: 381622 - DNA, 302 bp, Zea mays
tcctccacgcgtccgggacgcgtggcgaccgtgactagttctagatcgctatctgccgccctttttttctttttttgtggaaagtactagtagtattaacttgtacatctagagagttcttcccaaaaccattgcagaaaattcgagaaatcaaacaatgatccaatatttcaagaggatttcttcaccgacgactctgagcttcatcggatctatggtcttcgccgtcgagcgatgatcaaggccgtcgacgactagcatgcatggatttgggaggaggacgacaacatgagaccatgggg

SEQ ID NO: 381623 - DNA, 313 bp, Zea mays
ggccaagatgatgccgtcgggcccgccgaacccgatggggcccggtcagccagtgagcggtgcggcacgtcgctactacggacgagctccagcttgctcagtggcggtggccagcctgggatggctggaggtggtggtggcggcatgctttcttcacagtcgcccttctcctcgcttgtctccccgctcacacagtttggcggcaatggtcttcttggaggcgcctcgaatgtctcctccctgctgaaccggacgacgttcaggaatggtggcctatgccaggtccggggtcgatgcagggtggtgggatgca

SEQ ID NO: 381624 - DNA, 167 bp, Zea mays
acaagccgcaagtggccgtcaagagctttcctgctgagccgatccgcgcactcatcgccgatcaggagggaagctacctcattggcggtggcagcaatggcaacattttcctttgggaggtgagggcattgtgctttctttgtgacgatttcgaagcagcctctccg

SEQ ID NO: 381625 - DNA, 303 bp, Zea mays
ggggccgctatgattggtcctcctcgcccgccgccggcgcccgctggggaggaagacgatgaggacggcggcggtatcatgatcgggccgcctcggccaccgccgccctccgctcgcggcgagggggacgacggcgacggcatgattgggccgcctaggccgccgccagcggatgatgaagacgtcgatgatgatgaggacgacgacgaggaggagatggaggatgatggggagggtggattcaatcggatccctcttagcaacgaaattgttctgcgggggcacaataaggttgtctctgcc

SEQ ID NO: 381626 - DNA, 160 bp, Zea mays
cccacgcgtccgctctcactcctggcgcaactggccgacgaccgccgccgccgtactcctggttctctggtgcccaggtctagcaacgtcagtcccttcgccaggtcttcgttggggccttcactggcgacgagcacccaccagttattgggtgtacatc

SEQ ID NO: 381627 - DNA, 141 bp, Zea mays
caacaacaaattctaccgccacggccaaggctggcactgcagcgaggtgggcatagtgggcgccatggtcaccgacgcgtgcttcagcgcgcgcccgtcggacgtcatcatcgccaccctgcccaagtccggcaccacgtg

SEQ ID NO: 381628 - DNA, 306 bp, Zea mays
  unsure (1)..(306): unsure at all n locations
acgcgacggtgggcctccttcctccagggttagatccagggaagacaactagatcgctcccacttcttcctcttgcctcctctgtgcttggatctatgtttcaccacccccaatgctgatccttctcgcctcgatgtccaagagctccgatatgtcgtccaccgagccccggtgctcagatcacaacacgtgcgtgtcctcactctctctattcgcttacgcgtccgaatttgatgagctcggccggggtggctggctgtggtgggggcgcagatgccaaaggatttggcgggcgtacangggtgt

SEQ ID NO: 381629 - DNA, 295 bp, Zea mays
ggattctattggagttgataccaaatataatgaaatgtcttttctggataacctttttgatgactccatgagaatagccagtgaaaactcacccaagggggaagctggtcaattgacagtgcagcatgtcaacaagagaaaatcaacatcaaaggatgaatcaaaatttggcccagtgagtattgctaaacctaaattaaaaaggtcttctggcagcgagaactctacagcaaagcctgagagtgctaaaaaggtcaaagctgacatagcatcgtcaataggttctttatcagag

SEQ ID NO: 381630 - DNA, 296 bp, Zea mays
ggtttatggagttgaataggttcatctgccaccaccctatcccttgcaaactaataattagtacaaacatgagggatgtactcatgggttggttcctcaaaaaacattcgaagtgcacccaccccaatagctgtggcaatgtccatttctcctttgagactctctaagaaggcatttttagatgttcgaactgatataggtttgaaaagttttcctagctgaaaattacaattgacggcttattgacagttatcatgtgcgcatggggctgcaaattacagatagtgtcctgctgg

SEQ ID NO: 381631 - DNA, 327 bp, Zea mays
gcattcagatgttgcagcatcatatatcgagactcagctaattaaagcaagggaacaacaacaccagcagccacctcaacaacagcaacagcagcagcaaatacaaatgcaacaaatgctgttacatagagctgcacagcagcagcaacagcagcagcgtagagatggttctcttctcaatggtactgcaagtggattttctgggaatgatcctttaatccgacaaaatccagctaatgcgaattcgatggcagcaaaaatgtatgaagagaggttaaagctccctccccagcgggattctctggatgaggcgtcaataaagttgca

SEQ ID NO: 381632 - DNA, 311 bp, Zea mays
  unsure (1)..(311): unsure at all n locations
ctgctacctggtcgaccacgcgtccgacccaacccattgcatttgcaagcccttttaccatgcagagcgccagaccctcgctcgctctcggaccagaggtagaccgctaacagacgaagaagaagccagacaagcagaattgagagagaggcgaggacgtggcgacgacggcagccgcgatggcgacgacgacggacctggggttcgaggcgacggagctccgcctgggcctgcccggccgcgcacgtcgangggagccggcgctgggcggcgaggcgaggagctcttcctgcgcctccggcaagacgggc

SEQ ID NO: 381633 - DNA, 315 bp, Zea mays
cccacgcgtccgtagttctagatcgctagctgccgcccttttttttttttttttttttttttttttttttttttgttttttcacaatcaccatcattattgaccctagcaccaatctccatgcaatcggtactactagtggtggatcatcgacaacacctgtgacccggagattaaacacatggcaatcgcaggatggccacatgcagctgcacgcacactgattttgatttgtgtttagatggcggggcctccaggtcactcccagatgccgacctccatgaacccgtcctcggtggcgcactccggaacatgc

SEQ ID NO: 381634 - DNA, 227 bp, Zea mays
cggacggtccgcccacgcgtccgagcgcatcgagtggccggcgtacgacgcggtggacatcgccaacgggttcgagatccggcggtacacggacgccatgtggctcaccagcgcgcccagcgaggacatgtcctgcgtcgccgccaggcggagcggcttcctagagctggtcgactacatccagcgcaagaccgcgtagaagcagacgatcgacatgacggccccgg

SEQ ID NO: 381635 - DNA, 390 bp, Zea mays
cccacgcgtccgaaatctcgctccgcaaaaccatgagcgcccctatggagatctccttcactgcgcccccaccccctccggacgcagcgtctaccgccgacgcttccccgctgctggaacctgccgccgcgcagatgctgccccctgtcgccgcagtctcctcctcgcagccgatgcagcagacagctgcggctgcggccgtggttgctccttccccggccgacgataaggtcctcgtgtcagttgaggtactgttgcacgccacgagcgtactcgcctacgaggacgtccaggtggcggtcgagaggatgctcgaagctcgaagcttaagctatgttgatgggcctgtgccaattcctgccgataattcttttctactcgaaaatgtca

SEQ ID NO: 381636 - DNA, 187 bp, Zea mays
actagttctagatcgcgagctgccgccctttttttttttttttttttttggcagatgaaacgatgcagatgtcccactcggtttttacgatacaagtacacgggcaacttcctcagaaaccaccaaacagagagtagtaaaacaggtaccgcgtgggggcgagatcaagaaaactactaacctaacc

SEQ ID NO: 381637 - DNA, 301 bp, Zea mays
gtgaatattagcatcaaagaacttgacctggatgctgcccgtgctgaacgccagctgataaaaaggctgaaaaaggaagccgaggagagacgggaggaatacaaggttaggaagctccgacgaaacaaagaaatggatgagtatgatctgatgcaatggcgccgttcatttgaagagagggaagcgcttatcagagacatctgctgccggaaagcgcttgatcttcctatcgaagagcccgggcgatacgacgtggacgagacagaggtgtacgggaaggatcactatgacccagagaagc

SEQ ID NO: 381638 - DNA, 292 bp, Zea mays
ctgaagaaatcaccccttctaccgaagatatccccagggcctttgagcatatcgagaatgaagttgacgcctttgatgaagttataactgggcacagagatttatgtggtctggtggcttcactcagcacagctgcaacattcatgaaggccgggtgcaatcacgtgagagctgtcaacaagccgaacttcaatcttccatcatcggatttggttgacgttccgaccgaggcccgaagtataggaaataggtttattacccaaatttaggcaaagggcgggcacgaattggt

SEQ ID NO: 381639 - DNA, 294 bp, Zea mays
agctgttgtcccaccagttgtgcctgtaaaaagcatcagcaatccaacaccacaaatgacattggaggtgcataacgatggcaccgaacccactcaaagcagaaagttagacaaggaaagggaaattactgaaaatggtagcccaattgtcgatacacccattgctgcagctccagcagaagaggcagtcacaaacctaaataagaaaacctcacagaacatgaccttgattccacaaggcttgaggaacacaggaaatatctgctttctgaatgcaactttgcaggcattgct

SEQ ID NO: 381640 - DNA, 333 bp, Zea mays
gggcgggaatccgggaggaagcaagcgttcgaagaactcatatttgaatttgaagtgaaatagaaacataaacacgaaatagtgaatagtaaaaggtgataaagaagtgggggagacgtatttggggcggaacctcattattggccgagattctcacctgtacagccagcctaacctgccctcacgcgcgtgccgacaggtggggtcgcgtgagcagtcaccatcacacctgcacgttgaatcgtgtatctgcctcgcgtgtaggtgtcacacatggatttaatagataaagccgggtacattttatatatgcgtcaaagaagacaacacata

SEQ ID NO: 381641 - DNA, 292 bp, Zea mays
ctcctcgtttgtttaggacattcctgcaaatcccaacatcctcttcttcagcttatcgcgcactagtagcttcgtctgcattcttgccatcaagacggagctttgaaggctacattcctcgtagctgctccagctcatcgctccagatctacagccggtcaccgctgttaaatctatcgccgtcttcagctctcatggtatcctcccagctcacgggctcctccgacgtagcccaacgttcagaggaatggtttgctcttcgcaaggacaagctcaccacaagcaccttcag

SEQ ID NO: 381642 - DNA, 312 bp, Zea mays
ctagttctagatcgcgagcggccgccctttttttttttttttttttattgtcatgaaatcatctatttgaaacccgttggaaaggacaaggaattttggtagtaaaacttatggagcaaaagtggaaaacaaccaaagccagtcagtttcaacatgctctgttcatatccgatgactgtcaggcataagcagtgcaacatgcaatgcctctataacaaggtcagctgaaccagttcaaaatatgactgtgcttcactgtctctaagcaacttcagagcaccggatgaaggtgtacatgcatgaaaggtaaca

SEQ ID NO: 381643 - DNA, 342 bp, Zea mays
  unsure (1)..(342): unsure at all n locations
gaccccactgcgttcacgcctcgacgtcgttccgtcccngactcgatgcctgncagggcgggcctaaactgactgcngtagagtcgctccgtgctgtccgaaagtagaccacctgcgtgtgtgcgctcgtacgcgccgccgtcctcgaactcggctcctgcacgcccaaagggacacaatcacgcttcgtgataacctgcataagactagtcagaacatccttcaattagcaaaggatgcgaaagataagctccaaaaggctgctgaagcagacaagagcactgatacaagtgcagacaagaggatagctgatatgaagcttgccaaagattttgctgccac

SEQ ID NO: 381644 - DNA, 293 bp, Zea mays
tccgcagaaagaacgttagcattcatgcataggtcagagggtgaaggtctgggtgttggtctactggcgacatcggcagacccatatgcctttgtatgctttccattccatctcttgcgcttgcccttcttgcaagaagcacccttttcgctttgaatcttccaaggccaccaaagctacccattcaaacttaaaggacctgcaccgagtttcaatagcttctttctttcctcacgtttctccatgtaagatgatacgctaacacccaatgctttgcctgctttggcgcagaa

SEQ ID NO: 381645 - DNA, 289 bp, Zea mays
cgcactctttttctataggcggtgccacaccggggacttgttgggggtggggtagttgtggtggttggtgaggtggggatagtggcaaggtgcaggcgcagaaagttgtgagtcccgtggttgtgcgagccttgaggtgctgctaactgctgatgcaaaaaatgttgaagaacaccatgaggcagactgtcagaaagtgtgctactgtcataagccaaagccaccatccttcttattgtcattttcatctggccaatttgcttggagtaggggtttctcctctcagcca

SEQ ID NO: 381646 - DNA, 327 bp, Zea mays
ggaaccttctttgaaccatctgccttaaccactttgtcctctctctctgctcttgcaggcacggtgtatcgccgacgtgcgcgcggacgccagctcgaccaccttcctcgccgggaccctcagcctcaaggaggagaacgaggtgcacctgatccggctttcgccggcggagagtgagctggtgtgcgatggagtcttctaccaccccaacgagatctgggatctcaaatcatgtcccttcgatcacagggtcttctccacagtctacacatctggtgagggctttggtgcgtcagtttggaagatcccagagcttaatgggcaatc

SEQ ID NO: 381647 - DNA, 320 bp, Zea mays
gaacttagctccggcttgctatacatgaccgccgacggcaggagaaacgcaataagaagcgtggatcggctcgaggcccgcgccggcagcggcactgcgcttgtcccggccttcgaggagggggtgaacatcctggacgatcgggtgggagacggccgggaccgcctagggttcatcatcctcctcaccgacggcgagggcacgaccgtgtccgcgctgagcgagctgcgccgagaggtgatccgacgcgctctcggcaggtaccccgttcacgccttctgcctcggcgcggcgcacgaatccgaggtcctgctccacat

SEQ ID NO: 381648 - DNA, 329 bp, Zea mays
ccgacggcaacggcaatggcaacgacgcggcggggcgtggaagtgagcgcggaccggagggagcgccgcggccagcgtattctacaagtggctcatggtgctcgaaggcgaccaggagcccctggagcaagacgaaaccaggtacgacgaggaattcggtcagggagaagacgtcgagcggcaggtgggaaaggagacggacgagggcacgaacgggccgacgtccgctccgccgccgaacgcgctgctgctcatgcgctgccgctcggcgccggcgactgggctgtccatgtccagaaggaggacgtgtgagcagttggctggcgtgg

SEQ ID NO: 381649 - DNA, 325 bp, Zea mays
gttctagatcgcgagcggccgccctttttttttttttttaagacaaaacatttaatccaaaccaattgctcggagagaaaaaaaaagatgaaaaacatataggttttgaacaggtaatggagaccaagaaaacagagcgactctctgtatccttttcaatcgatagaatatagatttaggaaaactgctctagagtaaaatgaatacagagaacgattttttatgtaaatcactctttaaatggtaatgtagagtaatttatggagtgaaatttagaaagaagctcagaatttgtacggggtgggccaaagaaggaaaagaatct

SEQ ID NO: 381650 - DNA, 326 bp, Zea mays
tgtgagaacaataattctcaacaggaagaagatggtgaaattctggctgtttcaggtcttgtgaatgttacaagcaattgcccaaggattcttgatgcagtggaaccacatgattgtgaagtggagaacatggaaggcaacgtcatttctgaggtcctgagtggaaatggtgctgtttacgagaatggagctaaggattgtgcaacagaagtttgtggaagtaagaatgacaggagggaagaaggtcttttccttctaaatgatcccattataagtcctagtacagatgaagttagcatgactcatagcaagagagacggatgtgg

SEQ ID NO: 381651 - DNA, 110 bp, Zea mays
cccacgcgtccgacggacttgaccactgaaagctaagcacacccctcggccatggcgctcgcgtccacctccgccaccgctcccggtgccgtgctcaagatcccgttcct

SEQ ID NO: 381652 - DNA, 121 bp, Zea mays
acgcccgcgggtactgcaagaacggcagcgcttgccggttcgtgcacggcggcctcaccgacgacgccaccgctaagatggacaccgccaccttggagcagcagtgccaggacatcctgct

SEQ ID NO: 381653 - DNA, 313 bp, Zea mays
actcacctcacggtgttgttcaccggcgatctcgcggcgacgactgcgcgcactcacgtcggcgacgccgtgccggccaaggggcgtgacacactcactctccagatccggtgcttgtgggagcctaacacgccccccgcctccctctccgctgtcgccgagtccctcgccggcttgccccgtcgctggcgaaggcactccggcgtcgacggtcggttttaggcctcccggaggctgcatcccgtgtcgattcgaggtgatttaggggcgatcttggccctaggcgtgagatctcactagctctggcactggt

SEQ ID NO: 381654 - DNA, 113 bp, Zea mays
gtttctggtggggctgataactcagtgaaggttcagttgataagactgttaaactttcaacgtcccaaaatttaacagtcttatcaactgaaccttcactgagttatcagccc

SEQ ID NO: 381655 - DNA, 311 bp, Zea mays
cggacgcgtgggctagttctagatcgcgtaccgccgcccttttttttttttttttcagttcagcatcgatctttcattgctcgcgttgcgcgtttattcgacaatgttaaaattacacaaagcccaacagtccccttccatcaatgaccatacgggcattgcaaattttgcaatcagcagccaatgatgctggtgtgtacaattgactgcatcgaacagcagtgatacgcccatcatgccagcttctccagttaggcaaagctgcttctggccgtcaggcttgttggatgccgctaggccatgtcagattc

SEQ ID NO: 381656 - DNA, 320 bp, Zea mays
gtcatgggaatcaactttatacaaaaaatggtttccacaatacaacctgccaacttttagaattgatcagtcaggctgcttgaaaaaagtgcggattggtgaagagatttgtatggtcaggctggttgcagattacttgttacagtcttacttatacttaggaaccaagactagcttagttggtggagggcatagatattttcccatacaacctaagttcattgcggcaaatctggggacctatttcttcatcttaattcttagtgaaaagccaccaagtccctcctaggttggtcaagtattttttagagtttttactt

SEQ ID NO: 381657 - DNA, 384 bp, Zea mays
actatacgccaagccggtacgcctgccggccacggcccggccttcccggctcgacccacccctccgcccaagcctccgccttactacgactccaaatcattccaatagacggagacacgacaatggtgcagcatctggtaatgacaggcagagctatgatttgacgtccagccaacctgcttacactagtaagccacagttggttcagaattcagcaaacacacaggaggaggagaaagtcacaaaagtctcacctcctcggagaaaggcttatagagaagacaaatctgataggcagagcaactatatgacaaacgataatggtcctgagacaagtcgggttgggtataagacgcagcaggcaaagcagctgcaacagcaaca

SEQ ID NO: 381658 - DNA, 297 bp, Zea mays
attctagatcttagttggccgacttgatcataagccactacccaaagcaaaaaaaagtatattattgaagatgcaactctcccctatattctgagagaagatgaaggatatatcagtgtgtttggtaccctgtagctcctcgtcgacctggtgcaacagcttaagctcaggaagaatgctttacaaatccgaatataagttcagtacgatagtgcaaatagagagcatcagcactaaagaagatagggagagttcaatgcatgatgcttgtcttgttgacactggaagacgcgacta

SEQ ID NO: 381659 - DNA, 290 bp, Zea mays
  unsure (1)..(290): unsure at all n locations
ggcgcacgcgaggagcagcggcacctcctcaagacgtaccagatcacggcgcgcaactggagtcggacctccgggccagggacgccgaggccgagcgcgccaggagctccctcatcgccgagctccgctccgagcgtgncctggaggcgcggctccacccgggccggaccctggcgtcgctggacgagctccacctctcgggcctgaacccgatccacttcctgaccgcgctgcggcacacggtgaagtcgatccggtccttctccaggtcgatgctgagctcgacgcag

SEQ ID NO: 381660 - DNA, 308 bp, Zea mays
cgtacacctgctcgcggtcgtccttaattgcgcacgcctatgttcttgtgtcgacggtcgtcagatccgagtcgacaaggagatgagatgagggagaagttctacagggcgctcatcaccaacggcatgcgcaatgccatcggggacagcggcatcgccgacagcaatgtctttgtcctggcgctttactgtttgaacatcaagatggagagccctgagcccctgatgcgtcgaaggccatggaggcaggtcgcagtggcagacgctcagctgctgacgtggacaagtacttggagaagtattgcaag

SEQ ID NO: 381661 - DNA, 180 bp, Zea mays
gaaacagtcagcgcagggcagggcagcctgacagacagccgcggcggcagcaggtcaatggctcactgctctgtcctctcgtctccagagttcagaacaccgcatcgccatggcgccgccgcagacgactcaccggcgcggcatcttcattggcggggcctggacgtagccgtgcatcgg

SEQ ID NO: 381662 - DNA, 302 bp, Zea mays
acatctcccgtgtcccgccctcctcgccagtcgcctccctgctcctgctgccggcagtggcggtggtgtcgcctctcctcagtcctcactcctcctcaccccagcggaagcgggggcccgactccgtccgacctcgccgtctcggccccgacggcggggagaacccggcagggtgagcccgacgctacgccacgccgcgccaccatgccgctgccgctggccaaggcgaggcgggggtcctccccgcagccgtcaccgcagcacgcgtggtcctcctgcaggtcgcagctggagcaggacgt

SEQ ID NO: 381663 - DNA, 141 bp, Zea mays
gcagagggttcaagggaggggacaagtcgagcagctcacctttctctgctcgagaacgagaggagctcccgtcttttgcttgccgtgccgggcgctgctgaaggttcagctcagtccgatggcgttgagcggcagagctct

SEQ ID NO: 381664 - DNA, 312 bp, Zea mays
tgataataataataataataaccggatcaccccacattcaccaggtgatgcacgtcaaaattctattggtttcctagctgttttaaaacctaggggtggtttctgatggatggcgataaaaccgatcgatgtatggttttgggttgtgcgctgtatttctgatttctggttcagagataatggaggccggcgctgctgcatatgcatccaaactgtttacattgtgtaaaaaccatatatgttttgtttacaacgtggaaggcgagacggatcacaacgtgcaatgcaggctgaccgcctgcgagagcatgt

SEQ ID NO: 381665 - DNA, 295 bp, Zea mays
tagtgacaccagctcagccggacgtgagatgctgctcggctgctctcttcttctccgtaacagaaacgatggacgagaagcgttctgtccattcgagaaataacttgttttcttctgttctaatacaaatgcgctgggcatggattggtgggtgttgcaggggtgtaccagagcacggttaatgcggcgtagggcaaggtgacggtgtccgggctcatggacccggacaccgtcatcaggaagctgcacaatgccgtgaagccggcgcactggtggtgcgccaccgtcaagcctg

SEQ ID NO: 381666 - DNA, 249 bp, Zea mays
  unsure (1)..(249): unsure at all n locations
tgacgagcgagatgttcagcatcgaaacaagctgcttgagcttgtcaccgtggaaatttactacgtcccgggcataatctccctgactgtcgtggtgaggaatatcctcgacccgttgacgccagcatccaggatattcctcaccacaacattcaggagctcatnctcggagtatgcgtgacgaatatccttagttggtggcgtcaatgtcgagaggatggttcctcatcgtgggaccttgtcagatgt

SEQ ID NO: 381667 - DNA, 308 bp, Zea mays
ccaccaccagcagtccagtccgcgagcatccctctgctcgcgcagtgctgttgggtttttttcagcctccatggcatcgtccaaggccttcttcctcgtggccctcaacctggtcctctttacggtggccaacgcctgcagcggcggctgcccgaacgccaacgccgccaaccccgacgccgccgtcgccttcaaccggtggcaagtgccccaagcacgcgcttaagttcgctgcgtgcaccaacgtgctgggcctcgtcagcgccgaagtcggccacccgcccgccgagccgtgctgcagcatcctc

SEQ ID NO: 381668 - DNA, 296 bp, Zea mays
ctccatcgtcgtcgcgttatccttcgcgcggaagccgggcgccgctacctccgaccaagagcccccgattgaagggcgccgcctgtcaattagagcactcgaatgaaggcctgcagagtccgccgcatccgcaggccgtccccctttgtgccctctaggaggtacgcaatccgcggcggctcggcatcggagtcgtcagagttgacggcggcggcgtcggggttctcgtcgtcgctgtcgctggcggcgttgccttccagcagacggttcttgattcccgcctcgacggatggggc

SEQ ID NO: 381669 - DNA, 298 bp, Zea mays
ggcgctgccgatttgccgaagccacggctgctagtagctcctccacctacatgcatccactgttcgtcttcgtcgcctcagaccttgtccttccccccggcccgtatactcagcccaccactagggagagaaagagacatacgcatgccagcaacgcaaggacctcagatcctcagatacgcatcggttggcagcagcggcaaagctgcggcggcgaagagcggtaagtagtagaccgggggggcggtgcggcgtgcacgcggtaataggcggagcccgaacgcagacgcgaggggac

SEQ ID NO: 381670 - DNA, 171 bp, Zea mays
cactgtcgggggaggcccatgtgtgattcgacccatagtgatgggccccgcgaggtcaggtctgattagggccgtgtctgtaatagggtttaccttaatgactgtctgtaacctcccctcgtgggaatattgtggggataaaccgggtactcaaaggtataaacgtctttg

SEQ ID NO: 381671 - DNA, 307 bp, Zea mays
ggaccacaacgacccgccattgtacgcggtctcctactacagcgaccactcgtgcaacagcgccttcctcccgctcttcccctccgagttccagctgcggacaccgtccgggaaggccgtctccatctgcttcgactcctcgtccggagcgccggcgcaagatccggctgccgtggcgtccgtcgccaccaatgccagcagcggctcgccctcttccagcgccgcggcggcgcgcgaggcacaccgccggatatcagttacccgctcgacctgcggtggtctgacacgtacccgtggggcgccggcg

SEQ ID NO: 381672 - DNA, 279 bp, Zea mays
ggaaaggcgggtgcagacactactgatgagccgtaacgtacccgtcagatcccccagatacaataaaacgagtctgtaatgtggcatttgcatcgtattttctgcatcgtgttaaggagaattctgtttttttattcagtgaattgtgaagagtggaaaatatagagcaacaaatagtaagttaaatagtatttcagctacctgcagagcatcatctagctggaccatttccttctcttccagcagcccagtcttgtggaggtttggaatgcaatcgct

SEQ ID NO: 381673 - DNA, 312 bp, Zea mays
gcccaaccggagctcgagccaggcagaagacgcgccgccgtggcagtctcactaccaccaaaagaggcggcgccttctcccgcggcgagcgacggcagcggtgggagacgggaggggagatggtggggtggatgacagcactggtgtacggcgtcggaggcgtggcggtggtcggcctagcagcgctggttgcgctgcaggagcgcctcgtttacgtgcccgtgctcccgggcctggcgcgcgcgtactccatcacgcccacccgccttagcctcatctacgacgatgtctggctccgcgccgcggacggcg

SEQ ID NO: 381674 - DNA, 304 bp, Zea mays
cccacccgtccgctagttctagatcgcgagccgccgccctttttttttttttttttttttttttttttgcacaaaagcttattttcttttctttttctcctcactgcggacctgccagagcctaaaaaggtcaacaaatgtgctggtagcctagtacagtggactactacaaaggatcatacggggaagactagcaaaaagaccacggggcaggcatgatttgcatatttgcattacgtgagcaaaacggtcccggggtgtttggtcaaactgctcgcaaaactatttgcctcacgaaacgaaa

SEQ ID NO: 381675 - DNA, 295 bp, Zea mays
ccaccttcaatgctctcaataaaaatgggggcaagcatgtgcatctgcatgttcgtttatgcgtgtgtccgattctgacctcgcggtgtgaatgtgatgctgcctgtagttttttttttaagagatgctgcatgtagtagtagagacaacggaatggcgttggcacttggcaatgacatggacccatcaactaattgttataggaacaattagatctataccattaacagatccaaactttagatatatatcatggacccacatgtcattgactcatgtggacacacatgtaagt

SEQ ID NO: 381676 - DNA, 300 bp, Zea mays
gcgcacagctccgaaccttctcccacccagccagcgcaggaagctcaccgggaagccggtgcaatcacacaccccacatccccgctacaaatcccagcccccggtcgacatccctctcactcctcccccatgcgcaccggcaccggcaccggtagcggcagctcaccgatccccggaaccgctactataagtacaaagcttccccggcggcggtccacccggccatggcggcagtcggagcgcgcccagtgctgtaccaccaccaccacccccacccggcgccggcgccggcgggcggcg

SEQ ID NO: 381677 - DNA, 111 bp, Zea mays
tgctcatgtactttgttcttttaggaaaagttgctcctgtacttctggatgattcattagattcgggaactggtgtaacattttaggcccagacaatagacatccctctac

SEQ ID NO: 381678 - DNA, 311 bp, Zea mays
gctgtctgtctgcttggtggtgtgttgtccctgggagttttggccaccactgctgttccactgtgccttgcccttgcgtggtggtcatgcagtggggaggtcagaggtggagtatattagttttgttttcccctgcgataagtcctagtaaagccacaaatagcccattgcttgccatgacagttgaagcctagaactgaaacttgtggtgctcccgttgcttccatgacctgctcactgtgcctcaccattcttctatacatgtgttaacttctccagccactcctgtcgcccagttgctttgttcaaga

SEQ ID NO: 381679 - DNA, 133 bp, Zea mays
cagagctcttctgtaacgtggtaagagagcctaccacttggtggtgtagtgcaaatatgatactatagcatcatgtaacagacatcatggttttgtaaatagacgtcatgatattggacacctggattctgat

SEQ ID NO: 381680 - DNA, 128 bp, Zea mays
ggaagggccatcttccgacccacttgtaggcgctgtaacctgtaagcagtcacctctcagccacagacatggtgggcatgagcggcgcctacggtggtgcttgcaatgacgacagcaagagccggctg

SEQ ID NO: 381681 - DNA, 295 bp, Zea mays
cccacgcgtccggcggccgccctttttttttttttttttgcagaagaaaaggacctatgtatattcattccacagttaggtgccaatctaccaaaaagtagaacatccacatcctagacaatcttgtggaaacaaattatctccctcgcggcaaaaccgcctccatctaatacctagcatgccccctcatttgctgtcagtaaaatctgcgtcaatcacatcgcctccgtcacctggcttctcagaagtgcccgctgaaccagcagaagaagcatcagctgcaccaggtcctgcg

SEQ ID NO: 381682 - DNA, 153 bp, Zea mays
atggccggtgcagtggggacagatcgcagacgtgagaggcaatggaacaatcttgaggcgatacgagagatcagtaccagttccagtaccagtgaacaatgagtggctaccgggtctctgctcctacaatctaagagtaatgcgtcttgcgca

SEQ ID NO: 381683 - DNA, 247 bp, Zea mays
gtcttggtgatctgccattctacactgtctctgatgaaggggaggtaactgattccaccaattcagcccaggcggtggtgaacactgtcactgtatcttccaggaggcctgttgttcttgcggatggcattatgcacaagagcgcgtacgagacattacccatagtgtatggcatagacacctgactcgtactattgcaggatctctgctgcgtgtgagactacagcttgtagtgagatcacatcag

SEQ ID NO: 381684 - DNA, 121 bp, Zea mays
cttacacatttgcacatgggtcggatctcctctacactttccatcgctctgctctgctacacgtctgagtccgaccaggcaaaagcaatacagatccatagacaggtaatactgccatttc

SEQ ID NO: 381685 - DNA, 325 bp, Zea mays
gcgcacccccttatccggactccggaaaactcttcagtccccgctccccaccacggtgccaccgttcccgtgcgtcgctgcaccaccaccgtagcctcctcctctcacccggacgcggccgagccagaatggttagcgagcaacaagctcctgctgcggaggtggtggtggagggcagcgatgcggcggcggaggtgcccgtggagagcgaggaggcggcctcgcccaaggcggaggagcaactggatgacgaggcgccggtcgtcgaggacgtcaaggaagacgaggacgaggatgaggacgacgacgacgacgacgacgctga

SEQ ID NO: 381686 - DNA, 323 bp, Zea mays
ggcgaggcgaaggcgcgcacaatcctgcctcgtttccctccaaattcccaaagctctcgcgcgcggtgccatggcggagcgccttgccgcctccctcctccctgccgcctcgccgtccccgtccgcccgccgtgcaacggtcgcagccgcagccgcggcctctttcccctccccatgctccgcccgcgcggggctgcgcctacgctcccgcccgcccctcttctcaaggcggccgggcgcgggtgtggcctgcgggtggtgcggtgcatggcagcgtcggacgcggcgcacttcaaggccgcgcgggaggacatcaaggagct

SEQ ID NO: 381687 - DNA, 101 bp, Zea mays
ttaggagacgcggcgatagttcttggtcggctagatggaaaatgctggccagactcggcggccgctgacggtgatggcatcctcatcgtcgcatgtggcag

SEQ ID NO: 381688 - DNA, 151 bp, Zea mays
cccaatttggatgggagaaactgcttttctcctcttagtacaacagtaacccctgtatctttcatgatatgatttatgtactgatcctatatgataacaaaagaccacaatctccaacatcagaaaagcagtttctcccatccaaattggg

SEQ ID NO: 381689 - DNA, 324 bp, Zea mays
gtcgtctaggccggctgcgtgggtgggatgctcgccggagccgtcgacggggccgccgccaccgccgccgccgccgtgatgctgaagcagcaggcgcacaggttcgacgcctccgagatcatcctccacaccgtcgtctaggccggctgcgtgggtgggatgctcgccggagccgtcgacggggccgcggcgatctatcgatttttatcaccattcattgacggggagagccagagtgtgttgtgctgagaagcctgagatgtgatgtgatgcgcctcccgtttttttattttttaccatgagttcaaatgcatttcggttcgt

SEQ ID NO: 381690 - DNA, 273 bp, Zea mays
gcgagcggccgccctttttttttttttttggaagctggaacagtccaatcaatttattcccactttattaattaattatttatttatttgtaatacacggcagtacaagttgttacagttaagtatacatgccgatgcagcacactagctagcaagagtgaaattgaagctgctgcaggaaagcccgattgggttgaggaaagtggtgaatccaagctgcttcctgtccacgtcgagcagcagcaagtggttctccagctggaaccccacgga

SEQ ID NO: 381691 - DNA, 287 bp, Zea mays
ggtggctgaagtcgggggacatggtttctttctccgcttcctaagattcctcttcttccccccaaccccacctacaccttttgcagcgccgcacctgcacggccgctccatgcgccgccgtatctcagtctcaggtcagcatcaccaaccgcagttccacctcccgaccccagccgcaatctaggaggagggccgccgctctcccctcggccgcatcgcatgctaccgcgaccgaccaccagcagcagcagggcaagatgttccagctttcacggcaacggttcttc

SEQ ID NO: 381692 - DNA, 320 bp, Zea mays
cccacgcgtccgcccacgcgtccgctcacgcgcgagcaaagcaaagcacaagcagcaatggggatctgctgcggcaaggccaaggcggcggcaggggagcccgacgacgacgagggcctgggcttcccatggatgcacgacgacctgttccacagccacctgtgggccagcgccggcgtctccgtgcacaccaagcagggatggaagggcgccaaccaggacgccatgaccgtctgccaggacttcgccggccagaaaggccacatcctctgcggagtgttcgatggccacggccctcgtggccgggaagtcgctcgcca

SEQ ID NO: 381693 - DNA, 241 bp, Zea mays
gtgcgcgtgccgcgtgcggttatctcctcctgtcgccgcctccacttccaccatcccaagtgctccctctcccgtccctcagtccgctactccgctgccggagctgcatcagttaggtcagcggcggcgccgctgatcaggtcaggtggtgccaggccgttcacggaccgagtcctcccgtcctcgtccgacgcgagggcaatcaccacaccggaccgctttccgagcgacacccttcttc

SEQ ID NO: 381694 - DNA, 312 bp, Zea mays
aacccaacgaaatctgcgcgattcataacgaatcgccatagttaatcgaagcattaaactggggaaaacagagggagaagagaagataggggagagacggagacggagacggacggaggaggccatcgcatccgccggctggtcctgatcccggtcccgggtcgtatttgggcgccgccgcacgcagcaggaggaagacatcagcgcggggcgaacgtcgagcccatctccgccgcgggaaccactggcatttaggatggtggacaagaatgatgggtcagagggtattaaattcaacacatcaaacctcat

SEQ ID NO: 381695 - DNA, 308 bp, Zea mays
cacaagctcattaagcaccattcacactcttcttgatatgaaagcgcatgatgatctacaagttctgggttgtcttatgcttgttgacttcctgaatggccaggttgatagcacacatatgtttaatttggaaggcctcataccaaaactttgcaaaattggtcacgaattaagagaagatgatgaagggctccgtcttcgatctgcagctcttcaggctcttgcttctatggtccaatacatgggcgaccactcacacatttcaatggaacttgatgaagttgtctcagtgatcataagctgttacg

SEQ ID NO: 381696 - DNA, 318 bp, Zea mays
gcactctctctctctctctatatatctctctctctctacgcgaaaagaaaagaggaaagtgggatagctcaatctctccttccaccgtctctcagttctcactctagcgctctctctctccacatatatatcagtaggatggatgtgcaaacctagcttgttgctgcctttctagctgagaactgagctgtagctgttggtacggttttcctcctcgctcttcttctccttcttcttgctgctggttgccgggagctgagatcgatcgagagcactgctgttgttcgtgcggccggaggcggcggcgcgcggcagggg

SEQ ID NO: 381697 - DNA, 151 bp, Zea mays
gctcgtgggaccacctccggtgtaacgacgccggacgcgtgaacaacgtgttcatcgacggcgcggacgacgtgcgcgggcaaatcccgtcgcggtgggcggctgacgactcatgtcctacctgtcgctgcgggctgacggccatccgctg

SEQ ID NO: 381698 - DNA, 144 bp, Zea mays
caccactgctcgcactcactccaccgctgcccacttcttgtttgtattgtatccagactccagaggaagccgagagggccaatgaggcaaggcatgagctccccttccgccgctcgggcgctcgtgctcctcctggccctgctc

SEQ ID NO: 381699 - DNA, 146 bp, Zea mays
cggacgcgtgggttctcttagcccgttctgatccagcaagatctactaagagaactggttcagatggcctgcgcttcaaggaaggtgttcacatcaaccgaggacttctcgctctcggcaatgtcataagtgctcttggagatgag

SEQ ID NO: 381700 - DNA, 106 bp, Zea mays
cagatacgcaagagctcctgcctgttgcttccgccacccagctccagctcgagctccatgagttggctatatctgtaggccttgctgctccggtagaccgtggtgg

SEQ ID NO: 381701 - DNA, 142 bp, Zea mays
ctgacgcgtgggctcccttgccgtccacttcttcctccaccacagtcatcagtggcgttatcctcttcgttctcgcctccctggttgttgttggctgggtgtacgctagctgggagtagagaccgagaagtggagctgccat

SEQ ID NO: 381702 - DNA, 104 bp, Zea mays
ctttgctttgagccccccttcggcatctctacctgctttcgtcaccggcatttaatcccgcgtcccattccgaacagcgatcacaaccaccgctgctgcgatct

SEQ ID NO: 381703 - DNA, 306 bp, Zea mays
aaaagattctctctccttttctttttcttctctccacccgcttctctctgttgatttctggccggggttgcctggcttggttctccttctggctgctcgctcgcctgcaaccgccaagggagaggaagcaagaaggattggaccgccgtccgccgggacacctcttcctgatccaaatccaagggacggacagcttaagtaactgtggaatatggaagtcgagcaggccgccgaagtaagcgctccagagacggctgatcttaacgtgcctgctaagacgccggcacacgattatgataaagaaaa

SEQ ID NO: 381704 - DNA, 280 bp, Zea mays
gaaacgatataaaaggtgctgtggagcttcatgagatgaacaacaatcctctcgttcactagcacatgcaggccaggtgcagcgtttgtaagctcttttctttgccaaactctaccaagctctttcgtggacaacacctgaatttgaagcttgcaatttgtaaagcactatgagcgagccctatgtttcagaaggctttctcttaaactctgatttcttgattggagttgttgtttaacattgattcagttcaaccatgcatgaatctaggtaatatata

SEQ ID NO: 381705 - DNA, 131 bp, Zea mays
ttatcgcagtttgcagaaagctagaagacacaagaacatggcgtccaagcgactcctcgtgctagtagctctcctgctcgccgccgttttccttgccgtctcatcagcagctaacgacgaccaagcccaac

SEQ ID NO: 381706 - DNA, 271 bp, Zea mays
tgaagctccacaacatcaacccgtcgtctcgaaagatctccgtcgccgttgccacgccggtcctcgtcctgctggcgttcgccgtcttctcgctctacgacatcaacttcgctgatagttaccagtacatactccgcgcctcctctgcgtcgtcgtcgtcgtctacgagagaccgtagtctggccactaccccttcgtcttcgacggttccggacacgtcgtcgtcgtcgtcgtctccgatcaactcctcctcgtcttcgacgtctccggc

SEQ ID NO: 381707 - DNA, 146 bp, Zea mays
acaaaatttcgcaaagaggcaaaaagcctgatagagctaattgggtaatgcatcagtatcatcatggggaagatgaagacgaaaaggacggggaactatgtagtatctaccatatactgtcagttgccatataacagtatggaaat

SEQ ID NO: 381708 - DNA, 291 bp, Zea mays
cggacgcgtggcggacgcgtgggcggacgcgtgggctggctgaaacgctggaaactgtggcgaccaacttgttgttgttgttgtacttaagattgacaagcttcgtgttggtgagcattgccatgtttggggcatgacttgtttttgttgaaatcaattgacttccaaggggtacactaaatccttgatgcaacataataggatcaccgtactgtcttcctcagagaccttccaacttggttctagttccagcaaccctgtcatggatcatcagaatttacttcccaacaa

SEQ ID NO: 381709 - DNA, 291 bp, Zea mays
tggacggtggacttggtggcgcaggaggagggtttggaggtggtggcggtgctggaggtggcctcggcggcggtgcaggtggtggagttggaggaggtgacggtggcggtggcggtttcggtggtggtcttggaggtggcagcggttctggaataggtggtggctttggaggaggcaaaggttatggtggcggaggctatggggatggtgctgtaactggtggatctgaaggagaaagggagagagacactcgtcccccgtaccgtggcggaggcagacgtggtggttaca

SEQ ID NO: 381710 - DNA, 291 bp, Zea mays
ggcagggaaacggaaaccagactaccgcccccgaaaccgcgacgaccccacacctcgtccgcccctcctcccttcccgactcctactggctatccatcgcccgtctcccccgcgatcaagctgaccagagccggcaaccgatggttgttgttgcggttggatgtggcggaggcggcggctgggggacgtgggaagagctggtgctgggcggcgcagtgctccggcacgtgggcgccgcgtgggccaccgtcgccgaggagctccggacccgttccccgtgcaccttctcgg

SEQ ID NO: 381711 - DNA, 284 bp, Zea mays
aaggatcgaaggatggtgcatcaaaaggacacattagtggcaagaacaaaaacattaaggaggaaccttcgcttgatcatggattttctcgtaaaaacagatgtgattctgatgagtacaatggtaaacctcatgccagttcatgtcagttgcaaaacattcccaacaaaacttcgccactggagagggacaaagggaaagtattgcatatggaagatgaaccatctcagtacaaaagcaaggaaaatggagacctgtttagtgcagattccatggctgtcatg

SEQ ID NO: 381712 - DNA, 270 bp, Zea mays
attagacatgtactagcctctgtagccatacctaagcagcgtctccatgaacttgtctttgaatcgcttttcgtccgacagacgccggatgcacggatgcatggacattgctgtcgacggtaaccgctcggtggagagcaaagtgctgataacgtgttgaatctcagtggagagagacagataatgacaaatgactgaactcattattgcagggaacatcctgatatatatacaggtgaagggttgcgttctcaagggggtgtcccttgg

SEQ ID NO: 381713 - DNA, 301 bp, Zea mays
ggacctgggtttctagatcgcgagcggccgcccttttttttttttttttgatctcgagcacacaaggtgcgcatagtgagcattgacaaacctagaaatccttcatctgctctgctgtcttgaatctctataacagcccgagtgcccttaatcttgtgagcactattgcactattacaggcttcaaaagtcaaaatcaactacaaagaataccagcctcaaggaaaaatataccagaggtgtaaccacttccatcctaatatcagggtaaaaactgcaggcgagcatcaggttatttgagg

SEQ ID NO: 381714 - DNA, 299 bp, Zea mays
gtcccaacaaccgcaatggcgcagcagaggcttctcgctctcctcctggtggcggccctcctcgtgctctcctgctcgcaagggctggtggaagcgcggaaggtgcaggtgcggcgcgcgcccctcggcggcggccgcctgcttccggaggcgatgatggcgtacacgacgacggactacgggccccccactgccaacaccaacacccacggcggcatggtcccgtcgccggacgacccctcctcgccgccgacgcactgaccggccagtcgatctcaccggcaacaactgtcttgttc

SEQ ID NO: 381715 - DNA, 204 bp, Zea mays
tcttcctcccactcgtcctctcttgttgctccaatataattatcttcctcttcgtctctcgcacgtccgatccgtcctcacgtaacactccgatagatggagtcgtccatgtccatgttctcctcctcctcggtcgtcgttaggacatgcgttcctgccgctgtcaagttgcccctcttcccgtcctttactaggcccggttcc

SEQ ID NO: 381716 - DNA, 204 bp, Zea mays
tccgcgtcagagctcaggtctggtctcctccttcgccgccagttgcctcctccagtcgagatccgccgtcgggtgagacactgaccatggaggccatggaggagctatcggagctcgccgagtcgatgcgccaagcggcgtcactcctcgccgacgacgacccctccgacgacgccgcgccgcgtcgtcccaccaactttctca

SEQ ID NO: 381717 - DNA, 320 bp, Zea mays
cccacgcgtccgcgttcccccttccccaccgcctcttcgcccgccggacgcaagccgccgcagctagcccgacgcggactgaggactccaaactggcgccaaccgctgccacagcaactcgccagccgagtcctgaaaccaccgaatgacctaggcttcccacctattcatggcccgctgcctcgtcgcccgccgcttcctcccgcacctccgcctctgtgcgccgcgtctcctgtctgttccaccgccgacgctgggcatgcttatccgcggtgtcggagtgtcgtttccttcggttcaggcgcctcaaggaacccgat

SEQ ID NO: 381718 - DNA, 224 bp, Zea mays
  unsure (1)..(224): unsure at all n locations
ggacgctggtaaaacttagaaagagttctaagttttggtagactgattgttgttttggttattaatgacaacataagattattttaactaatgtatgacttgtagagataatcttatgttgtcattaataaccaaaacaacaaaagattatctctacaaaacatacattagttaaaataatttaagtcaggttaataataataacgattgtttaagtcatcang

SEQ ID NO: 381719 - DNA, 253 bp, Zea mays
gtcaagctccccactgatgcactaagccctttaactgctggtgagatacctttagctctgaaacaagagtggaaatggcacctatttgagaacgtgaagcatttacaccgtgtgaatacgagtttgtctggctacaagatactccagaaactagagcaggaatggcatagcaaccaaatggaaaactcttctttgagtacaaaaaatatcaatgacgcattctctgcaattgcctgggaggaacagagagtaa

SEQ ID NO: 381720 - DNA, 253 bp, Zea mays
aagaggagcagggtctgcagatgtctgagatacctttgacggacagctctccccctaaagatggtcaacagaaacaaccactggctgccatcagtgagcgatcaggagctgactatcagaaaagtgataatgttgaggatggcggcgacggcgtcgaagatgacgacggggatgaatggttggaagaggaagcatgggacccgggaaacacgcaaattccgatagcagatgatgaagacgtgtctttcagtga

SEQ ID NO: 381721 - DNA, 252 bp, Zea mays
ggtaaaccctagcgctctttccaccccctcgctttttttttttgcccgcattcgctgtgacgtgaacgactgaagcgaaaccctgacgttcctacggtacttgagcccgtttggtccagttgcggccattcctgggatgccgcgtatcggcgtatgtggatttattcgctgttccgagttagccctccgtgtggccccacgttttgagcacgcgcccaaggtctcagtggggttcataatccatcagttagg

SEQ ID NO: 381722 - DNA, 241 bp, Zea mays
catggactcgccaccgatccaacccacggtgctctccctgatacttgctctcgtcctagtgttatacttggcgctccggcgcgtcggcggcggcatagaaccagagctacccgccagtcgctggcaccgtgctgcaccagctgttcaacttcggccgcctgatggagtaccaaaccgcgctctcccgcagtaccgtaccttccgcatgcttaccccgacctgcagctacatctacaccgtg

SEQ ID NO: 381723 - DNA, 135 bp, Zea mays
ccacgcgtccgtgaagataggttaaccgccgcttcttcttatcctcagttccaaccccttttccgagctcctcagttctcgtcatcgtcctcgcgctcagtgtcatttgcagttcccggcagcagccatggcgtc

SEQ ID NO: 381724 - DNA, 299 bp, Zea mays
gaaagatggggcttggaacacattctgatattatgtctatgattagagagatgctggatggaatgccccctggacttgaagaagcgcttgtactatcaaaggtgataaaatctattgacgtgcaagtggccgatatacttcggcgtttagtgctggatgctccatccactggacatacacttaagcttctgtcagcttctgattggattgaaatgttccttactttgagcattaagggcataaaagtggcttcgtccatgccatcgtttaatatgtatcttgaggacgtgcaattcatc

SEQ ID NO: 381725 - DNA, 111 bp, Zea mays
cgagaccgtcctccgcccgagtctcgctcgctagctagggtttccaccaatggcggcgcccaccacctcccgcagcggccccggcggtgcgcgcaacatggacgacgagaa

SEQ ID NO: 381726 - DNA, 106 bp, Zea mays
cccacgcgtccggttccttctgccaagcacaacacagaccatcgtctgcacgcccaactgcacccgcagttgtcgggtggcaaaaccgaaccaaaacctagattcg

SEQ ID NO: 381727 - DNA, 113 bp, Zea mays
gtcctctcctgagcaacgagcagtggtgaacgcgggatccaccgcctcatccacccggatgcggcgacgaagattaattgaataactacgataagatgggtcgtggtattagc

SEQ ID NO: 381728 - DNA, 289 bp, Zea mays
acaatatccggttgctgatttgtttaatgcaaggtgaacgcgaaaacagctggatctggggaggggacgggctgccagagctcgtgccatttgctccaaacaagggttgaccggcgcgcaaagcaaatccattcgcgcccccgcagcgttggaacgccaagattgaatagatggtggtggtggagaaagaaaatccattagtgcctggtggcggcggcatctgattctgatttctggggattccctccttttttttagcagatgcgtctggtggcctagagtggaataa

SEQ ID NO: 381729 - DNA, 212 bp, Zea mays
gctgatacctcgcggcgggagtcgggctgagttgatttggcgagtttaggtgtgcggaaggaagaattccgggaagaacagttggttggtctgcgagagttctgtgggcggtagggtgggcggtcggtcgagcgggcgggcgacgtacttgcgacccggaggccgccgtcgctgcttcgggcaagcgatgatcgagcaagtcgtcaacttcg

SEQ ID NO: 381730 - DNA, 294 bp, Zea mays
ggaccgtggctagttctagatcgcgagcggccgccctttttttttttttttagcataactgtcatacaccactagttacataggcaacaaaaatccaaccaacacaagcacaaggtctccaagcaacaaaagaagataacagacacccttcctagttctgaaggccagcctttggcagaatcaagcctcacattgtacagccaaatcatctctgccccctacccaaagtttttttttcacaaatacatcatcacaggaccaaccacggtgaagtgtgcagaccacaaaaatccc

SEQ ID NO: 381731 - DNA, 168 bp, Zea mays
cggacgcgtggtgtgatcccaagttcccaacttcccaagccacctctgcttctcctccgtctcgtcgtcggccatgacacccgccggtggcgccaaacattccccgacgccgcgtagctggtcttcgccttctacctcaccggccatggcttcggccacgccacccgc

SEQ ID NO: 381732 - DNA, 309 bp, Zea mays
tccaactcagcttggaatcacaatttagcgtgggtgattccaaactcgacctgggtggttaatcgctttaccaaccatccgtgagtacaataactacttgcaagacagtatccggatagggaggatggcgtcggcgaagtaagaacagccggcggcgctgtgccaagctgtgctcagctcaaagaaatagccagtctcggtctccagttctcgtctccagtcaagatttccacgtcgtccatggcgctcgtcgtgatgtgtgggcagccgtgcagcggtaaaacagcagccgccgcttgcattgctgtg

SEQ ID NO: 381733 - DNA, 309 bp, Zea mays
ctagttctagatcgcgagctgccgcccttttttttttttttttttggagtcgctactgtatacagttacatattgggagcaatgcaaccctgtccggtgaccgggggttggggagaaaagcagaaatacattcatgagcgatcagagaaacaaaacatggaacgccagcagccgtccgatatttacaggtcatttgcagagaccaggatccactgtctgatactctggtctacatgctggataacgggaacagaaacagcagcaaatagcttgcgggtctcgaaccacaactgcagacttcttccaaat

SEQ ID NO: 381734 - DNA, 118 bp, Zea mays
  unsure (1)..(118): unsure at all n locations
gccattctcggagcacgcctcgagctacgcatgaaggtcgtcgcttgggaacggcatatnggagttgcacatatacattcagaagtggcacggctcagcgatagcaatgtgaagtcaa

SEQ ID NO: 381735 - DNA, 297 bp, Zea mays
ggaagaagtgaagcggaatatagacgccgtcgacaatgggagagagccgcggcagcatcgcctttttcgccacctaccggccaccagtgccgctagacatcttctccgtgcccatcccgccgtcttcgatccgcgacgaggtacacctcacggacggcgtctcctacaactacaactgccgccccatccccaaggacgcgctcaagtccctgctcaagcgccccaagctcgctgccgacggcggcgccaccgacgccgacgtcgacagcggccgcgtctcgggccttctcttcgtct

SEQ ID NO: 381736 - DNA, 146 bp, Zea mays
tgccgtgactctggatcggcggatgcctatgcatgcttttcactagctattattactactactactactcttcctgtcttcctactgtgtgcaccaaagtgagagggacgacatgcatggcgatgacatgtcgtgttatgtgcact

SEQ ID NO: 381737 - DNA, 245 bp, Zea mays
cggaccgtgtgcggacgcgtgggcttttgggtccttcatttttatccatattgtggtacaggtttagttgctacttacctgtcttatatgacatgtgttttgctgttgattctttgatattggggtgcagttttagctcctttatggtaggttgacagaatgacagccaacgctctcatcgttgttgaggtgaagtattccagttgagattgttctttcagcttctcgacactcctattgtgagc

SEQ ID NO: 381738 - DNA, 297 bp, Zea mays
cacacacagacacacgcaaaaacatttccgccccctcccgactgctactgccgctgcctcccccccctttccggccgccttcgctccctcccgacccccttcctcctccgtctagggtttcccgccgccgcctgatccgagtcagatgccgcccgcaacagccatggcgccgccgtcccagcccccgtctaactcaggggatccgctgtacccggagctctggcgcgcctgcgcgagcccgctcgtcaccgtcccccgcgtcggcgacctcgtcttctacttcccccaggggcacat

SEQ ID NO: 381739 - DNA, 296 bp, Zea mays
ccgcgagtcacaggcgcgtctatctcagcttgctgcactgcagtaccctgccgtgccatcatatggtgcgtgagcccggccgagcgagagcagaggagaggcgtggctgctccgaagctcgcgacgctggcgctggccgtgctcgtggcggcgaccgtggtgactcccccggccgcggtgcgcgcagcgagtgtcgtgttccgccgtgtacagcacgctgatgccgtgcgtgccgttcgtccagatgggcagggccgtgccgccccaggcgtgctgctgcgggatcgggagcctgg

SEQ ID NO: 381740 - DNA, 293 bp, Zea mays
cacacaccttgtctctaatcagatatcaaagaagtagccattaagttaacgatggcttccgccgacctcgcagaggcgatcgagcccagcaggaagaagaagagcaacgtcaagtatgcctccatctgcgccatcctcgcctccatggcctccgtcatccttggctacggtacacaacccatcctttcgttgctgtcgaaatgtttctcgttttgctctttccaagagtttgtaggtgaagtttgtgtgtaccgtcaaccaaccaatctatctatgtagatattggggtgatg

SEQ ID NO: 381741 - DNA, 293 bp, Zea mays
ggaccctgaggagcaagatggagggttcacatattactgtacaggagatcacacaatgagctattatggcagcagctcttctggtggacgaagcagtaggagagtcgactatgggaggacatatgtggtgaggccaaagggaaggcacctagccaccattgtgtggctccatggcataggtgacaatggtgctagctggtcccagctcctggattctcttcctctaccaaatatcaagtggatatgccccactgctgcaacccggcctgtcgcggcttttggtggattcccct

SEQ ID NO: 381742 - DNA, 283 bp, Zea mays
gcgccttcagcagcgcgcacgacgtcacccgagcgcgcgacacgccccagcgtccacagttcactgcgcgcgtcgtgcaggtgcaggcaccacaccatggcacctgccgcccctgctgccacggacgcggcgagccccgctgtcaccaagggcggcggcaaggttgcagcacgctccgtcaggctgggcctcaacctcgccgcgcagggccagacccgggccgcgtcgtccttctacgcgttgctggcgatgaacgtggtggccatggccgctggggaaccgg

SEQ ID NO: 381743 - DNA, 299 bp, Zea mays
cccgccgttgccggccccttcctcccgcttaccacctcgccgtcgccacctcttcctcttcctcgtcgccacctcttcctcgtcgccggcgcttgcgcgccccttctccaccccgttgaccgccgcacccacggcctcgccgttgcagcactcgtgcgatccggtcacgagtggagcgcacgagctcattcgctgcttccgcctccccctcttccttgccggagcccgcgcctcctctcctcgccggcgccttcgcctgctcctgcgcccccttctccacgtcgcacccacggcctcgt

SEQ ID NO: 381744 - DNA, 131 bp, Zea mays
cccacgcgtccgcccacgcgtccggtgatagacaagatcctgagcctggagctgatgggcgtggactattggcgctcgctggagcagagcccggcgctccgctacgtcgcgccggtgtccatccacgcggt

SEQ ID NO: 381745 - DNA, 293 bp, Zea mays
ctgtcctctcctctcggccagctgacctcgctgacggatcacacagccacgccgcagcgccgcgtgggtgtctgtctatatccttgtaggtcgttcgcaggtaggtaaccgtaacctagctagctcgtcgggatgatgatgatgagcggtcgagcggccaccgcggggcggtacccgttcacgtcgtcgcagtggcaggagctggagctccagtcgctcatctacaagtgcctggcgtccggcaagcccatcccgtcctacctcatgccaccgctccgtcgcatcctcgactc

SEQ ID NO: 381746 - DNA, 286 bp, Zea mays
ccacgcgtccggaacacacgcgcacaggggacactcgcgcacactgcagtctgcagctagcccgtatcgccaatcgccatgctcgcctacctcctccacgccccagccaccgccgtcgccgtcgccgcggcgccctgtgcctcctatctccgctcactcccgccggcgaagaccccgttcctcccctcgctcccgcgcccggtctcgccgaggcgcgccgccgccgctttcgccttctcccccgccgccgcggctgcccccatcgcggcgtcgctgctccagggcc

SEQ ID NO: 381747 - DNA, 286 bp, Zea mays
gcgaggtccatcgctcctcctctccgtcaccgagaaaatgtcggtctcctccccggccatggcctcgccccctctcgccgcgcccggcactcaccgcggcccctgcttctcgaccctctgccgcttaccgtcgccatcctgctacccgcctctttcggcttcctcctcaccggctatctccaccgtctccgcattcgctgtcctcaaacataagcccagaggtctgggactaaggtgccaggccgcggaggaggcaccaccgccggcgcggggtaagacttcgctc

SEQ ID NO: 381748 - DNA, 306 bp, Zea mays
ccctcctctaacaagaactactcccagccattcagatcctaagttgctgaccttgctgctgcttgttggagatagatttgttggttctaagttcgaagtaccatgagtccaccgagtgtgatggtgtaggttgtgtccccaaactggcccatcacactcggtggactcatggtacttcgaacttagaaccatcgagtccacctgagtgtgatggggcagtttgggacaaacctacaccaaggttttctgttaggggactcgcgctgggaaacccagaagtgagacgatgaggaagtacttcgagca

SEQ ID NO: 381749 - DNA, 310 bp, Zea mays
cccacgcgtcctgtccgtgggcgcgggtgctgcacctgcacgatgcgtgctagtggggccgggcggtgcgggcgcgcgcggtagcgccggcgctggatgcagctgcgtgggcgtgcctcgccatgtcggtcatgctcgcgctcgaggtgtgctacatgaccgtctccagcttcgtcgccgtcaacctgctgcgccggaccccacagcggcggtacagctgggagcccatgccctccgggaccgggaccgggaccgcgcggggggacgacgaggaggcagcggtgggcgatggaggcggcgaggcgtaccc

SEQ ID NO: 381750 - DNA, 310 bp, Zea mays
gccagaattgcagccacctttagagaagaaatagaaaggattatcataaaagtggctgcaattctggcatcttcaacgtcaaattgaggccttacaatattcagttcatgatctgcctctctggatgcaaacccacgcgtccgccacgcgtccgcggacgctgggcggacgcgtggcggacgcgtggctagttctagatcgcgagcggccgccctttttttttttttttttaggacaatccaccaacatattgccaaaccgggttaacagaattataaacacaaaatccctgatcaatacctcttgcgta

SEQ ID NO: 381751 - DNA, 304 bp, Zea mays
gcacatcgtatcatggctataggttctgtagccgcggctggtggccaacaagctcttccggaagacctcgggcagccacgctttcgtcgccgacttcccggccgccgatgacgatgacgatatcgtcattggaacggatgccgacggcagcggcgggtgcagccccgacgcggacgccagccgatgcgtgaagctggcacagccccacgagcagaaaaagatcctaaagtacaggctgatcgcgatcacgtggaacgtgggcagcgtggcgccaccggacgggctggaactgtcggactggctt

SEQ ID NO: 381752 - DNA, 311 bp, Zea mays
agcaactcacacacagtaggagaggagaggaaagaacccagcgatagatcagagtcggagagaaaaatttgcctcctcccatcggaatctagctaattattttccagtccttctcccccatgtaagtctccctctcccatccccgtcgcctgcacctaccggaagcgaaccttctacagttcaggtccatatccgggtcgccgccgtcggctagctctaggcggacatggtggccgcttgccagagcacggcctccacctacgcgcttctgctgctcttgctgtttgccgctgcggtcgccgtctcttctt

SEQ ID NO: 381753 - DNA, 302 bp, Zea mays
gattggagacttatccgcaacccctcctccccacttcagcttcagcgcaagcatcttcccgccacatgctcaaaagcaatcaagcgactcctcccacagtcccacttccactcccacccacccacacgcacggacgcattatgcagcaccatgtggtcggcagcaacggcggctgcggcgcgcgcggtgtccgtgtccccagtcccggatccttaactcctgcggccggcgcggcgggtcgcggggcggccgggggtcggtgtcggtgcgcaccggatgtgggacttcgttggcggcgacct

SEQ ID NO: 381754 - DNA, 105 bp, Zea mays
acttatcccaataggatgtaccctagctcccgaccgtacacccagtatgggaattcaataaaaactggccttccctacgggagcaacggttatgattccaggata

SEQ ID NO: 381755 - DNA, 154 bp, Zea mays
gttctagatcgcgagctgccgccctttttttttttttgttttttttttctttcactacccatgctgattattctatcgcaacggtatcacacgcacacttggcatgccaagaggcgctctgcagtttgcaactatggaatggtagcacaaaaga

SEQ ID NO: 381756 - DNA, 305 bp, Zea mays
cccacgcgtccgcacaaaagcaaatcagcgaacaatcttcaaaaatcaagagtggtagcaatgggaagaatgaggagagaatctccagagaaaagcacactgaaagcaagtcagtacactgaactgccacaaccagttctccttcgtctaccaccgctaccacaaccgccgccgccaccgcaacccctgccgcctgctgtaccacctccattgcctccatcaccagaacctgagccacctggagttctagccgaggatatgatagaagacatggatatctgtgacaccccacctcacactagtgc

SEQ ID NO: 381757 - DNA, 102 bp, Zea mays
ggcccagcctcaaccgcgcactgaagctgcgggacgacgactgcgcctggtggatgtcgccggcagtgccggtaaaggacttgaccatcgcaccaccggcac

SEQ ID NO: 381758 - DNA, 130 bp, Zea mays
cccacgcgtccgggcgaagcgacgaaaccctcgccagtccccaactcggacctcagtcaagcggcgtgaaggagggagagttcgaggaccgaagcggcgtccggcgagattaagcttaacgtcaagaccc

SEQ ID NO: 381759 - DNA, 299 bp, Zea mays
cccattcagtcagttaccctcaatggccgacgaccccctggactcgtccccgtcggcgtccgccgccgccgctgctggcggagtctcctccggcccccgcccagcgctccggccccggcgggaggcatttgagtacgggctcctgccgatccccaagctggtcttcccagaaggcgcgctgacgcaaaccctatcccagctgaaggagaggctcgcgccgggggggccgcgggtgggcgccgcagcgctcgctgaggcgctgcagatccctgccgagcaggcagcgctggcgctcggaa

SEQ ID NO: 381760 - DNA, 244 bp, Zea mays
cgctgctgctggtgtgaaatttgtgaccagggatctccggtgcctcctcggcttctcgctgctggtctggttctggatgcactggaaacatcaacgagaccgagagctgtttaactagggatgtgcattctcgaagtgcttgtattcgttggaaacctctagagctgctgttgtttatttggattcacatcttttgtcctaaaaaaaaaaagatgtgataggtggttggagaaaaaaagggcgg

SEQ ID NO: 381761 - DNA, 326 bp, Zea mays
actagttctagatcgcgagctgccgccctttttttttttttttttttttttttttttttttttttttttttttttttttttgataacccatggtgtatttctctctttgatgaaaacatatcagataggacatgtagtttgaaggtacatgtggcccacaatatttggaagtttcacctatccaaagttatggcctatgggctatggctgacagatcaatgatgggtcacatccctgacgggtaaataaggcaatcaaattatcagaagcggatccatccattttgactttgaagtgccaagttgtgttcagtaaatttgcctaaa

SEQ ID NO: 381762 - DNA, 314 bp, Zea mays
accataaacccctcctcaaccctcactctctcgctccctgtgcgcgcggcacacaccactcttctccttgttagcagagggctagctagctcatcccccacagtccttatgctgaatctagcaccatttgagacgccgcctcttggaaggcaggagagaccaactaataccatcgtcaccgcaacagcggccatcgccaggggaaacgaagaaagctccagcaacacttgcctccagcacggacatctggacctcagccttggcatctccttgtctcatggcggcggcggcggcggcggcagctgcgacgcgtc

SEQ ID NO: 381763 - DNA, 200 bp, Zea mays
ctgactcgttggacctagtccatcttggcgttgcaagaacagcaagtggttgcccatcggctgtcgcttcctgagttagcatcagacaccagcatgacagataagatcctgatccagcatctagcaacgatgataatttcaaaacaccaggacttactaaagataacggtctcgatgatgaagggaaaggagagagtagt

SEQ ID NO: 381764 - DNA, 307 bp, Zea mays
gcttaagccttaggtgcttcatgggcgatgaagcagatggtgttccaggaatccagcacttagttcctggatttggcagaaagaccgcagtaaaactactgcaaaaacatggttcgttagaaaacttgctaaacacggctgcaatcagaactgtcggcagaggttatgcccaggatgctctcactaagcatgcagattacttacggaaaaattaccaagttcttagcctgaagagggatgtaaatgttcagtttgacgacagttggttatccccgaggaacacatgcagtgacgccaatgttctagc

SEQ ID NO: 381765 - DNA, 299 bp, Zea mays
cccacgcgtccgctggtctccaccctcttcacccgcatctgcactgcagcacacgcgccgccgaagcgctctgcccacctcgttcccctccagtggccgccggcgcagttcagcagtccatcctcctgacgccacctgcaacggcgccaggcgatgatccattccaactcgcgtatgttatatttcgtaggggcattggattggaccgcactagcaactttttcttcatggagaaagtggacatgatcatagctcgtgcatggcgaaggttccttgagaagacaagactgcaaaagcta

SEQ ID NO: 381766 - DNA, 295 bp, Zea mays
aagtgggctctagaagcattcatcattgcaggagcaaaaaaatattcaggtgtgtggctcatcactagatgtggagcattgatccaaggggactatgatatcaacgattttaatctttgcatcaccattgttatactctatggtgtgctcttccgtcttgttgcgtttcttagcatgttaaagttgaaatagatgatccagtgtcgtcacaacctgttcaagaacattgtctattctccaatttgtgaagtgtgtaatattgaagatgagacttctgatcaaatcatcttccgcc

SEQ ID NO: 381767 - DNA, 294 bp, Zea mays
cccgttcgagcgcccaccgggcgtcgcgcatgggccacccgcacccaggcgctggcacaggggagtgaggtgtggaggtcgagcaatggcgggcagccttcgccggcccgtggatctgtaggcgcgcgcgggagggtgttggctggtgcgcgatgggatctgggagcagcaaggccaccacctcctcctcctcgcccacggcggcggaggagcctgctgccactgccgagctcctcctgcttccgtggctccacgacgccgtgcgaaggcgacgctgccgcagcagcggtggac

SEQ ID NO: 381768 - DNA, 292 bp, Zea mays
ctccctccccctttctctctcttctctctctaccgccccaggcccccccgatctcctcctcccactccgatcgcccgaccgatcgccgagcttccctgttccctccccgcccccgcgacgccgcgacgccatggagccgccgcacgctgagcaggccgtcgccgctgtagcagcaggaggagagggtggcactgcaagcccggacaccggcctcgaaggtgctgcctgcttaacgtttttttgtttcgttcagatctccggccgggcgtacagccgcgcggatctctggtaa

SEQ ID NO: 381769 - DNA, 280 bp, Zea mays
caaggttccaggatgtacagtgaggtagctatagatctaatcaaacgtcaggtatgagtcggatcaaggtcgagtcgtggattgtcggtacggtccgtacccgacctgtgttagtgttgggttgggttgggttcgtccgtgcttctatgtcagagttcggttgggattttttcgagttgggtcgggatttttgactttgggttagaatttttttggaaccgattgggttttggatcaaaaattatatccggttcgacctgtagattgttggggtcaaaaa

SEQ ID NO: 381770 - DNA, 268 bp, Zea mays
atcatagtagtggaagcattcatcctcatacaaagagtggttccgttgctccaactgaagggttctctaatgggaatagccttggaactagcccttccaatgtgttccatggagcaaagtggcacaaatctgataaaaaaatggaagcacgcaaggttacaaagtctgattctcgagctaaccgctccacagcaagtaactcttctcctgagacaaagctttccaggaaatcactggacatatcaagtgttgcctcagatttgaagac

SEQ ID NO: 381771 - DNA, 306 bp, Zea mays
agccaagccaagcagcaaccggagcttcgtcgtctgcgccgagctacgcttcctactcagattacctgtacaactctccattttcgcatttcactgcccctactcccagtagctactcttcgtcgtccccactgatgatcacttacgacgacgcaccagtcgcgccgccgcccatggtcgtcagttctgagcataacctagatgaccagctgctccctgctctccccttgcagcctctaggtctaaaccttagcttccagggattcaatagttgtagctccgccgtcgccggtgacgacaccaagc

SEQ ID NO: 381772 - DNA, 296 bp, Zea mays
gcatgtcttaaaaccatagtttttttcccgaaaactgggatgccgtcatgtaatgacagaaataggactgccattcttgtggttgatgtataatgtaaaacctatgcataatttctagtgtggttgtacatttcttttgtaatactactcactatatgtattaaacttctacgagttggtccagcaaatgctaaaatttcttggtgcattacataaaacctgcttgtggattctctgttactattttttcccaagtcatcatctttcatattactgcggtaatgaccttttgtgtt

SEQ ID NO: 381773 - DNA, 122 bp, Zea mays
attcctttactgttcacggattcctgtatttgcaatcgcatcattcgggaaccaatctttgccaaggcagaggtataactgtattcaatgattaaatatactgagtagatataatatggttc

SEQ ID NO: 381774 - DNA, 278 bp, Zea mays
tggaaacttgcattgtatgcatgagttgaagattaaagtgtcattggaagaatggatctcacgggaatagttgtcagtagcatatttgaaatgaaaaattggatcgacaagcttgggggaggatcaagtatagaatcttaaggtgttctatggtctaatatttatcaggcagtctttatcatgagctttgctagttgctgaacatgcagtaagactgcatggttgatatggtggtgtttgttgaatataatataagtgaatttaccacctcttcatat

SEQ ID NO: 381775 - DNA, 157 bp, Zea mays
agcaggatcataaatttctctagggacttggcatatccgcgagtcaacagtcattagttggaggcttcgtgatggcgggcgcgaaggcggatgtagacgcagaaacgggagatagcatgcgggtcggcagtagcggcggcggcctctttagcgagca

SEQ ID NO: 381776 - DNA, 221 bp, Zea mays
ctgcatctccctcgctctcgtcgcctcgttcgcatcgcatccggcccgccccgccccgagcagagcgcagctcgatccggagctgggatggcggacgcgaacagcagcagcagcagcagcagcagccacagcaggcggcagctgcagccaccggcgtgtggaagacggtcaagccttcgttaaggcggcgctctggatgctgcgacctcgtcatcagctat

SEQ ID NO: 381777 - DNA, 296 bp, Zea mays
cagagcggattatggaaatggaatgacagggcatgcacggcattggtgacacggtggtggtgacccccattggtttcctcggcggcgaactaaacaacttcgttcgtagtctcttctttcgatccattggtttctcaagcgaggcggcagcacggcttcagtcaggtttctcaagcgccccaaccaaggatttcatttcaggtttcaaggaaatgttttctgtttttttcctcctagtattctttgctgcaatatgtaactggagaaattgaacgagagtcctcatcagtcagagg

SEQ ID NO: 381778 - DNA, 290 bp, Zea mays
ctcctccccgcggagaagctgctcgaggagatccgcgacgtcgggggcgcggcctcgcgcgtggtaccgcagcgcctccgacgagggcctgctcgacgctgacccgatggaatccatcgatcacgaaatggacggcgccgaccgcgtcgcctccgacgctggcccaatctccggcgccgagcagcagtggaagaagactaggctcatctctatgatggaagaggtttgcaagcggtaccggctgtactaccagcaggttcacacggtgatcaactcgttcgagacggtcg

SEQ ID NO: 381779 - DNA, 315 bp, Zea mays
cacagtacagaactacggagatacttaaaagaaatataaatcgctatcacaaacagatcccatccacggtaactaacagtatagttactcagctgctatgtgtgaatgtacctggaaaaacgtccggttcaaaacatttcattaattcatttaatcgcactgttctttttaaggaaatacttctaaggtgacaagagtcttagcaatatacttgtagggtgcaccaacacaaggcacaaataggctgaggaaggtacaatcaagttctcttcactgggcacaacttgagtagcccaggtggaggaatagacaccg

SEQ ID NO: 381780 - DNA, 130 bp, Zea mays
  unsure (1)..(130): unsure at all n locations
aggcgtgtaccggtctacgcgccgtacacgcctctacagatccaggcgctcttctagtgcagcgccgcctctcgtcctcccggcgtcatcatcgncggcctgatctccgcaggacggcgtgtggcggaga

SEQ ID NO: 381781 - DNA, 276 bp, Zea mays
ctcgaacgtgatgaccgacgtaattgtaccattatctgcaaccttggcaacagaggaacttttgaatccctcgaaagtcactctaagtttatcgcgctcttacatgaccattcatacactgtttatggtatgggctatactgcaacactaaacgctatggattgatatcaggatcctattcaaaccttgatgccgaccacatgaaactcaaggagtttttttcatccacagctcaataagattttacccgaggaacattttgccttaaatcggttg

SEQ ID NO: 381782 - DNA, 294 bp, Zea mays
caatggtggtgctgtctgctgtgtgtatatttagtttttagtggttacggagagccggttgatggacttcagttaaacatccatactgttctgctaccattccacattcctccttgacaaatgtttgtgcaggctaaacataaaattgagtcagcaggcggccctttgaacatgcaactcaaccaagtccctaagatgcttttcatcctccggaaaaactgggcccctgctgcattttgtgtatccttcaagctcgaaacagatcctaacattctcctacagaaggcagagatg

SEQ ID NO: 381783 - DNA, 153 bp, Zea mays
aaagaagcctccaggacctgcgcgaaggagaacgcgacggtgtattcgcacgcgcgggtagcctagcctagcaagcaatagggagcaagcctagactagccgaaagagcagagcgaacaaagggacggagggacagctccgagatccagctcc

SEQ ID NO: 381784 - DNA, 209 bp, Zea mays
atccgggtggacgctctcctcctccttcctcttcgtgatggttgtacctctacgagcatgattttttctattagccgagtccatttttttggtcttttctgtttttctggctatttgtttggttttctgatggatcgattgctctccgatgatgattaaaaattactttcgttcttctgaagttcgcaatgtggaagaacaatttggag

SEQ ID NO: 381785 - DNA, 221 bp, Zea mays
  unsure (1)..(221): unsure at all n locations
cggcacacgcctcacttttccctttccgcgcaccatcaccatagccacaaatagcaaccaaggcagtaaacctagccaagccaaccgacggcggcgagagtatatatacacacacacctgacgcctctacagcagctgggatcaacgcggcagcttagtgacgacgacgacactactgtctcagcgntgattaatggacagtaacagatccatggcgacga

SEQ ID NO: 381786 - DNA, 200 bp, Zea mays
caagcatggaaacactaccaaatagctcagtaaataatactgagcttaaccaggaaaatgagaagaccatgtatgctagtaagtatgaagaagcacgggatatttttgtttacagagaagatgtactgagcttgaagtccaaggaggatgtccgtggtgtagtattggaggtagctggggaatatgattatgatggtagc

SEQ ID NO: 381787 - DNA, 152 bp, Zea mays
acgcgctctgtcctgcctatctcgcagtgtttggattcagcgtactacgtgtctggattcagcgtactacgtgtcctattttctgcttgccagcgtgtcctcttggctcgcttggcccgaattcccatcgcgtcatcgatcttgccaagtat

SEQ ID NO: 381788 - DNA, 152 bp, Zea mays
ggagatcacacacccaggcgcgcccaaagcttccttccgcttccagctcggcgtccagctccagcaatgcagctcccacccccagcttctctctccccatggccacggcgccctggttctctgttctgcgcgccggctcccagcctggcgtt

SEQ ID NO: 381789 - DNA, 147 bp, Zea mays
agcaccaggccgtatatcatctcgcagcaagcttgctacctgagcctctgttccatgtcgacaccgtctgcaccggcctgtcccaagcttcagtagtgagtcttgtagagcggttgtatcgtccgagcgttgatctgaaccagcgca

SEQ ID NO: 381790 - DNA, 303 bp, Zea mays
cttcaagagacaagagtggagggcgccgaagagcagcgcaggggggagatgaacagcggcgtggacacgcaggcgcgggcgttcgcggacgaggtgcgcggtagtttggagacgaaggactggatgctggacctcggccacccgctcctgaaccgcgtcgccgagagcttcgccaaggccgcgggggtaaggcagcacgccgctcccgaacaactcaggtcggccggttccttgcacaacagcctcctgatcccgtgtgtctccgcagatcggcgcagtgcaggcggtcgccagggaatcgta

SEQ ID NO: 381791 - DNA, 202 bp, Zea mays
gcttcaacaccgacaccgtccacgaccacgcgtcctacgccttgaacaactacccgcctcaaccagctgcgacttccgtggtacgaccaccatcaccaattgtaggaggaagaggcttacgcggacgcatcgatgcttgtaggaaagctggagcaaaaggtggtctgcacatttggaagcatggtgtttgcaagcatccttc

SEQ ID NO: 381792 - DNA, 200 bp, Zea mays
ccgtgacgcattcctagccgctccgctgctacagctcgtacaggacatttgtagctacaacctaatacggcgatactacccagtttattcccagctgcgtagaaatacgaaaagttatctataacatagggcatgccataacatagtagttgatttcacgggtttaaatatataaaaaaagaaagtcatgaattgggatc

SEQ ID NO: 381793 - DNA, 123 bp, Zea mays
  unsure (1)..(123): unsure at all n locations
gtacaatgtcatggtgattgatcggcttggtncaagtctggaggacttatttaacgagggcagcagnaagttcgcccttangacagtacgaatgcttgctgatcagatgatcagcagagtaga

SEQ ID NO: 381794 - DNA, 205 bp, Zea mays
aggccgacgacctaatccccttcccacccataggcagcgagggcgggcaagtaccgggagaggtgcgagcgccaccaccgcggggacaggtgggagaagcagcgctgcctgatggactgcaagaaccgggagcgggaggaggagggcggcagcggcggccggcgcggcgaggacgaggaggacagcggcgaccgctgcccttgcg

SEQ ID NO: 381795 - DNA, 209 bp, Zea mays
  unsure (1)..(209): unsure at all n locations
ggatatatttgacttgtgtacctattagatcttgaattaactattgtgatcatatattgatatgaactcccaagttttctatgattctcggtattggtcgaaatgacaaagtattagacaatacttgagtacncactgaatatgctgtagaacttaccacttctttttagttgcgtgcaaagtatggcagattatcattgtcctcaaat

SEQ ID NO: 381796 - DNA, 198 bp, Zea mays
  unsure (1)..(198): unsure at all n locations
gaacgatgtgttcaatttactgttggaataaatcaaaatccatacacacctgcaaactaaacaagcatagaaaagtttgcacacacggcgccaaaccatcattcaccagcagcagccgcacccatacgggctgcggcaagacccgctgcggcggatgcgaggtctggacgtgaaatcagcgctccaagncagcacgcg

SEQ ID NO: 381797 - DNA, 146 bp, Zea mays
acggcccgctcgtctccgccgtgcccacgccaagaagcctgcgcctggggagccaccagcagcagcacccgccggctctgaagctcagttcctctcaggtactgccaatgggctgtttccgtcaagtctccctcttgatttggcac

SEQ ID NO: 381798 - DNA, 304 bp, Zea mays
aagactcgtgacctttgccagaaggtggcagactggcagttgcttcttctgtcgtgcattggtctggggacttgataacagcaccgagaattgtatgaacttttgagggtacactgtataaggaaatctgtactgttgtagctggattttggaagctgtttattaaccattcgcccttgtaggcaggcaatacccttcagtttgggacacacctttgtattgtaggctgtattatcgttgttggcttttaatgttaaaaaaaacctttgtattggatgcaaaaaaaaaaaaaaagggcggccgc

SEQ ID NO: 381799 - DNA, 149 bp, Zea mays
caagcatcggtacggcactgagcatcggtgaggcaggcgacgcgcgccgccgatgaacaggcgcctcacctgggagagacagggagggtagccgagcccgagatggccgccgctaggtaggacgacgaagcggcacggccgcttcttct

SEQ ID NO: 381800 - DNA, 142 bp, Zea mays
cttttgtctacaaatgataaaacaatagaataccggaaggtccaagagaagaaagtaaaacgatttgcagtcatgaatttggacagttcccaaagtgcaggaagtagtaccactgctattgcaagtaccagtagttctaagg

SEQ ID NO: 381801 - DNA, 138 bp, Zea mays
cgggaatagtgctactggggctgctgatggttcagatcaagtagaatgctcaaataatatcagtgaatgtgaaaagcttgaggcagtgtgtgactctcttgttgaaatttgttctgagatatctgcggaaacctgtaa

SEQ ID NO: 381802 - DNA, 274 bp, Zea mays
tgaaacagttgcagcgacaagcgttttacgacattatgcagctgaaggagatgcaagagaaagttgaaagagtgatcacgttgttacaaagctaccaaagtaggtccgttcgcagaagaaagcactcgggtcaagggcgttgtcaatatcgcaggctcgctcccaagagacatctcagaagcagaatcttgtatcagttcacggtttgtgtgtgaagctacctgtcagaagaaggattccctgtttgccgagctcagcaccgaacatagatacg

SEQ ID NO: 381803 - DNA, 140 bp, Zea mays
cacgcaatcagtagctgcggccccaaaacgaccacttctttgctgggagtccttttggattcagtagtgaaccatgtaactttcgagattttggatacaaatcggaaaaatccatttatattgtttttacatcgacttgc

SEQ ID NO: 381804 - DNA, 195 bp, Zea mays
cgcgcaggatgttcgcggcgtccgagtggctgcgccaggagctgcaggagcgggacgacctcgggcgcggcccgcccgtaccgccgcggcgggtggtggccggcagggcgctcgcggcagccaacctcgccttctgggggctcaacctcttcgccttcctgctgcccttctacctgcccagggcactgatgagat

SEQ ID NO: 381805 - DNA, 219 bp, Zea mays
ggcatttccggttcgattccacctgagcttggagggatcgagatgcttgtcacactcgacctcgcgggccttgctctcacaggagagattccagggtcgcttagccagttacgattcttgcttgaactgcacatcaaaggaacagttgaacaagagcagtgtgatgcaggagcagctcatctaacccacgagttctctcctacatatatcagcagtgca

SEQ ID NO: 381806 - DNA, 194 bp, Zea mays
  unsure (1)..(194): unsure at all n locations
gttctagatcgcgagcagccgcccttttgtttttgtttttttgttttttgtaaacaaacagntgccatataggtttactgtttacacaatcggacagcttatattaattacacgtctatcactgtcaagcaagaatgaatgtacacttgatgacaatcattatcaaatatttctaacggggtgtcttgtctagc

SEQ ID NO: 381807 - DNA, 219 bp, Zea mays
tgcatcgtcttcggcgatggagaggggacacgggacgacccgaggaggacgacgacggatcgtggttggaagttccctctctgccattgatggcgccagactcccttggttggttggaccggcaatcaatgccctggctgctgctacggctgctgagtgatgatcatctagcgagatagctagtgcaactgccacggcgcattcatacgcgcttcccct

SEQ ID NO: 381808 - DNA, 182 bp, Zea mays
aggcagcagcacggcagccatggcgtcgagttcgaccctggatttggcgatgggccccggcgccctcctcccccgcagcgcggtcccgtacgcctccttcgctccaggaaggggaaggagcgcgagcgcaacgaggagcaggaatctggcgctctccgcttcctcctccaacggtgcagcag

SEQ ID NO: 381809 - DNA, 152 bp, Zea mays
gtccgctccgtggatgaaatgtatcggatgtccaccaaaacatcaaacaacttaagtcttgtatcacgtaattaagttgtttgatgtctcgggttagatgtacgccccgtggatgaaatgtaaaggctgtccaccaaaacatgcttgtttcc

SEQ ID NO: 381810 - DNA, 181 bp, Zea mays
  unsure (1)..(181): unsure at all n locations
cggctcgagcggggacctgtagtactgcaataggcagtacacaattgctgatcgctggattgatgtagcactcattcgatggcaatttacttnactcgttgtcctcatcgtcgtcaactgcactaccggatgagttgagttggttgagcctttcaatgatgctggcctacctctgctcata

SEQ ID NO: 381811 - DNA, 183 bp, Zea mays
ctaccattcagagtcaggttggcatacatttgtagaagttattactcgagcattatgggcttgaagctgacgaagcggcggtcacattttttgtttgtctggttccagtggctttcgatgtgtacataaaatattgggtatgcctttttgtctaaattaacagggataaacaataatttttaa

SEQ ID NO: 381812 - DNA, 133 bp, Zea mays
caggctcgcagcagaggatcgcagtgtccagatcaggccctctaacgtacagataggaggccgcatgtaatgtaaacactagagcagtagaacttgctatgcgttgtgctgtaagtaaaacccattaatagct

SEQ ID NO: 381813 - DNA, 162 bp, Zea mays
tgtcgaaaccgcaggcagcagcactcgagagcgcaccaggaggcggcgctccgacttagagtttcacataggccgctgcgtccatatactcctccccgcagtcgacgtcgcccactggagacgacccggcagctgcgactgatcccgacctaccgaggctca

SEQ ID NO: 381814 - DNA, 167 bp, Zea mays
acccaccccatctccatggctacctccgccctcgctgctctgtccggggcaccactccgggggttccttggcgcgccaatccgggccgtggcgtcgtcggcgtcggcagcccccgcggcggcggccaagaccatcgcggtcggggaccggctccctgacgcgacgct

SEQ ID NO: 381815 - DNA, 100 bp, Zea mays
gtactagggcctctcagcagcaagcttatcctgatccagctaatctctatgccttccaacaagctggagcatcatatgcacagatggggagggctgcaat

SEQ ID NO: 381816 - DNA, 214 bp, Zea mays
gttaatcctaggcaggcaaagctcgttttttcttgtgcgccggttgattaggctctctgtttgcggagtcttgctctccctctggtcggttttcgttgatccctcctgcattgatttgctccggctcagatccgattctctaggaagagagaccaaagtatcaagtggaacaacagaattttaggtactgccgtgccactcaacaagggaagag

SEQ ID NO: 381817 - DNA, 153 bp, Zea mays
  unsure (1)..(153): unsure at all n locations
tatttgttattataaagtagaactatcaaattaaaaacggaggtattaggacgaagtcganngttataaacagtaggagtagatgtattcaccacaccgattattgacggaagaagcanaactcagtgctagacgtatcgacatgaactgatc

SEQ ID NO: 381818 - DNA, 174 bp, Zea mays
caggcaggtacgtcgcgtcgataccaggtcttcgagaggagcggaggaggatggcggcgagtacggaggagaggcgagtacagctgtagcgtttcgcttcttgcccgtagcggcggcggtgccacctcgaacgctgctccctgttctggggcttacagcggatcctgatctgag

SEQ ID NO: 381819 - DNA, 174 bp, Zea mays
cacccacacccttgccttgagcagggggttcgttcaggaagctcatcacgagagcacgcgaccgcaactacaaccaacccaaaaagctgcagctaatccatccatctcacccgaaacaatcgatcccctcttatagacttcgcctgcctccaacccttaatcttcagctatgga

SEQ ID NO: 381820 - DNA, 172 bp, Zea mays
ctcagagaggcttgggatgatttggcctgaaccaccattggataagttggcccagtgtcttccagacagcacaaagtcatttgcttcaggaaaggttttaagatcatatttgtctttcaagtcggtaaatggagattctggtccatttgctgaggacaattcagttcctgat

SEQ ID NO: 381821 - DNA, 155 bp, Zea mays
caattctcacacgcacacagccaaggagcatacacataggcagcaggcagcggctcggtacaacaccaccaccgaacaaccaagaatccacaaccacgactgagctgacggctcggtcaaccatgagcgtacccggctccaaccatccccatccg

SEQ ID NO: 381822 - DNA, 163 bp, Zea mays
gccatagaccacaataggggcgtggggatctaggtgttttgcaggtgttaaccatccccacagcgacctagtttgcttacagccagtacatcatgtgaccatggtgaccatgcaacccgagtactcttctcaccgtggccagaaaacgaagaagagatcgaag

SEQ ID NO: 381823 - DNA, 158 bp, Zea mays
ccaaattcacgcgagctccaatctgtgtcggtctccgtcgtcgtctctctcctctcggccgccggcacgatgaggcggttgctcggccacctacacccccatgcccagagcctcttcgcttccctgcctcgcaaaccgtccatcgccaccaagctccc

SEQ ID NO: 381824 - DNA, 101 bp, Zea mays
ggaatacagctcgaggtcaggacatcctatcttttagacagcttcatactggtacgaagataggcattcagtgtgcgagaacagtggaatctattttcaag

SEQ ID NO: 381825 - DNA, 175 bp, Zea mays
  unsure (1)..(175): unsure at all n locations
atagatacgacctaattcttttgttgtattgtaacatccatatctgtatagctaatctatccaagttcacctgtntttttatacttgtcaatgtgcagggacagtaggataattccaggagctgctgcaacagaagttgagctggcaaagagattgaaggagttctctttgaagg

SEQ ID NO: 381826 - DNA, 172 bp, Zea mays
caaatatcaccccgcgatcacccacatcgccgacaggctccccccctccacaacgtcgacgggcagaggagacacctcaggaccgggatcggacacctctttcaccgccaacgcataccagtgatgaagatcttccgctgaagcttgctcaagctgcaataaagcatgacgg

SEQ ID NO: 381827 - DNA, 222 bp, Zea mays
cgctccgctactagctaccaccagtagagcagtagaggagagagcatctacctagcgccgtcggacggatcggagctacctcatcggcgaccgcacgcgaagagatcgatggctcatgctgctacgctcgctgctgcagccgcggtcgtcgtcctcatcgtcgtcagctgctgctcctcttcggaggccgccagccacagcgccaacgcgaggcagccgccg

SEQ ID NO: 381828 - DNA, 175 bp, Zea mays
  unsure (1)..(175): unsure at all n locations
gtcaaacttgagactcatcggctcgaaagtcagagacacttttggccggtatggagatagcagcaattgtatgaanattgtggatcggatcacacttcacatttccacttatcgcagcaactcaagctgcaaggataggagtacaatgtaacagaaataaggctgtaccattaag

SEQ ID NO: 381829 - DNA, 172 bp, Zea mays
agcgcttacactcttggctatgaaattagcttatcctcatgtaacagtactttgattattcacttgaacatttataacgagaaaattggggcagtcacaatacaaattccctcggcattaagttataaacaaagcacggttacatgaggataagcaaatttcatagccaaga

SEQ ID NO: 381830 - DNA, 170 bp, Zea mays
  unsure (1)..(170): unsure at all n locations
caaggatcatcatcaccaggatcaagaaagaactcgtcgattccttaccccttccgncttcttctgatctcagctctatccactagctaggagatggacatgaacaacgggtggcttggcttctccttgtctccttcggcagcgagcaggggcggctacggctacggcga

SEQ ID NO: 381831 - DNA, 166 bp, Zea mays
ccgaagcgtccgacgaggatgagtatgacgatgaagatgacgagccgcagaaggtccaggaacccgaagcgtccgatgaggatgaagacgacgaagaggaggatatcgaagaggacgagaaggccaaccacgtggtcccttcttccgccaccaagaacccgcctcc

SEQ ID NO: 381832 - DNA, 139 bp, Zea mays
  unsure (1)..(139): unsure at all n locations
tcgacgtcgccaatcttcctcccgctaactctagtccagcactcgagatcttcttcgcgcaaacagccatggcggagacgctcgagctgaccctcgacgacatcatcaagaacaacaagaagagtancttctcgtctcg

SEQ ID NO: 381833 - DNA, 199 bp, Zea mays
acctgtattcatcactagaagaacgtaacacttgagtacaagtaggtgttaacccacaccacagccacacaacatactgtataccgtgcatcgagtaacagtagcgaccatagcagcagtacacacactcaccatggccatgattcctcggaggttgtctcggccttgtgtagcccgtaccctacaactcgcaggtcag

SEQ ID NO: 381834 - DNA, 216 bp, Zea mays
cagcctttcgctccctggcgctcgctcagctcgcggacttcctctacgcggcgctcctgctccccgagctcgccactgcgcgcgctcagctccagcccagctccctgcatccatggccactgcgagcgccgtgcttctttctctctgctcgcaccggccccttcgctccctgggcgtgtcgcgccctggccatggacatcggtatcggcgagctca

SEQ ID NO: 381835 - DNA, 216 bp, Zea mays
  unsure (1)..(216): unsure at all n locations
cgcgcgttgtcaggcacgggaaagaggtagtccgcgggaggttctctccggaggagaggtatggtgcccgcgaggctcgccatatcgatagatccgcctctgaccagcagcaagggcccgctccagcggnggcggcgacgctgctagtgcgagcacctcccagaggctatcacgcaagagatgctatcccgcctcttctcccactacggagccaca

SEQ ID NO: 381836 - DNA, 217 bp, Zea mays
gcgggaaagagtgtaaaggacacggcgacgcgcgcggctggcgccacggcggactacgccgacgccaaggacaccggcgcgcagggcgccaggccgcggaggagaagacccaggaggccacggggaaagcggccgactacaccaagcaggctgccgcgaacgtgaagggtctcactgccggtgcggccgggacgaccatggagtacgcgaacaggcg

SEQ ID NO: 381837 - DNA, 221 bp, Zea mays
tagcaccagtgcagtagtgcaccaccagttacacccacaccctgtcttcccttcctagtgttcgaagccgtctacccaaaccctaacttagtatttatactcggatctgatctaatttccagtgtatatggccactaacttcgattgcgttgcaaaaaaaaatccgttgaggggacgagcatttcggcttccattttcatttagcacttgtgatgtttact

SEQ ID NO: 381838 - DNA, 217 bp, Zea mays
acggaacggacgtggttgtgataggcagcgggctcggcgggctgtgctgcgccggcctcctggcgaggtacggcaaggacgtgctggtgctcgagagccatgaccgcccgggaggcgccgcgcactcgttcgatatcaagggattcaacttcgattcagggccatcctatgttctccggattccagaccagaggcccccaggcaaatccacttgctc

SEQ ID NO: 381839 - DNA, 221 bp, Zea mays
ctcatccatcgctggatttttccacggccgctgccttctagcttctcccgcccacgctcacgtctctcccgccctccccttctcccggctacgcgcgtcggcctcctgcgcgctgagctccctggtgctcgcccctctccagccgagctcctccccgtctccttcctcttcctccagctgccttcccatggtgtgccccgagctcctccccaccatggcgg

SEQ ID NO: 381840 - DNA, 215 bp, Zea mays
aatcactgtcttttgtgcagaaagatgcagctcgtaggaatgttcttctcacaaccctgaactacacaatcaccagcacaatagatgttttggagtcgatggtggcacatggtggggagaaaatacttagaaagaaaaggcatgttgaattcattcagaggtggaacctgctcacgtataaactggagaaggtgatctcagccatgtcacgcttg

SEQ ID NO: 381841 - DNA, 310 bp, Zea mays
ttaaattttagttcaaaatacataccaaactagcaaaagtgttcaaaagtaaaattgtaatgaatagttctatcagtcaacaaggaccagatatttagttaaaaaaattgataggacccacttgtcagcctcttcacaacgccacataggatgccacctaggcgaaactgcctgcaaaatcgtctgagggatcaaaatcagacggtttagaaagttaaaaaactagtagttgtacctggttttgtgcagcagacacaaaaatagattcgcacaacacttaagaggaccaatagagtaccttttcccatag

SEQ ID NO: 381842 - DNA, 305 bp, Zea mays
cagatcttccacaggaaagtgtactccgagagcgcggccctggcgcggaacctgaccaagaagatccgcaagcgcggcagcggcgcctaccacaagccggagccggcggcgtccaagctccggtgcctcaaggagcagcgcgcgccggggttcggctgctgcgccagccgggcctccttcggcggcgcgcctctcccatcgacggcgacgacgacgacgagctcaactgcagcaagagctgccactggatcaagaccgacgctgaatacttggtgctggagctgtagaatgagtaataacaagag

SEQ ID NO: 381843 - DNA, 302 bp, Zea mays
tgcagaatcaacactacttgaagaaccatagcatgggtcctcaaattgctctggttcttcaagtagtgttgattctgcatcatcatagaaaggcatatgtccagcaggaaaatgaggacccatgctatgatccagatgcaattacattacttgggccagtttcagaatctctagataacttcccgtcggacttagattgtggatttttctcgagtgatgttgctaaagagtcacatgggaggccttcaccaattgagtctcctctctcaagatctccgtaggttgaagaaaagcctatcgag

SEQ ID NO: 381844 - DNA, 302 bp, Zea mays
  unsure (1)..(302): unsure at all n locations
cacacgttccacaccgagtgcatcgaccccaggctgcagtcgcgggccacgtacctgctctgccgcgccaaggtaccggtgctggtaccgccggtggcgctagcgccgtgctagccttcgcggctgccggaagccgtggcggtaccggtgttggacgacgagttggaggacgacagcgaccaggaggacgataggaaggaggaggccatcgagctggagatagtgcgcatggcgcggcgggccgccacacgctctttgcggcggcggccggctgcaacgcgnaagtatgagggcgaccacga

SEQ ID NO: 381845 - DNA, 293 bp, Zea mays
actgtgtgctgcaagttccgtgtggccttccgtgtacgcgtagacaaccaaagaagaagaaaaaaaaaagagaaataaaaaggtgtaggagcagtagtagactagtagtagtgcagggttgctgtcgcttgctttcccctttcgcttcttgtattccccctcccattctctttgcgttttccgttccgtgctgtcgcctgtagcgtgtaaatacttcggttcgcacttggcagcagaggcagagtgtagagtgctcccgtggccgtggctgtggctgatggtgtagcattttt

SEQ ID NO: 381846 - DNA, 283 bp, Zea mays
  unsure (1)..(283): unsure at all n locations
tgggagcttcggggggaaaaggcaggcacagtatcgtcgaccatgctgccaggtcgccacccggcgcgccgggccgacgccaccgggacgaggccgctcctgccggacgccactcgcgcggtggtggcggagttcgtcgccacagccatgttcgtgttcgccgccgaagctccgtctacggcctctggaagctgtacaaggacacggcaacggcgngcggcctgctcgcggtggccatcgcgcacacggtggcgctggtggccgcggtggcggtagcgagcaa

SEQ ID NO: 381847 - DNA, 289 bp, Zea mays
acaaaaagggcaagacaacgccggcacgtagtaggctataggcagctagctcctgcacctctgctgcagaccatgcacacacacatgtaatgtttgttcaggccgtggtcacgtctcttcgcaacatttactcacccccatttactactacgtactgcgctgcacccgtccctgtagtactctctaggacgtaccttcatcatgcacgcagcgaccactaattctcacacacgctacggtacggtagtagtagtttcttgcttggagtcagagcagaacggacggtaga

SEQ ID NO: 381848 - DNA, 304 bp, Zea mays
cttacttgtgataaactatatctgttgttattgaggctaccatgccatggcactcatctctatagatatagtttacttgtgataaactgaagagatagtcatgaacagcgtcctggaaaatcaccagatactgcccaatctgaatctatagagctaagggaattctgtctgtgttatgctcctctaagtgctgagcctcctgatctgatgtatgtatctcaatgctccgtgcgttttcttttccttcttttttcagaacatttagtttcacccggaattcaatcgatttttttggttggtggaa

SEQ ID NO: 381849 - DNA, 295 bp, Zea mays
ctagttctagatcgcgagcagcccgtttggcgatctctaaactagaggtagcaccaatcgaagaaaaactgtgtcagagaatgagactgcttgttgtattgcataggagatggtcacatatatatagggagactcaagggaaaccctaaccataatgggctatggtggcacctacacatacatataggaacacacactctaacaaaaacttgtcctacaccgattgagatggtttagacatgttaaatggagacctctagaggccggtgcgtagagacttgaaaggattgaatat

SEQ ID NO: 381850 - DNA, 279 bp, Zea mays
ctccctcctccttcctcctccctgcaaatcctgcaggcaccaccgctcgttttcctgtccgggggacagagagaaggggagagaccgagagagggtgaggcgcggcgtccgcccgatctgctccgccccccgaagcagcctgtcacgtcgtcctcactctcaggtacccgcatttagccttcctggattgttatggatcactagtgccccccctgccactgttccatagattgttccgaatggattggtgaggaatcgaccggcgttcggttctgggtt

SEQ ID NO: 381851 - DNA, 278 bp, Zea mays
ctgcgaccttctttgtgttttgtgttttttttttggcgacgagatcaggtcctcgcctccctccctccctccgtttcttcctctgctcagatctgcgcggcgccgtccgtggcgcgggagggctcgcgctcctgcccgcccgcccgcgctgccaaatgcgctttgttttccttttgttaatggctactgcagtgcagcggacctgatcgttcctagcgtttctttttgtctccaccacgcagacgacagtagcggcggttcgaggttcggagctagag

SEQ ID NO: 381852 - DNA, 278 bp, Zea mays
cgccagtacctgcgtgccgcgcgctgctttctggtgctcggactgcttctcagctcgcctgaccggagcgccctgctcgccctcctgcgtcgagctccctcgctgtacgcgccgttgaagcttcacgggccgtgcgctcctctgtcccgaccaccagcatccaattcgagtattctcgccattgaagaacagtcgccgctctctgcgttctcgccgcgttcgtgaagctgtcgtgcaattgcggtcatttttctttgcgtcatgtgtgcagcacgtca

SEQ ID NO: 381853 - DNA, 272 bp, Zea mays
gtttttcttttccatgtccgggagcacagtactgttgaaatgcatgcggagggcaggtttggttggtttaattctagttcggttcgattatcccctgctgcggaagtatgtcacccaccgtacattggcggtgtgggtggaataatggttcgttggttcttgccatttattctctctttgatttgatgatgcagagtagatccattctccatcagcaacctgtctggtttcctttgctcatgagagcattggtttgttccaatgatgatgac

SEQ ID NO: 381854 - DNA, 301 bp, Zea mays
ggcgataagacgaagacgaaggcgacaggagggctcaccggtcgcgaaccctcctcctccagccacgcctcgaaactggctcggggcctgcgcggcgagtccatggctgatcgcttcattcccaatgactttcctgacttcgtcgccgaggctgaggcctccgacggcgaggggcaccgcccgcaggcatcggggcctgctctcgcttccgtacaccaggctctccgaccacttcgccgcacgtagcgccgtctgcgcttgcgaccaaccctgcgggggcggcgtccctgcactcctcgag

SEQ ID NO: 381855 - DNA, 304 bp, Zea mays
gcgcccatctctctctctcctcgctgaagctcccatggcgttcggcgtccccagccatggccgcggctccctggagctcgcctgtctgctcacgacacacgcccagcgcctcgtcaagctcctccatgccggtgaccctgcttccgtactggccggcgagtggtctcgagctcccatggcgctcggacttctgctcgggttcaggctccctgcgcgcgagcctctgcgcgccctgtctctctcccttcgcgcgcgctgctccctgttggcccgcgcagtttcccggttgccgctcccggatttc

SEQ ID NO: 381856 - DNA, 297 bp, Zea mays
acatacagctgttatgaagactatcttgctgcaccgtttcccttaggtttatacaagcagatttttcttccatctgaaatgacagtattaccggcaagcttaggagcctctatgtgcatcttcagttctgatatcttgcatgatgagaaggttatagatctggctaaccacacagtatgtgagtctgatgttagtggtgcaactgctttgagctctactgctgcttcaagtgatttatatggaactcaaacaatcggttcatatgggaaagttcgttcattgaaagctgtagctgtt

SEQ ID NO: 381857 - DNA, 298 bp, Zea mays
agcgtttgcaatcacaaagggataggtatagaacataaagaacaacaattaccagatttctcctcagcagaattaactgtgtctacagaactcgtgcagcagatacaaatccagaagatctcatcctctcaaattttaacttcagaaaccatacaatcaagattatctttgagttctgagatacctagaaattttgtttgtggtggttctgctgcagcttatcagcagctgggaagcaatttcgaccagggaagctcattaacaggaaatgatgccacagccagtgaaattgaatgtc

SEQ ID NO: 381858 - DNA, 293 bp, Zea mays
aggggatccatgtattctgttcactagtcttcaccaatccttccaacctaggacagatcttacgaaattcggattctcactacgatggttttcactcgggatcctacaatcattatcgccatcttgacaaatatgtctctttttgaatcttgaccaagcaatgagagctatggtcagtcgaccgtggaggatccagaaggctgaggttgtctatcctgctggatgctgcgagtgcgagctgtgtccccacctccagcgcaaatgtgaaatgatgatgctttgtgcagaggctc

SEQ ID NO: 381859 - DNA, 292 bp, Zea mays
cgcgctcgacgctcccgtcgctgtcggccaccgcgctgcgctgcgctgctcgcagagctcgtcccgacgctcgtccgaagaaattcaaatccggggcgctcgcgtcactcccagcgacaaatccgcgcgtagattctgctcccaattggaacccgcatgcgctggccatgttcacggaggggctagatcgcgacgccctcaagtgggtgcgagatggacagggagcggcggcgctgcatagccacgaccggatggatgcgctgcgttccgtgcgcggaagagccggccgcgg

SEQ ID NO: 381860 - DNA, 291 bp, Zea mays
ctcctcgtgaggaacttgctgcccgaccccaagctgtagctcaccttctcgcgctcagatccctagcgtggatctcctcgccggaagctcttgggccggccatgggtgcccagccgaccaacgccgactagcactcgcgtcggttctccatgttctcgccggggaggctcagccatcgcgccctcaagctcgtcctagccggcgtcctcctctaccatggatctcccctgcgtgctggactttcctccgctcctccatccatggcgctcggctgttccaaatccctcccct

SEQ ID NO: 381861 - DNA, 165 bp, Zea mays
gtcacggtggtgtcgcgccaccctgcaggagaggaagaactacatcgtgcacctccggccccgggaagccaccgacggctccgtcgactggtggcaccgctcgttcctgcagcatgcggcggcagggctggactccgcggccgacgacggcccgcagatcatata

SEQ ID NO: 381862 - DNA, 281 bp, Zea mays
ggaaatggtcatggcgctcaggacaccacagaggatgctggtgcgttcgcctttgctgaagagattattcgcaaaaggcgccgggtgagcatgaccactgctgatgatgagctctcgcagtatctcgcagagccccccgcaccgatttccactgatgcccttgagtggtggagggggcattcctcccgctatccacgtctctccctgatggcccgagactttttggcaattcaggggacctcattggatcctgaagaactgttcacaagtaaaggggacaa

SEQ ID NO: 381863 - DNA, 282 bp, Zea mays
aggagatcgaggagcgcgcatcgaagcctggagcgacggccgggagcacccagcaggacgcgccgctaatcgaggaggtggtgcaaggaggaagcggaggccacgacggcgacggcggcgcgcaggcgcaggagcagcccccggccccggggaccagcgacctgtacaagggccgctgggtgtacgacgagtcccgcgcgccgctgtacaaggagtccgactgcagcttcctcacggagcaggtcacctgtatgcgcaacggccgacgcgacgacgactatc

SEQ ID NO: 381864 - DNA, 312 bp, Zea mays
agattgtagttggattaattcccacaccacaaccccccaccacaagaacttgttcgatcgaattcttcttcaactacccgccgcgggaacccaaggaaggaggcaaagcaaaggcttctcgcaggttcgcatcctccggaaccatccactcctctcatcccgctcggagtttgacctctcccgacctgagatccgattgaatcggtactctgctcttggtttatttcctctccttggtgaattcgcgcgctgattcctgctgcggtggattacgtcctagggtttcacgtcagcggcttctgcggcgggcgc

SEQ ID NO: 381865 - DNA, 299 bp, Zea mays
agatgattagtaacatctagctacttcaaattatgagtttccctttaaaattctccattcttaacttgtttctcttatagactgcatgattatgtgttggttattattagataaataaaaacacttagttttgacaatttttgttcctttgatatgtcaaatcggccaaacaaactaggagtgctggcaggaaaagatcgattttgcaatataattatcattgaagacccaatttactatgttacacgccttggcttccgatgaggtggccgaagcgtgaagctgacggtggtgctggt

SEQ ID NO: 381866 - DNA, 294 bp, Zea mays
gtgagaacacgcagctccgtagctcagttacacacgacacccgctcgtcttcgtcagttcgtctcctccacctctgtatccctctcactccaccggccgccggccctcgcatcggcgcgttcccaatgatcacatttgcggacctgacggagccggccgccgccgcgccgagcggtgcgtggaccggcaactgtggctggcgtgcgcgggcagcatgtgcaccgtgccgcttgttggcgccacgtctgctacttcccgcagggcacgcggagacgcgctcggtctcgacggtgc

SEQ ID NO: 381867 - DNA, 302 bp, Zea mays
cttttccattggagcgcacaaagccggacggcaccaccatttaaagaaggccaaccaagcacacggcacggcgaagaagagaccaccacctcacactccattcacggcaggatcgatcgctatagctgctgcgcccccctgcacccttgcgtcttctgccgctgctgcgctgcggctccggcacaggtgcgtttcttgatttacagggctcatggagttcggtagcgtgatccggaaaacacacccgattggtgccggccggcggccgggccgctgcgctcgtgcgttagtgcttttttttt

SEQ ID NO: 381868 - DNA, 219 bp, Zea mays
cagccgatagcccggccggtgatgccggcgttgaggatggcgtacacttatacatgtaaagagcggaggcacacagccgtctgagccttgttggcggcgttcgtatgcatcggcgaaggccatggcctgttgcaggtcgccgggcgcgcacagttcgacgtccacccggagatgccatggcagtcccgcggtgaatagttgggcctgttggtgcggcac

SEQ ID NO: 381869 - DNA, 290 bp, Zea mays
agatcgatgaaggcctacgcaggtgctgaggccttcatcgatctcttagccgtcgacaagcacccaagaatgatttgttattgatcttggcactttagtgcttcagagatgcaggatagaatgagacggcagggccaatatggtgaagcggatattaactccatggttgctgcccagttgcatcactaccaggcacagcaaagggtacagaaacaccctgagaatagctacactggaagagatcctgcacaagcttctgcggagcatcagtacacttcccctaaggcaag

SEQ ID NO: 381870 - DNA, 233 bp, Zea mays
gcgaatcacagacgcgcctatctcagcttgctgcacagccctgccatcatatcaatatcatatcgtacgtgagcacggccgagatcgagggagacgcatggctgctccgaagctcgcgacgctggcgcaggccgtgctccaggcggcgaccgtggtggctcccccggccgcggtgcgcgcagcgatgtcgtgctccaccgtgtacagcacgctgatgccgtgcctgccgttcg

SEQ ID NO: 381871 - DNA, 289 bp, Zea mays
ttccgctgcttgcctccgactcccccacgcgtcgtctcgtgcttcccaatccccatagagccggttgatccccaaaggcccatgtttttctccgacgccgcgtcgcctctcgtagccaccgccgctgactctgcttcctcctgcgtcgcccacctccgctgctgctgtcgcgttagttgttgctgttgttgttgaagacgcgttgctcgctagggttcgtgatttctcgccgatcgattcgggaactggtaagctatggatctctcgcggcccgcatcgtcagacctct

SEQ ID NO: 381872 - DNA, 246 bp, Zea mays
ggagacgtgggaataaagagtggtagctgcatgcgcgtacagcggccatggctctccgatgaaagagctagctgtgtacgtgtgttcgtgatgttgttccatgcatgacatgtatacgtcttgcctaagtacgcttgtactagttgagagactgtgtaagtgaaatgtgctataataataaataagtaaagggcgccttctccaacattctatgggctcgttttggagggctgtggctcctctcaa

SEQ ID NO: 381873 - DNA, 274 bp, Zea mays
cgcaccgccctctaccgccacagccgcggttgacctctatgagacggcctcgcagccggacgcccccgccgccggcgacgcctacacttttctcgagttcaacacgcagggggacgacttcgactaccccgacttcccggagctctctcaaccacctccccgatccacgccgctgacgtcctccatccccggcgccggcacgtcgtcctcgtcgtggcctgcaccaccgcctccgccgtccgacgcggcctccccggaacccgatctcacgtct

SEQ ID NO: 381874 - DNA, 292 bp, Zea mays
gatggcttgacagccgtcaggagtggtggtgttggcagtggaactgatgcgataaccatagcttcgttgagatataatgatatgaatttgctacctgaaaaccccatcgcaacttccagttgtttgggcgaatcaggaaccttcaattctctcgacgatgtgtgtggtgtaaacccatcacaaggtggaacctttgtgaaggtatgtaatctcacttatgctgtatgctccttattcatcaaatggcatgtgaagttagcaagttggtaactgcaagagcacttacatttgt

SEQ ID NO: 381875 - DNA, 281 bp, Zea mays
ggcaatcctaagggtagcagctgcatagctgtagagataaaggccaaatgtgggtttctgccatcatcagaatatatatcagaagataatactatcaagaaactagtaacgagatataagatgcatcagcacctcaaattttatcagggttgattcccaatacattcttgcacacatttcagatatcgaagactagtgagtacaatcctcttgatctattttctgggtcaaaagagagaatatgcatggccatcaagtcgcttttctcaactactcagaac

SEQ ID NO: 381876 - DNA, 228 bp, Zea mays
gcctccgcccgcgaaccgcagcagcgtctccaactctccatcgatggcggaggcgaacgtggcagcggcgtcgctcttcggcgctgacggccgcctctgctcagccgacatcctcgcgccgcctgaggtccgggctaggatcgaggtagcggtgctcaacttcctcgcagcgctagcctccccttcctcgccggccatcaccgtcctccccctgattagtcggagctc

SEQ ID NO: 381877 - DNA, 127 bp, Zea mays
acgcgctcgcggacgcgccgagtagccggccgaaccagtcggccgcacgcacacactccctccctatcgccgatatcagcgtcgatctgcgaccgaagagcgattcagaggcagggtgaggggggga

SEQ ID NO: 381878 - DNA, 199 bp, Zea mays
tcaattggatttcttattttttgtctgatcttgtttatttggatcaggagatcaaaaaacaaagggaaaggaaaacaggatggccatccctccataatgacttcggatactatcaaactctgggagggtgagaagacaggcactttttttgcggtgttttccttttcacaaataagaaatggcacagacaatttttcaa

SEQ ID NO: 381879 - DNA, 151 bp, Zea mays
ctggcgtatatccaccaaatggactttaaaggaatcatcgaaccgaggatgtgttggcccttgatgctcaagtcgcacacagcgcccgaatccgtgatcccggttctctgtcgccttaacttcctgcaatgctgaagccgttcttcttggg

SEQ ID NO: 381880 - DNA, 166 bp, Zea mays
atactgacgtacacatctcctcgccgaggttgctccgtccggtggccagaccgtggttcttggcgctcttggttggtcggggtccttggcaaccggacgtctggtgttcctgtttcgaccttgaacttcttgggggtggggttttgggggcgtcaccaccctgttt

SEQ ID NO: 381881 - DNA, 300 bp, Zea mays
atacttggcaaggttgtatgggacgaggaaatgtcatccgagcttgacatggacaatgacttattgggacagctggtttctggcggggagtacccagttgatgagcaggttgtggatgactcctcggatttcaaagagtttggattggtcgatgcagaccatgtttttgtggaagggctcgatgaagatagcaaagcagtttgcaaggcaagcatgtatgatgagctaactcttgagataaacactacttttctctttggggttgctatagatcacgtgaatgagatgtctgtcaacatc

SEQ ID NO: 381882 - DNA, 191 bp, Zea mays
ggagcttagttgataatgtctagttaacatttcacaatactgatgctaaaggttgtttgtgtagccggtgccattcaggcctcaaacaagtctatggagactgacattgtagttttgcttgcagccacagttccgcgtgtgtggaccaacgctgttcttcctcgttctcaacaccctgatgatcttgctgt

SEQ ID NO: 381883 - DNA, 291 bp, Zea mays
gtttgtagatgtgtcaagctctgagagatttgatatacatgcatttgattctccatctgctcggcgctctttgaggaaaagagcagccccatctccaccacagccttacacagatgaaaatcgaaggccagccaagcgtcggcaggtatctaagaagggcaaggagaaggtggaggatgatgagcccgctgtggtgtggtcatcccaccaaaggcatctaaaattgggccttctgagaactaagaagccatattttacaagaggaccgatgtcgttgtctgatctgttgaa

SEQ ID NO: 381884 - DNA, 228 bp, Zea mays
ctcgagccgatcgtagcacgctagcacgcatctgttcccggctcctcagcctccgtctcaaactcgcccggtcatcccatctccaccaccacatccgtcctcttccgccgccgccgatggcccgcctcctcacacaaaccctcaccctagcccgtcccgccgcctcctcctcccccaccgccgcattcgcctccctccgttgcctcgctaccaaggtcgagatcgtcg

SEQ ID NO: 381885 - DNA, 259 bp, Zea mays
gtcgacgaaacaagcgcacaggacatcgcgacggtgcaggacgctgcagacctcatcgagaaactcatgctggaagcgcctccaaagataagatttttgtatggatgttgctgaggtataaattagatgctccaaaggctgcatggagcagatgaagacgatgtattccacttcccatttgcatgttgtacttccatagagagatcaatgaactgttatgaagagtcactgcaactagggcttttgatctttgtgaagt

SEQ ID NO: 381886 - DNA, 233 bp, Zea mays
cttccccgtccctgtcgccatctatcactttccccgtttgcgacttggcccgaatctccgtctccgtctccgtctccatctccatctcctagccgccgcggctccacacctcagtcctcagtccgaagcgaacactccctccgcatccactgccaccatgagccgcgatcgctacttccatcgcctcctcgacctccacctccacgccaacgacgacctcttcatacccttcc

SEQ ID NO: 381887 - DNA, 299 bp, Zea mays
cttgtgttcttactagtgtaactcccttcccatccctgagtgcgctgtcccagagcttgctcgtcgtgttcctgtgccagtggtgaccatagccaccgattactcaccttgccgtggccaggacagatggagcagctgcacacccaggttggtcccgttctctgatctccgtgtgacactgaagcttacgcaaccccgcctttgaactctaccgatgcatgctgcgtggagcagggacatgtcgctgcaatctggcgccgcggacacgcctcaatgtctactgattgacttgcgttcgt

SEQ ID NO: 381888 - DNA, 298 bp, Zea mays
ctattttttaaatagaaagaaagaaagaaagaaagaaagaaagagagagagagatgttgtaaacatctcacatgatgcctgatgagtaatgcttccctctggcctctgtacatgattgctagctactagattctgattctgtaaagaactccagattcgaacagttaattcaactgtgtaatttatcgccgcaaccctttccgtctctgttaccgatgcagctaactatgggctcgcgacgtgcgccttcttcggcgtcggcgtgaacctcgtggtgttcctgcgccgggtgctccac

SEQ ID NO: 381889 - DNA, 140 bp, Zea mays
gagaggctttaaaagataacgtttacatcgggtatgtacagaatttttttcgccacctatacctaagcactgcttttttcacaaaatacttaagtctaacctgtcatcatcatcccctaaatctaacttgtgattctttc

SEQ ID NO: 381890 - DNA, 314 bp, Zea mays
gcgctatctgttggataaattggttagacatagtagggggagttatttctcttgtaaatagcaggcgtgttgtgggtcgacctccaaatccttgttaccggtttattgctctatggcggcattagggaagactctttcctcttgtttactttgttgtatgatgatattaggatgaatggcgcttggatggatatgtagttgcatagtgtgattagagttaggtttataacactagattacgcgaggtgaatgtatttgtggttatgaagccgcatttcttgcattgatgtgattgcgataatatgtatgaagtg

SEQ ID NO: 381891 - DNA, 234 bp, Zea mays
ttcaactgcaccagaggatgcccctactcactggcagcagtactggcgaccaatggtatgtcaaagaatctgtgatgcgataatctgggggaaactgaaacatagtaaccttctttctgaataggctcaaatctgttttgtatgaaggacaaccttgctgctggtcattgcggtttaggagcattctgactgtactgggttgtcgtggtagcaaattgataaaaaatggagtgc

SEQ ID NO: 381892 - DNA, 314 bp, Zea mays
atcacctgtcgcccccgcccccgagcctggtcgccgcttcacccgccgtcgccgtcgtcggtcgggacgcctccgggcggccgcgccctcgacggaggaatgtcttctgctgctcccgccctcgtccaccaccgtggggtctcaggcagagcaatcttacctttgcatcatggagaatgcagagtccctccaggagcttgtttcatgggcacatcacctatgttggggccaatgagggtatccttggtatgtaatgcaagccccaaccaccataggccaaggaattcggatatatcgcgacaacaaaaaggggg

SEQ ID NO: 381893 - DNA, 125 bp, Zea mays
cgcaaaccctatccccggctcgttggatcaggtgagacctcggctttacgccacgaggagcagcggtggcgcccgctgcgtcgatacggagtctatcgcgacctaccgggagaacctgtctctgc

SEQ ID NO: 381894 - DNA, 309 bp, Zea mays
gtggtatcaagtgtatcagtagggaggttcaacttttgaatctgctgaagcgccgtgatcaaaaacacaatgttgatgagatcagcctgaatgaaaagctcaccaactgtgcccgtcagataacttttgtggaatatgctggttttcctttccccagtgttgccttaaagtcaacatttgctccaggattcgaaaggtggccttcagatttatgacctacaaaggacctggatgttttgctgctgctgccaccatgatggccaccacaaaggaggccaagttgatgagtggactgctgaggaacagatg

SEQ ID NO: 381895 - DNA, 310 bp, Zea mays
cccagatggggagctgctacaagaaggagatcttcaacgaccatgtgcagaagggcgtcctggtctgggcgcagaaggtcaagatgaggaaggggttgaagggggctcttagcaagagtgactcggcgaagaacaacaatgccgatccagcaggaccttctgttaagattgagatggccaaggctggggaggatgctaaggtcgtcggaaacacggaatgagagatcaggtgattgcggcggattggacagtgtgcccgacctgtagttgaagaacaatgccatcgtttttactgtcacagcagccgagg

SEQ ID NO: 381896 - DNA, 307 bp, Zea mays
  unsure (1)..(307): unsure at all n locations
gggctctctttacccatctccagtccacctgtccgcgcctcctccaaccccaattcctctcctttccatccacgccgctgcgctcccgatgcaaccctaaccacctcatcgccggcgcgatcttccccgnccccactccccggctattgcctctgattggcggctctccggtgcgtgcccccttgctctccctatcacctttacacgcccccttccactcttgcgcgttattttcacctaccgctttttgtctgttcgacttagggattcacgttggaccggggtacggctcctgcgattttcacgc

SEQ ID NO: 381897 - DNA, 189 bp, Zea mays
tatttagaacctgtggttcacaaggataaaagtctgttctgtatctgtttcattgtcgtcaataatttgcgtgaaggatgtgaaccctaaatttgaacttccttattgtctcttgctccagtttcccagcggtatgcagagatgttgagagaaatgcagaaacacgacaaggaggacaagcttgaacac

SEQ ID NO: 381898 - DNA, 248 bp, Zea mays
  unsure (1)..(248): unsure at all n locations
attgaagatgacgttattcctgaagaaaaaaagtcgatcagattcacactccccaacaactgataatggtcacacagaaccacttttgccttcttcctccgaatcaaaccttggtaatcttgaagatgataccacagacatcgatattctcttagctgagggtgaaggggctataaagccanagagaagaagaccaagaaggggagaagatttccggtttcgtgaagcaatactgaacgccgatttct

SEQ ID NO: 381899 - DNA, 306 bp, Zea mays
aacgaatcagtgttattagagggaggggggctcttcatcattgctgacctttacctggtcacttgggctcgctacaatgaggctcaaagcactctggtggccggttacctgcgacctcttctcatggagggtggtctgccgacaaacaccaagacagaaggaagctctttcaaggggctccattgatcctttacaccctagagagtcagatggattttgccccaaattgtttctctaggatagcagtggcatatcatcagatttattttcatgtctttgttgtatgataccaatcttgcatatata

SEQ ID NO: 381900 - DNA, 291 bp, Zea mays
gttcagcccaggcttcgatggagagccaattttcgacgaggagcccaacgactccatcgccgagttcgtcgacgtctccttccacggcggcaggatctcaaccggtggtatccaccacccggcctccaccatgccgaggctgcacgcgagcgtggtcgtcgacgactgcatcgaggggttcgacgtgttggacgaggacgccgcgagcgccaacgcggctgacttcacctccacagtgggggacgccacaccccaggccaccgagacgcggctcaatgccggatgggtgcg

SEQ ID NO: 381901 - DNA, 301 bp, Zea mays
ggagcgagagagagagagacagaaagagacacagtcacacagcgtagggcgctgcggccataagggacgaagggcaccagcatggtctttctcatccattcgcaaatacgaacaaatcttgcatcttatcttaccctagaaaaacaaatcttgcatcatcagctgtctgtacgtgtgtgtgtgagagagagacacagcgtgccgcagcagcagctctggacaggcttacaggcaagtcagagagcgacggacgagccgggaagacgacgccggacggaacaaaagggcgagtttggttctt

SEQ ID NO: 381902 - DNA, 296 bp, Zea mays
tctcgagccgcgcttttgcctcgtctggtcggctggtccctctgcactatcccatcccccttatagcaggctgttgagcaagctgaactcatacgaacctcgatttcttccgtccggcgtttttttttctctcagtttctgaggtatttctccccctttctttcatccctccctcccagtagattcttcactgctcggggatttggaacaaaggccgtggttcgaagctggtgtgttcgttcaattgtgcggaaagaaagtgcagtgttatgtgtgaagctgaagcagtgaaggct

SEQ ID NO: 381903 - DNA, 299 bp, Zea mays
tgctttcgtgccacgttggagttggcctgtgtttggtggcgggattgttggatttgcggtttatttttaaggcaaatcgtctagttatcgtcgatcttgtttcgtcttcgccttctcagcatgtcggttgcaggattggatctgatctgagttcgtcatgacgttgtgtggcgatctgtttgtctgagttcggagatagatgcaaggagggtccttgctggttatggaaagatcagttgaatggtggaggtttgcttatggttcattcgtcgtttctcattctgatatcatcaaatggg

SEQ ID NO: 381904 - DNA, 282 bp, Zea mays
agaaggctgagataccccatttttagggggtggaagagaggttttttataatgcaactaaacaaaggagttcatttagggtgtctgttgaacggttagccttaaatttaagtatagtagtttggataggtgtacagggtaatcttggagatgctcttagtcagggtattctgatatttttttttattggatacataacttaagctcaattaacatctttatatgtgatttatttgatgcatcaatactactttttcgttagaacatacaatgatacaaaagc

SEQ ID NO: 381905 - DNA, 310 bp, Zea mays
agagtcgtctagcgacgatgaacccaagggtgtcaaaaagagagctgtgcagccgctgggcttgaagcagggaaaagccgagttctatatgtttggcggaaatcgtggcagaggtagaggcggtggtggcagaggtggaggcggtcgaggaagaggtggaggtggtcgaggaagaggtggaggacgaggcaggggcaggggcagaggatgaatggggcccgtcacattgaccccgttcctgcctttgcaggggttttggtaagcttgaaatggattgatcctgcacatgcagtgggtagaaagtgtgttc

SEQ ID NO: 381906 - DNA, 291 bp, Zea mays
gtcgtcctccccgcagccgcagtcggcaggcggtcgcctccagggtccaggctctctcccgctcacggcagcgcgtccttcgacacacccctccccgctctagttctggcctgctgaggactggaggtccatccatccggactttgttgatttcttctgttggtaatgaaacctaatctgctccgactctaagaggagcattgtggtgttcagctcaaaatgaaaggagtgcttccgattaagggggcatcaggccgtgaaaagaaagcgcctaaggagctcgagagcgtc

SEQ ID NO: 381907 - DNA, 135 bp, Zea mays
cttcaggtaaaaatttccgtaccgctagagcgatgctcccgacgtttttatcatgcttttatacaagcgcgtgcaggttgatccatgggtttggcacacgttccttccttgccaccggcgccatctttgcttccg

SEQ ID NO: 381908 - DNA, 143 bp, Zea mays
agccggaccgcccctgactcctttttatgcgcgccggctgctcatccctggcatgctgcgtccatggccgagcggctccaatggcgagctcgccgggatgcccttgttcaagcttcatccttgatcggcaagacaatcggctt

SEQ ID NO: 381909 - DNA, 307 bp, Zea mays
ctaggttctagatcgcgagcagccacccttttttttttttttagcgtttttttatttttttttcatgtaaacatcagtgcaagctcactgaattaacatgtgttcatcggataaacaacttcggcaatgaagagtcttagcaattacagttctcaaaattttaaattgcaatttttcagaaacctcggcagccaactttttgttttcatgtaacaaaattaggtccctaacaaaacgaaggagctagcatcacatgatcactcttcctcttcgtcgtcaccgcctccaccagaagccttcttttggt

SEQ ID NO: 381910 - DNA, 222 bp, Zea mays
cgcgcgtctccggtcccgtccgtaataacactgatccgatccacgccggccggcgatggagctcatcaagtccaggacgaccgtgtgcgcgcacctccaggcgctgctcctgctctcacgtaataaaaaagcatactgatttattcgttgactcaattcacgtattattactaatttctgttgcctcatggactcttccaccttccgctatccacgcacaga

SEQ ID NO: 381911 - DNA, 306 bp, Zea mays
gtaaattgacgagcacaactatatgaatttcaggattttaaaaatttaaaaataacgaatctttataggcttcaaagtttttgtctgggtcatgtagttgatccacatgaacagttactgaattatctaggtcgtgtagctataacacagcactgtaattccatagataggttaatgttatcagtgagggtaagctttagacagacactactccagaaattggtggtcttagtttagaagttggtgctccatgcatggtaactacggaaaatcagcaagaataagttagaactgagaattgtttat

SEQ ID NO: 381912 - DNA, 312 bp, Zea mays
aaacatctttgtacagcacaatatgcttctatgcttttagattgtagaccctacacaccctaaaatcatatgtttcaccaattattctcacaagtagtgcatattctggtgttccatgacatacagtaacaccatgcattccaaaagaatgcacaagtaaaaatagccctgatgatattttacagcacactgttggttccattttttaaggcatattttggtcaagcacaagaattaggtgacaaacaaagataatgtgaagtgacatgtctgggatatccttagtgttaaatctcttggagcacatgatag

SEQ ID NO: 381913 - DNA, 200 bp, Zea mays
gacgcaaccaggcaccattcagtgcatgcgcacccgcggcccagccatggacatggggtttgtcgagagccagccggagttgacggccgcgaggcgccgggacccggcacgggaagcgggacgccgggcggaggcaggggcgggcgcaagcggaagcacctcacctccatcgccagccacgtgcaccggcaatgttcact

SEQ ID NO: 381914 - DNA, 304 bp, Zea mays
gaagagtttccagtcgtcttcgtcgtggagaagcggcaaggcgagttatatcggagtctcacaccccgttcctcgtcgacggtagccacgggacgtgacagtcgtatcagagccgacgttcatctgcaggggtgcgaaggtcggattcgggtgctgcagaggtcgcgtacatccctggcgtggataggtgacagcggctccaccgctacggcgcccgtcacccagccttcggtacagattcgattcatcctagaggcatttggggatcgccatattaggtgtgcaggcggtgtggatgaacaag

SEQ ID NO: 381915 - DNA, 177 bp, Zea mays
gctaaccacccccacgcaggctcgccaccgccgccgcagcaggcgtgcggaatcagggcagcgccccgcggagaagaggaggcagcgcgctcaccgtccgccatggcgggctcttccgaccccgacaagctcatgagcaaagccgacaaactaacaaaattgagttttacaagatgg

SEQ ID NO: 381916 - DNA, 169 bp, Zea mays
  unsure (1)..(169): unsure at all n locations
agggcgatttcgatgggttcctttcccatcgantaccttcctgagaaccacaatttgctgccgctacccgacagttggagcaatttgtggttctcaacccggtaatcgatgggaagaaggccgatttcgatgggttcctttccaatctgggctttgcaaaggttggggc

SEQ ID NO: 381917 - DNA, 189 bp, Zea mays
gaaagaagggtcgcagacggaacccttccaccctcccgacaccaccttcgattcctctgcgatttccccccgcgcggtcgccgattccttgatcgactcccgcgtgattcgctttctggtcggattctctctcctcaagcatgcagtcggatcagcctgtgatcagcttgcgccccggcggcggcggcg

SEQ ID NO: 381918 - DNA, 261 bp, Zea mays
  unsure (1)..(261): unsure at all n locations
tggaatcgataacttcggtgctggtaggattaacttgctcagtgaatttaagatgaacctagattcggttcattctcttacatcaaacttgaatggaatggctgtcttgtanaaaaactacgatgttttagtttcgtagatttaattgtcttcggtgtttctcaagtgttgaatcattgcagaagttggagcacaagttgctggacaatttcttctctgtgctgtcatgtgttgtctccgtgcccttctacacgggattct

SEQ ID NO: 381919 - DNA, 257 bp, Zea mays
ctcttgcattctcgcaaagtgttatagaggagcaacggtaccaggacgcgtcaaggttgacaaagctatctgggaccacttttgtaattaccaactcttcactgattattttcctatatgttgctccagaataaatatactcttgtcgtgaacattttgatcagtgtaccgtatatacttgtaggatcatagtacggtggtcatgggattgggatccgctccgtatttgcagggtgaagccttcgtgtctcctcgag

SEQ ID NO: 381920 - DNA, 202 bp, Zea mays
gtttcgatgagtcatatttatatgaagccagtcacagaaggttacactagtacacgtttatagagagtcgaaatgcatatataaatatgacgagccaattcctcagccaaaaaacattatccatgcattttcacactctataaacgtgtaccagagtaaccttccgattcgatgagtcatatttatatgaagccagtcacag

SEQ ID NO: 381921 - DNA, 305 bp, Zea mays
agcgtccgatgttgcagcctccgcgttggggctagcgggaaaaggggaaggcggcggcgtcagtagttctacgggtgccggccgtctcgcccatggtcgccacacgaaggaagatagccacgcgccggacgcaggaagccgggcgggtgtacgagctgatccccaggtagtgaacatgttccatctcttgctattctgttcctctctgctagttgttaggtctattgtttatgacattgtcgtcactcatcaggtttctatgtgatgtgttctacatctacactgtacattttctcacttttttt

SEQ ID NO: 381922 - DNA, 159 bp, Zea mays
gttgctcagcttccttcttctgcatacctatcgcctgcagcttctatctttcatggttggtgctcctgctcttttgctcctccgccagcttcatggtggacgacatgcccatcagggacttccgcaaccaggagagcaaggaggtggcgttccccaaga

SEQ ID NO: 381923 - DNA, 257 bp, Zea mays
catgggctgagggctacttttcttagatcaggcaactctggtgttgttccgtttcactcgttatgtggtgatgcacccgaaattgaaaagaaaggtagctctgaggacggaaatgatggatttaagcttaatgaagacggtgccttggctactggaaaggcagcagcgacaaaggagctattagggctcccgctagctgaacttgagcgccgctgtagacataatggcctctctctgtgcggtggtaaagaaatgat

SEQ ID NO: 381924 - DNA, 122 bp, Zea mays
cagatatcggccgccaccttcacaaccaccgccccggcgcacctgtgcgtctccatcgtcgccgcctcacctccttcggacacgactgaccttccacaggcgccaacgaagaaaacacatag

SEQ ID NO: 381925 - DNA, 300 bp, Zea mays
catatttcattcagtgccaacaagtgccaagtgctcgtgtccggatgcgccacgccgcctggtcaacagatttttgccctgcgctgtcactccaccacgctgcttgtactgaaaacgctgcttgtactgaaagctttttcccagaataaaggctggggaggaggaagcggcggcggtggcggcgctcagaagagaaggtgagatgaagactcggagctcagcgagaggggagccgaggcgtctcggaaatgcggctcttctggcgctcatgctctgctccgtcgtcgcgctctccctcat

SEQ ID NO: 381926 - DNA, 298 bp, Zea mays
ggacatgtagctgcaaactgcccaatgggaaagcggaagaagccttgctttgtttgtgggttgtttgggcacaatgcaaagcagtgcaagcaggttggtcccccctatctccgagggattatcacttggtgacttggggtcaagactgtttcatctgcaaaaaaggagggcatatggcgaaggattgtcctgataagcacaagaggaatgatcatcaatccacattatgtataagatgtggagaaacaggtcatgatatgtttggatgtgccaatgattacccaccagatgatatcga

SEQ ID NO: 381927 - DNA, 276 bp, Zea mays
gagaagaagaagtgtccgggaacacgtgacaccctgtcgccgatcctcaacgacgcgcgcgcgggccgccatcgttcacatggctgcgatgccaccggccttcacgggcaacctgaagaaagcacttgcaggtctgagaagaatcaatttagatgggcttcgatggcgcgtatttgatgctaagggtcaggtgctgggacgattggcttcccaaatagccgttgtgcttcaaggcaaggataaaccgacctatgcgccacatgtggaaaatggaga

SEQ ID NO: 381928 - DNA, 139 bp, Zea mays
  unsure (1)..(139): unsure at all n locations
cgccgtgtctgctacacgttctctgccgcacgcagctcctctgcgtcgccattctctggcgttctctctcnctcgcgcgtagcttcatctgctcgcgtctgtctccagctcgtaagccatgtgcccctctccctgcacg

SEQ ID NO: 381929 - DNA, 103 bp, Zea mays
cttttgtcagttgaagaacggttgaatggtttgctgagtagcccttggcaaaatccacaatatagcatttgttggcgcaatgcggttctcaaggcttcagatg

SEQ ID NO: 381930 - DNA, 123 bp, Zea mays
  unsure (1)..(123): unsure at all n locations
cgctactgcatctgaggctcatcaatccgtgcagtcacagagcacttcgtcttcccgctactcncgcaagggggctcgnacgttccttctccggggagtgatgtgcacttctggtagagcgag

SEQ ID NO: 381931 - DNA, 128 bp, Zea mays
caacacacaactcgacgacggtgcgttgcgttggtagccgccggcgacgatatcgtcgtccgcaggcgacaagaggaagaagacggactgcgtaaccggagggaacaggtacatcggctccgcgctca

SEQ ID NO: 381932 - DNA, 138 bp, Zea mays
taacacgccgcgccgcgacacaccacgcaggaggcagcgagcgcaataatgcgcacgcagaggagcacagcggcgtcacaaatgcggcagtaatggccgcctggttccacatccaccacggtgtgcacaagcgctaca

SEQ ID NO: 381933 - DNA, 136 bp, Zea mays
ctcaatgtaagtcagaattttgcatgtcggcaaagatttggacatgatgtagtgcacactgaaccttctactcaagaacctgaggctcaatccattgggtggggacaaggtgttgaccatgctggcgagtcagctg

SEQ ID NO: 381934 - DNA, 127 bp, Zea mays
ctgcaacgtcgggaacgcccaggtccttggtcagccgccactaactttctttcgtgaggttaccacgcttaattaccctcagaaacacctaagaacaagacaacgcaagtgtgtttcatggtcgaaa

SEQ ID NO: 381935 - DNA, 122 bp, Zea mays
agccgccctgacacccggcgcattctcctctcggtgccgactgccgagatctccccggccctctcccgagaggagtgcccgctcttgacccgacgtccgcgatgacggtggcggctctgcag

SEQ ID NO: 381936 - DNA, 139 bp, Zea mays
ctctctctctctctctctctctcctggccgcgctgaagcttctgcaccgcgttggcatacgcacgctctcctctgttcgtgagagcaggctctcttcacgccatatgcagggcgtcctcccctctacctcgtccagcgc

SEQ ID NO: 381937 - DNA, 140 bp, Zea mays
tgcaaatgttgttgcgagcactcaaggctttgtcccaatgcaaaccacataccagggacagacacaagcaattgcaaactcacaagtgcacctgtcaaatagctatttgggtattgacaactccatgaactttaatcagc

SEQ ID NO: 381938 - DNA, 124 bp, Zea mays
cttgacgtggccgcgatcgcaagtcacgtggaccggacgagctgggagccggagcgaggtggtcgcgcgcgatgatgaacctagaagcctgcacgaccacagatctgggggcgctggttgcctg

SEQ ID NO: 381939 - DNA, 110 bp, Zea mays
atgagagcgaggaccttcttgccttcttgttcgtatgcagctcaccccgctgttcttgtggttatcacctccttttgccttcaatgctgccgcgttacaacaggatctga

SEQ ID NO: 381940 - DNA, 245 bp, Zea mays
gtcgcccccttccatccatggcagtcgcgctccctctgcgagcctatacgtgcggggatgttgggaggcgctaccaccaatcgagcggcattagccccgacctgaagcacacatggccggaatccagaggatatcgtgcccccgcccccatccggagtctgccccgcatcgtgcgatgctcgttgctgagctcccgatgaccgcccgatggtgtcgaaccccgcaccgtcgtcggcaccgcgcta

SEQ ID NO: 381941 - DNA, 323 bp, Zea mays
aattcagctcgaggaagcacaacttcgcatgtaaacgaatctgttggaacatgttaaggtatgtgcaaatatgtaaatctcccctaccaaattgaggattccaaactcaccaaatggcacatatgaaggcaaagaaggtaccctgctccagcgtttagacccccctgcttcagatgcatttattttctcagtcctattattatcttcagtgttccctccatctttatccgataaaggggtaagagcaattccttgtgaactttcttgaatctcaagagattgaggtggttcttctgattcatcacctttgattgcaatagcta

SEQ ID NO: 381942 - DNA, 215 bp, Zea mays
agaaaccacactcatcctctcgcaccgcaccgttcgcatcctttcgtcaaccccaaacctcttggccagccgctcaccaactcttcgccgctgccgccaccgcaccaccgggcagccagccagccatggatgaggattacgacgtgatcgaacttagtccggagctcaaggagtacatcctcagtagtctcctttccgtcgacagcctcaaggtt

SEQ ID NO: 381943 - DNA, 266 bp, Zea mays
ctaagatattgtgtcaaagctgttggactttattgctgaacctcactctgcagctgattctaggctctctgatgaccagaaatttatcaatgacagcacatctagtaaaaggcagaaaaaagcgctcgagtatgatactgatgaggatgaatccatgaagtcagacagtgaggaaaacagagatgaagattcagatctagctggtgacaaacaggaggtgactatgtatctggtgaagaaaaggcagggaagttctcagaggtaaa

SEQ ID NO: 381944 - DNA, 243 bp, Zea mays
cagcaagtaggaataggtcatgtcacagataggcaagtatagaagcaggagaacctgatagacatttgtggaatagcaaggccaagctgtatacatataagcattttaaggagttgtttgttggcatatggtttgttgtcaccacgggatgcttattgttgagaaacataaaaaaggtaggcatattgttcagttcacgtttaggtcagtatagaagtaaagcacgagataggtgtttacaag

SEQ ID NO: 381945 - DNA, 257 bp, Zea mays
  unsure (1)..(257): unsure at all n locations
aaaaggganaaaactatatccttttataactaactatatattagctanaaagcctattgtgatccttgaaacaanatacactctccacatgtacatatattttaggacagattaatggggtggaaaaagtttaatgcttctagttaaagcaaccaggctatctagctcttgattggatactaaaaagttcttatatttgtggancaaatttagacacacgaaccacttatatttatagatcacaggggtagcaaggt

SEQ ID NO: 381946 - DNA, 312 bp, Zea mays
  unsure (1)..(312): unsure at all n locations
gtcaacttagtacgcttacgatccacaagaagcacatataacacaaccaaaaagatgaaagctcngagtaaacgtgcatcttgccacaaaggcgctcaaaaggaatgccaccctgaagagaagaaggctgatattagtcaactaggtggaagtagagatagcctcagcccaaaagtgagggtatatatacacaggtaaatgagggtaaatatgcactaaacccttcataaaatggggatacacaggaatacatagatatacatataacaatattcatcagacgtctacatgcatatacttgagcctactcag

SEQ ID NO: 381947 - DNA, 275 bp, Zea mays
agcgactggagactcatcaccggagaccggagagcatccggagccagtgctcgcaccaccgctcccgattcccaatcgccctcccgccgccgaagtagcgccgcactgtcccccggcctcgatctctctcgggcccgccgtccgccgtagccctgcgcctcctgcgttatcaggctggagatccggccggagtcccattcctactctcggtcaataagtattccggaatgcttttccgagctgaaatacctagctctctggagctggatctcagt

SEQ ID NO: 381948 - DNA, 302 bp, Zea mays
gctgatgcctgctcaccaaatgcgacaccgacacgccgccgccatgatgaacgtcgtggccatcgggctcatcctctccacgctggcagccgcgggggtctggtccccagcgccgcagccgaccgcggccccacatcatggcgaccgcatcgtccgggagggccgacgcgtggtaatcgtggagtacgagcgcgagctcccgctgtcgaccgatggcggcggcagcgtcaaggtcaaggagacgcgcgtcctgcccccggacgcactggacggcgtcgagggcgacggcggaacctttgatg

SEQ ID NO: 381949 - DNA, 235 bp, Zea mays
gcctagagatctttgaagtcaagaagtgcttggaagaagctcgttcggctggcctcactgttagagctatggtggtaataaatcccggcaaccctactggacaggtatatatagcacattgttttcctgaatccttttacatgtaccaataaagaaaacagatgaaaattttcagggtagttcttaccagtgatgatcaggttattggaaaattttcaatttaatctcgtttcag

SEQ ID NO: 381950 - DNA, 276 bp, Zea mays
ggtgattatttaaaatacatcgctcgcgcaaatacgaattcggaagcccgactcacacgggtgatttttatctcggaccaattaatttgaacacgacgacaaaaatgttcggagtaaaataatccgaatcgcgcatccaccgagaaaaatcatgcgcgagattatgatcccattcgttcctcagcaagttgttgtggtgatgaaatcacgtatacgttcgcagatatagtttcggctaatttcgatcagtcgtttcacgtccggatccaaatcttc

SEQ ID NO: 381951 - DNA, 106 bp, Zea mays
tctgattcttgcatacaacagattagttgggcccataccaccagaaattggaaggttaaatcagtagcaaaccttgtcatagcaggggaacagtttgtatagttca

SEQ ID NO: 381952 - DNA, 297 bp, Zea mays
cggcccggtccctctgcacagcgcccatccatccttaaaccctcctgcgcgcgtaggcctctcgctcgtctcgtctcgtctcgtccttccccagcacaccacaacctctcctcctccttcgccaggtgcctcttcgttctcctctccgttccctgcgtggcgcgcgcggcgctccaggctatcaggacgaaataactggccgcgctgcacgccggccgccgcgagaagaagcgctcgcaccgcgcgctctgccgctggttcggccgtagtccgtcgccgctgattgatccaggtaag

SEQ ID NO: 381953 - DNA, 192 bp, Zea mays
cacaaagcagacagcaggatatactctcagcttgtagatcagtagtttttcagagtatcagatttcttaaaacaagtggattcacctatcgtagccaacaaacaggcagtgatgtcacagcagcaacggttgaactttccaaagtgatgcagaggaagatactgattttatcgagcatttttcctttgctat

SEQ ID NO: 381954 - DNA, 149 bp, Zea mays
tgtggatttcgtgcacacaaacagtacatctgtggtacatcagagcatgtgcaatggttttacaagcaatttcaacaattcaaacagtgtaaattctgttcatagtgaggatttatcagatggactcaattttacagtatacacagaaa

SEQ ID NO: 381955 - DNA, 246 bp, Zea mays
ggataccgaacctcggcggcgtcggcgccacgcgagcaaaaaccctagtgcgagcaagcgagaagcagagacctcagtaactcgagcaacgcgcgcccggcccgacggcatggagagcctcatcctcgcctccacctgctccgcgtccccacagctcccgctactcacctccgccgcccgcatccgcaggcagcccgtatccgtaccgccgccgtcttcggcgtccatcagcggtaccgcgaggaa

SEQ ID NO: 381956 - DNA, 156 bp, Zea mays
agccgcgatcagaatagccgaaataccttgaacaacggcataggtcacaggagcagtgaagcgagaagcgtctgtgcatccacaggaggaggtcgggcggcgatgatacctacaaaggggccgatggcagcatcgccaggttgtcgtctggatagc

SEQ ID NO: 381957 - DNA, 208 bp, Zea mays
gcagcaagctctttctggcaggatcaagtagatactgatgtaactacccatggatggctgcttgcctcgtgttacatagtttaccgaacattttacaggctgacatgtaaatacgaggtacatggtgggccgtgaagcttcaacagggactcaggttctggctgccgtgtgatcacatgatgacagtatcggttttcatcatcagagg

SEQ ID NO: 381958 - DNA, 157 bp, Zea mays
ccatcgtctgctcatatcgtcaggtcatcagatctctcggttctggtttgtacatcagtacgtgcatgcatgtatcccgtgtcaaatgtatttcgtcacacgtcagtttcagccggtcagtgaccaagtttatttcgtcacacctcagttcagtgac

SEQ ID NO: 381959 - DNA, 152 bp, Zea mays
tgcaggccgccagctgggcgaccagccgcagccgcgacgagcctgcctgcaggtgcgagcagcagattcccttgcgctgcgatcacgtggggtccaccgccgtagtcgccgtcgttagccccagccacgtagtcgtcgccaactccggcgac

SEQ ID NO: 381960 - DNA, 146 bp, Zea mays
ggtgactgaatcggatgagcgaggccagggtcgcgtacccgtcctccggcaacacgtacccggcgtcgggcaagtacatctaggtgactgcgtcggatgagcgaggccagggtcgtggtcgcacttgcgtttttgtgtacgtagcg

SEQ ID NO: 381961 - DNA, 144 bp, Zea mays
ctcgacatcatcggcgttggcggacgcgtgttgaccggagattgcgccgagctggttgaggaagagcgcagcggcgcggtgtcgcatggagcccggccacggtttgcctgtagctcgcgctctcagccgccgcactgacgctcg

SEQ ID NO: 381962 - DNA, 207 bp, Zea mays
cgcgttgagcacaacagcacaagcaggagaaatcagaatcaagggtctcgtcttcgttcccttcgccactccattccgtaccgcgtcagatcgcacaacacctccatggcggcgctcagcctccgccagaggcagcttgatcagattgtgcggatgatgcacctcaacaagccaccgccgccgcccggcacgactgcggagcaagaa

SEQ ID NO: 381963 - DNA, 281 bp, Zea mays
cacacatgctataatagcagggtgcatacaccttctgtatagacagagtaaataacatgaagaagctacgcggaccatcgattttgttgtgaaccaatctgatttcactattcagacacaaaggaatgttacagaatacatgttctttgcacagacgatcacagtagcagcacactatcttccatcagaagttcaaggtcaaattgacagtctgaaaggcgatttgaacaaagcagctgacacaatatctgtgaagacagcagaaaattacaaaatgataa

SEQ ID NO: 381964 - DNA, 163 bp, Zea mays
ctatacatcaagcagcacaagtagcacagcaggtttcaagtacaagaataagtacaaggaatcgaaatgtacagcctgaagtaaaccagtcacaaagttatgaacaactaaggcggcaaaagaaaagcacagaaaatgaacaaagcatgacaagagatgaaaa

SEQ ID NO: 381965 - DNA, 177 bp, Zea mays
  unsure (1)..(177): unsure at all n locations
tgcgacaccaatgcaatttcatggtggaacaaatcggggtgcaatccgacacaatcttcccaatggtgatgtaatccttgnctgtgctacagggaggctcagatgaggtgataatccaagccactccgccacaggttgagaggagaagagacgacgtgaaactggagctactagagc

SEQ ID NO: 381966 - DNA, 116 bp, Zea mays
atggaatgcgatgcagcagcgcagacgatatggatcagcaccgtgactagtatttgtgctgtacataccggccgttgtacatgaacaaactgtacccagtgacaacaccttgtgta

SEQ ID NO: 381967 - DNA, 108 bp, Zea mays
cgctgtttaccggtcgtagcgcgaggtcaccaaggatgtggtcaagacgcttgaagagtgcggcaggatcaccttccccatatcccttaagcagcccgggcctcgcga

SEQ ID NO: 381968 - DNA, 215 bp, Zea mays
gaaagacagcgccgcagccgccgcacccaccgcacggtacgtgcgcacagtacacgagcagcgccagttcaagacagccgggaacaccttcacggatgagttcatcgataccatcgacgccgtttaccagcagcagctggacatgctgaagaagctgcagcagcgccagcaccggctcgacaagaacgtcaagaccatccaggcgtagcgccggg

SEQ ID NO: 381969 - DNA, 195 bp, Zea mays
ggctgcgtgcagttctcgtttctcctctaatagatggcacacgttatgaagtgtgtaaaggtgtcaaaatccaaaaacatccagcattcacaatttttttcatggtaaagattttggataattttttacaagtttacacacttcatcacgacaaagattgtgaatgctggatgtaaacttgtaaaaaattatccc

SEQ ID NO: 381970 - DNA, 191 bp, Zea mays
ctccaggaagggccagaacgcaggcagcgcctcaactcgtcacgccatcagcacggatgattatcacgagtacgtcaagcgctcattttaggaagacatcgctgcgcaagtggctcaaggagtggaatgcaattgatcgaaacatgatatatttgacatattcatgatggatttttgtatttgatgtgtcg

SEQ ID NO: 381971 - DNA, 310 bp, Zea mays
tggaggcgccaaagaaggtcgtggcgggtggtggagatgaggaggaggtgagattggaggggatagatgagggctttgggggtccggagtccgagaacggccaggcgaagggtgtcggaggaggatatgatagcggggatgtaaaagaggcggatgcggaggataaaggtgggaatttgggtccgacagaggccgaggccgagaccgatgacggcggcgaggaaccggcgtcgggggacggggaaacacccgcttctttggcagcgcccatgccagtggtggaatccaagtcggagaacgccgaattggg

SEQ ID NO: 381972 - DNA, 312 bp, Zea mays
  unsure (1)..(312): unsure at all n locations
cgcagtacattaaaaccaagaccagcttgtctgactgtctcatcgatcgtcaatgcaagtctgtccatacgcacaggtctgaacacagtagcaacaagcgcgagccccacagnagccgagcagccagctcgccaacaaagcaagccgngtacaatcaaagctcaactaggcaccctcaacatctgatccagctaagcagctagccagcacaacagaagggcgtggcaagaatcaggagagagacagcaggggggctagccagccgagctcgtgcgacgaagaacggccggaancggcaggaacatggcggcg

SEQ ID NO: 381973 - DNA, 295 bp, Zea mays
  unsure (1)..(295): unsure at all n locations
cagcgtccatcttcctcaacgcgggggcttcggtggggccggactttggggacgacgtgggcaatggcccgcacacgttccagcagggcaacaagcctttccatggactcatgcagcagcccgaccaccaaggcaacggtgctggggggcccggcggctcaggccccagcctcttcaacctgagtatctttgctaacaatggcaacagctcggggtccagtcacgagcatgcaagccaggagctcatgaacaataatgaccacatncaaggcggacaggtggaagcagcgggggt

SEQ ID NO: 381974 - DNA, 288 bp, Zea mays
gactagttctagatcgcgagcagccgccctttttttttttttttaggacaagcccccctatgcaatcaggctgagcgtagtgttacttgcattgccaacaggtgggtagatgccaacaagtggatgatacagatacagtactggtatatgatgctgctgcctgtattgaggatgctctcggatgtctggctagacgaagaagcgtatacggatagtctgctttagtaaagctcagacagacaactatgcctgagtggtgtgggatagctaactagcaccagacatggc

SEQ ID NO: 381975 - DNA, 193 bp, Zea mays
cccgcgcacaaagctccatctcacctagccaccgagctccaccaccggccgtgcttgcctacaatacccatggccggcctgtgttcacacctggccgagctccgcgccatagaacaccatgcctggtcgcgacctcgccggaaagcgccgtggccttctcctccctagcttggcgcccacccatcttctccag

SEQ ID NO: 381976 - DNA, 185 bp, Zea mays
tgtgggcgcacaggggtgtcacgatctcccccgggagaagcggatcttgcggactctcatgtccgccgggagggcgacctgtcagtgattggacagtgcagctgcacctcgtcccggcagcatgctgcccgcgtccgcgtcttttctgctgcccacattccccaacgccgcgcccgtaccgtgta

SEQ ID NO: 381977 - DNA, 189 bp, Zea mays
  unsure (1)..(189): unsure at all n locations
gtaccatcctttccgcgcggcagcccaccaccaccacgccatctcggacgcctcttgcttccttacccaacacggccccggaaggaagcgccgcatgcagctcgcggcggtcacgtgccgcgcaccanggtcaangagcccgctccgagcgcaggcgcctcgcctccgccgccgccacaggcgctgacg

SEQ ID NO: 381978 - DNA, 180 bp, Zea mays
ggtaaacacacaaggcaggctgaatagcagaaaattaagagtcaatttggtgaagcgcactaaagagctcaaagtaaagcaagcacagcttgctaaggcaaagacagaagtagacatgaatccaaaccttattgaggtagcacttggtgtgagaactccaaaacaaaagcagaaggaaga

SEQ ID NO: 381979 - DNA, 308 bp, Zea mays
  unsure (1)..(308): unsure at all n locations
tacaggctaaacacaacaatgatggagaacagggtaacattgaacccaacagatcttgatgattttgacaagagaaaactagncctcaccaggataccagattgaggttgtccaggtagataacgatggcacgcaaccagcaaaaccaaaaccaggcgcaggaccagcagcagataaatctcatgctgatacctcggctagcacggttgcaaaagaaaatagaacagcgacagnagaatccaacaagggaacaggaagcaataatgatagagatgaagtctacactgacagcgcaggggaggatggat

SEQ ID NO: 381980 - DNA, 314 bp, Zea mays
tatttccttagtgttacattttgttaaataaacatgaaaagtctgactcagattacctattgtttagttggaacttggaacatgttcagtacctgttctatacacaatttggtatggagtagtctgtatagaagcagtggtcgtagcagaacctactagttgaatgtccatgcatttggatccgaacaaataaaaggatcatattagcctcacatgtctaggtactgctgttgggctgagcctaatgccacagcattagtctcagatgttttgggcatttaatcaagatctgtcccagtcaatattgtgcttgg

SEQ ID NO: 381981 - DNA, 124 bp, Zea mays
  unsure (1)..(124): unsure at all n locations
aaagagacatcttgctctctcgtctnatgtgcccgtagtaaggagagagcatgagatagtcatgctcaacactaacatagccacatatcagcgtcatagcctgtggtgactgaatgtatgcaca

SEQ ID NO: 381982 - DNA, 114 bp, Zea mays
  unsure (1)..(114): unsure at all n locations
cgcgacagggngtggctattcttctgcctggcttatgtctttctacagcacagcaaccttttcttcctatatttcagcanggtttaatgagtgggtcggccgaaacaaaggagc

SEQ ID NO: 381983 - DNA, 168 bp, Zea mays
aaggcgcgcgagccagtcacaatgcgtcccgtcgaggaggctgctctagtgctgcacgggaggcgagtgccactggcgcgcgaaccccaacgagaacgtgctccggcggcgagaccgaggtcgtcgcgcaagaccgggtcggcgaggcgagatgagccaagaggcgag

SEQ ID NO: 381984 - DNA, 311 bp, Zea mays
cacgtattgttcttaatctcacgctgcctcatggactcttcctccttccgctatccacgcacagactcacgacggcgggtggaccgcggctacagccacctccgctactgcaggtgccagaaggctgctaagcaaagctcttgaaacaccctggctgccagaactgaactgtggtagtactaagtaacacccttggctagctgtgcacaacctacgaccgtgcatgcatgtaatgtggtgtcatgtaacgtgacagcaataaatattaataacaataataacacggcatgtgacctttgcatgcttctagc

SEQ ID NO: 381985 - DNA, 143 bp, Zea mays
cgtcctttatgtactaataaaatagaaattgcatcgatccttgctgatctagctggatcgttgctcttagaccaatggatctagccaataggttacgcgatgctccttcaacctgtgcactagttcaaataacgaaccatcaa

SEQ ID NO: 381986 - DNA, 296 bp, Zea mays
atgatgacgacattctagaaaactgggatgatgaggatgctggtggtgggagaagcaccggggttgctaactctattgatgattctgaagacgagggcaggatgcatctatttctgttctggtggattccatatatgtttcacagaccgcaggagatggttactgtggcaatttgtctgactatgagggtaattccaatggagggagaaacaaaagaaggttcatggatgggaacaaaaaaaagagaaaaagatcacgaagtcaagcacagggaagtagaggcccattagatggta

SEQ ID NO: 381987 - DNA, 238 bp, Zea mays
ggtgtgcataatgatggattgcattgcatgggacggggaatggggaaatggttgccggtcgggggttctctcggtctcggtggcacagaggtaggaagagaaggcatagctaattaacgttccacgaggttttggttattctgcttctaagtttccgaaaatttcttgaatgaacaatcttgaaacaacatcaaaagagcagtcatgaggggagagatcggtctccctacctccttgt

SEQ ID NO: 381988 - DNA, 109 bp, Zea mays
aaaaaaccagtcctttgttcttcttcacccggcacgcccagcgccagtcaccaaccttccaaaaccttccttcggtcgcaatggcgcgcaagaagatccgggagtacga

SEQ ID NO: 381989 - DNA, 304 bp, Zea mays
aaacgccaaacgcaacacccgccagcaggccacctgtgagcagcgatgagctcgtcgacgccccggccgcgatgacgacgcgccggacctcgtctgccagatcgactgcgtccacggcatggtggacgcgctctcctcagtccgctggaagcgccaccaggtccgtccgtgaatctatcgctggaccgcctcccgccccgccccggctcggctcctaaatcctaatcccgagccccggatttcccgtggcgtaggacgcggtgatggagctgtcggagcacgggatcgttctatccgtagagga

SEQ ID NO: 381990 - DNA, 265 bp, Zea mays
caccgcaccagcctagcctccccccgccgctcggccgaatagaatcgattccccctcctccgtcgctgtccggccgaccgcggagagcggagtcgatcgggggcgacaacgatggtggttagcgtggccgcgaccgggcccggcacggacgccgagccggtgagctccaccttcttcgcgtcccgctacgtccgcgacccactcccacggtaccggatgccggagcggtcgatcccgcgggaggcggcgcacagatcatcagcga

SEQ ID NO: 381991 - DNA, 297 bp, Zea mays
aaggaacaacatgaaagtcatccccatgttggaaacctaaaaacaacggagagaaaaaaaaaacccgcatcgcgtccttggttcctcgcatcagccacccactggattttcttgccaacgagcttcgaccacaccaacgccgcttcgtcccagtgcttgctaatcatcggctcctcttaattgcagcaaccaccacgcttcgtgttttcagatcaaagaagtcggaggcacaacacagatttggagcggcacgccagcaatacggaccgggggtgacctgaggcgtggagatttttg

SEQ ID NO: 381992 - DNA, 113 bp, Zea mays
ctcggcggcaccgcagctgcctgcgcaggcaggggaacggagcacaggaggcgtgggcggaggagccacgtccgcgcagacgcaggggaacgtggttgtatccaacgtaggca

SEQ ID NO: 381993 - DNA, 213 bp, Zea mays
tgtcgactcccggcgaattgcccgatactatggagggagacgatctgagggccccgctgctggcggccggctgcggccgtcccccgtctctgctgcgccgtgactcggcgcggtcgctgcgcacagcttcctgtcgcggctgcccgacaaggtgcgcgccgggctcgacccggagcacctcgccgacgtcgacctctcccgctccaaaggcat

SEQ ID NO: 381994 - DNA, 225 bp, Zea mays
cacacttcacaaaagacttggctcggaggtgccaggaaaatgaagggaagcccatcgagagtatctttgatcaagctgagatggctgtcgatgagatgcgggatctcttgcagctgagagttcgatagtagtaagagatcccgcatcccatcgagagtatctttgatcaagctgagatggctgtcgatgagatgcgggatctcttacaactatcgaactctcagc

SEQ ID NO: 381995 - DNA, 116 bp, Zea mays
cagccttggccgtcgagcgcaccagctccttcctctccctctcgattctctgttgaccggagccctgctcaaatttccgcacgccaagctcccagccgagctcttgcgctgggttt

SEQ ID NO: 381996 - DNA, 118 bp, Zea mays
caacatcatcgccctatacaagaagatttcagaagctcagtttagctgcgcctcttggttttcagctgggagcaagaacatgattaccagaattcttgatcccaatcctacaactaga

SEQ ID NO: 381997 - DNA, 230 bp, Zea mays
  unsure (1)..(230): unsure at all n locations
gtggaatcgaccaaggatgtgaagaagcacgaagcgcatccggcggctgcggtcctacagaagcaggactgcatagtagaacgaggacgacgagagcgtctcagacgcgctcgacacgctctcccgcaccgagtcctntgccatgaacagcagcgtcacaggcctcagcggcgctctggacaccggacattgcgccgagccaggcacccgnggcttcatgatggaccggt

SEQ ID NO: 381998 - DNA, 176 bp, Zea mays
ctcgcctcccttttccctttccgcgcccatcaccattgccacaaatacgcaaccaaggcagtaagcctagccaagccaaccgacggcggcgagagcacatatacacacacacctgacgcctctgctgcagctgggatcaacgcggcagcttagtgacgacgacgactcttctgtct

SEQ ID NO: 381999 - DNA, 195 bp, Zea mays
agtggtgaccaccagtaaaccgcaaagtgcaaaccaaacaccacccacgagaaagcggaggagggagcaatggcggaccgagccagcagctgcggtcgttcgtggaggtgccggcgggctcccacttccccatccagaacctggccttcggggtcttccgccggcggggggtgcaggcgcaggcgccgcgccccg

SEQ ID NO: 382000 - DNA, 312 bp, Zea mays
tccggctctagctcgccgcgcgcgctctgcttctagcgcgtgccttggagctcttgcgcgcccctgtttcgcataaccatctctaccgctaggtatctccatggacgcgccaaactattgccccatcgcgtatttctctggtggtcgcgtgtgtgcgcctcgtggttgcgttcagccttggttccggtacctgcggtgcttgcttccttagtgcttgtcttcttccccctgcgcgacgaggagaggccgtgggggaaatgctgcgatttgaccgtatgcgccatgacgtacgtgaccatttggtcgtgcttt

SEQ ID NO: 382001 - DNA, 250 bp, Zea mays
acgaggatatatagccccagaattcatcgacagtaatcctgaaaatcgcgcaattacaaaaaagtgtgattcgtatagccttggtgttataattatagagctactgacgggaacgcgcacaacgtgtgctgttaacgatgtacttgacagtaggatcagccagtagggagaatcaaagactaaggcacagttagagcagataaaagaatgtactcagatagctatcgagtgcagtacccctaaagcagag

SEQ ID NO: 382002 - DNA, 278 bp, Zea mays
  unsure (1)..(278): unsure at all n locations
aactaatccagatagctagcctttgatttctcactttaatctgacgaagtgcactcctanngaacaaactcgaactcgcgcggtagttgagcctagatgcatggatgtgcgatggccaagcagcatgcgctatacggtgactgcggcgcggcgaagacttcgactacggatgggaagtgcgactccgccggcgccaaggctagctccgacgtgtcgaagtgcgactccgccgtcgccaagtctgctggggactacgtcgtcgtatggaatgtcgacgc

SEQ ID NO: 382003 - DNA, 288 bp, Zea mays
cgctcgcaatcctgtcactatcactagtccccgctccacttcctctccctgtaaagatttcggtctgtcctcttccgggttcctgatctcggtctcggtccccgattctacctgtggagtctttcctgcaatctgtagcagtagcacgttgcacgtgaggagtttgtgcgttcctccagaggagccgagtccgtcagtggttacttgccactagcgcgaatcacgtccgggttgcgtcctccactccgtgccaatctaattccgggcgccctgggaaggattctggac

SEQ ID NO: 382004 - DNA, 118 bp, Zea mays
aggaataaagagtggtagccgcatgcgcgtaccgcggccatggctctccgatcagagatccagctgtgtacgtgtgtacgtgatgttgttccatgcatgagctgtatacgtcttgcct

SEQ ID NO: 382005 - DNA, 287 bp, Zea mays
actcgtctgcacttggtctttgccagtagccgagctgctcactatgctcgagttcctagcgccctacatgcagtcgccggcagccaagcactctggcacaagcgcctctaagccctgctccttcagccgtgccaatgctcgccagccctcagcccgcgtctctggtacaagtcgtcctgtcagctaccgctcgttcctgactagctcctaccagcgccattgacgaaggttccaatcattagtttcaacctcggctccctatccttgcccagcctcatatcgtcttc

SEQ ID NO: 382006 - DNA, 275 bp, Zea mays
  unsure (1)..(275): unsure at all n locations
agggtttctcaagcatctgatgataagaactggaaggttagtgtcataaataatgtgaactcgtctgtaggtaattcatctgtgggtgaacaagaatatactttgtacgggaagccanacattacagaaatgttgagaggacttgcgttccagatatctgccaactccttttttcagactaatacaaaacaggctgatgttctttacaagcttattgaagattctgctgggcttaaaggagatggctctgaaattgttcttgatctgttttgtgg

SEQ ID NO: 382007 - DNA, 303 bp, Zea mays
  unsure (1)..(303): unsure at all n locations
tttgaaggaactgtaatgttctctcagtactgagaaattcttagacaatgctcctttagaagcagacagtcgcggactccttaaaaataacgccccgggccactttacaaatataacgatgtactactcgtcttttagtttttcgcactttaggggtagtaacatttaaaacaatccaatggaacttttaatttttcgcactttaggggtagtaacatttaaaacaatcaatggaactgtggcagatagaganaaagaatcaaacgttcgacaacaattactcaccatagaggagaaacactc

SEQ ID NO: 382008 - DNA, 297 bp, Zea mays
agtacctgtgtccatgacagtattagctcctctcctcagccactagattgtaaacttgtatgagcagagaaaggaaatgctaaggcacatgagatgagttctcatacctagcttcatcaaattactgtgtattcatttcgattatacccaacattcattcttgagtagttatcctgaagggataacacttcaaggacgaaggtttctattgtttaacattgtgttgctttgatttcggttgaatatagcaattgaaaacaagtgtacaacacctactttgttgatacacatgtttta

SEQ ID NO: 382009 - DNA, 296 bp, Zea mays
ggccgccctccctggtgctcgccccagccgaggtctctccatgactggctgctgctccctggcactcgatttctccaccaggcatcccttctcttcaacctcgacgcaccgctgcctggggttgacgccggagctctaccaaggcggatctccctcccttcaccctctcatctcctctgctgaccgcgcgcgcacctctctgtggccctctccagctcggccgctcgtctctcggcctcccatggcgcgcgccgtgcccagccgaagctctttccctgctccgcaccatggtgttt

SEQ ID NO: 382010 - DNA, 295 bp, Zea mays
ccaaaaccccatacacaggaaaagaaaaggaaacatggtgtaacaaaacccagtcgcgatgttgagcctgagattcatagtgacctcaccactacaagatctattcataaaagagttcctgtgcaaagaattgaagatgacagcacatgcatcgaggatatgatgagggagtgtggcatcattgaaaccagagtagatgagagcatgaagggccatgctggtataccctttaacattttgtctggtctttttggtgatggcagcataaaattcgatgccaatttacccagtaaga

SEQ ID NO: 382011 - DNA, 146 bp, Zea mays
tcctactctatatttttgtgtggatacgtagctcacagctacctgtcgtcccaccatgaaggtcaaaggggattgagagggagctgtgaaccacgtatcctactctatatttttgtgtggaaaagacgttaacgaacgtgctgtat

SEQ ID NO: 382012 - DNA, 117 bp, Zea mays
ccgggagaagacgatgaccatcgatgtaggcgtatgcagggaaggcgagtacagccaagtagcaggagcatgagcctttattagagacagctgaagataggaagatctcaaattctt

SEQ ID NO: 382013 - DNA, 147 bp, Zea mays
tacaaaacggaaagtctgatctgaagccagcagacgtgaaagcgacagcacgtacgtacgtgtgaagactgagggcttctcggcggccatgggacaatggtgctttaagaaacgcgcactctggtgattattctggccattagctcg

SEQ ID NO: 382014 - DNA, 182 bp, Zea mays
tgcagcaggctgcaggcgtgaatcgtggcgctacagctcatgggtgaagaagacaattgacggtgaccttcttcctcctcctccacttagcctccttctcttgcagcttggagtatctgaatcccaatgtacatgtgttcgcaccacatcaaagggacaccaaagaactcgaccgccggcca

SEQ ID NO: 382015 - DNA, 187 bp, Zea mays
ccaggattaggccaggattcattccaacttatcaaaacttatataaattagagaaacaatccggccaggaaccgttccaggccttcaatccgtgaaaaacgaacaggccctgatcgatcgttcgacggaacttctgcacccccttccttttcgcagtccgggcgtcgtctccatcgatcgcatcttt

SEQ ID NO: 382016 - DNA, 291 bp, Zea mays
  unsure (1)..(291): unsure at all n locations
ctcgtgtcttccctatctccacgctaccgcacctgtcgccgncgcctccgncctctttgctcccggccccacttcaagcccaagcgtccgcgtctcccgcccgcgccgccacgcctcgatgtccgccgccgccgattcctcctcctccattgtagtatcgggtgatgcagcggttagctcgctctcgcccgagagcatcgagcacaacgatctgctcatagttgggcctggcgtgctcggccgaatcgtcgctgagatgtggaaacaggaatatccaggttgcaaggttta

SEQ ID NO: 382017 - DNA, 291 bp, Zea mays
  unsure (1)..(291): unsure at all n locations
ctcgagccgattcggctcgagggagagacatcaatggaaggtcatttaagtttaaccaagaaaactanancatctaattactantacatttgtgaaaagaatggtggctcgttgtctgacaaggtaatgtatcctaattcagttggttgttcgttgttctaggcaggctgcttgctgaagctaatccctcattcttctctaaaattctgacaagttctgcctgtgactaacacagatggatgaacttgcttgctttgctcctggtatgctcggcttaggtgcctctggtta

SEQ ID NO: 382018 - DNA, 168 bp, Zea mays
aaactcgggcagtggtaaaaagaccagctaaaagttctgaggcaagcatcaaattgcccagatactcactgagggtggtgctctgtgcttacatgatactggctcatcccagtgctgttttaagtgggcaaggtgagcgggagaaacagcttatcgagtcggcagcaa

SEQ ID NO: 382019 - DNA, 289 bp, Zea mays
agaaatgtaaaataaaccttgattggacaatcagagtacaacatgtcccaaattccaactctaccaattgaactgtatgctcctgatgtaaattggagttcctttatcctactatcagaaggtctcttagtgcttatagcatgtcttgctctatcactgctcttgtatcgcgcaaacctcaagtacctactcgtatgtcctttcccctccccctcaatctgctctatttcccatacaattgcaaatcacgacattgctagcaaacttaagaattgttccagtgtatcac

SEQ ID NO: 382020 - DNA, 311 bp, Zea mays
aactagccattgcctccggtgggccgaaacccaaactggcctacatcatcttgtacgtgaaggtcgtggagaaggccgtctccttctacgactccgccttcggctacaccgtccgccgcctcgatcagtcccgcaagtaaaacgcgcgcgcctgtgcccgcctgatccggatgcgcgcctaatctgccgcacctgcgcgcctttttgggattactttgcaggttggcggactggagatctctgctacgaccatcgcattcacttcgctgcaccatcgggagacggacgagctgtcggtggcggtgcagctg

SEQ ID NO: 382021 - DNA, 243 bp, Zea mays
  unsure (1)..(243): unsure at all n locations
attaatcacccaccctaccacacgaagttaccaccagcagcttgcatcaacagtagaagagagcgagccgaggaccgcgtcaccgnagccctcgtcggcggcccagcaccaccaggcggcggcggccgggcaggcgcacgcgcgcgcggacccgacgcacgacaaccgcgtgaagaacaagaaggcgacggcgcagaaccagtgcagccacgacgtgacgctgacgcaggagccgctggccaa

SEQ ID NO: 382022 - DNA, 183 bp, Zea mays
acccaatcaagcaaatcctcgcttccctcccccacgtcgcgtccgatcggcgacggtgcgccatgtcgatagtggacaccttcttcagcaagggcggcggcggcggcggcggcggcttccgcggcgccaagtgggagtgtcctattgatctcaaagaagcaatatcaagtgtctgttttgccg

SEQ ID NO: 382023 - DNA, 178 bp, Zea mays
  unsure (1)..(178): unsure at all n locations
cgtcaaccccagcttcggctatgacgaagcgcaaccaccgcttcgtcagttctccgtcgcgcctccgccatccgcaccggcggctccggcgtctccagtgccggtagtaccgntgcgcatagcccgtacctagctggttaattgcatgcacgatgcacccactagcgctaattggttg

SEQ ID NO: 382024 - DNA, 220 bp, Zea mays
gcagcgggcagagccgtacggcggtgcgtaccccaccggcacggggccgcgtttgcagggtgccggcggaactaccacacaaggcgccttttttccccttgtgtgcgcccgcaatgcgctcttgagatccccagctcctcctcctaggactgcatctcctgctccggctgctggcactggccgcctacccggagcgggaagagcggcgggagccctgcat

SEQ ID NO: 382025 - DNA, 308 bp, Zea mays
actgattccacaagccgtgataatactgttggctctcccggaatgaactcggaagaacttatggacgacaataaagggaactctagacaggacaaaagatgaagaggttgctcacagtgttgagtccaagatatcagctgaccctttgctcatgtagcaacccatttctgtggaatcttcagggtcaatggcttgccgaatgcagaacaagttagcaagcaagcaaaatgtctggtagacgattccagtatcttgccagcttcaacatcggaaattgatatttactttcagatagaatatattacagg

SEQ ID NO: 382026 - DNA, 319 bp, Zea mays
acaaaatcatgcaataaggaagctagtacaagtggagataagtccattcttatagttcaacttggataggtagataatgacatctacatgtgctgcccttagaaagggcatcaaataaagtattgtatagtttctcaaatgactaaacataaatattaaggataaagttacatttgtagatgaatatatgtatttagatttacctactgatacttggtggattgattctggtacgactgtgtatgtcaccaattttttttatggagattccatacgaagagggccgttttaagaggagaaagaaatattagagtcgcca

SEQ ID NO: 382027 - DNA, 238 bp, Zea mays
cgccaagaaagcaagcacagagccgagcctacagcccaacaagaggaggggagaacacgtcgcgccgcctccgaatccgtctcgtcagctcaccgcccgccccacagaactctgccccgtgctttgccaccggtgacagcagaagcagctagccatggcggcggcggcggcggcggcggccttcgatgcctacaccgacaagaacgccatcttccgccgcctcaaggccaagcccgag

SEQ ID NO: 382028 - DNA, 313 bp, Zea mays
  unsure (1)..(313): unsure at all n locations
aanaaaagaggcaggcggacgacacagagagaggctcggaacaaggaaagagtcgccggcggcggagaccccaaccgaaggcccccggtcgcttcgccgggcaaggcgtgtccgtgcccctcggacaccgggagtaaaaaacagtgaacgctaagctttgggaatggagttgacagtttctgctgaataacagaaaaaaaattactcgccttttcctgaatccatggaacttcttgataccaatggtcatgggaaaacaagagcacagaatgctgcaaatatgtgcacagtttctgttaagagtccagataca

SEQ ID NO: 382029 - DNA, 226 bp, Zea mays
ttctagatcgccagccgccgcccttttcccttttctttttttttttaatttttttttttttagcacataaaccagtgcacatgttgtggtgttcattaccaaacacgaaatgctgttcatctgagcatttggttacaaatctaatggcctaaaccgcagcagcagtgacaatttcccctgcgctcgctcgcttctttattattaaaccaagacacatcagacatct

SEQ ID NO: 382030 - DNA, 166 bp, Zea mays
taggcatttttatataagtattgcgaggagaacaaaacagtatcaattagtatcgaacttgaacactcaatgtttacactttacattgaaatactgccgttaggacatgttatttctgagtacaaaaaaacaaaaaaaaaaaaaaaaaaaaaaaaaaaaaaaagga

SEQ ID NO: 382031 - DNA, 252 bp, Zea mays
cgcgcctctccctcctccacgccgccgccgccgcgctggtggtcctgctgcagctgcatggaggcgccgtggtggttgcgtctgagccgccctacacctgcagcgccggcgcgcgcccaacatcccgttctgcgacgcgaggctgcccatcgaccggcgcgtcgacgacctcgtctcgcggacgacggtggcggagaacatctcgcagctcggggaccagtccccggccataccgcggctcggcgttccggc

SEQ ID NO: 382032 - DNA, 255 bp, Zea mays
aacagatgcaacaagcacagtacccaattctactagcaaaaaccagattttacaataaatagccattgcaaacaagcaacgaggcaagacaagaacatcagagaacattcatctagaagttcatggccttgtcataaatcacttaataataataaatctttacttatatatttatatattattataaaattaaagagtggaaatttcttcctccaaattttgatccatcactctctcttagtctctctctctctc

SEQ ID NO: 382033 - DNA, 249 bp, Zea mays
cgttattctcgttcttattctctgtggagtgatcggagttgctaacaccctcacatggacgcgccccctgctcgtgatctccccaggaccgagcgcccctccccaactctcctacaccctcaagtcgagtgggctctctccatgggtgaagcttaggcgccgatgctctccttctctggttcgacatgtcagcatggtgccctctctcccatgcccgatcctgaggtccctgcctcgacctacacatcg

SEQ ID NO: 382034 - DNA, 164 bp, Zea mays
gttgactttagatgtgttgttgaaagtagggggggcaacttgagagaaggtgatcagacagttgtaatgtaataccttttaggcttttactgcctagtgcttttcctgactagactgggctcatgcctaaggttcccaaagcaagaagtcttgccctgacttgc

SEQ ID NO: 382035 - DNA, 267 bp, Zea mays
atacagtcatacgatcaggtgattagcgatgtgattagccatggtgataaaaacatcttaaaagatgggcgcaagagatttcctagtggccacacttcgtgtaagtatgcactagtaagtgctcatagactctagcatttagatggataagcttgttgtccaagtgtagagctaataactgaggtataaaataccggttctagactgtcaacaatttctgcgttcagtagaagtagtgacatggatctaaatgtttttacagctatg

SEQ ID NO: 382036 - DNA, 154 bp, Zea mays
ctcgtgcgggatgcgaggtgcgcacatgtgcttgggcacgagatggtccggcgcgttgctggttcctgccgtccgtcccaggtgatggatcagaggtctattcctctaggtgatatatatatatatatatatatatatatatatatatatattt

SEQ ID NO: 382037 - DNA, 134 bp, Zea mays
atggcatggatctcctccctgctcacaggcctcaccgtcctcaatagcgagtgtagcctcaaacttcgcaccaacacactcgacaagcttgatggcgacccctacgtcaacatccgcatgggcaaggtttgtgt

SEQ ID NO: 382038 - DNA, 192 bp, Zea mays
cgacgatccgtctcatctgtgtaggtcgcaccggacacaggccaatcaagttcaagttcgacagcgcgcaggctagctccacgcggccatgccatcgctaatgtcgctgacgcaatggcggaggaacaagagggtgcctggagggccggtgacggtgcgcacacagcggcgcacatcgctgggtgcactgtg

SEQ ID NO: 382039 - DNA, 206 bp, Zea mays
ggcaaaccctgcacgcctccgcaaccgcaaccgcgtcgtcggcgtgcgcgatcccgagaggcccagccatcagcttccttggcggggtgtgtatgcgcgtacgtcggccgtgcccagatcggctgagccaaggccatggcggagggctgaggaatgaggagtcttcggagtcgtcttcgagaagcggcgcgcgctgcaggtacgca

SEQ ID NO: 382040 - DNA, 129 bp, Zea mays
ttcgcttcttcagcgaaaggttggagctttgaggtggtgcaggtgctcagccgaggacttcgggcgatgacacacgcagtagcgcgcgtatacacggacaatactgggttcaggtagcgagttcctcga

SEQ ID NO: 382041 - DNA, 158 bp, Zea mays
  unsure (1)..(158): unsure at all n locations
agctcagaaacagnctcacagtcagattcagaagattcagaaccagaaaaaccaacagtcccagcgaaaaggcctctagcaacaaataaaaagaatgaacaatccagcgagaaatcagatgacagcactgatgagagtactgatgaaagtaacgagga

SEQ ID NO: 382042 - DNA, 169 bp, Zea mays
  unsure (1)..(169): unsure at all n locations
tggaacttgatcacagttctcctctttatcataatagagggcagtactgaaccctttattgcntgtttatatttgtcaggattggactggatactcacacaacttgcgatcatgagtgctttaggctgggtattggatgctttaccaactttgctgtagatattgggca

SEQ ID NO: 382043 - DNA, 164 bp, Zea mays
cagctttagcaagatatccaggagctttgcacattcaaccaaaaatagacttaaataactatgatgcacagcttgctctggatgaaaataaccaccagcacacaggtgcttcagaaagccagatcaataatttgccacagtcagtagttcagtccaatagcatt

SEQ ID NO: 382044 - DNA, 209 bp, Zea mays
cgcgatgttaggagcagacatgacgcggcgagagtacagcatcggagatcaccgccgccatgtaggcacagcccagcaccttgcggcccgaaaaccgtcgatctggtgccctgccctccttctccgatgccttcgccctcgcctcaggcagggtccctcacccgccttgccaggctctacgtggtcggttgtacgcggatgagcagaca

SEQ ID NO: 382045 - DNA, 191 bp, Zea mays
acgtgatgcccaagagaaagctcttccgtaagtacagcactggatctggatgtgtaacttctcttttctagagtgcagatgtatcattgtagtaataggagaaagaagtttttttagatactaaaagattgtagttgcgactttgatgtgtaatgctgctttattttctgacatttatgtgaacatgctta

SEQ ID NO: 382046 - DNA, 123 bp, Zea mays
gctctgacatgtttcaacggtcattatagccgtcatgctgtactgaggaccgtccggccctagggcgcggacagtccggtgtgcgcagaacttccctcttttgctcataacggttggttttag

SEQ ID NO: 382047 - DNA, 192 bp, Zea mays
atcgccagggtatcctttcatgaggtacagcacagggagccgtggatttccatacaccccagccgacactgggattgggtattcccatatgctcttcacaccagagaatttggcagctatcacagatgactttgcagaagagaaccttttgggggaaggaggatttgggtgcgtgttcaagggcattttgca

SEQ ID NO: 382048 - DNA, 122 bp, Zea mays
gccttcaagcgcacacaggcacgcaaatcccctcttcatcaacctcgactcgagtacgcgcgcgtacccgaatcgaggtatggggatcccatcgctcaactgtcgattaatcttgatcagat

SEQ ID NO: 382049 - DNA, 125 bp, Zea mays
tctttttgttttgcacgtctacagaagcaaagaggcatttacctggactccaacggacaacgtgctgatccttgtttttggacgactcgagaaaagacttcctgtacgatgatatagtacgtttc

SEQ ID NO: 382050 - DNA, 173 bp, Zea mays
agaccaagccaggccaggcgaggaggttcggttgacgagttcatcctcttcctcgacatcgccgatcccgccacgcgctgcccgcagcggaggtgagacacaataatcttaggtgaggagcatagttcaaaagtcaagatagaaagggcattggacacaggaggaacgttgtg

SEQ ID NO: 382051 - DNA, 178 bp, Zea mays
ggttataccaaagcaaaaaaagatccgccatgttttatggtcattgtcacaaagaagtatctgcaaggtatgtcatacatagttagttttatacctatcccttttagtagttcctttattttattttctaaactacaacatggtcactatttcagttattagtagttgtacgcaaagg

SEQ ID NO: 382052 - DNA, 185 bp, Zea mays
aaaatttccagccgccactctcttctcctttctcccccacgcaccttcttcctccttgcgcagggcggcagcagccaccagcgagccctgctccatgggcgtcacccctcaccttcttcctcccttcctccccatggctgcagctcttccactcctccctcacgccagcagcagggagcctaggt

SEQ ID NO: 382053 - DNA, 245 bp, Zea mays
gttctcccctaccttagccgctcacaagactttagcagctcttccaggccggctcctcttccttctcttggtgcgtgctcatatcatggccaagatttgctcatgcctctttccacttcaagcatgcatatgcgtcgtctctgctggcagcccggccgttctgacgctagctgatcgatctactccatcaccgagctggctcttctatggattattcgtcctcgtccaccgtgggacgccatgat

SEQ ID NO: 382054 - DNA, 292 bp, Zea mays
ctgcccagccgctgtgcgttcgcgctctctcccacactgtctagcgacgactgcgtgggtgggtgggtgggctaccgccgccgcccgtcgccaggtgccgatctcttaacacccttgaccctcctctcgcgtctgccgagcgagaacgtaccgccacgacgaacgatggggaggccgagcagggggcggcacgcatcgagatccgccgcatcgaggaaggcggccggctgcatgtgaccttctcgaagcgcaagtccggcctgcaaaagaaggccgccgagctctccctcct

SEQ ID NO: 382055 - DNA, 128 bp, Zea mays
gagaggagaaggtaggcccggcgtcctctgtctccgtagcctccggcgagcgacaggaggaagcgacggcgtcgcatcatattggaggagtggatgaagccaaggcgtcgggccatgttggagaagca

SEQ ID NO: 382056 - DNA, 274 bp, Zea mays
tggcactctggcgtgagaaaaggaaactgaattgaagcacaggttcgcggtctatctcgcactccctcccacctacccactttctctcctctcgctttctcctctctcgttcttgacactccttgtgatcgccacccgcgcggccactgcagatcgatcgagagaggcgaacggcagtcggcaggcgagaaagaagtgctgacgcctcgtttccgtcgcacgcactactactcgcccagtccgccgctctcccgcggatccttcacctccactc

SEQ ID NO: 382057 - DNA, 128 bp, Zea mays
gatcgatgcagctcgtacatgtgtactcatatcaagcgctgctggagtgcgatgacgtaataagtagtcacccatatatatatatatggtgtgtgttgacgtaccacgtatactacgtacgtgtgtac

SEQ ID NO: 382058 - DNA, 134 bp, Zea mays
ctctgcctgcctgccttgcctgtagtaagccacgcggaggacatcgagatatcgctgtgtgacggcaactcggacgacgagcagcggcagcgtaagatcagctcgctgcggccgaaggccatccacgcgctcaa

SEQ ID NO: 382059 - DNA, 199 bp, Zea mays
aggtagcgaccgtcgtctcgggctgcgggaggctgaagaaggtcctcgtggaggagtggaaggtgagcgagacgacccggcggatggcagggcccgtcctgtcgttcctctgcaccggactctagtaagtagggttgccaagaaagggcaatgaatctgggcagcgtcagacttgctctttggatgaacagagcttgta

SEQ ID NO: 382060 - DNA, 127 bp, Zea mays
  unsure (1)..(127): unsure at all n locations
cagcctccttcctggcttcctcctctcacactcgctcgtgctgcgctcgctacatcngttcgcataccattcgaggagagcggtgagacgggacgaaaggcaagatgttcatcgagagcatccgcgt

SEQ ID NO: 382061 - DNA, 185 bp, Zea mays
cttggatatagcgctcagcttccatatactttgttaaacacgatggagcatgggcatgctatttcaggttgattgacacagtcacatgatatttcagggtgatcgaacagagaaagtaggtgttatagacaacacatcgaagatcattggatttgaggacccacatacgaagacaatcatcggct

SEQ ID NO: 382062 - DNA, 191 bp, Zea mays
cgatcgtacacgatatacggacaacaccgcacacatctatctaggccagactagaaggtagaagaagcaacgacggtcaagggcctagctatttgttaacaaaggcccctcaccagctccccttctgtccagcccacgggagggcgactacggataggagcgaccggaggagctgcgcctgcccaaatcca

SEQ ID NO: 382063 - DNA, 103 bp, Zea mays
cgtagatgttctagctaacacagacacatagtacactctccgttcttgttttaaaaatgagtgagcgggcgacaagtattcgataacggattcagcagacttg

SEQ ID NO: 382064 - DNA, 131 bp, Zea mays
  unsure (1)..(131): unsure at all n locations
cacaactcctcgcggtccatcagcagtgacctgttccgttccggaaacggccggagagcaacgtcacacgcgctaattttggcctctgncaggcaacagaacagagcacgccgacctcactggtatataaa

SEQ ID NO: 382065 - DNA, 315 bp, Zea mays
atcagccaagacgaattcacgaagagtgatgaaagcttgttgggattcttgcacctaaagatggctaatctaccgggagattagcttttgtattaattgtacaaaagcttcaactgacgcaagtcgtgaagagtggttttggcaatttggccattcatgctgagtttcttcaatctctattggcgacatcaatttctgcatcatgcctatttgtgtttctgctttgtgcccttcaatttgttcacttaattagagcttagaaatgagcctctgcctgtgtattctgggacctgccattccagagtccatttctgt

SEQ ID NO: 382066 - DNA, 250 bp, Zea mays
cagctacaccatcgatgtgaacatcgacaaggcggaggacgtgctgctgcaccggagcattctcaacgagtgcactgaccctgaaaatcgccccatcttccatgtaggcttcctgaactgcatcccgccctcgttggatccacagtataacactcaatccatctctataacactcaatccatctctacgagcgaaaacggtaattgtaggggttctcaggattccactttgaggtacaggctatgaccca

SEQ ID NO: 382067 - DNA, 297 bp, Zea mays
gcaggacgagaacgttgaggtcatagtccaccacattcacggtgtcatcggatccttcatgaagaggctcgaaaaggagcacacgtcgtcaaggtggacgacttcaccggagaaaaggagggaagagttcaggagattggtttccgatgctgctaggccgttcctcctcggccgaacggagcgattcgtcgccgaggtggagctcttcctggcatcggatctcaacatggaagcctacaacaaactgcgcgtccagaggtttagggagtccagctctcatctaacgagagagcaaga

SEQ ID NO: 382068 - DNA, 125 bp, Zea mays
ctttgtcaaggcagccgactccggcaacgatgtgtccggtctcctggaggccagccgcgcacagctcgaccgcaacttccggcagctcaaaaagacggtgtaccattccaacagcatgctatcag

SEQ ID NO: 382069 - DNA, 156 bp, Zea mays
ctttagtgtcgcagtctactagcagttaaaggatctgtttcttggaaggatcttaccttcagggctgtcagacctaccttgaaactagacagcagcaattgtatgattgtatctcgatatgctccacatcctcttactgtaacttccaactggtac

SEQ ID NO: 382070 - DNA, 223 bp, Zea mays
ggcacgcaaacgcaacccaccgccgcgccggcgccgccgccggccctacttccttacccttccctggccgtctcccgaagttcgctgtctccgctttaaccatccgtggtcccgttcttctgcagtaagcgggtgtttctgtgcccacgcactggcgtcacgcggaccccactgtttgtagggttacaaggacgatacaccaggccatcacagtcgcattatt

SEQ ID NO: 382071 - DNA, 268 bp, Zea mays
gcgaggagtttccccttccgctgcgtgcatcccgcgagagctcgaaaacctagccgcaaaatcgatggctcggcgcggccacgacgacgacgacgacgatgtcgatgaggaggaagaggaggatgcctatgacctggacgacgacgaggatgaggatgaggaggacgactacgaggaggagacgaggcgcgggaaggcctcccgcggcggcggcggcgccaagagcggcggcgggcggaacggtcgcgggaagacactttatcgacga

SEQ ID NO: 382072 - DNA, 147 bp, Zea mays
attttaatcccaagaatatatcaagtaaaggaggttttgcgcttgtgtataaaggttgtctgagaaacagcctgtgtctcatatccttgatattatgaatttacataatacaatctaatctgaaagatagttttttcaggctcaagc

SEQ ID NO: 382073 - DNA, 107 bp, Zea mays
gcgacaagcagcctaaaaaaaccgtatcgtctcgcctgttcagtttccttcgcctcttcccgcagcccggtttgccgaccaggttccaccgttccagagtagccaag

SEQ ID NO: 382074 - DNA, 117 bp, Zea mays
gtcatatatagttggcagcacatacacaaatgcaagctagctgctaactgagcaatgcaaaccttcttattcgcattgcatgtcgatcagctggaggagaccacgaagtgtggtcgt

SEQ ID NO: 382075 - DNA, 115 bp, Zea mays
  unsure (1)..(115): unsure at all n locations
cgtccacgtgacccaccgncctacaaggccagcaccacaggccgggggaaatagtttgtggctcatataatcgccgcggggcttatgctggattctgggccgagttccagttttg

SEQ ID NO: 382076 - DNA, 279 bp, Zea mays
cgagtgagacccagctccgcgcaagcggacagggccggaggaggaggagtcgcgcgaccgcagccctaacccgggccctgaggcacggaaccgagcagcccggcacaccgagccgcggcgtcaaggacgacatatccgagctcaccgaaacgctcacacgccgcctctggggcgtcgcatccttcctcgcaccgcccccgacaccgccggaggctccacaccgcgcgccgcgactccggcacaaggggaagatgaggggattgaggatgagggagaggc

SEQ ID NO: 382077 - DNA, 180 bp, Zea mays
agcaaggtgagtctcgtaggccagctgcgccgccaagagatccaccacggcggtgtttctttttcttgtccaatcctccgacgagttacaacagaaataaatggatcagctcaatccttatgcattaataatagattccagtgatagtgtacgtactccacatttgttacttgttagtat

SEQ ID NO: 382078 - DNA, 184 bp, Zea mays
cagggttacacactctctctctctctttcggatagcgcgccgtacatcaggaagatcgacctcaagacttccaagaacaccaaggacctgtcgaccgcgcttgagaagatgttcaatagcttcagtacaggtgagatgtctcggggttacactctctctctctctctttcggatggcgcgtcag

SEQ ID NO: 382079 - DNA, 284 bp, Zea mays
gtgatgcagtaaaacttatatcaatacttgaagatgcttcaaatgggttttctagtgatgtgaacaccaccatttcaagtctgcacactgtccaatgcacccgcgaaaggaaggtcgacgtgcagctagacttgacaacacatactgcttttctagctgtatttttgttgctttggtttcatctacatccaaggagaccgaagcctaagatcaactgaacaccgagccaatgagcagcataggccatagagtttttgtgaatacacgcatggattacagatggc

SEQ ID NO: 382080 - DNA, 298 bp, Zea mays
gacaggcaccacaacaacgcctacttcgcgcgggtaggcggcgtggaggtggcggagatgaacgcgctggagctgcgcctcctcttcgccctgcgcttccgcctcaacgtcgcccccgacaccttcgcgcggtacagcgccgcgctcgagtgccacgtcgacacgcccgacgccggcggccccgtgccgcggatgccgccctcctcccacgtcgacggcgaggaggcagtgaccagcagcaagggcaaggttgccgccgccggtgagcgttccgtcgtcgtccagcgtagtcaccgtc

SEQ ID NO: 382081 - DNA, 297 bp, Zea mays
ctccaatctgtgattcaaagcctcagcaatagcaaacatgttgacgggagttctgaataccacaccagtcatactgaatcatgtccccgctctgaaaatacagcagatactaattcctcaggtaaagaaacatccagggatagatcatcagctgctagtttcacagaggaggcaagcaacagtcagaaatctcagaaagtgcagcagtgtgatactgattcaattcaagctatcaatccatcaccagatgagtcatatccccaggcccaagttgaaaaggtcggtcccaaagatggc

SEQ ID NO: 382082 - DNA, 290 bp, Zea mays
gtggctaccagaggtccagagccgttgcttgttcttggcgcttgccccagcaccagcctcgcgcttccttggctcgcccaggtcgccgccgtcgctcagctcggcgcccatctatctgctcagcctccagcggcggccttcccctgccggtgcccagcccagcggcccctcctatctctccctcaagctctctgcgcgccgtgaagcccctgcgcgtcgcagtctcccaagctcgccatggctgccggacgagtctctcccgtctctgcttgtcctcttcgagcttggtt

SEQ ID NO: 382083 - DNA, 289 bp, Zea mays
cggctcgagagaccctcctctttagcgcatgggacagaagcctccatggctaagctcctctggtgcaggcacccagcctctccaactcggcacccctcaagcacacgggaccgcggtgcctctgctctcccatccaggcaccccttcccctaagcggatccatggtgctaggaggatctcctcctcggcaggcgctccaacctggcgtccatggtgccagtgtcctgcacagcgtccccctcccctaggctcctagcgcgcagagcatttctctgggtccgggctcgag

SEQ ID NO: 382084 - DNA, 113 bp, Zea mays
ggcgctcttctatcacatgagccgttgcagcatgttatagcattatgtgacgatgaatgttgtacacgttcctattgcctgatatgcgttaggcatccatttgaacagattgt

SEQ ID NO: 382085 - DNA, 234 bp, Zea mays
gcagctcatccatatccacagaaggcatctaaaaatgctcctgcagtttctcaagctattttatcacaagaacaacctacccagagggagcaaggttctgtcatgcctatggataccgctactgtgagaaacacaaatgcgaatgtcgcggtgccttcctgggacaatactcttgctcaacctttcagcgctggtcatgttcaaggtgcagctgcaacaaataactgttcaagt

SEQ ID NO: 382086 - DNA, 140 bp, Zea mays
gtacggtgtgaagctgagcccgtcattcctcgtgccgtccaactgaacggggtgcctcggcgtgataaacaactacgagtcgttgctgcccaacaagaaggccctgttcgacataccagtcgcacgcacagccagcgcgt

SEQ ID NO: 382087 - DNA, 188 bp, Zea mays
tgcgagatggagagagagaaggaaacctaggcagctttccgtttcgggaaattcccgggcgccccgttcgcgctgccccgctgctcccgccgccggttgccaagcccccgcacgctctgcgcggctcgctcccggtaacgtgttgccctctttcgccgcggcgaatttcgctgtttggatcgtgcgat

SEQ ID NO: 382088 - DNA, 299 bp, Zea mays
gtcaccaccgctctcgcgtcgccgccgccttcctccttcccctgcgattacaaaaccctaggacaattctccaccaattcctataatccctcgtcgctaggtagttcctgcgtctccatcccgatccccttgtcgattcagttgtaatcaggatgcagcccggatcggccccggcggccggcggcaccggcatgttcgtgccggcggcgacggctggcacggtgctctgctgcatgtgcggcgtgtccatgcagcccaacccggccaacatgtgcgcgcgctgcctgcgcggcgcgtcg

SEQ ID NO: 382089 - DNA, 298 bp, Zea mays
gagttttctccctgccctcgagtctgaccggtgttcatcacttgagggacatagctcttgagttcaagtcgacgtaaacccactccacagccacccaacatgatgtattttgtgcatcgagtgccaatggcgaccacagcagcagttctcaccctcaccgtggacatgattccttggaggttgtctcggccgtgtggtgcttgttccttactcctcgcagagtaccaagaagaagtgatttgtgaagaaggagtttgttccagttctactgatccagtggtggactccatctaactgc

SEQ ID NO: 382090 - DNA, 295 bp, Zea mays
gtaattagagcatgttgtagtgcaagctcttagttacttgaataacggacctttacacaaataatacccgaaactatttcactgtaggtcatatacaatcttgtttagggtccggagtttatttagttgtatttttttgtacacccatctggtctatgagctgaataatctgtctaatgatgtctctcttttggtctcatgtctggtggatggcgtcacgaattgcagatggaggtatgttgtattaagcattgtctgatggtgaaatattctattgtttttcatgtgttaatac

SEQ ID NO: 382091 - DNA, 308 bp, Zea mays
ctagcgcccagctgaattcccctgcgcgcgccctatcttccaccatgtgccctgctcgcccatggcgccagcagcagctcggagctccctctgcatccccaggcctgcgcctgctgcttgccccagcttggagctcgctcgacctccagctccggcgcccggctgagctccctggctgccgcgccctgctctcttttgctgctcaccggtgctccagctcgcggcgcccctgcttttctctctcctcctctactcccgccatggcgcgcgtctctgctccctcccccacggcgtgcgcctcaagctcg

SEQ ID NO: 382092 - DNA, 306 bp, Zea mays
ccaatccaatccaaccccagtccggcgacggttccgggagaggagtgggatggacggggaagcgatccggatgggtggcggcaacttggcgcccgcctacctctccggggccgccaccgccaccgccaccgccatcgccacgcaggatccgaaccagaaccagaaccagaaccaaagccagttcctgttcagcgccaactccacggcgctgcagctgttcggaagcaccgcggtccccgcggttggtcctgctggttatataaattacactggaaacacccaccttcctgttatgaaccaagcaag

SEQ ID NO: 382093 - DNA, 302 bp, Zea mays
gattacattaaatgtattgattttatgaagctgaagttctgtcttagtcctcattatcttctaatgtttggtttagttctggattgcttatgactttattttagtctagccgagtatgactactctttcgtttattacacaagttccttagttaattgctaggcaagtgtgatgatatgttgtatgaaatatgcttggtgaacgcatatgcattgatatgattgtgttaataaaccatgaagggtagagttttgtttatggataaattacttatacaaagaacatgttaacacttgctgttt

SEQ ID NO: 382094 - DNA, 299 bp, Zea mays
gaggaagccgggtatggtgacgcctggacctcctaggaggtttccgctgaggtccaggcgcctcaggcgcgcagggcggttatggaggggcttatctgcccacgcagccagtggttgccactgtcgtggactctgaagaagctgtcatgctgccagtagtcgttgcggaggtcgagcccgacgacggcgtggctcctgttgccgcaactcacgccacgccactggcagcagtcgtggccgcgccacgagcgcaccaggcacgccgggtcgctggttatgctcgccttgaaggacagcag

SEQ ID NO: 382095 - DNA, 155 bp, Zea mays
gcgcaggctctccttattttcttcacgcatgcgatttctctctggagcttatctcctgccgctcaagccgtggattttttcagtcgttggtcttatcttcttcacgtaaacaaaatcttccacacattctctctgtgttcttatcccagcgatgc

SEQ ID NO: 382096 - DNA, 298 bp, Zea mays
tgcggcacatgcttattttcagtatctttcccattcatcaactgagcttcaatcttcatatcaccatgatgctttgaaagggaaaacaagaagctacactatgcgtgcgatgctgtatctacttcacataatgttgaactatggggtggaactgaaggaaacacttgaaagtgggctttcaacagttcctttattgccatggcaggagattatacctcaactttttgcacgcttgagttcccacccagagaagatagtgagggaacttttggagagtatattgctgaagctaggaaag

SEQ ID NO: 382097 - DNA, 158 bp, Zea mays
cgggagggccttctccacaagatcttcaagaagaaccacgcttagtttaagtgcaacgcatgcatgtatggattgtatatatacttagggtctgtttgggaggcatctatatgttctcggatgaaatgtttcaggtttagatgctcccaataaaagga

SEQ ID NO: 382098 - DNA, 156 bp, Zea mays
  unsure (1)..(156): unsure at all n locations
gcgaacganaagcgggggaaagccttctgaatcaggcttcctcgcgccgccgccgcttcctgctctcagcgacgtggagaggtttcccgcccgcccgggcctggttgcacgttttccttccttggtacaattcaattgattacctcaccagggagg

SEQ ID NO: 382099 - DNA, 285 bp, Zea mays
ctcaaaagaaaaaaaacagtcagaatttgatctttttacggtccacggtaacagctaatcctacttgggttgctggtatcttctacttagatcctgcgcctaaagtttagacagtagcgttcaaacctcccccgcatgtgagctatgcccgctacaaaatacagcagcttcggattaataccaacatcagttgatgtggaactttatggctggaaatgataaaaaacaccattgagaaagttaaccatttttcacatatattctgtgggctactctcattacttg

SEQ ID NO: 382100 - DNA, 282 bp, Zea mays
gccgcgtggagcccagagtgacgcccaagccaggagaagattgtttggagatccatcttccttttagttccaagccacaatacctggccacacctcggcgcaagcacgcctcgcccaagtagcttcgtctcttttgcgttcggaatccgagtttgttttggttttttgttttgtttttttgttttggtttcttggatctggttcttgggacggcatcattagacgaacgggtgccctccggcgatccatggaggtttttgccctttgcaaggtgcccagata

SEQ ID NO: 382101 - DNA, 191 bp, Zea mays
  unsure (1)..(191): unsure at all n locations
cctcaccctcgttcaccacacagtccgccactcctttagtagcttgtgatttgtacgtcgacgagatcactggtcgggtggcggacgacgacacatggggaagggtagtgtgggtgcatcatggtgggcgttcctcctgctcgccggcgtgctgctggtcgtagcagccactgccggggcggangacggat

SEQ ID NO: 382102 - DNA, 300 bp, Zea mays
caccaacctcttcatgcagcaattggggctcggaaagtggagtatttgactgtagcccttctgaagtcaaaccttctcaatatgattacagcccttcagcaaaaggccaaattttccgaggcagtaaaataaaggtggaagaacaagaatgcagcagcataagtaatgcaaggaaggaacatgaaaatgaagagctaagtcccctatctgtgcttgaaccaacctctctaagtgagagttgctggtcttccgagtgttcaggcagcagcggtgggggtaagagttattcatcaatttttg

SEQ ID NO: 382103 - DNA, 147 bp, Zea mays
gttgcaagttgcagtgttgcacattacctttgacaatcattgtgaaagtaactgccgtgtcagattacactagcatgaactaaaactggctatgctgcagatcgcccaacagggaccatgtatgactgcaacagcagtagttgccag

SEQ ID NO: 382104 - DNA, 192 bp, Zea mays
ctcgtctattcctcatctcgcggatagcggcggcgtcctatctctgttgctgctgctgaatcgcacgacgaacgcgagcagtgtcgaaccctaccaaatcacagataatgggttcttgggaggagaatgttaggcaatttttgttggaggaggaggaagatgatgatgaactattctttgttattctccctg

SEQ ID NO: 382105 - DNA, 136 bp, Zea mays
  unsure (1)..(136): unsure at all n locations
cccgttggttacatgtaccttgttttatttagcgcttcatctaatttaccgtagaaggcatgtgttcaaccgatctttggggtgtttggttcttttagtcacttctanattttaggtactaaactttagttcctag

SEQ ID NO: 382106 - DNA, 283 bp, Zea mays
attcctcccaggaagccaacttcagttgctggggtggcgaggcagcgcgaacttagccataccgttgagagttcgggggacggtaagatgaagcggcaggtgtccaatgcgaaatccaaggagctcagtggtcacaacatctttgctgatcatgaagatccgagtcccaacaagtcaagcagctctgctgctgctctggcacatgtgaaaaatgcaaatcaggtgagctccttctcctttggaaaggccgacatggacagcacagtgaaaacagcaaagaaga

SEQ ID NO: 382107 - DNA, 159 bp, Zea mays
ggcggagacatcgccgaggccgagcagcgagagcacggtttcttgtcggtcagctgcacactcttcggcagtcacactccctgcatatacttatatatcgcccctccttgacgtcgccatacccctctcctacgctttgttctgggctcttccaggctg

SEQ ID NO: 382108 - DNA, 280 bp, Zea mays
gaagccagctccggaggcagaagaccaggccgctctgagcgctcgttcgttctcccagtcccagcagtcgagcaacagcttgccaccgtatttcctcaccaacctcctgcagccgctgccgtcgcagcactcactagctcaggctctgccgagctacaacaacttggggttcggggagcccagcttgtacaggccctgcccctgcggtgacccgggggagcagaaggtgcagcttggcagcaagctggaaatcgtggacggtctcgtgcagctggccaac

SEQ ID NO: 382109 - DNA, 160 bp, Zea mays
cgcctcctccccaccttcccgtcccttctcctcgcctccttccaaatccacacacttccgccgccgctgctatcgtcaccggtcaccatccgtccgacgaggagggatagggaccggcgggagcgaaccctagatgacccgatcccgggtcgggcccaga

SEQ ID NO: 382110 - DNA, 179 bp, Zea mays
gtacgtgcttcgtgcgttgcctccaaggaaaaaaccctctccatcgtcgtggcattggcaaccggccgatcgcgtctcgggaaggaggaggaggtccgccggccggccgcgtgggccggacgcgggagtaccggacgggcatgcagaccgagctgctgtacatcgacgccccgccgtcg

SEQ ID NO: 382111 - DNA, 172 bp, Zea mays
gtgaaccacctggatccacttcatccggcgcaggaatgaaaacatgcctgttttcgagttggaagaaacacacgagccctaaaggatccgaaccataggtttttaatggcacacggattatgcgatgaagacttaagatattttcacaatattgataaaaaatacagtggat

SEQ ID NO: 382112 - DNA, 171 bp, Zea mays
ggcaagctggatgaggctgtcgaattattaaagaaacatgagcaagtcacacctgtcaaagaaagtgacgtgaacacatatcaagaaaatttctcatcattgtcagcgattataagagaactactttcccttaagctgtctgtttttgcaatcgcgcactgcgtatcaagc

SEQ ID NO: 382113 - DNA, 303 bp, Zea mays
cttcaacctcatacacagtgctttcagctgggatgcagttccacatcggcaaccttggccaccaccacatttgcacgagaatcaaatgatgcagtacaaatgggagcaggaactcatcaacgaagtactggcagtagagagtcgtcgacctgtgtttggtgtggctgtggattttgcagactctgatgggtgcacagaggcgaatgcttgctcgtcgccaccttgcggttgctgctatgatgaggaattggtgagagattctcgctccgctgtttatgcggagtatcaatcacggaggacgca

SEQ ID NO: 382114 - DNA, 162 bp, Zea mays
cgacaacatgatggaggagtacgagaagccggccgctgccgcgcccgacggatccgccaagctgcgggtcttcctcttcccggcctccgggagcgatgcggccggctctggctccgggtcccacctcgtcgccgcggtggacgagtctgggcagcggtacat

SEQ ID NO: 382115 - DNA, 136 bp, Zea mays
cttctgctgggaaccatgaaccggttgcgctacacagctctttcagcgacttgctgtgccatgctgctgatgcttgccgaagtgtttttacgggtgctgttgaccggttgccgattgccatggtgatcgatccgag

SEQ ID NO: 382116 - DNA, 285 bp, Zea mays
ctagcaccgagctccgcacaactttacctgccaccgtcggtcgtccaccttcgccttccacccgacgtcgagttctagactccctgttccaccgagcgccactccggaccgcccacactcggctcggcgtcacctccgagtcccaggccactcgcccggtcggacgagctcctcctctcggctccaggcagccagcaagccgaggtcctccccgcggatcctcccccggccgagctccacagtccgccctacgttgcagcgaccgatcggtcgcattacctgatg

SEQ ID NO: 382117 - DNA, 177 bp, Zea mays
atctcacgcgtcggcgaccatggcggcgtctccgtcttctccccatgcagcacccggagttagcggccagagcctgtccccctcagcgccgtctccccacatccccaactatttcatgggaaattgagtgttctcatggtgagaggttgaagcatactggagcttagtactttggcc

SEQ ID NO: 382118 - DNA, 301 bp, Zea mays
cggccagttccctcactccccagattccccttttcatagcacctctatacctcttcttctcgtcgtcactctatcccgcatctgctgttctttatttctatacatacatatatactatcaccggttatttgcttctctattctgtccgagtactttacggtgttccgcacatagatctcgtggccggcggttttgcgctttcgcttgcgtttcttggccctgctggtgtttgaccggaccgaacgggggcagatcgatggtttgggtttgaagcggactcctatcattccaatgaagggtc

SEQ ID NO: 382119 - DNA, 109 bp, Zea mays
gtttaaattggtgcaattattgatgtctactctaccctactgctacatggtggtgtgacatgcagtgcatcatagagataatatatggatttttgtgttcttgtcgtca

SEQ ID NO: 382120 - DNA, 105 bp, Zea mays
agctatgcattgttcgttgctcgatcgttgcaggtaatggagaacccagctccgagtatcgtagtagcccccatcgccgcacctgtatcagcgaacttcagcaga

SEQ ID NO: 382121 - DNA, 192 bp, Zea mays
ctcagggcatggttcctacgtcctataattgatattgatgccataaataatcgcctcaacacagtatccttattcactttctcaattcttgatgcccaattggccactaggcaccattagttttctgtactgttttcctagaaatggcagataacattctttctttgctgtgaagaagtaatgtctgcattg

SEQ ID NO: 382122 - DNA, 158 bp, Zea mays
gccatcgagtagcttctggaggtagtagaccgcgtggagctaacgaataatctagcaaactatatacatttagatgttagctcagcggtctaagaacaacagataacagatcctcaagacagcacctatgttctttcccatttccagaacttaataaa

SEQ ID NO: 382123 - DNA, 210 bp, Zea mays
attgctaccgtgccctggcccttgatgtttgttgagatgggcagaggggggcaactaaaagtcagggagacgcaaaagaacaacaaatccacatccctccgatgtctctcttaggttagcttttgacattggagggatgtggatttgttgttctattgctaccgtgccctggcccttgatgtttgttgagatgggcagaggggggcaact

SEQ ID NO: 382124 - DNA, 208 bp, Zea mays
cgcttccaccgcccgcgtacagtccaaacgcaaccgtcccgtccaccccggtcctcggcaccgccatgccgccgctcgccgcgcgcctctatgccccgcttaacctcgcccccgccgtcccagccgcctcccttcgccccgccacgcggctctgcgctgcgagcgggccccgcaacgtcggcgggttcaggagaagcgcgctggcatc

SEQ ID NO: 382125 - DNA, 221 bp, Zea mays
cgtggctgcatcgtgtccatccacaagtatcagctccgtgacgctggtggggttgactgcgccaagtgtgctcggagcacccgtgctgccatggccccaccaagtcccgtatggacaaatcctattcatagttctcaaaatgtatctgacagaaaagacattactgtaaagagctggagacctcctgctgggcaaatttcaagtcagtggaggcagactaa

SEQ ID NO: 382126 - DNA, 222 bp, Zea mays
gtggaaatattttgccaggtattggctgtgatcgagtatctcctggctaatggaagtgaacatgttatcaacaaaattattgatgatagctcatgagattattcaaactgcaaatatagtgaaacttaagatattgttcaccagaatatatctactagctcattgttcactggaatgtgtctgttttacctctaaatttacagactagaattcttgatttat

SEQ ID NO: 382127 - DNA, 246 bp, Zea mays
  unsure (1)..(246): unsure at all n locations
ctcnccatccacgcacggtaataaaacgcccgngcccaaaccataaacccaaaccgtgaacacgncccaaactaactccgtctgagaatatcgcattcacccagacccctcccgagatcagcgctagcacaccgtgtcccatcctcggctcgttcctttctcgcctcaaccgaaccacacctcggccttcaccaagagaccatcgccttaccccctcgacttctgcggcgctacgcgaagctccgg

SEQ ID NO: 382128 - DNA, 286 bp, Zea mays
caacccatcgccaccgaccctcgagtcccgaagacgcagtgtccagaatcatcccccacccggtcctcggcgatcgcgcggacactggcgacgcggtagagggagaggcagcgagggttagctggaaatggacggggcggagaagctgcggtgggccttctcggacggcagcgtcaccgatctcctggacgcccgcagcctccacggctcccccgacattaagaaaaaagtacagttccattcttctctagtgcaaaagcttgctttggaaaaggagatggagggt

SEQ ID NO: 382129 - DNA, 285 bp, Zea mays
ttcgcgccgcgctatctcgtctgttcacctcgtgctactggaggagccaaagacgacacacgacatacagccgacaacctctagagcatggcgacggctgctgctgctgcaacagcgatgtgctccgttccaggcccgagcggcagcatgcggcgccgggcattctgcacatggaaaaaagccgatgctccgcgcgtcgcttcttcttccgtcgcgcgggtcgtcagggcgtccgcggcggccgtgcacagggtgaagctggtcgggcccgacgggtcggagagc

SEQ ID NO: 382130 - DNA, 261 bp, Zea mays
gtgggctgtggcgcggcgcggtgcctcgtcacctcacgcgtcacgcctcacgccccgaacagaggcgtccgtccgacaccttccgcctcaagctcaagccgccgcgccgacccctgcccgcgagctcaaaagtcagagccgcacgcaagaagcagaagcgccccggggccgccgccaaaggctgcgcagattacctacccacagcactcccagtctcccacagcccaagcaacatccggtatcaatatcacaagctcaaaa

SEQ ID NO: 382131 - DNA, 251 bp, Zea mays
cagaagctggtggatgatgatgactgtgtgcctccattttgtttcatgacccgaccagctcaattagctgatgtttgtgatcattcctgcgaacaaacctgcagttccaaagaaaacaattctgatgacattacagctgcaaaggcaactgatgttgtttcttcattgggtctcactgatgaagtgagcaatcatcagaaaacatctgaaaatataactaatttagatgtggataagtcttctactgcaaa

SEQ ID NO: 382132 - DNA, 232 bp, Zea mays
agctcgagcggctcgagcaactacgtaatagctggaattcctgtacccaggctagtactcacctatccccagtcaccaaacttggtctctcacagaaacttgcacgccatcttcctgcctgaggtgaccacgcccacccgttcttcacctcaccatggccagggatcctcgacgggtttttcggccacgttgtgctggttccataatctccggaggtcagtgatgctcacta

SEQ ID NO: 382133 - DNA, 220 bp, Zea mays
cccaagttcaaattcagacagtgagcttctctatttaggctctattttgattttgctcacattcactgatcatagatacaagttgtaacgtgtgtggttgaacttatgttgttgaacttgatctgtttccttttctgctatttggtttgtgaactcaagtactcaacttatgtatgaacttattctatatttgaagttctatgccaagtttgaaaagacg

SEQ ID NO: 382134 - DNA, 225 bp, Zea mays
atttctcctgtccacccccacttcttcctcatgcaacattatcagctcttaagagcataggatgaggtgttgatttctgctcggagattcttctcgcgtttctcctgcactttccgtcttatatttatcagcttcttactccagtccagcagagttccttgcttcatttctcgctttgaaggggagtttttactgctagtctcttgtgagccgtcaaatttttca

SEQ ID NO: 382135 - DNA, 218 bp, Zea mays
  unsure (1)..(218): unsure at all n locations
tatcaacatcttatatcagccattcctatctccagctctattgacttctttactgtatgcctgttatcagtttgtgntgtcttcttcaaactttggccatcggtcagtcccttctcctcctgtttttccgatcagctcttcctctccatccgagcgtcctgctctctccggcctcctgctccctcaagcttgtccccatggcgttgctccttatttcc

SEQ ID NO: 382136 - DNA, 222 bp, Zea mays
atcccgtcgcatcccatcccactaccacccatctcgtcgtccgccgattcgatccggttcttccaacccagggtgagtctccggatccgtcgccgtctggtatccgtgtgctctcgtcgccgtcgccgtcgccgccgtctgactgcccccctcgcctcccgcggcgtcgggtctctggtgctgctgctgctgctgctgctgctgcgtgcagggcagtgatgg

SEQ ID NO: 382137 - DNA, 213 bp, Zea mays
cagccatctcctcaccctcgttcaccacacagtccgccactcctttagtagcttgtgatttgtacgtcgacgagatcactggtcgggtggcggacgacgacacatggggaagggtagtgtgggtgcatcatggtgggcgttcctcctgctcgccggcgtgctgctggtcgtagcagccacggccggggcggaggacggagtggtcgaacggga

SEQ ID NO: 382138 - DNA, 165 bp, Zea mays
acgcagccgtccaccaaccgacgcagcgaggagatgaacgcgtcgcagttcatggacaagcagatcctcggcctggctgcctccgcctccccctccggcggcggcgcggggggccgtgggggtgtggatctcagcgatctgatgataccgatcccccaggacgac

SEQ ID NO: 382139 - DNA, 305 bp, Zea mays
gtttctcaataaggaagatggttctcagcttgcaatgtttgtgcaagagaaatttctgtttgatttgaaggttcatccaagttctttttcaattgatggtatgctggggaatatgagattttgtgacatgtcccttggtccagaacatcgttggggttggctttgcgatatacggaagcctggtgtcgagtcactcataaagttcacattccagtcgtacagtatcgatgatgaagattttgaaggtcataattacagcttgactggtcagctttctgctgttcgtattgtctttctctaccgtt

SEQ ID NO: 382140 - DNA, 228 bp, Zea mays
  unsure (1)..(228): unsure at all n locations
cggctcgagctcgagccgaatcggctcgagctccctcctcccacttcccagttctcaatcgtaccaacaccgcgggctgcggttccgcctccgcctaccgnctcctgacaaccgctgcccgcttcgctcgtagcccacaccgccgttctctcccccaggtgcccataaacccccttctccgcgccatcgttggcccggcttaaccatctccgctgcagggacgaggag

SEQ ID NO: 382141 - DNA, 166 bp, Zea mays
aaagtggctgaagagcatggtcacacttgcatggggaagatagcttcccatgttgaaaagagaaatctgtcagatgatctgcccgtgaggacacaatctgaggctgcaaacaaatggaactccagatcagggaaagagcctacatgcaatgacagacaggacaatc

SEQ ID NO: 382142 - DNA, 140 bp, Zea mays
gagcgacaggccaagaatccagtctgcagcatcatcctcttgtcagatggtcaagatacctacacggtctcaccaactgctggcgtacacaaaggagcaccagagtattgtgcgctcttgccgtccactaacggtaacca

SEQ ID NO: 382143 - DNA, 168 bp, Zea mays
aaatgctcctcgtggaacttgtgttgaagttccagaccctaatgcggtacacgatcctgatatatcattagctacatagtagtagacctgtaggtgaaaggactgtgtggttgtaacacattattttgttaccaggatcagtacatgtatgggaatctgggtttgcag

SEQ ID NO: 382144 - DNA, 193 bp, Zea mays
agaaatgtcagatgttgcaatgaggttgttttcagagttcaaaattaagcggtgcagaaattacttgaaaatgcctgcactgattattgatgagaaagagaaggagtggttgaagcttatgaacaagaatggtctagttgaggatcctgttttagttgagaaggaacgggtgatgataaatccgtggactcaa

SEQ ID NO: 382145 - DNA, 238 bp, Zea mays
agatgatgcagctctaaatgacgccctgagagaagaagtccagcggcttaagatagccacagggcaggtccctaacataaacgggaatcccttcaacggaggactaccccagcagcagcagcagcaggtgccgagctatttctcacaaccacaggggatgcaatacttcagcagccaccagggccagcatcagcatccgaaccatcaccctcagagttcttcaaacggtggtggccag

SEQ ID NO: 382146 - DNA, 237 bp, Zea mays
tctggattaaggcagttacaagcccataacagcatctgtagcagagcactacatgctctttttgtactgtgctcttggcaacctcttgtgtgttcgttgaatggaccacttgagcagtggacagtgaacttttcatcatgttgtggtgttgattgtagaaaaagctgacccatgtttgcagctggaaatgatgttaaatgctgcttggctcaaaaataaaacgaatggggagctcaa

SEQ ID NO: 382147 - DNA, 243 bp, Zea mays
aggcggcgccgtgaggagataaacaccggcagccaggatttttgtaagccaaagcggcgcagaggataacgccggcgagctggagggaggagaactattgccgacgtgcggcagaggaagacgctgagcgcagaaaaatccagggagtagagcggcggctgcaaaattccaaccgagagagagcggatgagatcggctgagatctttttcagattttttccacttttctgtttattttattaa

SEQ ID NO: 382148 - DNA, 160 bp, Zea mays
tgaagatgcatcaacgagttacatgtcctgtttgaacattaacaccgagagctctgaccctaaaatatttgctgaggcttctgatggtttggaaggagtcaagagagtgaccgattgggtatctcagtgcaaggaatttcttgagagaagaacatctcct

SEQ ID NO: 382149 - DNA, 185 bp, Zea mays
gttctagatcgcgagctgccgccctttttttttttttttttttttttttttttttttttacaacaatgatccttaacagcaacagagatagcacaccgcttttgtttttgaacactaaaaccgcccccagcagtttaccctttacccatatgatcgtgcaaaacagagtgaagtttgaatatatg

SEQ ID NO: 382150 - DNA, 227 bp, Zea mays
gtggtcgttgcattgatcgtggatggtgacgcgagcaagtcgacgcggcggcgtaagcagccgtcatgtatggtcggtccggtccggtcgttgggtggttcagactcacgcgtggtggggggaggtttctcgtggctgggctgggctgggctggcggcgtgcgccaccttgtgtctctgtgtgtggacgccggtatgccttttgctttggcgtggccgtggtgtggt

SEQ ID NO: 382151 - DNA, 292 bp, Zea mays
acgccgcgcacacggacggcagtgcacgcctcgccggctcaccaatcgacaccctgtccaaccagcaccacccggcgtcgtcctctctggccgccgcctcgctctgacgcgtggcggggggctataggctagctagagctgtacagcgcgagagcgacgaacggcagcgtcggcaggtcgatcggcggtcgcacgtacgtcgtcgaccgagagcagagcagacgaccgcggcgccagagatagttcgaatccgattccgacccatccatgggggttcacctgctgaagaagc

SEQ ID NO: 382152 - DNA, 229 bp, Zea mays
gttgaaaattgtggaaggaagccccttggcgaagatgttggtgaactgcgaagttgttgggacgcagagaacgcgtacatcgccgacaacgacacacttgtggatgaagtggaggttgatctccatgtgcttcgtgcgctgacattgcacgggattggtggagaggtagaccgccctgacgttgtcgcattagatgagggtggcgcacgtcaggggggtgtggagctca

SEQ ID NO: 382153 - DNA, 196 bp, Zea mays
  unsure (1)..(196): unsure at all n locations
caatcccccactcncaccccccttctcctttctataaagggaaacttcgccaccaaatctcgaatcccatctcgctgctctccgccgctcgacgccgacgccgacgccgacacctctccctcccccattccccgtgccccggaccgcggagcagacagaggcgagatccggagcgccgcgcgatggcgaacatcga

SEQ ID NO: 382154 - DNA, 213 bp, Zea mays
cgtgccgcgaatccgtgcctattttggtgtgatcatgagtcatgaggctgtggcagctgtgttacttttcggtgcagtaggatgcacgtgcggaaggagattggtttggcgattggggctgcgaagtgttgatgcacctgcacagcacatggttgttgatactcaattttgggtggcctttgctgagatttttgttcagatttttgtccttaa

SEQ ID NO: 382155 - DNA, 305 bp, Zea mays
caataaagcagtgaccaagagaaggaaccggagaaagaaaggtacaccagagggaggagtacggagatcagctagcgtaacgcctggctgccatagtgtctcgtttcgggtagtcaagccacaacggtatgcacgggagaaccgccatggcagtggcctgccttctgtgcatgacggctctgctgctagtccaggatgtccagtccaggaggctactgtggacggagcaggagaagaaacaaacccatggtggccttgttggcaaccatggcgccgctgaccggcgaacacctccctgcaggaac

SEQ ID NO: 382156 - DNA, 293 bp, Zea mays
cttccgcctccgggactcctgcctacgtcataccatcaggcagccgaaccctcgattggccgccgccgccgtaagagagaccgacgtcctccttccactgccgagcgacacctcgaatttctctctcatcgtcatcccttctcccctttattcgcgtcgcgcatctgggagatccagccagcgtgatttgtgttatcggtaaggaattgttcatgtaggagtttcgttttggtttctctttgctgcgagtccatgcagtcagatccgtgtctcgcttactccccgtgcaggta

SEQ ID NO: 382157 - DNA, 253 bp, Zea mays
aggttatatctacaatatttaatgaggacaggttcgccaaaatgcaaggccaacatgatagcagcaaaaagtccactggtaacattgataacagtgaacttttggataccatcgttgaggttgccaaggaggttttcaagcggcattgtgctaaaaggttccaaatatcacctttgcatactttggagtggaattttaccaaaaacaggggacacacagtgaaaatcttaactcaaggaggagagatgctaga

SEQ ID NO: 382158 - DNA, 295 bp, Zea mays
cttgtttttgagaactgctttgtgccatgcgaaaatgtcctcggtgaagaaggcaaaggtattatctcctgacttttgaagctcattcatgtgtgtcagatatttgctctgttgtttgagttagttgcctgtgcggtgcatggcgcagagattggaactatagtagcatctatttctaaaggcaaagatattctgcacatgggaaactgcaataattctgtctacttttcatccagaagtagtttctaaactccctatagtctatagaacaaggaagagttctttaactatgtgc

SEQ ID NO: 382159 - DNA, 283 bp, Zea mays
gtctagtaacataatttcgaaatccaaaacttttgattcttttactaatactgactgtgctttcttctcaacactccattcactggtgggctggtgccattgctccttcgccaatggaagccaggcacagaggcacttcatggtcacattcacatgcagatcatgttctggaactaatgtgtcatagttctccatgttatccacattttgtgtctgttgctactcttattcatctctagcaccttgtggcagctcttttttttttattttttttttcattttt

SEQ ID NO: 382160 - DNA, 106 bp, Zea mays
atccagattcaacgaacgccgtcggcctccgctccgtgccacgtcccgtgcaccagccatccccgtgaggccctcacctgcagtgacacggtccaccttggaccag

SEQ ID NO: 382161 - DNA, 166 bp, Zea mays
gttttggttgatgaatgggtcagtaccacaaatgctgccctgacagagaactttcctggctcttcaaatccttctgttgtggatgaacaagaggaagggcttccatctccacctttggacgaaggggccttctttgccacccaaaccacttctattcaactctctg

SEQ ID NO: 382162 - DNA, 104 bp, Zea mays
gctcatctcatgagggatatgtattacaaaaggaacccaccagcaagaggttcaagctctaatatttcagtaaaaagttactttgagatcgcttgccatggatg

SEQ ID NO: 382163 - DNA, 139 bp, Zea mays
ctaaaggttatgactccattcagagtatcaagaggtgatgctgactgttgctgatcaaacacttggtgaaagcagtctggttgatgaaactgaagatatcaatatgagctctgatgcctcagagcacaccagcataaac

SEQ ID NO: 382164 - DNA, 299 bp, Zea mays
gtcttgctttgcagctgtgtgtattgttattaccttaccaagctagtgacttcattgttagcgcgtgtgcagatatggacttgttggagatatctgtcctgaaaaattctctgtgctatataaacattagaaactgcttcctgttgacggatgatggtatttctaaccttctgatgaagtgtacaaagatccattcgatggttctttcttatacttcttttggaaatcgatcaattcaaatgctatgcgctgccaatccttctgtgcacaacagtggacatgctcatgttatggcatct

SEQ ID NO: 382165 - DNA, 288 bp, Zea mays
tgtggcaagatcattgctacatattttattacaagatactctgcatagaattaccatttgctttgtttgataaatgttgcattttatttattgtctggtgtctttccttaaaaaacgaattggtatcttaataatgaatgtaggtctattttgttcttcatctaacaatatgactgctccgaactgtagccatcttcataatttccattctgatgttgcgtttttcataatgtctcaggttgggaccgtgacagcaatttgtgttacctgctttctgataagatgtgt

SEQ ID NO: 382166 - DNA, 258 bp, Zea mays
gacatcgcccccaccctcacagtctcacactcacaccggcacacgcgacggcacgcgctagctcaaccatggatcgcacgcgacacaggagctccgttagctccgagcgcttccttggctccttcgcccgctccgcagccgccggagaacagtcggcctctacggccttcgagcttgacgaggacgacctcttctccgcaagatccggctcgcccgagccgccgcagccgttgcgccgcccactcatcctgtcctccg

SEQ ID NO: 382167 - DNA, 142 bp, Zea mays
cgaaccccctgtcgagctctttccctgaaagccgccttcgagcacaacgccggccaagtgttcgatgggaagtttgaaccaatactcatcgtcgatctgcggttatcaaatcattctggtcatggtaagccgataagttatt

SEQ ID NO: 382168 - DNA, 145 bp, Zea mays
agaacatttgcatcggacggatccagaagatagcctggaggacttcttcatagcattgtttgtcaggaaagcaggacctacatcagaagaacctagtgaagataccacggtagaagtaagaaccaaacaaacacgcgggaagcga

SEQ ID NO: 382169 - DNA, 137 bp, Zea mays
  unsure (1)..(137): unsure at all n locations
agtggggagaagccatgagaacacgagactgacatgggcgctctcgcacaaaagacataaagcggggggactgnaagatcagaggtaccagtagacagtagtagtatgatggaagagacagtaagcagcgagtagtg

SEQ ID NO: 382170 - DNA, 120 bp, Zea mays
ggaatccgccgacgccgctcgtctgtctgaaacgaaggaggaggcacgcacgccgctaccgcaagccagctagcaagaagactgcgctagcagggcgttggcttggttttcggcggacga

SEQ ID NO: 382171 - DNA, 299 bp, Zea mays
gttttaattagcttacatcatcagtgttttgtctgtctgtaataatttcaactgtttctaagctcacatttcatcatcacaagcctattatgaatctgatgctagttaactgctgaaaggtacagtactatggatcacgaatgatgtattgtatgcaattcggcccggagcgtcactaaatcctggatccgcattggccgcaggccagtggccagtgtccagcctgccagctcagcccggcggcaagcgcccagcggctggctcgggcagcgtgcagttgcgagcagccgactcgtttc

SEQ ID NO: 382172 - DNA, 303 bp, Zea mays
ctttcgccgccccatcagcccagcagttcttcgctgttcgttgcagttggttccatcggttgatcgaccggcctggagcagagagacagagagagatgggcaagtcctgggcgctcatcagccacctccacaccgtcgccgggtagttccgctgctccctcgcagttcgtttccgattcctcctagtccatctcttgggcacgctcgttgcctgacgtgtgcgtttgctgcttctttgtcttgtctgtccctccctcccgtttcgcaggccgagcatcaccctgctgtaccctctgtacgcgt

SEQ ID NO: 382173 - DNA, 292 bp, Zea mays
gtcgtcctctttcgtacttcatatagaaaacatttataattatttactctttggacatagcttacaattcatttttttgtctttttaactttgaacattttttaccatgcatgacaaataagcatatttttattcatcaagccgttccagtgctcttgcgttttaatacctccaaacatgattttctgatagttgattcttatgtaactttgtgccccaatgcatgcaagctgtaatgtaattggcaggaagtttacgcagatatacgaaagattagttggtttcacatgag

SEQ ID NO: 382174 - DNA, 251 bp, Zea mays
accaaggccaagggaggagagaccaacaccaacaaagacatagggaacgagctaccggaacaggacatgaaaatggttaccgttcttaagataaaccagcacagcgacgcctgcagcgaggagatcaaaaggcggatacttaagattacaggcgtggaggaagccatgccgcacctcaagtcttcacaggagcgcggtgaagggaaacgaggagccggcaacacaggtgggcatcatccacaagtgcacgg

SEQ ID NO: 382175 - DNA, 286 bp, Zea mays
  unsure (1)..(286): unsure at all n locations
cacagggaatatataacagaagcaattatgcnagtgcctaattctcaacagtttcttacacctgggagattggacggtgttaaatctgattctgatgatgatcacttgcttggagttatactgaaaaatccatctgcattgctaaagaaatatgttgttctggtattcactggtgattgcagttcatctgcactagcccctgagttcaataaaaatgaaaacggtcctgtgcgatttcaaggaggacaatttattgtcctgaaacgaaaacgtggcatggacgatg

SEQ ID NO: 382176 - DNA, 288 bp, Zea mays
gagagtacaacaggaaaagttaccatggaatctgccttgagttgaggatactatatgcaccataaagtacagcacaggcaggacggagacatataatttcacattttacttggcgagaagctgaggagcagtctcaattaaaataaaagtatacctatttggtgtcacgaatctttgtatccctctccgtcattttggctttgactctccggtgaagttggaacgactcgtcataacttgcaacgaacggagatcacggctgtaaccattcatcgtcgtttactgtca

SEQ ID NO: 382177 - DNA, 289 bp, Zea mays
ctcgctttcatcctctccgcgtcacttgggtttcgtcggtgtcaaggactccgcttccgcccgaacacttcgccttccgcccgaagacttcgccttctcttggcttgctcaccagctgcgtctctttgcataaggttgtctcaggtcggagatttccggttgtgctcattgcgaccaagacgaacaacacgacgacgatccgtccacggcggtcgtctcctccacgagcgtattgactccatagcccgctatgggtaccttgagttggccatcgagcagatggcagaga

SEQ ID NO: 382178 - DNA, 289 bp, Zea mays
gctggatctggtgctggtttttggatctgggaatggtggcattgctttgtctgcgtggggtgtgattcctctcatggcaacgatggggagattgtttatctcagttcagttcgtgtgatgaatttttagctccaggctgatgctgaatcatagtgaaatcgggctttgtgcaagtgttgctgatgcaaggctttcaaaagtttaacagtctcacttgatgcaaaagcaacacaatcactctaaaggtttggatcagtcatttcagagcatgggttcgcggtttccatcc

SEQ ID NO: 382179 - DNA, 203 bp, Zea mays
cgagaccgtccagcgcgcgggcaggcgcgccgctaaactaaacccgaccaaataccgccgctcctcacctactcctccgtaccggcgctgccgctggccgcgtggtccaggtaccgcctcagggttgcggcttccaacgccgcctccgccccggacggggccggcgccactgccagatgcaccagcaccggcgggttcccgtc

SEQ ID NO: 382180 - DNA, 162 bp, Zea mays
tattgttgttgttgctacatctaatccttgttgcttatatgtccttggtgttagatcatcatcttcttaccagtacgagttgtatgcaacacatcatgtgcaattgcagtatgaagtatcatgcatatcaatcccacaagaggattgtatacatgataatgt

SEQ ID NO: 382181 - DNA, 163 bp, Zea mays
gcataacagcgctggcaactggcgccttcttattgcatgtaatccccagaagactctagcgtggtcgtggtcgtaggtataacctcgttcccagcgtctgtgggaggaagccgcaacaacttccccttagagcaactccaatagttctctaaaaaatagcttg

SEQ ID NO: 382182 - DNA, 311 bp, Zea mays
gcggcagcgagagcgccggcgacaggagcgcggcggcaccgtgactccgacgtcgacgaggacgacagcgaccggcaggcgaggcagtggtgcgtgcagcgctgcgagcgtaagcaacaggaggacgccgccgccgacgacgacgagaacagcgaccggtgccagaagagatgccagcaccacagcgactggatgaaaaggctgcggtgcatgcaacggtgcgggcgacaggaggagggcggcgcacgcgacgacgctgacgacgaggccagccacggcgaccggtgcgagaagaagtgtcagcagcacca

SEQ ID NO: 382183 - DNA, 304 bp, Zea mays
gaccgatcccatcaggaatcaaagcaggacaacagtgatggtgagctgtctgaagaagattcatcacgagtccaagaaaccagtttgaagctttttgggaagacagttatcatcccagacccaaagaaagtctgttcctcggatgggggagctggagatgatacacaagaagtgatgcaaacatcctgggttggaggaggggtggcagcataccctgcccataacggatggtttcttccgttccattctttccctgctcatatgtatgagtcaggggatgctaggatttcccctcttcatatgt

SEQ ID NO: 382184 - DNA, 302 bp, Zea mays
catttcctcactgtagtctctagcgaacgagacagagccagcccccgcgtggtcctccgctcgggcgacacgggaggcccctcccccagccctagcgccgccactctctcctcctctatttccccctcgtcgtcgccggaggagactgccgaaggccggcgcgaacggcggcggagcgtttctccggcatttcttcttcgtttgctctaccggtgttcagatttgagcgggttctatgtcgggcggctcaagttccagccgcggggttactggggcgggtgcagtcccccgcgccgtcgtct

SEQ ID NO: 382185 - DNA, 288 bp, Zea mays
cggctgtctcggcgacccaaccccagcctgaccccacctcccgccgccgccgccgccgccgccgtcgcatcttacgtcgtcaggagcagtgtcccggtggctgcgtctctctcccctgcccctctgctccacactcggttcacgcgtcggctcgctaccgcacgccctcgactcgtacgcccgtcccctgcggcgatccggccggcaccgtaaccctaggactccgacggagcaggaatgatgattcatgaacagtaaattgtccctcctagtaagggctctgtgaat

SEQ ID NO: 382186 - DNA, 297 bp, Zea mays
ggatgtccatggtgttcctggactggttaatttgtttggaatagaatcccctggtttgacctcaagttttggcaattgctgaacacattgtttcaaagtatttgtgacgggagtctcctatacaaagcttcattgccagatgctccatgcactgcagaatgatgaacctgacgtgtcaggaccagggttcaccaaagaaaatcgtacagtaaaaacaacattttgagttgtttttttccttgatcattcggatgcttattgcatgtgactgttagaagatgaaattctctgaaagtt

SEQ ID NO: 382187 - DNA, 296 bp, Zea mays
gtcgggtggcggacgacgacacatggggaagggtagtgtgggtgcatcatggtgggcgttcctcctgctcgccggcgtgctgctggtcgtagcagccacggccggggcggaggacggagtggtcgaacgggaccgccacgagggccagccgtgggagacccaggagtgcatgaagcggtgccgccgccgcggactggccgtcgacatggagcaagagtacggtcgcggcagcagagcacgggcaagtaccgggagaagtgcgagcgccaccaccgcggggactggtgggagaagca

SEQ ID NO: 382188 - DNA, 290 bp, Zea mays
caggtacacagagatcagcgcccaccgcccgtcttcccacgctagcgggcacaaactcagagtagtgtcgctcaatgaatgtcctcgcccggacgacgcagccagcagcgactgagcacccaagaatttcagagcaagatcacaagaataacttacaaaagacgacatcgacacacgagggcctcattgcggacgattcacaccaccagcacaactctgcccacagcgcagatggagcagctaataatgggtccatggatatcagtggggattcctcatctgttgatttg

SEQ ID NO: 382189 - DNA, 315 bp, Zea mays
  unsure (1)..(315): unsure at all n locations
cccaaggagacccaaacaagacagaacagatgatgaccgcgagaacgtccaagcatcatcagccagacagccacccggatcggacgtatatctatcttggggcgccgccgccggcaacacgaacatcgacgtacggcgacacgaacaacggaaagagggcaatatatctacgccaccacgccgcctccagccagcctcccttctcgtttgctttccttctgctagctcgccgatccgattctacactctntcatcgagctagtgccatccatgatacatggcacacggcgccacggttccgctgggcaaatcgat

SEQ ID NO: 382190 - DNA, 291 bp, Zea mays
gctcggtggtatgagtgtcatgggtgcttacgtatgggcttccgaggcatcattcaaggccacatcccctgcagatctgtcgcaggtcattcgagcgatttgccaagcttgctatggcagtgcatccggtgtgaggctgctcgtccacatttcttacagtcctcgaagatgggcctgccgtatatgcgaggttgcatcaggaagtctgcgcccgtgcgattttaagttgacatctgttcaagctgagccgtttaagaaaattattttgaaggcaatcagtcatctcacaga

SEQ ID NO: 382191 - DNA, 244 bp, Zea mays
atcagctcactctcttctccatcctcttctcggttatcccaccaactccccaaccccaccccaaagatcaggtttcgatccgcgaacccactcccaatcctccaaagatcaccgctctcagacccctcctccccggcaatggccgccggtggccccgcgctgctgcgtgccctcctcgtcgcggccctctgcgccgtcccgtggcgggccgaggcggcgatcgggatgaactggggtacgtgtc

SEQ ID NO: 382192 - DNA, 235 bp, Zea mays
cgggcagccgcctccaccatgacggcgccaggcgcccttctgcatcatcaccaacacccgccagcacgagcagcaccgcggcagcgcagcgaccgccatgacggaggcgactacaaccacccgaagccccaggccatcgccgccggagctcacacgttgcagctcacgcgtgcgtgcttatcgtccaagtcgccgccgccgtctcttgccgtagggctgctctcggtgcttgcgc

SEQ ID NO: 382193 - DNA, 231 bp, Zea mays
atcaggctcaccttgctgctggtccactaccttggcgtcacttccatagcacctcctcgcgcccttccggtagctcgcgtgctacctactcggtgaaatatgaaaaccagtggccgatcttgctccgccattaatttcgcttcgcagctcgtctgatgttatggtggtgctatgccacgacacgcgtgccggtgcatcgtctgtgccttgtgttcgtgctggtgaggtctc

SEQ ID NO: 382194 - DNA, 313 bp, Zea mays
gccgtgaagacactcttatgctggccacgcgtcaccagctcgataaaaaggaatcccatgggtatctggtcaagaatagaaactgtgtgcctcgctcatcagacgtgtgtgatcaatgacgtcaaccggaaaccgtcatcgtgcttccgactatcgcgtcgaattagtcagggtaagcaaatttgttattcgtgctagtggattgatgaatggtttgactaggtataatatttattagattgtctgagtcgctttggtaatttgatcgatgtcgtaggatgaaagaggtcgcaataggtcctagtgcttgcgg

SEQ ID NO: 382195 - DNA, 152 bp, Zea mays
tgcccctcctcccgctccccttggctccccaagcctcgacacacggctagggttttgcctccttcccgacgccgctgtttcagcgagcgagaccgaagggtagagaaagagcggtgcttagccacccatgtcgctgcgtccgagcgagcagg

SEQ ID NO: 382196 - DNA, 177 bp, Zea mays
gtcgacgacgccattgtgccgaagtatatatgcagatgcgacgagtgatctctgatgatgtccttgcatctgcatatatgcatgtcgacgacgccattgtgccgaagtatatatgaactggttttggcgggtgtgtttgaataaatttgatcatctagtatcagtaaatagtttttt

SEQ ID NO: 382197 - DNA, 266 bp, Zea mays
  unsure (1)..(266): unsure at all n locations
tggcttttcagtattggacaatgctaatggagttacaactccaaggacnagaaggtatagcgcagatggagcaggtggtgatgcctctgtataacttacactgccgtgcaggcacgcagctgccgcgcttggtgatttgatatttgtgtataacggtttacgtggaggtgtcgatccacagatttagtttgaagagaaaatagtcagcagagacaaagttggcgctcgacaatttnttcggaatcatcttaaaaggctgaccatca

SEQ ID NO: 382198 - DNA, 188 bp, Zea mays
tcctcaccctcgttcaccacacagtccgccactcctttagtagcttgtgatttgtacttcgacgagatcactggtcgggtggcggacgacgacacatggggaagggtagtgtgggtgcatcatggtgggcgttcctcctgctcgccggcgtgctgctggtcgtagcagccactgccggtgcggaggac

SEQ ID NO: 382199 - DNA, 190 bp, Zea mays
ctcgatccatcccagcatcatccccacaattgaggcgattgaagcagaaaaaatcagtcgccgtagcagcgccgcctccgccgccgtggggaggtagcatctaggcccattccgccgcctccatctccggtatgttcccctccgtccctcgattcgcacgaatgctgggccaaaaacacttgcgcgattc

SEQ ID NO: 382200 - DNA, 179 bp, Zea mays
gagtagcgggggtaaaagagaaaaaatctagatccgtctctcgttcaagaccacagaatccaccaagccacggcgtcaccgccagcgctacaggcatctcggggaaggaaccgaaccgacccctgaaaagaattcggtgcgtcggaaggaagagcaacccagcggtggtggagcgagga

SEQ ID NO: 382201 - DNA, 183 bp, Zea mays
gtgcttgcacatcttaacatttcttgtcaacatcttgacagatagtcttgaaccatattttggctccacaagtagactagaaatatagatcttgtcagagccaactcaaatagaataaagctttctgttgtttttttaagatcttgtcagaaccaactcaaatggagtaaagctttctgttgt

SEQ ID NO: 382202 - DNA, 239 bp, Zea mays
catcattataatttaaactgacgtgaatgtttcagtccggttggcatagggccacttgttatgttcataaggtcattcgaatcccctgagtcccaatgcattatgctgatgaatcaggctgcagacatattgtgaattatattctttttgtactaccttgaggaatgaaaagtttttgtcctcacatgtaatttggaacaaagccagcaacctgtatttttattgcatttattatttta

SEQ ID NO: 382203 - DNA, 311 bp, Zea mays
cccatcactcgcctgccttcgcacgggtgcgccgcccgctcgacagccacgccgcgccgcgccgcgccgctcagctgcccggcacccgcccttcctcgccgagctcgggatcgacgtctcccgcacctcctccgcgcccgttccgggctccgcatccggcctctcccccgtccccaaccccattccgcagcaggcgaccagcacaacatctcgaatcccccgcctcgcattcggctcgccgtcgctcctcctccgcgtcccgccaccctccgcacgcacaagtttactatgtctgggatggcatctgatga

SEQ ID NO: 382204 - DNA, 315 bp, Zea mays
ggacaccggtgggcggtggagggttaggcgcgcaaccggcgaagggattcagcggtccccttcccccgtccgaagcgcgacggcgccctgcagattattattggttttgattgcaaaatggatacagaagcgactttaaacaagtctggtggttctgaatctgtaatgtcattactggaacagcttgctgaagtatttggaaacttgaaatcccacaccgaagcatttctgcaattgcagaatggtatgcaatgggaagatatcaaagggcatttcctcagccttgataagtcgtatggaagcaagtctgatgaa

SEQ ID NO: 382205 - DNA, 271 bp, Zea mays
caggagatacaactctactggaaatgaaattaggcagttcaatacagaacaagattccctgacaaatgggggtttacctgcaccagcctatctcatgctcaaatatgggttcaaaccagcaggttggcgtgcccaaaatgatggtgaaggcaatgatgatgggttcttgaaatatatatcaagaagagtcattgctatatttcttaaagtactctcttttttgcggttcttcattcgtcgacgacaacacttggccaatgatcatccacat

SEQ ID NO: 382206 - DNA, 193 bp, Zea mays
gcgtgctctggtccagctcgccggtcggccgcccgtcacttgtagctgctcgcttgccgttgcatcctctcggttaggaaatttgcgcgctcccaccatgctccagtaccctgccgttggcttctcctccaactctagccccagctccggcttcgccgcggtgtctatgctcgcccaggtcgcgacctcaacg

SEQ ID NO: 382207 - DNA, 250 bp, Zea mays
gcgcgtccggccacccacacctctgcccctccatgcatcttcctagtcctagccgcagctcctcatcttcctgcgcgcgcaccttctctgtctcccatggccgagcgtcctccctgctcctctctcctttatctccctctccatgccggcgcttccctagctcgttttcccatctccctgctccttcccatggtgcgcagggcgtcctcacctcgactccctccctagctccccaccgctcgcattcctc

SEQ ID NO: 382208 - DNA, 189 bp, Zea mays
cggggagaaggtggtggagatgaccaaggagggcgcggggaaggtggccgagacggcgcaggccatcggggacatggcgaacatggcggcgcggagcacctgggacgcggccaaggacaccgcgcacggcgtcaaggagcgcgtggtccccgacgcggaagacgtggacgccgccgtgaacgagcggga

SEQ ID NO: 382209 - DNA, 183 bp, Zea mays
taggaaggcaccaagagaaaagagcggtggcctgcttcttttgtcgtttggggcgtcgtcattccaatctcacgcgatcacatccggccttcgttggtgcgcagacgacgacgacgacgacgtgcccagtgcgcggccggccggggattcatatcgaatcggatcggaggggaagcaggagcc

SEQ ID NO: 382210 - DNA, 211 bp, Zea mays
gagcaagctacaagcagctggatgcttccatctgtcagtgtacagtagccggcttgcgatcagtagaccggccggaagcggagctcacccgtctctatactatccatcatagaatagaatagatagatagatatgctactcagtaccacacgatcagtagaggtagcagcaggaagcaggactgggacgacgtagagcgccaagaccagag

SEQ ID NO: 382211 - DNA, 259 bp, Zea mays
  unsure (1)..(259): unsure at all n locations
ctttggtgcaaggacattcagcatgggtgttgtgccaccgacagaagctgcctctatgcatgtgaacccaatgcaggggagctaccccatcagggctcacactccaatgcaagaagcaaacgctcctatggctacttcattccaggggagtctctcgaaggataaagcactgggcaatgctgctggtcctgaatcaagccagacgtaacaaccgccatgctcatgaacacangcagtcactcccatgtcaaacatgctg

SEQ ID NO: 382212 - DNA, 155 bp, Zea mays
ctgcacgtcacgcacgcctctctgctactgtgctggctgatgccggtggggtgtgagcgaactgcgagctgctgccactcctgctgccgctgtcgaccgccggccccggaccgagatggacgctcggtgggcggtgctgctcgcgctgctggtcg

SEQ ID NO: 382213 - DNA, 307 bp, Zea mays
agagcggccgccctttttttttttttttttttttttttttgcacaagataaacttcaggtgacaaatcaatactaaaaaaactattacacctttgccagtattaagcagaagagataaattatgatatttgaatgagaatatatggctagctacatacagttttggatagctcactacccatctccatggttcgcaagcacagagaaattatttcagtttgcaacaaaaaactgatgacttcagtatcatcaaccttggatgcaacctactgatccaattgaataaccttggatgcaacctactaat

SEQ ID NO: 382214 - DNA, 99 bp, Zea mays
ggaccagtcctctttcctcagctactgctcaccgccggcaccacgagcgtcaaccgcttcgccgacgcgatctcctccagcagccgctgccgcgatgca

SEQ ID NO: 382215 - DNA, 300 bp, Zea mays
atgatgtcgtacgtctttttctccacgaagaaccctataactcgccactgggagagatcccatcgagggaaagagttccattgcgttgcttcgggtcggctggccgcccgatgcgtctccaatcggtgcagagttgaaaagagattatcgtgtaagactaaactagatctaaacctaaggctagagtactccttctcctaagaattgaaaaaacgatataaatagggtaaaattataagtaattttgattggatagattatgaggggtttttattggtcgtaacccttcgtctatataaa

SEQ ID NO: 382216 - DNA, 283 bp, Zea mays
tacattttccaaaaataccatgtctcctgcaaccattgacttaaagagttcttgtgccagtagagttcttttgaccttatgattctgccttgatgatgcatgtgatgctgatgatatattggcacaacattccaataggaaaaagtgaattctgaactcacaagttatggtagttaaaccctgtttctttatattgcctgtttttttacatccgaaaatgtgctttggcccatcttcgtccctattctttggctgataaaagtggccatttttgccaaattct

SEQ ID NO: 382217 - DNA, 278 bp, Zea mays
caaacatttaaaagacagatcggtctaaaattcctcatatacgtaggattatcaattttaggaatcaaagtaacaagaccaaagttaagtcttttaatgtcgagaaccccattataaaagtctttgattaaattccatagatcattatggatgatctcccaagaatatggctaacttgtggttgctaaatgttatagcatttaccttgtggtttttgtacatcactgaatgttcagctgcaagttgaaaaatttttaatcctctattttattgtcact

SEQ ID NO: 382218 - DNA, 280 bp, Zea mays
gcggtgatctgctgctgccggatccgagcaccgtgcccacgggtcacggccagcgatatgtagggatcaagaatccaactttgagaaaaattgctcgagatgtaaatggtgccgccggagtaccagcagtacctcgtgcaggtgaccaagtaccaggccgcacagaacttcaaggtacgtatgcacacatggttacatttactatagaactggagttatttttttgatgcaaaggctgccaggtcatggtgatttcacgttcgttaggctcgagaggtgg

SEQ ID NO: 382219 - DNA, 274 bp, Zea mays
ctcaattcatctcgagtctgatgatggtattattattcaaggtcggtcatcggtcccttctactgatatggagattgatgataacaaaagtacaaacataacagctgaaggatacagcaacatggacggtgggccttctagtcatgtaaagttaggtccactgaatgcagatgacctaggaggaaacagtatccgtaactggactggttacaatgtacagactcctgatttgaatgatatattattgcataataatgaggatattgcaggccca

SEQ ID NO: 382220 - DNA, 303 bp, Zea mays
atgaagatgaacagaagctaagcgagcacaatggacggaccgatgtggacaatgatcactgtaacggttcttcacaaactagcatagtagtaacatcaaatatggtcccagaggaaatgatgggagattgtccagtcgataactgcaatgaggatagtagtctttgtagaaaagtgctttctggaagtacagaaccttgcccaggtgcaaaaatgacaggatgtgggaatttgagtgaagaccaggttgctgaaggtagcgtgcttcaacgtgtagaatctatatctcctgttataacagata

SEQ ID NO: 382221 - DNA, 194 bp, Zea mays
cacagcagcccctcttgtaccagtaaaccgtgctgctatcccccgctagccgccgcgctgctgcggctcgcctccctcctccccagtccccgcgccccgccgccgccgccgccgcctcctctcgctccctccttttaccccgagcttaagctcgcgcgtacctgcctacctatccgtaagagaggaagagggga

SEQ ID NO: 382222 - DNA, 302 bp, Zea mays
gacccaactagagggctgcatgaggatgagcctccgccaatccaagccgggctgacttctgcctaacgttggagcttggaccgtcccttagggagaatcggttccgcggacgaagacaaggaggaggtggagcacgacacctgatgggagggaggaaccgcatgggagcaagcggcagggtaggtggttgccggaacctgggcggcagacggcgagctgttggtggaatgaggggcgccgggtgatgtgggaggcaagggggtgggagacgagggggcgggagcttttttttgcagtgtgtg

SEQ ID NO: 382223 - DNA, 297 bp, Zea mays
agcgaagtgtggcaatgctcagctgaccctggagttacttgagcagggtttggatccttgcgtaaaagatgcaagaggaaagacatcttattcgctggcttcagataaggaagttaggaatacattcagaagatttatggcgctcaatcttgacaaatgggactggcatgctgcagatgtgcctagtgcactaacaaaagaaatggaagaatcacaagctgcaaaacaagcagacaaggacgccaaaaggaaagcacgtgcaaaggaattgaagaaattaaaaaaagaaagagaaaa

SEQ ID NO: 382224 - DNA, 300 bp, Zea mays
gttgcatttgtcttgaaagattatattttcagtttgaggtaggatattatatgtgcctaacttttcaatgcaaggcatgaaattctatgcttatcattcaaatggctcgttctgtacaattttagttaggtattggagttggtatcaggacgacctgacagtttacaatttgcaacaatgtatctatttctcaagattgctgatattgatgttgttacatttttcctgttttcgttatcattggtgtggttctacatttttgttagctatttagcatgatatttgacttttatgggatgg

SEQ ID NO: 382225 - DNA, 217 bp, Zea mays
caggcgcatcggcctcgccgctgcacaacgccggagacgagacgacggcggctgcgggatgacggtcttccacttcctcaactgcgccttcctcaccttcggccctcacgtcgtctactactccgccacgcccctgtaccccctccccctttcactgcttcccctctctctctgtctccgtgagatccgtatgctaaacacgcgggatctgtgtttg

SEQ ID NO: 382226 - DNA, 297 bp, Zea mays
gttctgcctcccctctcgttctgcctcccgcgcctccgataaggctctccctgttcggccatacgcacaaccgctctctctccctctcgaagcgacgcagaaccgctcgccagtgtcgcagtcgcctcctgtccctctcctctctctttgccgctgccctcctctaagcatctccctctcctactccctcctctcaaagcacttgttggccccccaccgccgcatctgcatcccataatcgcctacgccatcgccgccgccttcgggtccttctcgctcagcctcgactgctcgctc

SEQ ID NO: 382227 - DNA, 220 bp, Zea mays
tatggtctgctggggaagcgaacccatcctactaggtacagtagctattaaagcatgtataatttagggcatgtatagtttatgtattgagctgtatatttcagtgtgtctaatagagtaaatataaaaactcaagacatgtatcttaaatttgcttcaaacaaggtttgtaatatttctcgattttatttaaagttgacgcatatatacttatcccgtt

SEQ ID NO: 382228 - DNA, 315 bp, Zea mays
gcggtcaggccacgacggcacgcctgaggcatgtatctggtacgcgaggcggcggtcgcggcaccggagcagggcggcataggcgaactggtcggaggcagcgacggcggggtgggctcggagaacgcggcggaagacggtaagtgcggcggcgtggcgaccgcagcgcgcgtggccagcgatggcggcggcccaggaggacgcgaggcgttgttggcggaagacggcgaagagcggcgatggctgccatggcatgtcgctgggcggcgacggttcttccttcccggtgtcctagaaatccgaagaagagtagag

SEQ ID NO: 382229 - DNA, 311 bp, Zea mays
acccttggttcctcgcggcgacgactgggcgagcgcctcctcccctccctcactccctccgtgagctcctcgccggcggcgcgcgccgccgcccgtcgccacgtcttctccgctgacgtgggctcaccaggagcggtcttctgggcgatctcgcgggtttggctatgtaacattcgcctcagctgacgatgcaaagaatgttcttgattgcgagcatgttcttgggagccgtacattagaagtgaaggtagctactccaaaggaagaaatgaaatcacaaggatcaaagaaagctacaaggatattcgttg

SEQ ID NO: 382230 - DNA, 310 bp, Zea mays
taccctgaaaaaactgatgcctccgtagatggtgaaactgctaccggtactcctcggttagatttcggtcggtttattacttctgatgggcataatactgttggttcaaccaccgaaggaagtgttcaagacggtgatatgattgtaaatcttagttctataaagactagccttcaaacggataacggtttgagcgtaccacaacttctccatcagataagcaatggtactgaagtttcaagctcagaaaaacgggaagcattgcagcagttggttgatgcttcccttgataacaacacctccatttggg

SEQ ID NO: 382231 - DNA, 305 bp, Zea mays
atcgagcgcgaacttcagtagctcatgtccatgtgccaacaagttgggcggggtggcctttcaaaaaaataagttttcccattatttggatagttttattaagaattagaattcctgcagaggtagcaggggtaattgaaatattgaggcctctttgcatacagagatgtttcaaagttttgaggaaatatttacccagcagctgttacagtaggcttaatccctattgtttcatcttttatacttcctccattcttttttattcatcgtggtttagttaaaaaatatattaattaacgacaaat

SEQ ID NO: 382232 - DNA, 265 bp, Zea mays
  unsure (1)..(265): unsure at all n locations
acaccggctcgcctcaacgccgccgcgcccgagtttaccccccgatccgccgcccagcaccacggcaacaacgcccataccactngccacccaccaccaccatcagcccgcacaccacccccactaccagcctcaccagcaccggctcgcccaacccgaggtccgcaagctcgtcaaccacgttcaatctcagttcagcgacatcaacttgggcacaactgaacatctgatgaacttcatcgctaacgatccagatggatttgtg

SEQ ID NO: 382233 - DNA, 231 bp, Zea mays
ctgcagtactccactccgttcctctatgtgcttagctttcttgtagacactcctagagtgaggtaggtggggcgggggtagtcgggagccaggagacgagagtctctcttcctcctcctacctcccagtcgcacctttctttctttcttttttctttctttttgggtttctctttctcctggtccggtccgggagacctgctggaccagacggtgccgactcactgcaggc

SEQ ID NO: 382234 - DNA, 283 bp, Zea mays
gttctatggcatacattctcatctctggcattgaaagaactgaaccataggaaaattaaggacagaagcacttctccagattcaatgccgatgaaagaacctatagctgtggcacaagctagaaggttttctcgactgacttcctttccagatatcttcctaaatgccaagtatattcctgaaacagccacaaatacacctcccaaggaaggctcacacaggcagttgtcaccctcaaatcggatattcaggtccacctctggaaatgataatgttcattcta

SEQ ID NO: 382235 - DNA, 306 bp, Zea mays
caattagcagcggcaccgatataatttatcctcctcccctagcctcaagctcaccgccgtctcctaccgcagtccgcagcacacagcctccgccagtcaccgagctagctagacccacccgccgcgccatgacgtggaacaggtccgcggccgacggcggtggcagcagcgccgggacgaccgccggcgacgacaccggcctggcgcgactgcgggagctcgggtacaagcaggagctgaagcgcgacctctcggtgctgtccaacttcgccttctccatctccatcatctcggtgctgacgggga

SEQ ID NO: 382236 - DNA, 294 bp, Zea mays
gccctgccccctgtttccatgaccggcgtccccaagctcctcccctgccggcgtccagcacccggccggatatctcatggcgcgcgtgcccttctcttggcggcgctcactttctgcttctctctctcagcgctcgcggctctttctctcctgctccgtccatggctgtttgccactgctcgcagcgtccctgctcgcccagccgagctctccactgcctagctccatctcacggcgctctgtctgctcggttccatggtcgtggtactccagctcgccgtgcactgctccctc

SEQ ID NO: 382237 - DNA, 298 bp, Zea mays
atcaaagcaagattatagaacttatgtttgtaaattgaatatctgagatattgacttccacaatagctaacgaggacagactacaccatgtagccctgcacctactgtaaatcattagactatctccggcagcttacccatcatatctctcatcctatctcctatttgaactccactctacgaacggtgcagtccacaatctacattggaaaacaatgttttaggtgaccatatgagtaacctgctggatacggttttattagctactagctagtcaatggccatgggccatggcttc

SEQ ID NO: 382238 - DNA, 286 bp, Zea mays
gctttaccttgcaggccaaatgtgggtttctgccatcatcagaatatatatcagaagataatactatcaagaaactagtaacgagatataagatgcatcagcacctcaaattttatcagggtgaggtgtgtagattggaatgcttgatgccttgatccaagataaaattccactctcttttgcgcacttaaaaaacatccatcgatgatacaaacttgatcaaaataccttaaggcttgttatttacggcactgttgtaatattataccgtctcttgctttttgac

SEQ ID NO: 382239 - DNA, 203 bp, Zea mays
tgtcaagctaggctcggctcggttcttcagcgagctccaaaatgctgctcggctcgtcctcggctcaagttggcatgcgagccaaactgtacacagcgatgcaggcaacccaagttcatctctgtaaaagcagaaccacaacaatcaacactcaacagtctgcaaaagcataaccacaagagaatagaatagtagtacactac

SEQ ID NO: 382240 - DNA, 286 bp, Zea mays
ctctcctggaccagccgagatttctcgctctgcgcatctctaattcatcttcgtcgagaggagctgttcctcttctttgccgcctcgaatctgggactggtcggttttctggatccctgctgcctgtcgggttctcgagaggtgtaaaatccaatggagggtgtgtcatcgttgaaccagccgttgatcaacgacgaccggcagcccgtgcccagcagtatcgccaagggtgatcaaatccaaggcctgttgtcgggtgaatggacaaatgagcggcacagctcgt

SEQ ID NO: 382241 - DNA, 291 bp, Zea mays
tgcaatctttgcgggaaactgttgaaaatctgtactcccctcaacaatgcagtttctcagtcaatcacatcaaagatcctgaaaaggaaggggatgctgttactgataggcataatgaagacacaaatgcaatcgtaatggtgaatgttccatcttactacaacaatgatgacaatgaagaaacagacaatgaggatcaggtttctccagagaaccagaaattgccttcagtggctagagatgcgagccccttgtcaggaggcacaaccactcaggctgatagatctgctt

SEQ ID NO: 382242 - DNA, 293 bp, Zea mays
cgctgctgacacgaacatagggttcgtcagtcgctatggcatgagactctaccagggtgccggaggaatcgcccctctaggagattcttatttctttggtgttcttcctattacattctacaacgcttatatagaggtatgcacccctgactcaattggaaagccaactaaccaatgtaaacaaactaggaaacaacaaattgactcagaataggaagcaacaaaccgactcctaaacaaactatttaaggatatctctgtttttaaacttatctgattgccaattgttaatc

SEQ ID NO: 382243 - DNA, 299 bp, Zea mays
agcctggtcagggtatggaagagcataggcagatgtcggagtttgacatgccggtttcacagggaagcggccaagccactatccagtttagcagcatgaattcatctttctcgagtccacctgttcagcaaccccaacggccacatcagatgtcacaatcgttacacatgtttgggaatccacaccattctcagatccagggaactagttcaagctcacaacagcaggcatatgctgtgcacttggctaaagaaagacaaatgcaacagcatatggcacctcaacagcatagtgatctt

SEQ ID NO: 382244 - DNA, 278 bp, Zea mays
actctgtctactaggcgggagagtgagacggccatggcggaggcgcaaccctagtaccggcgcaaggtcccgacgaggcgcccctcgatgcgtccgccattcagagccgggtggagcagctctcattgaaaaggctggaggtggagcggaggggaggtggcggaggatgaggtggcactaggtttggactccacgcacaaggtaaggtcgtcgctactcagggtcgattctgtgacacatgcgagggcgaggattcactttggtttgccggaattgtg

SEQ ID NO: 382245 - DNA, 283 bp, Zea mays
accgccgcccgtcgcttcccccaaactatcgtgttcaccaccgacggcggcggcgaaacaccttgtcgccctctaccgaaatcccagcccaagcgtgagcgcccgctccacaccagtcaccatggcgccgcgctcccgcaagcaggcttcgcgccccaagccccgcccaggctcccgacgtggtggcggcggaggggacgacgaccccttcttcgagtccgcgcccaagcgccgccgcggggaccgtgacgaggacatagagagcgaggacagcgacgacgac

SEQ ID NO: 382246 - DNA, 272 bp, Zea mays
ccggtggccctgccccccatgctgcctatccttggccccacagaaggcctcgcgcgagaccgatcgtcccttagtctctgccttcagcgccgcctcccgcttaaccgcggcggccatggcctcctcctccgcccttagcgccgcctcccgcttaaccgcggcggccatggctgcggcggcctcctcctcccgctgccgcttctcctcctcctcctccttctctttgaggcgaactcaaggagctgctggaggctgacgtattgggagggatg

SEQ ID NO: 382247 - DNA, 302 bp, Zea mays
gtgaccaactcgaagcttgcgttcttgtagtagaggtcggcagcaagcggtagagcgagaggtcgagaagatgaagagcagcactctgttggcgatcctagttctccaggcccttctggtctctacggccgtggccaaaggacctgcaggtacgtgtgcttgccgagatttcatctagctggctactagcttgattggacgaaataaagcaagtacgtacgcatgatgctgctgcgcgcagggccgaagaagcagtgctggtgcggcgagtgcaccagctggtcgggcgtgtggacctgcga

SEQ ID NO: 382248 - DNA, 296 bp, Zea mays
ggcaaatgctgatctccatctggctggcggcgccggagttgggcatagcgcatcgccatgaagaccacacctcctccggtggtgggctgaatctaggctcgcgctcgaggaggtgaggcagaagactacctctgagcccccagggaagggcaacgacagacattgctgccggtagtgattttgtgaaggagccacagggccccctcgtgcggttgtgtcatcgtctccatcgcaggtatgatatgtcctctccactctcttgtgcaccctgaggcacacgcatgacacctttggga

SEQ ID NO: 382249 - DNA, 121 bp, Zea mays
  unsure (1)..(121): unsure at all n locations
cgcttgcgcnctccgcaacaacgcaacgcatcgtgacgccgccgctttttgcttttccgactgctgtttccgccttttgagtacgcgttgggcgatcatcggattcgacggacgcagccgt

SEQ ID NO: 382250 - DNA, 309 bp, Zea mays
ctagacttggcaacaaaatgctgccttctgctgactggcaccagtaaattagacaatgtgaatacatggacatacataaaattttgttggtcctttcatttttgcagaactgacatgattttcactgcctacttctcaaattcgtattgtatctacactgcagggtgtagctattctaatctcgtttctggtttcagctgtattccatgaggtactttaagttcttcagaagcctttttcatgatcggttcaatttctgtttttcctaagacatgctattgttcgaattccactcagcacattactaac

SEQ ID NO: 382251 - DNA, 271 bp, Zea mays
tctcgattctccctcaagtccagtccagccggatcagtccccttcccctcctccacaaggcgccgcctcccgcagatccgaattggaatctgggccttcgtctccgcaccacaaatccggtaaatatacgcgggcaataaaaatccatctctccccacgaaccgtaatgatagatagctgcttgcctgctccggagtttcttccgctgttctctctcgggcaaattttatgcttgggcaagaccgtgtccttcagcttctaccccccaaaa

SEQ ID NO: 382252 - DNA, 306 bp, Zea mays
ctgttgtccagccctctcatggcccctagaattgcacaggtgttgcgcggcgcctcgcccctcttgctcccctcccgccgccagccccgttggggagaggaaaaggaggattaggaaattcttgtctgacgagtagcagaatttctctaggtcgttggttgcagcgaggtccgggccttcgtgggatttttgatactctaaagtcgtatgatcgattctacatattgaagaaaaaacaggccttcgctatgggagagagacggacggagaagagaaaaaagttatctacccttacctctgtgctat

SEQ ID NO: 382253 - DNA, 188 bp, Zea mays
tcgtacctcgccggctctcttgcgtgtctccgcttttcgcgacttccctacctatattgcgcaccaacgtactcgaccggatgcgtgcatgcggttctaacagcacggatgcactcatcattcatcactactacttcactagctagctagcagtactcctactcgctaagtagtggagatcgacatga

SEQ ID NO: 382254 - DNA, 289 bp, Zea mays
cgactccaaataggctcgacacacactcccctcgctctgaatccggcggcgtgaaagccttgcggccttgccttgccttgccttcctgcgagcgcgaggaccacggctctccttcccttcccggcgtgcaccgtagcccgaagaccgtcgttttctcgcgtctcacgccgtttgctgcgttcccgttccccgcgtcgcttgccgtattttctgcacgggtgtcactgtcatgtcggacccgtgaagcgattccgccgcccatgggccatgaccctgcctgggctgggag

SEQ ID NO: 382255 - DNA, 306 bp, Zea mays
agttctagatcgcgagcggccgcccttttttttttttttttttattttttttagtcaacaagtaaagtattctttttatatatctagaaacatgaaacttttgagctacctatgcaactagtaacagaatagcatacaagaatttcaaacggcgatatccaccctaatgtaaacatgccctaaagatggacagcttccactcctcaattggttactctgtacttctgcagaagcaaatgttccaattaatttcattagacgggcaatgttgacaataagaatcaacagatgagtcctatggagagc

SEQ ID NO: 382256 - DNA, 303 bp, Zea mays
cctatgtcaacttagaatgaacattgaaactaattaagagtgttgatcagcctcttggtcagaatattcttgcatacaatttgacaaatgatgttgaactagtggtccatgtttctttttattattcattgttctattgttttcttcagcttgagaaaggtgtggatggactatttgatagctttgctaggttggattcccgcatatccagtgttggtcaaacagctgcaaaaattggtgatcatttacagaatcccagagggaaactgctagtcagacgatcgatctcatcaagtatctcat

SEQ ID NO: 382257 - DNA, 258 bp, Zea mays
cgacgcgccagggtttcaggcttccacgaatctccccgccgccctcaattcccctcggcgccgccgccctcaattcccctcggcgccgccgcctcctcccctcgcttcggtcctcgttgttaaggcgtccccaaggcgacgcttaagcgtcgcttaggcggtaaggcgcccccgcgacgtaaggcgtcctgttcgtcttactcctgctggcgagtgggagaagccactggtggctccaacagcagcacggcggctcct

SEQ ID NO: 382258 - DNA, 294 bp, Zea mays
ggccagcctttttttttttttttttttttttttttttttcggaggaaatatgtgggatgagcaaggacgagaacccgccagatgacccagcaacgatagtaggcgagccagactcgattgcaatgctgcataagatcgcaggcaaagtgtccagccagctgaagaaggaggagggcgctgaggtggtcgcggagcaggcgtgctacctgccgtgcaccgccgacgggctgccggtcatcggggagataccaggcgtgaaagggtgctatgtggccacgggccacagctgctggg

SEQ ID NO: 382259 - DNA, 237 bp, Zea mays
gccatctcctcaccctcgttcaccacacagtccgccactcctttagtagcttgtgatttgtacgtcgacgagatcactggtcgggtggcggacgacgacacatggggaagggtagtgtgggtgcatcatggtgggcgttcctcctgctcgccggcgtgctgctggtcgtagcagccacggccggggcggaggacggagtggtcgaacgggaccgcaaggaggacctgcggtggtgca

SEQ ID NO: 382260 - DNA, 292 bp, Zea mays
  unsure (1)..(292): unsure at all n locations
gcgactacgacaagaagcagcagtgcgtgcgcgactgccgccgcggccgtggctgggaggagggcggcagcggcgaggaggaggaggaggacagcggcgaccgctgcccttgcgagaagcagtgcgagggccaccacgaccgggaaagcaggcagcagtgcgtccaggcttgcgagcgccggcgacaggagcgcggcggcagccgtgactccgacgtcgacgangacgacagcgaccggcggtgccagatgaaatgccaggcgcacagcgatcggcaggcgaggcagtggtg

SEQ ID NO: 382261 - DNA, 224 bp, Zea mays
cttgtatctgactgtagagtttggaccactacataccgagacaaccatctaggctgtctaggttctgaagttatgattaggtactagagaagtcaaagtgactagctctatatgctccatgtggaaaagccaagaagtttcagggcgagtagggtgggttctaagaaggcgcagtcgttagctaaatgtttggttgggctttttgcactctttctaaatatttg

SEQ ID NO: 382262 - DNA, 291 bp, Zea mays
gtcgaagtcgaaccctagaagttctctgttctctccctcgtccggtcgtcctcgtccctcactccctctccctagttgcctacccccgccgccgctcaactcaatagttgctcggtgcctcggcctcggttgctcttgcagtcttactcgccaagtcgccaggtgacgaggtcctagacccacgccgccgctgcatccagattccggacccacgccactgccgcctgcatccagtctccatggcggttaccagtgacaccacaaatgacgacggacggaagtcgctaccac

SEQ ID NO: 382263 - DNA, 311 bp, Zea mays
ggaatctctatatattttagggagcctcgccaaacttttagggtctcctgcaaatagtgggtgccgaatggaagcctttggtgcatggcgggtggctctaatctttaggacctgctcattaggtcgttcagcctagatctttaggctctgtcgataggctaccgcccccttgttatattttgcaccagttgcagacacctgttgtttttgtttctagccggtgtgtttctgggtgggtcagttgcccactcctgtacccgtctcttaatgaaatgacacatagctctcatgtgccattcaagttaaaagat

SEQ ID NO: 382264 - DNA, 308 bp, Zea mays
ctgttatcctggccgatggccttcgaacagagccaccattgcttggctcatcctccccgacgttggtcccccctctctctctctctcccggtgctctgctggccgccgcgcccctggtcccggccccagcttggcctcctccccatgccgctcggccgcccatctccctgctgccgctctcccatggcgcgcccctggtccttgctcctagctcgcctgcgctcggcctccagctccagctcgccgagtccctctctgtctgcgccatggagctcgcccggccgcgacctcgccttgcttcctgttgc

SEQ ID NO: 382265 - DNA, 173 bp, Zea mays
atgcttaatgtttaatactttgagttgaagttattggatttgttttggattttaagttaaaggatttgcagatatatggtttaaaagtcacataattctcttctagatgcaatatttgtgtttaacaaagtcatatgctcttttacacaaaaaaaaaaaacaaaaaacaaaac

SEQ ID NO: 382266 - DNA, 302 bp, Zea mays
ggaagatctactttgtgcttttgcactcgaaactcaataagcaagatgctgaggttctttcgacggcaaagattctaagaagcaagggagcagttgttgcaaagtttagggtctgagaaaaagcggggatccaagtttcccgacgagtcatccgccgagagctcgaacgcatcctccgctcctgctgaagagaaggtgattcaacctccagtcatccaagacaaagcaggcgcttgggagaaatcatcgtccgaagaaccttctgaaaccgtgtccgagaaattcccagtctcaaccaccga

SEQ ID NO: 382267 - DNA, 300 bp, Zea mays
cgagagccagccggagttgacggccgcgccggcgccgggacccggcacgggaagcgggacgcacaggccggggccgggggcggccgcaacggaagcacctctcctccatcgccagccacgtgctccggcaatgttctctgacactggacaggagcgtggacgatttggtggcagacttcgagctgggcttaaagactgcagcagtggacagctactcaagaaaactggtcgagttctgcagtctccaggcgctgcagatcatcacgtcacgcgatataggtgagaagatcagcgagggct

SEQ ID NO: 382268 - DNA, 180 bp, Zea mays
aacccagcagacgtgaaaccgacagcacgtacgtacgtactgtgagcggctgctcggcggccatgggagaatggtgcttcaagaaacgcgcactctggtgattattgtggccattattagctcgctgcagctgctcctgataactgctcaagaagctggaggagaccacgaggtgtggtc

SEQ ID NO: 382269 - DNA, 165 bp, Zea mays
gtccaatctacggcatcatcgcaattgatagttgatagagcattagattttccttgcagatctatatagatgcgcaaccgtttttgtcagtaaaatcatatgcacaactttccagtgaacacaaaatagtcctgaatttctccgtcgtatcaggagagatttgct

SEQ ID NO: 382270 - DNA, 181 bp, Zea mays
actcgaccgaattcggctcgagcgatggtaaaagaggatgaccgccatggcgacaccctggccgccgacgctcatttccgtgtagtttaggactgcagattccttcgcgctcctcctgctcccagcgaggaaaagagagcacgaactaaactaggaaccatccctccccggcattcattcc

SEQ ID NO: 382271 - DNA, 178 bp, Zea mays
ctcaagaacgccctctctccacgcttgtgccaatttcttcgccctccaccagtgagcacgccaagccacctccccttcctgttgcccagctcccccctgcagcgcgcccgcccgcccgcctccctaccctggccgctgcggccttcgctccatgcacctgctttaggttgcgccgccg

SEQ ID NO: 382272 - DNA, 285 bp, Zea mays
gaggcaacggtggagagggagcaggtcgccatgcacgtcaggaatgtgatggcaagcgaggagatgcggaagagcgcggccaagtggaaggaggaggcggaggctgcgggcggccccggcggttcgtcacgcgagaacctgctgagcatggtgagagcgctcagctccgcacccaactcaccagatgcttaagagcccaaagatcagtagtcacactagaacggaatctagaatcatgaagcaatactgttcatgatcgacgccagcaaagttttagtctcctaa

SEQ ID NO: 382273 - DNA, 118 bp, Zea mays
agagcgctggctccgggcgttcgggtactcggagacggcgttgggagaagagaaccgcaccgcggcgcagacatgggcgagttctgcccctccccgcaggtggactccgcgctggcgg

SEQ ID NO: 382274 - DNA, 189 bp, Zea mays
ccagaacgcaacctcggctccgaaaccctagccgcacgcagctgtccacttctactcccctcgcctcgccacacccgccgcgcggcacgatcagacgccatggccgccgagaactactggaggtcaggataccattccctcagagagaacgacacacttggggcatcttatgaccgttacttgcgcaat

SEQ ID NO: 382275 - DNA, 99 bp, Zea mays
ccccactctactcattcagcagatcccgtcactcgctctccacaagcagagcaccgcagcagaacgaggaaggatgctggctatcttccagaagcaggt

SEQ ID NO: 382276 - DNA, 288 bp, Zea mays
acctcttccacccatcctgcctgctcacttccgttccgtagtccagctagatccccgggcaaccgatccaccgagaagcttgtggttgtggcggcggcggagagggaagcggggagcgggaggtcggaggcctccgtgcgtcggaggtggacgagggagcgaggcggcgccagaccgaggttgcgtcgggctcgatttctactgggctgctgtctgctgagtttacggaagtgtttggccctagaagagttgaagataaggagtggagctacgtttaaactctggtga

SEQ ID NO: 382277 - DNA, 154 bp, Zea mays
ctggaacggacgcttctgctcactcgctttccggtgctaagcctgagcttgcatcggcagagctgactgtgactggtgaagtgaaggaaaggggaggagaatgggagggaagctttgggcgggagaggaagcctagcagcaacagtaggcagta

SEQ ID NO: 382278 - DNA, 164 bp, Zea mays
ggaacagtgactcagcggcactcagtgttggagagctgcaggcctgctgcagctcagccacaccaatccactccactcctcgctgtcactgaaggcaacttttcatattatcactgaatactgatagatataaagcatccattgatggatcataaggcatggct

SEQ ID NO: 382279 - DNA, 272 bp, Zea mays
atcgcccaagtcgtccgactaatcgccctagtcggtcagccagaacgactagcaaatcgtccaacttgaaaacattgacgatcagtaacactaatcgagtcgaacaccctaatcgagcacagagaaacgatcaacccgactaatcgcgactaatcgtgattagtcggacgatctgaaaacaatgctagctatgtggaaagtagccttcaagtgataattgacccagatgtgtaaatgtttatatctttctttctttatactccattccgaat

SEQ ID NO: 382280 - DNA, 278 bp, Zea mays
gcgcgccacccgccaccagtcagtcccgccgcgccgataaaccctccctccccgaatcggagaaaccgcatctctgagattcccctccgacacccgccgtccgcgctgggtgggatctcccatccggacccgtcttccgactcattgtccctagaatttctcctccacacagagtccaccggcttccggagcccgactcgtttcgtcatccgcgcctggtctcgtcagttccggcgcgcctagcagattcgtggcccttcctcgtacacaattcgggg

SEQ ID NO: 382281 - DNA, 227 bp, Zea mays
tgttgaggagaaaaatccggggaatctaggtgaagaagagacagaacccgtccgtcgcttaccaggtgctgggtgaaaggctcaaaccgactatcgttgtcgcttaatgccgatcgagtcagcttaagtcgtgcacggaaagacgggaggagcacgacgtagggatgcgcgccgatgacgggaggcgcgcgatgtgatgaccaacggcgatgggaggccgtgatgcg

SEQ ID NO: 382282 - DNA, 285 bp, Zea mays
actatctctgtttgcatctgtttctcgccgaggaagaagaagcttatgtccggcctaattcagggagtgatgaggacctaagtgaagaacgactacaaggtcttctgaatcaactcaacaggaccagtggaccacaaaaacaggcacaatatttattttttcaaaatgacaaatccaagaggccaggctgatgccaaaggaagaattctaccaaaattctgaaatcgatgataacaagcaagcaataattcaggaccttcagattccaaatcgtcaagcggcaag

SEQ ID NO: 382283 - DNA, 286 bp, Zea mays
aaaatccaatagatccaccagccaagcacctgtaaagatgtgagattggccgtgaatattgctcatttcttggcccatcgacatttgtcaccatgggcggcgtgtgttcggcggggattgcaggggacaagtcgccaacggagctctcattccgagcgatggggttcgtggtggagcaggatttcaaggccttctcagccgccggcaagaacaagaccgcgcccgtcgaggaggcggtggatcctaaccaggtgagcgatcagtcgtttcgtttctctgagaaggg

SEQ ID NO: 382284 - DNA, 299 bp, Zea mays
ggagttccagccggccggcgtgcacattgcgcatgtgatcatcgacggcgtcatcggcgagaggaggtcgctgacgaggagcagcagggccggcggcgacacggcgggcgcggacccggacgcggtggcgcagagctactggcacgtccacgcccaggacaagagcgcttggacgccgccgctgctgtacgtacggtccctggaatctttagtggactgctaccggccgggcgcgttcccgatcaagcaggagagagggacaagtgggtcttgttgtgtatgtatacgtcgtgccctgt

SEQ ID NO: 382285 - DNA, 302 bp, Zea mays
aaataatctgtaatatctagatgtagtcttattagtgaaatgttagtacctgaactgcttttgtacaacaaaattaagaagggagatttaggacttacacacacataattggtataacagccatgcttcgggagacttacccaataacccaacccatggtgggggtggactgttttttttagataggcccgtacagtctcacattgttgctgccaaatttgaatataacctctgttttgttggtttacctggagctgtttgtgcatggagagtatattagaccatgtccactgttaccttaa

SEQ ID NO: 382286 - DNA, 275 bp, Zea mays
cttaatgttcttattatgcctgcgacgaatcttccacgactgacgtcctgaatgctatctgattcctttcttccaacagcgtatgccgagaggcggttggttgcagaaaacacaagcctgccaaacatgcataaggaagaacttgagactataataaggaatcagctccggaagccccagttgccaccttcttcatacgacacagcgtgggtttctatggtgccagtgcggggctctcatcagactccccgcttcccacagtgtgttgagtggat

SEQ ID NO: 382287 - DNA, 284 bp, Zea mays
cgaaaacagattaaaacagtaaaaccaccaccaccacctcgacctcgactcctccgccccatcgccgtcgtcccggcccgtctcctccgccttgctgtctgtccgctgctcgcctcccctaaaaggaggcacccccggccattgccgcaccaagctccccttcctcgaatgccccaggcccggacaccacgacgccctgccccgtgctcacatggctagcggcgtcctccaccgttccgcctcccgatgtctccgccctgccgccgcgccaaaccccgactccg

SEQ ID NO: 382288 - DNA, 285 bp, Zea mays
tatcccctttcgtctcgctctcggagtaggacactcgcccgcttccggcttaaccttcaagattctccctcctcctcctacttcttcccgcttgggcgggcgcggcaccttccggttctgggcctcctatatatatacgcgcgcgaccgtcccccttccatactccctagcatgctcggctcgcaccccggattgatcgagctcgcccgtcgccgcgatggattcggtgccttccccctcctcttctacccgggccaccgctgctcccggtccctgctgccgctt

SEQ ID NO: 382289 - DNA, 277 bp, Zea mays
gcggacacggaccgggagctgaagcggttgttgtcttcccccctcgtctccgtcaactgccagccgccgccgctggattctttccgaattgctctgtctatcctgtgccgtggatcgagttgcttccggaggcgacggcgacgcggtgatgttctgctcgtgcgcgcgatgcagctgggagccctgctttctcgactctgtttctccttgcactgattcagcacccccccacaagccagcaagatggacgggttcgtggaccccttcgtcccggaac

SEQ ID NO: 382290 - DNA, 277 bp, Zea mays
gatgaaacctatactggcatgttccaaaatcatacaagtagagaagctgctgtagattactctaagaggagtggctatgtaaatgttccttcttcacatgccagttcatccaaaggcaaaactctggattcgagtccatgggatgaaatgactgcacatacaacaagaccaccaagagaaaaattgggaaaaagaactgcctttgcagcacctgccacgaccacacatgttaagactgggtggcagatgggaaataccactgagcatctctcgaccg

SEQ ID NO: 382291 - DNA, 277 bp, Zea mays
cggatctcgaccttgctcacctgttagaaagccactcgcctagctccacttgtcccagctgctaggaccggcgacctgctaggtactccctcgagccgatggtgagggccctgctctaccccttttcccgttagatctaaattttcatggaggtgagcgcggacgaggtcaggtatgtcgcctccttctcttcctccaccggcttctacacgctctaggcccgcgctggtgttgtcggccattccttgtgctcgacctcgcgtctacgttggactcc

SEQ ID NO: 382292 - DNA, 279 bp, Zea mays
cgcaataactccttcctccccatctccacattctcccatccgccgttcccctccgcttcctcctaccatggcgtcttcttcctccccgagatctcgccatgctagctctcccgccttctgctagccagctgcgagtacggagcgctcgttttcgggcttcctgcatgcgatatcaccgacgaaacgtgtctctggaagaaggcatcacaggccgggatcggagaatgaaagctgacgatatagagcaagatgagctagggttcgcgaggcactagctgg

SEQ ID NO: 382293 - DNA, 300 bp, Zea mays
gaaaaatcgcgccgctccagccgtcgttatccccagctgagcttcttctttcccccagcacgccgcacttctctgctccctccagtccacagaagctcccagccgtggcgttctctctgctcggccgcgcccctgcgcttgccgagctgctctctggcgctcgcccatggccacgcctgcccctgctcgcgtccttcagctccagcgctccctcggctcgcctggccggagcgccctgcgctctgctcgcccatcctccgctcctatctccatggccgtggtgcttctccatggctgtcg

SEQ ID NO: 382294 - DNA, 312 bp, Zea mays
tgcagcagcagcggcactgggcggacagggcgcgggcgggtaccgcacggcagggacggcgccaccttcctcctccccgagctcctccagcgcaccccaaccccagctccaagtcctccagcgccgccaccttcgtgccgccgctcgccgccgcgcatggaggaggagtagcggccccgtttggcatggcgccgctgggagtggcggcggcggacgaagcccggttctgcatgacgccgtggtcagcggcggcgcacttcgagaactggggcgactccggcatcgtcgtcaacagcccgctcgccgagacgg

SEQ ID NO: 382295 - DNA, 240 bp, Zea mays
caatctcgtccccaaacaagcaaccaccgcctccccgatctcgtcgagaggaagcccaatcccgaaaccgccgccctattccaatggcgcccaaggccgagaagaagcccgcgcaagaacctgcggagagagcggcgcgagaagcacggcgggagaaccaggcgagagcgctccgggcagcgcagcagaggtgcgaagaggagagagaagagcgtgacgtcaattcactcagtctacagt

SEQ ID NO: 382296 - DNA, 306 bp, Zea mays
gctgaagatgattctgatccatggggtaagaaaacagacggtgattctgatccgtggggtaaggaagcggtatctgctgctgacggtgattgcaatccatgaagtaaggaaacagtaccttctgctgctggtgattctgatccatggggtaagaaagtgttttctgctgatggtgattctgatccatggggtaagaaagcaatatcatcagctgttgaagtttggaacactagtgccacacaaaaggaaggttctagtggcaatgcatgggacaaacaagctggagttggtggatctgatgctgct

SEQ ID NO: 382297 - DNA, 300 bp, Zea mays
gttaggataaactgcattatggattctggcaacacttcgtgctctagaacacgaatgggcttgtaaggaaaaaagacacatttgctctcagtagatcttcatgttcaagaactcgaagtggacttctaagagtaaagagctctgtggattccagtgatgtttcgagttccagaactcgaagtggccttctaaggataaagagctttctggattcccatgatggttcattttcgaggtcacaaagtgaccatgtaggaggtagccctcctattgttgaggctataaatgatgaatcagttt

SEQ ID NO: 382298 - DNA, 296 bp, Zea mays
cgcgtcgttcgcccccttccttcctcccaaagtcttctcgtcttatcggcttgccggacccgctgccaccaccatctccgcacccacatctgtgccccaggtgtggttcggtttgagaaacggtaccagcctgccgacggccaacgggcagaagtctccgcgtccctgagcgccacagcaaccgtcgccttcaccacttggttctttccgtaataaaatcccacctctcccatttctgtctcgacactttccctcgctcgactcgatacgcagcaagctaagcgcaaccgaccagc

SEQ ID NO: 382299 - DNA, 324 bp, Zea mays
acttctcatgcctagcgaccgctaccagccggctgaaaccgcgctctacgtgggctcgctcgacgggcagctgatcgcccgagtgtcgtacgccgtagcgagagtcgcgaactcgcgagggcggaaccctagcagcgatagatctagagcgggcgctttcgatctgtccgggaaatggcggaggatcctgccgcggaacaggagacgcggcagctagaggaccggctcagggatgtcggggaacggctgcaggcgccttccgacgacgcggaggacctgctcaacctcctcatcgaagttgaggaatgtttaattaaagtagag

SEQ ID NO: 382300 - DNA, 266 bp, Zea mays
caactatacaccacttattggtatctgatagttgtgaagatacaaggtattactaggtattcacttaaaccttcagatgttaggtcatatgtcattaatcgtcattctcaagcctacatgtgggcagttgatgatgcatggaaacttgagttcactgataagtgggactggctgttattcaaagagctgcatgttgtgggccgtgagcgtaattcccaggggaatacaatcccaattcctggggtacatgaagtttctgatggcat

SEQ ID NO: 382301 - DNA, 289 bp, Zea mays
acagccgtttccgaggatgacaacagaacagctgctgaggtggacacgaactgcgaagtgtcaatcgggagcgatatatgcgaacgggaacaagatgagcatgtcgttccatttcaagatttggcagcatttgaggagctggttgctccattggcaactggagatgatctaccattgccatcggaggtcctagagccacctgaccaagaagcaggtgaagttgaacaggaggacgtgaccacaagcacgggattagacctccaaccaaatgaacagaacgagatcgaag

SEQ ID NO: 382302 - DNA, 311 bp, Zea mays
agcatgtgaaaaagcaaaaccaatgaacatccaggcatatcttgactcccatcgaagaaaaattcaagttctaactgtggcagccggcatggttggatctgtcacacccctgaaagcgaaaggttcaagcaatgtggaatttgtggaagcaatgaacaggaaccggctagaaaatgttgtggaagcagtcaaagatgtgtctcgaaatgccagtaaagcaaaagacataatcgatcaatgcgataattccgtgagttggatattactttttcctcagatctccttcaccaccctcttaactcaataactca

SEQ ID NO: 382303 - DNA, 186 bp, Zea mays
ccataggcagcttataagctgtaccaaacaggccctaagcccatctaggtctaagtttaaaaaaaatcaactttgataaccaacaactaaaattttatgtatgttgacaacacaagtagattcattatgtaaaattatttttacaacttatagcttttttcatttgatatagatattacatgtcat

SEQ ID NO: 382304 - DNA, 300 bp, Zea mays
ctgcgcgcgatcttctcaagcttcttcctcctcgcgtcttcctagcagccggcgctcgactgctcgtgtcctgtactcgcgcccctccgctctgcttggagttttccctgccgcgcgctttccccaagctgcgaatccaccgtggagctgctccagacgtgcccttggtccgtgccatggccgtcgtcaagcccctagaacttcctcacctgcgcgctcctctgcgtcgtgctctgctcgcgtactccctccggccctctgtttccatggtcggcgcttctaccagcggaccgtgcctcc

SEQ ID NO: 382305 - DNA, 294 bp, Zea mays
ctcgttcgtgttcgtcgggttcagcacccacatggggcaaaaccacccgcagttcctggccgggaagggctccgtgctgcaggccattgggaagaaggtgctggcgctggcgctggggcagcgggacccgaccgccgtggacaagctgctgtccgcgcacgcgagtcgacgatactgccgtgcgtatcgtgtgcaagagaagcagcggatgagagagaaagaggaggaggagcgtgcacggagacgcgatgaggaagaaagatagagggacgaggaagaagaacggcggatgga

SEQ ID NO: 382306 - DNA, 285 bp, Zea mays
gcttaggactgcagactccttcgcgctcctcctgctcccagcgatgaaaagagagcacgaactaaactaggaaccccccggcattcattcccttgccctttttttcaccgaattgtagcggttgttgctttcctgttcaggtgccttgttcttggcctccttcgcacgcaaagaaccgccggtcgtattgctctccgcactcagccatcgcgctgctgctgctcgactgctcgtggaatggttcttattggccgcctgtgcctgctttgcggtctctagctctgc

SEQ ID NO: 382307 - DNA, 157 bp, Zea mays
cgcatactcctcagacgcctctctctcgtctctcccatcactcccgataggctctgagagcactcgtcagactgaaggagcgtgggctcgtcctcgtcgcacacgaggtcgcgcatgccgggcctcagccgcgtgcggaagaactcctcgtagtcgg

SEQ ID NO: 382308 - DNA, 285 bp, Zea mays
gtgccggatgcatctgcggccggtggcaggaaggtcgagctggatggggacatgcgatggacatcacaggttggcccctccagtgatccatctccaacactagccaggtgttctcctttgccaccctcctttggcagttctcttcctaacgtcggccgtagttccccttcctgctgtttttgtctccatagctctaaaattttaagttcctgtttgcataaaggcataggaaaacgtgtatcaagaaactgatgctactgtacatgtcgagagtactcagattca

SEQ ID NO: 382309 - DNA, 306 bp, Zea mays
gccgccgcagcccgcacgggagccgcgcgccgcaccaaaaccctaggtctcctccgtcccccgatccatcgccttcatggccgcgccgcaacctgtcgcccaggcccccgaggcaccgccgtctgcgcaagtggtgggcaacgcgttcgtgcagcagtactacctcgtgctgcaccagtcaccggatctggtgtaccgcttctatcaggaggctagtcgcctcggccgccccgcatccgccgccggagccgccggcatggactccgtcaccactatggaggcaatcggcgagaagataatggagat

SEQ ID NO: 382310 - DNA, 301 bp, Zea mays
actttttcacattttctctcaaaaagaagaaacagcgaaatttgtaattctcagtgacgccaaccctgactccgtttgacgcggctccgatggtcaccgccggcgacctcgccgctgccgccaactcctgagacctcgtcgcgcctaggccctaggggcgtgagcttgcctccgccgcgatccgggtaccagtcctcgaggatgcagtaccagcacgctggcagtcgaagccgcatgccgccattcgcgcgctgcggcggcgcctacagccgcggacggaagcagttctacccgccgtctc

SEQ ID NO: 382311 - DNA, 302 bp, Zea mays
accacctctgcgcccctcttcagtaccaccaccgcttcttctccagcgtctgctgcgaccaccacgccatcctttgggttctcttcttcgccagcaacaaccgcttccgccccatcgtttggctttacaccatcatcaggaagcgcgacgaccgcgaacacggctccttctttgttttcatcatccgccaccacactaaccacaccggcgtcctcgtcctccactggcttctccttggccacttcgcaggctgcacctgctccctcattgttctctaccagtgcaataggtagctcgtctgt

SEQ ID NO: 382312 - DNA, 299 bp, Zea mays
gcgcgctctctaccgcttgtccgtttcttcctcttccgaggtagcaacgtggtgagtgaggcagccgctgctgtgctgcactgctgctgcggaggcccaagccgaccggcggagagcacccgtccttgggcggcggagggtggaaggtggatgctctaagcccccgcctctctctgccgccttatacccccgcgctttatccttcttctagcttcttcattcacctgttccagaataaggccgggcttgcggatgccggggtgcggagtagcggggagaggtggtgtgggggtatcgtc

SEQ ID NO: 382313 - DNA, 135 bp, Zea mays
tcgcgctctgcgtgtgttttcaggtgggcaagttcacggcgaccagcgagcaccaagctgcggaggctcacatgcgcgcggccaacgcgcacgtgcacgcgaccgacgaggcgcacgccaacaacaagcggctcc

SEQ ID NO: 382314 - DNA, 139 bp, Zea mays
agctcacggacacggagtcacggaccgtggctctccgccggccaccaccagcagccgccccaagtagcaaattagcaacccgccgagcaatagcaaccgccggcgtgccggcgccgaccctggcgtccaggagtccagg

SEQ ID NO: 382315 - DNA, 233 bp, Zea mays
agccgcggtcctcccgactagccgcgactgcctcccctccagcggccaggtaggggctccacctcatcgtcgccctcccatttatccacctcctactcctccccgatctggagattcggcgatgcgcttggatttcgggccattggtgctacctgtttcgatctggaagcgtgcgagatgcggtgtgtagctaccacacagatccgtgagctctcgagcgtttgattgcgtcc

SEQ ID NO: 382316 - DNA, 286 bp, Zea mays
aaaaaacccctccggccattgccgcaccgagctccccttcctcaaatgccccaggcccggacgcctcgacgcccagctccgtgctcgaatggctagcggcgtcctccatcgctccgcctccctatgtctccgcccggccgccggctcctccgccgactccggccggggccacggcgcggttatgatcggtgattcgaggacgcgcgttgctgctctgcggctgggaggatctagccgtcttatcagctagttagtggttttctgctggtatcctgagatagttggt

SEQ ID NO: 382317 - DNA, 236 bp, Zea mays
aagaaacattgctatgtctcgtccgcttgattttgctgtgcttaattacgaaaatcaaacgcttgcggaacaactggaagtccacaaatttgagttccgtgctcttgagagtacatttaatgatttaaaagagaaacacaggacacataatgagacacttatcctagtagacaattattcggagcgactcgtagcagagctgggtatagtccctgtttgcaaaagtgaatcttcac

SEQ ID NO: 382318 - DNA, 277 bp, Zea mays
cgtgcctagatctccgtcgatgaaaggcgcaatttcagggatgctccgtggctgccccagccatcctcgacctcgctggcttcgcgtcaaccccgccatcctcgcctcgctcttcgtcgatggaagccaacgaccgcctcctccatcctcgccctgctcaccgccatccccttccatcagcacccctccatcaccgctccacatccacaactgtcgtgtccttccatcggcgtccacaccccatgcacagctgctgtgatctcacccgccatcctcg

SEQ ID NO: 382319 - DNA, 291 bp, Zea mays
agcagttgcatagattggcctcaatgccttattctgcactagtcttactgaaatcttccccagttgttacttaccttgaggagaaaggcttcctgcacgagtaggctgaatccaagcaacatctggggaagatttcagtaagactagcgcagaataagtcaaaggcgctggcagttacggtatagcagttgcatagattggcctcaatgccttagtattttctttccgtacttcctctgccacaggctctatgcaatttcattcagatgagcctggatggttcctaatttc

SEQ ID NO: 382320 - DNA, 284 bp, Zea mays
gtaactacagcacttaggctttatacggctacactcgtatccgtctcaatccatgcgtattggagtggagacacgattgatagcggagagacctcagggatctgctcaagacggacgagaacccggtcgttctgcggcgccacctgcccccccaaaaaaaaccaagaaccacactgttagacttagatcacaaattccacccagcaaaccttgaagactcgaaaccagagcgcatggattcacacagcagcgaacccacccaccttggcagggtcgtacttaag

SEQ ID NO: 382321 - DNA, 283 bp, Zea mays
aatggaagtgcaatgtctgctgctagcaaaagtagtaacctatctcttgatgctttagccaaagcaaaaaaagctttgcaactgaagaaggaactgtcagaaaaactcaagaaattacctatgcttaataataaactcgctacagctgttactgctacacaagtttctaaagaagcagcaaaaacttctgtatcagctgtagatgcacaacacttttctaaaggagaagcaaaacttactgatgtttctagtctgccaactagtagcatctccggaacgccag

SEQ ID NO: 382322 - DNA, 293 bp, Zea mays
cgcggacggaccgagccacggccagtgccaggagcgaaaataaaaaggggtaggagttcctcctccccaacctcacaagtaaatcagcagcagcagaccttcttgacctagcaagcaatggggccgccgttcctcgccgtcgccgtcatcgtcgccttcctggccgccgccgcgcaggccgccgaccccttcgccttcttcgactgggacgtctcctacatcaccgcctcccctctcggcgtcccgcagcaggtcattgcagtcaacaagcagttcccaggccctatcatgaa

SEQ ID NO: 382323 - DNA, 246 bp, Zea mays
aagcgattcggcgccacaaacctgagacccgccacacttctccagagtgccagcgccggccctagcacctccaccgcaactccgacgcttggaccaccggatctgctgctggccgtcgactgccatcagaagggacttgttgcaagctgagggcaccaggaaacccctgtttgctactgctcaaagtagcacaagcagtcagattgcgattttctagactggttcaaacaattcataaatccatta

SEQ ID NO: 382324 - DNA, 193 bp, Zea mays
acgaattcctcgtcaccaacacgcacgcggcctctgcatccgcgtcagcatcctgaggcacccgatcccggcggcggcggcgaggaagccggcgctcgcgcggcactcctcttttgtgaggacaactgcgtagagtacaaagactgcgacttcgagatcgtctgaaggaattgacgctggatttatcgctatt

SEQ ID NO: 382325 - DNA, 179 bp, Zea mays
agcggtccgtggcctgtgttagcaataacgtggaggagaagataagaggagacgaagaaaggagaggaacacgggaagcgcgtgcaggtggtctgcgacatccaatccaacactgctctggtgtgtaaaagacacatgatgacttgtttagttcgaacaataatacctcgatgttaata

SEQ ID NO: 382326 - DNA, 286 bp, Zea mays
atttccttagaaaaaaaagaaaatcgccgctgtcttccttgttgaacgccgtcgggtcggcatctagctccctgcgtcctcgcctcctgctccgctccatggccggctccctgagctcgcccctgctcagattccagcgccccgctccctgtttaccccagctcgcctggccgctgcgcacccctgctcttctccccagccacgcgttcccccagctccagctcgctgcgcgtcctgctccactgtgtcgatccagtgcgtcgtcgtcgatggatatcccctgtgt

SEQ ID NO: 382327 - DNA, 292 bp, Zea mays
cggatggaaggtcctcttgccgttgccgccgatggaaggtgtcgcggatcccggccctcctcccacaccgcctctaactccccctgtactccacctcgccgtgtccgcgatggaacccacccgcgccgtgatccgtgatggaacccacccgtggatctcgcccacgatgcacgcctccaccgcgtcgccgatgtaaggtgccgcggataccggcacatccgctcgtccggatatcgccgtgtccgcgcatggatcccgcacgctcgcccggtctccgcatgctctcgtggtt

SEQ ID NO: 382328 - DNA, 169 bp, Zea mays
ggagagatcgcacgcgccctctgcggcttgttcgttcctcgcgcttgccaccaggcaccgccacacacgtcccgatctcgcgacggcaagcagcagggtctgcggcggcagcggcagcggcggcagcgcttccggctcccctttcccattggcctccgcgatggcgctc

SEQ ID NO: 382329 - DNA, 294 bp, Zea mays
acaaaaggtaagacgaaaccaaatcgaggaaacaatgggcagatctggtaccaatttgaggtattgaagtatttgaacaattcacaatgcaaacgaagcctcaatgtgtgctactgacttctaattgaagtgaaagcaaacgattcataaacgatggcatggggccaagatattcctgagtcaatagtgaacacccatacttagcctattggtggaactgaaggtctaaaactctaaattcgaaccagcatatgttgaaatccaatcttcggtttagaaaagcgatcaggtttt

SEQ ID NO: 382330 - DNA, 295 bp, Zea mays
atggattggagatcatccgtgctgaacataagaaatttgagggttattatgtggatgacgaggaggagattgcatccttgtcaatgcggacattagaacagcatcattgatggctgaggagtgggtgcctgagactcaggagaatgaggcagtttttgatgcactgagggaagcacaccggttgcttgtgtcaaagcatttggtcacagtacaggagtggataactgtgcttgtgagggtcaaccttccagacaaccgtttccgagattctgcattgaaggatttcattgatgtt

SEQ ID NO: 382331 - DNA, 287 bp, Zea mays
ctggagttctgcgtgcccatggaaaactcagttcgccgcgtgagatgcccgaggtgccacagcgttctcgaggagcccagcgcgccggtgtaccagtgcggcggatgcggcactagccttcgagcaaagaaccgcaccggcaccggcaccggcagcacgggagacgcggccggggcgtcgccggcgcggagctggcttcctcctcagagcaggcacctggacgccagctacgtcgcgagcaccagcaggtccagcaccccgacccctcctcgtgtcgggagcaccag

SEQ ID NO: 382332 - DNA, 292 bp, Zea mays
aacaagggtggcgaacaaaacccgcaccttggtgagttgttgaggttagaggaagttgccaagcaacagggtgttggtcgttggagcaaggaacctggtgctgctgaagagtcaataagatatcttccaccatctgcaattggtgaagcaagtggttttgatgcgaagggttttgcggttgaaaataaaggcaagagtttggaggccattgttgaacaagccccatcaatggggagacgcccatcggcacctactgtaattgctgaaactgatgatactgctaatgacacga

SEQ ID NO: 382333 - DNA, 301 bp, Zea mays
agaccctgccacacgcgagacggcgcaacgctggcggcgcgggaggcgaagaagcggctgacggcgaccctccccaccgccttctcaccgtacactctaaacttctgtttggcagcaccgacttcattaacgcctgcaaatccacttagaagttcgttgcttgataaagtacattctaaactcctgattagcaacatcggcttcattaacatctacaaatatactcagaagtttactgcttcgtaaagtcaaccctaaactttgggttggaaacatgggcttaattatcgtctacgtatct

SEQ ID NO: 382334 - DNA, 187 bp, Zea mays
atcagggtctcaggtacagtgtcacggcaggtgatgaggtagaagatatgtttgctctggtgaacgaaggtaaaccgtcgaatcccatccatcagtgcggtgtcgtcaggtgcaatcgcatccgattaccagaggctccgggttgagagtgtttgctcgaggctgggcctggtctcgctggcgtatc

SEQ ID NO: 382335 - DNA, 306 bp, Zea mays
attttggttggttaactttaagagttacttgcaacacttatgccctgttttgatgcaaagtattttaaggaatggaggaattacaataccaccaacaacaacaaaaaaccatttgtcccaagcaagttgggggtaggctggagttaaaaacccaatagaacccacaaatcatggttcgggcacatggatagctgctttccatgcactcctattcaaggcgaaatctttgggtatattacatcctttcaagtctttttttactgcctcttcctatgtcaactttggtcttcctcttacttctcatta

SEQ ID NO: 382336 - DNA, 250 bp, Zea mays
ggccgacgacctaatccccttccctcccattggcagcgagagcgcgggcaagtgccgggagaggtgcgagcgccaccaccgcggggactggtgggagaggcagcgctgcctgatggactgcaagagccgggagcgggaggaggagggcggcagcggcggccggcgcggcgaggaggaggaggacagcggcgaccgctgcccttgcgagaagcagtgcgaggggccacacgaccgggaaagcaggcaccag

SEQ ID NO: 382337 - DNA, 300 bp, Zea mays
ctgaaagaacatggcaaagtgcaaaaggagtttctaagacgcctaatgaacaataaggatgttatggaactccgaaatcaggttgaggcatttgcgtcacagtttgctatgccaggttttgatgtatgaatgtgcatatatactgtagtcagcaattatccagattcacagcaacattgtcatccgctcagttcctcgaatactagcaagtcttgctctcgactgcacaacgattaggagagtttttattaggttgtagagggtcttgactcttgattttgattcaaacaggaaagttgt

SEQ ID NO: 382338 - DNA, 278 bp, Zea mays
gcggcggtaggtggagggtcgcgcggcggaagggggaccaggacgaggcggggaggaaggagtgggaggtggttcgggtgatacagagcggcctcaaggagttcgagcgccggagcctgtccagcggcatatttgctggattccgtggccgtggcgagtttgtggagaaatttaggttcggcatgaaatcactgaacaagggctatcaggaatccaaggtaattccataggaaacaatggataacagctggaaatattgtttgtgttgcagatataga

SEQ ID NO: 382339 - DNA, 157 bp, Zea mays
cgaggttatggtaggttagaggaatcagaagatttgtcaacccaagctgatgggggaaattcggaggtggttctagttagtgtggacggacatgtgctcactgcacctatttcttcaacagaggagggtatggaggatgtgcagttatgcgaccctc

SEQ ID NO: 382340 - DNA, 118 bp, Zea mays
  unsure (1)..(118): unsure at all n locations
agcttctgtcccggttttaacccccggcccctgccgagctcagcaggggaagcgcggcgctctactccactccngttcacgccagatccaacctcaccagctcgcccccatggccgtc

SEQ ID NO: 382341 - DNA, 303 bp, Zea mays
ggacgacaagccggtggcggcggcagaggacgaggcgaaaaggaagaaggaggcggccggcgccgaggacagcgcccgggcattggtggccggcctcgacgacgtgatcgtcaaccccgtgggtctgggtcggcggtcgcggcaggtgttcgacgaggtgtggcgcaagttctcgcggctgggccagattacgagcgcctcgtccaccgcgctggcggaggatgagcaggccgtgcttatccgtggaggacctatgtgcgagttcactgtgccaggggcgcaggacaccaccgtcctcgtcgt

SEQ ID NO: 382342 - DNA, 256 bp, Zea mays
gccttatcttctcccgttcaccccgccgtgcgcgcgcgcccccgcggcgacaaccgggcgaccgccgccgacctacgccaggtgccaagccgttcctcagtcccatcacgaggccttcaacgagcccttcgccggcgacgagaaaatttgattctagttaactattcaagaagtaggagatgatgagctacttccaaaccactacttgcaagcctcaaagcagggtcgttgtgaacaaacctataccaggtcttgg

SEQ ID NO: 382343 - DNA, 153 bp, Zea mays
cctgtctgcagtatcgcatgcatccagagattagcaggtttccatctttacgattctacggaaataaactgcctgatggtgtggaggtcgctgataaatcagcttcatttcattttcatgagtgtcttggtccatacatgttttttgatattg

SEQ ID NO: 382344 - DNA, 272 bp, Zea mays
cgctcgtctgtatgaaacgaaggaggaggtacgcacgccgctactgcaagctagcaagaagaggccgctagcagggggttttgcttgatttctggcggacgacatgagcacggccacgggcgtgcggccggagcggcggttcacggtggggcggacgaggacgccacgcacccggacaccatccgcgccgccatctctgagttcatcgccaccggcatcttagtcttcgccgccgagggatccgtcctctcgctcgggaagatgtaccacga

SEQ ID NO: 382345 - DNA, 211 bp, Zea mays
taaaagatgaccatgttgcttctggcctttgttgtattcaattatttatgaattcaatgtctcaagaggaggctttgaggcatttgggacatgccaagacacatttcgaagaagccttatctgtacgagatagaacaatcgaggctactaagttggtattgcggtctgctcggaataagggtgcacctggaaaaatgaccagggaaacgat

SEQ ID NO: 382346 - DNA, 315 bp, Zea mays
aattgagacttttgtacagaaggaggttctgcaacagacctgtgtttctttacaaaaggcaatgggagaagagattcatcttctggagtcacaattagaccagtcaaagatacattttgctcatttattgaatcagactcaggaaaaggaacagcttattgggaagcttaaaaatgaagagttaaatgttttgttaagactgatgtcagaagttctaaagacaaacagtactgtacgtgagcttcgaattggattcaatacattgcagtcaagcctttatatgagcctgaagtgatcgctgtcaaattcagattg

SEQ ID NO: 382347 - DNA, 314 bp, Zea mays
gcatcgttgcgcgcacaccatgatgctgggcatgagcaggacgaggttggccggagcggcgctgcgggtggcgctgacggcgctgctgccgctggtcctgccggcgtactacgtgtacaagctgaccacgtacctcctcggcgccgtcttccccgaggacgtcgccggcaaggtggtactcatcaccggcgcctcctccggcatcggcgagcacctggcctatgagtacgcgaagcgggagcctacctggcgctggtggcgaggagggaggcgagcatccgcgaggtcggcgacgtcgcgctggggttgggctc

SEQ ID NO: 382348 - DNA, 305 bp, Zea mays
cggctcgaggagaaacctggccgtcttcatcttccccagccgtgcggtctcccattcctaccagccgagctctccctctccctcgtctttttcctctgctggcgcccgtctctctggtcggaccctccctgtttctccctcctggtgctctgctggtgcggccgtgcccctctgctcgccggcgcgcacccctgcttccatggcagtcgcgcccgctgcttgctctccctgctacctcgcggcgtcctgctggccggcgcttggactgcgcccaagcttcctttgctcgtcggcttctcctctga

SEQ ID NO: 382349 - DNA, 230 bp, Zea mays
aagacgcctacctcgccaaggcggacgccatacacattttaacctgggcggcgctgacgcctagctccactcgccgcctggacgcctaggcgtcgccttttaaacagtggctccagccttcgagaagcattccccttcggacctttcatagtcatctgcttgcttactaatctttgtttgctcatcttcattactgataatcttccacataacatcgttaaacatggatc

SEQ ID NO: 382350 - DNA, 305 bp, Zea mays
ccggaacagagaagacaagtcgtcaggtcaacatgtccccggccagccagccagccagtcaacacccaacgcatgctttaccacgcacacgtttgaccacggactctcggctggccgtctccagtcccccactccgcagctccgttcacacctcgccgcgggaacgggagtcctggactcctggtggtgttttttattctgctaagtggcccggcccggtcgtctttgctgcctcttgcgaacgagtgcgccgtaacttccaagaaccgaggggtgcgtggggggccggagccggacgtagcaag

SEQ ID NO: 382351 - DNA, 130 bp, Zea mays
acatccattcaaacacccctacccttcgcatcgaacctagcatcccaaggcctcactgctcgcagtggccccagaagtcagcacgcatccatcccggcatccctccccttcgcacgtcgcctcatcctcg

SEQ ID NO: 382352 - DNA, 329 bp, Zea mays
cgtacgaattccgctcgacattgatactaagaatatcagatgttggatctttgttgtccttattaggtcctctctttttaatactttttcctggaaacaacttggtcacaacagtcaatttctcacccacaattgctttaatctcttccggcaattcagatttgttgctttgtctcagtaatttctctacggttttcccaataagtgatgtcgctctctcatcaaagagcacgaattctagctcataggtgccatcagtggcatatagagatattttatacctatttagagtataggttatagacattgataacataccagaagttttg

SEQ ID NO: 382353 - DNA, 266 bp, Zea mays
gcgagtcttggtgtccacgctcggtgtgctgctggctgctagcagtagagcagtagaggagagagcgtctacctagcgccgtgggacggatcggagctacctcaccgccgaccgcgcgcaaagaggtgggtggctcgtgctggtacgctgggtggtggagccgcggtcgtcgtcgctgatcgtcgtctgctgctgctgctcttcggaggcgcgcagccacagcgccaactcgaggcagccggcgctggcacccggcgtgtccttgg

SEQ ID NO: 382354 - DNA, 274 bp, Zea mays
atattcgacaacgtctcagctgagaaggctcaggagctcatgctcttagccagcagagggtctcttccaagctcagcacccgtggcccgtaagccagaagctcctattctcgctccagcaaaagtcacagcgcctgaggttttgcatgcaacacagatgctgtttcaaaaaccacaacacgtttctccaccttcgtctgccatctccaaaccaatccctggcatcttgcaaactgcaagtctccccaggagcgcctcgagctctaaccttgact

SEQ ID NO: 382355 - DNA, 301 bp, Zea mays
gcggcgcactgtgcaggcgaaggcggcgcgctaccggcgacggccgacgggggatacggcgacatcgtccccctcgacccctcctccatccccgacgcggcggcgccagactgcaggtgttgaatgctgatttgttgtggcctgttgcgtcttcaccagttcatacattaaacttgaagaaccacgtggttgaagaaaagcccactgaaaatgagtaatacatcatcttcgtcaagtggtgagcgtgctatgcagtgacagagggctgtggagatcataagttcataacatcctatgttag

SEQ ID NO: 382356 - DNA, 299 bp, Zea mays
actagttctagatcgcgagctgccgccctttttttttttttttttgggccagaaacttctcatccgtgtgccagtaaggaacctaataaaaaatctgaaagttctagtagcatgataaaatgatagtatccgttggccgtctcattttgcacgcgaactctttgtgcagccgtcggcactttgcaaatttacagtgctttacccaatctcagtcattgtagggttacctgcagggcacatgatctccgtgtttgcttacatgattggtcttcccactgttgtttctctatccttttgtc

SEQ ID NO: 382357 - DNA, 299 bp, Zea mays
atttgttgatttacagaagcatagctatgttcagaaaaagcctggaggagcaactgaacaacaggagttgacatattctagccttcaggtagatgatttagttttcagtgacttctaaaatctaaagtctggtaaaattattttgactcaaacataccttgttcatgttttgctccctgaatatagtgttctttttggctgcaacatttgctgtgaaatatatgtgatgcaatgcaactgatagatgttaatgctatagaatgaagcaatttgaattacattttttatatttgaatctg

SEQ ID NO: 382358 - DNA, 302 bp, Zea mays
gtccaagagtcctgtatattgtcaaaaactcaaaaatacaatgaggcatagcaacttcgtctgtttccccccttgaaaacagcgaaggataaaagcccgcagtccagtaaaccagcatgaaaagggttcgatcctataaagctaccatgaagttgcaggaatgaacatttctgtgatctaaaagcctctggaatgaaacaaaaaccctccattatcaaaatgacgaaatgcctgatgcttggcgcacttctcgtaggaaacccagaacacaaactgccacgggccaagccttgcccatgttg

SEQ ID NO: 382359 - DNA, 313 bp, Zea mays
agcactcgctctcgctcaccacccctgtctgcagtctgcttatccctggagcagaccggagtaaggccagccaaccaaattgtctatctactgaagggaaggaggaaaaaaaaagaggtaacttgaaactgtcagtctcggcattgcataatcgcattcccaggtcccttcctttcgattccgtaagctgttgtataggacgagttaggaacatctctattctctgtcggaaaaaaaatctttttttttaccatgaactgttccgtcgatctaccaggaaactggagccttctgctgttctacttatacagaa

SEQ ID NO: 382360 - DNA, 312 bp, Zea mays
  unsure (1)..(312): unsure at all n locations
aaaacgaggagttactgaagcatatgatctttatccagttttaaattagcaaactgcaaccaaggctcgttgcagctagaacaaaagcactggcaatccaagctattgggccaaactgtgccttcgaaaagaaaaaaaaaaggagaaagctgtcggcatgataaaatatagagaaatattaggatgttgcagaagtttttgggtgaggatcctcctttttcctcctgtacagtggttggaagcggtttgagtctctccatcttttgtgaattagcctgaatccagctanacagacttgttgcattttgatct

SEQ ID NO: 382361 - DNA, 187 bp, Zea mays
aatgtcccaattgaatcatatctgaccagtgaatatttgtaatttactgtattgaaaaattgaagagcaagcctggtgcactggtgagagctgtctcactgagtcatcaggtcacgggtttgaaacagcctctcagcatttgcggccggaggttgccttggtttatcccttctctagaccccactca

SEQ ID NO: 382362 - DNA, 163 bp, Zea mays
tcgggaataacctagtcgtttaatatagctagatgatgatccatgtatcattatggtaatggacatgctgtacgatagctactgtagctctaaatgcaggcaaggcaagaattgatctatcaaagaacgaatgaatgcaggcactcactgtagaggtgatcta

SEQ ID NO: 382363 - DNA, 162 bp, Zea mays
ggcaaatcctaagaagctcccaaccccacctcccaagaggcgcctgggaattaacatgcttgatgggaggaacaagctagtagagtacaggctgccaccaaagattgaaaagaaggtggtcaatgagcagaggtatgtcccagacacaagatatgtgctcca

SEQ ID NO: 382364 - DNA, 281 bp, Zea mays
cattcttcccttcatcaaccacgcggcgccggaacgagcctcctctagtctagcgccgcctagggtttctcctccgccgtgtcgtcaccgtccacgcgccattgcaccatctcgatcgcgcgtcctccctgccatcttgcagctttcactgattcaggaccaggtacccgtcactattatgctcccgccgagcgatgcgtagaagtcgccgctcgcaggtctcgctcttccctacttttcccgccggcccgctgttccaggcaatggccaaacttccggta

SEQ ID NO: 382365 - DNA, 303 bp, Zea mays
tgcgagaaggtgggttggggaatctgaagcgatcagagaaggcaagcttgcttgcatgcatctccaccgaatcccccatctcgcgccctccgtctctcgccgcggagactcggccccccgccgatggaccagctcgtcaatttcatcatccgcccgcacagagctgactacagtccaaatgatgatctactagagcaggagtttatgctgaagggaagatggttcctgaggaaggatttggaggacaaacagacggggcacgcgactcttcgctgcaatagtggtggcgactctacacctacc

SEQ ID NO: 382366 - DNA, 316 bp, Zea mays
  unsure (1)..(316): unsure at all n locations
agcaaatggagcgcaactccaaaaacaggctttattgacattactacatcaaaggattacaaacacntaattagcggtcttcagtatagttacttagaagatagcattaacaatccttcgaagaaacaagaaatgctgggtgattctgtagcctgggctggctgtacgataatgtacttactgggacagcagcagcacttcgagctttttgatttctcctatcaatttctcaatgtggcagaagtagaaagtgcgacagtatcacactatcaatcttcagagaggactaaaagttcaaatttcttgcaaggctacg

SEQ ID NO: 382367 - DNA, 315 bp, Zea mays
cccgctcccagctcgtgttccgcttcttgcagccgtcgccgcgaacgctccagagaacttccgtcaacatggggtatctcactgtcttctgttgaagttttttgatctatcctcgtgtccatctattttctggcttagcgattatgagtgtggttcggtgtgactgcataagtgcatctggttgcttgacgcgcactttgcttgcgctaatgtgaagtatacatcgtgatctattttgatttcttctcagtatccacgtgaagcttattgacggtccagtgctgatcagatactacaacgtcagcgctaaacaca

SEQ ID NO: 382368 - DNA, 300 bp, Zea mays
ctctgcacctccctctctctctctctctctctctactgcctttgtttttgctcgcaagaaaaacccgaaaagaccttgcgcaaatccgtcgtcctgtccaccgacgaagcttctgagtcctcgccgcgcgccgctacgcgtgatatcggcctgctggcgtcggtctttttccctgactggtgatgtggaggtcgttctcttcaattcaaatggttcccccccgcagagcaagatgaggaaatgttcaaaatactcttaagccgtgtagcacgacaagtttgttgccagagacaagcgacg

SEQ ID NO: 382369 - DNA, 314 bp, Zea mays
cagcctctggttttacagatagagtgtttaactgagagttcataggtcaatgaacataagacatgcatctactccatatatttgattactgcccacgagattagcaggctggcttgcgcatccaacctaccgcttgatttaatcaaagtagcaagacagctcttgcagcagtcttgctgctcctcaaaaaaggctcggaccaatacaagctgcagcaacagccatggcttcagcgaacagagcaagaagatgcgcatacttctgatcccattcttcgccaccagccacatcggggcctacatcgacttcgccgt

SEQ ID NO: 382370 - DNA, 311 bp, Zea mays
agcgcagaagcatcaccctgtcttcttcctcgacgccccctgctcctctctctaccgagcccccattctccacgacgtttggcagcagggagcccttctcccccagcaggagcagagcctccatggcgtccgacccctctcctttctcctccccgctcggagctctgccatagcgcacgcaaatcccttccccctccattcctaggcgcaggaacttctcccccacgccgtccaactccaggccggatccaattcgccctatccctgctcgcccagaatttcttagcacaagtccggcaatcgcctcgccg

SEQ ID NO: 382371 - DNA, 283 bp, Zea mays
gcgccccacctgcctgcctgcctgcctccgctcctcgcagtgcctagacatctgctgcttctgctcctggcactagttcctgccttcttttgctccgctcggttggttattgctgctctgctgctgcgtcctcctgcagtctccacctcaacttctccgccttcctccttttcctcctccccctcctcgcgcagtctcgtgcttcgctgttcgttcggggaggtcgtgcgtggcgcacgggtcggagtcgattcggtgacgctttcgcaggaagttggtctgt

SEQ ID NO: 382372 - DNA, 297 bp, Zea mays
  unsure (1)..(297): unsure at all n locations
cagttcacaggcaaaagcagtcgccttctccatctctcctccctttcgtctcgctccctcgcgcatgctccaaaaagcagctactcctcccccatcctgctttcccctcctcgtctagggtttcccacccccatgcctctcccgaaaccctagccgccgcctcctgttcactgctctcctcgccgctgcagccgtttccggccatggccgctggagccagcgactacgctttcgcggcggagtacgttggcccgccactcncctacacgctcccgcgcgccatcccgctcgacctct

SEQ ID NO: 382373 - DNA, 310 bp, Zea mays
acgatctaaagcttcaagtagaacattgcacaagacacaagagcagtgcactgtactctggtctagctagtagagctagagcatgcatgcatgcactggcctctgctgccgcgcgctgccgtgcttctttgcgcgtgtcgcattgatgccgtcgtcctgccgtacggagtgcgcgcccatatctcagatgatgtaccacgcgtgccaagatctgtgtctgcgtgggccatttcggccttgatggcaaaccaattgcctttgccttcgccactgttacacgatctgcacgtcctatgtatatggacctttc

SEQ ID NO: 382374 - DNA, 178 bp, Zea mays
caagaatcaggagaagacaaagttagcagcgtgatattcaccaagtgctcgacaaaagtttgaacaagtcgtcgatcgtcaccctcgtctacgccaagctctgagaagattaaacgcagaggaaaataaatcagtacacggccaaagaattctcgatgtggacacagaagaagcgcga

SEQ ID NO: 382375 - DNA, 295 bp, Zea mays
tttaactcttgtagccgccgcctcgtgctcctattcaacaaggcgatctagtacctgatccaccgccgccagttcttgctgctcccgatccaccacctccagtttttgctgctcccgatccaccgtcgtctcctcatttcaccctgcgccgtgttccccttgtcgtactcagcacagccgcccagttcgtacgcgatgcctgaaggagttccgcttgccgggaagcgtcctgcgccttcgtcgaagtctggtgcggcacgattggacgacgaccggcaactcttccttccgccgt

SEQ ID NO: 382376 - DNA, 301 bp, Zea mays
agcagccagagattcaggacaagagaccacgatcctaacacacagcgtctctgtcatcttcgatcgcggcggcaccaaaggtcgcgacgtggacggcgatggacgctccggccatgttcacgcgcaagcacgtccccgaggacatcggcctccggaacatcggcgtcggcgaagcggaggacgatggagccgggggccaggcccagctgcaccgcgacgagaagcagcacaagccggtgctgaagaaggttaaggagaaggtgaagaagatcaagagcaccctcgctggccacggccacgg

SEQ ID NO: 382377 - DNA, 306 bp, Zea mays
cagacggcggggagcgaatccggggcccagttcccgcacctgcctccctcaccctccacaccaccctcctccactccatccacctctccctcccctgcgccgctgttgatctcggagcaacaaaaaaaaaagaacaaggggaagaaatctcctcccccgtgctgttgccgtctgtttggcctcgaccgcggaccgcccgctaccatccaaaaggcggcggcaggctgctctgcccactcggtgccgttgtcgtcgccccagccagcgggatcttgctgctccaccgccggctgccagtgttttcct

SEQ ID NO: 382378 - DNA, 300 bp, Zea mays
gcagctgccacagagacatcagagagcggtcctccttgtgagtctgagctgaggaggaggagaagcagcagcggcgcactgggatgatgatgcctggagagctaagatgcgccgcgtcgcgctgttgctcgtcggcgccgtgtgcgcgctggcgccggctgccgcggtcgtcactgacggtcttctcccgaacggcaacttcgaggatggctcgtccaagtcggcgcttgtgaacggcacggtgttgtcgggtgcgaagccatcccgcgttgggagacgtcgggcttcgtggagtacatc

SEQ ID NO: 382379 - DNA, 180 bp, Zea mays
gctgaggatcctgtgaagatggcgacgagccaccgtcggccgcagtggctgccggggcatcaggggcgccttcgacggtttctgggggcggcgccgggacgacctcggacacagccgccaccgggttcgactccgaatcacgctgcgcgctgttcaaagccccgacgtcctccactttct

SEQ ID NO: 382380 - DNA, 290 bp, Zea mays
cagacatgccaaatagaaaaacattgaggggcagaaacttctcaaagctcattttgaagctagggacacaaaagtgaaggtagaagaatcttctgactcatctaattctttggataggccacctgatgttccagagagctcgatgcattcttcagaagatacagttgatcttaaagttaatggaacaccaaataaggatgcctctgtggtcaaccctgtcctggaggaatctgtttcaggcataccagtcactgcaaagaatgaatccttgccttctgccagaacaaaag

SEQ ID NO: 382381 - DNA, 296 bp, Zea mays
  unsure (1)..(296): unsure at all n locations
cacatttttacccctcgcggcaggcccaccgaccgccggnggcgcagcgtgcgtacgctcgcgggcaacgccgtcacgtcacgtgcatcacgacaatctcctcctccgcctcgtcttcctgccaggccgcgctatataaagcgggccgcgggagcagcagcccagcttcagatcagtcgaggcgggcgattccagggtttagagaggagcggagatggtgaaggtcatccacgggcgcccggccgagatggggttccggatgccggcggagtgggagccgcacgagcagtgctgga

SEQ ID NO: 382382 - DNA, 326 bp, Zea mays
gccttcgcggcgctgcctgcgcagtactacgagctagcaggctagcagcaccaggaccaggagcctcttcccacacttccgctctccctctctctctttcctctcgagaatggttgtgtaggcgggcgcaggagggaggagagagaggggagctagctagggttttgcgtcgccgccttctgttacccttaggtgagcgacgctcccgtagatccgggcgcgcatccttcggtcgccgccgtcgtctagatctgtgccgtttggggccgtagaggggcgctgtttcgcgctcctccgtgacggtttgggtgcattgcagcgtggat

SEQ ID NO: 382383 - DNA, 321 bp, Zea mays
cccgcgtgctcgcgcgctcgcgctctctccgcgacgactgggtgtgggctaccgccgccctacgccaggtgccgaggcttcgtcgatctcttcgccggcgacgagcacccaccaggatgcaaaagctctcggggcttcggagcctcgaggggttccgatccctcgttggatccacctcgacagccatgaaggtcgcgaaccccaggccttccccggatactgggggtatttcgtatgggagcttcgccaaccttaagatcacagcagagaaattagtcaaggagcaggcttcagtgaagactgatctagaaatggcgcatg

SEQ ID NO: 382384 - DNA, 316 bp, Zea mays
tgttcttccactccagatggaaacgaacttgctggcgaggcggtgagcacaaacccgtgggtccgtgcccacgccgtgatacagcgcctcaagaggcacgcctcgcccgcagcaggacgacaggccaccgccgatgacgcgtcgccgtcgtccgaccgtgccaggcagatggagcgcgccgtccgcacgtccgcggtcgtcaagctacttacccgatccgtgctggctggcgtgctccagcccggccgccacctgacgatcaccaccggaggcggcggcggcggcgccgcaatgccggcaccagctcgcggccctc

SEQ ID NO: 382385 - DNA, 316 bp, Zea mays
ccaaaatcccccttcgcctcggattcccacgcggccctcgagtcgccggcgcccgccgacgccacagcgaggtggttccgttcaaggcttgggaggcggaagtagggagcgggaggatccgttcgcgtccagcgcccgttgacgcgcccatgtcgggccacctcgatcgcttcgcgcggccatgttttgaagggcgctcaagtcatgatgaatgcagagaccataagtcagactttgaagtctctgaagacgaaaagaagaccagaatgggctctttgaagaaaaaagcaatagatgcatcaactaagattaggca

SEQ ID NO: 382386 - DNA, 311 bp, Zea mays
tggaaatattcgaagggcacgcgagctatttgatgccgctactgtggctgatgcaaagcatattgctgcttggcacggctaaagcagagcgctttgaacaggcacggactttgttcgagcaagccagtcaatccaatccaaaaagttgtgcaagctggctataggcttgggctcaggtagaaatgcgtgcaggaaacaataccatggcaagaaagctctttgagaaagctgtccaggctagtcctaaaaaccgattttcatggcatgtatgggcactatttgaggcaaatgaaggtaacattgacagggca

SEQ ID NO: 382387 - DNA, 309 bp, Zea mays
ctcgagccgatttgaatgaattttctagtgttatagtgagtcccatgtgttggcaaaatctaccgggtgatgttttttgattgaccactgcattgcatgttttttatgtacaaatgtaattcatgcatttctattttcttaataaaataatttaggtttacacccataagctacagttagatactcactggagaaagaaacaaaaaaaaactatctatatcatgccacaagtttaccacaatgctgtcttatctgttttgtacatcaggcatctccagtagagttaaatggccgttttgttcatgttga

SEQ ID NO: 382388 - DNA, 307 bp, Zea mays
gtgcagtgctaacagatgaagtcctacaccatggccgatccatgtttgttgtttcttactaaaaacgtacaagcgcatgaccaatgttacgctgacactattctaacaatgattactgttcgaatcatatattagattgaaaacagcccctgtttatctttgcctagaccagggaaatgtgatccttttggcttatgtggattaccatcaatgtatggttaatatttatgtgttgttttacacacggagttcgttgctagataaatatttgtcttgcctagcaactagatttggccgatccatgtct

SEQ ID NO: 382389 - DNA, 307 bp, Zea mays
cccaactgcaacaagttgcactaacgacgggcgaatgctacgaggtattttggttctcttatgattcatttaatctgttttaaatacttttagttactaaaactaaacagtgttgttttaaatacttttagttactaaaactaaacagtgtagagactaaaaatttagtctcctaactaaactttagtccctgtactaaagtaaccaaacaaccccttacttatccgacacttttgaatccctaggcatttggtaaatcggtagcaacagatgcatcacctttcttgcagattgacaaagcctccat

SEQ ID NO: 382390 - DNA, 308 bp, Zea mays
acgaaaggcaacaaaatggcgtgaccggtttagaagagtatctcattggaaagacgatgctttaattaaactggagcgtaatctcatggattttaagcccttcacccaatgttccaaataatcatcctagtttgtgggtttcaaaagaagaggatcatgaaaattggcacgttcaggttgtcgtgctgcctgttaagttctacttttgtcaaaatagtcttgaaattttctggagttgttaatgtatttttactctgcaggtattcaggtcaattgactctggttccctaaaaggatttcctagtgat

SEQ ID NO: 382391 - DNA, 248 bp, Zea mays
cgacgctgcagcaggaagccaaagaggagagaatccatcgagtcgaccaccgagcacggttagggcggcggggctcgccgtggccacagctcaggaatccaatcccccactcctcaccggcgcccgcgctctggctacttcctacgccaccaccgcccgctccggcctcggctcctcgagcaagctgccatggctgccgccgcgctgagggagcaactcaacgctctcctctcctccatgttcgcctc

SEQ ID NO: 382392 - DNA, 204 bp, Zea mays
ccgagagttctgactagccacatccagtcaagcagtaaaggcgcaccatggaggcggcggcggagaataaggaggccgagcaggaggagcagcagctaccgcacgcgcagaaggataacgcgcccgccgccgccgaggaagacgaagcggattcggaggagaccgagcgccgcaaccgcgacctcaagtcgggctttcaccccc

SEQ ID NO: 382393 - DNA, 231 bp, Zea mays
gcggcgccgcaccacctcaccggccccggggcccaagtccaacccggcaacccccctcaaaatcgcattcgaaacctcgcgattcgctccacgaaatttacaaaaccacagcactcccgccaatctcccgcacgtttgggacccaaatccgcgatcccgttgcccagccgcagcgtacggaaacctagctccccccccgccgccgccgccgccgctgggatggacttctcg

SEQ ID NO: 382394 - DNA, 220 bp, Zea mays
gcgccatctgaagtcagctggcgcgacgaagaaatgtcctctagcggtcaaaacccagctgccacacccgcgtcgtcgggccccgccgagccctcgccgccgggcaggccaacggcggtgtcctcgcgtgtcctcgacatgggcgctcagtaggcgcaggcgctgaagccggtgcggcagatgaagcagcacgcgtgcagcttcgcgctgtacgcccacg

SEQ ID NO: 382395 - DNA, 228 bp, Zea mays
gccgacgtcgacgaggaggagaccgcgcgcaaggcaggccacaccgtcaagtccgcgcgcgagtccgcccagcacaccgcctccgagatagggaagaaggcggggtacgccaaggagacggcgggagatgccgcagccggcgagtcgaacaaggccgggcaagccaaggaccaggctaaggacacggtgaaggacgcggccggcgaagcgtccaacaaggcggagtac

SEQ ID NO: 382396 - DNA, 174 bp, Zea mays
gccgctccatccgctcggctcccacccgtccgtcgtcgcctcgccgtcgagccaccgccctccttgtcaacctcgctgacgacgggcccgtgtgattctgctgcggtgcagtgttgctgctcgggccgggcgggaggagaaaagatgggggtgtacctcagcacgcccaagacg

SEQ ID NO: 382397 - DNA, 171 bp, Zea mays
gtgtcgagccgagtcggctcgaggtcctcggccgtcgtgtgtgtgtgaattggcgggtccccggatgccggagcgctcgtgcggaccacgaggaggaggagagagagaggcagggagccctagccctgccctgcacgccggcgtcgccagggttagggtctccccggggcc

SEQ ID NO: 382398 - DNA, 278 bp, Zea mays
gcgatgcacagggcaccggtcgagcaggttaagcgtcgtcctccgcccagaaaccactgcctgcccgtcctaagcggcgctccgttcgtcatctgctccagctgcgtcagcctggtccagctgcccgccgacttcgccgtgccgagcagaggagcacgccggctgcggtgcggcgcctgctccgagctcctttcctactcgtacagggaccccgccgggaggaagaagccgcggtcgccattcgagggcgatgagtgcagcactgacgggtacgacga

SEQ ID NO: 382399 - DNA, 307 bp, Zea mays
  unsure (1)..(307): unsure at all n locations
cattcactcatacttcaacatttattgtttatcaaataatctgtctatgcaataccatttgtcatccagttactataggaaagtttgccgccaaatagtaaattgattattgagaggcaaagctcatacatatttatacacaaggaaccagatcgggtttatagaaacagcaccaatcaagggatccttgcctattctgttgcaacacacaaagcaaggcatcaatcaagggacccattcctattctgtacagcacacaaggcaaggcagtaantcaagggactcttccgtattngntacagcgcac

SEQ ID NO: 382400 - DNA, 303 bp, Zea mays
cgtcacgtcattagcccgcacctcatctcagcgcacccgcaccaggccgccttcgtcttcgtcccgttccctccagtccggctacataacccgcgcgccctcccatccgccgctccattccgtcgtcgtcgtcagcagcttctgcttgctctggggggaacgacacacacacagcgacacagatctagtacacacgctagctaggtggtcctcgaacgaacatgcttggcggtgttagcgggcacgtggctcgacgtccggcgctactggtggcggcgggcagccggacgcctgtcgccaaga

SEQ ID NO: 382401 - DNA, 305 bp, Zea mays
  unsure (1)..(305): unsure at all n locations
gtaaccccgagatccagcgccatcggcacgaccaggcctgtccagggatggggcggagaggggagccctactacgtcgaagcggcgccgccggtggacgtgaacaagaacacagagtggttcatgtacccgggcgtctggaccacctacatcctcctgctcttcttcgcttggctcctcgtcctctccgtctctggattgctccccggagcagccatgaccgacgntaaccgtgcgcacgttcgccatcacttaccacttcttccagtggaagaaaggaaccccttttgctgctgatgaccaagg

SEQ ID NO: 382402 - DNA, 156 bp, Zea mays
gtggacaggaggcatatttttgtaaaaggacaacaacagatgagtggtcatttggtccttctcaagggtcatgctagtttgcgtactaggttacctaggagaatatatgctttatgattcacaagcaatgggattgcttttttgttaatatgattt

SEQ ID NO: 382403 - DNA, 180 bp, Zea mays
ctccattcctggctcgcctttgcctttcctcccttgagccgcgcgctccctcccagccatggtgctcgtcggtctgcagctcgccccagccccggtcgctcctcctgctagcgcatgcccagctgagctcctacctcgtctccatggccatgcgctcgctcagctcgtagcccggctctg

SEQ ID NO: 382404 - DNA, 285 bp, Zea mays
gattgtctacctgagtctttaacagcagtaagatgcaaggttcccataattattgctactgaattgttccactgtactgtaacttttccttcaggatattccagatggcaactggtactgctctagctgcctttgcgacatttgtggtgaagtaatcgattcaaaggagcttgtaacttcccttcctgctttagattgctcacagtgcgaacgccaatccagatcatcaacacacacacacacgggcagggcagactgctttttaaccaagcctagatcaagatt

SEQ ID NO: 382405 - DNA, 292 bp, Zea mays
cgctctcaagcttcaaaatcccactagcgaaaggaaaacgggagaagctaggaagcagcagccgcggcatttcttccttgagcgttcgccttcggctgctcaacgcgtgcttggtttcaggagagccttggtggcatctctgtttcatggccgagatctgctgtgaggcggcggcggcggggtcggaccagaagggggagtgcgccggcagccactgccgtcgtggccgtggtggggcctcgccacctcgtcgtcgccaactgcggcgactcccgcgcggtcctctccagcg

SEQ ID NO: 382406 - DNA, 304 bp, Zea mays
tgttctatatcgcgagctgccgcccttttttttttttttttttctcgtatccaccgttagatcctaaaacctgacttatttactgccgtagcacacacgtacacattgctgcgacaagcagaagcacatcacaggtgcacaacacacgctaatccgaaccttttctttttggcggtatcgctgcatatacctttgccactccgcggccttcggcgatcaagcaaccagactgggtggaaagtggaaatgtaacagaaggaaggttcgggaggaataaattacatcgagtagattggtcttcgat

SEQ ID NO: 382407 - DNA, 299 bp, Zea mays
gcaggtgcgctctcccgtctcctcgtcttcccgaatgtgccccaccgcatccttctcctcgcggcgacctggctgttccctcgcgtgcttccgcgttgttcaactcgtctatattttttttttggttgttgttgttacaaccgcttgatcgtgatgtcgtggttagggttccggagccaatgtatgctgctgaggcggccggactaaggccgtctctagcagctatcctgtctcataccctattccaaacaacactctgtaaaaaagtgtactgtgatgcccgacgcgcctggatgccg

SEQ ID NO: 382408 - DNA, 296 bp, Zea mays
gaaaagaggtactgagggagcaagagtcgcacactcagaccagaccgccgccgccgcgccggtgatcgagtctcgtcggcgctaccttcacgccacaagacaataagcatcgacagccaggttcggctccaccaaacgtttacttggtcaaaattcagatgtgtaatgccaattcaacagctttatgttccttgcctctgaacactatgcctgtgtttggcctttttgtttcttattctcctgtatctcttgtttggttgatgtggtaatatcatactgtggcctaccacaagttc

SEQ ID NO: 382409 - DNA, 228 bp, Zea mays
gcaccacaatgacttctttaatgaaccccaggaaacaagagcttgagcttgggtctgagaatggctattcaccgcaagatctgcaaaccaaacttgctaaggcacaggagatgacagatgttgagtaccggagcacaaatatcacaagttacaactcgaagcataacagtgaccggacatctccggcttggcctgaagaacttgtcacaccaccagatcaaagtctca

SEQ ID NO: 382410 - DNA, 308 bp, Zea mays
tgctatcttgggaaatgttgttttagaaattcaatctgataggtttgccagtctggtcttgtgggcttcctttcaatcactttgaatttgtgaacttcattgcaggatatgcttagctcaaagtttcagcagtctaattttcttatattttcctcctgattcgtttcagttcatttagtaaatcgatgttgtttttctgcttaagtggagaattgagctgcgaatgtaaaaaacagcttagactagaaaggcagattgactgtaatgtgtatgaataggaaaaagttatcagggcagtttctgaaatc

SEQ ID NO: 382411 - DNA, 220 bp, Zea mays
agcgagggtggggttggatttagccacctgctggttctttgaagaaggggagacaagacgacacctttctccgccttgttgtgaatcttgtcagttgtcacgatggtgttgcttgctgctctcaaaccagtttcaaaattggaataactagaaaatggccagacacatacagacagggttttgtaaaatcacactatctccgatctcgaatattttgcac

SEQ ID NO: 382412 - DNA, 291 bp, Zea mays
ccgaggggttagcttcactcatagatggtcgcaattttcttcagaagttatatgctgcagattgtttgcatgtgagttggtctccccacattatacactcctcacagccattaactcttattttctgtacaatccaatattccgtaatttttgtgtttgaaacaaaatggttgtttagctaacatattcagatggactaatccttatgaagagttatcgagtaatcaaaagtggcaaatatctgactgactgtagtttgttgatattatattgataggagataggacagcg

SEQ ID NO: 382413 - DNA, 300 bp, Zea mays
gctcagcctcccctcagaataaacagcgaaaaaaaggaaggcgaaaagaaaaaatcaatcgcgagcgctaagagcggagatccaaatcggcgcaaaaggaggcgctcgctcgcttcgcccgcacggaagttcctccgcgccgtcgaggagcaaaccaattgcggcttggaaaaggctaataaggaatggaatcgagttatgccaccgaagagagtaactctaaagactcttttgcaaatgcatcttcatctccaacaggaagttcagaaacttctgtggatttacaaactcctcccgcag

SEQ ID NO: 382414 - DNA, 313 bp, Zea mays
cggcctacgcccagctgctcaggtcttattcgggcctttggcggcgagaaccgaccccgccaggataatggctcaccgtggacacctagatggactgactgcccaagctccagcactgatgcgccatggttccttcgctgcaggcagcctttctagccactcacctttggagtcttcatctacactggagatgctggagaacaagcttgccatgcagactgcagaagtggaaaagcttatcatggagaatcagcggttagcatcaagccatgtggtcttgaggcaggacattgttgatacagagaaagagatg

SEQ ID NO: 382415 - DNA, 303 bp, Zea mays
caaattcagagggtgactcctctgctaattatgatgacaacaaatctgtgttacatgcagtgaattatgttggcaaagagtttgcagatgatggtgtagattcttcattccagaatttctgttttagtgatcatgaggcgaactggggtttgaatgagtgttgcagactgatggatatttatagtccagatgacgatttctcttatttgcttgatagtccacctgatcttctgcctagttatactggattttgtgatgaatttgtatcaatagatgcgttgatgaatatgagtagcagatgtg

SEQ ID NO: 382416 - DNA, 260 bp, Zea mays
tcatgtgtgtagtgtagtaattactttcacgattagaaaataaacgtgatcaggtgaggtgttttatttagcttctggtagtgtattaataagtgctaaggctatgttttgtatttgactgaactggggccatcatcgttcttgcgatttcaggtaaattggttcttggtaagctaaattatcatctatgttagttgggtcgatgaatggttgggctagatttcttagttgcgtacataatcttcaaatagacgtatgtt

SEQ ID NO: 382417 - DNA, 175 bp, Zea mays
cgcaaggccaagcaggagctctccgccatcggcgacgacatctctcgtttctcgagcacggtggaggagaaggcaaaatgggtcttcgaaaagctcaaagtcttggtattgttggtcctccttgatcctcatgtctttggccgtattagcaacactgtgcagtgtatgtcgacct

SEQ ID NO: 382418 - DNA, 119 bp, Zea mays
ctctcctcgaacacagacacggatacaccattgtacatgctcgctcttcctcttggagtcttgggaccagcccctcgcctcttccgaggtccgagcctgatccctccttccttccgtca

SEQ ID NO: 382419 - DNA, 261 bp, Zea mays
ggcacaccgctcctcctcgctgttctacgcccacccgcacaagcaatcgtcgcatcgccaccaccaccaccgagaagcagccgcctcgcgccccagatctcgccggcaggggtcgcacgccctagcatgcgcgagtaagtacatgagggcggcgcccttcagtgccgacgggaaaggggcggggaccatagaggcgctgctttggccgaacggtgaaggcggcggcggaggggacctgctgttggagccgacgtcggtgct

SEQ ID NO: 382420 - DNA, 309 bp, Zea mays
gtcgtcgccgcccacgtgccgcagccgctgcgggggctgccacccctgccgccccgtccacgtcgccatccagcacggccgcagcttcccgctcgagtactacccggaggcctggcgctgcaagtgcggcaacaagctcttcatgccctgaccggtccaacggcaacgacaacggcgacggcgacggcggcgccacctctccctgctgcgcacacgctggtaccggtgcactggtgcatctctcactcactggatctatctagctcgtcaggctaaggcagcagcgggctgcgtcgccgtggctggtgc

SEQ ID NO: 382421 - DNA, 260 bp, Zea mays
cgcgataatccgccctttttttttttttttgagtcgatggattgaataaattaatgtgctaatgtgatgctcactaggtgctcgataaattgcgtgaatcgcggaactctcgtcgacttcgcggttctcgtgattatcgagccagattcagttatggcgagttatttcgctattccagtcaattagctaaattggtggaccgagtaggatattagtaggcttgtgtgatgataaaatattttaatcacttataaagatga

SEQ ID NO: 382422 - DNA, 292 bp, Zea mays
caccctattgtttttccagccgccatcagccttcttcttcccccacgccttcttctccccctggctttttcctccacgcgcacagcagggagtcgtgctcccctccatggcgagcagcaagccggcgccctctccgtttttcccctgctccttcctccaagctgaacgccagccgtgctccctgttcctgtcttcctcgcggctgcgcgcaggagcttcctctcagccatggcgcccagaaaagatatcccaagcctgcgcccttcgcctacccacggcaagcagtagctcg

SEQ ID NO: 382423 - DNA, 136 bp, Zea mays
ccgtctgccgctgtgccgcacggcccgcaccccgcacgagacccgtccttgaggggcacgtcctagatcggtggcgcctgcctctcgccgccgatacggtgcctctcgcggtctcgctccccctcgcaggtctttt

SEQ ID NO: 382424 - DNA, 243 bp, Zea mays
cgagcgttcaggcgaaagaggaaaaagagaggagtgcaccgcgagtgtacagctcgaagatccacttccaagtgcttccttttaggataatcttatataccttcaagcaaatagacaatcggaggaacttcacaaagatggaaattactccaatatcacaactacgtccaggaaagttaaattatgctttacatgtgcgaatatctagaatgtgggagtttagaggcacaaatgaacagaacg

SEQ ID NO: 382425 - DNA, 201 bp, Zea mays
ctgctacacagaaacgccatcgcctccgcccaaaaaacagcctccacacacgacctaaatcttttcctgcccacgggcgactcccaaacccaacagcagcaagaaagccaaggaaaacactcatttccttcttccttccttctctaccatatagccaagaaacgaagtagcttgcgacttggcaagctacaagttgggcga

SEQ ID NO: 382426 - DNA, 217 bp, Zea mays
gccaaaagcacaaagccattggcgactgcgatcgtcactcgaaagcggctcgccgtgtgccgtccccggcggcccactccaaagccccccaatcttgtcgctttttgcgcgccgtcgcccatctatcgtgtccgccatcccaatcgcctccggcaaaaaccctccgtttccggcgcgtcccccacgctgtcccggctcaccggacaccggtcgagtg

SEQ ID NO: 382427 - DNA, 221 bp, Zea mays
  unsure (1)..(221): unsure at all n locations
gttagccagcacgtttttttcaacctgtatggccgtcttcaatagtatttccagaaattatcatttatcaacaagacggcaatacaggttgaaaaatgataatttctggaaatactattgaagacggccaaatttcttcaggcttctanaacatgtgaaacgaactttgaggataaatctttccatctattgtcaatatgtatatttattgactatgatgt

SEQ ID NO: 382428 - DNA, 213 bp, Zea mays
  unsure (1)..(213): unsure at all n locations
caagcacgcacctttgccacccttccgcgccccgcgtggcncctcactcactgcccacggccactccactccccgctccccaaaccctaccccaacggcccaaccccccggagcggacggagcanttcgctggtcccaccagcgccgcgcccgggcatgccgccgccattgggtggcgcgaccgacgacgcccactgagccgtgcgccgggga

SEQ ID NO: 382429 - DNA, 218 bp, Zea mays
ctggtctccagcatccggacgctgctgtccctgctgcggatgggatcggtcacgccgctagacgtgcgtgcgcctcaacctcgccgacgctcgccatggaaccttgctcgttgtactcgccgtcgttccccgtccatgccgtgagctacagcgtgctcgtcgttgccgcctcctcgttggccacgttcaactcggcagctccttcgtgtcatcgattt

SEQ ID NO: 382430 - DNA, 229 bp, Zea mays
gcagccgcacatcgtcgatcacaccagccgtcgggcgcgggaatagaagcttcacagtgctgtggggatcatgcgggtcgatcggggaggatgaattcctcgccgaaacgctgctgtccgccccacgagatgaccgaccgggacctcggatttggacaggttgcgacatgggctgctctccgacgaacacaccgccgcgttggggcccctgcgctgttgctctgatcgg

SEQ ID NO: 382431 - DNA, 228 bp, Zea mays
attacaactgctgactatcagctcacacacctccgttcgtaatagcatagtagccacgctctactcgtcttagctctcgaagtgccactgcagtcttcgccggccagctcgatcgccgcacaatggcgtcacagcagcaaaccaggaagcagcaggccaccaagggccaccaggaggccgaccgaggccaggcgatgaacctggaggagatcggcaagtaccgcgccg

SEQ ID NO: 382432 - DNA, 222 bp, Zea mays
attttagcttacagtgcgtcccccttctccatagaaaattctgaaaagcaaaaaaaaaaaaaaaaggaaaatctagaaaaaggaggaaaaaaaacttagataaagaacacttttgctgtaaatatttatacttccgtaacatactaactatttacagaagtataaatattgtgaaattttgctgacgacacgacttcgctcaaacgtgtaatatactgttgg

SEQ ID NO: 382433 - DNA, 222 bp, Zea mays
gtcgaggactccgtcgcagtcgaggtggcgccgccggccgtcgggactgtccagtggcacgacgccggcgaactgcagtttcagaacaacagatcgtcttggtatggtgacaccgaagaggaaacacattcttatgagcaacctacatacacttcaaccgatcgatcttatgagcaacctacctatacttcggatgatcgattctatgaacagcctacctac

SEQ ID NO: 382434 - DNA, 167 bp, Zea mays
gccggccggaatatgttgacgatcaggagggtggcgacgccgcagttggccgtcctcctggctgctcctcatcgtcgttacgcatgaggcggcgcctgtggcggagagctcgcgtgtgccggcgcctgagcgcgggcttcaaggggggctgcatgtccgaccacaac

SEQ ID NO: 382435 - DNA, 214 bp, Zea mays
gttattacataaaaaaacttctttcagagttgaactttgtaattgtctaaaattggcgggtttatcgcagaacttgtactatatctgtaatcatcgatagttggcgcagggaaagttcaagatgttagtggtgctaagttttcccagcgtttgtaaatgaaccatatgataggatcctagacaatgcttccatttccattatgattatacaaca

SEQ ID NO: 382436 - DNA, 218 bp, Zea mays
ttgtgattattttactactttgtgagctgtcgaatctgtagttcttaatataatgatatttagctcttctacgtgtttgatcaaaaattctctagctcttttttattgttcccgaggaccagattcaccaatgtttcttgtttcatgtctaatgtggaagtctctcagaactgagtacttttgtttgaagaaagatttgttcagtccagctttgcaaa

SEQ ID NO: 382437 - DNA, 219 bp, Zea mays
gtcactgtactagtgtcatttatactcgcttcttacatttgaggtgacatatctccattcctccctgtttctaagcacgtgatagctagtgccagaattggcttagtgaaaggttaaatagatagtttagatggctaacttcaacaagtatcccacaatcgacttaataatactttcagggttgaaacttgcagtgttattaagtcattcaattaatca

SEQ ID NO: 382438 - DNA, 218 bp, Zea mays
  unsure (1)..(218): unsure at all n locations
atttgaattcagaatatgcagatgaaagagcatccataccacagaacacaactgtgttggtccgcagaattttcattcncgggcaactgtcagagaagattgttttgtctcctaggcggaaagtcactgaagaatgttctgtaccttgcaagtcggtggttactgactcaagctcaaagtcatgttcctccacagtagtgcaagatgaagatgctgca

SEQ ID NO: 382439 - DNA, 111 bp, Zea mays
ccgatctgctccgccggcgaggtgaagtcagctgatatgatgtacctcatttggataacaatttgactggcaccaagttttaccagaataatccagaaggggcaagggcaa

SEQ ID NO: 382440 - DNA, 183 bp, Zea mays
atccgttcgtttgtttgcccttttttgccggcctcctcgtctcttccggttccggctacaagtgaagtgagctcggccgtctgttgcctagcgtgctgcttcgttcgtcgttggcttgcagcagcttgccgaagagaagaaagcagcaggcccggagctttctgtttgtttggatccgagtga

SEQ ID NO: 382441 - DNA, 305 bp, Zea mays
accttagagctatacagaactaggtgtaaatcttgctcaaagttaggcggtcaggttgatgttaggctattccagacatctgaaattggacatttcagtatgttggctcaacattggagtttccttggggttgttctgtgcagttaggagatatattttgtgtagcaaaattggagaccaagtattagtaagcaagtttacttgtggaagcttggcttggtactatataaatttggaagttaatggtgtcctaactagctctgtcagacatgtgcaatgcagaccagcttcagttactgtcacta

SEQ ID NO: 382442 - DNA, 295 bp, Zea mays
gccacgacaaccgctataggcaaatctggggagaagaagccaccgatcgtgagtgcgaacgggccgacacagtatctgcagcagtagcgcctgacatgtcggcctccggtggcggctccgaggtaatcgcacggtggcagatgtgctgatggggaacgcacgggctgctgccagcaagacgaagaaggcatcaccatctctggagaatccgcaagcaaagaccgaccgtgcaaaggtcgaactggaggtccaagcggtgccgtccccagcgaagtcccccaaattaccagttgtg

SEQ ID NO: 382443 - DNA, 170 bp, Zea mays
caggaagctaccctctctctctctctccccgcacgtcagtctcatcagtcgcacccacagcagtgataaaaggctcgagacgaggcgacaagaatctctcacaagaacacctctgctctgctcgtatcctccttgctatctccttgccttgccttgcctttgccttccct

SEQ ID NO: 382444 - DNA, 290 bp, Zea mays
  unsure (1)..(290): unsure at all n locations
aattagctagccaatggttgctgatttttaactagctaatttttagctacctaatatttagctacctaatatacaatggagcactttcaggaagtatttaggggatcgtcgcagcagcgtgagctggaactacaagtaacaactcttaaacaacagctccaagaagctgagatccattataagcaagacatgattcttctcccaagttttcattttgcgctctatgctaattcacatgtttgacactgctgatttttgtttatgttacttgaaagtttanagatctcttg

SEQ ID NO: 382445 - DNA, 312 bp, Zea mays
agaatggtatatacctcaaggttcaagttactctcgtagggtttcaaactaagcagtatggttttgctcgcgctattcggcctgttaccaatttcaatgaagtggctctgcatttcattgattgtatttatttgcatttggaaaatgtacggcaaaaggtcaattccctcgctccattcaagcaaatgtgtctacttatgagatgcaagctcaagttgctcacagtgttcaaacaaaatcacctgctcatatccccttttctggtggagctagagatcatcaagttgattttgctcctgaagtaaaccatgg

SEQ ID NO: 382446 - DNA, 256 bp, Zea mays
ctcacgccaacgctcactggaccattcctccgtgctggggagcggcggagagctatccacctcgtctcaggcaccctctggcgtccccctccccccgccgcgtgccggcgaaccgcggagatccggggttctgacctcgcctccttctgctgacaatatggattttgtaggaaagagcaaggtgatgttggagccttcggcactgggtctgccctcctgtgttgccctgcatatacttgtgaacgaggcagcatca

SEQ ID NO: 382447 - DNA, 182 bp, Zea mays
attttgccgagtgtaagcatcgtcatcgtctcatgctcatgctcgcctcctttgttcccctcacttctaggttaaggatgtctctactgccacctatctcactaacattcaacattctttgtctcttcagggtggtgttccttttgagcatctttgtggcaatgtgtccgactactccagtc

SEQ ID NO: 382448 - DNA, 208 bp, Zea mays
cttggatcgtgatcgcatggttaatagcgctttcgttcattatatctgtgtttcaaatccagtccgttcccttcccagtactgtcaacaagacccgtacgttcttctctccattcctcagatgcccgctggctacgtctcgctatgccatgagcgaggcgagctcctgcaggtcgaaggagccgccggaagcggcgtagacttgtcgc

SEQ ID NO: 382449 - DNA, 227 bp, Zea mays
aagaccgcctcctcgccgccccagctgtccaccgtcgtcaccaccaccaccacccgggaggccgccgccgcgacgcccctcgagtccctcgcgggggcggggggtaaggctcacggcctgtccctcggcggcggggctggctcgtcgcacctcagcgtcgacgcttcgaacactcactttcgctatggcagcaagtaccctcttggagctaaatccgatgctggcga

SEQ ID NO: 382450 - DNA, 220 bp, Zea mays
gccgccctcgccccacctctctcctctgccgtcgtctagctcggacccgcacccagccgtgaatacccatggcgcccaaccccagcttctttctccctcagctcccatggcgctctctctctctcctgctcgctctctggtgccgcgcgtcttctctgctcgtcggtgctcgccgcgggagacgacgctcggtcgcaaaattttcgtgctcctccctgct

SEQ ID NO: 382451 - DNA, 300 bp, Zea mays
aaacaagaacccaccagtacgcacttcctcctcctccacctcctctctgcctctctctcctcgctccctccgccagtccgctcccccctggcccatcagatccaattccttcccccgaaccccgtcccggatccgccgcaattccttcctgcgtcgagctcgactgctccctctccctgcccgcaagaatcccgccgtggccggcggcttagtgggactcccaagtcgaagccaaggctggtggggggcgcgctcctgccgggcgtacgggccatgggcgcgctgttgccgttcgtgcgt

SEQ ID NO: 382452 - DNA, 292 bp, Zea mays
gcagccaccagtgcatttttatgcgccgcgctggtggttttggggcgcggagtccatatccatggtcatggacgctggcctgcacgagccgtgcgcgcagctgccgggatccaagcgcgacagccacatgctagtctacccccaaatcgccgccgccgctaatgggttcacggcgcaggagctcgagtcgctgctgttcctgtcgtctgatgggattactttggctgcgggcagtggcggtagcggcggcggcggaagctatctgaatgtcgcgcctaccactgtggtcccg

SEQ ID NO: 382453 - DNA, 180 bp, Zea mays
ctccgtcagccccgccgcgcgcaccatggatcccccgccgcggcggctagccgcccgctcctcctcctgctcctcgcagcaggctcccccgccgcgcgcgcgtggaagaaggaaccgttccgcaactggaacgagacgcccttctgcaagcacgctcgaacccgcgccccgcactcggtc

SEQ ID NO: 382454 - DNA, 286 bp, Zea mays
aactggcttaccaccagtagcatattcttttttgcatacctactactacatgtgccattatataacttgtcctttcagggtgaccctgtggaaattgcacgtgttattaaagattcagtaaaacagaatctgaaaagatttcacgaggaagcccggcattctttaattagcacccctgaacagaagttggctctcattattgatggtagatgcctaatgtacgcactggacccaactcttcgtgttgatcttcttggattgagtctaagttgccactctgttatat

SEQ ID NO: 382455 - DNA, 287 bp, Zea mays
agagggatcacgaggtgtgcttcctcctccgcccaatcctgcccaaccaaatccgccagcgccgcctcctttacactcccacctctgtcccggagcaaaaaagggagggagaggctcgcttcttggatcgcggggtcacgggacgcgcgccgcgagccggtacgctgctgctggcggactgctcgacccttgcctaccagctgctgcctgctgctgcttccttggctggcgccggcgagagacggaggcgaggcgacgacgatggaccgggcggcgctcaccgtggg

SEQ ID NO: 382456 - DNA, 284 bp, Zea mays
  unsure (1)..(284): unsure at all n locations
aggtgaaggaggaaaaggggttttctggtaacatgcctaatgaaagcaatgaactagattactttcagtcgcttgaanatctcagtggtcattcgaagcatcatgactcatctgcttcaaattatatgcattcaggagccccccctactgtttgtattcaagaaggtgtgacatcttctcttcaaccaagtgacagtgttaagagcctagagacttgtaccatgccaagagctaggtcaacaacacagggttcagatatcagcgaagatgatcgccactctggc

SEQ ID NO: 382457 - DNA, 99 bp, Zea mays
ggcgtacaaccgaaaggtcgacgtctacagcttcggactgctcttgtgggagatggtgtccggtagaatcgcttacgagaacctgaccccttaccaggt

SEQ ID NO: 382458 - DNA, 290 bp, Zea mays
acttttcttcccagtttgctccgattttgattccatggtaatcgcagcctgttcctctcgtcgtctcgtccctacctttcctctgattgcgtgggatctcaactcaatctctccttatatagttatatgtagctgttgagttcgttccggttttgtttgacgatagttgagtagacccctggcaatccacccttgcacggttcttttaggttttttgttcgtcatttgcagctgccattctgcctagattgtttaagcgaacctcctccggggctctctttgttgaagtt

SEQ ID NO: 382459 - DNA, 144 bp, Zea mays
gattaatgattttgccaatacatactggaaccatttctttcagaaagagtccgaaagaatgtagcatcctatttgaattcctgtcatggcatgctggagattacctatttgtttctttgtagtcagtgttaagcaaactgctat

SEQ ID NO: 382460 - DNA, 169 bp, Zea mays
cagctccccgcgctcgtctgctgcgaggccatggcgtgggcggtcaccttccttgcgttgccgctccgcatgctcaccgccgtcgagagggagcgcaagttggggtggctggttgcggacatgcaggcgcagatggacgacctggcgttgcacaacgcggcgctggagg

SEQ ID NO: 382461 - DNA, 292 bp, Zea mays
aaataactcaacgcacagcacggcttgactgcgtaagtgaaagaaatgaacagacatgtttggctggagcatctcttgaagatctgatggccttcaatggaatgcaactatatggcagtaaacagaggcaagacaatagatgcgtaggctggccagggttcagcggatgataggttgaggctggtgtatttgacatccagccaatttggtgcaacacttgaaaaatgaattacatgcaagccttttctatttattacactatcgacgacaccgtccattgtttgatgaattt

SEQ ID NO: 382462 - DNA, 256 bp, Zea mays
  unsure (1)..(256): unsure at all n locations
cgtggaggggacagagcgcgagaaactatgatgcgctgcgccgccgccgcgcttgcggtcgccctcatcgctgccgttgccgccgcaaccgctgcgnggtcgccggccgcatgcacgtgcgcgcggacgtgcgcgccgccgttcctcgacgccgtcgcagtgcgctgccccttcgtccggatcgacgcgtccccgcgtctcgaggtgacacgagagactgttgatactgagttggaccttcgagagaggggtgctt

SEQ ID NO: 382463 - DNA, 288 bp, Zea mays
cgctcctcgtcgtcctcaacgacgccgcctctctcgagcacgcgcctgcgtccatctcgcgtacgacggcgcgtctctttttcccagcgccgcaaggcgagtggtaccttcactgatgcagcgacgcggctctgctactcagcgttgcaaggcgatagttcgactcccgttggccatgtctcccatacgcactgctcatcccgagatgaagggatgcttcgacggccgggtgctggcgtgcaagcaaggcaacgacatctccgatgcccgcgcacatggaaggcaacg

SEQ ID NO: 382464 - DNA, 100 bp, Zea mays
acagccactccaaacacttgcaccggcactacctcacaggtaagtccgccatggtctccagttctggcgtatacgcgaacatgcgatggtggtacgcacg

SEQ ID NO: 382465 - DNA, 290 bp, Zea mays
tggagttcctaagaaagattcaaggaagtcccctgggaggagtggtaatggctttctggaggatgctacttgttcagataacgatatctctatgcgagaaccttctggaagtgcattgaaattggatcattcaaataatgtggatacattgtcgtctattatgagtcttattagagaacattgcttggaggaccaacatgtagtatttcgagatgaagtccagaattctagcccagccaggaatgaagaatatcatttccaggttgaactagcaggattgattctcggga

SEQ ID NO: 382466 - DNA, 293 bp, Zea mays
agcgaactcggtgcccgaaagcagtgccagcgccacgatgtgaaccccggacaaagatgcggggagaagaggcgtgctgaactgggcttgctctgtccacgacgctccaatttgccatttggtagtagtacatgttggtagtggtcatcttgccgtatatattgccctgcccttataaaggcacgacgaactgtacccgtggtcatcttgccatgtcctagttttcaatatatttatgacagtagtagatgctggtagtggtcatcttgccatacacccatatttagccacaa

SEQ ID NO: 382467 - DNA, 222 bp, Zea mays
ggctcgaggtggttctaccttgaagtagattacacttatcacttttacaaaatgctagtatatgaaccatgatgaaaatttggatacttctgttttaatctgcacttctgcagtggtagaaggcactggatatgtttgggacgtaggaggttcaagctgatatgggtagaactacaacttcgatttcgatttaatcgaacttgtttctgctttataatgcta

SEQ ID NO: 382468 - DNA, 285 bp, Zea mays
agaggggatcaggggggagtgagcgagggggaggttttgccgccggcaatggagacgaatctccgggctcagagcccgctctgctcccggacccgccccgcactcgccgtgcgcccggacgctgccgccactggcctcacgctgtctgtcataaggcgcagcgatattacgagaggcgggctcgttcgatgcatggtgtcaagttcagattatcataagagtagtccgagaaggacgtcgacttctaagagcaagggtgtcccttccggagggtatgcttcaaga

SEQ ID NO: 382469 - DNA, 285 bp, Zea mays
taagttctaggatcgcgagcggccgccctttgtttgggttgattgaatgagtgtgggccgcgaagttactcgagtgtggagagtgcaggcgcaagataattggggcttgtattacatagaagcagagagcagaagtaacatgtactggcacgcaagctccttgaaacagcgtactagtttgttttacatctcagcgaacttggatagtactgtagtatttcgaaaacagcgtacgtatccacgctgagtacgtgacgcgcccagaggcctggagcaaacgaactc

SEQ ID NO: 382470 - DNA, 178 bp, Zea mays
gcttagttgccatgtacacagtgttcgatcggctcgtgctatcgtggtagtctggaagcgtctcttttatgtttcttcatcgtgttcgatccagttctacccgtccagtccaatccgagctcctccgcttcagccaaagggacgatggacttagagagatgtcctctatggccgggcc

SEQ ID NO: 382471 - DNA, 296 bp, Zea mays
cgaaaaacagccgtttcctgcgcccgtccctcaccttcacgtcggcgaccgaccggcagaccgacaaactcgaagcaggccccaatggcgttggctcgcctccgcctcctcgaccgctacggtctcctgtacccggcgctctctgcgacggcgctgcggtccttgggagacctgcgcgcgctctgcacgctctccaccacgctgcggtccggcgccggcgaggacgagatcgagcgcatccgccgcgagttcgatgacgccaagcgcaactacctcagcattcccgccgccatcaa

SEQ ID NO: 382472 - DNA, 303 bp, Zea mays
ctagatcgcgagcagccgccctttttttttttttttcatatagagctaaaccagagcggaacacgttctctctctgagccgtgctaacgaactgtcagcacccaaaaggaccgctggaacggaacggaacgaactgttagcatacaaagcaagcagcctcccaagggcttgtacctagccagggtcactagcaccttcgctactaataaagtacgctaccaactaccaagtagtacacacagccacagacacggcaattgacacaaaaccaggaggcggcaggcagcccaggatgttctggca

SEQ ID NO: 382473 - DNA, 299 bp, Zea mays
tgcgtctagctcaccggccgaactccctcaacgccggcctccatggcagacagcgcttcactgctccctacaagcgccccctcactggatcccctccatttgtgaccagcgccacttcctggtccaagctctctggttcttttccctgcgcgcccagccgtcgaagctccctgcactcgcctggcactcgcccctgacctcccatggctgtctgccccagctcggcttggtcctctgatcggcgtgtttgcccctgcaaagcccgcccagtctccattttttttttttttcccagcccg

SEQ ID NO: 382474 - DNA, 299 bp, Zea mays
tcggccgtttagacagccgccgtcccagcgccgtgagtgctctgctgctttcccgtcttctcccttctcactcttctccttctctcaaacgcaccagagagctctctcccaacctcccgtcttctcccttctcgctcttctccttctctcaaacgcaccagagagctctcccccaaccagagaactccgcctcgcccgtgagtttctccacccccaccctgctgctttccccccaccgacgttgtctaggaccggattgaagtgcgccgtgagtttctccacccccacacaatctgttt

SEQ ID NO: 382475 - DNA, 295 bp, Zea mays
gggcatctcaacaaggctgctgctactgctatccagcatgagtttattcataaaaatcatgaaaagaatgttatgaatcaaaacatggatcagcccactgttctgcccagattgaagattacaattcctagatcacctgatttggcaacaaagctaagagcagagaggtcaaaagctcaaagagcagtgccaactcttccaaagcagttaaatgacttaattcaacgggttgcaccctctgctcctacagttcaagtcgcaccaactagaaaggtagttcaacctttttgggcta

SEQ ID NO: 382476 - DNA, 291 bp, Zea mays
accggcactcggcacgaagtccatagccagcgaaactcccgaaaccgtaccaaccagacaattcaccatggcggcgccggcgcaggcgcaggcgcaggtcctgcctctcctccggtggagccggagcgcctccttcctctgcgcctcgtcgcgccgcctcttctccgccctccaacgcccctctgccgctgctcgctgcgaggccggctccaaggccatgctcaaggggatggactactcggaactcgagaattgggtgcaggcgcaggggtttcggccaggccaggccat

SEQ ID NO: 382477 - DNA, 285 bp, Zea mays
gttctgctgccttgaatctctgtgctctcgcagatcccctggagccgctttacctccgcgcgacgccgtgtgcgaaccaagttgggtttggtcgggttgttcggtttacagtttactcttcctgcgattatagttttctggtggatcctgtttgttctcgagttttagcgtatagcgtatataggttgcaggattgggtccgattcggtagtttcaggctcaaatgtcttctggtgtggtaccatcataatcagatagtgtcgtcgtagtttgctcaccagaact

SEQ ID NO: 382478 - DNA, 257 bp, Zea mays
agaggaaggacacattctacgatttccatctgaacacgagatccgtcaagtcaacgatagtgcatttccagctgaggaacctcctgtggcctacatcgaagcacgacgtgtacctggtgcagagctactccgtgacgcactggtctgctctgctccggagaggaagagaggttctcaacgtggccggccggttggctccgacccagaacgtgaagggggctggaccgttgtcgagggttcagatcagcgccatggct

SEQ ID NO: 382479 - DNA, 163 bp, Zea mays
caatctttagccttactggcagcatgttgccaccgacagaaactgtccggcgacctaggtctctcggcttgtccgcagcccgccggtcagtaatggcgcaggatgatccggttgtttctgctcagtggctgcacgagcacctagggatgcctgatgttaaggt

SEQ ID NO: 382480 - DNA, 303 bp, Zea mays
agattcagattcaggtgatatagatgctggtgggtttgctctcactagtgctcggaaggctagcagactagccgcagatgggtactcttcatttagtccacatgaatcctcacctgcaacttctagtcttcaaatgcatggctgtgataatagtgctgctgtgggcacaattccaaaattaactcataccaaccaaagccctttcatcaacaatgctaagaacataaacccagttctcaaacgaaattactctgttagagaggatccatatggggagactcgaagagtgagacaaagatccat

SEQ ID NO: 382481 - DNA, 287 bp, Zea mays
cagcagctgccacagagacatcagagagcggtcctccttgtgagtctgagctgaggaggaggagaagcagcagctcgcgcagcgggaccgaggaggccgggagagcgaagatgcgccgcgtcgcgctgttgctcgtgcgccgccgtgtgcgcgctggcgccggctcgtcgcggtcgtcactgacggtcttctcgcggacgggaacttcgaggatggcccgcccaagtcggcgctggtgaaccgtacgtggtgtcggtcctaacggatcccggttgggagacctcggc

SEQ ID NO: 382482 - DNA, 295 bp, Zea mays
gtgggatgggattgagaaattcaacgcggaggatttcttggaagtgggcactccccagcagcaggataaaccagccgatgtcgtggatgacgacccctcctgtataatctgaagcccgccgaatcatggtggcgaaacctttcatagttcagcgcccgctccgatcaacctggagcagtagatggctgtgactgatgtacagatgccagatcagtatgaataacttactaactgtctagaccatggcatcatccagaaatgccgatcgtaaccgagagttgatggtgcaggcagt

SEQ ID NO: 382483 - DNA, 298 bp, Zea mays
gccatggccaccggtgtcatacgaagaaggtttgtcgcaggtagcaacgacggcaactctgatgagcttaccagcatcgaagttttctgcccggactttggctcggcacaaccacagccaaacaagcaggtacgtagtgtgtatatgtcagagaaaatcaataactcttttaagaatgacagcagcaggaattctcagtaacacaatcagctggatgcacgtacgtaggactccgtctctgtcaccaggattggggtatggggtggacgacggaggtcggcgcaggacatcccgacga

SEQ ID NO: 382484 - DNA, 170 bp, Zea mays
agccttgactgcatccggcggtgtctgatgcgtgctgatctgcatgtttccgcgcgttcgtagttgtaatccgcctttgatcctcgatcgatccgatctgcgaggcttttattttagacgttgtaataaactccgctttcaaccgcaccgaactaatcgcgccagtatct

SEQ ID NO: 382485 - DNA, 256 bp, Zea mays
ggaagagagcagaggagtccgcgcggaggggaggaaagggcggagggaagaggagacggagcgaggaaaccggattctggcgagcggaagagtccgctcgaaggggacaaggcggagggaagaggagacggacacttaccgataatatagtagagattagatttttagatgtaacggacttgcacgctttataagtctgcccacgacacgatgccagtcaagtcgagtcgagtcgagtcctcttctatttgggggg

SEQ ID NO: 382486 - DNA, 201 bp, Zea mays
cctctacatgtgttcatgcatgcatgcgcgcacgtattccaaaggtccttcgtgacaaagcacgtctcttacgcatgcaacttgcaacctcacgaaagcctacctcagcgcgcgcggaaacgacacaccctttccatgaccatgagtccatgaccataactgcactgcatggatggttgcacatccttctggcatcaaaga

SEQ ID NO: 382487 - DNA, 269 bp, Zea mays
aaagaaacgagaaaaaaagaagagagctgctctgatggatcgctccacctccctgctccggctcatcttgcttgctcttggcgcagccctggtgctcctcgtcgtccgctccgccttccgcctcccacgtggaatcgacacacccaccacctcactcttcgatgacgaagccaccgcgggcagcagctgcacccggttcgcgccgtgggggtgccggcaagccgaccggattaagcagaagccgccgtcgcacgagaacgacgtgccgc

SEQ ID NO: 382488 - DNA, 206 bp, Zea mays
tgcaagagtacggtcgcggctgcgagcgtaacaacaggaggacgccgccgcagacgacgacgagaagcagtgcgagcaccaccgcgactacgacaagaagcagcagtgcgtgcgcgactgccgccgcggccgtggctgggaaacggtggccggcgccatccttgaggtggtgtgacgatcgacgacgtgcatggcgtggcgcacag

SEQ ID NO: 382489 - DNA, 210 bp, Zea mays
cgctcaagagccaccacgccccctgcacgcgacccgaggccaagaatcgcttccttccgttccgctccgcgccgcctccaatatccagcgagcggcgctgccagcccacgcctgtgctcgaatccctcgtccttcctggaaacgggatttgctttccgtgccccgctaaatcgtttgttctccatccagccggttcctacccatcgtgcc

SEQ ID NO: 382490 - DNA, 120 bp, Zea mays
aaccgcagcgacgcgatatcccaaaccagtagcggttgatccgcgtctcctcttatcctcacataggccagaactcgcacgcatcccctcccaaaattctccacggtcgcaactcgcaac

SEQ ID NO: 382491 - DNA, 304 bp, Zea mays
cttgtctccaagtttgtaaccctagccgccaagcttgaaactccagccgtgctcgtgtagggctgcaggccatccgagctccgccttccggcatccaccagacgtccttagaatacggtgcagcgagcagcaagtcgccgagcagccgagccaccgccgagcagccgagccgccgccgagcgccgagtcttctatggtaaattaaacaggcttggataaattagtgtttcaatttagagttttggacaggatttgaaaagattactacagctcacggctcacgcacttcaaaccctaacctgac

SEQ ID NO: 382492 - DNA, 133 bp, Zea mays
ctcacgtacgcaggcgtggagtacatcgtctccgacaccatcttcgagggcctggccccggacgagcagaggctgtggcactcgcacgcgtacgagaggtacgggatcgacagctcggcaggggggctcaagg

SEQ ID NO: 382493 - DNA, 296 bp, Zea mays
gcgtcacaatctggtcaaagggttcgagacagacgttcttcgcctgggatttggggtcaaacccgaggtggtagaagcgatcaagtctgccaagacaccgccaccgatcatagcctacaacccagaggaggagaagggggacaagaaacccggctggaccgagaacatcatcgacgctctgctgggcgtgcgcgatccggaggagttccttaacaagaagaagaagaagaaggacaagcacaaggacaagaagtccaagagcaaggcgttcaacttctactccggaaagccagacg

SEQ ID NO: 382494 - DNA, 290 bp, Zea mays
ctagttctagatcgcgagcagccgccctttttttttttttttgcacatactattgtagtcaattaaaataaattattaggatatctaatttcggcatctagccgtaagaggtataacagaagttgtgaaaaatgcacaactcattaaacacgaaaatttgcccaaacaaacgggacatggtttacacactagccatggtatctcacccaaatctgaaaaatggaccgtcctaaccagagtaggagattgctgatagcctccagctccagcagctaccctcctccgtatcg

SEQ ID NO: 382495 - DNA, 309 bp, Zea mays
gcgagcgacgcaccgaccccttcgctggtccctgcctggttgccttcttccccctcccgtccgatcggtttcaccattcaccgtccgcgcgctccaaccgccgcagttcgtactggcgcggtggacagggagctagctaagctaggcggggttgattgcagttggggaggcgggagtgtgtgtcggtgatgtacggcgcgccggtgcccaaggacctcaacctaccagcagccctgccgcagccgaccagggccggagcgaggacgccaccgcagcagcagcagatgagctccccggggctgctgcgct

SEQ ID NO: 382496 - DNA, 288 bp, Zea mays
cgggggagctactgcagcgtgtctcccgccagacaatgcaggaggttatacgaactgtctttgcccgcctgccggacatcaatgtcaccttgttgtccgacgagcagagtggcatgtccggaacaaatcagatttggtctgcaaacttaaggaaatcgcatatcttttcagattcagtttgcagaatttgaagggcctatttattctgtggaaggtcttacagatagggattatggtttagtttattcagtatgctaatttgcatccattagtaagtacactagaagt

SEQ ID NO: 382497 - DNA, 159 bp, Zea mays
ctgtcatcacttttgggccatttaatactccagctgatgtcatgacatctttgtcgcatgcaattggtactgtgtccatgccgccaaaatggtcacttggctatcatcaatgtcgttggagctatgattcttctgagaaagtactccagggtgttagga

SEQ ID NO: 382498 - DNA, 316 bp, Zea mays
  unsure (1)..(316): unsure at all n locations
cgacgcnttggatcccctcccttgctttgccgtgtccccgcccaaaccccgtagccgccgccacagcaatcgctgccgccgctggaggccgggccgtgggggctgaaatgaaggaggtggtgctccacgtgtatgacgtgaccaacagtgactccgagaagacgaacaacaccatcctccagatcaaccgcatcttcaaggaccgcatcggcctcggcggcatcttccacagcgccgtgcaggtctatggcgaggacgagtggtcgttcgggttctgcgagtccggcagcggcgtgtttagttgccccataggcaa

SEQ ID NO: 382499 - DNA, 291 bp, Zea mays
tgatgccgcccccgagcgcatcgccctacgcccgcgggtccaacctccgctacgccacgcctcgcccgccgcgctccggcgccagcaacgcgcaccacggccgcggggccctccgcaacccgctcagatcggcggaggactgtgccggtgccggtgccggtgccggggagaagttcttggcggttgctgaggctgcggcgagggcccagaagcagagggcggtatcccgcataaggtgggcctgggcgtcccggacccgaagcagcagcagaaccagtggggcagcagcgc

SEQ ID NO: 382500 - DNA, 112 bp, Zea mays
agacacaccccgaccttccgctccacgcgacaacatccctctcggttctccctctgcacgagtggccctggacctgcttggcggcgcgcttattccctaggccggcgagcag

SEQ ID NO: 382501 - DNA, 314 bp, Zea mays
gctcggcgtggtcctcgcccgaggtcaggggcggccacgcgcccgcgcccagggacagccacagcaccgtggccgtcggcgcaggtcttcgtcttcggcggggactgcggcgaccggtaccacggcgacgtggacgtgctcgacgtcgacaccatggcgtggtcaatgtttccggtgaagggtgcatcgcccggcgtcagagcaggtcatgcagatatgaatgttggatctaaggtatatattatcggaggcgttggcgacaagcactactacagcgatgtctggggtcttgatgtcacaaaccgctcgtggag

SEQ ID NO: 382502 - DNA, 308 bp, Zea mays
atttgctgtttacaggacataaggcgcacattccaaacaatttacggcctcttatgacaagtatccctccatcatctgttcatagcgcacgttcaggatccacaaggagcagaccaatgagtgtctcagactcaccgctcgcaacaagcagcaacgcaagctctgagccgagcgtcaacaacaacctgatgtgcctggacggtatttatatggatgatgagttgtgcagcgatagagcaggaccctatggacggtgatttcacttccaaaaggtttaaaaggcatgattgtgatggaaccatttggct

SEQ ID NO: 382503 - DNA, 295 bp, Zea mays
ccccccccaaaagaattttgaactccaggctcctcttcttctccaacgcctaccgcggtgccaccccgcagcagccaatggcggatgccgccgccgatctgcgccggaggatgaaggagcagcgcgccgccatccagcggcggttcatcgactcccggaactgggccgccgccgcctcctcggccttcagtgccgccctcctcgaggcgcgctccatcgccaaccagaccgtctccaaccgagtccaaacaagcagaaggtcaaaacataatctcatgactgagtcgattttaaa

SEQ ID NO: 382504 - DNA, 308 bp, Zea mays
cagccatggagatgctgagcatgctgaaggtggggtacaccatcctgcgcagcgagacgcccgcgacagacctcgtcaacaccttcatggactgggcggcgcgcaggtcccttatgctcctggccatcttcctcccgccgtactacatctacaagctcaccacgtctgcgttcgctgctgccgtgccagaggacgtcgcagggaaggttgtgctcatcaccggcgccgcctccggcatcggccaggtatgccaaccagtaactcctttgtgtacgcgtatttttgctgaaacaaactaaaccatggat

SEQ ID NO: 382505 - DNA, 120 bp, Zea mays
ctgcctgcctgtagatgacgaacggagttccgaactgggtgagtaccagtagagacggcccgaggcgggcttgagacgtgtacatgtgccatggaggcagaagttggactgctcggttcc

SEQ ID NO: 382506 - DNA, 233 bp, Zea mays
tgttcactacacagttcgccactcctttagtatcttgtgatttgtacgtcgacgagatcactggtcgtgtgtcgtacgactacacattgggaatggtagtgttggtgcatcatggtaggcgttcctccggctcgccatcgttctgctggtcgtagcatgcatggccggttcggagatactatttggctaacgttacgtcaatgatgaccctctgtagtgtaagcaggcgtgct

SEQ ID NO: 382507 - DNA, 297 bp, Zea mays
gaaggcatcgtgtacgccccgtcctcggcggtggagtccgtgcgggcggcgcaggatgagagctcccgcatgtcgtggcgcgcgcgctggacatctgcaaggagaggcaggtggacgccacgggggccgtcgtggagggcgacgccaaggaggccatccgccaggccgtggagcgtatgcaggccgggcttctcgtcctcggcagccggggcctcggcgcgatcaaaaggtagagtagagacaccgccatttgacttgttgcgaccgataaaaaaccccaaccctgtcgatctactc

SEQ ID NO: 382508 - DNA, 303 bp, Zea mays
cttcagtatgcttttattcatggactgtgttttgcattaaagctcttcccatttttagtccagattacatacatattaacaaccggctccaactgctaagtcacctacccaaacagatatcagtggtagtagactagcagttgttatattgcagagtcggtgcatttacaggaagataaataatcctgcaatgaaatctaaaatttaagatacacttaatactcctagtgaagtatacaatcagttgcgactgtgtgccaatctccacaggtgcattatttcttgctggccgttaccagttgc

SEQ ID NO: 382509 - DNA, 298 bp, Zea mays
acgggtgaaagtgactcagctgaaaatgactcctgtgattctccccttgagcccaacagccctctgtatggattgtctgataaagttgaaactgaaggaattgaatcttcatcaaatctatctggacgatcactgcgtaatatgatgttgagatcaaggacattttctgaggggaaattaagcacgtcatgtagtgaaccgaatatagcgaatgccttttggaggcacagtcaaaggagaggagttgctgaggaaccccgtggtgctagttccagtcctgagcatccattaatgagag

SEQ ID NO: 382510 - DNA, 284 bp, Zea mays
  unsure (1)..(284): unsure at all n locations
tgctcatcaagaggatagagatatccaactgatggttgggtagagagatctagcacatcttctctgctacaaaggcaagccccggtgcatttggcccttccttgtgttttaaatgctttatcacctgatatgatgcattaggttgataggagttgtgtgataaacaattgatgcattaccattccttggaaattcctaaatccctgttttataaaaagaattattactgcttagtcctgcttagaaactacaaaatcatttgattttcanaagaatgatgtgta

SEQ ID NO: 382511 - DNA, 175 bp, Zea mays
acttcgccaatccaaccatgccaatctcatgtctggctggagagtggagataagtggaggttgcaccaccaattccttgatgtaccaagaattgttggattgttgtattctgaaatcatttagctcaacatatacaaggtctgttcccggttattctagcatatctgactgtaga

SEQ ID NO: 382512 - DNA, 289 bp, Zea mays
  unsure (1)..(289): unsure at all n locations
gacaccgccagctagcaagcgcgctcgatcgaataccgttaccgtgtcgccatggccattgggaagaacgtgtggcgtggcgctggggcacgggacccgacgcgggaaactgtgtccgcgcagcgactcgacgatactttcgtacgtatcgtgcgctgaggagctggcggagaaggccgaggaggagaggaagcgatcggaggaggaatgtggagggaaagggcaaggaccgggagaacgtgagaaggaaaaggagatgagggaactggaggataaggagnaggagaag

SEQ ID NO: 382513 - DNA, 165 bp, Zea mays
cgccgtctctgctgtgccctgcccctgtccctgctcacccagctgcgatctctctccctctcgctgaatccctgaatttctctctctccgcctccgccccacctcggatcgggtccaagccgcggagcccactccgctgacccagcccccagaaccccaatcgag

SEQ ID NO: 382514 - DNA, 303 bp, Zea mays
cgcatgccgtctgtttcccttcctcttctctggacgccgaggactccttctctgtcttcgcacgcagcttcctcctcctctgtccaagcggcggtcgtcggagacaacctgggaacggcgacggcggatgtgcgacggacgcgagcgggtggatccagtggtcgtccaatcctgtgatatccggtgacgacgacgtctaccactccctccacttttcagcttggagaagatgggagctctcaactgggccaaagtagttcatgagcaccaagggtggcgcctcattagctgtatctggctcca

SEQ ID NO: 382515 - DNA, 113 bp, Zea mays
aaccaacactacaacagcatcctgcaggcacgcaaagcacgtggacctctgcgacgatgcctagctcgggcgacgagacttgtcagacggtactctgaacaaccctttgacga

SEQ ID NO: 382516 - DNA, 176 bp, Zea mays
atcaccagctgtcccaatggactcaaagattgccgtgtatagtggtactgtttctgctacagaaaaggagaagttcaaggagcagcctagttctttggggtgtttgaccacaggagaaactcaggataaatcaggtaaccatccacatgctcattcactgaaatgccagactgaaa

SEQ ID NO: 382517 - DNA, 303 bp, Zea mays
gcctgcccctttccttgtgtgacttgagatggattggcgaatccatggatccgcgaatcgccggtctgccaaatccgccgcgaataccgcccgcggaggcttccttctatggcgacgaatcccgcgctccatcctcgaatcaccggcccttcatcacggtgactactgctaaagggagtggatctgcgcggagcatcttcttatccccgcccacgaccgccatccattgcatcagaatcccaagatttctcccctccgtgcaggtgcagcagccagcgcgcgcgtttctacaagaaacagaga

SEQ ID NO: 382518 - DNA, 161 bp, Zea mays
  unsure (1)..(161): unsure at all n locations
cacgcgttccccaaattcgcccacgcgactagaaatccccaaatccgcggcggcgccggccttcggactcgatccgcctagcgagtcgacgccatctgaacggcggagcgnggcaccagccaccacgtgggcggcatcgtgcctggcgtcgtgcagcgcgg

SEQ ID NO: 382519 - DNA, 283 bp, Zea mays
  unsure (1)..(283): unsure at all n locations
tcctgttttcccccactgcccacgctagccaagtccaggttctgaggttcacaaatcacaaccctagttggcggcgctcagatccggtggcatcctcctcccgcgaccctgtagctgcctccgacgacgaccttgtagcggcacagtgtggcggcgatcgagcaatactgaagttaaagaagcagcagaaccatggnctcccgtatcttgggacagggggacagtgagtcttaggaggaggacgcggcagaacttgagtcagaacatggcagtgatagtgatg

SEQ ID NO: 382520 - DNA, 291 bp, Zea mays
ccaccaactcggtcggcccttgtgcacagggcgctatctccctgctagtggtgacctcattatggccagaacgtaatcgcgccaccgcaaatcgtcgtcgtgtttagttttcatcgtcgaccagccagcatacgtcttccccgagcagtttcatgcacccaccgagaacatggactgtcagagctcctaaaggaagaggtggaaatccagaagaagtggtttctggagagaagtctacttctaaatctgttcctcaagtggattgagttgtctaactaattatgtggtaga

SEQ ID NO: 382521 - DNA, 291 bp, Zea mays
gaagacagctcttgtgttgaagaacaagaagagtctggctgtagcaccatctactctgctggcaaagcccctggctgtgatgctaaaaatcatctcactgaacttggggcttttgagctttctgataacttggccaactcagcaaaagaagaatactcaattcaagaaaatcaagcttatgaaagtgtgttgctagattctgaagagatgtcaaggaatgactgtgttgatgatgaatctacacattcctgtgttggcatttatcaggatgaaagagtgtccacaagggga

SEQ ID NO: 382522 - DNA, 132 bp, Zea mays
accgccgccaacgtcgcctggcggccgtctgcagctccgcgcctctgctcggaagttggtgaaggtttcttgaagctgagaagatggtgctgaagacagaactctgccgcttcagcggccagaagatttatc

SEQ ID NO: 382523 - DNA, 289 bp, Zea mays
gccgccgtcgctctgcccgcattcccttccacaacaccgagacgccaggatgacggcgcagactgcggaggagctcgccacccagatcgagcagcagaagctcgaggagcagaagaccgaggtgagatttcgcacacactcctcccgaacggtccgaatcagaaggggaatcgctgtcgcataggctatggatactgcagtccaaaatagatttgatgttttatttctagctgcagatccacgaacttgaagtagaatgatttcgtaggtgggtcttgctggaccatgt

SEQ ID NO: 382524 - DNA, 99 bp, Zea mays
cagatagtgatttgcagaaaagtgtagagattaagacccctgaactcatagaaaggatgagagtaacatgtcgaattgcaagagaggttttagatgcag

SEQ ID NO: 382525 - DNA, 285 bp, Zea mays
gcagcgggcgagggttacgcgaagcgaacggagtagtggaagcagaggcggcaccatggccgtgatggagaagctcaagatctttgtcgttaaggagcccgtagtcgcggcctcctgcctcatcgctggattcggtacgcgcccttctttcccctccgcaaaccctaccagatgtgcgccgtgcgcgcgcgcccttggggcgcacgtaccttgctttcggtgtgccttggcttagctctggttgactgacgtgaggtaggtctgggaaggtacggcttgtttgct

SEQ ID NO: 382526 - DNA, 309 bp, Zea mays
gcagagtattatgtgaagcaccctggtgctgcacgtgtttattatcatatgcttggtcatgatgtggcgagacgggggatttgtcttcagcccattttgaggttctgtaaaaattcaactgtcatcattgcaatgagcagcgaagtaatcatggtcagccctgtcgctggcagctgccgaaatgggttgtgtgcatgtggcatgccgtggttggcaattggttgttgagaagacattgccattagcttagccatgtgccgtgtctctgggagtgtcaagacgtgcagggcaatgttagctggtgtatgt

SEQ ID NO: 382527 - DNA, 211 bp, Zea mays
acccgggcggctggaccggaccggaggccccgacggggtaggtggaactccgcgccgtgtactaaaactctccctgcaaccatcctccacttcgccgttctttctccctcagaccctcaccaaccaggcaaccaaaccttctccgatggccgcgcacgtgtcgcagccgccggtgtccgccagggcgtccacacggtttctcccccgcggg

SEQ ID NO: 382528 - DNA, 305 bp, Zea mays
ctcagccgtacgatcccctcagccacctggttctccttctccttcaccccccagctctccttctccctccccacatctctcttctccctgcgtgccgccaccgccgcgacttgcgagtccatataattgttaccatttataatttcaatcgtatatgaaatgtcttctgtccttaaaaactccatgtgaagacatgattcctatttcctaaagaagggcagacctagtgtagtggtgagagctgtctcattgcatcagatcacagattcaaagcaatatcttcgcaatttatgagagaacgttaa

SEQ ID NO: 382529 - DNA, 196 bp, Zea mays
cttccggtcttctcttcaccacaaccacacccgcccgccttcagcaccacagctgccccgccgctaaccaaccactcgtgcgccacaactctcccgtcgtggaatattgcaaaggccacgcatctcgcttctgtcctcgtcgaggggatcggagaaaaataggctcggaggcggactgcgacaggatccgtggccc

SEQ ID NO: 382530 - DNA, 296 bp, Zea mays
gcctcctcccatcctcctgcccccgatcttcctcctcttcctcgtcgcccctttggcggcgccgcagcccgcgccgggatcggcggcggcgcgcaggaggacgacctgcgctgcctccgaggcgttaagcacgacctcgccgacaccaacgagcgtctcgcagactgggacttcaagaacacctcgggcggcgccgtcagcaattacaacggcatcggctgctggaacctgcaggagtcccgcgtcctctcgctctcgctctccgggttcggcctcgtcggctccatcccctcctc

SEQ ID NO: 382531 - DNA, 197 bp, Zea mays
tgccaccctttacacgcactccaccttcgctcctccgggcccccgaaatgtcggacgaaggcggcgccggcgagccgctcagcgaccgccagaaacgggagatcgccacctggttcctatccaacgcgccagccggcgagatccattacatcgccaaagatgtgcgcgcgctgctggggaacgacgcggtgtacgaa

SEQ ID NO: 382532 - DNA, 136 bp, Zea mays
taccacactttacacgcacaccaccttcgctcctcagggcccccgaaatgtcggacgaaggcggcgccggcgagcagctgagcgaccgctagaaacaggagatcaccaccaggttcctatccaacgcgccagcagg

SEQ ID NO: 382533 - DNA, 124 bp, Zea mays
aacaatgccaaaccataatttccaacatccaattcttgatcaatgtcattgttacatctcttacacctgtttcatgtcccaatctgaggagactcgtgttggtaatcatgtaatttttccttcg

SEQ ID NO: 382534 - DNA, 123 bp, Zea mays
acagcctctccactgcgctctgcgctccaagcacctctctggcctctgcgaaatgccgctcttcccctccaccgccgtggcgctacaccgcctcagcatcccattcccattcgctctccacca

SEQ ID NO: 382535 - DNA, 248 bp, Zea mays
gccaagagcaagagaccctctcccgatcccgccgcctcctccttcctcctcctcgccgtcgacgttgcttcgcgaagagccgaagatgctgctcctgcgggcatcgacggcgccgttcgcgtacgccaaggtggacaaggtggacgcggaggaggcgcggcacctcagggcgcagtacctcatccacaaggtgctggaggagaagagcccaaggccgccggcgccgctggcgcggaccagcaggccca

SEQ ID NO: 382536 - DNA, 241 bp, Zea mays
  unsure (1)..(241): unsure at all n locations
cggacgcgtgggttcttggagttgtcaccacatgtattaattccaatgcatggaaggattaatctatggcccaattatatgctttgtggatacctcaggcatggagaactaatcgtttctttatacaatttttttaagaaaaaagaaacgttatcgctgcttctcttctctggctcatgttctanaggctatacgtacatgttacaagttcttctattcacagttgctttttgaattttat

SEQ ID NO: 382537 - DNA, 241 bp, Zea mays
cccacgcgtccgcaggaactggtaaaatttcaaaagaagcaacctttttgtgttaccatagttctgttcagttctatgatcaaaagcttcgccatggtttccttagggtgctttcatagtgttgcctatcattgcattgggttgtatggtacagttacaatctgctatccaatgctaaacatcttgttgggagcttttgatctgatcatgaacggaaattagttacctggaagtttggcta

SEQ ID NO: 382538 - DNA, 210 bp, Zea mays
  unsure (1)..(210): unsure at all n locations
cttttatgttanaaaaaggattattgtattagtgattcatctgagtatacatccagngttgaaactgatggtacttgataatgtcaataaactaataatataatgtataacaacaattggctacatgtattgatctactattgagtaccatcagtttcaaccgtggatgtatactcaggtgaatcactaatacaataatccttttatgtt

SEQ ID NO: 382539 - DNA, 317 bp, Zea mays
cgcgcgtgcaagcaacagccatgagaagtgcgaatcgccgctactcctccgccatgctgcagacaaaaatacgccagagagagcctccatgtcattcacgctcaaagtgtataagccgcggtggagaacgaaccgtatctcattctcagtcagtgaactcaccgcggcggcgatcggcggcacgaatgtggcggcgctggaggacttggagctggggttggggccttcacattagcccccgcgatgcgcgcgcgtgcaaccaacagccatgagaaatccaacaagaacaagaagaagaggaaaatggaaggaaacaa

SEQ ID NO: 382540 - DNA, 340 bp, Zea mays
caaactgcagaaactgatagatgagcagcaaccacaatctgcactgtgctagagagggctcacctcattagcatgccttgttcggtttttcatatggcatatggattggaagggattgagctaacggataagaactttgacttgatatagattggaacccatccaatcccctcaaatccatatggattttgatgaaaccgaacaagcactaagttgaattggacagctcacttcaatccagacccctaaaccttttgtaggccttggttaaaattgttgtgaaatcagatggctactcgaggctgggcacttggggtccggaataataccgaaaccttct

SEQ ID NO: 382541 - DNA, 285 bp, Zea mays
cccacgcgtccgctccgtcaatgcgggcgggcggtattgcccgttcgcacagcgagacggcttgcacgcccatggcgaacgcccgtccagtcactgactcccagcacgccatatatactgctgcgcagttcgcgtccgagctgagctcaaatcgcccatcccgtcctctccagtctctagttctttctctacactgctgcagtgcagctagcatcgcacggatgagccgaaccagacgcatggcagcacatctcgcctgcgacttcttcttcgctgccgagccgt

SEQ ID NO: 382542 - DNA, 274 bp, Zea mays
ctcacgcgtccggtacgtggtaacagcatggcacgtgtagttagaaggttaaaaattcgcaagttgatatgcgagaacgatttcgcaggtgtatcagtgtagtatgtatagccgtatagcaagtgcgcatctcatctcgtgtacgtgaaattagttggttaggacgaacagcagcgtgtgatgttggggattactagactggtagtttcaatcaaatgtgtgatgtgtgggattatttgtcaaattagtacgtatactagagaccttactaggt

SEQ ID NO: 382543 - DNA, 159 bp, Zea mays
gacaaccttagcacgattattcgcacaattctcttagataaaaaaccagaagaaatcccactgattgttgaatcactactaaacaaagttattcaggaatacgagcttcgctttgcaaatcagaacttgatggatgaagagaagcaaaataacttgact

SEQ ID NO: 382544 - DNA, 160 bp, Zea mays
cttctcgccgcattatttgatcggcggcctgcacgacggctaccccgcgtggatggcggcgcatgagcgactcctttgcgaggtcgaggtcggcggcggcggcgctcggggcagcatggaccggtgggtgccgcagatggccacgtacagcggcacgggc

SEQ ID NO: 382545 - DNA, 147 bp, Zea mays
cccacgcgtccgcccacgcgtccgattccttgcttcccgcaatccaaagacgcctccttttctcgtctccaaatccgcaaagttttcgtccatttgacaatctcgtcagtgcttgtcaagctctagaatcaaagcctgatcccaact

SEQ ID NO: 382546 - DNA, 141 bp, Zea mays
gttccattggcaataacccatagcgaatggcggtcctgcgaggtgcaagcgatacgcggttgatgggttggggatcgagttcagttgtcatcacaaatacagaatgcctgcagattgttgctctgctctgtccttgctcgc

SEQ ID NO: 382547 - DNA, 131 bp, Zea mays
cggacgctggtcccaacccaaaccagcggctggcacggacgccggcgagccgcgcggcccggaggaccacatcctcctgcatatagccggcttccgcggccatgtcatccgtacacttctttcctgcttct

SEQ ID NO: 382548 - DNA, 147 bp, Zea mays
ctttattttcgtccaggccgtgtcgaggggtgtaagctgagagtgaatatatgtttgtgtctaaaataaagaggagagaataaatccaacgtcaccaaaacataggcagtagtaggtagaaacgaatggatttattctttcttcttt

SEQ ID NO: 382549 - DNA, 150 bp, Zea mays
cggacgcgtgggattttcttgagaatggctactcacagtacctccaacatctacaagacagtcaggaaggtgctacgccttcctttttctcttacgccagaaaaagatttgccgttatttatatggagctcagaagatgtttcaatgatt

SEQ ID NO: 382550 - DNA, 319 bp, Zea mays
cggacgcgtggatgatggccgtggtctggggcagggagtaatggacaacaagcccatgaatgttatatgatcatctcctcatggagtccaatgtctcagctttgccccaaacccatagcttgcttactcttcaaccttctctcctctcgcaccgtgttggggcgcacctgaactacccaatgcatgcttttatgagcaaaaaacctcatgaaaaatccttcaagctggttcaacagtcatttgctccattaactgcttctttgccctgtgatgtacatattgtgaacctgaaggtcccacagcccctaagattttctca

SEQ ID NO: 382551 - DNA, 319 bp, Zea mays
aatccagtgtatattattggaacaacacggacgatgaatcctcccatctcacgagaacttgtacaacgccgacgatgaacacactctggttgttgttgttgttgttgttgataacttgacgtggaagtggaacgaccctggtctttaattagcatccttttactgctgttgttacaataatatactgagaaacgagaatcagctagatataatccagtgtatattttctccttgggagccaggtcatgtggcagcacgcttgacatccaaacgtgctgttggaatggttaagaattgaaagattttctgtatttcctat

SEQ ID NO: 382552 - DNA, 138 bp, Zea mays
gggccgtggaagtcgcggcggaggcggagggagtgattctgctgcaggagaacgagaaaagaagagaacttgacgattgtgctggagctggcgcgatgaacatgaccaagcacctatgggccggagccgttgctgcca

SEQ ID NO: 382553 - DNA, 145 bp, Zea mays
attgaaaatcacatgacttccaccgcaatcgcacgcaaaaatcccgctcgagcttctatcgtctcgctccgcttctccgtgcggtggtgccgggtcgcgtcgtgccatggcgctcgcctgctcggtctcgtgcgtgtttggattc

SEQ ID NO: 382554 - DNA, 149 bp, Zea mays
atcagccacttcttagactgctgcttggtagaagagggcaagctgctgccgttcaccgtttgttgagtgagattcgtgataggaatggtctagggttagatcttgatacatatacccttctgatcccatggctctgcaaggtcggggag

SEQ ID NO: 382555 - DNA, 308 bp, Zea mays
cggacgcgtggcgagttacgagatcagctacagttagacagagagaagtttctggaagcttatgcaaaacgaccacgaatgagactgcactaggaagcagacggaggaagggagatattattgctcactatacaaggaaagtgagcagtgcagtatctccaaaaggtcaccatgctgagctgggagaatgtaataccagtatggagaatcaaacagtgaaacaaaaggtggttgatcgaagagattcaggtgccactaagaatgatgatgatgcgaatgacacaaagaataaggaatcagaaaagacc

SEQ ID NO: 382556 - DNA, 140 bp, Zea mays
ctgcttcagcctcatccgcttcgtcccatccttatcgccacgcctccgcgcacactcgtcgcccccgcctacgtgcggtcctcgcgatggcgggcttcgacgatccccgtgcagcgtccgtcagattggtcgtcgtcgtt

SEQ ID NO: 382557 - DNA, 262 bp, Zea mays
cggacgcgtggcgcacacgaggaagctgttaaccagcgccgccacttccaccgagtcactcgtggcgcttgacgcgcgctgtctctcgccccgctgtcgaggctcgcgccggctagaggtccacgctcccccccagagatagctccctccccgaggagctgaatgcagcggcgtcacgggggctgcggtaggagctcgacaccgagcgggagttcgcggagacggcagccagatccggatcgacgctcttcgccttattcga

SEQ ID NO: 382558 - DNA, 185 bp, Zea mays
cagtacggtccgaattccgggtcaccacacgcccggacctgggcggacgcgtgggcggacgcgtggggcgaaccctttgtgaatcttcgttgtccggctgtctggggcaggcatggcgctccggaagctgctgcaggggagcgtcctgccgcggataatcggcagggatttggcaccggccgtgg

SEQ ID NO: 382559 - DNA, 137 bp, Zea mays
ggactctgtcagtggcaggtgcatgaagtacgctcagacggtgttcgtctcaggcgccacatggcgggacgttgtccgcatcgccgaaccctgctgcgtctagggtgtgccgggctcgctcgtgtcccggacctagc

SEQ ID NO: 382560 - DNA, 261 bp, Zea mays
cctccagtcagcacgtctgtcgccgcgtccacccttgcgaccgacggctctcgttcacctcttcgccgccatacgcgcccgccgtctcccagcgagccggcagccgcccgctatcccaggcttcggtttcgtgttcgctccgccactgtgacagatggctgcggggggcgggcggagctagctcgccttggcgctcgccgccgcgtggagtccctgcgcggtggtctccgcctcatcgtcgggtgatcaggaacgcggaag

SEQ ID NO: 382561 - DNA, 119 bp, Zea mays
cggacgcgtggcaactccaccgtgggctcgctgctggtcagcttcaccgtctacatcatcccggcgctggcgcacatggccaccttcttgacgccggccgccacggagaacgccgtgga

SEQ ID NO: 382562 - DNA, 246 bp, Zea mays
ggaccgtggaaattggggatccgccggttcccaggaccgcgtcccagcgatggcgcacagcacacgggaccgcgacgcaaccggaaccctcttctcatcggccacgttcatcgcctccgcccgaggaccatgacggcgacgatgacgatgacgagattgacgatgacgacgacgacgacgatgacgacgaggattatgagggcttcacagacgaagagctggacaaattcgaaagcgccttcggat

SEQ ID NO: 382563 - DNA, 300 bp, Zea mays
  unsure (1)..(300): unsure at all n locations
tgtgctcatcatgctgccacaacagctgtgcggcggccgncgcagttcctaccgccgccgctgcagctgccgccgctacggctacggcggcacgaataccggcgggtcgacctggtccaagaagctcatcttcttcggccccatggcggatgacccgccgttcgacctgtaggacctgctgcgcgcctcggcggaggtgctttgcaacggactcgttcgtgacggcgcacaaggcggtgatgtagaactggtcctccgtggctgtgaatcggctcaaggacgtggacctcccggagccgg

SEQ ID NO: 382564 - DNA, 243 bp, Zea mays
cacacgcgtccgcggacgcgtgggttctagatcgcgagcggccgcccttttttttttgtttgtttttttagaggcaaaacacgctccatgctttccctgatctctacacatactagcagtatgcatacatgccatgaggtatctaggtgcagtttctaaggctaaacaaccatccctagcatacaagctactacagatgtttaatcctacacaacgactaatacttccatattccaagagaca

SEQ ID NO: 382565 - DNA, 107 bp, Zea mays
cccctgctttttttggcctctccactccgttggcgacgcatacatccggcgagggagcggaagaagtcagtaaattctgtcgctccaatccggacgaggagatgccg

SEQ ID NO: 382566 - DNA, 230 bp, Zea mays
agagaatcatcagactctgctgctgttgtcgtgatcacacaagaggcccatctaagttcgtatatgtacggatggaatatttatgcatgtatgtatttatgtttatctccctgcatttacccttagtgcaacagggtggtaggggacggttgtagtattccagatttatgtatcgaataagtgaggacactgtccttggggtgcaattgtgtatataatataataatagg

SEQ ID NO: 382567 - DNA, 257 bp, Zea mays
tgaaaaagcttcaagaggggttcaattacctcgccctgatgaaagctctgcctataacttcgctcctgcaaataggtttttttctggaatctggtcagtggataggaacgatggaagtcctccaatttttgtcagtactcttgaaaaggttgatgagacaatacctgatgatgtatagtcacaaaagtatccatcaccacctgaagcttcctacaacacaattttttaatctgctcaagaaaatggtctggcaaagg

SEQ ID NO: 382568 - DNA, 199 bp, Zea mays
cccacgcgtccgcggaccgtccgcccacgcgtccgcccacgcgtccggtacccgttcacggcgatcttcctcatcttctacaccacggtgccggcgctgtcgttcgtgacggggcacatcatcgtgcagcggcccaccaccatgttctacgtgtacctggccatcgtgctgggcacgctgctgatcctggccgtcctgg

SEQ ID NO: 382569 - DNA, 323 bp, Zea mays
cattttcgtgtgtgcacatttggcagcacttttgattaagagggtggagaatccctaacaaaagccctaccaaagaggaccttagagagaagggaattagggaaatgctttccatctattagcctcaagctttctgcaaatctgcaagtttagctacttggaatgacaattttggaactataggtatccatggccttctacagttttgttattcttcagaatcttcttatctgcggatttggtgcagatgaaggcaccgctatccacttagtagtatcttggactcaccatcagagtgtggtccttagtatgctggcatccaa

SEQ ID NO: 382570 - DNA, 324 bp, Zea mays
aaagatgatggtatcaatgcaggagtggcaggctgttgcactggccttgcgctgagctttccaggtaaagttacaggaagtagtgcaattaatatctttgaactgttttaatgtagagtgtggcagctagtggttatcgttacaacctgttcatgcatatcctgactaggactaggattacaattgtcatagcttttatgctgagctacagctaggaggcacttgctctccgcattttcttaacatttgctctttgtagttccaagtttgttcgttgatgaaaagtgagagtgcgtaatatattattagaaacgatgataactt

SEQ ID NO: 382571 - DNA, 312 bp, Zea mays
gagcttcagggttgcgaggggagctacgacggcatcgcggctgtggggcgctgctgtgcgatgcttgaggagctcaccatcgctgaccacaggatggacggtgggtggcttgccgcgctaccttctgtgggaatctcaagaccctgcggctgcagagttgcagtaggatcgacgacgaccctggcccagcggaacaccttggtgcttgtctcacgctcgagagcctgcagctgcatcggtgccagctgcgtgaccgtagcgccctccacgccctctttttggtctgtgagggacccgtgagatacagtccag

SEQ ID NO: 382572 - DNA, 109 bp, Zea mays
gggaaaacaactttggtggattcaatgttaaggcaagccaaggttttccgagataatcaagttgtgcaggaaagaataatggactccaatgacctagaacgggaaagag

SEQ ID NO: 382573 - DNA, 318 bp, Zea mays
cttgttcaaattccaatcgcggggcaagcaaaggaggaaagcaaccaaaggcatttcgcttctcctccgacaaatccatatccagaagatagcaccagtgcgtctcctcccaagctctcggatccaacccaatggaaggcgcggaggcgcttttccccggcgacggatgcggcggtgaccccatggacttctcgtggaccgctgacggggagaagcacccggacccggcggcttgcgccagcaccggccgcgacgacgaggctacctcggcctcgaccccggttccttcgccgcaggagatggcggagtccatgattc

SEQ ID NO: 382574 - DNA, 240 bp, Zea mays
cccacgcgtccgtagatcgcgagtggccgccctttttttttttttttgaaagaacttaagaactgcaggcaatctcttctttattgccaccacccccagacaattacttttctccttttagaacatccaggaaataatgaacaatgtaatcctatgaccatcccaagtacacacacaacagtgttcacaaagaacaatgaaagtacactacaaactgaacataaatttactatgggacag

SEQ ID NO: 382575 - DNA, 312 bp, Zea mays
cggacgcgtggcggacgcgtgggcgccacaaccgatcgccaagtcgcccgtatttgaagctctggcacatgatctcccctacctcgatctcgtaaaatgccgcattcttgcaactgcatagcagccgccccacgccgagctcgccgtcgtgcaaggagtccgtgttgtgctcgccactgttcctacccaagtcaccgacgtcgtcgaacctcgccagcgcttcactaaagtcacctcaccgaagcgccaagcagcatgccatcgccatcaccccagctgactgcgatccatttttgagcttcgaggaatcga

SEQ ID NO: 382576 - DNA, 107 bp, Zea mays
cggacgcgtgggaaaaatctcatcgactctctcctgagtcctgacatctccgatcgtccccgtccccggcgacgtccctctcgctcttgtcctcggtgccgcacctc

SEQ ID NO: 382577 - DNA, 238 bp, Zea mays
cccacgcgtccggcactctctctcaactcattggcagcagcaaccgcagccgcgatggccaagccggggggacgaggaaagtggccgacgaagaggaaagaggaagaacgcgtcgcggagccatggggcttggccttggcgtgcgggcggcgcgcttcacgtacgcggcgcacgcgactggccgtcgcggcggctgccatggttctcgtctggtccatccaattccgcggcgggctcg

SEQ ID NO: 382578 - DNA, 214 bp, Zea mays
cccacgcgtccgcgccttcctcttcaaccgcttccccgccgtgtatgtgacggatgagcgccctcagcaggagattgacttgccttcattcgatcgcgtggcatttgaaagtggtggatctgtaaatgaagatgtgttcaagaagacttctgggagcagtagtgtgtcgcaccatgttctcccgcctccagaaattgaactagtcctcccccct

SEQ ID NO: 382579 - DNA, 213 bp, Zea mays
cggacgcgtggagccaaatggcacttcctggtagctgctgattttctatcgacaagatcagaggtaaactgtatggggttgtttgttggtttttagttgagactgcttatttctgagaatggtgtggttatattcctttaatgatggcaatttcttcttctatagcagctcagacctcaggcaagggaggtacaatgccaagagcaaatgaga

SEQ ID NO: 382580 - DNA, 260 bp, Zea mays
gaccacgcgtccgcgacggtgcgaactggtcagcaagcgggcgacggagcagcaggagctggagacggagctcgagctgtacaggcagaaggtgcagcactacgaggacaacgagaggatgaggacggcgagcttcaaggccaatgtggtaagccccagtggcagtggcacttccgtgtcgtccagcggcgaggacagcgacggccactccgacgactactgcgagctcgtgcgactctcctgacggcggtaacgtccag

SEQ ID NO: 382581 - DNA, 333 bp, Zea mays
  unsure (1)..(333): unsure at all n locations
aacatggaacagcctaggtggtggggcgaccttgatgtcaaccagcacgtgaataacgtcaagtacatcggttggattcttgaggtaatttcttcggggcctgcctcttttcatcgtattcaatggccactgctctggccatgtggtgggtgttgttggagagatctcgctggcatggcttgaaagtttataaagctctgtgtacttgtgcttgtgtaactccttgctgatgaatcatcaattggtagtctggctgggtctgtatttgaanaacagacgttgctagtacggttgatcagctgagctgcttcttgatctttgcctagtacgaac

SEQ ID NO: 382582 - DNA, 323 bp, Zea mays
tgtgaggcttattcccagtggaacacaaattgttctttctgtgaagtcacaacaacatgcgatgcaatgtgatgcgctggcagatgaaataagattgatagtcatcgtgaaacaaagattgagataaaagcaacagctgatgggcatgctcatgctattgtttcatggtgggtgcttcaactggattcttctggatcagtcttttactcaactgctcctagatgggtgagacaatccagtggtgtcgatttaccacaatatgccaatggcacgaaggattggtgtgatcattggaagcagtgtgtatggtatatacaagggac

SEQ ID NO: 382583 - DNA, 301 bp, Zea mays
aagacggtgacggtgcgctgcggccactgcgccaacctactctccgtcaacctccgcggcctcctgctcccgcccgccgcgccggcgccgcccaaccatctcaacttcgctcactccttgctgtcacccacatccccgcatggcctcttggacgagttggctctccagcaggcgccgagcttcctgatggagcaggcgagtgccaacctgagcagcaccatgacgggccgcagcagcaacagcagctgcgccacaacctgccgccgccggcgccgatgccgcagctcagctgtgcacagaa

SEQ ID NO: 382584 - DNA, 266 bp, Zea mays
cccacgcgtccgcccacgcgtccgcccgcgcgtccgagcagaaggaagcagaggggatagatatgcaagcggctgctgcgcggctgcctcgcgttctcaccgagatcgacccgcacagctagtgggtgcacggacgcgcgctcgacgctatcatgctggacgtcacatggttcagcagagaccagctgaaggtgcaggtggagccgtgtgtgagcctcaatgtcagcagctaccagggcgccgtcggctgtggtggcgtcatgcag

SEQ ID NO: 382585 - DNA, 323 bp, Zea mays
cagccgcaagagggtggacgcggaagacgtcaaaggggattccaccggcgggaagcgattgcgagtacttatggttgtccctttggtgagggctgccattttgtccattacttccctggtgactaccgggccgtttcagaaatgaccaacctgggtggcgcaacaatcgcacctcctggaggaatgatgatggatgggccacctacacccatcgtgaagactcgcttgtgcaacaagtacaacactgcagagggatgcaaatggggggacagatgccactttgcacatggtgaaagtgagcttggcaagtctatgatggacaa

SEQ ID NO: 382586 - DNA, 284 bp, Zea mays
gatttgctgcaaagattgaatctgttggaaaggctctgtggcctgaacgaaggtcttgaattgataaggagagaaatcgggatacggatatcagactgcaatgcactttcatcgtatgggtcttctttgctcccgttgtggatgcatgctgaggtgcaccttaagcaactagactcttccatttccaggatggaaatgagctaccatgcagatacagaacataggaattctaagacagaggttgttgaacacaatgcacctgatggagctgacctgacaacacc

SEQ ID NO: 382587 - DNA, 202 bp, Zea mays
gcgacgtgcatcctggtccggccctccgcgcacaagcccggcgcgcgactcatcacgcatgcgtcgacgccggcgccgtcgacgcgttccacaaggacatgatgcggctcgactgattattctgctgtttgttaatccagttgcataatttaattcgttcgttcgttcgttgctgtatcgcatgactagttctagatcgcga

SEQ ID NO: 382588 - DNA, 130 bp, Zea mays
gtagctactgtggcaagcttgtgtcaaatggtcgagaggcgcgcattcagtcttcaatccatgagagtgttagttattgatgaggtcgattttattttcgggtcatcaaagcaagtcagctctcttcgca

SEQ ID NO: 382589 - DNA, 207 bp, Zea mays
aataagttaacaatttgcttaagctagaataaagttcatatccttgaaagaggatggatatcatctccagaggagcaggataaggtctctgaatcccttccctctttctacaaacattgaactcataaagcagaggagcaccgtccgaataaagatgaaagtaaaaaaaaaaacaggtgaagacttgtctcttgcagcatgatcagg

SEQ ID NO: 382590 - DNA, 318 bp, Zea mays
ggattgtgtgcgggactatgaggtgcttcggaaggagtttcccagtgacaaggaggttgctgaggcattgttccatgcccaaattgccttgaaggcgactcgtggtgaggatgtatcaaatatgaagtttggaggagaggtggagatggtttccaatgtagagcaactccatgctgccataagttcgcctggggtaactgttgtctacttcatgtcgacaatgaatcagcaatgcacacaaattacaccatcgatcaacattctatgcactgaatgcccctcagtgaattttctcaaggttaacgtcaacagcagccc

SEQ ID NO: 382591 - DNA, 314 bp, Zea mays
ggacctgggcaactaatcaacacataagcacacatccaaatgcccccttgagagcgagcgcacacactctctctctctcttcttcaacctcctcctctctcttccctgcattcttaggcttacatacatggcatacatggctcagcagctcgtcgcccggatcacaatggaggtggcgccatcgaagctgccgtcgacgatggccaggtgcgctaggctcccgaggaacctcgacacgatcgcggaggacgacgacgacgacaaggaggcagcagccatggagtcgacaagggagctgcctctccgcaatgcga

SEQ ID NO: 382592 - DNA, 247 bp, Zea mays
attccatgtcgcatcctttccgttgatccgattcttacctgttgatgggatgcgatttggatttggggcgccgcgcttttcgtgagactggtgactcagatactcagatgtcgatcttgctccgcacctagttgatagcacctccttgaatgggatataatgtggtttttcagttaccaacttgcagttctactactccgcggtttggtaaatttggtatagaaactacattaagcctaaggttgtg

SEQ ID NO: 382593 - DNA, 304 bp, Zea mays
cggacgcgtggctttggtgatcttggagatgtcagcttagtgcaaaagaaggcaccaagaaaagtcacgcggaagagaccaatccctacagaagatggctccactatagcgtatgctctttacgcagttttcccttacaacaatatctctcgaaaagtttgcagtatatcttttttcatttgttttctagagcagtggaagtgtatgtactgacatgacatttgcttaatccttcagatatgaggagtatatagattacattttccctgatgaagttgctctagcaccaaacctgaagatccta

SEQ ID NO: 382594 - DNA, 163 bp, Zea mays
cccacgcgtccgcccacgcgtccggggcgcccaacatcaacgtgttccgggacccgcggtggggccgcgggcaggagacccccggcgaggacccgacgatgaccggcaagtacgccgccgtcttcgtccgcggcgtgcagggctacggcctcgccggccccgt

SEQ ID NO: 382595 - DNA, 248 bp, Zea mays
gaacacacacaccgtttgtgagcaagacaagacaaatcgctagtggaggagcaacgcgctcaccgcctagcagcaagacacctccgctaggtgtttccgccgctgaccggggcattgcggaggcagcaagccacgctacagcgcggcggaacgggagctcggctgcagcggagcgccagtccgggtggcagcggctgatttggatggtaggttgccgagctggggtgcagatctgaagatggccgacg

SEQ ID NO: 382596 - DNA, 333 bp, Zea mays
ttcagatatggttgagggagaagcagcagaaagtaggaaggctatccgcagaagcaagataacgagcttgttcactgcaaacgacatggttttctgtggtacagaaactgggttaattaaggcatggataccgttgtgaagtgtagaagcaagaaggagcaggtggaaggcttaatcttgtaaatgtacaggaaagctagagtgtacaggaaacatgaaaaagaggagcatactattgtacaagccctcaggacacaacacagcagctacgcggttcgttcataaactcgatggatcagcaagtgtcttcgacatggatgagtagtaggtcat

SEQ ID NO: 382597 - DNA, 332 bp, Zea mays
  unsure (1)..(332): unsure at all n locations
tcgggaaaagtggatgcagaggatgcaaatgaggctggagaagatggtgctgcggaggaaggtanaggtaccgatgtggagatgaaagatgctgaaaatgctgaagacgagaagaaagatgtcccaagtgcagagaagactgaggaagttgacgataagaaagatgctgaaaatgtggagatgaaagatgctgcagagaagactgaggatgttgacgacaagggcgcggagtattcaggccaggtgaacaccgctccccaagaaccgacggcagcgaactgcgacaaggggcagatcgaccctgntgcntctgctgtcaggtgcacataagg

SEQ ID NO: 382598 - DNA, 304 bp, Zea mays
gcccacaccataccataccatatcacaccagccttcctcgcgatctctccgtctcccgtctccaccgcgccctcctccccaccggattcggaggcgattcacggggccggtgcgcaggttgctgctgcgcatccgcggaggttgactaccatggaggatctgggcatcgaggcgaaggaggccgcggtgcgcgaggtggcgaactgctcccgctcccggagctcctctcttctatcgcctccattaaatctgactacctcgcgcggcagcagacaaatgatgcacaactcagtacaatggtggc

SEQ ID NO: 382599 - DNA, 322 bp, Zea mays
cccacgcgtccgacggagggcagtatgctgatgctattgtcaatccggatggtggcctgccaccgccaccatccggattgacaatatcagctgccaaggccaaagggatggatagctacaagggagggcagtatgctgatgctatcaagtggttgtcatgggctgttgttctaattgagaaatcagggaaagatgctgacattgttgaggtgttgtcttcaagagcttcttcatataaggaggttggtgagtacaagaaggccatcactgactgctcgaaggtgctggatcaagataaggataatgtctcagtgctagtgca

SEQ ID NO: 382600 - DNA, 256 bp, Zea mays
gcgtgccaacgctcgtgaccacgcctccgagggattacatgggcttgtagcagctcgcatcgtcgcccaggactccccagccaattccgcagttccgcgtgcgatgaacagggaccgctgctgtgctctgcctccggtccattcctgcgctcgagaaccgcgactccctccgtgcgcgcgttgttgatcttcgagctccgctctgcatatcagacgagattttcttatattttggtgaagatgaagagaaaggtgc

SEQ ID NO: 382601 - DNA, 214 bp, Zea mays
  unsure (1)..(214): unsure at all n locations
ccagcttgattagcaaactgacgaaacagnataaaaccttattctcaaacaccagatgttgacagtaacactagtagcactgtcaacatctcgtgtttgagaataaggttttattctggttcctccagctgttgacaatgctactagtggtactcagcctgctgcaaaacttgattccatatcggcaatgcctgaatacaaagactagagtcat

SEQ ID NO: 382602 - DNA, 305 bp, Zea mays
  unsure (1)..(305): unsure at all n locations
gcgccggcgcggcatcgacggcgaggcggcgcacgggcaggagcactaccggggcctgcagggcggcggcgggttccacctcctgcgtgacctgaccgggtgatcgatctgctccatccacggcccgtgcatccgcggtcggccgcgcgcgagctctagctgcgactccgagtgagctgagcgatggggacgtcgtgccggcgcctagctagctaccgggtgtccgcgccggattcatggcacgcactcgatcgcgcgtgcgctcatccggccacagcggcgctgtgtacgtacgcancggattt

SEQ ID NO: 382603 - DNA, 312 bp, Zea mays
cccacgcgtccgcttgccttggcttttgccaagcgtactcttgttcgatgccacaaatttgacgaaacagggaaaagctgcttcagtgagccttctctttggagtgtgctgtctgcacccttgccaagcagtgacgcgagattcacggagggtgtagagaggctgaagcatcagaagctcggcggaactcgagttgatcgaggtggtacgagataaaagaaggtcgacagggcactgtctcacagcagggatgcgtctgcaaagggctctggactgaaatcagggcgccattcctcaggcggcagcggcagg

SEQ ID NO: 382604 - DNA, 191 bp, Zea mays
ggcgtcttcttccctgcccctgtcctgtttttctctgcgcaggatttggagccctgccatggccgcaagctcgctctgccccctgcttttcctgcacgcgtccgttctcgcgccggcgtcgatctcctctacgcgacactcctttcctcctggtatctcagcgagtgggcagggtcatttttcggggactc

SEQ ID NO: 382605 - DNA, 326 bp, Zea mays
gtagctgcagtacggtcggaatccgggtcgaccacgcgacagaacggtccgcgacggtgcgaggatagtgtgtttcttttttttacactgtacagtacgtacggtagaattgaaggataggcacttgacgcaagtgtgcgtgtgtgtctatgtacagagagctcaacctcacgctcgttttttcaagcacagaacaaaggtgcaaaaaaaaaaaaagggaaacagcagcacacaaaagcatagaattaaacacctctctctcagtctctcttcttcttcaacctctgagtcctcctttttttccttttctgaaggaatataatgga

SEQ ID NO: 382606 - DNA, 338 bp, Zea mays
  unsure (1)..(338): unsure at all n locations
ctggaagtagacagctcatacaaacaggcagctatccttcgggagaacacccaagtgagacctgatccattgtacacaacatcaaggcataatatgcaacacgctttacgagaaatagagactgttttgatggcacctgatgctgatgatgcagccactagcaccaagcatgaatttgaggaacataaacctgctcagctgatgaggcagcggtcaaggacatggagtcatgaatctaggcagccatcaccaggagttgtacggacacaacttgcatctggatacccacagcaagctatgagtccgnccagagaacggctaagggagttaaggaggat

SEQ ID NO: 382607 - DNA, 284 bp, Zea mays
  unsure (1)..(284): unsure at all n locations
gtcagcgtgacgccggcggtggcggcggcggaggtgcaggcgcgggagacggtggcggcggttatggtggaggcagcggcgttggacgttctggcaacgcagtggggagcggcggagggtatggaggtgcgagtggtagtgccggaggtggagcaggcagtggagttgggtcagccggcggagctgttggcggcggctctggangtgggggtggccaggttgaacaatttattatattttatatatctatttatgactcacaatatactattcatatcatagta

SEQ ID NO: 382608 - DNA, 135 bp, Zea mays
tcccaggctcacaacccggccataactgacgacaaggtatatggagattattagagatatagcttgtatggttttgagcatctcgtgttcctatcactgaattaccgtacaaattaagtataggaaagtttcctc

SEQ ID NO: 382609 - DNA, 265 bp, Zea mays
  unsure (1)..(265): unsure at all n locations
atggaagagcaaaaggtcctttgcctggattgtgggaacttgatttgaggtctaagtttcctgtactttttgtaccagagaaagaagtgaccgtcaagattccacattcagatattattgaagagtgctcaggtactgtgtattttgctttcagtcncctctgattttcctttaatgagagaattagatttgtaccactattttaattatggatatgatatgtgacattgctttcgtaatatgtggcatcatgacactgatgtgt

SEQ ID NO: 382610 - DNA, 232 bp, Zea mays
  unsure (1)..(232): unsure at all n locations
tggaanagggcaagagccagaaggcatcaccgccgcgacgacgatggcagcctcgctccaagccgctgccaccctgatgcatccggccaagatcggcggccgggcgccctttgcctcgctgccgtcccgcccgtcgtcgcaactcgcctgctgggcgttcggcgtcgacgcggcgccgcatgatcacgtgtccctgcaggacgtcgctacatgtgcgcgacgcgcgaactcg

SEQ ID NO: 382611 - DNA, 340 bp, Zea mays
cggaccgtggttctagatcgcgagcaggccgccttttttttttttttttgataaaaagtgccatagcatactccaaaacttgacagtacagaacagcatccaggacaaaacagaacccaaaatcgactccggcagttcttagctataatatagataccgcatttagacaagcacccgacgagtagagctctccactcaaaccatcctaagcctctactgtctcagttggggcctcgagcacaaggcccttggtgggctttgccagcaggtcggtgtactgctggaacggggccatggagaacttggtctggctccagaattcaggagtgaggaagccgta

SEQ ID NO: 382612 - DNA, 177 bp, Zea mays
cggacggtggtcgagacgcgtgggcggacgcgtgggtttttttttttttttttttgacaaagtattaggctttgttcaattaaacagatgacagatacagattattctccgaactgttgatatttcaaagcaaaacaaacaagtcttggttccaattgtacaggaaacaaaagggca

SEQ ID NO: 382613 - DNA, 313 bp, Zea mays
tgaaagttcctccagggctctcaatagctcagctgaggctggcgctcgtagaaggatttccttggataagcaaggtcctactgtagttcatcaaaaaccaggtcctttgcagacagtttttgaactacctccagatgaggcaagtaactagtacaacttcactcattcatgcatgtatctaataccaatggttccaacttgcaatagttgtttccttgtcttgtacctttcaggttgttgaccacagttactcatgtgcacttgagaggtcatttctgtatcatggacgcatgtatgtctcttcatggcatat

SEQ ID NO: 382614 - DNA, 161 bp, Zea mays
aaatttaaggttagataggtataattctaatataatgttcatccaaactttcttaaatttgatcaaaattgtataaaaaagatatactaaaatttaaggttagatatatatcattacatttgtcatggaatatattttagttgcagtttagaatttcatcg

SEQ ID NO: 382615 - DNA, 236 bp, Zea mays
  unsure (1)..(236): unsure at all n locations
ctcatcaatcatcggtagggttccggcgattctccatggccggccgccaccgatacccgctgccaccttcctttcnccgcgncgccgctgccgccgccggcagtcgtctgttttctncgctnctttcncanctcncgccacaccatcgcctcgacgactaccgctactcgctgcgcctcttcccgcaccatcatatcgacgacttccgcgatccgtctcgcctgctgcctggccac

SEQ ID NO: 382616 - DNA, 305 bp, Zea mays
cgagaccaaggggcgatcacttgaagagattgaacgggaactaagtgtagcagaatgatgtgcttttgctagtcatgctgcggcgccgttttggtgattttgagaatgcaaccaagcacacaaccgagcatccttggacctggagactttctagtttcatgtagcagttaccgatcagattcagaaacaatgaactcgtcgatgtttctggagataagttttcgttttttgttctaaaatttcttgtttctcttgtataggagactttgagatagtttcagctctaaagacgtgaatatggagca

SEQ ID NO: 382617 - DNA, 156 bp, Zea mays
cctttctcttcctttcacctgcctgtctccgccctagatctgagatcaagtggctagctctcccatatgaagatgtactagctacacgcgcacgtatggtgggctctgcaaagcctaagcgtcactgggtagtagggtactagtagcactaggggt

SEQ ID NO: 382618 - DNA, 321 bp, Zea mays
  unsure (1)..(321): unsure at all n locations
cagcggatcacgtctcccatcaccaaccctctggatcctgattatcctcgtcgccgccctcttggatcccagtctcctcccacgccctgcacccgccctctccagccaagccctgcacctgccctagcccccaccatcaacggccacggcaccggcggcattgcaggggctgaggtaggggtcatttttgctgttgttgccgtgcgtggccgccgctgggtgaccctcctgcgacgacgacgacagagacacgcagttgctgccccactgctacaggtcctcgagctaccgggggnatgaagtgcgccatacctagtccga

SEQ ID NO: 382619 - DNA, 267 bp, Zea mays
  unsure (1)..(267): unsure at all n locations
cttcctcttccattgattccagtcaagatcactgactgttaccagccagccagncgttcgttaagaagatagctatcgagcaatatatatatagatggagaagggggaagatcagaacgaatagatggatatgaggggtcaaacgcagacagcttccgctgggggccggtggcgatgcgacggcgctgcggcgaggtttttgtggtggtttgccgtggtcctcctgctgtggcatttaccgagctcacgcgcgcttggcttcttgag

SEQ ID NO: 382620 - DNA, 308 bp, Zea mays
ctcctctctctcccaagcggctctccctctatctcctcgtttctctgccctcctcttctacagccgctgccatgcaaccgaccgccgagcagcgcaccacccgagcgccacgcccgtcgcgccaggaaccagcgtccctgctctcgccaggacgccacgaattgctcgttctatagcaagcttatgagttcagcttatattccattgaatatttgttgcagtgaagagacatgagagagcaccttcggttgtcagcttcagtgtatattccattgaatatttgttgcagccgactcatctctgtttcg

SEQ ID NO: 382621 - DNA, 311 bp, Zea mays
ggctttgagttgctgctggaggcaggctagagtgcacaatgcaaaacattgcagatgattttatgaacacttttaactacagatgcagcaaaggaatagaaagtgagcttaacactttcattgtatataatgaaaggacaagagtcacttcatcagctagaaggaagctgaaatcagaagacagatcattgcaccagactccggagggttcactccttgatattatgcgtaatgctcatgacctcctttccagttgcggcatagatattcccatggttcaagacaacagtgaatatatgcattctggaccg

SEQ ID NO: 382622 - DNA, 249 bp, Zea mays
  unsure (1)..(249): unsure at all n locations
nggagaagtagatctgcatctgcgagaggaggcagcgggggtggtgatgatggagagccagccgctgcaggccccgacggccacggctccgccccccggatctgcggaccagccggagctccgcggccgtcaccccggcaagagttcacgcgcacgcgaggcctcgtcgtcgtgccatcggggaacgtatgctcactctcctcgcatcactaccgcatatcaccagaaaccctagatgacgttcatgtg

SEQ ID NO: 382623 - DNA, 329 bp, Zea mays
actggttgcatcatatggcacaacaagcatttcccatcatacgaagcaagagccatgaagctagtctgttcagttgaataagagaatttatatggtcttcgtttatggataaaggcaatgggggcatctgactcatgataccaggcgtttatggataaaggcaatgggggcatctgactcatgataccaggcgtttcgctcattctgcttaaaattgttttgatgttgttactcgtgcggagaaaaagatctgtgttctccactgtcttgaatgtttcattatttgcagaaatctggttaagcaactgattattttcctccaggagacg

SEQ ID NO: 382624 - DNA, 321 bp, Zea mays
cgcatttgccaagccggagcactccatgtctgggaagcaactggtgtctaaggttaggagcaggagcagaagaatcacaggatctgacatgcaattgcttgttcatcctctggatattgagaaactagagagggcatccagaccttcaagtgctccacatcagtctgtggatgcatttgatacggactcaaaaatgactgattcagacacatttcacagagatgtcaccctcgatggtttatctgacaagtgtcccgaatggatccaggacgttttgaatgtaatcatacacaagcatcaaagcagtaagataagcattgc

SEQ ID NO: 382625 - DNA, 303 bp, Zea mays
cggacgcgtggccagactaaacgggaactgaatcatcatcactaggtagattggtaggtaggtagaagagacggaggcgacctccatctgctgcgtctcgaccgtcctccggagctagccccggctagttgcagcagcagcagaggcagtcgaggcagcactcgcaggtctcgtagcagcagaagcagcacgcatgtcgtagcgtagtacaggagagatgttttactctgtcagttccagtttgagcattcgtaaaccaaccaaccatggtctgaactctgaaaaaaaaaaaaaagagagaag

SEQ ID NO: 382626 - DNA, 318 bp, Zea mays
  unsure (1)..(318): unsure at all n locations
gcccaatacagatcaacacttgctaaaacaaacaagctagacagagagtccatatggtggcacttgggaaaagatccagaattagcaagagaatggtgtcgcgaggcggcggcggccgttccagctcatggtgctgaggcggctccgggggctcaagaaggttattgtgccggaggggggcgctcgccgcaagccgccgccgacgtggtgctccggcaagctgccgagtacatctccgcgctggagcagaaggtggccgttctccggnagctctctgacatgtacggtgtgtagcattgcacatgtgagactgcactg

SEQ ID NO: 382627 - DNA, 204 bp, Zea mays
cggacgcgtggtctttgcttgctaaataatactgtcaaagaagacttcgtagtctggatggcacttccaacgccgagtagaaaagctagttagcccgtggtagatcactccgttttctactgggcatggaagtaccatccagactatgaagtctgctttgcttgctaaataatactgtcaaagaacaggtcgactacatttttg

SEQ ID NO: 382628 - DNA, 310 bp, Zea mays
caatgccctattttttttttcttttggcctgaataattagagagactgcaaacagtaagtaaactttgacctatctacttcatactgaggaactttgttgcttcaatataatcgctgtactccacacttgcctccaggacattgtcagtcagtctgtaattccttattccctataaggactaaagaagcactttgaaataatgttctgtgtagtaccacagtaatgcatactccatctctggatgaatcaacttctagagttgcaacagtttgatcaatttcatacaaaaggtactaaaaactctgacaa

SEQ ID NO: 382629 - DNA, 307 bp, Zea mays
tgcctgcccaaccgccccacacagcgcacgccgcagcagtgcgccgcgttctactcgcagccgcccgtcgactgcgccgcgttccagtgcaagccgtttgtccctgttccgccgccgccgccatcataccccggcccgttgccaccggtataccctatgccgtacgcatcgcctccgccacctgcgcagtaccgacgattcgtcgaggagggagaagcactatcactttcaccttaattcaccaccaccgctgctgcgctggatgaagacagcaaagttcaccgtcacaattgtacgtggtcagtca

SEQ ID NO: 382630 - DNA, 287 bp, Zea mays
cagacgcgtggcggacgcgtgggctctgctgacgccgccgccgccgggagccgtaccccgggagaacccccagccctacatcaaaccctaaatcaaaaactatccaaaaaaatccgcaaaaaactagaaaaaatcccaaaaatcaccacttgattggagatggcggcgcaagggcaggcggcggctggatccgcgtccgagtctggcggctcaccggctgcctcagctgctgcagcggcggcggctgcgttcccggcgacttctctctacgtgggtgacctgcacga

SEQ ID NO: 382631 - DNA, 145 bp, Zea mays
cggacgcgtggcagcagccaaaggacaagacaagagacacaacgaaaggagaggatccaagagaaagatcgaggagagaggagccgtcgcttttggacttgcaccgtcgtgatctgtcacgcggcgacatgaggatccagccagc

SEQ ID NO: 382632 - DNA, 318 bp, Zea mays
gacgaacaatgctctattcgaacacacaaatgctctcggccttctctctccataggcacacaaatgctcctcaacatatcaaccaatcgaacccaaacactcctaattgagcatcagagtgtgcttccccttttactcttggttcacataacgaaagtcaaaacgaacacctgattacatactgtaatctcaatctctctctcttttttttttgtattcactctcgatcatgagtccaagcaaatcataaactgtacagtactattcagcaccaaaaaagaaagaatgtgcagaaacgatggaggaaaaaaagaggac

SEQ ID NO: 382633 - DNA, 318 bp, Zea mays
cggagcgctggcgtgacgcgtgggccgcccgtcgctcgcacgcgccgaccgccgccgccaggtgccacggagtcgtggacagtctgcttcggcgaggagcacccgccgagccatatctctgcaatgggtgactacgcgatccagatgagcgccaggctcattgaccagcttgctcgtgaggacgaggaggtgagacggaaagccgagaagcgcaagcctaagaagaagcgcaccgtgcagccgcatgaagagcccctggaattcccgagaggaccaaagacgacagaccttgctagtgctcgctggtggcctctgcag

SEQ ID NO: 382634 - DNA, 337 bp, Zea mays
tacctgcagtacggtcggaatccgggtcacaccggtccgggacctggtgacactgaagctctctttgtcggtgtgcatgatcgcttcttcagctgctgcctcctacagttcaatcggcgacggttctactcgtaccttgattcaacactgtgagcttgtgctggtgtagacctgtgaggtcgacatcacaggctgtagaagcaagaaagttgtggctaatggtcataggtgttgctgtgaagaaactggagaacggtgcgtttacttttgctgaacaagctgtagatattcagcgacccatcttttctgggtgatcagagtttaagattcccgcttt

SEQ ID NO: 382635 - DNA, 210 bp, Zea mays
gacgaataatctcttctgtcagctcactaacaccgatctatcatctcgctctgtcctgcaacaatggcctctcgctcctcctcccagcagctgggcgcggcggtggcggcgtcgctgctgctgctgctggctgcgggtgccgagacgctactgcggcggtgatctgctgcgaggtgacggcgtcgtgggcgctgtgcctcgggtacgcga

SEQ ID NO: 382636 - DNA, 311 bp, Zea mays
cccacgcgtccgaggagggcctccgcgagccagtcccgcggctcgtggtcccgatcggtcgactcggacgaggagatacttaacagcgagtataagacgaagatgtacgcgctgtaggatggatagcaagtgtaacatgacggattcttttgtacataccagtgctttgtttcgccagaggctgctccatggcatgcggcaccacatcagtcttcttcaaccaaaggactgaaggcccttcctgcggaaccaagttcaggtcacttgaccggtgtgcctgttcctggggagtgagagtctgctcaactgtg

SEQ ID NO: 382637 - DNA, 254 bp, Zea mays
ctcctttccctgctccctccaaactccaactaaacgccattggtgaatggatctcaaggaggtcaaactgatgcagagcaagttggacttttcagtcagtggcctggccttgcagatggctcccgcgaccgcgaggctggccgacgaggcaggggcttgttagtagtccagtcgctgctataaaatagagcggccatgaaccgtgttctcgcgtgtgcgtcttctctgctcacatgccgcgaggtgctccagga

SEQ ID NO: 382638 - DNA, 307 bp, Zea mays
caccgttcaccatacaagaagttggctatgccaaggtccactgaagcacagcgatttttgctgcctgtttctgaatgtgaatttaacatcacatctgcaatagaggacctgagctccatgtctgcatgtccacgtgggcaccgccctttaagggcaactggcgcacgatttctactgctattgctcttctagagggttgctgctcacccagtactggtggtcggattatggtctttacatctggtcctgcaacagttggtccagggtgtgttgtggaaactgatcttgggaaagcaattcgttctca

SEQ ID NO: 382639 - DNA, 318 bp, Zea mays
cccacgcgtccgccagctgttcagcgtgccctgcaggctgctcgaagggctgcagacagcgcctttcacctcccaagagtacaagagcaggtgaacaaggccgtcatggctgcaaacagagcggctacagctgcccgtgtcgctgcgatcaaggcagtgcagaacaggatagatggcaagctctgtttcatcgatgtgtgaattgggttcaagaattgtgcccttcacctgttaacaggatagactagccaagagcggcagtgactagctgctgagtttcgcgaccggagcagcacaaccgcatgctccgtgttggtt

SEQ ID NO: 382640 - DNA, 199 bp, Zea mays
ggtcaatccgccaagagaagagacccacggcacagatccctctcccctgtctctctctttctctctcctcgaccctcccgacgcgaaaaaataccagggaggagaggagggagtaagggaagaggaggccgaaatctcctcccctttccaaatcctggcccaataatctctccatcaggggatcctaaggctgatcagg

SEQ ID NO: 382641 - DNA, 281 bp, Zea mays
  unsure (1)..(281): unsure at all n locations
nccacgcgtccgctgacgctagggtctactttatgtcctccggaattcctgaagatagaggaatacggattaacgattccttttaccttgatgagccatgttaccccggtgatggcaatagtaacagcaattatttccattgtgatggatccatggcacgacttcagtgcaagtcacttttttgatagttctgctcacataataatacgcagcttgttgctgcttttaggtggcgctttggccttgtccatggatgtgacagattatgtccttgtttctgt

SEQ ID NO: 382642 - DNA, 319 bp, Zea mays
  unsure (1)..(319): unsure at all n locations
gcgatgaccgcggacaagtgcgtcgtaaaagcagctggacacagccaaaaagagtgagcccttgttaatgggcattttcgggacggagcaggaaaagatgatgattgtacttgttggtcacgcctttattagttttaagctttgcttcacattctcgcgatttcgcgaacgcaagatgatgtcccgcgcgtctccggcagaggagtaccgtgtgttgcgcaccactctgtcgcggacaaggttccattttccanaacgggccactgttagccggtccctctaacgaccatcangcagtctcggtactgctgctacacta

SEQ ID NO: 382643 - DNA, 310 bp, Zea mays
aacccttccattccgttcctgctgtgcgaaaccgagaacccaaaccctaatgtaagctatttgcgttcagatccgatctagtcacaaatgtagacaactagacatgtattatgcctattaacttcgatattttgcacacagaaaaaccggggtttatatgtgtgctcccgtgtcctacatcgcgtccaacgctgctgcttgtgactgacctaattacaagtgtatacatgtattatactgttcctgacagaaataagtctggggaatgtgttcttatgtgatgctgatgcgctaacaccccaaaagtgat

SEQ ID NO: 382644 - DNA, 274 bp, Zea mays
tggtgattgttacaggcgaatggcttagcgcgtgttaggttgggggccactgaaataatcgctagtgtcaaggctgaactaggaaaaccaagcattcttcaccctgacaaaggaaaagttgacatttttgtcgactgtagtccaaccgctgagcctctgtttgaggttggcgatttgctgtggctggatcggatgaaaataaccaacagtctaatatattacttgtgttcatcatatacccaatgtttggcactgtagtctggactgtacttct

SEQ ID NO: 382645 - DNA, 182 bp, Zea mays
ggccaagcatttcgtggtccacctccacgtgccagctattactgcgacggcctcggcgtcaacggagggcggttactactgcgacggcctcggcgtgtgtgaccactaccgccaccaccgccaccaccgccacgggcagcagctgctcgccgtcggctactcgtaccgcagcaatccgagcg

SEQ ID NO: 382646 - DNA, 320 bp, Zea mays
cagtacggtcggaattccgggtcgatcacgcaaagaacacggtccgggacggtgggcgacgctggcggacgcgtgggttttttttttgcaagctcactgaattaacatgttcatcggataaacaacttcggcactgaagagtcttagcaattacagttctcaaaattttaaattgcaatttttcagaaccctcggcagccaactttttgttttcatgtaacaaaattaggtccctaacaaaacgaaggagctagcatcacatgatcactcttcctcttcgtcgtcaccgcctccaccagaagccttcttttggttctttc

SEQ ID NO: 382647 - DNA, 317 bp, Zea mays
ctgtcgaatcagaatgttagtgctgcaaatgttgtgcgcataccaccagttcagcaacaacttcctccaggagctccacgccctcagcaacagcttttggtccctgcccgtgcaccaccgttcccgcagaacaacatttctgaacaagcgacaggttgacaaggacgccagaaagtgacgaattttaggcatcctatagtctgcagcaggactaagaaaagccataccgctaaattgggcggcatgcttttttttcttgcaaattgttttcttttgcactctagaggttgtcgttatccatggctacccgaacttct

SEQ ID NO: 382648 - DNA, 189 bp, Zea mays
acaatatgtgtcgagcaatccagcacccccatgggctatgcctgcaagtgccaattcagctaatcctttccagcctgtgacataccaaacgccaaacactcctgctgcttctgttgccccttcagctgcctatccaactatgtcaacaccgtatgctgctccatcagcgcaatatgttccatctccagc

SEQ ID NO: 382649 - DNA, 247 bp, Zea mays
gtgccggctctgctctcctcgcatgctcctgctcattcccagccgcgccgcagttcatgcatgctttcctcagcgctaggccggggtcggaaaggagacttgaccgtggatatgagtatgtaaccccaccgcaataccggacttgctggaaaagcagatcttgatccgttcctgttcctgttcctgctgctagctactagttgctaaggccgtgtacgtacgcgttgatgaaggtgaccgtgtgagg

SEQ ID NO: 382650 - DNA, 244 bp, Zea mays
catttatcttatcgtttcttttttcttatatgaacgaccaagctgttacgtgttagtcagcttaagatggtgtgctgttctggattctaattagcgataataattgcaatttccagacatcttaactactcattcttctagattttaattgatctggccatttctctttatgctgagaagttgataggccaagttcagaggatcatttcattagttcttatttcacagcttaggtgattattga

SEQ ID NO: 382651 - DNA, 304 bp, Zea mays
cgccttccagtattctacgcatattataaagatacacgtgcccccttccatttgcacccacgcctctctctacttaggagtatacttcaaaagcgccgaaccagataggcaggcatctcgatcggcgacggctccagtcaaggggctggttggcatggagggcgagaagaaggcggccgccgtagcggaggatgaggttgtggttgtggctgctggcgatgtcagcctgaaggacctgtcaaagaagctcaacgacttcgccagggagagggactgggagcagttccatagccccaggaaccta

SEQ ID NO: 382652 - DNA, 308 bp, Zea mays
cccacgcgtccgcaatgggtcgctcttgtgaataattggtttacaacaaaatcacaggatatcagtgaggcaaataggataaactgcgcaaaaaggaaggcgacccatacatcaggaacaaagagttttgctcggaacagggaagatatgagggaacaagatccagaaaagaaatacccccatagggctgtattgtatatcaatacacacaagagtaacatcacaaagaacagaaacccacatgtggttgcattgaaggaactattagtgcagcaaccaagtttagctgacactagtcatggaaaggt

SEQ ID NO: 382653 - DNA, 196 bp, Zea mays
  unsure (1)..(196): unsure at all n locations
agtanagataccacactgagtccagcaacactagtaccacgacaaaacggataatatattagaggttagaacaacctatattgcaagtactttttagtttctgcagttttccatgctaataagagttgtgaacacaaacgtgagaggtaattgaggtcaggtgtgttgttttgaaaaaaaaaaagagtaagacgag

SEQ ID NO: 382654 - DNA, 180 bp, Zea mays
  unsure (1)..(180): unsure at all n locations
acacgacgacaacggtccgggacctgcgacggtntgttttttttgtatgagaataactgcgtgtccaggggggaggatcagagcgcttgtattgaccatatgcgataacaacaccaccgtgaccaccaatcgataacattcccccgtcttcattcgaattttgtatgaacacacattcca

SEQ ID NO: 382655 - DNA, 305 bp, Zea mays
  unsure (1)..(305): unsure at all n locations
cggacgtggggtttacggtcgctgaaggctanaggtgaacctctgttgaacaaggcatatagggaagagggaggtgatgatattgactatcgacgcttgctaacatcatctgatgaatctgtttcagagggatcaagaggagatggatcagcagatactatggtgtcagaatttggtgatgacaattttgtcattggagattgggagttgaaggagataattagccgtgatggccgtatgaagctttcatcgcagatgttctttgcatcnatagacgagagaagtgagcgagcagctggggagag

SEQ ID NO: 382656 - DNA, 231 bp, Zea mays
  unsure (1)..(231): unsure at all n locations
ggaaaattttgtttctttacgtactgaattcagcaacgaagtcgcattactaacaaagtattgaacataagaacttggtccgattgcttggttatattgacaaacccaatgaacgaattctcataacagagtatgtaccaaatggncatcttagggagcatttggatggtaaggtcnacatggcctagttttgggattaatcagcgcttgaaatactatagatgtgcccag

SEQ ID NO: 382657 - DNA, 216 bp, Zea mays
ggttttaccaaatgggtttcaaagctattgataagaaaagatggggcttcttgtcgaagggcgcggagaaggcttatgggggtaactgtctagtctcttgggaaaaggttcaacaccctattcagatgatgaggaacgtctttgggcaggtttaccggagcaagtcccatgtattacccaaacattccatgtgcatgctcccaacctgatcaaggt

SEQ ID NO: 382658 - DNA, 232 bp, Zea mays
cccacgcgtccgggagttgaagaaatccgcacctgcctttctggagactctagtgcatagttgggtctcagtgttactttcgggcgacccccagtgtgtttctatcgatgctccatcacgttcaatgcatgacatgatgccctatgtcagcacgcggaagctacacttactgaacataatgtgcagaaaagtaatggtcagcattcacacacatcatggtcctggtgctgaa

SEQ ID NO: 382659 - DNA, 208 bp, Zea mays
gtagtactgcataccggctatttgattctggtattgcacaggatctggtagcaggcattgcaaaacaagcagttgagaaaatagataagataagagaaatagctatcaaaaccctgcagagaattctgtaccaccaggaacacctcatcccatttatacctcacagggagttgcttgaagaaattattcccaacagcagagatttggg

SEQ ID NO: 382660 - DNA, 227 bp, Zea mays
agcgaacccctgccgcgcctgagatccaggcagccatggagggcagccgaaccccttctccatggcttgagccagcgccctctccctgctggttccttggtcgtcccttccctggtgggtactcagtcaccctcccctatctctattctagcagctagcacacgaaatcctcctcggtgcctagtgcccatgccgacaccacgccttctcccatggctgagcgtggg

SEQ ID NO: 382661 - DNA, 342 bp, Zea mays
  unsure (1)..(342): unsure at all n locations
cagacgcgtggcgagacgcgtgggtgtaagggccacaccaatcatcacagcagaaatatacgaccgaacgaccgtggacatctcgaataactcctgccaaatcgccagttcatgtgtattgtgcgctaccgcctagctgcactgctgtttttttggtctcattgttcgtattttctccttggcccctccccctagaggcgttactgttagccttactcttactccctgtagctgcacgtagaagagaactgttgtcctgcaggtctcttctacgtgcagctagcaggagtaagagtaaggctaacagtagnaagagaacttgttgtcctgcaggtctggcaa

SEQ ID NO: 382662 - DNA, 238 bp, Zea mays
ccccccccacgcgtccgcggacggtggcgacgctggcttcgctaaagccgtaatccgaaatcccgcccccagacccacattccacgacgcacccgatccccaaatccccaaatcttcccagttccctcctcccgctcgacccagatcgaggcctcgatccaccggccatggcgctggagtgggtggtgctgggctacgcggcgggcgcggaggcggtcatgctgctgctgctgacgct

SEQ ID NO: 382663 - DNA, 329 bp, Zea mays
tgctgcttgtatttaatttgtatatacctctagctgctcatgcagccgtctctggacttcgatctgcatctggagggcttcacttatgtgcattgacctgccagattcccgaaccgtgtcaccttctgaaggttcaggtgcggcggcggcggtggtggcggcggtgaagcactcccttggcatggggcgttgtctgctcccgtccggcagcctaccaacgctgcatgcgaaacagaggcaagcttagcgcatctcgcactggactgaacggctagggtttcagttacttgagctacactgtattaagaagcatatatatatgcagccta

SEQ ID NO: 382664 - DNA, 272 bp, Zea mays
cagacgcgtggcggacgcgtgggttgacgcctcgcctcgcctcgccttgctgccccctcctcccgttctcacaacaggtcaagacgcgcctcctctcgcctgcctgcgtccttgctcttcctcctcctccctttgcccgtcgtccgctccgcttcgttgtctcatccgctgccgttctagcaagcggggcagcgtcgcgcctcggcctgatgctccaccacgctccagtccacagcctccccggtccttctcgttcccgttgagagcggcgg

SEQ ID NO: 382665 - DNA, 324 bp, Zea mays
  unsure (1)..(324): unsure at all n locations
acgcctcgctcaccgcacgnccatggtccgcgacgctggcgacgtggncggcatccgcttaagaatgtattggataagttcactggacatgaggttcatcttcgtctggctctgctgactacctgcacagattgctgctgctgctgccgcccctggatgtgcgtttgatcagtgactggctgctctgctccatagaagatgaatgaagagagagatggtgaagaaggctttggcaaatggcaattgccgcagcaagccatgtcggcgccactgaccggcttagtgattggtataatttggtgtggcagcagccaggattaatgc

SEQ ID NO: 382666 - DNA, 311 bp, Zea mays
ctagatcgcgagctgccgcctttttattggtttttgcctccgtctccgtcgatatggctgtcgcctaatccgcgccttcaccgccacagcggcacagcctgagccacttccaggtccactgcctcgtccgaaactccgaacgcgctacacgctggaggtgagcgccgggactgtgatctagctagggcttcgcttctccggcgcgggatgggctacctcgtgctctcgccgtcaccgtcgccgtctccgccgcacgcctttcaatacgcctcctcgtcctcgtcctcctcctcctcgggcgctacctcctg

SEQ ID NO: 382667 - DNA, 330 bp, Zea mays
ggttgaataggttaagcatacctgggatagaaccaagtacgggagtgggtatcatgcaacaaaatggcttatgggaggaactcaaaatccagatgatatgggttggtttttgcaattttccccctcaaacaattgagctgtttcgggcatcacttaattgatgtatctgtagcttgtagcctaactggttataactactcagcaaggcactgttactggaagccaaactttgcaactcagccctggaataccataattacagtccaatggtgaaaagtactaaaagatcatcagttgagacatatcatgatctggcaattcatatactac

SEQ ID NO: 382668 - DNA, 329 bp, Zea mays
cagacgcgtggcttccatctcccaccctccctcgttggagcacgagcaccaaaggtgcccagatctacgtcggccctgcccctgcttccttcaactccaccaccaggtaatgccctggacttaattgaatgggctctcttctcaccaggatcggtgtcctgccatggctccacgccatgattgttgatcccgtgctgtaggtcatcagaacgggagcagaacccaagcaactagccttctctgctgcccttggtatcacgattgggatctttccgaaatattaggagcacctaaaggatcgactacgatagatgttttcagtgagtgta

SEQ ID NO: 382669 - DNA, 326 bp, Zea mays
ggatgaacgacctgaccaaatggacttctacccaaatgcatgacctttgcgagtaaatgtgaactctcaacccttggcttaccgaagtactgagagaacttgctcaatgtcaaaggtagttcaacaagttggttttactaacttgtaactgcattgtgatcaaaggttgagtttagagatcattttgtcgagttgtctaaactcactttggttcaacccgtcctaagaaagttcttacaaagatcaagttaaaatcgactgatcaccacctaatcatcgctctagtcatgccttgatcgcctcacgcgtgcttttccagcgtgtgt

SEQ ID NO: 382670 - DNA, 322 bp, Zea mays
cggacgcgtggcggtacgcgtgggcggacgcgtgggccagaatccttgactccattcctgaaggaaaacatgcattgcctaacccatccatactgcagaaagttcctgaggaatcagctctaaatccaaaagctcctaaagtgctcaaacacatcatgagatctccagctgtaagaaaatcacctagaactgttccggagttgggaaatgaaatgattctgggaagtggaactccaaaagctcatgtggataatgcaatctcctcacgtatgccacctgggatgggagccatttcagatctagagttgctgtgttagaaatg

SEQ ID NO: 382671 - DNA, 319 bp, Zea mays
cctgaacgcggcaatctccgaagtcccatccaaaacctcgccgccggattcgcacctcactctcgcccgcgcactacgaattgactgacgcctacgccctaccgctgcaagcagcaccatagcgggagccgctaccatggcgtcctgctacaacccgtggcgcctattcccaggcatgtcgacggcggtccctgccgggcccgtcacggcgccggctcattctcgcacctgcaagtcctcgaaagtgttcggtgctttgcctcaccggaggagtctgctgttcctgggcacgcggcgtgccaggatcaagtgcgtcaag

SEQ ID NO: 382672 - DNA, 103 bp, Zea mays
atccatgtgaattggttggaattgagtgggtttaaatttcaaacaagtcaaaatcttttggacttgttcgttttgtacttaaaccatgtggatcttttggact

SEQ ID NO: 382673 - DNA, 257 bp, Zea mays
tcggattccgggtcgaccaccgtcgggagctggcgtgtcttgagatgtgattccttccttccttgtttagttgctgctgctcctgctgatgtagtactggtgtatccagtccttttaatttcttgattagtttgctcggctgaagaaatcaggacgcgtgcctggtgttgctgctcagctccatgtacttgtacaaccgttcctccctgcagctgctgccccttctctctttttgtttaccttggattgatggattg

SEQ ID NO: 382674 - DNA, 322 bp, Zea mays
aaaatactgaaaggttttgagggaaaccatccattccataattacacagcacgtgccaagtataggaaggttcttgcgggaagacacagaagggccaaaggagcaagctcggcgttgaagtccatgtcctctgacacgggcatggcagacaactcttctgaagaaagcacttctccagatcacgatgaggacttgaatatttcatcaatctttgactctggtataccagaagacactcgtgtggatggtattctgaagctttctgaggatcgggtgcagattcaagctaggtggctgcatgagcctgacgaaagcgatagat

SEQ ID NO: 382675 - DNA, 309 bp, Zea mays
caagttcgtcgcgcgccccctatatttctctgtggccgacgctcagctcctagctccggcgcgtgtccctctgctcagctccggccgcgagcagctccctggtgcttggacccggctcagcgcgctccctgctcccatcaccgcgtgcgcatctccctgcccaatcgccccctttcttcatctccctcgagctcgccatggagctcgcccctgcctcagcttggactgcgtcgcacggctctggtcaaagaagatcctctgcccagccctctgctcgcatgcgtgtcgtgctcgagccttttcctgcgg

SEQ ID NO: 382676 - DNA, 237 bp, Zea mays
  unsure (1)..(237): unsure at all n locations
ccagttgcttcataagctacgcatcgccaattcgccatatacgcacatacccaacgacgacgcacgcgcgtgcgcaaaccaccaaccggagcgagtaccaaccggccggcccgcccaacaagcaggcggctaggtatcgacgaccgagcacatcgagctagccccggccggtcatatatatatgccaggcggcggcggtgatccagcaggaaggagcctgngcatgggcatgggcgt

SEQ ID NO: 382677 - DNA, 163 bp, Zea mays
cggacgcgtggcagaatgtccgtggatatacagcaaggaagcagtgatgcacgcgaccttacctttaagccatattttacaagtagattcagcactttagccaatggattggtcagatgtatcgatacattctatgaccatctaccaaggagttctctgggca

SEQ ID NO: 382678 - DNA, 326 bp, Zea mays
tgcctggttcctcagctggttcctcgagtggagtcatgctgcctggggttggtgcttcattgggggagatatgccgggactacatgaatgggaggtgcacaaaggtggagactgactgtaagttcacccacccaccacaacagctgctgatgtcgatgcttgcagccacgagttctgtcagtgctcttgggcatgcgccgttggcgcctctgcggctgctatggcagctgcacaggccatcatggctgctcaggcactgcaggcacatgctgcgaaaccaaggccgcaggtggggcttcaggctcataaacaaactgatgaactga

SEQ ID NO: 382679 - DNA, 242 bp, Zea mays
cggacgcgtggcgcaaccatcgtccgccgagtcgccgactccacgacaggcctccacgccgagcctccgcgcatgccccgtgagtccgacgagaacgcctcctcgccttccccggacgtggtgtggcgtacctaccgccggtgccgcagagcgcacggtcctcctgcagcgggagccctcgctaccgccgtcgcaggacgtggacgacgacgacgacctggacgccaatggaacgccatcat

SEQ ID NO: 382680 - DNA, 151 bp, Zea mays
caatcccacccggcagcggcgcgcgcaagtgccacccacgcagctctcggcgcctcccgcatcaccgcctgcgcccgactgcacagcagggcccgcgtcgtccaggcacggcgtgcagaggctggactgcgccggcttctccgggctcagg

SEQ ID NO: 382681 - DNA, 311 bp, Zea mays
gttcattcaggaaaccaaagagggaggatgaagaaggggaagcgtagagatctcgccttggcatgctatgctggcacaagatgcagatctgcttgttcgtcaacggtaggtgcggaagcgctgctgcgtcttccttttttttcttgtttttttgagaaaaaataggtgcggaagtgacgaggctacagagatgggagggagaggctttcgaagctgaaaggaacagcgcacccgccgcccacctagaaaagcccggcccgtgaacatttcgaaactcaaacaaaagacggtggagcccgcgtcatataatc

SEQ ID NO: 382682 - DNA, 254 bp, Zea mays
gacgcgtgggctgggttctcagagatcgttacaaagcctggttgtttctaataggaatgaccaagggtattgtttgaaggatggcttgatttacaaagggcggcaacttgtggtcggccaaaattctgctctgcaaaataagatcatagctgctttacattcttcagttgttggggtcattcaagcattcatgccataccaaaggattaataactcttttgttggaatggtttaaagatagctgtagaatcctt

SEQ ID NO: 382683 - DNA, 243 bp, Zea mays
aacgcacacaagcggatgacaaacaaacagcaagagagcggaactgcgataggcaaatgcaaatgcaacggcaacgcaagccagatgcagagcgcgccccgccacgatgaagaaggaggaggtggcctcgccggcggcggcgacggtggtcctgctgctcctgtcgtcgtcgttggcggccgtctcctgccagccacagccgcagccgcagcccgggggcagcaagcagacggcggctaacaa

SEQ ID NO: 382684 - DNA, 324 bp, Zea mays
cccacgcgtccggcgccaacgtaggggatcgcccggccccgccccgctccgcttcgcgcccctccttcctgcctgccgtaaccgcgccgtgcaactgtgcaagggtggggtggtggtgccatggcgagcacggtgtggagggaaggcggttgtggccagcatgttcagtaggttgttgagtctagataccagatgatggacctgtccacgacttcagtgctggcagctaaagcttacaaatacaaagcagaatcacttgttaaggagtaccttcttgcagattcgtatgtttcatacactgctgtacttggtgggatcctgatg

SEQ ID NO: 382685 - DNA, 325 bp, Zea mays
gagacgcgtggcggacgcgtggggccttatcttctcccgttcaccccgccgtgcgcgcgcgcccccgcagcgacaaccggaagaccgccgccgacctacgccaggtgccaagccgttcctcagtcccatcacgaggccttcaacgaacccttcgccggcgacgagaaaatctaattttcccagacccgcttcctcgacttcctgtctcgactctcccaagtcacaaccctcgacctcccccctactccaactactggaagtgccgacccatcaggttctgattgattcttctgcaccgaccgcagcggcacggagatgactgcga

SEQ ID NO: 382686 - DNA, 211 bp, Zea mays
caaatagtaacattatcgtttgatggcgtattatgctggccgaaaaacatgagggtttcacttgcttttgacttggtggctacatatgcatgttcatcaagcatgtccttggatatccggatgttacaacatcaactatgttaatgacttggtggctggccgtttgacagggttaattggtgaacaaaaaaaaaatagttctagatcgcga

SEQ ID NO: 382687 - DNA, 334 bp, Zea mays
ggcgcacaagtacttcgaccacgccgtggtcaccgtccgcgcaggcgacggcgggcacggcgccgtgctcgccatgccgccggcgccctccgcggacgccgccaagccccgcggcaggttcaaccggggcgagaagaagagcaagaaggtgtcgtacaagcgcaactacgacgggtccgtggcgctgccgacatgcgggcacggcggcgacgttgtggtgtacgccgacgaggccgaggagacgctgctgcggttccacgagaaggcgcggtactgcgccaaacggggagggacgtgggcgccctggcggcacgctcactcgcggatgcacacg

SEQ ID NO: 382688 - DNA, 307 bp, Zea mays
cggacgcgtggcgagacgcgtgggcgcgtcgcagcagcggcggcggcgcgagcggcgtgccgttcctctcactctcacgggcacgtgaaacggaaggcacggcaatcggcaaggggggctgtcggaggatgtgaatatgcctgcaggcgaccagctggagatgccgattccacgcagacgcagggagggacggccacggcccagaccaggccaattgaaccggctactacctcgggtgggtggactatagaaatgcatggtcatggagctgcgcgcacatcttcgatctacccgtggtggtgatgct

SEQ ID NO: 382689 - DNA, 306 bp, Zea mays
cacagcgagcgagagcaaggcgcccaagcaaccaccgcgagaacaagtcgcagccaaacagccccgtctcccagcgaactgtgagcttgcattattctaccatgtcttccatggagctgctccacgccgtcgtcccggagaagcagagcgaggaggaggtcgcgcccgcagcgacgaccacgagcagcagcgccaccgcacgggcggggacgagggcgccacgtgctccagggtgggcaagaggaacgctcggcgccacgatcgatgagagactcggtctgctctcatgttccgggtgcacacggt

SEQ ID NO: 382690 - DNA, 327 bp, Zea mays
cggacgcgtggcggacgcgtggggttctatcaaaattttataagtgttaggtgtccaataattttctaaactaatttcgtagttaacatgtgtatcacatatattaataaaacatcacattttaacacccacaatcccacaagcactgggacctattgtgacctctttctccacacgacatcgaccaaatcactatagatgacttgggcatcctaataaatagtatacctacagttcccttcctcgaactcataaccgaattagcaatccgactcaccacagaattatcatgattaatatacctagtcagaccattcatcaatccac

SEQ ID NO: 382691 - DNA, 310 bp, Zea mays
gtccacaggcaaatgcgatatggtgaggaagagagagcacgggatgggttgagaaacaagatggagggagaaagtgggcagcctgctggatcttggcatctcgccgccgctcatttccgctccacctgtgtgggctagttatctactagtagtatcttcgggccagttcaagacttagccgctgttctaagcgctgaggaagtagaatatcatttatcggctagagtagtctctgttgctatccggcaccaatggcgactttggtccgtcatgattcaaggcagtactcgtggtggattagccatatcag

SEQ ID NO: 382692 - DNA, 319 bp, Zea mays
tttatttttttttttttttttttttaaatccaaataatccccataataatctgaaaacaatatgtgaatccaatttacatgacttgatgtgtgatcaaatgaaaacctctactaatcaattagggcacatacatgttggcggccagcaactagacgaacctaatattatatttttttgattatggaacctaatattatatatgtgtcgttgggctctcatctattcagcatttctggtggctgtggagtattcacaaactgtgcacttttgttgaatccttcccgtaccataattcttacagcttgcaagctcctttgg

SEQ ID NO: 382693 - DNA, 192 bp, Zea mays
cggacgcgtggtggacaacatgcttgcttagataattttatcatgcttgctttttctgtcaaggctaattgaacattgtttcgtttttaaaggcttgctgcatagcaacagtttatgtcctatgtttgtccggacataaactgttgctatgcagcaagccagcaaaaacgaaacactagttctagatcgcga

SEQ ID NO: 382694 - DNA, 281 bp, Zea mays
ctcccgccgcggaacgccgcctttcgccttcctcatctcccacgcgctccggtcacgctctcggtcgccccgctcccgctccccgcccggccgccgctcccgctcccgcagccggagccggagccgcagccgcagccgcagcccgcagtacccgcccgacggtaagcggcacggcacaacgaccttaccgtggaggcgtgccgcgacttcctgcgcgataggtgcacccgctccgacctcgagtgcagatacgcgcaccctcacaactcagcttccgtcga

SEQ ID NO: 382695 - DNA, 285 bp, Zea mays
  unsure (1)..(285): unsure at all n locations
nacacacgtccgnacacgcgtccgcggacgcgtggcgacgggntnttttctccggcgacgaacacatatttcttggcacttttattcactgggcttgacatcaaatacagacgagcataggggctacatataggccacagactgccaggagcacgcctccacgtcttgccttcttgccatgatccgcatgacacacatgtacatacacgagctggactanaacactctacgcgctacgaactcacgtacatcacacacatgacgtgtttattttccacatagatc

SEQ ID NO: 382696 - DNA, 288 bp, Zea mays
  unsure (1)..(288): unsure at all n locations
aaacacgcgtccgcggaccgtggcgggcgtctccactcgcgctcgcgcaccgcttggcctctcctccgccgcctcctacttccgtgctcccagctccggcgaattggtgcccacctgcgagctcgccccgttatagtgcactgcattaaaggcactgcgatccttccttttgtatctgggttattcttgaagaattaattttcactctggaggaaaaatgagtggtcctccanagaggttgcatgaggagaatagcactctacacctgcaaagcggcctttggacgac

SEQ ID NO: 382697 - DNA, 287 bp, Zea mays
gtcgacgtgcactgcgttcgacgtgttcaccgccgccatatggaagtgccgtgcccgcgcgacgatcggcagcgccgccagcccggacgcccccacggcgctcgccttcacggtgaacgtgaggacaccggccaaggccaaggacggctactacggcaacgtcttcgccttcggcctcgctgcctcgacgctgcgcgaggtcgcggacggcgacatcctggaccttgtgacgctggtcagggacgccaaggcacgggtcccgttcacgttcgctgacggagccgcgc

SEQ ID NO: 382698 - DNA, 354 bp, Zea mays
gtacggtcggaatccgggtcgaccaccgtccgggacgtggtgcccataaagacactattggtgtttcagatcttaacagagtcagatcccatagaacaaatgaaaacaagggatcgattgatattcatggaagcttatacaaagagtctttgaagccatcaccagcagatcagctgatcaagacagaggaaagagaaatgggtgacactggtctcaagccttatatcctttacttgcgccagaataaaggcttcttcaatggctctatgggtatttacgaggttctgaaattcttgcccaaatccaccaccgccataccagcgcgactaggattccgtcgagttagaccaagcg

SEQ ID NO: 382699 - DNA, 310 bp, Zea mays
ggacctgagctcccttccaattcgatgcctttgtagcgctgctgcctcgccgcgtcgtcgcgagtccccgatttccgcttgctgctgcgcttccaacaccatggacggcgggggatccggcaatgcctccggcggcagcggcggcgcatcgacgtgctgctactacgcgctcctcggcatccgcaagaacgcctccgccaccgacatacgcgccgcttaccggaggctcgcgatggtgagttctgttgccgtgcatgcgcgcgtggcctcgcgccggtgtttgattgcgctctctctctctctctctgtg

SEQ ID NO: 382700 - DNA, 171 bp, Zea mays
cagtacggcggaatccgggtcaacacaggccgggacggtggtcccctccttgacaggtgcccgagccgcgccgagctccagcctcatttccacgggtcgcgccggcactcttccctctcccgatcgtcctcctcgtcgcctgccgcctcttccttcttcccactccactag

SEQ ID NO: 382701 - DNA, 135 bp, Zea mays
ggacctggcggctgaccagctactaccagcactcgcagtgccacatcaacgcgcacagaagagaggacgagatggcccggctcaaaggaacggtgctggatccaggaggagggagccaggccagcttcctgatgc

SEQ ID NO: 382702 - DNA, 151 bp, Zea mays
aaataatattatccattggcctactaagagacaaaatatccaacaactaagtgtcacagagaagctgtcaaggcctaaggaggcccacggaagggctgcggcagagcaaccatggaccctccaaggggattaaaataagatcgttagagat

SEQ ID NO: 382703 - DNA, 131 bp, Zea mays
cccacgcgtccggtcctctacttgctaggaggtgcttacacacccgaaaacctgcccccgccgccttggactcacgtcacgatgtcttgcacggtgaccatcccgaactcggcagtcttctcgccttcagg

SEQ ID NO: 382704 - DNA, 250 bp, Zea mays
gagacgcgtgggtcgcgggcacgcgcaggccttcaagctctacgaggatgatatgtgcttgtgcatacaggatgctaaacctctaacaagcgggcattcccttatcattccaaaaagtcattatccatcagtgcaaacaacaccaccaactgtactagcagctatctgctctaaattgccactcctgggtactgcaatcatgaaggctactcaatgtgatgcatcaatgtgctaatcaacatggagagaa

SEQ ID NO: 382705 - DNA, 322 bp, Zea mays
  unsure (1)..(322): unsure at all n locations
cccacgcgtccgaattccttaaccgtaagcatggaaatgcaattataattctaaatcattctttagtaaggtgccttttgacttctcaaaattaaattgtaactaattttgaagctctacggaagcctaagcaaatgttccatcaaattctgaagaaacaaatgatgcattgactgacagtatatcagatggacatgcaattgcaggaatttatcgaggaggttatggctctggtagagcttgatcagctgagatatgcattagtnaggaagcaaggttctactgggttatcaacagagcaaatgtagggccttactaattt

SEQ ID NO: 382706 - DNA, 209 bp, Zea mays
ggaccgtggggcgaagcaggtggttgtggttgacaagcatagcagccagggcaggtagacgaagggaacagagagatcagagatggcggatgcgcacgccgaggccatggatgggagcacctgggaagacatgatgctgacgatgcttcacccgtgcactcccatccccgaggcgccgcccaacctcgactactccatcgccctctagt

SEQ ID NO: 382707 - DNA, 280 bp, Zea mays
catagaacttagttgttctggcgatttcattgtttgcgctggtgagcttggacagatagtcttacgctcaatgcattctcttggtattgtttggaggtacgatggaaatggcaagacaattacttccctagctgtgacccctgaggagtgcatcctagcaggaaccaagaatggcagcctcttggtgttttcaacagaaacttctcttcttcgaagggggagcatgcaacgaaataaaataaaaccctccacatctggttaagtcattggctgcaagata

SEQ ID NO: 382708 - DNA, 301 bp, Zea mays
gccagccagattgagcttgagcatgctcatatattttatgtatcattccgtgcgcgtatgcatgcatgtgcatggcgcagtgtagccatgcagctccatgctgctgatccgtctactctacctacctgctgctgagacctgagtgtactgcattgcttgtctttgtctgtgtttcgattcgatttagcattggtgttgtcgaatctatttccttgtaggagacagcaagtgtttgctgtactgtcaactgagtatatatgtccctttgagatctactagctagggactgggagatacatat

SEQ ID NO: 382709 - DNA, 273 bp, Zea mays
ggacgtggcgagacgcgtggcgagaccaccagcaagtccatcatcgtcgtcgaggacatagactgctcgctcgacctcactggcaagcgcaagaagaagaacaagaaggaggaggacggcgagaacaagaaggacggtactacgacgaagcagcaggaggaggacaaggagaaggaggacgagaaggcgggcggcagcaaggtgacgctctccggcgtgctcaacttcatcgacgggctgtggtccgcgtgcggcggtcgacggatcatcctg

SEQ ID NO: 382710 - DNA, 315 bp, Zea mays
cccacgcgtccgcccacgcgtcagcaatgttgtcgaccacctacttttgagcatagcttttaccatattcctccctcgattcgccattcattccttcacagctgagtcaatagctgtgtcactgactgaatgtagttcttttttttaaagaacgaggccgctaaggtccagggacctgatccagaacattgaatccaaccatcagcattcgcaagaaagagaaagaactcggttcaaagaatcgcttcggtctaaaaacgagtcttccgagatcatgtctatgcgaagagcttgaaccaagcgttcacacgcata

SEQ ID NO: 382711 - DNA, 289 bp, Zea mays
agctccgcctcctcttcgcccacctcccgcccgcagcctcccgctccctcctcgcgctcggcctctcctcccgcaagaacctctgcatccacccgcacgcgtccgccgccgccgcccgggactccgtcgacaccgcctgccgccgccttacggcctcctgggtccgcgagaaggcctcctccgacccggactccaccccgctgtgcgagttctacgagacgttcgaccgggccgctgccgccggcgacctcgcctccttcatgccgcccggggtgtacccctggcagac

SEQ ID NO: 382712 - DNA, 267 bp, Zea mays
ctgcctctggcctccagccacctcccgatctggtcgagctcgcctccccggaggcggcgcatggatcccgccgtaccaccacctccgggcctcgtccgtcgtcaccgccgccgtccgctctgggggcggctccagcagctgcaggagaccgtggcgcgacgccggcgtcgtccgatgaggagccgtccaagctcgtttccacgtcgggcaccgccgccagtagcagcgcgggcttgtaggactcggctgactcagaagcataccggt

SEQ ID NO: 382713 - DNA, 304 bp, Zea mays
ggacgctgtttgagaataaaactggcacaaggttgaattcaaattcaaattaaaattgaacttagaaatagataaaagaaaagaaaaggataaaaagaaagaggggagagaagctacctggaccgcgcatccccattctggcccatttcacttcccctcgtgcacagccactagcaccacaacattgcgcacagacagggtggggcctgcttgtcattcgcactacacagtgccgctctcacgagcgctcactctgaccagtggtcctagggggacagcgacactcttcactgggatccggtgg

SEQ ID NO: 382714 - DNA, 226 bp, Zea mays
agagtagtggcctccgagctgctcttcaacacacagattcggcagagcctgcgagagagagtgaaaagagagggagcgcgctcaaggtgtggcgcaaggagatttttcttttatccagcttcttagcatgattctctttgatcccggagagcagccaccggtccaactagtccttgctgttggtctgccggaacttttgattgctctccagatctgaggcacctgg

SEQ ID NO: 382715 - DNA, 215 bp, Zea mays
cccacgcgtcacggatttggaggggtgggccatcgcggtgttgataagtaaaaggcggactccttgtaccagtttggatttgtattgtacgcgcattggttcctggcgtgctcaataaattgcaaccacttccttccgaattccgatctagcggactaccagttcctcccgatcttgggtttgaggaagccccgagccgaacgtcatgcatggag

SEQ ID NO: 382716 - DNA, 305 bp, Zea mays
ctccgctgtccgctggctgcgatagtgctgcctgctgctctaagctctaacccaatccaaggaggatgccgaggagcccgcagctgagcctgagcggctgcagctctctcttctccctgtccagcaccagtacgagccgcgacagcgccgccctgaaggcgccggtgcccccacggcgcacccctctcctgtcgctcagcgtcggcgaggaggaagaggacgagggtgaggacgaggaggagtacctgctgggggccggcgccctggatctgcagctgacggggcccggtggcggcagcaacagc

SEQ ID NO: 382717 - DNA, 300 bp, Zea mays
  unsure (1)..(300): unsure at all n locations
cggacgctggnttttttttttttgtatttttctattcagattggggtaattttattaattaattaccacacatgagcacatcataaatagctttgatcgtcccattgagctatctatcctacactagacaaagattagcagcagcagttgcttatcaactgcgttgtccagcttacagttgcaaatgcactccattccattccattctattctactacaatcagacgagtctctcttcctcttcctgcacaagtactccctggcatccatcacctttcaccaagtaccgtttcaagaagg

SEQ ID NO: 382718 - DNA, 128 bp, Zea mays
cccacgcgtccggcgaacagccgccctgttttttgttgggttgtgtcaagaacttgggatataatatgaacaggaaacggtacatttgccggctccatatgaacaaacacaagtccgatattaggtgg

SEQ ID NO: 382719 - DNA, 265 bp, Zea mays
gacagtctatttgtgcgctgaagcctgaaggagccatactctcgtcaattaacccacgcatgcccgagtatcgatgaatcgtctgttttgtagtgatgaagcgaccggttgtttgtgatttctgtattggttgctaggtgagaaaagtacccatttgtgtgtgtggtctcctggcttgaactgtgtgtacactttccgggccggcatagcgagcagctcaataatgaaatgcatattagtgcatatacacacgtgtattaccaat

SEQ ID NO: 382720 - DNA, 191 bp, Zea mays
agtacggtccgtatccgggtcaccacgcgtccgccacgcgtccgagcgtagtcgtcgccacttctcccatggccgctccctccctcagccgtggcgtgggccgactgcatagcgctcatcatcatcactaaccttcctgtggtggatgcgccattgcctgatgcgagccgcggggacatgacggatccttg

SEQ ID NO: 382721 - DNA, 206 bp, Zea mays
cccacgcgtccggtcgccatgggtctgcaggtacggctcctctcgccgctctgtatttgtatctctacctgcatcttcgaacaagtgccgtgttcagaggccgattcgggaccgccgggcttcgctggcgaagtagctcaagtgccacctgtgtgtgtggtttaatttgtgacctcgccgtcgccggccggatcggttgttgcttg

SEQ ID NO: 382722 - DNA, 172 bp, Zea mays
tcttttaatgctttatgaattagagtatgtagaatgactttcacaacaaatgtcatcaagaccgcgctcgctcgctcctgtgcctctctacctcgcttgcgtgcgccgggaaggcagtgggtggctggtcggttctcgcaagaggttgctggtgctgtccctcctcccccgg

SEQ ID NO: 382723 - DNA, 266 bp, Zea mays
cggacgctgtcgcctgattgtttccgagacgaagctcatcacggtgcactcctgcgctgggagccctaggggactctcgcaaggtgttcgaaggaatggcgtgcagggacctgctcgcctggtcggccatgatcggtgcctacgccatcaggggcctgtacgaggaggtcgtcacgctcgcggtggccatggtcagggaaggggtcatcccggacaggttcctgatcacccggattctacaggcctgtgcgtacacagaggacctg

SEQ ID NO: 382724 - DNA, 105 bp, Zea mays
cagacgcgtggggcgaccaggatgtcgccctcgcaggagtgcagcgcgacgccagcctggtggcggcccacgacctgtttgtgtgcgtgggagaggacgggctcg

SEQ ID NO: 382725 - DNA, 299 bp, Zea mays
  unsure (1)..(299): unsure at all n locations
aacacgcgtccaaacacgcgtccgcggacgctgggcgacactcgaagacagttcgtgtggtccgagctgaaaggccgagactcgaagacagttcgagtgatgcgtgcttaatcgactgagggctaaggaatgtgacgtactggtatatgtacattagttgaagcggaggctataaagggtgtagagattgtttcatcagtatatatcatctgtcncgatgggttttgttttgtgcttttcacggttcatcattgtggaacacatgtattattagtacaagaactgctagtagatatata

SEQ ID NO: 382726 - DNA, 232 bp, Zea mays
ggccactcgtcgtccggtgcgtgcgtgcgtgcttgtgattttgggatcctcacctccctgcctaatttggtgcgtgctgtcatttggtaaacgaagaggtacgtagagttttcggtaggatcgcatcggatcggagttcattcgcccatggcaggccacactgtggcagtgtgaaacgtgtgcgcggatgaccttgtgctgtgggcgagtcaatggctggccgatgcatgga

SEQ ID NO: 382727 - DNA, 237 bp, Zea mays
cccacgcgtccagcattccttattaaaggatgatgatgatccgattgttgctacaaattattccttcttactccatacaggcctaccattcatccatggctcggtgatgctgcattgtgtggaagtggattggttcgttctgtgctttgctgctatagaggtttcattctttcatctgtcttcgacaccaatgtagcgttccattccatcccatcgatctgttactgctgatgactg

SEQ ID NO: 382728 - DNA, 193 bp, Zea mays
ccagcagctgccacagagacatcagagagcggtcctccttgtgagtctgagctgaggaggaggagatgcagcagcggcgcacgggtaggaggaggccgggagagcgaagatgcgccgcgtcgcgctgttgctcgtcgccgccgtgtgcgcgctggctccggctgccgcggtcgtcactgacggtcttctcccg

SEQ ID NO: 382729 - DNA, 325 bp, Zea mays
  unsure (1)..(325): unsure at all n locations
gccacgcgtcggcccacgcgtccgcggacgcgtgggagaagttgaaggataggcgtgcaacgctgccaggcgttcggtgttatgcacgaacggatagtgtcgttgatctcgtggtttcaagacggatttagtttggtgagctacatcgctatccctattggttaatttgattggttgattgattagaatggggtcgatgattctctggctttttatgtgaggtatatgtggttagacttatgcgaggggtgattgagttagtgacgcgaatagtagggtagtatatcacccgtctangtgatggatgcgaccgttgattaagtgt

SEQ ID NO: 382730 - DNA, 257 bp, Zea mays
cggacgcgtggcgacgccgacggggacatcctccccgacctggaggtagacaccacggagctcctcgcagagttctcgtccacccctcctccggacgacctgctggcagtggcagtattcggcggcgacgagcagccggcggcggcagtagcacaagagaacccgtcgtcgtcgttggagcaaacatgtggtgacgacaaaggcggtggtgtagcagtagcctccagaagtacactgcagacgacgacgacggagga

SEQ ID NO: 382731 - DNA, 289 bp, Zea mays
ggaccagcctacgttcacgctcaacttctccaaaggttcctgtcagatcattgcgcagtactatcaactcattcgcctaggcttcgaggtactactgttcttcgatcggttcttcctcctcttgatcgaacattctgaatatatatgtgcaggggaacaaaagggggtgctgtctgatacgtttcttgagggcgagtcgtttttgtttctgttctcgctttgtgctgccgtaacagcctcccaatctggtcgggttttttttttttttggtgccgcttctatctggtgt

SEQ ID NO: 382732 - DNA, 294 bp, Zea mays
cggacgcgtggagcaggagtacaagatccagaaggagctggaggagtccctccgcgaggaccccacggtgaccgtggagaaaccggccaccgcagcttcgctgcagctggtggcagcagcagcacctgaaccagcggtggctcagagcatgactacgggaacagaggccgagccgtccagctgcctggggtcttgccttcggcacatgttcagcccgccggcgcagggggaggactacaccatcctgcaggcgctggtgagcgtggacatgctggtgctgttcctggccaccat

SEQ ID NO: 382733 - DNA, 259 bp, Zea mays
cgcgaggagatcccttcgtcggggacgagaacccgccaggagacctacccttcctcaatcctccgaccctccatggcctcctcctccctggccctccctccaatctctctcctcctcgcgctgctgctcctctccgccccctcgccgtccgcctgcgcctcgctttccttcctcaccgcctcgtccaacggctccgcatcgacctccggcgacccggagcttgaggacctggccccggagcccaccttcctcgaggagg

SEQ ID NO: 382734 - DNA, 216 bp, Zea mays
cgcacgctgctgaccgggagcagcagcagcaacgcgtcgtcggagtccactagctgcggcatcaagtactcgacgcccaggtcgtaccaggccatgtataccatcatcagtactatcgacgctaggttctctccgcagccacaaggcgtcagccacggcctcggcttgcaatagcaccgcgttgtgccgatgctggcgttcgcctcgccgtcgccg

SEQ ID NO: 382735 - DNA, 321 bp, Zea mays
cggacctggccgaggccgacgccgacgcccacgccagccgcgtcgccgacgtacgggccgcggaagccgacgcccagagtcgtgccggagcccacgcctccggcgcccgatgagcgcgtagccgttcttcaagaagaagccgatgctcaagttcatgcgcgagaagaaaccgtgcccgtcgctctgcgacgacgacacgacccggcggcctacggcagcagcgctgcagaggcacgagaacgtgcagatgaaactgaattagggcatcggagctggctcgatcggggacatcagcacagctctcagatggtgcagtgtcag

SEQ ID NO: 382736 - DNA, 325 bp, Zea mays
cggacgcgtggcggacgcgtgggcggacgcgtgggcgcgccggcgtccgcgcggtggaagagtgtgacttgatgctctacaactctttccatgatgccgagccggcgaccttcgcgcggttcccgcggatcgtcccagtcggcactctcctcacgggcgagcaccctcgacgtggcagtggtggtaagcaggcggcagcagtcgtcgggcaattctggcagcccgaggacggcgcgtgcatggcctggctcaacgcgcagcggcgaggtccgtcctgtacgtgagcttctgcaggcagaccatgttcgacgagcgccagttccgg

SEQ ID NO: 382737 - DNA, 207 bp, Zea mays
cagacgctgcgctacccgagcatcagccatggcgatcgcagcgcgcgtccaggccgcctcgcgctccacctctacgcctcgctcgctcgctctttctgcgcagtttccccgtccggcgcctcgaccgtaccggcgtccgcctcggccgagccggtgtacgccaacgtcgccgatcgcatcgtgcgcgtcatcgacatcgatctcgaa

SEQ ID NO: 382738 - DNA, 308 bp, Zea mays
cggacctggtttattttttttctttacttctctcagtacgcataaatgcatattagggctaaatgacatggaggtggaaaaactacagcatatctacagtttacgggccaaacaatggttgacaaacatggccttcgattatggaaaaatgaatagtcacctcagaataatatctgctccaaacatcttcattaactttgaagaaatctgatacctcagcagccaatgctcccagaattagagccaaatgcagctattagaattcgagcaacgagcaatggccatcatggaaccatatcatggcgtta

SEQ ID NO: 382739 - DNA, 294 bp, Zea mays
acgcatcgaacacggtccgggacgtggaccgtggttattgctattggataggaattatatttgggtgaatttaacttcaaaccaatccgtaatctaactggtagcagtttgcttgggttctgaagatgtagctgtttgttacaatttgcagtgtcttcatattttttaggcatatgggagtttcaaattctactagatgcatgatgcatataagaaagataccgtacccagtttcaacaagaaaagaaaagactagagaagggcgctatggatcaaaataaaactaacaactat

SEQ ID NO: 382740 - DNA, 292 bp, Zea mays
cggacgtggggcggacgcgtgggttcagcagcaactgctgcagctagcgcccagcaagaggcatagctctctgaatctgtgatcaggaacataagcaagttctctgaaatctgcgcgtccgcaagggtctccaatccgttcccaacagtagatctcttccttgtcgtctgtgaggatgctctcaagtggaagaccatcgctgccgagtctgtggtgaccaacggggctgaagaggaggaactgctggagaagaaatcgacttggcactgggtcggcgctgcgttaccactga

SEQ ID NO: 382741 - DNA, 287 bp, Zea mays
cccacgcgtccgcccacgcgtccggcgggccctgccgcctctccgagcggaggaaggtggagatcgcatgggacaggcacgtcgccgaggagctcgggtacaccgaccagcactggaagatcaacatcacggacccgcggaaatgggactgatccacgactactccgtccgtcgcctgctgcattttcgtacataataccccacacgtagctggtcgagagccagatcgctaggcgcgcacatgtttggttcgtgggtacatttaggccagctcagtttcataagtg

SEQ ID NO: 382742 - DNA, 275 bp, Zea mays
ccctggaaacaaacagagagctcccctctctagctgtcatcttttccaccatgccacctccgcccgtcctgtagctcgccctcagccacggtggatgccaccgccacctcactctcctgccggccgtcctgctctccatcgtcgccctggccatggacgccggtgaacttgcccctgttccatggccggcgtgccccatctctctggtgctcggcgccctcctatttcctagtccatggtcgtggtttcctctctccctcctccatctctgctcc

SEQ ID NO: 382743 - DNA, 292 bp, Zea mays
cccacgcgtccgcccacgcgtccgtatatatatatatcaatattacattattacgcatatatataattatatatataggtcctgtacctgtaaatatgcaggaggaccagtagggacgaccaggtcggctaggacccgattagtcgacctaatcgtcgactaatcgcgattagtcgcccaggtgtctcgactagctagtcgagcgacttgaaaccattggttgtagctagtgcactggccccatggtttaagctgtagcattgagcaaactgtttttcacatagaagaagct

SEQ ID NO: 382744 - DNA, 224 bp, Zea mays
tgcaaggctatccaccacacacacgccgcaacagtgcccgcctcgcacctgtcgcccgcccagcacaggacgacacgagtcctcccccgcccgcgccagttccggcaccatacatggccagggcctgctgctgtgcagtgcagtgcaggcagacgccgcgccacggccacggccacggccaccgcgcgtcgacatgtcacgagccatgtggtggcgccggctgc

SEQ ID NO: 382745 - DNA, 311 bp, Zea mays
cacacgcgtccgcacgacatggacatggcctcgccggcgctgctcaccgacgacctcctgtcggacatcttcctccgccttgcgagccggccgacctcgttcgcaccgcagccgcctgcatccccttccgccgcctcgtcgccgaccgcgcgttcctccgccggtaccgttcgctccaccccgcgcctctcctcggcttcctcgaccacaacggcttccacccggcgctctcgccccacgcatccgcccccgcagcgcgtgccgtctcgctcgcagcggatttctccttctcgttcctacccgcctcctcc

SEQ ID NO: 382746 - DNA, 178 bp, Zea mays
caatattgtagcctctggtggtcttggtggtgaggtttttgtttgggaccttgatgctgctcttgctcctgtagccaaatctgtggacgcaaaagaagacgaggttcctaatggaaactcagggcctcctttgacaacattgtgcagtgtaaattctagtagcaatattgcttcctct

SEQ ID NO: 382747 - DNA, 144 bp, Zea mays
ggacgcggcaccggtggcgagaagagtggaatgcttgttcaagatccaacactaagaaatgatgtggatgcgatatttgaacaagccagacaagcgggtatcaaaggaatgcctcctcctcttgatggcgagtcttccagctct

SEQ ID NO: 382748 - DNA, 181 bp, Zea mays
ggcctcaccgccaccagcagccgcgagcggctcgagatcctggacgtcgagcgccgcgtgctcagcttccgcgtcgtcggcggcgagcaccgcctcgccaactaccggtcggtcaccaccgtgcacgatgccggcgccggcgccggcaccggcaccgtcgtggtggagtcgtacgtggtgg

SEQ ID NO: 382749 - DNA, 312 bp, Zea mays
cccacgcgtccgcccacgcgtccgggactcttggcttgggcggacgaccagacgatgcgggctgggcaaggcgccgccgcagctctggcactggagaccggtcgactgcaccgccgcgccgccgccgcgtgtgccacttcgaccccgccaccgcgccacaactgcttccgtgcaagtctacagccagccagctagccaggcgctgttcacccgtgctcgcacgatgcagccgccccatgccagcaggtccggtcccaactcgtcgccacccgttgtcgtcgccggctcgtcgtcatcggctccagcgtctcg

SEQ ID NO: 382750 - DNA, 176 bp, Zea mays
gttcgggcaagtgacctgcagaccagccaacgatgtgaagctcagcttgtcgggactttggcaggtccactcaccgtcgtcgtcgtcgtcccggctcaaccatgttggaatcgtcgccatcccacggggcagcctgagaccagaacaccccaccggaggcggcactacagaaggac

SEQ ID NO: 382751 - DNA, 283 bp, Zea mays
gcagctgcagagcagtgccgggcgtccatcgtgcgcgccgcctccgagtggggcttcttccaggtgaccaaccaagccgtgccgcaggttctgctggacgagctgcaccaggcgcaggccggcgtcttccgccggcccttccaactcaaggcgcaccagccgctgctggacttctcgccggagagctaccgctggggcacgcccaccgccacgtgcctggagcagctctcgtggtccgaggcctaccacatccccacaacgacgaccacgaccggtaacgacg

SEQ ID NO: 382752 - DNA, 186 bp, Zea mays
cggacgcgtgggaccaaaccagctgagccggtgccggatgaggaggagaagacggtcgtggttgccgaggaggaggccaccaaaacggtggaagccatcgaggagacggtcgccgccgccgccgccgcgtccgaggagcccgaggcgggcgacccgaaggaggagcttatctggggcttgccgctg

SEQ ID NO: 382753 - DNA, 231 bp, Zea mays
ctagttctagatcgcgagcggccgccctttttttttttttttaactcaactgaactcttttagctgtttggttcagaaacatctcaaggcccaaattacataaaacaatttaactgtgagaatcttaagcagagctcaaaaactgccgagctcaggggcatacatcttacatacggaaataccaacccaaccctaaatatccagcaccatcatcatcatcatcatccaaaa

SEQ ID NO: 382754 - DNA, 281 bp, Zea mays
cccacgcgtccggccacgcgtccgcagacgctggcgctcgtcaccgccccttccttcgccgcaccagcgcacactccgcgccgtggtcagaaggacgtccttcaacgtgcgcgcctactctccgcatagccaccggcaccgccgccgtggcaatggctgccagcgccctgcttgccggcggtgcaatggcccaggaggtgctgctgggcgcaggcgacggcgggctcgtcttcgagcccagccagttcaccgtcaaagccggcgacacgatcacattcaag

SEQ ID NO: 382755 - DNA, 145 bp, Zea mays
aaatttccagctcgacaagttggacttgttagagaccagtcagtagctgccattcatccactcccctttcccatcggaggaggacgagagatccgtcctgcggtgtgcgatggactcccccagctgccggctgttcggtgcccag

SEQ ID NO: 382756 - DNA, 211 bp, Zea mays
cggacgcgtggttttttttttttttttttcattcaaaccttgtcctttgttcaattcctcgtccgacaatctgggtcaaaacattaccaaaacgtacgtatgactccaacatgcataaaatttctaatgtgtccccatgaacctgtctagatggagcgtcaagatactagagggagagtaactctcaagcctaatcatcagcgcgttaagc

SEQ ID NO: 382757 - DNA, 152 bp, Zea mays
  unsure (1)..(152): unsure at all n locations
cagtacggtcggattccgggtcgaccacgctacgtacaggcgcgacctgcgagtggnccgtcgactcctgggtccagaacgccgtctcctccctgaccaccatcatccagaagtccaacctggacggcatcgacatcgactacgagcagttc

SEQ ID NO: 382758 - DNA, 301 bp, Zea mays
ggacgctgggcatctccggggtgaagattggcgatgagacgttcatcatcgcggcgctgatggcgatgcggcaccccaagtcgacggtgctctcgggcgcactgtcggcgcttgtagttatgacggtaggttgtgtgctcaactgaagcttttggcagctctgtttgggggaagaaaaaagaagctgccagtacttgctagtatgactgatccttctgtgcctccgtggtgatgcattcttaggtgctgtctactggactaggcaggattgttccgaatttgatatcgaggaagcacacta

SEQ ID NO: 382759 - DNA, 300 bp, Zea mays
ggacgacacctttgaaagtttcagctacgcgagccaaaaaaaaaaactagtccggacgggaggccacatcttttatttatcgcttggaaagaaggcttcctttgcaaattacagcgttagttgtttcgatgttgaggttgggcttgagaaaacattgggctagaatttcggatcggaggaagcagtttgatctggatccccatcctaggagtcagggacactaccgcaccatccgaatctagtgatgaagttatatcatcatcgtaatcagtagtacgcatgttatttagtagagaacga

SEQ ID NO: 382760 - DNA, 220 bp, Zea mays
gtcttgctgaccattttggagggaaactgcatctaggctacatgctgattcgtgacaaacagaaagaacttcaggtgctgagtgtaatgtaccgttttctgctttaaagagttactctgttttgggccttttggcatctgagcagagaaccaaaaggggcacggcaaaactgaagatgataggcgatctagagagcagagcaaggatcgaaacggcccgc

SEQ ID NO: 382761 - DNA, 304 bp, Zea mays
atcagaagtccataggaggttacggcatgatggtggatgcaatgtatggcttgatttcaggtgcacgaaatgggttctcttcttttggcccagggtatgggatgggcatgaatgttgaaggtgggatgggcggaacatttggtgcaagctctggtttcatcagcaactccaacgggaggcagatgggttcgtacttcgatgcaagttcgaacagattgggtagccctattgggtagcttggtcttaattatgctccgggatcaatgttgagttcgatgtctaggaatgtttggggtaatgggag

SEQ ID NO: 382762 - DNA, 299 bp, Zea mays
gccaggcattggagcagacagctactcgtgccaagagagatggttcggacgtgccaagtgaccagtctgaaatagagaaggcggtgagagatatggttgagcagaccacttccatgatccaggcggcatatgcagaagaagacgacgtcgcaagatcaagagcgctgtcgcaccacaagtctgagatgtttcgccgcttcaagcgcctggttcaggtccgtcatgagctactggaagggaaatgcgaccttggaaagtttgtagacgaggtctgcctcatcctaaagtacgtagtgagc

SEQ ID NO: 382763 - DNA, 316 bp, Zea mays
ccgcccttttttttttttttttgaggaacatgtaaagcactgcaattgcatagcgaatgttttttttccaccagcacgccgcgtatagcaatcgaccgtctcaacaatgagctactctcccaacaaagcagaacaaaccactatacagtacagtacaatttcggacgggttcgcttcttcttactttaaagccagccacggcggctgtaggcatctctcggctcacgcacagcaggagcagcagcggaaacaaacaagccttcgtgtccgtccaacagtctctcccaaccgataaccggcagcaaatcaggcgcac

SEQ ID NO: 382764 - DNA, 218 bp, Zea mays
aaaaaaatgttattgttgcccttgatgtcttatttatgaatctgtcccttatcacctcgaaattcaggaagctctcctgttgttcccgttggaatgcaaaatgccctttggtaataatgataaaatttgcctcaagcatggtctagaatgcacccctataatttgcctgattctatatatcatcagaaaagaaagggaggaggtagcatctgctactc

SEQ ID NO: 382765 - DNA, 170 bp, Zea mays
cccacgcgtccgcccacgcgtccgcaatgagctcgtcaaggatatggctgcaaacacgagccgttcaatggactggctagatcaaaatgtgcagccttatctccctcagacgcgcatcgttgggatcactgtgggaaatgacgtgctcggaggccaagatcagagcttgt

SEQ ID NO: 382766 - DNA, 221 bp, Zea mays
cccacgcgtccggacctgctggcgtcgtcggcgcggggggagacggtggacctcacccgccatctcatccgcctctccaacacctccatcatccggatggtggccagcaccgtgcccggaagcgtcaccgacgaggcgcaggacgtggtcaaggacgtggccgagctcgtgggcgccttcaacgtcgacgactacatctccctagtccgtggctgggatct

SEQ ID NO: 382767 - DNA, 310 bp, Zea mays
gctcaagcaggtcgattgcatggcttcccttatatggcgtcatcagcggttttgatacgtaccggccattcagatatttaggatatagtttgagaagtttcctggccaattcagtgtcgtagtgttttttatttgacatctgtgtacctaaatcttacaccatttctcaaaacacagccagggccaagggagagaccaatgcagtgctttatcaagaggaataagaacaactctacattctacctctaccttggcttcacaagttcacctgtggataaagggaagtttctcatggctgctagaagattta

SEQ ID NO: 382768 - DNA, 304 bp, Zea mays
ctcagcggtcgcgcctggggtctccggctctccgctcgccacgcccacgcccacgcccacgcccacgcccacgccacactacccacgccgccgacggttccgcccctgcgtactctaggtatcccgtgtccaacggtccacccccaccgcaaccgccgtccgtccgtccgcccgccgccgcaccctgctagggtttcggccaggccggatccgccgccgcctgtagattctcctatccgaccgcggcgcctcgagccgcaccggcaacctcggacctgaatacctgatacactgcacttcttca

SEQ ID NO: 382769 - DNA, 255 bp, Zea mays
cagtacggtcggaattccgggacaaacacgcgtccgggacctggtgagttctttgggcagccacataggggtgaaattagaggaattttgtcttctagaattgcgtatggctcttgttggtgctgaaaggaccagaaaatatttggtgtaactgtagaacaatacatctgttttttctgccgtttgttttcgtttttgttttttcacaacgttgctgtaagttagtgctggaaatcacaggtacattcagttcta

SEQ ID NO: 382770 - DNA, 246 bp, Zea mays
ccgctcctctcccctctcccctccgcgtccctgtcccctgctcctcgcaccctccgcctcccgccgccgcagcttcttcaccgagtcgcccgccgccgcccgctgctgcgcggcatggcctccgccgccgcccccggctcgtcctggaggagctaccctgggaccattccttcgtccgcgagctgcctggcgacccgcgatcggacactatcccgcgggaggtcctgcacgcctgttactccaggg

SEQ ID NO: 382771 - DNA, 303 bp, Zea mays
gagatttctctgtgttttcacgcacaaggatcgtgccccggccagccccagctggtagcgttgcttctcgatcttgcgattgttagctagcttgcaaggtcaaggacgggccggcgatggtgaacctggtggaggcgcagaaaccgctgctgcacttcctggtcaggagggccgggctgcggcagcacgttgtcgacgtcgatggcgccggcacggtgatgaccttctgggtgcccaaggacaaggttcccaaggagaagggcaccgtgcaggacatcacgggcgccggtccagctacggccg

SEQ ID NO: 382772 - DNA, 222 bp, Zea mays
accggaggcagtatgggatttggtgcccacaggaagtggagggagagcggtctccggtctcgcctccttcctcccgttcccgtcgccgccccgctcccgcccctggttttgccttgcctagccttcgtccgtctactacttgtatggatgcaaataccattctcaacttgcaatctctcgattcaggattaatacccacccccgtcggtcgatcccctccct

SEQ ID NO: 382773 - DNA, 192 bp, Zea mays
ctccttcccgtccatcgccgtcgccggggcgccctacaacttcaaaatggcggctaccgcaccgccatggctatagcaactatctcccccgccgctccgatcccatccgcgcccttcccatccctccccctcggcctccgcctccgccctcaacccctccttttcgctgcttcccgccgccgcctcctccat

SEQ ID NO: 382774 - DNA, 259 bp, Zea mays
  unsure (1)..(259): unsure at all n locations
attgcctttggatcctangaaaggcgacaactctagcgagcagtggatctagttggtgctgatctagttcgtgatgcaaaggataggcggtgtttcttgcgatgccgagtagcgactatgttatctcgcacgggattgctaagcaaaggagagatctcgacagaggtgatgttgaaaagagcatccatatctcaagttccaaaaactgcaggggttggggtgaagcgcgatccccaaatgacctggatgaacagggcac

SEQ ID NO: 382775 - DNA, 190 bp, Zea mays
ggcggatcgccttctgttcctcctgccggctccgcgagaggaggcactgctaaggtgaaattttgctttgttttggttgggtggggtctcgagttccctgtggcgtttggtggtgtgatttggagcgggattggaagggaaggtggttaggctctctgctagtttaggtgaggcggtttggttgtggcgg

SEQ ID NO: 382776 - DNA, 204 bp, Zea mays
  unsure (1)..(204): unsure at all n locations
cggacggtggntttgatcaaaccttatataaattagacaaacattccagctaggaatccagctaggactcgttccagctcaatccactggaaccgaacggactcttagagtgctcgtaccacgaagcaagccattagagatcaatatgtattctcataatcactgctacatgcagctctatagaacacaagaaacaaaatcacg

SEQ ID NO: 382777 - DNA, 314 bp, Zea mays
ccacccgcggcggcagacacccaaaaccgtaaccctagattgcaagaggacatgaccagcaagtttgggctcgccggcggcatcccggagcggcgggtgagaccgatctgggacgcagtcgactcacgccagtacaagcccgcgctcaagctctgcaccgcgctcctcgccaagcaccctacatccccctacgcgctcgccctcaaggctcttattctggagaggatgggaaagcctgatgaagcattgagcggggccctgaatgctaaggagctattgtattcagacaacatttttcattttgatgatcttac

SEQ ID NO: 382778 - DNA, 229 bp, Zea mays
acgcaccgacacggaccgggaccgtggactgtcgagacgcgtgggcggacgcgtgggcgcttacaccatcgccatgagagcagagagagatcaggtcgtcgagagagaagaagggggggatcaggatccgccgccatggatcctggctgggtctcgagcattggtggctggtgctgcgcagatttctcgccggttatgatgaagtgctgcccagccgtgttgtatcgta

SEQ ID NO: 382779 - DNA, 146 bp, Zea mays
cttttagaattgctaaaagccactcatatcatacacttgcactcttgggatattgagaggcccaagagtgcaagtgtatggagtcagtgcttttagaagttgctaaagctcaagcattactacgccatggtcacgtgagtgggtga

SEQ ID NO: 382780 - DNA, 240 bp, Zea mays
gcagcttgcttgcgttgattactgtcttgagcgtggtagcagcgttgttctactgaactacagctccattcatttcccacaaagatggtgtgttacaactgttgaggcttgagttgcaccttttggtgcttatgggttggcttcctgattctttcttttgagagcaactccaatagttatataaattttagccctctaaaccacagatttaagaagttgctaaataactttgagagtaaa

SEQ ID NO: 382781 - DNA, 183 bp, Zea mays
gccacgcgtcctcagacgcgtgtccatccaagcgcgctcaatgacttccgcacgctgcagacgcactacaagctcgtcgtctgcctcatgccgttcctctgccgccgctgcggctaggcgttcgccgtcaatggcgactgtcgctcgctctatagtgagctgctgcaggctcgtgttactggt

SEQ ID NO: 382782 - DNA, 266 bp, Zea mays
gggacaggttcgtggccgtggagttcgacacgttcgacgactcctgggatccccacctgacctacgaccacatggggatcaacgtgaactccgtcgtgtccgtggccaacatctcgctgccgagcttcagcctgaacgggcagatgagcgcgcgggtggactacaacagcagcaccagcgtgatgggcgttgacctgagattcgaccgcagccccaagttcggcagcgctacgcctatcttcaacgtgagcgccaaggtggatctc

SEQ ID NO: 382783 - DNA, 270 bp, Zea mays
cggacgcgtggggagggccaagactttggccgacaagcttcagatgccacccgagacgacgaagccgcacactctcgatcggtgacctgattattcggctgcctgtacgtgtggtgtggttcgttcattgtattcttacctgcttctgtgtgctaatcaggtgtgctgcgacctgcgagagctgttttttttttcttctcttttgtcgtgcgccacggagaattttcgtggcttaataagctgacccctggctctcatgtgctcagtcct

SEQ ID NO: 382784 - DNA, 312 bp, Zea mays
cccacgcgtccgcccacgcgtccgtgattttccattcatcatcgatcttcctgcgtgtctgaactttttctgctgtgtctgttggccggagcagaggttgttgctacacgtatatattctgaagaagagatcgagatgaccagcgtgtggaagaccaaggttctgcctggcctcaacaagatctttgacaaggatggcaagaaggctgcagctgcaggcttcttgaagtccttcaacaaggaggagattgacaaggagattgaggacaagaagacagagctggagcccaaggtcgtggaggcctacgaagca

SEQ ID NO: 382785 - DNA, 305 bp, Zea mays
ataagattcatgtaaatttctgatgtctatatttacaaaaatgattttaatgttttgttacactgacttgtgtttgtactcgttctcagtgtctattgcataatttcctaattttcttatgctatttttctgaaatgagatgtgctaattttatttttgtatccttttacttatggttgatcaagttttagtacctgtttgagccatggaatgtgcaaatttcttttggaaccgcagtggagtttccaccctttaatttatcatagcaaacgtgtctacactgttctactatggcgaagggtgct

SEQ ID NO: 382786 - DNA, 149 bp, Zea mays
tgcagactgcatagagggcggtgctgctgtcgtgtcggtcgtttcatatcagcttttgttgcctgcaaaatgaatttaagaatgtgctttgtcacgctgccacgtcagtcagtcagcacgcagttgctaccgcccaacggtactgttct

SEQ ID NO: 382787 - DNA, 132 bp, Zea mays
cagacgtgagcgagtacgcatgggcgagacgcgtggggctcgggcacgtactggtgagaagctttgaggttctagccgtacaaggaactcatcgccctagtcggcgagtgacggtacacgacggtcgtcacg

SEQ ID NO: 382788 - DNA, 163 bp, Zea mays
gggacggtcggacgcgtggcggaccgtggcggaccgtgggcggacgcacgggtgtaaacaaagacgcctgcaagttccttcatttcgcggactctcaattgattgaatgttttgtagagagcaaagagcattcagttcagtttacctggaactactttttttt

SEQ ID NO: 382789 - DNA, 301 bp, Zea mays
ccacgcgtccgggacgtgggttttttttttacataatcataattcataatccattacttgcacttgcagaaaacacagcttctacccctacccatagcatgccttgcaatgcaactgaggggaggtcgttaactccatggaaagctgccttaaaacatgtagctccatgagacactagtagtatagtacagtaactaatactagtatgaatcaattaatccttaacgcttatttataccgtgaccaattcttggtcacgtaggttgcagctgtaattaatcggtcagtgttgagtggatgg

SEQ ID NO: 382790 - DNA, 186 bp, Zea mays
cagacgctggtcggtacgcgtgggtgcctggcgccaacgtgagatgctgagcaagcaagcgcgtgggagagcggccatgcgggcagcgcgcacatgatcagagaagagagacctcttcgatcatgtcattctcgagctcgcgctggataagggcatgcctggaggcttctacgcgcttcactgcgc

SEQ ID NO: 382791 - DNA, 268 bp, Zea mays
aaaaaacaaaaaacaaaaaaccaaaaaaccccacgcctttcctcgccggcgaaggagaagccgcagcgctgctcccacgccccctaggagcgcgtgcctccattccatgtgcgcccgcccaccggaggataacctttgatcatttcgtttgctggacattggatcaactggtgctgttatacatagaaaggatttcattttaaattctcatctatatttggtggtgccataatcatttttccactagcgtttggcaataatgtcggag

SEQ ID NO: 382792 - DNA, 247 bp, Zea mays
cctgcaaaacagctgggttttaaataaaattcgatctttcatgttcttccaaccataactagccccaacttatcctcacgactgcactaaaccaagcgcacaggagcacacagaggggaggcagaacataaattacaaagaagtgcagcattgcagtccttgctgctcctggtcgacctcgcgtcaggtgtaaggggcaaaggtgagccacacgaacccagaagaaatcagcagtcgttctcacatg

SEQ ID NO: 382793 - DNA, 254 bp, Zea mays
aaaaaatgtgctacctgtttaaaacaatcagtggaaaagaaatgagtgagttattaattaagaatgcaaaggtacattgggaagagagactgtacaaagagaacttttgaccgtgaaactcaattcaaaacttgtgctggtctcagttactcgtgctctcatgacctttgcttcacaggcccgcgattacatgctatacctgtcattgttcgacattcttggcagaatggaactatcccagctcgatgcctacc

SEQ ID NO: 382794 - DNA, 102 bp, Zea mays
cccacgcgtccggccaggcatgctcaattcggcatatccttatcagatctccacctgaacaagctgcagccgggcctgtcaccgcacgggctccaccgccag

SEQ ID NO: 382795 - DNA, 290 bp, Zea mays
gacctgtcggcgctgggctcgttcgacgactgtacggccgcctgtccgagatgttcggcgtcgagggcgcggagatgcggaccgcgtgctgtaccgcggcgccaccggtgaagtgaggcacgccggcgacgagcccttcagcgatttcgtcaagtcggcacggaggatcacgatattaaccgatgctgggagcgacaacctaggtagctaagtgaggagcagtgaaccaattccagccgcgagtactgactagccaagtagctagtgtgtggttacaggaacagcatagg

SEQ ID NO: 382796 - DNA, 223 bp, Zea mays
caaatcaacttaatccatattatacgagtgtactgaatagacatgtaaatgagacaattcctgaactaatgggccaaaaactggtacctgtatcctgtccaagaattgtacaccaccccaatcaagtaatttcttcccaactcatgatagtcacaacctccaacaacccagggcctaatgaatcgcggcagcacccaaagcccaggaccgcctcagcgccaat

SEQ ID NO: 382797 - DNA, 286 bp, Zea mays
ttctctggtgcctttatacaggtccgctatggaatcacaatcctgctgggtcctggcttgcacatctgtggcttctcttccagtcttcccgcaggcaatctatatgtctgaaagcttgagataaatccaggaaacgttgaagaatgcatgcacaaagtacagtctgttaaatatggagaggaggtttgcttcaatggcatatttatgctgaaacttctagttcaggccttgaacttggcaattctacctggacaatacaaagtccaagagctagcattacctacct

SEQ ID NO: 382798 - DNA, 210 bp, Zea mays
gtgcgactgacggttgctctagatctgttcatcctggtggttttgtgaggtcgagagcggcgagcgaatgagaagatgctggagaagctgtgtggacgacgtcgtggccgggcctcgcccggagacgggcctcgagaatctccgcaaggccaccaccggccgtccgctcgtcatcaacaaagacgcggacggcggcagctacaagcgggc

SEQ ID NO: 382799 - DNA, 284 bp, Zea mays
gtttctgaaaagtatttccatgagaaatccactctcgaatctgaaatcgaaaggctccaggaagttgttaggagttttgaagagaacctaacaaaagttgctggagagaaatttcagcttgaggcccaggtaaaggaacttgaacagacttctaatgatttagatgactcttctgcggagattataaagctacaagaaataatcaaggatctgcaaggaagattggaaaatgactcaaacgataagagtgtacttgaggaacgtgctatggagctggagcaagt

SEQ ID NO: 382800 - DNA, 318 bp, Zea mays
cacacgaccggggcaggttgcgcaagacgctcatgctgctcttccagctcgacgactccaccggcagaggcgtcgcgcgtccgtccgaggggccccaatcggcggagttccagtccgtttccgaagaggaggccgagggggcaagcggatctattttcccccctggcacgtctctctgtccaccgatctccgccgcctcactgctcaacaccatcgtcatgaacgtggttctcgagccatgcgtgtgcggcggcgacgtcgatgtcgaccgagcgctctagctgttcgaggaaatgcgtgggcccatggggtgcggcg

SEQ ID NO: 382801 - DNA, 304 bp, Zea mays
caacggtccgggacctggcatcgctgaagcttgggaagccttcaaaactgctgcatctatcgacccagaccatgccatgagtcatctttgttgaccttacccccacctcttagcgagagaattcttgtgattttcttgatttttgtttttcgcctattcatgtttgatgtcactaattttatttgttgttgttgtgcagatttgagatcgagcgaactaagcttttcatcaagatggcgctttttcaacttgtggtgtggcatgtcatgatggcctcaaatcatcagagaagcttcaaggggat

SEQ ID NO: 382802 - DNA, 308 bp, Zea mays
cccacgcgtccgaaatgcagtctgaaatagttcagggtttagctgaggaaaacagattggacgattgttgcatgtctgccatctctgaggaggatgtgttgatttctggacgagaagccgacataagggaacttccgaacgatgaagaattttgtgcggaggtagaaggatcaaggaaacaaatccaaagatgcttcacattggaagaagctgctgatacaattctcttctgtagttctattgtccacgaccttgcatacaaggctgcgactagtgcattggaaaatgagaaggaatcagagtttgtt

SEQ ID NO: 382803 - DNA, 268 bp, Zea mays
  unsure (1)..(268): unsure at all n locations
ctcactcgtccggataaatcctttccccctccatttcatttcatctnctcgaaatatggtagtcgttgatccgatagctgtctcctctgcgcaccagttcaccgtggtcatcgacggcttcgagacgatcgtccacgaggtcgttctccggctctacgtctgctcggtggccgttgtctgctcgggcttcctcgatgttatccgtctccagctcgtgtgtgtgcgcggcttgggctggggctacgtgcgcttctccctgtgcctgtac

SEQ ID NO: 382804 - DNA, 201 bp, Zea mays
gtagtttattgccgcgttgattcagtcctttgttggctttagtctaaggtcactagaccggttataccactgttttgcaatgtagactaccaaaatggagtttaaaatgaaagttaaagatagaaaaaaaaaaaaaaaaaaaaaaaaaagaaaagagaaaaaaaacatcaaaagaaagggcggccccccaaggggtaccaa

SEQ ID NO: 382805 - DNA, 318 bp, Zea mays
gacaactgttgagatagatgatgaaacatatgaagaaattgtcacgacctcttcaacatctccaagtatcatgtttaaatgttgatcatacgcatggagatgttgaagaggtcgtgacaactgttgagatagatgatgaaacatatgaagaaattgtgcgcaccacgaaacgcactatcccctttctttttgtccgaggtgatggtgtcatattggtttctccaccacttcgtacgacatgaagtttgaagttagatcatgctggttgttaattatgataactggtgtatttggccacttgatggcgttgcatggagt

SEQ ID NO: 382806 - DNA, 316 bp, Zea mays
cccacgcgtccgccgcccttttttttttgttttgtttgttttttggtttttttttagccaagtaataacccagtagtctccttttgtaccgttatgtaccaaactcagcaacacacagaaattccgaggcaacagcgaagaccaagacataataggactactactagcagttacaggccactagtttccgccttcaaggttttggcgccgagaacaagttggggtaggagaaatacggatcgtcctccagagacggcgacctctgcggcacatgagacggcacatagtcctgtgtctcgttggtgaaggagtcctg

SEQ ID NO: 382807 - DNA, 315 bp, Zea mays
cccacgcgtccgaattattcgacttcaacgaagagaaatacgagctgtccatctgggctcttctggattacgatgcacaagagtgggtgctgaaggacactgtgagctccctccagctctttggaggaaattgccccacaagtgtcgcattggagttgtacagcgaggtggccagcatgcatctggatcgcaatgtggtcttctttttttcacactgtgaacgtagattcatagcatatgacatggacagcaaggaagttagtgttttcagcagttccaaagctatacacaggtggaaggttggttgctatgttc

SEQ ID NO: 382808 - DNA, 303 bp, Zea mays
ggactcgtggttggttcaccggggcctgaaccgattggtttggtttggtttcctgcgctcgcacagactcgtacacaacaggttcaacaaccagtacaaggccaccatcggttcaggccccggtgaaccaacgcaacatcaaagtgaagtgaaatcgagggatcggagaggggcggacttactggttcatcagcgaggtcttcaaccatataaagagactcgagcaatctggggatggtattcagaccaagcatgtttcacgtgtaattggcggccttgataaatctcatgtgaaaccttatg

SEQ ID NO: 382809 - DNA, 307 bp, Zea mays
gccgcctcgcgtccggacgcgccgttcctccgaggtgagaaaccttgcgcatttcatctgacgacgatccagttcgcgccatgtaggccgttgtccacgatcggctttcggttttcagtgttgcctgctacacaaagtcacaaacccctgacaccaacgcgcacacgcatgccgccgcctcccgcccgcacgagcaccgaccggctacgcagcacgaaggacgggaggtgccccgtcgctcgccggcgatgatcctccacccctgacacgcccgcgattaggttccgtcctctgccgccgcgcaaac

SEQ ID NO: 382810 - DNA, 308 bp, Zea mays
attttatttgttgtctccaaatgggaattggacgtatagtattcatatcatgggaattagaagggagtagtatcctccccaaatcctgagattacgatgaacaagccttttaactcgtagccagatcaaaagacggcaggaggcacacacgctcggcttcgactcttcacctccgagaaggtatggaacgcgggcaaaacagaaacagaacgatggttcgacggaccgaaatgcattcgattttgaactcatggtagaaaagataaaataagaacgggagtgcgcatcacattacatcacatctcagc

SEQ ID NO: 382811 - DNA, 251 bp, Zea mays
gtcgcgtggcggatacgccgccgaaaaccaccgcgtgcccctgccgccggatcagcagggctctggcctggacatgcctcctgctcgacaaggcgtgcgcgtacacgacgttcgcgacgacggtggcggcggcgcatgcgtgcgttgtcgcgctggacggcgcgcacgtggtgcagtggaccaagctctgctacatctacacgcgcttcttggatcaggtctactgcaccctcgtgctcgggatgctggcc

SEQ ID NO: 382812 - DNA, 273 bp, Zea mays
gatcaaaaccatggccgaatctggcactcatgctgagcaaatagagacttttatcgttaataatcagaatgtgcctgagttacctgagcatgaagctatctggtccttctcttccttgtctgcagccagacatggttcagcgaaccaaggtggtgctgatacgcaggtgttgatttcgacctgtcatgaattagtatccgatcacagaagcacagtgatgatctagtggctctaactattgagacagaccgtttcagacactctctaacacat

SEQ ID NO: 382813 - DNA, 304 bp, Zea mays
agtaaactgggccaggcccattacagaggggcaagacagtaattaccccaaaccctaaacgggtattctaacagtatcctctatcctgcattgctgtactcccttcaggcctgcagtttagtttatgatatggccttttctcctatatagtatgctacatcatttcaattaaatttccacacatctctcttgtacttttttataataattcatacggcccttccttcatctaagggaaatcatttgattgtagcattagtccatgactgaactaaatactagcaggatgcaaatccctatcttg

SEQ ID NO: 382814 - DNA, 311 bp, Zea mays
cccacgcgtccgcccacgcgtccgcccacgcgtccgcccacgcgtccgcccacgcgtccgccttgacatacttggtgacgatgatggcaatgcttcaccaaacaacttggctgcaggacaagaggcatctgttcgtggttttgacatcaacttaccaaatcaggacgatatggatgatgaaattgctgatgtagatgtaaatgatgacacggatctgtggatcaatgcagccgatgcgctgcgagctcaagtgaacgcagaggagcatcaggagcagcaggacagctcaagctctagtgggagcagcagca

SEQ ID NO: 382815 - DNA, 215 bp, Zea mays
ctcgagttctgtgcctgtgcctctgctccacctctcctgccccggcgccgctaagcgacggccaccactcagcactcactctgctcgctcgctctcttcgtacacgctcccgcttcgctcatggaattaaccgtggtgatgtagcggtctgacatgatgcacgtcatattcgagtcggacttgacgatcctggcggcgtcgtcgctgttcgttcg

SEQ ID NO: 382816 - DNA, 298 bp, Zea mays
cggacgctggacgccatcagccatcgcgttccgcatcgaaccagcacatcgcaagacaactcagcagcagccaccactgccatcacatggagtacgccgccgtcggctacggctacgggtacgggtacgacgagcgccgccgccgccgcggcgatgtacggtggcggcatggagttcgaccactcgtattgctacgacgacgggatggtgagcgggagcagcgactgctggcagagcggcggcggcggatggcatagcagcgtggacggcgatgacgacggcgccggcgacatgacgc

SEQ ID NO: 382817 - DNA, 307 bp, Zea mays
cgcacgcgtccggcagttagccacgaaccaaacaggtctttagtcaccgaaccaaacaagcccttagttagacaggtttttagtcaccggaccaaacaagcccttagtttcacacttgttattgtggtgttgtggatgtatgatctgtgtatttgtataatattttggtcattggggaataagttcggcatcttatgtatagcgtgctatctgatacagtactgcatatcagttgtctactttcaaatttgtgcactgcccgtttgatttgtttggtcagaaaaaaaaagaaaagggcggccgctct

SEQ ID NO: 382818 - DNA, 267 bp, Zea mays
tccacgcgtccgcgacggcgagcggccgccctttttttttttttttttttatgcgagctagacctctaagatgattgacagggttgattccgttcacaagtagcagcagcagggatttgagtagctggtgcttgccgcttctagttacgtgtataccgtacacgtgcggcggcacatcggccgcaggtaagtagtactagtacgtagtagcaaacacccagaaaatcaagcgcagggtccgcacgatggacacgtcgtcacttggcc

SEQ ID NO: 382819 - DNA, 305 bp, Zea mays
ctggcattgtcacacacatctcagctccttgggttttccctctccatgagcagcagccacacattgccgtcttccttgctgcacttgtagttacagctagatccatctccccgccacttgattttttggcaagaacaagagcaggagctactgagcaagaagtaagtgcgtacgtgcttagtgagttatacttatactagcttgcttgcgggcgggcgcggctgcgatggagctggtgactatcgtgacgctgacgctactggcgtactcggcggcgatgctggcgcgggtgctaggtgcgcgcg

SEQ ID NO: 382820 - DNA, 295 bp, Zea mays
ctgctttcctgaattccattgtcaacaagaagttcccctttaccacgcagcaggtgaaggactgcattgctgtgtccgtgacctctgacgatgctgcttctgcccaggcagggatcttcaagaaggcaaatgaataccactactaggacatggatatctccgtactatactgtttctcacaattcataccacctttcattcctcccccttttggttttctcgtgtaacatcacctctaagctatgttgatcttgaattttgttggattgccatgtattatcatgtctaatatata

SEQ ID NO: 382821 - DNA, 308 bp, Zea mays
cacccgtctattctggtcacttcttttggggttctccgttcccctccccattcccctgcccccgcctcttcgagctagggttagggtttgctttgcgttcccttggaaattgatcgaatcgggcacccctaaccggtgtcctcaccgatccatccgttcatccttcgattcgatcaaatttccacctctcgacatcagcaatctcgctgcctctctctctctctcttttgagagagggggaagtaataaaagggaaaaagctagcaaggggatttccttgatcccatcatcgtgctacagatccttta

SEQ ID NO: 382822 - DNA, 316 bp, Zea mays
cccacgcgtggggacaagattggtggatcaacttcttcaagtgtgcaagtgtgcagagaattgtagcaagaatgtcgaacgttccatgagcttggagatagaatgggaacccttgatccgaacccctaagtagcagtaacttggacttcgcgatacgtcatatcaacagcgtcaaaggcattgcagaggcattatggtcctttaatgtggtaacaagtggacatgtgcaattccaagcattggctctgaatattcctagcaacaagaaaaggtgcaatgcgtactgtaacgaagcacctgtggtactgtagctgca

SEQ ID NO: 382823 - DNA, 324 bp, Zea mays
cgagctgcggtacgcgtggtcgagaccgtgtcacaactacacccggcgtccaaaccagccgagagcgctgactgctccaccctccttcctgcttcgctcgccttggtggacaccgcagccgcagcgcgtacttgtaacgtttccggagccgacatggagcgtggccgcagcacacctttcctcttccggccttgctgtcctctcctcctcctagtctgttctccacgcgcggcggtgcgcgcggcggtcggctctgactcactgcagcagctgtgcgttccccctggtttcgctaacgaatatggccacgcggactgcgacgac

SEQ ID NO: 382824 - DNA, 262 bp, Zea mays
attgagatcctggaggaatcatttggacctgatgatatacgggttggaagaactgtgcatagtcttggaatatgctatcatcttcaactcaagcttgctcaagcccagacatgttatgagcgtgctttgaagatagaaggacgtgttctgggggttggtcacccagagtattcaagtacaatgtacagtctagccaaggtgctcagtctacaaggaaaaagaaaaaatgcagaatgctttattgaagagtctattaagatac

SEQ ID NO: 382825 - DNA, 280 bp, Zea mays
ccacgcgtccggccccctcccttctcagcctcaggcgatcacgcccactggccgtacccgcgacgtcttcctcctcggctccgccgccttctgccgatcgcctccgccgaatcgaatagaagaatcgagcgccgctgctggcgaggggctcggcgcacagcgcgggatggcgagcggcacagcaacggggagccaagcacggcgcgcacgaaccggtggacgacctcggctggctcatctgcgtgaccatcgcgacgccagtctgcatctcgtatgatta

SEQ ID NO: 382826 - DNA, 142 bp, Zea mays
ctctggaaccgctctcgggagccctggcggccggcaaccgtggtggtgaaccgtcggagctcgcgcggcactcgcgttctcgggcacataccagtactgatcaagcgtgagtgtgagcgcgagtggaacttggccgtgaagt

SEQ ID NO: 382827 - DNA, 355 bp, Zea mays
ggtagaggtccggatcttgaagcgcggcgaggacccgcccgctccagctcccgcgccacccctacgccggtgatagcagcgcccccgcggccaagcgcgggttgaccagcgcgccctctgctccactggtcggatcgggccgcaggtcccgccgtggtgccgacgaagaagatggtgtcgccccccgctgcatctccagccaacgcgaccgtgttcgcgcgccgggtgttttctgcctcggtgcccgccgtagtgccgacgaagaagacggtggcggttccgctgcatcaccagcagagccccgtgtacgcgagcctgcgttttctactgcacgcctgagccagctcctcccatg

SEQ ID NO: 382828 - DNA, 322 bp, Zea mays
cccacgcgtccgaactcaaagatgaggagaaacgcggcaaaagtcatgattattctgtggaagatgacctcgaccagctccttaaagctatcgatagcaggaccttccgacgcgcgcttagtcctggcagtacaggtggagatgcgctgggtaagagtgttctgaagaaaccagctaggtctgggttgtctcaaaatgcaggcattgggatatcctccaaggctgttaatatgaagcaagcgctaagaaggctatgcatttcccaggcatcagaaatggctgcaatgaagaggttgtcgatgtcacctggatcttcaagttc

SEQ ID NO: 382829 - DNA, 309 bp, Zea mays
cccacgcgtccgcccacgcgtccggttctagatcgcgacggccgccctttttttttttttttaaacacaacgaatacagaatctggaagaagtgcatggccagctttataacatcgctcgacccaagattattggggaggaaaagtaaacataagccacctaagtcatggaactatggcccggtcaaaatccagcgctgtccaatacaaaatgattaaggcgtcaaagagaaaacagaaacaaaaacagaggtttattgggctggatttggggatgtcagctccggtggggcccctcgagtgatgccga

SEQ ID NO: 382830 - DNA, 129 bp, Zea mays
cccacgcgtccgcccacgcgtccggcggcctgagggcggtgggagccagcagccgctgctccaccaaggcggtcgcgccgctttgggagcgcttatgccccaaagcgaagtttgacccgacctcttagc

SEQ ID NO: 382831 - DNA, 343 bp, Zea mays
agtacggtcgaatccgggtcgaccacgcgtcgacaggtccgcgacggcgagcgcctacggagtttgatcctgaaatacatcagggagaagagtatgataggtcacaagtatgactgggagcactggagggtgaataccagggctaagcagtcagtgcttttgtcagtgatgataattttgatgtctttcttttggattttgagcattgtgctgactgtagtaaagatgcatagtcttggtgatggtgctgtcctatggatgggctgctcggtagcacctccagttgtttggtaacgctggtacctggcaggctcaatggccagggaattgcaaacagagatct

SEQ ID NO: 382832 - DNA, 321 bp, Zea mays
gtaagtggttcgtaggtttcggttggtatcttaactcgatttgggatcctttttcttttgggtttcgatttcatccattttgcagcccagccggctgtgcttttcggtggcgggattcgacgaatagggtttcagctttttattcttcgatcatgatgatgttttagtgcactttgggaattcttcttgcctttgcaggctagggtttgaggaaggggctcttactattggcttcaaatggatttctttcctgctatgtttttctttgttatatagttccttttctctgattctgctcgatctgtcattatctgcagtcaa

SEQ ID NO: 382833 - DNA, 136 bp, Zea mays
  unsure (1)..(136): unsure at all n locations
tngtagaggatgaccactgcgttgctggtgcccttgagaaagaggaggattccgggaagatgaagcggtccccgagccatagcagcgtcgccgcctcctccgccgccgtgctggctgaccccgccgagaagccgcg

SEQ ID NO: 382834 - DNA, 168 bp, Zea mays
tacgtcggattccgggtcactctccgtcgggacgtccgaacaggtcccgacggcggagctggggtcggcgccgactacctcggcggcgtcgcactctagtactccaaggcagtgcacgcgtcctgctggcgaccggcttcggcgcgatcaccggcgccgtgctgggat

SEQ ID NO: 382835 - DNA, 144 bp, Zea mays
cagaggaatacacactagctagccactagccagtgcagtgcagtgaagtgcggtgcctcgatctttctctctctctgctagcggctagcgttactaccgtcctcgtcaagcagtgtgccggcctccaggaacgatcgatatcgg

SEQ ID NO: 382836 - DNA, 137 bp, Zea mays
ggacgggcggacgctggcggaccgtgggcgcgacgctcgggcgttagctaccctgcctactctccagaccactacgccgtctgcgaacagccgggcaagagcccgatccagaccccgcgagcaatccttgatatact

SEQ ID NO: 382837 - DNA, 211 bp, Zea mays
gtcaccggcgccgcgggcttcgtgggcacgcactgctcgctcgcgctgagggcccgcggcgacggcgtcctgcgcctcgacaagttcaactcctactacgacccgtcgctgaagcgtcggcgccaggcgctgctggccagccgcggcgtccttgtgctcgacgccgacatcaacgacgccccgctgctggagatgctcgtcgacgtggcgg

SEQ ID NO: 382838 - DNA, 274 bp, Zea mays
ggacgtgtcggacgcgtggcggcctccctcgggtcgaccacacctcaccgccagcgtacctcgctcaagttccagtcctacctggacggcctgccaacacaaccaagagggcatttctcagttctcaccatcgtcccatggcgtcgacggagatggagatgggcgtcgtaggcggcggcgtcaatagcagtggaggaggcagctgcggcgggctggtggtgacggagctgagccacatcaatgagctggtgaggcagctggatgtgcacctcgg

SEQ ID NO: 382839 - DNA, 311 bp, Zea mays
tctagatcgcgagcagccgcccttttttttttttttttttttttttttttttttaaaagaataactaacaatataatataattggcatgttttatggatcataaggcgtccgaagggaactaagaccatataagctgcagggccaataaatccagtgagcagaaaaccaggacaaaactttagattgacaagaggattatttcctgatctccttgcatgtatgtaagacgttcctttatgcttttgcttgaagcataaagatgctgcagtggtgccgctagttaatcccatcaaatgcccaagatggccat

SEQ ID NO: 382840 - DNA, 309 bp, Zea mays
gcaccgttcccaattccccactctcgccgccgccgccgccgcccccgcagccagccaggcagccaccaacttcacggcataacgaagtcatagccaccgacagcggccaccgcgaggaccggtgcccccctatgtgccgaacttcagctgcttccctcacctgccgcctgctccccgcgccgggccctggcatggtggggtggagctaggaaggcgtgacttcgcaccgcgccggcgaaggaagaggtgtgggagcgctcgaaaactaaggtgggcgcctcgccgccggatggccgctgatgacgcggc

SEQ ID NO: 382841 - DNA, 260 bp, Zea mays
cttaattcttctccagatgccagaccggacatcacacaggtgtggttccgtattaatgagttacttccattggagctgcaaaaggatttacctgatggatctccatctggatcagcatttgaatctcacactgccactgatgaagtatcaatgaggccacagcagatgagtggctcttcatcaagagagatacagatactcctatgatctcacatatgtcaaccctgaactaaggacatggtcatgggatttgcaccaca

SEQ ID NO: 382842 - DNA, 173 bp, Zea mays
gcatcattaacacttcaattctaggtctattgctatggtatagtagcactctttcaatctttcatgtgcacagctgatgcttatgtgatctctcctgctttagtggactaacactggtgagctgtgtcgatgcctgctcaaatcagtaaagagagagaacagtcagggactcg

SEQ ID NO: 382843 - DNA, 320 bp, Zea mays
cggacgcgtggacgcggtcgcgcctccagcctcccctacccctactcccctcgcgcccagggaggagaccgagtcgcggcgagcgaagattccctccgattgctctcctcctagaacttccgatcggctcgtgatggccatgcagcagcacgcggcgtcggcgtcgagctccagcttggggctgcaccttctcgcctcgccctcgtccatcagggaggccacccacaccaaggttttcgtgggcgggctcgcctgggagaccagcagcgacaggctccggcgcttctacgagcgcttcggggacattctcgaggccgtcg

SEQ ID NO: 382844 - DNA, 171 bp, Zea mays
cccacgcgtccggattgaagctgatttgattggtaattgtaaacaacttgtctttggatctttgaagtcaaacaaagtcagttggttgaatcagctggatattgtatgcctttttttttgtgtgtgtgtaccggtatcacagaattatgcatgtcagataagtgtcaatcg

SEQ ID NO: 382845 - DNA, 295 bp, Zea mays
gacggcgaaccggcacaccgtcgcagagcgcagctccggagggctggcctgttagcagcgtgctttgcaagctgcggcgccagtagcaaagtggtccatgtgagttagaagttcttggaaagaagggtatggtccaattaaatggaaggtccataagttcaggcacaaaagttccccttacaggaggggatgaagtcatattcaattcatgcggcaagcatgcttatatttttcagcatcctttgagtgacagagttcctaaaacggtgccatcatctgctgttagccttataga

SEQ ID NO: 382846 - DNA, 292 bp, Zea mays
ctggcaccatgggcagcgcccgggatagacagcgagatcgagctcttcgtccaggtacacactcccccgcccggtgacccgttgccggacctggagtcacgctgcctagactcgccgctgggtggattcgtcgaggtggaggtcggattgtgaccacgccgtccagttaggacgtcgtcgtctccagatccaggggatggggttgctcggcatggcggccaagggcccctcgcccacgcgtcgcctcctgccgcagccgcacttggccgtctcctcgctggtggcctccatg

SEQ ID NO: 382847 - DNA, 304 bp, Zea mays
cggacgcgtggtgggtttccaaaagttagttctgttgatggaagctcttagtttgatggcccagatgagaagaacttttcgaatcctttcgagtgtgtccatcactttcactcatatctaagctattatcatctgggccatcaaacgaagagcctccatcaacagatgagtttcttgaatcaatgataaaggcagatgctccccttaatgtgaagtacctgagaacattggtacaatgcttatccatgcttggaaatgttgcagctgcaggagtagtgatatgccaacgagtacgccctacaat

SEQ ID NO: 382848 - DNA, 220 bp, Zea mays
gttggatctcgcaaaaatgctagttgcttaccagggatggtgctgaatttgaaaaaggcagtatcgtaccccaaccatcttggctttgagtgtagtgctgctggaggcaggctagagtgcacaatgcaaaacattgcagatggttttatgaacacttttaactacagatgcagcaaaggaatagaaagtgagcttaacactttcattgtatatagatgaa

SEQ ID NO: 382849 - DNA, 261 bp, Zea mays
  unsure (1)..(261): unsure at all n locations
cccacgcgtccgcgaccgtggcgactgatntgtttatcgataatcgtttggattactaaatcaattcttcacgctattaattcttcttacacaataatcattttaaacttgagtttcgcgtgacacgaccactttatacttatgtacacaatatattcatcaaaccaataattaagctaacaaaaatatgaatcggcttaccatactaaatctgacgcgctatccgcgaacacggcaaggattctggttcccccttgtgtc

SEQ ID NO: 382850 - DNA, 306 bp, Zea mays
cccacgcgtccgctcccacttcctctaccagcctagggcctaggctaccaccccagtgcgaaggaagtcagagctctccgcctccgccggcggggctcgatactgatgggtgtcttcgggacctcgcgtcctgcctccgtcaccctctgcgccttcctcacattcctcaacctcttcgccttccttctcgccgtcggcgccgagcgcgccgcagcaccgggacagtggtgccggacgagtacgacgagcggtcctactgcctctacgacaccgacgccttcacggtctacggcgtttccgctttct

SEQ ID NO: 382851 - DNA, 310 bp, Zea mays
gaaaaaagtaaactcatcagaagatgggggatttcaaagccaacatatctggttttgatctttcttgatgtttacataagctccaatgcatttgaatgtaatcaaagaaagtttgaaggaagtgccatcctgattaaaggtttggcattctttaaataccttggtataaaaccttggttctcgatagtgtgttggctatggaaaaaagtaaactcatcagaagatgggggatttcaaagttttttggacaatgtgcagtacaaagccactggaatactacgctatgaacgtatctttggagatggctacg

SEQ ID NO: 382852 - DNA, 121 bp, Zea mays
tggcagcctttgccttgattcgcactcaaagcgagagtatgtagtttttcgaatgagcacaaccattttgcaccgccaagaagcaccatttttgtccttaggatttaacttagagtaaagc

SEQ ID NO: 382853 - DNA, 237 bp, Zea mays
cccacgcgtccgcccacgcgtccgcagtatgctattcccttgctgcccctcgctccctctcgctccggtcttccgtttgcgccgtctgcgttctccattcggtgagtactccagttcgtccgttcttggtccaggtgagcgcgaactcctacccttgtgcggctagggttcgtccgcttcccctcctctgccctctcctctctgccgctggtgttggatctgtgcttccctcctcga

SEQ ID NO: 382854 - DNA, 310 bp, Zea mays
ctcggatctcgcggtggaagtcgccggtccactcgatcagcgagcgagtcggtgccgcgcggcggattccccgacccgagcaaaggaaccggacatgcggccgcggctggtgctcttcggccgtgacagtcttcttcggcgccaacgacgcctctctgcccgaccaggtgcaggcgcaccagcacgtgccgctcaaggagtaccagagcaacctccgcgccatctgcgcctatttcaaggagcgatggccctccactgctgtcatactcatcacttccccaccgatttacgagccagcgagaatccgaga

SEQ ID NO: 382855 - DNA, 306 bp, Zea mays
ctgatgaaagaaaaagtcagatattggatgtggtgaagagtctggccggagggtttgatatggatgttatcttcaccagaatggatggttttacaatgactcaagagtggttgcttctggattgcttagatctcaaccttcgacatggttggattgctgctagggatttgttgaccggacccgaagtatcatttgaaagtcttacattggcttctaatgaacctggttttccacatgcggaggagatcaagaattttctaaggggacctcaacttactcccattggcttggtttcgctgcaagaag

SEQ ID NO: 382856 - DNA, 274 bp, Zea mays
cgacgctgtggccaccgagttcagcaacgccggccgcttcaccctcactatcacccgcgccaacggctccgtggccatcgacaccggcgtcgtgcaggccaccatcacgcggaccgtgttcgaccagaaccctgtcgccgtcttcgccgtatccaaggttctcctccccaaggagatgttcacccgcacagccgccgcctccatcgtggccaccaccgcctccgcgtcctcccccccaccagccgcgacaccccggaggcctccgagagcgcgc

SEQ ID NO: 382857 - DNA, 306 bp, Zea mays
acacgcgtccgggacgcgtggttttgggggacgtagatgccgataaaaatccaatctcaaccgatggagcacttgcatcttcaagtttgtataagatgattgtggagtcacacttgaaggctgctgctgattctgcgttcgaggatactgatgatactgaatattttcatgtttctgtttcaaaacgtgatgaacagttagccttgtatgctctaatagcacgggcttctgcaaatactactattccatttcttgcacagttgttttcagaacgatttgcccggctaaatcagagaaatggtgaaa

SEQ ID NO: 382858 - DNA, 167 bp, Zea mays
gaaagaccatcatggagaagaacccaacggcacgtattgatgttctgaagctagacctcagctccctcaagtctgtcagggcttttgtggaccagttcaactcgatgaaactccctctaaacatcctgataattaatgcaggcgtcatgttctgcccttttcaatgg

SEQ ID NO: 382859 - DNA, 226 bp, Zea mays
ggcaagggggagaagataaacgtcaaggatgacgtttctgcgatgaagagggttacgtgctgctcaaactaaggcgaatagccggatacgaactgtttgttcgattgtctttctgtggatgctgagggttagaggaccgttgagagagactatcagcttaaattatttattatcagctctgaattcgtggttctgtcaaattcaatcatttttttgtgttcttgcc

SEQ ID NO: 382860 - DNA, 263 bp, Zea mays
ggggatattcaccaccgagagagagaacatggagcctacggaagccctccactgtcgtccggcgtgcactgcactaattggtgccctatgcgcgatcgggagaatctgtccaagctctaggatcatgttgaaggtggtggctaggagggagtgcgacctgggcgccgccaatttgacgtcgtggccgcaaatacggggtgcgccgtgggcagggaaaggcactgcgtgatcacttacaatggatcaagcagtctcattagctg

SEQ ID NO: 382861 - DNA, 289 bp, Zea mays
gcaatttctcgcctttctgtctcgacatttcttgcaacctcgctcgcgtccccgtgtctatcagcccctctctcccaaccccgggtctgtagtgttctcataggaggaaagcgagagaagcaagcaagcgagaagctggagcagcgaacaccaagaattcggtgccgaagcggaggcgaaggggaggaggacgaagggaagggcagtgaccgaagagcgagcgcgccacgtttgatctgggtatattatgagtgttccaagactaatgcatcatctttgatggtgtacc

SEQ ID NO: 382862 - DNA, 283 bp, Zea mays
gcgggacgggcggacggtgggcggaccgtggcggacggtgggtggccctgaggatctttaagcaatgagctgttctcaagtacgtctccatctggaatcgccaagcctggagtgaagttggagattccagatggagacgtacttgagaacaaggatgtcaatggccctgaggatctttaagcaatgtttgtcatcaccagtttttcccaaggacatgtcacaggaactgccaagcctagtcactcctactgagatctatattttgtaattttcatgtgcattc

SEQ ID NO: 382863 - DNA, 249 bp, Zea mays
ggacgtggtcgcgtacagaggacctggaggtgtggtttgttgtatggttgtagcatagccatctgaacgggtgatggaacggagtgggtctaagatctgtaggagcggaagtctaccgggaaaaggggttatggtgtgctgaatggaagacgtggcgtcgacgtcttagcagccacatgtgtaatgacgttttctgtctactgtttctgacgactatgcagtttccattttgtataagctctgttatgc

SEQ ID NO: 382864 - DNA, 284 bp, Zea mays
ggacgcgtggtacattgaacctattatgtccttgaggcagaagctcaaacagagtagacgtacattgaacctataatgtccatgaggcagaagctcacacagagtagacatacattgaacctataatgtccttgaggctgaatgagagggtgtacgcgtcttcacgcttgtatatgaaatctgcaattcgtgcaacattgatcgctgtatcgagaagtgctatggggcgttcttgctcgaggttgtcttggacgatgtcatccatgccttttcgattactctct

SEQ ID NO: 382865 - DNA, 133 bp, Zea mays
ggacgtgtcatgcctcccacccacaaagagataggaggatagcgtctatgcccaatcctcccgcagcggcgacgccttcgcatcgctccttcctccgtcccatgctccgccgctgacacgttggcccgactta

SEQ ID NO: 382866 - DNA, 186 bp, Zea mays
ttttgtcttgtagtttgttatttgaataaatatctcaatatctatttatataatatataacaaccgtagcgcaactggctagtacaacaaccggctagtacaacgtatatgaacggtctggacaatccagtttctgcccgattttttagaagcatgtacagagtacaccggagtatctctcgccta

SEQ ID NO: 382867 - DNA, 197 bp, Zea mays
  unsure (1)..(197): unsure at all n locations
cccacgcgtccgaggataaaagcagtaatgacttccacgaccaccaccatgtcctctcttgccttggccctcgcgctgctgctcttgagcggtgacatcggcggcgcgcgcggcagctacaggagctcccgaagcctgacctgccgccgttgcccaagcccgaggtgccaccgaggccgnacctgccgccgctcccg

SEQ ID NO: 382868 - DNA, 195 bp, Zea mays
gcgctgcgcccatccatccttaaaccctcctgcgcgcgtaggcctcgtctcgtgcttccccagcacaacctttcctcctccttcgccaggtgcctcttcgttctcctctccgtttccctgcgtggcgcgcgcggcgctccgggctatcaggacgaaataactggccgcgctgcacaccggccgccgcgagaagaa

SEQ ID NO: 382869 - DNA, 143 bp, Zea mays
cagacgtgggatcgttgtctcatacagtactagttagttagtattaagcatgcctgtaacatatatatagcttcatgtgaatgtgttgtactgatgtgtgatcttaaaagtatgctgatgaacggtgtgatattttttaatcc

SEQ ID NO: 382870 - DNA, 311 bp, Zea mays
cccacgcgtccgcccacgcgtccggtgtgtcagtgtgggtggtggtggtggtggtggtagtgtgtgttcagtgtggttactcttcagtcactactgtgaactagtcactggaacaagcccttttttttaaagttgctggaagctctactagcacaaatgctgcttcaagtagttctctaccatcgatgtttcctgctggtagtgctccaccactttctcctaggaggacttctggttctccccgtgttatgagacgaggatctggagcttgacgatcgtccttgggttctccattaaaattagttagtgaa

SEQ ID NO: 382871 - DNA, 282 bp, Zea mays
cctgtcattcattgtcgtcgtcatcatcatatagcaatacaatagattagatcgaacccacaatagcagttcgatcagtgtctaaactttgtaacctcaaaattcagatggatgaatgcatttgcaaaggcaaaaatgctatgcccaaaattgagtctagattctatggtaatagtaagcatgcagagtatagatccactccccttcttgttagtcttcgaaggcagacaccagctccgggaccggctccggcactgtgggcaacaccgggtagttccgtga

SEQ ID NO: 382872 - DNA, 208 bp, Zea mays
  unsure (1)..(208): unsure at all n locations
catacacgtccagatacacatacgnacacgcgtcagaggactctggcgactgtggacaatggctgcagctacaggcatcttgaagtccttcatcaaggaggatattgacgaggagattgaggtcaagacagactgagctgcagcccaaggtcgttgatgcctacgaggcatctcctcctgaggtcaaggctctgttcaagggtaagaa

SEQ ID NO: 382873 - DNA, 259 bp, Zea mays
cggacgctggtcgagacgcgtgggtgtcgaaggaggcacaagatttcattggccaggaagcagggaatagaacgccgttcccatcttccaatcatgaagaaagcatttgtccactcaatattaggaagaggggaacagcctactattccctgctacctgtcgaaggaggcacaagatttcattggccagtgtgtaagagttgatcctgagaagcggccttctgcatcacaacctttggagcaccattcgttacagacac

SEQ ID NO: 382874 - DNA, 152 bp, Zea mays
cccacgcgtccgccggccgatcccgcacccctgactgtcagccgcgatccgctctttactgcgtgcacggcggacaggagagatggcggcggaggccaaggacgtgtgcatcctcgccatggacatctacttcccgcccaactgcgtgctcc

SEQ ID NO: 382875 - DNA, 146 bp, Zea mays
gacaacggtccgcgacgtggtgttttttttggttgtgaagcagataaatattatagtatacatcacactaccaacctaagatgagtctgccatgatgactatcaccgttacagtttagttgtagagcaaacttacacgataagaca

SEQ ID NO: 382876 - DNA, 303 bp, Zea mays
gccgccctccccgccgtggggtccggtccgccgccctccggcccatccgccgccggttcccgtccagccgcacgcgccttcttcctcccccggcgccttctcggtgaaccagacccgtccctcacccgtgcgactcccgcagcgcccgcacctccgtcacctccgcatcctccccgtccttgcggccatatccgtcgtctccgcatcctccttcctacgctctgtcggcgtggcctccccatcccggtgttctccgattttggggggcgtccctttgcgcgctccggtctgctcctccagagt

SEQ ID NO: 382877 - DNA, 228 bp, Zea mays
cccacgcgtccgttttttttttttttttttttatatttaaataaatatcttaatatttatttatatgatatatatatataacaaccgtatcaaagcacgcacaactgactagttattgtttaaaaacgtacaatgagtaaaaacacctaggtgacctgaaaacctcacggattcaagtattcaagtgcgatcggaggcggttgccatccttaattattttggttctat

SEQ ID NO: 382878 - DNA, 176 bp, Zea mays
ggacctggtcagagagtgagaaagctagcacagtacctgagaagtgccttctccatcttgaggagcacgatttggctgcagcaatcagggcactcttttcagcaaccggacgcgtgggcgactccgagctctcctccatccaactcccatggcgggctacgcgggagctcctccgt

SEQ ID NO: 382879 - DNA, 293 bp, Zea mays
  unsure (1)..(293): unsure at all n locations
cggaccgtggcgccgcccaagactcgtcaccaacccgcagcgagcctcctccactggcgccccatatcttcccctcgctgcagctctctcgttgaagagctgcatccccactccccagtcagtgctcacccgcggaaggatcggtcttcttggcggcctcccgcggtgctcctccccgccctcctctctcttttcctcgctgcagctacggatcttggtggcangcgacgcacatcatttcccagaattcaaacggcacggaagagcacatacgctcgtttcttgttcttact

SEQ ID NO: 382880 - DNA, 300 bp, Zea mays
cccacgcgtccgcccacgcgtccgctcacgcgtccgcccacgcgtcaaaagctgtgtttcccccctcgtcgttaggacgtaatgtaagacagccaggggtcagccagtgagtactgactgagtagcccgaagctcagagcaagcgggtgccaactgccaaggggggtgatggcgctgtctcgacgcatggcggctcccgtcctcgtcctcctgctcctcctcgtcgccacagagctggggacgaccaaggtggcggaggcgaggcactgcctgtcgcagagccaccggttcaagggcctg

SEQ ID NO: 382881 - DNA, 302 bp, Zea mays
acaattgtcacttccattttctcaataccttaagcaaggaccaatgtctcaagcccagccccctcgttcccaagcccagtggaaacacgttaaatttcaggataaccaagctaatgccatgaaggaaccaggaaccggtgggtatggctatgggacgaaaaatgacaagaataaggatgtggatacaatagcttcggacttcatcaagctgaagcacaaggcttgggcactccagaagagcacaaccatgtaccaaccttctacctaaaggtgctgcttgcagccttggatatttgcggatg

SEQ ID NO: 382882 - DNA, 136 bp, Zea mays
cccacgcgtccgctgcactggtttggggtgtgttgatccaatacattccaaggctgcttcgaatattccctgtgatcacagggaatattcgaagcaccttggaatgtattggatcaaaacacccaaaccatgcagt

SEQ ID NO: 382883 - DNA, 146 bp, Zea mays
gcgccgactaacaacctcgccgatggcgggtaccacatgtatacagacatgctggagtggatcggtcgaccggcgaagaatgttccccagcagccgacacaaccgctgtcgggtgtccatctccaagaagctatagtggtacgtgg

SEQ ID NO: 382884 - DNA, 237 bp, Zea mays
ggacgtggagctcactcactctcggtcccagtagccgcccgcaatgcagctctggaccgcgtcgcgccgtcgtcatggcccagtcatgtgagtcccctacaggcacaggaggcgccatctctcacctctccgcagtcagcatcggcagtgccatggccgctcctcggtcctactagcatgtctcaggagctggggattgccctgccactctgctgaaattttggagaagtgtggtgt

SEQ ID NO: 382885 - DNA, 185 bp, Zea mays
gtcgaacaaagcattcattgatggatagcttggacaaaacccttgatgatgccaacattcagatggatcaaaacattctagttgaggtaaccactgatgcaagtggtagtctggatggtttggttaagcgaaacaatttttttgagagtgatgctccgaaatcaggattgccagatgagaatttt

SEQ ID NO: 382886 - DNA, 143 bp, Zea mays
cttgtctttttgtcaatgtaagcagagcctgttctcagtccaaaaaaacaagatgcacaagcgaacaggcaaaaaggcaaggccgagaagcgctttatccggccgtacgtagcgataagagtggtgcacccgtagcggcacgg

SEQ ID NO: 382887 - DNA, 140 bp, Zea mays
cccgttcctagcatgccgcccagagaaacttcagttacaccagtggcgcccttggcaccaaatgagggcaagagtaaaggctcatgccgtcgctctgaaatcgttgttctgaagccaaaccttcagaggaaaagtttcac

SEQ ID NO: 382888 - DNA, 132 bp, Zea mays
agacgtggcggacgcgtgggtgtcgggctgtccctgtccctgcgcatcaatcaatcccacgagcttcctgccgagtcctcggctgcccccatcctccgaatcctgcctcggctgcatctccccgttcctcgt

SEQ ID NO: 382889 - DNA, 138 bp, Zea mays
ccctgacgagcctccgacacgctgaggctcagagagagccgccctggccctggggtcggtcgtcgagagagaaagagatagagagaggggaacggagagtgattgggaaagagatcgaggaagatgagcttcaacaag

SEQ ID NO: 382890 - DNA, 273 bp, Zea mays
ggacgctggcggacgcgtgggcagcagccgccgccgccatcagccatggccgctgacacttcgaagcccttcttccccgcggcgccgcactcggctctccgcccctccaggagcgccgcctcgcgcgcgttccctgagagctcctactggcgcgccgtccgctcctcggagctcgtgtccgacgccggcttccccgtcaacgatctcagcttcgcctcgtctgtggaagacagagctgcccctaccgtcgccgcttcctggtcgactccgtgc

SEQ ID NO: 382891 - DNA, 279 bp, Zea mays
cccacgcgtccgcccacgcgtcaccacgcgtccgcccacgcgtccgctggattccaggtctaacagggcaaggaccccatcgaacggcagcacagcctcacacgcacctgccaaaaatacaaacgcgagcaccttctcgtttggagatgccaacactgacagcacgccaaagacggcaaggaagataaccggcaagaaggtcaacgacctcaccggcaacgacatcttcaagggagacgcgccggcagcttctgcagagaagcatctgaagcacgcgaa

SEQ ID NO: 382892 - DNA, 140 bp, Zea mays
cccacgcgtccgggagaggtcgccggtatccgcaccggcgcccgggccccgcgccggcgcgcttgccgacgtggacgggacgaccgggaagcggcacgaggtcaaggtctccgaagaccgcaccgtgcgcgccaccgact

SEQ ID NO: 382893 - DNA, 311 bp, Zea mays
aggctccgacccaggccccgcgatggctccccgtctacgaggaggagcaggagaaggtcctccgcgcgtcgctgctccacgtgccgcgcatggggtggagcgagtcggccatggtcgcgggggcgagggacgttggcgtgtcccctgccatcgtgggcgcatttccaaggaaggaggccgcccttgtggagtttttcatggatgactgcctccaacaaatgatggatcgaattgatgctggagaaggagagcagttgaagacttgatactgagtgagagactctcaaaacttgttcggatgaggctggaaa

SEQ ID NO: 382894 - DNA, 260 bp, Zea mays
cggacgcgtggcggacgcgtgggcggacgcgtgggtttttaaatggaaaccgacataggattaaaggtactcaaggacgcatggtttcacattaactgtgagtatgtctcaagggagacaataccaatatctcctggaagaattacagacgccatgatgtttttcgcacaccaaggtaaaagaacaatatgggcctaccccagtatacccgtttccacaagctcaaccctaactattagatttgcctctaccagtacagc

SEQ ID NO: 382895 - DNA, 270 bp, Zea mays
ctttaatgcttgcctatattaatttcgatgtatagcctcacattttcatctatgtgctatctcattcatgatttccttggaacattttttgttcattcttcattgttcttacatgtgaagtaagtgaacttttaaacaaagaaagacaaacagaaaatgttttgaatatacacttctgaacctaacaccttggaatcgtgtatactgatagatttgcatgttcttatcttgtagcattgcaagtaactaacatgaccatcttacaattca

SEQ ID NO: 382896 - DNA, 268 bp, Zea mays
ccacggtccctcacgcgtccgcgaccgtggctgaaataagtgttattaaatgttttaaattttatccaaatacatataataacatattaatatactatgtaagtagtattactttataccttaaatttatttttataatatatttatttagagatataaatgttattatttttaaaataaatttaactagtttttagaaatgttgatggatagaatattatagcaatatttattttagtacccgctcgtctgcagttgtgcaatgcta

SEQ ID NO: 382897 - DNA, 164 bp, Zea mays
cggacgcgtggtggaaatatcaattcttcatttggtggtatgttgtgtgcaaaccattcttccctggaacacttcctcacaaggaatgcttattcgtcaagacctatatttgtaggattaagttccattgaatgggctttcttagaaatcctaaagcattttta

SEQ ID NO: 382898 - DNA, 263 bp, Zea mays
ggttggacactgatgatgcgatgtgtacttctgtggcttctgagcaacagattcttgctgttgggtgcagtagaggtgttgttgaattgtatgatcttgcagaaaacacacggcatatacgaaccatttcgttgtatgattggcggtattcagtggaagataccgggcctgttgcttgtatatcttggacgcctgacaattgtgctttcgcagttgggtggaaatttaggggacttactgtatggtctgtgtctggatgtcgg

SEQ ID NO: 382899 - DNA, 212 bp, Zea mays
acgcaccgggagcgtcgacagcgtcggacctggggaacatcgagcctgggcgacacaagcaacatgacgcctgggtgcgcgacaacgacggacctactctgctccaaccaggtcctcgcgtcatcccaggcgcgtccctcaggttgtggtgtgcggatccaatcctatcttccccggatctggtgtcctctcgcccgggagggggcaagtgc

SEQ ID NO: 382900 - DNA, 290 bp, Zea mays
aacacacatccgaacacgcgtccgcggacgctggcgactgggctgcagcagccacccttttttttgcttgttgtgtcaatatgcagtatatctttgataacagaactgctagcttgctgttatcctagcagtagaaatttcaacggagtacacaacaacatacgctaatcacctacctcgcatagtacgaacttcttgggttcatgggcaggttctcagcttcctgtgtaggatacccagttgtaccaacttctatttcaaagctagcagtcggtgtcccactaagaagg

SEQ ID NO: 382901 - DNA, 231 bp, Zea mays
cggacgcgtggcgcgcccctctccctggctgctccctgggcgcgccggctctagctcggccgccttctgactcttccatggccgcagccgctcagctgcccctcttctctctcccttagctcacggcgacctccccttcctgcggcacgccggcctcctccacagcttggatctcgcccatggcggctccctctgctcggcacctcctcgagctcgccttagctcgatgcc

SEQ ID NO: 382902 - DNA, 166 bp, Zea mays
cggacgcgtggcggacgcgtgggagagggatcgccaccggagaaggcttcgagcttgctccgctgactcaggaggtgcatcatcatctggggagagttcgaccagatcttcccggtggacaaagcgcacaaggtgaaagagaagctcggggagaaggcgacggtga

SEQ ID NO: 382903 - DNA, 265 bp, Zea mays
atcaatttacatggagccatttctccagtagcaggctcacctcgaggaccataccaaggaaatgatatcccaatgggtgcttatcaccaagcatcgcaactggcaacttcatggcattcaaaggatagtggaggcagtgcaagtggatcatttgagcaaggcagcaacattaatgatgatataaggcaaagtgctacaaaaagatttgccgttcctctagtgactagaagcacactagaaattgtcataccaaacagtgctgttg

SEQ ID NO: 382904 - DNA, 260 bp, Zea mays
acttgactctgataaggagatgggtcttgatgatgaagacccatctccttatcagagtaacttctcatcatcttcttcatcagcatcaaaaccatccatatcatcagcagcctcttcattttgctacttagcttctgcaacttggtccttgtaagcaacaagcagctcaagtgttgctttgaagatccgatccaaagcatctgctggaatcttagacgaccttctcctcatgccactaggatgagtgttcctgatggaag

SEQ ID NO: 382905 - DNA, 258 bp, Zea mays
cgccgtctcctccacccctcacctccttctctcaaccagaacaaccaagtgaaaccgcgcaaacccttgctccgatccccctctcctcggtctcctcgacggaagtagtagagcaggggccgaggccatgtggcccggctgcggtgggcggttctactgggcgccggaatcggcgccgccggggcaagcgaggggtgtcgcggtcttgttcgcgtgggtgtggagcgacgaggcgcactgcggccgttcgttgagctg

SEQ ID NO: 382906 - DNA, 238 bp, Zea mays
ataaaaatacccgtatttgtatccgaaaaatgatctcgaatcagtactcatatccggtacctgtttcgggtacctgcccgttttcacccctacacacgtcctctgcagtcgacttcaccgttgtacagaatctcatctccctcccaaacaaaaaaaacgtccttctaccgggggaaaatcccaaaaaactgaagcatggttcactgtcaaaacgagacattgctaaatacccaatctg

SEQ ID NO: 382907 - DNA, 257 bp, Zea mays
  unsure (1)..(257): unsure at all n locations
ggggcctcgtgttcgcgccgtgggccatcgccgcgcgcgcgggccgcgccgntaccgacgtcaccaggctcaccgtcgtcgttgcctccgccaacgacacgctggcgctgggggtggaccacagctacgccatctacgtggcggcggccgggggcgtcgattccatcgtcggaggagcaatcattgaggcaaacacaatatatggagctattcgaggactggagacattcagtcaactttgtgttttcaactatgac

SEQ ID NO: 382908 - DNA, 257 bp, Zea mays
cttgtctgtctatctatcccaccggatctgatgttttcccacaatttcccctccggggttatggcgacacccgcccttttggatctagggattatgcgccattgccattgttctgagcttgtagatctgaacagtctcgcctagatctaagttgttcatcattttgccgtatgattcctgtacctctcagtgattgtcgagttagacgcctgaccgtcatagtgatggattactatgcatctcctctcttaccgcag

SEQ ID NO: 382909 - DNA, 319 bp, Zea mays
gaaagaaagaaagaaaggacagtctcagcagcacctcctcctttcgttccctgtacggcgacgagcgctcaccggatccaagaacaacgaagccccctctatctctctctttcttgttcttctgtcttcattcgtgcttggagggttggtttgtccctcttcgctttggtggttccgcaacttctgaaccctgattttgtgttgtcgctggttagacgacgacgacgacgacgacgacggcggcgtttctgtagatgcggagaggctctcgagagattgacagaagagagtgagcacacggcgcgacgaacgacatagc

SEQ ID NO: 382910 - DNA, 101 bp, Zea mays
  unsure (1)..(101): unsure at all n locations
nccacgcgtccggacaaccccaaaggtcgtgcgatccaaaagggccctgttggcactatcagcatgctggcggctctcttcatcagacacgaatcgtccca

SEQ ID NO: 382911 - DNA, 290 bp, Zea mays
agcagcctcctccaacccacgaggccacgagagagagagagaggcagaggcagccgctgccccggagccacgcctcccctcgcctcagacccgcggctggtgctcgctcgccggcggcggagcgccgtggtcaggtaagccggcccccccgtgcccgtccttcggaagtgtctctgcagcagaggaggacacgctgctgacagtgtgatccactgctatcattactgccctagtttgctggctgcaggcgtgtgataatggacaaccttgggcatagagaagatggcagg

SEQ ID NO: 382912 - DNA, 307 bp, Zea mays
aatcccctctgccaaatcgcaagcaactccattttccacccactcacccctaagatcacaatgcttggtgattcttgggttgaagactgttgtacatggttcatagtccttggtttcctcctctgtatgatggtaatactctttgatagaatcctccagtgggaagagcaaagagaaagaaagggtcagtgaaaagtgaaaagaagacagtgaagataagataagaaaaaggttctcccagaatcaaccctgtgttagtcatttctcctcagcctgctcaagcagcaacagcagaagaaggaccttt

SEQ ID NO: 382913 - DNA, 310 bp, Zea mays
cgaaatttacaatgcctgcaaaccacagcctactcttgagattcacaaccccgatatgcacaaagatgccccaaggttgctgccctcgtgtttcgtgctctgattgttgagtcttcaatgagagctgattccagttatatagagctacaatgcttccgagagaagggaaaccggcaaaggggaaaagagacgaatagaagggcattggtgccctctcacacacaggccaagtatacatccacatgccacaaggctgaagcttccacatgatacaaagaatggatcgtgatagctattgccagatgatgca

SEQ ID NO: 382914 - DNA, 283 bp, Zea mays
  unsure (1)..(283): unsure at all n locations
ggaggcggcctcggtggtggagctggaggtggcttaggcggaggcggagggcttggtggcggtggaggaggtggttatggcggaggtgctggcggaggcggcggccttgggggtggttccggtggaggtctcggcggtggtgaaggcggaggaggcgggcttggtggtggtgccggtggaggcggtggtcttggtggcggaggaggagctggtgggggagcaggtgcgggtggcggctctggcggaggcgccggtgcangaggtggcgctggaagcggctatg

SEQ ID NO: 382915 - DNA, 164 bp, Zea mays
cccacgcgtccacccacgcgtccgcggacgcgtggccactaccgaagcccttgtacccctcgccgccgctgctgctagggagcttccatccgcgcgcgcctacaacgagagctagcatcagtagcggccgttatcttgtcgctccggatccgttcgtgtaccca

SEQ ID NO: 382916 - DNA, 270 bp, Zea mays
cggacgcgtgggacaatgccctagcaaatccaatcccctccgtcgccgccgcccacgacgacgatgaggaccccgatcttatcagcctcctaccggattgcatcctcgccgacctcgactcctggttccgctccctcgccgccaaaagcctccaggaactcgtcctccggctgccctccgacgacacccttcgcctccctccatcattcctctccttccggtccctcagcaccgcggagctcaccaactgccgcctccccgaggacggcg

SEQ ID NO: 382917 - DNA, 322 bp, Zea mays
accccataaaaatggtgaaggtggaatcccatcccagtgcatccttaattatgctagttgccattcccactaatttgcggcggagtcgaaattgctagggatgagagagagagatgctccctcccacggacccaccctagcacctgcttccaataaactacagccggaaaagacaaagacggagccgtgtctcttgccgtggccatcctgtttttgccaggttatcagctgttaggattttgttttggatcagcgcccacgttaagaactcgcatctagttttctgcttttgctttccaaatcaaattgttgcggaatggca

SEQ ID NO: 382918 - DNA, 244 bp, Zea mays
atgagatccgccaagctcgcctttggcaacgccaccacggccaacgccgaccgctacaacgccaacgccgccggtgtcgccagcaagagcatgagcgtgggcatgatcgaccactactcaacaagaacactaacaacgacgcgcaagagctacttcaaaagtcgcggcacagcggcacaaacacacacacgcagagactcgcgccacagcagaccagatcgcaaggcggtccagagtcaactcg

SEQ ID NO: 382919 - DNA, 252 bp, Zea mays
ctgcttcctttttctttttcaccccctcaaaaaaaaaatgaacccatctccacctttcgtcagcctagcgcttcccaccacgtccgttgccgatggagtggcggatcactccattcgtctctgcttcctttttctttttcaccccctcaaaaaaaaagatcagcgtccgtctctctaatgtaacgtacgtaatgtaatgtaactgatcaaatattcaacaagaaatttaattaccgaatggacggatgaatt

SEQ ID NO: 382920 - DNA, 317 bp, Zea mays
gccacgcgtccgcacaactgttgtggcggcggtgggtgctgaagcgagccagctggtgtcgggcgctgaagttgtgcctagggaggtttctgatgtggcagggttggaggaacgaaccgtgcaggatgttgtggtgaaccagtatgatctgggtgctgaggttgctcttgttcccgttgaagttctcgaagcaggaccggacaagcagggagtagaagttgttggagttgcgcaagtgcctcctttggaaacagaagctgctgaagtgaaacagcaccatctcgttgccgaagcggctcctgctgaagatgttcttg

SEQ ID NO: 382921 - DNA, 207 bp, Zea mays
gcgtcctcctccgcgagggcaacgccgtcgccgcgctctggctgccgccagcttcgccgcgctcctcatcggccgccgcgacgacgatgccgcacgccgcgcttcctagttcgagctggctgtagcctgttgtagcatcgcccccccttttacacctcttcctcctcttctctcaagctagatctccagccatgttgttcctctccg

SEQ ID NO: 382922 - DNA, 250 bp, Zea mays
cggacgctgggcggacgcgtgggcggacgcgtgggcggcgcttctccggctacaggaccccagcggctgctacctctcctgcccgaacctccgcgacccgcagccgccgtcgtcgcagtgcattttcggctcggcgggcgggttcgggcaggcttcgaggctgcacgacccggcgctgtcgccgtcggatttcctggccagcggaagcctcggcctcagtcacggcggactcttgggctccgagggtcta

SEQ ID NO: 382923 - DNA, 188 bp, Zea mays
gacaacccgtcagcccctctcgtttttcatccgccttcgcctccaaccgcgtgcgctccacgcctcctccaggaaagcgagagctctgcataagaacaacaaatcaaaagcgtgatcagctcggtgccacaaaacctcaacaaccaagtttcatgtctgatctcgacgtccagcttccatctgccttt

SEQ ID NO: 382924 - DNA, 187 bp, Zea mays
cccacggtccgccctttcatggacgccgccgtctccaccctcaccgctctcgccatcttcgcgagcaccgtcgagcacgccgcctacaggagcgtgcaggggtatagggtggtcgggaggaaaggcggcgggtgggtccgttgggagaggtgggtggagcggcagttcgtcctctccctctccttcc

SEQ ID NO: 382925 - DNA, 182 bp, Zea mays
acacttccgcggcaagtgaacccacacataacaaataaaagcgtatccatgtagtatattaaatttatcttgaacatagctagcagaaacaaggaatgatatatggtggactttaggcaaacataaagttttaacaaagtacactggactcattaaagacatgtataacaatgttgtgatta

SEQ ID NO: 382926 - DNA, 185 bp, Zea mays
atcaactctagtctctagccacaactcgaagtacgagtacctccggagtccggatggctgcagcgatggacgtcgacgaagccggcgaatgtgtagaggcgaccgtcggagaaggagctcttccgcgccgccgagtccggatgcgccgtcgttcgcctccctcgcccccgccgatctctccctgc

SEQ ID NO: 382927 - DNA, 177 bp, Zea mays
gcaagacagtcatcgatggatatggaaaccctgcaactcagttacaaaaggcaaaaaaaccaaggctcaactcatatgtatgacaaggttcatctacaaccaacggcaagcaaaacggtcaattgccggcttaatcaagtaaattatatcatagctttctcgattatgaatagatca

SEQ ID NO: 382928 - DNA, 182 bp, Zea mays
gccttctcgtcgctctgctcctccgttgccgtgaccctaagggaggaggacgaggaggaggaggaggaggggaaggaacggagggatggcggaggagacggtgcaggagctgcgcgcgagcttcggtgcaggggcggacgcccggcgccgagtggcgggcggacagctcaaggggctcatcc

SEQ ID NO: 382929 - DNA, 267 bp, Zea mays
cccacgcgtccgcccacgcgtccgcgcgcggcccgcgtgctacaccccatccggccgtccccaagccgggagcagatgcgcaaaaccctccttccgctgctccggcgccatgggcggcgcctccaagctgctctcctccttcctcctcacctcttccccgctccgcctccgacccgctactgccgccgccgccgcgctgttcctatccccgcccgcagcggcctcgcgccgcctgttcctgctctccttaccctccccgcaccgtac

SEQ ID NO: 382930 - DNA, 141 bp, Zea mays
caaaacagaggagcccgtcggccgtcgcaaggagaaaaagggaaacaaaacaagaccaccgcaccatggaatcgctggcgcttcgcgcttcgacggccgcctcgccgctgcagcgacgccggctgctccccggacggcagc

SEQ ID NO: 382931 - DNA, 183 bp, Zea mays
cgacgtgcagacaaaggcagcacactcagctatccagcacaagagatcgagcggcaggagtcatggccaccgtcagcgccgccgtggtgaccaccatcgttgcccgcaccgagatcgccaagcccagtgctctagggctgcctgcgataagggcgaggagcgggagggtgcagtacagctacg

SEQ ID NO: 382932 - DNA, 202 bp, Zea mays
tgctatggcctgggatagaatcgttctccaagctgggagattccatttacttcgaggagagaggtgagaagccgggactgtatgttgttcagttcataccgagcacgttcagctggagaactgcaggccttactgtcgcacagcagctgatgcccctcagctcgtctgatcagtaccttcaggtctcgtgtctccgtatcgg

SEQ ID NO: 382933 - DNA, 158 bp, Zea mays
gtacggtcggaattccgggacaacaaaatcaggacgcgcggacgcgtggaggaccgtggttcctagagccggattgtagctctaattatagatataaggattaatcaattgaaataattttggatccattcttgacaacctaaggcccagtttgtttc

SEQ ID NO: 382934 - DNA, 303 bp, Zea mays
cccacgcgtccgctcaaatccgtcttcagattgtccatataaagaaccaacaatgctaccagaacacaaatctgatgttccagctacttctctcgaaggacatgaagcaagtgaagttcaatttctgcaatctgatactgctgtcgaattatctccatcagagcattctgagtataaagttcagcatgtggttggaagcgctgaagatacaatttcaaagcaagtaaattgtgagcagcctttagatcaaacaacattatcaattcatttgaggccatttgaggtggagatctcacaaggtga

SEQ ID NO: 382935 - DNA, 173 bp, Zea mays
gtccatccgtctcctctccctgccgctgcgcaaaaaagatctgtccggaccctgatacgccgccgtcgtcccgtggagcggagccacacgttgtccttccttcgccccgcccttctcggtcgcggcgggttgcctgttccctctccgggccagacgggcatacccagtgcaat

SEQ ID NO: 382936 - DNA, 256 bp, Zea mays
cccacgcgtccgcttttcccttcagaaaacagagcgagtccaattcgagacggctctccccacatcaccacagcgcagcgcaaccatggcttccgccgaaaccctagcccgctccccctcacgcgagccctcttccgacctgacccgcgccgactcttccgagccccaccacaacatcgatggctccggcgcgggcgcggagactcatcccgccgccgccgccgctcccgctgggagcagtcttacgacgactccg

SEQ ID NO: 382937 - DNA, 273 bp, Zea mays
gcctcgtccaaggccgctgcctccacctcctgcaagccattctatgcacatgagaaggaaggctggtatggttggattggtgagaatgacacagaaccggatgcttcactgatcgagttcaggaggcaagcacaccagttgctctgggatgcacttgattattttgtttctgttgaagctgatgccttcttccccgggtttcacaatgacggtagtggttggccagactactcaagtttggtcatggggcaccggttgtaccaaacaccttcc

SEQ ID NO: 382938 - DNA, 275 bp, Zea mays
gcatcggcttcggcaggcagagcactttccatccggccctcgcctcctcgcgctgcatctcccctgacccctgtgccttgtccgcccgcggcatatcctgaggcggctcgcacttccgtgttccgtccgccgcgcttccctttgcccacgccacgcgatcccaatttccaaacccgagcgaggtcaactcaaagtacccgcgccgcgcgtacgccataaacgttgcctgccgcgtcttccgaccgtcccccacgccacgacgcagtgctagcaga

SEQ ID NO: 382939 - DNA, 274 bp, Zea mays
ggtcagtccctctcaagacttacttacccgatggtgacattgatgtcaatgcttttagtaatagtgaagaattaaaggagatttgggcaaatcttgtccgggatgcattggagcgtgaagagaaggatgaaaacgctgaatttcatgtaaaagaagtccagtatattcaggcagaggtcaagattataaagtgtcttgtggaaaacattgttgttgacatctcatttaatcaagtcggtggactatgcacactatgttttcttgaagagattga

SEQ ID NO: 382940 - DNA, 315 bp, Zea mays
ctggagagcacattgtctgatattgataaagtgctctcggacatggccgcagaggaggctgctgcggctacagaagtcatggccgcagcgcctgaaaaagggaaagaaatttccgaagagacttcggaagataaaggcttcaacttccaaaatctagtcggtcaagaattatccaaggccgagaaggaggagctacaggaatttgctgaatcatgtggctaccagccaagagccctgctttttggcggaatcaataaagaagccttaggatgtattcgagatcgaactaaagcgaagattatcagcactctgtcg

SEQ ID NO: 382941 - DNA, 312 bp, Zea mays
ggcactgtaccacaaggattttacggtggagcagggtactataaatcctcctaatggatggaaggcatactatgcggctacaaaagccattattaaccttaatgcagagttctacaatattatcagggaagggtccttaccagcaatgagccgtttttggcttaatgcggactatgtcaagtgtattcatgcgactggggagttctgcactgggggagtgcatttagtggtgcttgatctattgcttggttagcatagatgttaggtctccttgctctgagtctaagggtggcctgggattgcgaaatggat

SEQ ID NO: 382942 - DNA, 306 bp, Zea mays
ccacgcgtccgcgacgtggatgtactgccgctactctaatttgtcctctacacttgaccactgcagctggctggctggctcgtgagggattcgttaggggtggacgggtgggagagtagagaagagcgtagacagacagggacgccgcgtacgtgcggtgtggcattgttcgagggccggcagctgtgcggtgggggaggaatggacgagaagctggcgatggcgatggcggcggcggcggcgagctccgagtgcagcagcggctgccagtccggctggaccacctacctcgacgaccacacctct

SEQ ID NO: 382943 - DNA, 266 bp, Zea mays
acacgcgtccgggacgtgggctcaaggtcatcttctgccactagagctcggagctcggagggcgccgccgccgtcaacaagtgtcgctagtagaggtagtaggatttgcggtgcgtgtgttgtctagtgtgtgctggaatagctgtggctgtgttcccgtcgtgtctgtggcctgtgtaggctgtctgtagtatactgggttgttggatgtatgcgttctggccgcaagactgatgtcatgctgttgctgcttactacagtttgca

SEQ ID NO: 382944 - DNA, 268 bp, Zea mays
tttttaaacagaggagattctcggcgaggagatatttctttctggaatcgaatccccgatttctagggttcatcaccgccacttccaatctgtaccaaaacagatggaacactctgaatgctggtactatgaaaagagtaataataatactatatacataaaacgcgctagagtacgtcgctgcacagaggagcttaagaactctgtcgctcgtttagtagatcgtacagttacaggagggggccaaaaaaaattacagaagtcggcc

SEQ ID NO: 382945 - DNA, 269 bp, Zea mays
cacagccagccacggccaggtcctttctctccccttccctcttctgcctactctccaactccaggcgcgattcgaagcatagaactcccccaccgcttctcaaatctcaactcccctctgcgccctcgcctcttctcttttgttttacctgctgcggaatgcggtccacgactatggatcttcgagagattacttaaaaaaacacacacacaaatcttgcagcagcctccacacctgggattctcctccatagcgtgtgccgtcagccg

SEQ ID NO: 382946 - DNA, 315 bp, Zea mays
  unsure (1)..(315): unsure at all n locations
cacacacagcaatccacacaagcacttcgacgtcacacgggcgctgcacacagacacaccaagcgtcggcaccaatggcttactaccaggaggtggactactgctcggaggaggtgaggtcggtggccccggccggcttcggccgccacggcggcggcgtccagcagcacgtcgttaaggagaagttcgaggaggtcgacacggtcgcacgcgccggcgccaaccaccaccaccaccatggtcaccacggcggccacggcttcgtggtgcgcgagaccagggtcgaggangacaatcacacctgcaccggcgagg

SEQ ID NO: 382947 - DNA, 329 bp, Zea mays
tacgctgcagtacggtccgaattccgggtcgccacggtccgccacggtccgccagcgccgccacggtccgccaaggtccgggacgtggtgcgcttgctcgaaagccatcttgccctgatggtttgcaaagcggccctgttcagaacagatgcttcatgtacatatcagcctccccttcttgggatagattcgaagctgtctgccataactacagcgggcatctcgctgcagtatcatcaatccaggagctaaacttcgtgaagtctctctgtggatcatcatccacaggatgctgggttggaaggcatcactacagcactagtaccggt

SEQ ID NO: 382948 - DNA, 305 bp, Zea mays
ggacgtgggcggacgcgtggattttttttttttttttttttttttttttagcttttttgcagactcaatcatcgatgcaactaccatacgatttccctaagacatagctccacagcaccacttattgctacctgctagtacaaccgagccaaactacgggacgacaggtgggcaggcttcacatgtaaaaaaccttagcctgcactctgctaccatgagaagctacaacctgtacacatcaagaaccatggaactatacagaacggaagcatcggaccgtctcatcttcctggagagaccaatga

SEQ ID NO: 382949 - DNA, 303 bp, Zea mays
gcgcgatgaactggtccctgtagcagcactgcctgccttcatccggtcgccacgccacgagatgtggagggagcacttttgcattggacaccaccctggttttgtgcgccttaccttgccgttctcgttttttcagggtggagaaactgggattcctaaccatagtagatctaccgtgaattcccttcccgtgtagtagcgcattgcgtccatgaactcatttgatcgatcgtcgtgtcaccgtgtgcgtaactgcgtatctgtttggcgtaactgcgtatctgtttgttgaatctttccgaa

SEQ ID NO: 382950 - DNA, 298 bp, Zea mays
gacagctggtgaatgctaggtagcttacgaagatggattcttttgcgtgatgcacaagcaccccgagctgacttctttttctggcaccatctgcaagttttttcttgatgaaagcttttcatctaggtgagacagaacatggggtctgctttgagttcgagaacaagatcttgcgacttgctgtaaagcatggaatatattgttccctcccagcagagcattgcgtcatagacaatgaaaaagttttgttaataatcgttgcttcagatatgtgaaagttttggctttccatgtagcg

SEQ ID NO: 382951 - DNA, 268 bp, Zea mays
gcgattctatcggagcgctcatcaggatggatagcgccgcgggggcgtcttcaccgaggtgccaccacggtcagtatcgacaggatgccggagaactcgaggaccagactagcaccagcaagatgccgtccagtgcttctgagcttccatgctccttgaagcgtgaggtccgagtccttgaaaagcgactggatgatcaattcgtcatgcgccgtgctcttgagaaagcactaggttacaagccttgtgctgttcatgcatcaagtgt

SEQ ID NO: 382952 - DNA, 154 bp, Zea mays
cggacgcgtggtttcacaaacaataaccatctatgataatgataatatcaaactaattgccagcgatgctcttacagaaaaaacaataccgcgccgatcgagtaaaacacacgtaccgtagctgctagcatcagtacaggctgaacccaaggaa

SEQ ID NO: 382953 - DNA, 279 bp, Zea mays
accgtccgggacctgggggacttgagaaatgtaaagttgtaaccaatgtttgacagcatgaccatacaaactatatctgtagtttagaaatattactgttgtcagttgaattgtgggaccatgaacctgatttttgtggcatttaatgggtgatggatggtgctgttctatccaccgatttctttgtcttgtgtccacgcagtcagaactatgataattgaagagatacgatcttttaatttcagcttgtcactggaggtgctaattgaacaacctctt

SEQ ID NO: 382954 - DNA, 274 bp, Zea mays
aatttctttctctttgagaacccccaacttgaactaccttgatctctaagtaatatatcctaaaaatgagcaccaaaagataaggacatgaatagtccagtgttaaaaacaagtgcccgcatggtggatgataacagtaaagaactggatgaggatgtgcaatgcaagaactgaagaagtccagaattagtgtcaaacatcatcagattcttaattctcttgtgtgacatttaaaaaaactcaaatatcctgctctatagcaaaatacaacata

SEQ ID NO: 382955 - DNA, 272 bp, Zea mays
cccacgcgtccggaagagcaagtggcgcagttgttggcgaggattgaagagggaaatcaagagaagtggcggatgatggacacgatgcaggcgacgatcgagaacatggagtcctcggtgaaaagtgtattgtctgaacaaggcgatctgcagaagtggcgctcggaagaggaggcgaacgtctctaaagtcgtggaggcggtaaaggcgatacagagcaaggttgatcaagcgattctaaagaaggcggtgatcctcccgaccaacgagtc

SEQ ID NO: 382956 - DNA, 195 bp, Zea mays
cccacgcgtccgcttatgaatttagtgaaagataaatatggaaatccagtgtgcgacgagaacaacttgagaaagatcttagcttcactacgacaaccagtcacagcatctaattggaaagagttacaggaggaagcatataaaaaaggatacaataacaaaagtcaaactgaaacaagtgatgttgtagattgg

SEQ ID NO: 382957 - DNA, 187 bp, Zea mays
aaagtttcgaaaggctcgtcgacggattgggctcttcggctactgcattcttccttatttcatttgatttgctattcttgttgcatgtctgtatatgcatctagtgtcttctcaaatgtcactttgtactttgtgtgaacctgtatcaaacttttttttgttggattcgattattgtttgaagtgtt

SEQ ID NO: 382958 - DNA, 158 bp, Zea mays
gcaacgcaccgttgcctgtgaagcagcgcacgctggagcgtgaagggtccagcgaccgcgactgatggggaggagcggcggcgagacggcggggaagaggcagcagttcgggtgcatggaggagttctggggcttctacctgagccagcactccaagc

SEQ ID NO: 382959 - DNA, 196 bp, Zea mays
cccacgcgtccgcccacgcgtccgcctctggctgcctcgtgtactggtcgagctcaagcgccccatttcgggctgggtccgggaaccacgaatctatctcctaaccctatcaagctagctagctgcgatgccgagcttccctccgccgggcgccgtcaccatctgcgagatcaaccgcgacctcgttgcggcggat

SEQ ID NO: 382960 - DNA, 195 bp, Zea mays
ggatttgtaccatttactataggggcaaggaggtttctagtgagtcatcgatctaaaatcttttatgctctctttgtgtttactgtttagagttgtttagttctgatatgaactaagggcatgtttgcttcgcaccttcctgcgccaggcaagaattttggccaggtgtctagaactcaacgtcggagaattcaa

SEQ ID NO: 382961 - DNA, 147 bp, Zea mays
cggacgcgtggcaaggacgacgccgccgagtgcctgctttatgtcaagctcatagaggagctggacagatgcatcctcggatattttgcgttccactgggaccatgccacctacctcatcacctcggccttgaccgcggacaccggc

SEQ ID NO: 382962 - DNA, 198 bp, Zea mays
gtcctctttgcggtcggtgtcgcccatgttcgctacaggggaggccgtctatgatgctgccgcccccaacggcaccatgtacgggctgctccagtgcatgagggatcgaacgcaagcggagtgtgagcagtgcttgaaggactcggttgggcggctgccaagctgctgttatggtcaccagggcggggtggtgctcgg

SEQ ID NO: 382963 - DNA, 184 bp, Zea mays
cggacgcgtggcggacgcgtgggaagagatggcacgatgaatggtaaagccaaggaagaagataatgagatgggcgacaccgtaaaggatgacgaacctgttttatgttctgcaattcattctcttggtctaacactttctccttccattggatagttttagcgttggcttcctccctgattct

SEQ ID NO: 382964 - DNA, 263 bp, Zea mays
ccacgcgtcgacacgcgtccgcggaccgtgggcgcgatcagtcgggctgcaggccatctgggctccggcttccggcatccaccaggcgtcaatacggaccagcgagcagcgagcagcaagtcaccgagcagccgagcgaccgccgagcacagggcaccaccgagcagccgagccaccgccgagcaccgagtcttctctgttcttctgcggcgaacaaggtcaatccagggccgtggtgcgggtgctggtttttttttttccaa

SEQ ID NO: 382965 - DNA, 130 bp, Zea mays
ggaccgtggtttcaggcatcatagtatacaaaagtacaaattctggatgaaaaaacacgaaagacgattctacatactatttactttgtaagggactttttgacacagtccacaataccttcacaatcgt

SEQ ID NO: 382966 - DNA, 132 bp, Zea mays
ttcagcaggatgccaggatcactcccactcggcggctccccctttgccccgtgaggccgtgactcggcgacggagaagacaaaccatgacgcctcccggccaactgctccccttgtcccggctgcctcccgg

SEQ ID NO: 382967 - DNA, 153 bp, Zea mays
gaggccacaaaatatttcaaaggcgtatggcggtggaagaaatatacgccttggtggagagactcaaagtgcagaagaaaaggcagccaaagataagcgcaccaaagagctaatagctgcatataggaatcgacagaacatggtaatcgatgc

SEQ ID NO: 382968 - DNA, 124 bp, Zea mays
cccacgcgtccgcgtttaaataaaagtgaagagcgtacaatctccgcatcaattgaacgtacatggcatttgcacaattgtactggacgccccatttttcgcaatagatttcagctttgcatgc

SEQ ID NO: 382969 - DNA, 279 bp, Zea mays
cggacgctgggcggagcgtgggatttcagccattgctgcgacggcgtgcccccgagtttgatttgatgcgaagcgaagacgaaccagaccagcggcgaggacaggccgcagccggcgatggactcgccgagggcggcgcaggcggcgacgcggcgcaagaagatgacgaagcagctgacggggaagcgggacgacacggcgatgcacgcggcggcgcgcgcacgggcagctggagtccatgcggcagatgatgtccggcaaggacgccgaggagctcgg

SEQ ID NO: 382970 - DNA, 276 bp, Zea mays
ccagcacggcgtcgtcggtgaacttggggttggggggtcagcgcgggagccacacctgccgctccgacgacgctgcagaggctggcggggatcacgtcctggtggtggatgtctcggcgagcaactccgggagcggcccagaccgcgagaggagagagacgacgccatcgagccgggcgcacggcgagctcagcgatctggagtcggatctggcggggcacaagactggcccgtcgctaccggcggcaacgccggctgcggagctgatcgtgccgc

SEQ ID NO: 382971 - DNA, 255 bp, Zea mays
cccttgcatttctaagaatggatcacattcaaatttaaaggattccatgaagattatcatacctggaaaaaacaatggtatcaataatgagctacacagtagcatcagctcagcaattattcatactcgtagaattcttgccatcctcgaagcccttttctccttgaagccatcatcagttggtacctcataacaaatgcatattcgtgatacagagaatggggagttccgttccaaggccaaactcgtactgag

SEQ ID NO: 382972 - DNA, 164 bp, Zea mays
attggagtagcagcaaagcagagcagctcggccagccagccagtgggtctgttcccgaggcacacacacgcacacacaggtgctgaagcacacggcagttgccttgcctgttcgattgctgcttccttcctcctccctcgagtcttcttctcagcccagagaga

SEQ ID NO: 382973 - DNA, 234 bp, Zea mays
tcgacctccaggccatgggaaggcccattcctctgctcggactgccgtgagaagaaggatgccatggaaggcaaacggcccagtggcgtcaaggttctgtagtatacagcaaccgatccttgtagctgcccgaaaaatcccacccttcttatttccttttctcgtgaggaccctttcaaagttttacaatttgtttccaatacattcggatgattttaggatgcgtcttattgt

SEQ ID NO: 382974 - DNA, 247 bp, Zea mays
cgaagagtccaagtcacatggtagaagtcataaccacaaggacaaaagagattcttgtgaccggaggaacagaagaaatcctgagagtgacgacagaagctctcttgagtgcgctgacaacggttctcgtgagtgtgccgactgaagatgatcaatggagcgcaaaaacagcagttatggcatggtatccaatatccattgcttctgatagaagctcaggtgggccatcagagaagctgttgtataa

SEQ ID NO: 382975 - DNA, 159 bp, Zea mays
ctgtggttagcggcatgctgcctcctcctcttgtacagcgttcgattcaggtccggctggtgccatggcaacggccccaggagctaccccgtgattgggtgcctggtcgacttctacaagaaccggtggcggctgctggactggtacactgagctgctg

SEQ ID NO: 382976 - DNA, 154 bp, Zea mays
cggacgcgtggtttttttgagaagccacgcagacttcgtaaagtacgtgatttcacttggtataaaactacttggttgtcaggaagaaactgttgccattacaatgtacaaaaaaagaagatatcaatattgccacatttcaacgcagtatgcc

SEQ ID NO: 382977 - DNA, 287 bp, Zea mays
cagtacggtcggaatccgggtcacctcctacgaacgagcgcgacctggcgacctgggcgagagctgagcacgagcaccgaggcggaggcaaggaggtgtctcatcagatcctgcatggctactgcaggacgaaagaactgagcagatttaaggtgccaaggtcttattaccagtggaggcagccatttccggcgaccacgacggggaagatcagaagggaggagctgaagagggaactcctggcagcaattcgactgcccagcaacctgtagctttttgaggcgatg

SEQ ID NO: 382978 - DNA, 277 bp, Zea mays
cgctccggcgccacgccacagccccctaagccgagctcgccaccggccccggccccggcccccgcggcggagccgtactactggcccaagccgtacgactacggggacgcgccgcgtcacctgcccatgtaccccacgccggaggtgttccgcggctggccgttcctgccgccgccgccggggccgcactgccgctccacgtgcgcccgcgtccgcgcccgtgactactggaggcagtgcatgcgggggctggactacctcttcggccactccgacg

SEQ ID NO: 382979 - DNA, 128 bp, Zea mays
tgatctctcacggagttcctctccatggcgacgccccgctctccgatcccccgctccgaagcggccctcgattccgcgccgcagctggtcggtgcctcctgcggcgggatagtcgccgaggcggaggc

SEQ ID NO: 382980 - DNA, 325 bp, Zea mays
  unsure (1)..(325): unsure at all n locations
gccagaacgaatcggccgatgctgcgagaaaggaacgtcgtggtgaagctgctcagcttgcacgcgaagatgaagctgctactgccggagaaaaggcgccgagcccttctcgccacgaggttcaagaggaacatctgcggcccctgcggaagaagattctgaagacggtggatgagctgaaaggcgatctctctgaacttttcagcaagtcccccgagctcaacgcgccacgcggcggtcctcctcgtcttcncaggccagaaggctacgtgtcncacgcggtggccggggccggccttcggcttccctgccagtgctcgccacg

SEQ ID NO: 382981 - DNA, 302 bp, Zea mays
acaagcgccgggacgcgtggttttatttttttttttttttttgaagaaaaaattgtaccatgtataagtattgacagtaataataattttgggagcaacaaaagaaattttagagcaaatgtacagagctcaagctcaatcgctggtagtactagtagtaagcaagaatgaacgaagaaataaatctagctgatgctcctctccatcatctcgttgtactgtagccacgagatctggcgctgcagcttcatctgcgcgtagaacctggcaatgaactcggccgccttgacgtccaccccggc

SEQ ID NO: 382982 - DNA, 323 bp, Zea mays
attccccttttttcctacttcccgtcccacggctcctacgccccgcgggcccaaaaaccctagccggctaatccaatcctgcttcccgcccatggcctccgcggacgctgccaagcccgcgtccccgcccgccgcggatccgcccgtcgacgaccccatggacgccgaccccgcgccccccgcgagggaggaggagcaggccacgccgcagaagcagcagccggagaagaagcggggcggccggaggaagaagggcgaggcggcggagaagacgcacccgtcgtccaagaagtcggcaggccccacggtggagcgcccgtcca

SEQ ID NO: 382983 - DNA, 246 bp, Zea mays
gaacctggcgcgccggtgcacggcccctcgccttgttcctcctgctcctggtgggggcacgggcagcgccgaggagacggcgccgcaggaacccacattgccagccaccggctccggcgctaccggcgcggcggcggtcggggtcaactccaactccgtgcttgtggcgctgctggattcgcactacacggagctggcggaactggtggagaaggcgctgctcctgcagacgctggacgacgccgt

SEQ ID NO: 382984 - DNA, 236 bp, Zea mays
  unsure (1)..(236): unsure at all n locations
gtntcgctacggtgtcgcggcttcgtacagggctctcgcgacgcgatcggccatggcggcgtctctgcgttcctcgtcctccttctgctctcgcctcctctcgttctcctctgggtgntctctgtgtccgtggcgtctcttcttctcttcatctgtccacttggtcgcccccctccagtccgaaaccttctctttcgactagatccagctgtcgccggagaatccggctaccgcca

SEQ ID NO: 382985 - DNA, 146 bp, Zea mays
gtggtccaggaggtgagcacagacaaccggcacgaggtcgggcaagatagcggccggcatctggacagccgtagagaacgggtaagatactggcgcaaccagtagctggagcaggccgaaccggatgtgcactcggtgatggacca

SEQ ID NO: 382986 - DNA, 117 bp, Zea mays
ctccttcctccacgccgactcggtctccctcccatggccggctacccgcgtcccggctccggctacccctacggtcccggcgggggctacggctccccgctgcagccctacggctcc

SEQ ID NO: 382987 - DNA, 261 bp, Zea mays
cggacggtgggcctcgacctagccgacatcgtcgacagcagcatgtacgtgccgacgaacgaggctgatgcgcccgtatccgggctctgctcatcgaaccggccggcggaggattactccagttcggccgagggcgccaactcctgttccgaggcggtggttccgtcgccgccgccgcctccgggcgtgacgacgacgacgacgacgaacatggtcatggagaggacccgccgcacgaagctcaacgagaggctctacgcg

SEQ ID NO: 382988 - DNA, 215 bp, Zea mays
acggcgggagcgcggacggtgggtctttggttgctccgagttcctcgcctagttttcggcaaagtgagctgctcctttcgccgttcctctgggagtttccccggttgcttgttgcttcccgttttccttctcggtctggcaaggccttctgattgctggcggctcaccttttcgcaggccaaggaaaggtggtcacttcacctctgttttttttt

SEQ ID NO: 382989 - DNA, 327 bp, Zea mays
cgaatccgggtcaccacgcgtcgtcacggtccgcgacgcggctggtggccttcttactggacaacacgatccagggtctgcagactcttcctcgcagccgcagtagccctgactggagtcaggcaagaaatgatcctatgcagatgatgctggagcatggactgatggcgttttgtacattcaggggtgaactgaactgtgcaggttgcaggggatagtgctctgggtagcatcagtattccctagtaaccgaaattgaaaaggccgcctgttaaacttctgcaaacactagcatgattacgtctcctagtgctactgttgtttaga

SEQ ID NO: 382990 - DNA, 191 bp, Zea mays
gctgacatccgacgccgacgccgggcagacagccgcaccagcgccacccaaatcccgcaaaaccctagagacagaagacgcgaggggggagagagaggcgcccggcatggcgagcgcgacgtccccagcgatggccgcgaatctggcgggcaagtcgggcgtgcgggtcgtcgtgatcggcgaccccggca

SEQ ID NO: 382991 - DNA, 288 bp, Zea mays
ggacgtggcacattggtcgtgtacttcggacgataactttcatcgctaccattctaccatccgcaaggccttgagtcataacacaggatatggcatatgctgctgttcaagcttacccagatgaatataagcccgattgggggcgtatgagcttccttgtagacattttgagaccaactcctggagaagggccttcgtggtaccatcttctgaagaaagctagtggcggctgcaatgaccttatgtacagtggacatatgcttgttgctgtcctgactgcaatggcgt

SEQ ID NO: 382992 - DNA, 279 bp, Zea mays
aaaaaaaaaaaaaaaaaaaaaaaaaaaaaacccacgcgtccggcctcgtggccctgctcgcctaggcacgggcgcgcgcgcgagcgggtggcgcctgcacggccgcaccgcacgccgggacggacgacgacaggaattggtgacgcggatgcagccggtgcgcggcgccgcgctgctattcttggccggtgtagttgtagtgcagtgccactcacgttcggtggcgggtggtacgtgcggtgcggacgtaccaccgtcgcctcggattctttctttctc

SEQ ID NO: 382993 - DNA, 278 bp, Zea mays
attagctctaggctctagctagccgctccactccttcgtgtagccatcagccttctcatctccactaattgtcactttcgaggtccagaccccgatcgtcgtggcggccgtcgaagcttccttggtggagatcccgctgccggctgtcgtgctctaggattctgctctcgccgacgacttggacgaggtctaggctgttgttcctgcttatctcttagatcttctcgcttccgagtagcaggcagtcgccgatgctgatggtgcggcacttgctggtt

SEQ ID NO: 382994 - DNA, 270 bp, Zea mays
tttttattttaatttactgcttttttttcagcaatactttcttctctggcacaaaatagtcccccggaaactaacatgtcacacattagtctgaacttttaaattgtatttctcattaccaatgctcagctaaaattctaactttccagggctcagtggagcacttctgtttccagactgattcactagaaatgtacaagtggactgaacttttgggaaggccagtgtggttgtaaaatgagtactcttgtaaaagcagatgcattcttg

SEQ ID NO: 382995 - DNA, 237 bp, Zea mays
cccacgcgtccgagatgcgccagaaggctgtccggagcggtgacccgtcgtgcgacctcctgcagttcatccgccgccgggattgacgtcccggcacgcgtcgcggactgtcggtcggtctcgtcccccttatagctagctatatagtatatgtatacatgctagtatgtatgcatgcatggttgcttcagcagtcgtcggtcgtcgtcgtcgtcgtccatcatggtcatcatcacc

SEQ ID NO: 382996 - DNA, 207 bp, Zea mays
ctaaagcatcctttaatttgagtattagtgttctgtggcgtgtaacttgagtccttaacaaaccatcagatgacaaatacaatacagaagaagttcaaggtatcttcaacacagctcctgtaccagtcatgcccataccaggcattgacgttgttccttgtcggtccattcctcgatggatttttgaccaaccaaaatgtctttgct

SEQ ID NO: 382997 - DNA, 227 bp, Zea mays
cccagctgcatctgcattgcattgcatgcacaggtcgcgcccaccatcagtagcggtcgccgccatgcagagactcgtgcgcgtcctcgtggtgctgggcgtggccgccgcggcgtcggcgcaaggcccgacggcggcgccaacgatcgccacgcccacgccggcaacccccgcggcgcccgcgcccacgacggcgtccagcaacatcacgggcgttctggccaagg

SEQ ID NO: 382998 - DNA, 188 bp, Zea mays
agcgagtacgggagcacgctcgacgatgaccagcgctacgccgacgctgctgaggtgctcgccgcttccgcgtcctccgccaacttcccctccgccgcctccgattactgctctgataaggatgatcaagatcctggtgatgttgaaggatcaatgctaggtcttcaaaggtagtgggatgcttccta

SEQ ID NO: 382999 - DNA, 264 bp, Zea mays
aggacgcgtgggtgaggctccttctcttctcgccttgccctcgactgctgtcatttttggttcatatgcgcttgcttccataataatttatcaccgacgcgtccggattctgtgtcgaattatgagtgaaacagggcacactgtacaagtcactaacctctcgagcagagtatctgaaagtgatcttcatgagttcttttcgttctctggtcctattgagcatatagaacttatcagatcagaaggatacggtgccactgctta

SEQ ID NO: 383000 - DNA, 263 bp, Zea mays
cgcctgtgccggcaagtgcatccttgagtcgcctgatgggacgttgttgggaacacgaggatcaatcaccgtttcggtgcagatgcggctgggatgttctacggtaacatcagcatcagcgaggatttggccgacgacggccagcagcatcaagcaaacaattgtcatcttcttctgcgcacggaagccatggctacggcgtgtttttagaatataaaacaattattctgtatttttcataatcatgcctcatgaaaatcgag

SEQ ID NO: 383001 - DNA, 303 bp, Zea mays
tgaaaattttcatgatatgtataaatgtcttggcaaggctgtttcgtgtcctttgttaccttatgagcatcgtcatctgaatacacagagaacggaatctgcaggaaatttgaaagtctgcatgcttcctgatcatcaaactgcagataaattgacagaaaagagtaatggtgagctgctgacattaggaccaaagtcaaacgaaatgtatacaggttcttgtaaccaaagaaggtcttatttctttgaaaagttaacgattccttccaaatcacaaagtgcatatcctaaaaattctgcgtc

SEQ ID NO: 383002 - DNA, 134 bp, Zea mays
cccacgcgtccgggctgtcaaagataatggcggttcaattacactttcatctcacttgcttcgtagctaggactttggaaggggctacagtatgtatttgggattatttgagcagtgtgttttttgtcgtttct

SEQ ID NO: 383003 - DNA, 137 bp, Zea mays
ctctttctgagtttgaagacgagctctagaaattttggctgttggcgatactgattcatctgccggtctaatcatcaattcgtctactgtaatagcagcgacttcgatatcttaatttgttttagctgtcaaatgca

SEQ ID NO: 383004 - DNA, 99 bp, Zea mays
ggccggaacagatggtgcgatcagcgacgcgtggcattgagtcacacactttctgcactctacctctaccaggctgtcatagtatacatagatagagcc

SEQ ID NO: 383005 - DNA, 258 bp, Zea mays
aagtatttgaggatatccctcacaggtttgtgatatatcatagataaagcaagccaatcagagcaaaataatgctattcaagactcaagaggtttgtgcttataatttctgcatgttgacagagcagagaggacaaagccaagaagctggatctctttcttcaccatcagagatggctcattgtcataactttgctatgcttggaatcattgaggtttttattgatttttctgcttcaaaactggagaaagcctctgg

SEQ ID NO: 383006 - DNA, 247 bp, Zea mays
ggacctgggcttcggcttcctttcgcgcccaattggaggcacaccccgcaataaaaaaaaatgacaattcgatgcgacaaacaagctcaaatgcttggtcggtccttttgaaggttcgagaccagccatgtcctcggcgccctgctggcctcctcgccgttgctggcgcgcgcctgggaccgctgcacagccgcctccgccgcagcgccgtggttcgttcacggcgaagacggcggcaaagtgtacg

SEQ ID NO: 383007 - DNA, 125 bp, Zea mays
cccacgcgtccgcctgcatggacaccttctctatcaggtcgcctcggcattgggagcttggtgatctcacaggagggtgtgcgaggacaacccccttggactgcgaactgctaacagaagcagca

SEQ ID NO: 383008 - DNA, 124 bp, Zea mays
cagacaagccacccccacgccacgatacccgcaatcccagccgaagccgcacgatgaagagggagggatggcagcacggcgccgtccgggccagctgcagcaaggtccttaggacggccgccgg

SEQ ID NO: 383009 - DNA, 201 bp, Zea mays
caattaagcgtggtggagctcgacggcgatcgaaactgagaggtagacggtgggtgagatctgcgaggggaaagagaggaaacgctttaagccgcgcgaggaaggaacgtttcgcgtcacgcggcctcacgggcggctggggctggctggcagccgtgtccgcgagttattacgctttacgcgcgactagttctagatcgc

SEQ ID NO: 383010 - DNA, 285 bp, Zea mays
ggtacttatactcttaatgatatgaaagaacagatgcagcttcatttgcctgggattccaaaagttctttttcatcaacgagagaatcataaagtaaaccttgccgctccttttgcttatcaggcagtagtttctcaacccattcttgtgcgcgatcaagcactttttgatcaaaaccaattgactttgcaatgctaagtgcattggaattacaagtactgccccataagattcggtatgttggttgtagagtttctacacaaaattccattgcagcattctcga

SEQ ID NO: 383011 - DNA, 286 bp, Zea mays
caaaagcttgcgggtgaaggccgcgctcgtctacgaggccgtcacgggccgtcacgaagacgacgaccagatgcagagcgccaaaatcctactcctggctctcgccaagaaatgccactccaaaatgcacccagaaaccgccgtcgtccatggtggtggtactggtactgctggagaaacaggaggaaatgccgccgacgaaactggctgggacgataagatgatgcgcgtgctcgacggcatcttcctcgtcgtcggcttcctgccagagctcaacgaagcgatc

SEQ ID NO: 383012 - DNA, 265 bp, Zea mays
gccacgcgtccgcggacggtgggcggaccgtgggcggacgcgtgggctgcactgcgtgcgctccatgtgacgctcacatattactcctgtcagaccgcagctgcatcagctgcctactactactactgctgcttttaccggccggtggatcggatcaccaaaccggttcgactgcgatggaggccgggacgtgggcggcggcggccgtggcggccgtggcgctgtacgtggcctggttctggcggatgtcgcgcgggctcagcgg

SEQ ID NO: 383013 - DNA, 273 bp, Zea mays
gaccctttgtctggggcttttcttgaagatgctatggttctcccatgtgggcactcgtttggtggcctcatgctgaagaaagttcttgaattggcaaggtgcagcatttgcaacggagatgttgatgaggcctccttatttcctaacctcgtatcgaatgttacacagctctaagagcggtagctaccgtggtgaagatggaagacgataggaggctctttcacaatgcggcccttcgaaagcgcaggaaagaagtgactgagcatatggatg

SEQ ID NO: 383014 - DNA, 150 bp, Zea mays
gcaaaaggccacgcccgcgtggacaacggaaagtgtcatgcgctcgccgccggacccgacaggtgggaccgcaggggggcggatggattattgatataccgctggttggttggatatttagcagccgcgacagagggtacatacattacc

SEQ ID NO: 383015 - DNA, 304 bp, Zea mays
cggacgcgtgggtcctgccatgaaccgttcagcgatattgtattggaaaggatgcttcctttattgtttaccgatatatggcctcagaatagaaatcaggacctgaatttgcaactcaacataaaacacacaatctagagcttccagttgcctgtacacttcattaaatcgagcacttgcaaaaaagagagccagagagagaggaagacgaacatcactagtcagcactagattgtgtgttttatgttgagttgcaaattcaggtcctgatttttgtcctgccatgaaccgttaggcgatattg

SEQ ID NO: 383016 - DNA, 281 bp, Zea mays
cggacgcgtgggcggacgcgtgggatgattttgacgggatagaagaagatggtaacatagaagatcgcacattgcagaaaccgaccagtaaaaaaccttatggaggatgaattggaaaaattaatgctgctgaagaaatttccaaatgatgaggttcagagaagaaaagccgacctgggaattgatgtctctcttgatacgatttcagagcatacaaataaatcaacagataactcatatcaccaggcaggaatctctacgccttcaactccatcaatgga

SEQ ID NO: 383017 - DNA, 275 bp, Zea mays
gcaggggaaaaggcgccgagcccatctcgtcgcgctgagctccaagaacaacatctggggcccctgcggaagaagattctcaagacggtggatgagctcaaaggcgacctctcccaacttttcagcaagtccccagagctcaacgcgccacgcgcgcgcccacctcgtcttcccaagcaagaaggctacgtgtcccgctgctaccgacggctaccgtggcagcgcactcggtgcgctgaagccccgtcaagcgcgctgctcctcctccacgtggc

SEQ ID NO: 383018 - DNA, 275 bp, Zea mays
cccacgcgtccgtgctgttttactgcttgtttctaccatctacggccgtgtaggtgtgtccgacacgccacaaaaacttttcgttatgttcagcaggtaaacaagtctagctgaagtgacgattgccagcattgttcgaccgtgcggcttctgtttggctggaaccgtgatggatccagacaaacaaaatgagatgagcctgatcgacaagagagaactagtatacgaagttgcaagatggcctcaaggtgccatggagattcttcggtgctgga

SEQ ID NO: 383019 - DNA, 269 bp, Zea mays
  unsure (1)..(269): unsure at all n locations
cggacgcgtggngcggacgcgtgggtgccgatatacatccaggtgcaacacattacagggacaacaatagcatgacataagttacaggacagtccctgccaaacgccgttccattgctaagatgctacctgcatctagaggatcaatttgtcagccagggagagatcctaattgtgagtttgaaagcaaggttgtatatcggcatcttcaagatggtgacattgtacttgtcaataggcagcctactcttcacaagcccagcatgatgg

SEQ ID NO: 383020 - DNA, 293 bp, Zea mays
cccacgcgtccggcgacgcgtccgcggacgcgtgtgcacgcacagcgcgagcatcccgtgcatcatctaggtcgtcccgtgattaggatggatcgatagtcgatcgtatatgcatgtttgtacgggtttgtgtcataatgagtcgatcgatcatgttggttacgctttgtatgtcggtatggaggtgcatctgcgtgcgggctagaatagatcactgcaggctgggcttcatcgaggccatgtatccagctgtgtgtaatgatgcaatggagaacgagccagaaagaatgctt

SEQ ID NO: 383021 - DNA, 283 bp, Zea mays
ttctttccatggaacatggattgcttagtgagtctgacgaggatagtgatggggagcttcatccattgattgtacgagaccagaattgtggacttcaagctaagactaatgataatcttgaagctttcccagaagataatttagcctgtgatgccatcattgataatagaacaataatgaaaaggccagagtttgtacgtataataagcaagctgatggtcgggatatttctttcgatttgggttcggagaagcctgcggatacacattaagaatttgagagt

SEQ ID NO: 383022 - DNA, 157 bp, Zea mays
gccgcggcgtcgttcgtcggcagccgcgtccttagtcgctcgcatccgacgccttttcctcctcgctgtcttcgtcctcgctgcagctctcgtcgccgatgtcctggtccgggtcctgggcgccgtcgacaaaccatctctctcctccgtgtctcgt

SEQ ID NO: 383023 - DNA, 294 bp, Zea mays
catctattccgcttccctctcccactccactcgccatggcggaagcgctcgtgggcctccgcatcgctgcccccgccgtctcgtagccgcagcctaggtttcatggcagccagcttcttcccgttgtgcacctcgccgcgtcccggcgcaaccgactgtgcaccgcccgtgcggccgtctcagggccaccggaggtggacgaggacgattccatgagcatcgacaacttgcatcgcttcttcgacctcaacgtcgggaagtgggatggccggttctaccaattcgacgcgcacg

SEQ ID NO: 383024 - DNA, 287 bp, Zea mays
cccacgcgtccggcttctctcttttatccaagtctgtacatatgaaagcaaccagggttgaactaacttcagaaacagccttaaatcaatcatccagtgcaagtaaagtgataaaaaagatgactacacatcctacagacttgaagagggaacacatgcaagctaatgcagtccctcacaaatctaaaactgctttatcaaaaacatacagcaagctagcatcaaatgggctattggccacctccatggatgccaaagttgacacgaatgccaaattaggccttgag

SEQ ID NO: 383025 - DNA, 262 bp, Zea mays
cacacgcgtccgcggacgcgtgggcgcgctgtctacgagtacgagcttgaggacggcggcggcggcctcgtgctggagctcgacgagacgcggttcgactttgggaccaggtacgagctcgagtgcgagacggcggaccctgaccgggtcaaggaggtgctggagcgactgctcacggtggccggcgtgccctacgagtactgtcggaacagcaagttcgcctgcttcatgacagggaagctgcttccttgactaggcatag

SEQ ID NO: 383026 - DNA, 270 bp, Zea mays
cccacgcgtccgcggacggtgggcgaccgtggccgccggccgcgtgggcctatttcgtcactccaaccaccgccatggccagcaactcctactacttccttctctcctcgctccgcggccccgcgcagtccgcgaaggattttgacaaggtctggccaatcttcgactccgctcagtccagggagttcaggaagatcgtgcaagggatcatcagcgagctggaacagcatggggcactgcctcggagcaattctagggtctcgtcacttg

SEQ ID NO: 383027 - DNA, 263 bp, Zea mays
tgccgaagccctcccatggcgcccggctctgcttgcccgtggccgtcgttcctaggatcagcctccatctccagttcgtctctctccctgcgcgctttcccagacgcgcgcctagctcctcgcgcgggtctctggtgctcagcagcccagctccctctgctcgcgacgcacgcccagcctctcccaagaactcgagttcctctgctttttccccaaccgcgcgcggtacttctcctctgctcgctcgtcgccatggcgatggc

SEQ ID NO: 383028 - DNA, 322 bp, Zea mays
cacgcgtcctgagacgctggcggctacagcggaccggcagctccccgctcggctggtattgggcggctgtcgcgctacagcagcaggggcatcgtcgcggtcgcgccagccgaagacggcgtcgggctgcacgctgcagcgacgaccgacccacagtcgcgagtcgaacgatgaggccggagcgctgaacagcgcgtgtacatgctcctcccgagagttgctcttctatggagacttccgaagaacaggcttccaaggactatgctggtttcgagaaggaagttaagaggacgatgtatagtgaccacctttctcctcaggt

SEQ ID NO: 383029 - DNA, 226 bp, Zea mays
  unsure (1)..(226): unsure at all n locations
gtcacgcgtcgggctgatcaggtcgagcagctagtagcgagctgctcgatgatcagtggagagtgtcggtaggtgtctgtgtctcttggtggctggttgcgacggtcgtggctacggcgtctcgtcgggtgcgcgtgctgctgctgtgcctgggcgtgctggtgtcctgctcgtgtcgcggcgggcagcttggaccaggagctggagatcacgttncgcgacgggc

SEQ ID NO: 383030 - DNA, 209 bp, Zea mays
atcatggtgtgcaatgattgataatttgatatgatatttaatataacgaaacaaatcgagaaagacaagagctttatttcgttatattaaatatcatatcaaattatcaatcatggtgtgcaatgacatttcacgcgaattctttttttattcttaccctttcttgtttctgtcctcggacaatttcacatggaggaaacttgtatcag

SEQ ID NO: 383031 - DNA, 273 bp, Zea mays
ctttaacagcagccagtcaattgacagatccttctgggaggtcaaggccacgttttggtgtcaactttgggttgagtagagctgtcagcttgggatcatcagtagcctgctctattctgtcatctggcctcccgacttctgctaacccaggtgaaggtcggggtgatgtggatgactcttctgatacagtcatctcccagcagggtagtgcaccaactgctgggattgattcgactctagacatgcttagagatagtgtcacggcacaagcta

SEQ ID NO: 383032 - DNA, 248 bp, Zea mays
cccacgcgtccgcccacgcgtccgattcactgtcgattcagctgcgttgaagcgtcgaggggtgctgcctgtggtcgttgaagccaaattgggggctgctggtgaccggaatcgccccactcagggcggattgctcaccgtagctggtctacgccggaccgctcgcttcatgaatgttgccacaccacaacctaaaccccgggcacactgttctaacgtcgcgctccctcctgagtcccaagcgggta

SEQ ID NO: 383033 - DNA, 218 bp, Zea mays
gccacaaggccctctcacgctcatgcccccggactcttctccccgcgtcgccgctcgccggagctccgcgtctccgcccgcgccacaccctaatcctcaatggctgccgcaaggggcattaaccagctcctgaatataactctcttcaagcagtctgctgggtcgtcgccgctttgttcatttctgggatagcatgaagaatcctctgctggactgag

SEQ ID NO: 383034 - DNA, 215 bp, Zea mays
  unsure (1)..(215): unsure at all n locations
atttgttcgccaaaaagtgttggtacatatggtggagaccaggctgcccacttgtgcagtgacacaactggtgacaatgatttctgtcttgtaatatctagaaagagggccagaaaggagaagaaaatgtcattgtggaagagntatggagcgcatgcatccacacctgcactttatcgaaataaaaaatatgttggccattcttcaatgcagat

SEQ ID NO: 383035 - DNA, 250 bp, Zea mays
gttgatcatagaaccgaagaaaagcttttagtactgccttgtgggccatctgctgtgggcataatgctgctgaccatactttctggtgtttacgtgatccattgtgtgtgggctgctgcagaagcatattcagtaccttcaattgttctaacatctcgttcacatggattggttgcatgtttttgatgatttccgcgaacttatggatggctgcgccataacacagatgcagatgacaatgtggcatctt

SEQ ID NO: 383036 - DNA, 243 bp, Zea mays
ggacgctgggcccggacaatcccgaacgcccggactgggcttacggccggatcgccgtcgtcattcatacacccgctctgtttccccctgtgctttgcgacgactgggctaccgacgccgacgccctcgcaggtctagtacgcgagtgtgtgctgttgctcgttgtatacgtccatctggtgttaatctgtatggtttctggcacctactcattctgaatggcggaccttacagacatcggtt

SEQ ID NO: 383037 - DNA, 267 bp, Zea mays
tggctcttcccccaccccaaaccctaattctcttcttcctcctggcctcgctggcccccgcggtcaccgcggttggcgttctcgggcctcgacgcttgtttcgcgtcggcagccgtgcgcgacccgtctgccggcaacgataccgtcgccgctctaccggccgcccttcgttgcgcgctctccgcacgtacctccctcctcccttccttcgttctcaacctctctgccacggtccccgtccacgtccgtcttgccggttcctccttc

SEQ ID NO: 383038 - DNA, 211 bp, Zea mays
gacacgggtgaccatttatttggtgccgctaagagaacagttcgatacttatacggcatccctaatatctgataggttcatggagaaaaaggttcagataaattcatctatatttggagattataaagttatcaatatcagctatcatggattgcaatccccgccatcatctctgtctggaggatcggatccttcaggaactgaagaatat

SEQ ID NO: 383039 - DNA, 213 bp, Zea mays
gcggaggagttcatcgccaggttctatgcgcagatgaagctgcagcgccagatctcctggctgcagtacaacgagatgatggagaggagcatcagctagattgctgatccttgattacggctagttgtagcggttgaactttgagcgctggttcgtcgatagtaacgcgtacatgtacataaaagtattattttatacagtacgagtatattt

SEQ ID NO: 383040 - DNA, 303 bp, Zea mays
ggacgctggcggacgcgtggcagaagctcacaccttgccgtgccatctcgcccaatgaatccattggccaatcattctgccaacaattcaaaactacaagcttcaaccagtgtcgccagcccatgtctaaattggagggagacccgtgcacgcaaagaacaaggtgttgctgatccacacgatgatttccttgatacacctctggaagctgtcaagaataccatcaggaaccctgcaactcccgaagaagcactggcacttgccgcctctcctcaagttatggatttcgacaattcagatgat

SEQ ID NO: 383041 - DNA, 124 bp, Zea mays
tggctgccagcagcctgcgtgccgtcggtgccatggcccaggaggttctgctgggcgcgagcgacggcaggctcggcttcgagccagccagttcagcgtcaaggccggcgacacgatcagattc

SEQ ID NO: 383042 - DNA, 302 bp, Zea mays
ggtgtggcatgttccaacacaaatgcatagaaggttctcactgaaacaggacgcctcacaccaggcggactggctctttggtacatattaagcagacgatgtcttccagttctaatttgaaggagaaccttgtaccaaatatggaattagttgaactagagaagagcacacaagatgccaggcaacctcttgctaccatttcttcgaacaaccaagataacatgaatacagttaaatctcaaaatcttgtcccaaccacaaaacaattattaagtccagaacaacattgtgtgaagcgggag

SEQ ID NO: 383043 - DNA, 248 bp, Zea mays
cggttttgttgacggctatcgattcttgagagaaaagaaggaacatgtcttccagctcttgttgcggttgctcaccgcccctcattgcattgcatctcgtgtttcgttccgtaacgcaggagggccgtgcacgcctcgtcgtacgacaagaacccggtagagcaggtgcgcccggcgttcgtgccggacgatgtgatcggcggcgcggggagccccgacaagtactggagcccccaccccaagaccgg

SEQ ID NO: 383044 - DNA, 280 bp, Zea mays
gggatttcattcctatcaagcagctccgtgagaagtatgaccagccacgctatgaagcttctggagatgaaagtgacaacgatggcaacacaaatagctaaaggtcaagtgccttcgtgttgctagagttgttttggaaccattttgattcacctccaccaactcagatgtgaagtgctgaactatctggtacagatgcagatgtaagacaaggcaaccattggcgaactgggcatcctcagtaacctgcagtaattctctgcatatgccgtccaacctt

SEQ ID NO: 383045 - DNA, 215 bp, Zea mays
tacgtccggattccgggtcgagcacgcgtccgggactcgtggcggacgcgtgggcggccctcgtccaggcgcgcggccaccgcatcgagaccgttcccgagactgccctggttactctccgactcggcagagtccatcgagaagacctcccaggcgctcaagatcctcaagcaggtcggcgcctacgccgacgcctgagaaggccaaggactccg

SEQ ID NO: 383046 - DNA, 185 bp, Zea mays
ctaatgttcaaatcgttgtgatgaaccaccgtccacgcctgttgatgccgaaccgaatgtctggatttactttgcgcctgttcttgtggtgtttgtcgccttccctgtcacagttatgtttggtgtcgtgttgttgtttctggaacgttctcgtggtggtggatagatatccccatttctgccaa

SEQ ID NO: 383047 - DNA, 191 bp, Zea mays
attctatgtttatacaacacaatttgttgctctcttcattagtggaagctgtttggagaaaaagcagtctagtaatgcctacttatcacaatctacacgtggcctacgctcattactacggaaacatggcgtttgcttttctatgcctctttgcagcactgaagtggagcaggctactggggacgacctta

SEQ ID NO: 383048 - DNA, 320 bp, Zea mays
ggacgcgtggtgcagttgagtcttttgtcttgtcctcctgagacatatggttatagttggtgatgatttctatcgactagaggcaatctgaaacgggatcaggatcctgataacgctgtcaaaagccacatttcttcttccactgtaagcgatctttttttttcatttgttacacttgtttatattcttgtgagtagcgtgtttatataggaatgatcttttagacatgtaacatacatataagttgtaacttctgtatctgtttgacatttagctgagtgttgtatcatcgttttggtggttcacatgtatctgaagaa

SEQ ID NO: 383049 - DNA, 285 bp, Zea mays
caaggagacagagagaaagcctggccgcgccgcccaccgtcgcctcgtcagtcgcctcctccatcctccctccccatcgacttcccaaatcccagccagggttgttatctgtctttgtagcagaagaaacagtcctaaaaaagaatggagagctcctcagataggagcaacgtttctcaggggaaccacctgggttatgcgagaagcacatccatggattccactggtcctcagttagctggtaggtctagctcaatgttgagtaggagaagtagcagacagggc

SEQ ID NO: 383050 - DNA, 276 bp, Zea mays
cggacgcgtgggctttatgaaggtagtgtggctacaggacaattaaatttcacatcaactcaacaactgcctacctgctattattcctcctcttgctcctcctgctattgttcctcctgctcctagttttgttgttccttcagctaggagtacatctgaacagactctccatccattcaatacaaatccatttgatttggatggacaagagatgacaagtgaagctcaatctgtatcagctattcatgaagcaagagagggagaaggtagcaaaag

SEQ ID NO: 383051 - DNA, 229 bp, Zea mays
cccacgcgtccgcggacgcttgtctgaccgttggcgtgacgcgtgggcccgaccgcaaaaccagcctaccgcccatgggctctctactccacacctcgccgtctctctccgctctctaaacgacggcgcgccccagccatccgctcggcggccacggacagcagcttcagctccggcgagacgccgtccaagaagaccacccggaaggaggagcaacaggagcggcggc

SEQ ID NO: 383052 - DNA, 224 bp, Zea mays
agcatatgcatagctagctctagtgctgcatcctctccgtctccagcgtcagcgtccctttccgtcgttcacctctagctagcagccacacgcaccaccgtcccgtcgcgtctccggcttagctcgccagtcacctccgcatgtcgtccatctcccttcatagtattcagcaagtaaagacagcttctgacgcgtcgtcgtcgcggttcgatcttcattgtggg

SEQ ID NO: 383053 - DNA, 199 bp, Zea mays
gctaaattcggttagtttgaacccatctagggacaaatttgtttgggacgggcataagaatggaattttctcagtccaatctatgtaccatttattgatgtacaatcctaacaacaatcggaataagatgatttggagacttaagatccccttgaaaataaaggtctttttgtggtatttaggtcgaggagcgatcctc

SEQ ID NO: 383054 - DNA, 218 bp, Zea mays
cccacgcgtccggcgcgacttgcagacgcggtgccggcgctggtggacacaccgccgctctggttcgcgaacgccgcggagatggacttccccgtcgacgacgtggtccccgttccccaagccaacagcagcttcggctaccagtggacgtgccaagcgttccacatgccaggttaacccagtggtcccgatgaagataaacaagtgacccaagtgaa

SEQ ID NO: 383055 - DNA, 159 bp, Zea mays
cggacgcgtgggctaactaacagctctgttgctgtggtttaggatactcagaactccgagtatatcgtatgtgatattgttgttgtatgaaataattaacggttggttggtcgtgttattatgttaaatatatatatgaaatgctgctgttgggtctcc

SEQ ID NO: 383056 - DNA, 246 bp, Zea mays
cgaagaaatactgggacaagcacgctgccagcgacgtacgtcatggcaaatgagcgctgaggctacctgctagcgtaccccgtgacctgataccttcctctaatataataatgccttcttcccgcgctgcatctccagtggtgattccggtgtcctaggctcctagcaagtgaactcccaaaattgaaaaacttaggattttgaaggtgatataactcccttggattttgtgcaaatatatcgtcg

SEQ ID NO: 383057 - DNA, 278 bp, Zea mays
cagcaacctttccaaggaactcctctgatgctacagtaataatagaagaaagatggagctgctcagcatcattctagttatagcatctctactcccattcgcagcatctgatggtcaaggtgatgccttgtacgatatgaagctgaaactaaatgctactggcagtcagctttctgattggaaccaaaatcaagttaacccatgcacctggaattctgttatttgtgacaacaacaaccatgttgtgcaagtaacattggcttctatggggtttactg

SEQ ID NO: 383058 - DNA, 278 bp, Zea mays
ggcatctcatgtctgctcttgttctctctggatccttggagagtattccctctctctgcctgaggttgagagtgccatttctaccatcaagcaatgccttggggatcttccattctacactgtctctgaggaacgtgagacaactgattcatctaagccatctcagccagtggtgagctctgtcaccgtgtcttcgaggaggcctgctgttctagcagatggaacttatgccacacagagtgctgccactgagattgctgtttcagctcctgcttcag

SEQ ID NO: 383059 - DNA, 269 bp, Zea mays
cccacgcgtccgggggtggggcgctagagaatggtgcacgtgcgactgtgcgctacgtaatgcgtgtaccgtattggtacaagtagagcaaaacagtgtttgtgttgtacaaatggtgagtcgttccatgtaccagagaccggattagaggcccaaaacaggtataactagtctaccataacccctagccggacgactaatcatgagtagtcgacgactaggatgactaatcgtttgctagtcgctctagtcgagtcgaagacctaatt

SEQ ID NO: 383060 - DNA, 272 bp, Zea mays
aggaggcactgccggcagctccattaattgaggaccctgtgccgaagtagaaaagaggcacaagaaaagaaaagtggcacaaatcacgcagatggaaaacaaggtgatgacagagggtgcgacggtaaggaagaaacataggcggcagaaggtgaagcaggagcaatctggccaaacaccatttctcaatgatgtctattcaaaggcaggggaagaagctgctgctggtggcgtcatgggcagtcagtgtgtcaagaggatcgaccgcagca

SEQ ID NO: 383061 - DNA, 198 bp, Zea mays
atcagtcggctgcatcatcaccccaaattcattttagagcacaaaacaaggcggtttccaggccaaaacataccattcaaaataaccaaattccacataaaccccatgcatgtcagtgaaccatcgtgaagccgttcttgatgtagggcagacacgggaacggcaggcccagcgagcgctcaacggtgtgggattggg

SEQ ID NO: 383062 - DNA, 182 bp, Zea mays
cccacgcgtccgcctttctgttactgatggattggtgaatgcttactactgtatcgtatgttaatatctacgatgttcacgcctgatgcaacaaatcgccgtccttttcctgacgcgacaacctgcaggccccggtgctgatcaaataccccgcggtctgatccctgaccgcgtactcctac

SEQ ID NO: 383063 - DNA, 187 bp, Zea mays
cccacgcgtccgcagaaaagggaccaaatcgaatccgtggtgcactgcccctccccctccctcacaagccgccgccgccgtgaggactccggcgaatggcgtcccgcgtcgcctcgggcctcctccgccgccgcgccgtcgccactctagggctactaaggagtcatacacatgtcagaaactacag

SEQ ID NO: 383064 - DNA, 269 bp, Zea mays
cccacgcgtccgctcgtcaaacctcgactcccgaaagttaggcaaaaataaacgaggtccgtgtgcattgattatctagtgctcggtcaaagacttcaatcgaaggtcgttgtcgttctgtgtgtcatcaagaaatcccaaaatcgggtaaagacggagttagcagcgtgatgttcaccaagtactcgacacaagggccgaactagaatccttgccgtgctcgcggatagcgcgtcagagttagtatggtaagccgatccatatttccg

SEQ ID NO: 383065 - DNA, 262 bp, Zea mays
cagtcttctatagatgtttcatcacctcattctgataatacccagaaggggaaagtgagaaaagggagtgtgtacaggagggcaattgccaatggtatcactgagattctgtcagtatacagatcagctgttctgcaggttgagcaaaaccttttatcagatccgttgcctatcctcgcgacagtaactcacgggttgaacaagtttgaagtccttctgcctccactgtatgagcttgttatggaaatccagcataaagaca

SEQ ID NO: 383066 - DNA, 269 bp, Zea mays
ggcaaggtaaaaactagaatggatgcagctaaattgtccttgaagcagatgcaagagctaattgctgatattcagaatgaatctgcaaagtttgagaaagtcgttgagttttcccaggataaggaagggaccattgaagctgttggatgtgataatgaccatctgtcatatcaaactggtgcgcagacagaagatcaacacagaaatgttttacatatgttagaacaatccatagcaagtgagatagatcttgaaaagaaactctctga

SEQ ID NO: 383067 - DNA, 216 bp, Zea mays
tctctccccagcttacttcggcggagcaggagcagcagcagcagccccggcaatggactggtccttcgctagcaagcccggcgccgccccggcgttgatgtcgttccggtcagcttcgttcccccagttctcctccttcgacggcgccaagaacccggcccctggtatcctcaggcaccagaggtcgttcggccccgacagcacgcactacgccgc

SEQ ID NO: 383068 - DNA, 301 bp, Zea mays
acatcccgatggcgaggtacttcgccaggcagcatgaatcgtaccggttcgagatgtcaccatctgtttcatccgattatgatcggaggtctgtggcgtcatcactttactcgcaccggtctgtatcgaagaggagatcagagtacttcaggaagaaggcggaacatatctgccggccagtggatggtgctgcacctttctctgtgtgcagttcatgttataaactactgcagatgcctacagaaaaatgcatagggcggagcagaaccgatttcaatgcgggtcttgttgtcagatagtt

SEQ ID NO: 383069 - DNA, 200 bp, Zea mays
cagacgcgtggcggacgcgtgggcggacgcgtgggcatcttgcagcaggcgacgcccgaaccgatcattgcgtgtgtgatggtagagatggctacagcagcttacgctcccatggcgagccaggtgatgaagagcagcccggtgcactcgatgccgaggggcctgtcaggcgctgcgttcacgcggactcggccccggtt

SEQ ID NO: 383070 - DNA, 211 bp, Zea mays
caaaatgctccaggtgctaggtggaaaagtccgcagaaggaaattactgtcacctaaagataggaatgtccgtccaatgatggaagttgtccgaggagcagcctttgacattttacagtcagctggtggttctcctgcttcactcagaccgggtcggtggctagacttgtatagtggtactggatccgttggaattgaagctatgagccga

SEQ ID NO: 383071 - DNA, 199 bp, Zea mays
ctgactcgtggcggacgcgtgggctgacgcgtgggcgggatccaacccgcccataagacgccacctctccgtatcttctgccatcttatcacgactcgacctccaaccccgacgccagccagccaggcacgcacgctcgcacctacctgctgctgcggcccagagagatggacggcggtcggccggagatgcggcggac

SEQ ID NO: 383072 - DNA, 264 bp, Zea mays
ctgacgcgtggatccaggatcggagtaaacgcttgctggctctctaatccccgtccctcatccctcaccctatgcaaaaatcacagcggcaggtgtcagcaaaaatctccatgcccacgctcggcctagatctcccgcgaaccggccccgcgcggtagccgattcactctccgaccccgacccgatgggcggcgatgtgccggagccgcgccggctgagccgctcgctcagcttcggctgctgcggcgtccccgatgatgcgct

SEQ ID NO: 383073 - DNA, 275 bp, Zea mays
cccacgcgtccggccgcccgtcgcctccagatacgtgcctccggcggaaaatcggcacggatatgttagcggatcgggcggccggatcaccgccggcttgctccctctcctcatgattggatcttctgtatagccagcaaggaggcctctccatctcctccgggaaggctgtgcagcaatggagaagtataacagcaagactcagttagcacccttgagagataccccatttgctctccgtggtgctcttggtagttcaagctcataccttgagc

SEQ ID NO: 383074 - DNA, 275 bp, Zea mays
aatcagaattgtgtgtgtgtgtttattggagaggaagggaagatgaaagagcaacgcatttgttttgaacccatgtacttcgtgcttgagagctgctgcagttgaaattaattacttaatctacacacttgtgcatccgttgcccttcccctgtttcagtttcttttttttcttttgaaatggtcatccttgtaatctacccctgctttgctgttgggtggcctcagaaccaaactttttgaatcggagtaattgggtttgaattgtccagtcca

SEQ ID NO: 383075 - DNA, 284 bp, Zea mays
ggggggtttgggagcggacaggggagacgattcttgaagaagatcgcgcgctgatcttggcccgtgcccgtccgtgcgcgacctcggcgtatggttggtggcgattggcagtgctggtagtgcgccgccgccatgggctgcgtcgcgtccaagaacaccgtctcggtgacgccggcggccgactcgtccggcgggctcagggaccggagccatccgcgcgcccaggagtctgctgctcctgtgccgttgccggtgcccgtgccttccctgcgtactcgtcgtcc

SEQ ID NO: 383076 - DNA, 283 bp, Zea mays
cggacgcgtggggaaatattcatctccttgttgttttgtaccatggatactttagcatcattctcatactactaggagtgtaggcgattcccatttctcagtgatgtcgatgtcctgtactcctgtatatttggattcaacaatatgccattagtatgctgtcaagcgtcctatttgcaagagataaatggcttacgcccgaggggcttattcttccttatcatggtcggtcgtgactttggttatccactgaaaagatatgcttggtggtgctttcttgtgt

SEQ ID NO: 383077 - DNA, 288 bp, Zea mays
gaggaacagagattccgccatgaaatccagggagaggaagaagtcgtacataaaggacttggagacaaagagcaagcacttggaggcagagtgccgtcgcctcagctacgcacttcagtgctacgcagctgaaaacatggcactgcgccagagcttgctgaaggataggcctcttggtgctcccacagccacgcaggagtctgccgtactcacgggtaagacatgttatccgtcctctaatctttattcattccctaaattagatgaatcgatttgtctaccatcagt

SEQ ID NO: 383078 - DNA, 276 bp, Zea mays
cggacgcgtgggcggacgcgtgggcgagcggccgcccttttttttttttttttttcaacaataagggcaaccaggtaaaattatcatgtaggcgacccatccggatcctacccacggtgctccaaacatttgccagattaacagaaaaggttcgtggaacgaattattggctacagctttgcaaaaaaaaaaatgaattcaagattcaccaccaatcaacatgggatgatctgatcagggcttcagtgcaagcgccaacccaaactttggggatct

SEQ ID NO: 383079 - DNA, 271 bp, Zea mays
cggacgcgtgggtccccggcggcgatgtcgagcgcaagtgtgcttatgcgagggcccgcgccgcctggtagcacccggcagaaagcgccggcggccgtggtggaagcatccactctatctcttcttgattcttcggattgaggctgctattttttcttcaacgtcttagcctggtggtccaagtgcttgacggtgaatcgtagcaaaattttcactaacagttggtattgtaaaaaaatcaaaagtgaatgaactcgtgatttggaagaat

SEQ ID NO: 383080 - DNA, 273 bp, Zea mays
acacgcgacgaaacggtccgggacctgcgacgtggcggggccgacccggcctattcctcctcacccgagccgataaaaagggaaccctaggacctcggctagcaaacctaacccctgcaagcaattggagctccggtgatagtcaagtgcacccgagagagagaggagggagtgtggagcgggagccgcagagccatcagctcgttgtcggccccatctaggtccggatttgaggattaggagtttcgcccgtgcatgctgaaggtgtgggtg

SEQ ID NO: 383081 - DNA, 239 bp, Zea mays
  unsure (1)..(239): unsure at all n locations
cacagaggaagcatgctctgtgctggaatagagtactggagtacaaaatgcattctatggagggtttacaggtcaataccaacagagagcttccatagaatgcattttgtactccagtactctattccagcacagaggaagcatgctctcgcttccgtatgtataattcaggatacaagagattttttttttggcggctgacgccggaaaaaaaaaagacaaagaaaacgacnnaaaaa

SEQ ID NO: 383082 - DNA, 277 bp, Zea mays
cccacgcgtccgtgaacgctctccgttttcaaccatgaagaagcttcagcagcaacacaggttgttcgtccatctgactgctcttggctgcagcagcacttagggcctatttggaaggaaagtgtttttttatatttttccagttaataccatggaatactagaatattttatgttacgaatgtttggttgcaatcctaaaaactatgttttcaaaagcatggtattttagataacatggtatgtttggaatatttaaaactccgtttcaatccaaa

SEQ ID NO: 383083 - DNA, 279 bp, Zea mays
cggacgcgtggcgggaatgcactccaagaaaaccaggttgcatctgaaattctccctgataaagttagcagagggtaacgatgtgtcttccactggaattactaaggacactactggccatagtggagatgttaaagctcccacttcagaaccacatttaggggaaacacgtatcaactcagcatcagtatatacatccaaacggacccttagattatccagctgagagcagggagcgattggccacatatcatggacaaccttgcctgcaagctcagg

SEQ ID NO: 383084 - DNA, 269 bp, Zea mays
gaacaggccgcgacctgggcttaaaaaggcaaagctactagagaaggatctcaaaactgaagagccagactcaaaggttccttctctagaaaggcagaaaactacacatgcagaagatgccacttatgcagggacgaatgtccgacctataccaacaccaaaaagtaagcttgcaattcagcgagaactgttggctctgaagaagaaggcactagctttgaggagggaagggaaggtggatgagtctgaggaagagctgagaaagggta

SEQ ID NO: 383085 - DNA, 268 bp, Zea mays
cccacgcgtccgcccacgcgtccgattcccgttccccgccgcccctcgcctccgctgcacgcgatcgacgatgcacagccaccacctctgcgttccccaccggagcatcttcaccaatcaccactgggctggctcccgcgttccccactggatttctgcacccagcgcttcttctgaaatttagaaggcggtggaaccgtcaaatcaaatggagggatcctcttacgcgtcaaggagctacagcgaactagctgccgcagcttccgga

SEQ ID NO: 383086 - DNA, 194 bp, Zea mays
cttcctcgcagcgccggcgctccagcttccgctccctccccgactcgcccttggcacgcaagcgacagcagcggcgctcaggttcggactctcaacgacggcggggcaaccccagactcgctggcgtcgtcagcgactcatcctcccgccactcgacaatcgcctcgctacctcgactccggtcctcgtccccc

SEQ ID NO: 383087 - DNA, 274 bp, Zea mays
cggacgcgtggctgcaaatgataaacctatacctgctccagatcctgaagtttcgcatataagcacccctctttcgttcattaagggtgtgttgccgaaatatttccactctgagtggtcagtagctcagttcaggctccatgagggggagcagtacatggtggcatctgtagaagcttccatccataccaacaacctagttctagatcgcgagcggccgctgcgcccttccccacggccaaggacctcctccacatctccttcaaccaggact

SEQ ID NO: 383088 - DNA, 223 bp, Zea mays
ccaaatcccacttctcgccagttcgcctccgcctccgctccgctcctccccctcccgtcccgccatggccaccgcagcacgcgccctcgtcgccgcacgcccggcacggccgctgctgccgcctcggcgcctcccgtcctcctcgtccatccgtcccgcgcggcaacgtgccggcgtcgggtgcgtccgctgcatggctcggcggccggattccacgtattcc

SEQ ID NO: 383089 - DNA, 265 bp, Zea mays
cggtcgccgtagccggttcctcgtgcaagcaccgcgctaacgatggccgagacggtgggcttcgcgagcggcgacgcggcggcgtggcgcgcagctggccgcgtacgaccgccgtctcgcggccctagacaaacccgacctcgtggccgtggactccttctaccgccacgacctgcccgccctcctgcgctgccgggacccggaccccttcctcgccaagcccgagactggtcgcctctccagtggaactctctcgcgcaagtgg

SEQ ID NO: 383090 - DNA, 263 bp, Zea mays
gtgagaagtacagatctgtgacaaatatacttgacaacatagttggaggaacgagaaattgagaatcccttgcatgactgttcttggaggcaagctcatggttctggaatctccatgcctgatttgaggatttgggggttttacttgtatttactggaaggccatacaacctttgtactctgtactgtctgtagtctgtaatacctaacttcaaattttgaaatcggctagcagttataccaaaaagaaacataaaagagaaa

SEQ ID NO: 383091 - DNA, 263 bp, Zea mays
ctatacttcccaaactcgaatcgtgtatctttgtatggtggtaccgtggtagctcctaaatccttcggcgagcagttaacccccaatcattgatccctcaccagcttgggggcggtttcgctccggttcttgcgcttcggctccaggccatggagcagcggaggtggctcgcggtagccgttttgatgtgcctgctggtgctttgctccgggagagaactgaagaccaaacatgtgcccatatatgacccagtgctggcccgg

SEQ ID NO: 383092 - DNA, 268 bp, Zea mays
aaagagccaaactaacaaggcacttgatgctcttaaagaactttccatgaggaagtgtatggaggaaatggaagcaataggtggattcacagaagaggagaagtcatatgccgtggaggtctttgagtctgggattaatagagaggctttcatgtcaacaatgaaccacaatgttcaaagaatgtggctaaagcgcaaaatcagagtgctgagtggaagcaacatatgaagctgacacggaaaaggaaaatggatgattttgtgacaa

SEQ ID NO: 383093 - DNA, 272 bp, Zea mays
aaagaaccttgtggttcaattcgcaacaaaacagtatctgatctcctatcagaaactgtagagggatccaagaggttagaggatgaaagttctgcgattgaagacgactcagcttcagagtctctgtcatttacagagtctgaggatctctctgacatttttgagacagaatcagaggagcaggaagaggacaacaaggatcgccccttatatctcgataggctggataagtttccctcaggaaaaaatgataatgaaccagatgattttga

SEQ ID NO: 383094 - DNA, 237 bp, Zea mays
ctctatgacaccaaatgagtacattatgaaaaatattttatggtgcattagtgacactaattcagtgccatgctctttttatgaatttggtcaaacttaagataagttgactttaagtgattccagagataaggcaatatctagggtcacttagagtcaaactagcttaagtttgaccaattgtacaggacaggcaccatcgtctatgtctcgatggcgccaaatcggtacattatg

SEQ ID NO: 383095 - DNA, 261 bp, Zea mays
ggaccgtggcggacgcgtggggccagatcctcttgccggggagcagacttggccaacggaagaagacatggaggaggtcgccataaacaacaaacagagaaaattggaaaagaggaagcttccccaaggcacttcagagtaccaggctgcttggattgttgaggacacagatgatgaagataacgactctgatgatgacaaccagactgaatctggaatggtcattgatgagcaaggtcactcagaccaaggaagtgatgg

SEQ ID NO: 383096 - DNA, 266 bp, Zea mays
ggcgtctatcgaacaacagctgccgccacgcctgctccagcgcccagcgcactcctcctggatatgctgggatggcataccaccacatcattcagtcgcaccaccacccctcgccacagcctgtctcaaacatgatggctggcaactttggttacgagtacgctgatcctacgcgcccacaggtctactactcgcaggcggctgcagcacctccaacgttgccaccgcagtatcagcgcatcgtctctcctgatgccggacaggcc

SEQ ID NO: 383097 - DNA, 258 bp, Zea mays
cggacgcgtgggcggacgcgtggggggctaaaaatcaaaatagaaaaagtctcctgcctccgcggccgtgcgaagccggcatcaccttccgtcccccacccccagcagcgatcgcgacgacccgagccggcaagggtgacaggcggctgacgagccccatgggagacaacaagtctccgctgagcctgagcccgatgggcgggcgcgaccgggaccgggagctcctcatcccggtctcgggcggcggctcggcgcccg

SEQ ID NO: 383098 - DNA, 253 bp, Zea mays
  unsure (1)..(253): unsure at all n locations
cggacggtggngcggacgcgtggggaatcgtgatgggatacatcgaagtctagcaaacagtgttggtttaggacatttgaaaaattgctaggtttgaatgtaacgatacacagatagtttgttttgatcatcacacatttctgtagtgtgcagcttaatcggcaaactgcttccaggcttgatcacataccacttttcagttgtaacatgagttcaggttttttcgtattctgtattcccttaatgacaaagg

SEQ ID NO: 383099 - DNA, 272 bp, Zea mays
cccacgcgtccgcccgatggacccagcctcgtccactgccctgccgagccatcgtgtgtggacgtctctctgtccctgtccctgtcccctccggtggcgccgctgcagtgggacaggcttgtgtacgctgcgctcgttgacagcagggacaactccaccgtcgtgttcgccaaggggatgaacctccggccaggccggttgggtgtggcgtcgaggtaccagtgcgtctttggccgtgatctgtggaagccaaagcagcgtgtgctcacgtc

SEQ ID NO: 383100 - DNA, 260 bp, Zea mays
ccagaatccgcgaatcacagacgcgcctatctcagcttgctgcactgccctgccatcatatcaatatcatatcgtacgtgagcccggccgagagcgagggagaggcatggctgctccgaagctcgcgacgctggcgctggccgtgctcctggcggcgaccgtggtggctcccccggccgcggtgcgcgcggcgatgtcgtgctccaccgtgtacagcacgctgatgccgtgcctgccgttcgtccagatgggcgggtcca

SEQ ID NO: 383101 - DNA, 262 bp, Zea mays
cggcagagtggtagacaacagactgccatgcgtgcctcacgttgtatccatggagatgaggacgacattgcctccaagtctgctccaccggcatccatcgacggtgcaaggtgaggtgaatttaatgctgacggcttatctcttggagcagaagcaacaggtgagctcattgagccctcaatggtaggtggctggacctggtggaccgaagatcctgagccattctgcataccagcacatggataaacaatgctccatagat

SEQ ID NO: 383102 - DNA, 258 bp, Zea mays
cacacgcgtccgcgatcgacaccattcaagctagagatgctttcttgggaaacgcttgatggcaacagctcgatcaatggcttcttcctggggttctcggttgccgctcgcagtagtgctactgctcgtggactgcttctcctccacggaaggtgggaaaagctacaccgtcggcgacgggtccggctggacaaccggcgtcgactacacatcttgggccggctcaagaaacttcaaagtcggggacaatctcgtgtt

SEQ ID NO: 383103 - DNA, 266 bp, Zea mays
cccacgcgtccgagtttcttgataggaattcacttttgtgatgacatctctgcctcaaagatgggatcctctacttttactgcttctccaaagcgtttaatcaagagtgaatcatttcaaggtggtggcacaacagagctttgcttctcagatgatgcttttgatatggtacctgattgcagccggaaatctttgattagactgggcgcacacatgccaggccgggcagagcaagcatccagaaggagcgggttcgtattcccaaa

SEQ ID NO: 383104 - DNA, 244 bp, Zea mays
cggacgcgtgggctgctagccagcatgctctggattcagccatggagcatctcctgcgtctctctctattcgatggccgagatccctgcctgcgcgctctgtttcttcttgccgagcgccactcgcccagccaaagccacccagccgaagtcccatggcgcttcttcggctgaatttcctgctcgcagccgcgaagtcccctgctcggccttcttcctcggtgtcgcgcgcccggttccagctc

SEQ ID NO: 383105 - DNA, 255 bp, Zea mays
cggacggtgggcggacgcgtggggtcgacgacgacgacgacgtcgtctctcgccctctttcctttcccccacagccgcggctcacaacgaccatacggcagccagctagtctagcttctccgccacagttcatcacggcgcaggcgacgaaaagctgccgagccaccatcaggcaccagcagaggggagcaagcgagcgaccacgcgggggaccgcgccaccgagccactcccctccctccctctctcttcgcct

SEQ ID NO: 383106 - DNA, 125 bp, Zea mays
gcgaacccgggaatggtgacaccggcgggatcccgtctgtgaccctaaaccgacgggaactgtgagctcgcgctggcggtacctgccattacggtgtacgggtatcgtcgccatcatcatccaaa

SEQ ID NO: 383107 - DNA, 244 bp, Zea mays
ctgcgcacggccgccatgtggctattccaccggatcagctgcaggagcagctatttctgggcgcttcgctgttcggccggctaacgtacgggccctgacagctggggtgaatcgcgggaatccaggatcctttgccccggttggatctcgagtttcaggaaaacctgcgcccctctttcttctcgtttcgccgctagatttgggattcctgcagcttcttttcttggcctccttctcgtccttg

SEQ ID NO: 383108 - DNA, 246 bp, Zea mays
cggacgcgtgggctctgattctgttgattttggatcctatatttattcctgagttattgatattcctgatatgaagcctgtccaggatgtttattaagatttgaccattgttggttgatccagaattccagatattgtatttcacctttgaactgttgatttttttggggatggggctacattgggcatcgaacaagacacaagtcttttttttgttctggatggtttctagctggagctatggtt

SEQ ID NO: 383109 - DNA, 246 bp, Zea mays
cgctcccccacggcaagcaccgcgtcgccgtctccgccgacgtctccgtcggcgaccccgcccgccccgagcagctgcacctcgcgtttgcggatgaggtcgacgagatgcgggtcctgttcgtgtgcggcgaccgcggggagagggtcgtcaggtacgggctgcagaaggaggacgacaaggagtggaaggaggtgggcacggatgtgagcacgtacgagcagaggcacatgtgcgattggccgg

SEQ ID NO: 383110 - DNA, 248 bp, Zea mays
cggacgcgtggggtttgatcgaggtaataataaacacttgctacttgccatgttggagtacaatgcatgcttgcaagtttaaactcattatgctatttatgtacattccgtgtgccctttgggcaccgacaccttctctaccaggtaacagcgtgccagtggcgacgccgcagctttcggaccccagtcgctgctactgctaggcgataacgcagctggctttactagactgccgccgcctgccgctg

SEQ ID NO: 383111 - DNA, 280 bp, Zea mays
cggacgcgtgggccgaaagtgtaccttcgcctgcaacttgtgtcgtggaggatttttctctcttctttgatgtttggtctgttggaagttttgctccgctcggctcatcggtgttttgcgatatagatctcggaataagttttgtagaattattttggaaggaaatttttgttgaggtgtaggctaattaatcttcctttgttgaggccaccattttgttgttggttgctcacaatgtaatcgagcaattaaccggcacgttgttctggtacgaatgaga

SEQ ID NO: 383112 - DNA, 136 bp, Zea mays
gcttgcgattgcagagaacttcatgaccggactcaaggtcgtcttcgacagggagaggtccgtcctgggctgggagaaattcgactgctacaggaacgcgagggtagcggacgcgccggacgggagcccgggccca

SEQ ID NO: 383113 - DNA, 279 bp, Zea mays
ggacatgagaataagcaaccaaagataattaagaagatactaacaactctaagagaggagagcaaatttagggaaagcaattctcctgttagagctagccgtgtaaagctaaattcacctagcaatagagaacgctcatctgacgactcaaagcaaagtgatatttcctccagttcaaggtctagtgaagttatgtcacatgaatcagcaaatgcaagctgtgaacctgtcaaacgaggacatgcatctcctcccttgaagcatttttcaccaattgtt

SEQ ID NO: 383114 - DNA, 276 bp, Zea mays
cacacgcgtccgcggacgcgtgggttgaaatattggtatagcaaatgttctctgaagactatggcggaaactgacagtgaatgcaccacgacgttttcttagagcatcgtgcagttgtcagtgggagtgtctaaaagttttgtctagctcgtcatgttatttgatcggcttagttctgactcctaatgaatcagtacgttgtgaggcccatccatccaatgcggagtgtattttggttactgttctggagctaaaccactggggcatacagtggaa

SEQ ID NO: 383115 - DNA, 126 bp, Zea mays
cggacgctgcgggagcaaaggatccaaataagagggacatggcaatatatgacatgcgtaagcttagtgagaccctccagaatttgccgccggtaaagcttgatgctgttgtgcaagtcattaagg

SEQ ID NO: 383116 - DNA, 207 bp, Zea mays
cggacgctgggcacgtgccaaattatggacattgcgggataatcagtcctttgcttgccaatgtgtgccgtaacgaattggattggtggatggaggagaaaattaaccagtacttttgcccatccaagcatgattcaatttggaaggaggtaggtgatgatgggtgccacaatcccgcttggcctgagttcgtcccatcagctggga

SEQ ID NO: 383117 - DNA, 279 bp, Zea mays
gtgagaaatgtcaggcagcaagagaagaaaagatgcacatattgccatgggactgggtacttgccatgtgctcgctgttctgctagtgggatgttattgaacacaaagcagttttcattattggggcataatatgtggtcaatgaaaggaaggtgtcagaattgttctggagctggaaaggtattctgtatattgcctttgtgtttcacaatagtcagtttgatccattctagaagatttgaacaatagaaaaggtttatcatacttggcgtaccgcct

SEQ ID NO: 383118 - DNA, 212 bp, Zea mays
cggacgcgtgggtttttttttttttttttttttttttttttttgcctgaacaaatatcagttttgttttcaataatccgatgagtatacatttttgtcatgcaacaaaacaacttttgccacagtaacaagcgagcttaccaagataatctgctcattacttattacaatttcacacatcaactcacactagacatcacacactgcacaatg

SEQ ID NO: 383119 - DNA, 164 bp, Zea mays
gaaatacctgaaatacttgcgaaggaccgactgggactcttactgtcttgttctgtcaaagctggggcttcgcgatgtgcccgagtacaaagctcctgactacaagagcaaagcaaccaccaaggccaaatctaagaagaagagcaagagcaagggcaagaaga

SEQ ID NO: 383120 - DNA, 270 bp, Zea mays
cccacgcgtccgcccacgcgtccgcgcacgtgctgcacaacaagcgcgagttccccttcgccgccggcgcgggagatctcgtggtgctgtccctcggcgggcgcgccgcagcctcgctgggccggctctcgtcctccagcctcctgcgcatcgccggagcctgccaggccgacatggttgaccaggccgtgtcgatggtgttcggggagagcagagcgaccaactacgtccgcatccagggcaacggcattgcgcccggcgagacggcgg

SEQ ID NO: 383121 - DNA, 182 bp, Zea mays
cccacgcgtccgacgggaacgagcatttgtgtcgctgccaccaagacggtaaagattctctctctctctctatatctctctctctcttttcaccaaggctggtgcctggtggtccagtatttcagttcagtctaccgtctgttgcagacacggtcgtcctggagttccagcactacgccccg

SEQ ID NO: 383122 - DNA, 276 bp, Zea mays
gtttgcatcgcatcgcgtcgcctttgctgaatcccagcgacggacgggctgccacgggcactgtacggtgccgacgagcattgcttgctgctgcctcggccggcatggcgatggcggcgccggtggatgtcggcacgcagggcacggtgggctcgctggtgctccgggaggtcgagcacttccggatgatggaggtctgccggcggccacggcaagaagagcagcaaggtcgttgcagccggcggcgccagcctccggagcaacggcggcaagaag

SEQ ID NO: 383123 - DNA, 275 bp, Zea mays
atgtccgtggtacgcgtgggctggacgcgtgggtggacgcgtgggcggacgcgtgggtgatcgcctcgggccgtcggctcctgcaggtccttgcaccaggggagctactcgtcgtggcacacgaggagcgccgtgtcgtgtggagccgtgcacagcagaagcgccacgttgccagggttcttccagcgatcaagctggttccagctcaagtagttctctgcaaatatcagaaccagaaccccaacaaatccaagaagaagaggattactatatgg

SEQ ID NO: 383124 - DNA, 182 bp, Zea mays
cccacgcgtccggtagccacagaagaatctgagtactcagagggcctcaggcctgtggtagctcgtggtgacttgtatatcaaccttgccatgactgctgcagtgcagggaaaagttgagcaagccaactacatggtcagccgttgtctggcgatgttgcccaacaaccctcgagcagtgct

SEQ ID NO: 383125 - DNA, 175 bp, Zea mays
agacacgcgtccgcggacggtgggcgtacgcgtggctggacgtgtaaggcggatgcgtgggcgccggctggagatttccaccatatccgccggatacctccgatccgaattccctctcacgctatggcccagactgttgtgctcaaggttggcatgtcctgtgagggttgtgttg

SEQ ID NO: 383126 - DNA, 265 bp, Zea mays
cccacgcgtccgcccacgcgtacgcccacgcgtccgcccacgtgtccgctctcccagcccgaggatccctccccaccgagatcccgcgccgccatggtgtcgtgacggcggcggaggcggcgtcatggagcgggggcccaagtcccccgacgaccgccctgagcccgctgcggcggcggcgcacgcagccgcttggagtggcggtttgcgcaggtcttcggcgagcgcgccgggggagaagatgtgcaagatgacgacataatct

SEQ ID NO: 383127 - DNA, 272 bp, Zea mays
cccacgcgtccgccaacttccgggcaggcatctgcatccaaagggcgctcgattctctagctagctaggatctagcaacacaaacccgtctgtccatatattatgggttggtaacaattaattagactgaagaagatcatctaacgaggatggacgcaaagaaaccatacatgctggctattactacagtagcaatctacaccggcatgtacgtggtctcaaaggctgccttcaaccagggaatgaacagcttcgtcttcgtcttctaccgc

SEQ ID NO: 383128 - DNA, 181 bp, Zea mays
agtgacatggcaaccatgtatagaaattatttgcatgggtttgtgttcttgccaggtagctaatgttatgtaataagtgacaaggaaacaatgtcatgaattatttgcattgggttttgacgagtgaaaaaaaaaaagtagagagaaggaaaaaaaaagaaaaaaagagaggggaaaggga

SEQ ID NO: 383129 - DNA, 296 bp, Zea mays
tccgaattccgggtcgaccatccaccgtacaggtccgcggacctggcgacctggtttttatcgtaacaccaatattaaaaatgaaaaatagtgatgcaaaggttggttaacaccagacatacataaccatcgattcggcgctctgccgtaaatcagaaagcatacttcagttcctagatgaattataaactcctgtgctcccaacgaggcaccagatgctactgtaagtaaccatgaatgagaatgatgccccagagcagtatctgataacatgatcaaccataatattacggttt

SEQ ID NO: 383130 - DNA, 187 bp, Zea mays
  unsure (1)..(187): unsure at all n locations
cgaanagcacaatcctgttcgccacgccatgcctctccacgcccgcgcaccgccgctccgccactcccaccttctactcaccgccgccaccgctcggctgcgcccgtgcgcacgccaggtaccaagccccgccgccgctccctcgtcctcgtccgcgcctccagctcggaccctccgcagcagcagc

SEQ ID NO: 383131 - DNA, 259 bp, Zea mays
cgactccagggacctactcctgaagggcctctacaacaatggcgaaaccagctgctcggccgaagcaatgttccaggtcatgaacgacgaggtggtcttcatcaatgagtactaccactccgttgtccccgtcgtccttgcgagccccttcttcctcgtcctaaactacttcctcctcaacatcgtcgtagccatcctgtgcgtcatgaccgtcatcctctgcgccaacggtgacgtcccctacgcgttccagagcata

SEQ ID NO: 383132 - DNA, 294 bp, Zea mays
ggcgtcgggagcaacggcagcgggagcaacagcagcagcaataaagcatcttctcctgatgatgatcaggctcctaaagaagaatacgaaggtcttgttccggacatttcggattccatgggctttgatgacaaggggagcttatctagttcagaaaatcataggaatatgtcatatgaagttattgatatgaaaagggggaaactagagccaaaggaaaaggtttgtgaagaacctgaaaaggcaattcattttacgaagttagacgagacaaatatcgcaacccaaaagggt

SEQ ID NO: 383133 - DNA, 283 bp, Zea mays
ggaaacctcggccgagaagaacgcgcgcacagacttgtccgcgctctccctctttctgtggacctcgctcgcctagaaagcgccgtgcccgcctgcccagcgacaccgggcagcgggctgtgtagctaatgggcgccgacgcccgcgtccgcctcctcctgcttcttctcttcctcctggacctcggctgcagcaatggcggcggccgatgctcctcggcgcagacgatgctgccggcccaagaagttgaagcactcaaaggtatagccactcaacttaacaa

SEQ ID NO: 383134 - DNA, 258 bp, Zea mays
cggacggtgggcccttttttttttttttttttgaacgatttttttctttcttttttttcttttcaacgcgacgtacagttggtacgcaccgacacttggttgatgagagatgacagacacatccttggcagtggagaaattgcattgcattgcattgcttcagaggcgggcgtgtgtgtgtatttgtactatatgtacagcacggcctctgtcgaatccaactcccggtatcataaatgtgcgtacgtcgtgaaggtc

SEQ ID NO: 383135 - DNA, 259 bp, Zea mays
cccattaacttactcgtcgtttactctcctctcgtcggcttctttgcttcgggtggacggcagggcgagcggcgacgccctcttcgtcggggaccttcgccggcgacgagaatccaacctgataatccggaagatacatgtgccagatgtgtcgatcacagggatagtaaagctctcgaactgggtgtaaagagatgtttgttcccgtgttagataacatgtctgattttgaggagcctataaaatttctgggatgtgg

SEQ ID NO: 383136 - DNA, 259 bp, Zea mays
ggcgtggcgcacgacgacgacgtggacatggtggcgggcgacgcggacctcgcagcgctcgcggacatcgagtccttcttccggtcgcccaagtgcatggagtacgctatgatggacccatgcagcacgttcttcgcgccagcgcccatggcgacggacgcggccagcgagtgggagtgggaggaggaaggccagatcgacctctggagcttctcgtccctcaactgaccggtccatcatcagctcctccccaccagac

SEQ ID NO: 383137 - DNA, 255 bp, Zea mays
  unsure (1)..(255): unsure at all n locations
ggacagatgagcgatccatcaactgccnccgagccgtgccaaccaagagccatccagccaccaccaccaccccggccgcttccttgtccctgcccctccgttggtctcctttgcccatctcatcctctctctctctctccctctctctctctctctggcggtcggcgtggctccgggggcgcgaactggggctcggcggggcgactcgccggcggctacctgcaggtttgggtattagaggggtcaccacgcggc

SEQ ID NO: 383138 - DNA, 254 bp, Zea mays
gggagagaaaatgggcttaacctattttattgcgtagtgggcttttgggctgatttgtaggctgggggctaagtttttatttttcttttatcttttcctcgtttttatcctaaatactttctcaaatatcaatattttttatattttaactatatttaaggcgtcgcctcatcatacgccttatcgcttaaaaggtaaaaagggggtcagtcgccttacctcgccttgccgccttgacaactatgcttgggtgt

SEQ ID NO: 383139 - DNA, 275 bp, Zea mays
cggacggtgggcggacgcgtgggttttttttttgcatcggcagatcaagccggtatcttgattaacaggaccattagataccctgacccactcataccgtgcatttacactatatataatcaccatcaccttatcgcgcccacttcttgtcgcttccatcaaccaagcaaacgatacgacgcccccaaatgcaagaacaataatctagccaaaaaaataaataataataaccacaaaaaagctggtgaaaagtgaaatggaaatatagggagcgg

SEQ ID NO: 383140 - DNA, 264 bp, Zea mays
  unsure (1)..(264): unsure at all n locations
ctgacggtgggccggataggcggacacccatcgcaactaacccccacccccaaacctccaatccacccataccctcctcatccactccggtctgccatggcctgctccttcgccgccgcgaccgtcgtctcttccgcccccaccccggccgccagcccctcgccgctgccccgcagtccgtctctgtttcccgctccgctgtcgtcaccgccgccagtccgctccgnctcgtcgcctccagatccgcgcgggtcatcagactcg

SEQ ID NO: 383141 - DNA, 260 bp, Zea mays
cggacgcgttggcaagaggacaatttcaccaactgccacaaccttaaggataccattcgctgcttgttggtagagccatataggatccacatttagtttttggcaacaaactaatgaattacagtgtccagttaatgtaatgcagagttatatgtcatccttatatgtgttagtatgttttctctagtgtatgtaatatggtgtcatctcatcctcatgtgtgtcaatcttcttttcatgtatagtgtcaatatgtacac

SEQ ID NO: 383142 - DNA, 198 bp, Zea mays
cggacgcgtgggcggacgcgtgggcaagcttgaacccaatcaatgggacgaatattagcagattgaaaaaagtgagaacctaaccatagatatctttaagttcaactcttgctttggcagatttaagtaaaaattccattctacacaaagccatatgggaaaattcgaattcaattctgcagaatgtcattctaatac

SEQ ID NO: 383143 - DNA, 143 bp, Zea mays
cgaacttccactgagaccgatcaagagtcaatgaagtttgcttgttctctttttcaaggcatggaaacattacagacgatatttcaccccgattgaagttattatggttgtatccgatgatctggtggcatatttgcaggtgt

SEQ ID NO: 383144 - DNA, 218 bp, Zea mays
gatcgatcgtatctgcggaacaagctgcgatgtatctgagcctatccaatggccgagggctacatcagcgcctgtggcgacctgttctccagcggcaagctggtggcggtggcctgcgtgtcgttgttccagcggaagagcgtggagaacgtcgacaagcaggagttcgccggcgcggcggccgagctcctgcacgctgcgtccgcgtacggtaagct

SEQ ID NO: 383145 - DNA, 276 bp, Zea mays
gatccattcagccgcttcggggccgtttgggttccttggatctgcaactgtagcgtccgccttcacgcgcggcgctgatgctgccgtgcctccgcctccacgcccggttctgttgctgccgtgacgccgccgggctcgggggaagcgcgtggcaccactcgtcgcttgcctgcacctgcaggttcaactcgcttggacacatttgtggcaagtgaggcctccgtcttcatgaatcagccccctccacatatgtctagaccaacaattattatcaag

SEQ ID NO: 383146 - DNA, 258 bp, Zea mays
cggacgcgtggcagaccgccgccatcagcgctgttttgctatctagcccgtcgttggccgctccgactccactcggcagtcgcctcgcggctggtgtttcggacccttccccgacaggtgcgcagtcccgcccttccccgccatgccactggcactccatcgctcggcccactcggccgtgcatccggcgctccaccccgccctggccctcctctgattgctccggccctgctagcttctcgccgccacgctgcccgc

SEQ ID NO: 383147 - DNA, 190 bp, Zea mays
cccacgcgtccgactgtgatcaaccatctcgtgtccctttccacgggtggcaccaaattgttgcaagactgctatgcatcactgatggagtcttgcattcagctgaaggaagttcaggacgatggggacaatgacgatgatgatgatggtgctgaagatgttgatgacaacgatgaagaggaagacaccg

SEQ ID NO: 383148 - DNA, 273 bp, Zea mays
caaggtgctcatggaggagctcgtcggcgtcaccgcatgcgtgctgggcgacatggcctcccgccccaacttcggcctcaacgagctggacttcgtcttctccacgctcgtcgtcggctccatcctcaacttcgtcctcatgtacctcctcgcccccaccgccgccgcgtcgtccgccgcctccgcgctccccagccacatgttcgagcccggcgccttctcgctcggctcccgcgtcgccacgctcgtgtgcaagggcgccaccttcgcggt

SEQ ID NO: 383149 - DNA, 293 bp, Zea mays
cgttaaagattgcctgcaaactgagagtcacaagtttctatgtaaatctgtatcattcggcagcaacccttgtgctttccctgatacagctgtaaacgatgacgacaaagcaacgccagaataagaaagttcatcagggaaagttaaagattgcctgcaaactgagagtcacaagtttctatgtaaatctgtatcattcggcagcaacccttgtgcttctaaattccaagaaaatcgcctatcaccataccatgccctcatgcacgaacaatccctgatacctgaccctggag

SEQ ID NO: 383150 - DNA, 150 bp, Zea mays
agttgggggctcgtttatttggcgcgtcccggaggacgggtttgtgttcatctgtcgttggctccatggccagcagctctgatgccccgaagcagtatggaataaccaagccgttgtcgttgctcggaccggtggaggccgacctccaga

SEQ ID NO: 383151 - DNA, 289 bp, Zea mays
agcgactcgtttctcgtctctgcgctgcgagcgaggctcctgctcctcgcggtctcgcttccctccaagttccaatccagcaccgggcgccaccgctaatcagtgctgatatatgaaccccgcatttggacatttggtggtggcaaggcaacgccaaccttccctgttgctgctttgaatgttctggtggttgtcggatggatcgccgcagttggctctggaagcgcaagtcattggataagagccctggggagagcgatactctggctctgcttcatcacactctgag

SEQ ID NO: 383152 - DNA, 301 bp, Zea mays
ggcttggcagggcgccgcgaagcgcaactttttctagtaatatataatatctcaatcaaatatcacgtttaagatcatgtttggtcaaaccttgacttaaagaaaaaagagaattcaagcttattttatatcgcacgcatggactaagaaaactattaaagatggctactctatcacatcctttatactatttaaacacactatatataatgcatgcatgcaaagaataaaaatgaaataattattatgagtatgtatatccacacaaatactatatctaacgcatggatgcaaagaataa

SEQ ID NO: 383153 - DNA, 296 bp, Zea mays
  unsure (1)..(296): unsure at all n locations
gaaagttagctaggtttcagcctctcgcacagctcgtgcctcgagcacaacggtggcggcgacggcagcgggactgttctggccgacgacggcatcgacgacgacgaggagtgttaaaacagctcgttgttttgggatttgctgcctcaagtttcatctagctacctccaacaaacccttcaatctccatggctacatcggacaagaaaacaaggggctatgtttccttggaatgatgagatggataaggtactccntgatacatttgtggactattacaataaaagtgatagatg

SEQ ID NO: 383154 - DNA, 232 bp, Zea mays
acgctgctcatgcacggctatgggccagaatcggttgaagaaaagcatagactttatacccttctaagaggtttaaattttaacggagagtctgcacccacatcaatgtctgagccttacacaccaacggctcagagctttggtggtgggaaccctgtggaggggttttattcacctgaacttagaggggaacttggtgctggacctctagaccttcacgctattgatgata

SEQ ID NO: 383155 - DNA, 312 bp, Zea mays
ctcgagccgctcgagccgtctcactctccgctggtcgctcactcttgcagctccacgcttcactcagtattagtctcttattagctctaggctctagctagccgcgccacgccttcgtgtagccatcagccttctcatcgccaccaatggccactgccgaggtccagaccccgaccgtcgtggcggccgaggaagcgcccgtggtggagaccccgccgccggccgtcgtgcccgaggagtctgcccccgccgaggccgaggccgaggccgaggctgctgctcctgctgatcccgaggagcttcccgctgccg

SEQ ID NO: 383156 - DNA, 262 bp, Zea mays
cttgaagcaatacggcacaactgatatggagttttgaggaaaaaggtttcctatgtatggattttagcaacggtggtcttctattattttgttctatagtatcttttggtaggcaagtttaatcatcatttccacaaatttttttctgttgatgattgcaggtcagctgcctggtgtcaccgctcctattcctggggttggggtgcttccaaacttgtataatttggctgcaggacagccacaagccatgacacaacaggct

SEQ ID NO: 383157 - DNA, 311 bp, Zea mays
caacaaattgattttgctaagatccatgctattgatgctacagttagcagttcacaaggtcctgtgattagaaatgacaatcaagttcataaggcatcaactgtacatcggtcaagtgagagacaaggcatgaatggtcggcaaattacacaagtttccaatacagaacgagatgatgaagcaagaagtatttttcctgaatcctctcaggatacacatcataacatggatttgatccggcagcaggcagacaccagtcggatctctgatgacaaaaatatcagcggtttgctcgtggagagcaccaaaaa

SEQ ID NO: 383158 - DNA, 306 bp, Zea mays
aagctgataaccttcctagataatctcaactaatctcctaaataatctcaactaatcttctaatcttatctctaactatccttatctaatcccccttagggcccatggctgctgctaccgcagcccctctgtgggcctccttaggtcctgacagtcgttttattctataggtgtttggttatcattcaacatttcttattgcaggtgaaggctgcagataatagagtgatacaagatcagctgaatgagaagttactcatctcaaagaacagctgtcccaagctcttgaagctaaggatttggtgt

SEQ ID NO: 383159 - DNA, 229 bp, Zea mays
caccgagttccccccgcgcgatttaacccctcgcctcgctcgctgcctccggttccctacaacgcgcacaccaaacgcgcacgcggcgttcgttcctcggccgctctccctacccacgtccttctccccccacagatctccgcgggccgtgaggttccttgattcgccttctccggggctgccggatctccgcggcggctggggatgggcaactgctgcgtaacaccga

SEQ ID NO: 383160 - DNA, 184 bp, Zea mays
gtaacgcggagtgctgagacgtcaattataaaatgatccaacatacatcagatgccggcagcagccacttctgatgtatgttggatcattttatacttgccttcgtactgtaacgcggagtgctgagacgtcaattaattttggccgtggtttacatggcctaatatgttatgagcaacactac

SEQ ID NO: 383161 - DNA, 303 bp, Zea mays
gagcattaccggcaccaatcaatcaggctggcagtggagtgacagccgcggcaacaccacgcccacgcggcgccggagccgatcccccgatggatctcccgccgctctcccaccaggccctcttcgccgccgtccgatccgccgacgcgcccgccgtccgcgcggtcctggccgacgccgaggcgtcggccacctccttggccgcgctcaccgccgctcagacggacgccggggaaaccgcgctgtacgttgccgcggatgccggcagcgaggaggtcgtgcgcctcctcctccctctctacg

SEQ ID NO: 383162 - DNA, 193 bp, Zea mays
  unsure (1)..(193): unsure at all n locations
gcaacactatgatctcatcattggaatggattggcttttggcttatagccctattacagtgcattgggctaacacgtggttgacaccttcaaagggcaatatatatgtcgtgctttatgggatcaagacttctgctgatagtagngcctttgttcaactttgcagcattgtcgacttgacagaccaagatcag

SEQ ID NO: 383163 - DNA, 270 bp, Zea mays
  unsure (1)..(270): unsure at all n locations
ggctcgagctcgagcgccctaatcccgaatccctcccggcctccaccgtctcgcgctcgattcgagtccgagctccctatcctgctcctgctgttcccactgcaatggaggacaacgcggtcgaagagcccgagttgagcggtgcggcggagttcgcgccggcgctcgtcgccgcccacccacacggcnaatccgtcgccgtcgtcatcgggcccgagctccgcgtgtttgatctcagggctggtcatccagtttcaatgtcagatgatt

SEQ ID NO: 383164 - DNA, 214 bp, Zea mays
caaaacacacctcggtcctcgcaagcgtcgccgccccgcacagatcaaccgctcgaaatttgggggaagcaagcgagagcagcagtaagcctcatcgggaagtggagagatggaggcggcgggtcgcctcctcctcctcatcatctcctccctcctcctgctcttctcgccggaacagccggcggaggccgcgccgccgcgaatccagccgctc

SEQ ID NO: 383165 - DNA, 243 bp, Zea mays
ggccggccggcacagcagtccggtggagtggggcgcggggacggagagatcctcgtgtcggcggatccagcaacgccggcgcggctgcgcggaggggacgccgcggctggggactcgccgggacagaggcagcagctcagtcccgggttgctcgatcaccatgcttgcgacacggagctaatcccggattttcaagtcccagggatgtatgaaggtgcccaaaagtttggctatggaggaagt

SEQ ID NO: 383166 - DNA, 177 bp, Zea mays
  unsure (1)..(177): unsure at all n locations
ttgtaatttgagaatcagggttcatcaaacgaggcagcaaagattttagatggtcaggatacaagaccatacctggacaattcaaataggaanaaacaaggtcgtggaaggagtcgtgctggtacaggccgaggccgtggctcaaagactgttgatcaaccacgactgactttgatt

SEQ ID NO: 383167 - DNA, 254 bp, Zea mays
cgctgcctcgctggtgctcttccacgtcctgcacgacagcgccattgcagttccacggccagctaccgctgccggaatatacacttgtggatctttagcaggttcctccggtccgatccaccgccagcttccgacgtcgtactcgggcggatcggttccacaatgggggaacggggagcagaggaggacggctcgggcggctcctccctctccctcatgtgcctggaggacggcgccgacctcgacgccggtgg

SEQ ID NO: 383168 - DNA, 173 bp, Zea mays
  unsure (1)..(173): unsure at all n locations
atttacaaggaaggccaatgatgatttgccggacacagcaatcctggactcgaanaatgctanaaatgcagctagatctggtatccttgactcgcaatatgagtatgaagatgagtacgatgattcatttgatgatcttggcttcagtgtggtagagtcaagttatgaggaaa

SEQ ID NO: 383169 - DNA, 247 bp, Zea mays
  unsure (1)..(247): unsure at all n locations
ggaatttgcttgcatgcacccacctcacncgtcgggcacacgggctcgtcagacagcgcccgggcgccgaatcaccagacgggatcacgccccccatctgacgccaccgaggccggagcccacagcgaccgcgcgcctcaaactccgatctaaaagaaacatcggagaaccgtacagaacaaaataagtacaggtanttcatcatttgtctcggtattacaataatgtggaaacacaatccctttgg

SEQ ID NO: 383170 - DNA, 179 bp, Zea mays
gacgaaatcctactagcttccctttgggtcggtctcgcgtctgtctgtctgtctgtcttggtctcttggagcctcatcaatggctaccatcagagaggagtccgactacgacagcagccggtcctcgctgacggcgccgggcggctcccgccggagctggatcagcgacattggcagcg

SEQ ID NO: 383171 - DNA, 314 bp, Zea mays
  unsure (1)..(314): unsure at all n locations
cacgaggaagaggaagcgaaaaagctctaatgagcaggatacaacacttgaacaagttgatacatgnttccaccanaaacaatataaatgncttgacagatggtcatcagcggcataattctgtcagcgagcaagataagttaagcacatcacaagatagctctacacttgtccaaaatgagggcacaacaaaagaccacctaccagactccttagatgagatcaaccaattaagatccggncatagtgaacattcttcagctcattgttctgctcaagattcaatgcaggcaggattcacggcatcagatcat

SEQ ID NO: 383172 - DNA, 111 bp, Zea mays
tcttggtactcgcgcaaaactggcatccgattcatgacctgtgtgtcagttgtagatttgacatgccggattgagaaaagcgcctcctatgatgatgtgaaaccagccatc

SEQ ID NO: 383173 - DNA, 298 bp, Zea mays
gcgccgtgctccggcggctgcatacggcggcggcgcacccctcgcctgacgaaattcgctgctgcgccgcccaaattcgtgagtcgccgcttcccagacgaccagcgccgcctcctcctccacatccgtagatcctgcctacctgaggtcttacctgattcatgcggctctctactgctcgcgtggtggatactggctggtgtttagtgtgatctaatctattgtaccgtcctggcgtcctcggctgaagggccaaattcacacatcacacggggccactgtgttctgcggtctgact

SEQ ID NO: 383174 - DNA, 104 bp, Zea mays
gtcctgattgcccctgctattggaccaaagatgggtcttaacttcagtgtactcaacacattcggagtcccagggctgaggggggcgactaccaagcaggttta

SEQ ID NO: 383175 - DNA, 214 bp, Zea mays
agttctagatcgcgaccgctcgccgaacagatcctctctggacgaacagaaaggtccacggcgagatctccccttggcgggccaaaaccgacggcgagcttcaccggcgttggtcggctccaatctcttcgccgttttattttcctcccaggttaaggttgcaggcttttagcttgggatcctgaaagatggggacctcttctggcgcgatttt

SEQ ID NO: 383176 - DNA, 183 bp, Zea mays
caaaaaactaacaagaactaccacaatgctagctaactagcagggaggcccggagcattctgcatacttgttaatcaaaatgcagatatgtagttcaatgcaatatgcacacatttgtccacatttgaagagttacaaattttaacgggatgcaatctttgcacaagtttcggttgctgaaag

SEQ ID NO: 383177 - DNA, 160 bp, Zea mays
  unsure (1)..(160): unsure at all n locations
acgtagngnagaggcgaaagatggcggcggcagtactgggacagttgggtgcgtaacctgaggagccgggggaagctggccttgggtgttttacctcaatcatatatccacacaagtgcttctcttgacatttctcgaaaatgggagaagaagaataaaa

SEQ ID NO: 383178 - DNA, 204 bp, Zea mays
actctgggataccattgcgggtggtgactcagaggatgaccaagaaggtgttagatgataatttcattgatgacaccggggttgatccagctgatcgttatggcagtgataatgagcggcattcacctgggcattatgcacaggctgaggagggtgaggaggatgatgaaattgagagactcttcaggggtggtaagaggaaga

SEQ ID NO: 383179 - DNA, 166 bp, Zea mays
cactaaacccgtcctctgttcccagcacgtttctcatatagccctcagtcactgagcaggattggagaggcacattcccttgggacagaggctacaggttggagctttttttcccctgtcccccaaccccatccccagctctatttcagaacatggcacccaacca

SEQ ID NO: 383180 - DNA, 158 bp, Zea mays
acacagacaagtggtttccaaagccaagtgtgtgtactagcaaccagcggcagcaggcagccatcatgtcggaggagaagcaccagcacttcttcaaccaccacaagagggacgaggagcagcccgcaggcgagtacgggtactccgagaccgaggtg

SEQ ID NO: 383181 - DNA, 108 bp, Zea mays
cttaccgcaaacacaagtacacacagtcttcattaatagatagtaagaacaaaacaaatacacctgcctcctactgattaagcaagctaacttgtagaaacttctagt

SEQ ID NO: 383182 - DNA, 143 bp, Zea mays
gcttctcattcggctccttaaagccatcgggggagtgactgactgagtcagttagtgggtgtgtaggagtgtctttgaggggaggcagcaactacggcttcctccgacgccggacattgtgggatgaaagcacctgtgcctgg

SEQ ID NO: 383183 - DNA, 127 bp, Zea mays
gagccactcggccactccctagcacaacaaaccctatggccgcccagcccccgagacatgtcggcgattgtagacaagtgggcacggacacgtcgcaggggcgcgctcagcaggtgagcaatatcaa

SEQ ID NO: 383184 - DNA, 162 bp, Zea mays
gcacacgcattcggcttgtcacagcaaccagcacacatttcccagtggcggatcgaaggaaggacagagtctatgggtggcggcagtgtgaacggcgtggaacgccggccgggagaacctcgatcgtcaacttccgctggacccgccggagcgtcgccgtcg

SEQ ID NO: 383185 - DNA, 157 bp, Zea mays
cattcggctcgagcggcgaagaaggtgctcatgctctacggcgactacatggaggactccgagggcatggtcccgttccgtgtgatagctacgccgtctgccctagcaagaaggccggtgctgtctgccgcaccgccgtccatgtgctgaccggtca

SEQ ID NO: 383186 - DNA, 151 bp, Zea mays
cagtgagagggacgaccgagcggagtctagactcgagagtaacctcgacctccctgatctctctcccactgtgtgagatgcgaccgatggcctcccccgacctgctcttcaagcgtgcggaacctcttctaccttggtgtgttaccaggca

SEQ ID NO: 383187 - DNA, 122 bp, Zea mays
tttcagtttgataagaactgtttggtcattctttggtctgcagatgagcctaatagccttgcttgtgatttgactgccattagccttggtactagtgatatagcgtgtcgggataacaacag

SEQ ID NO: 383188 - DNA, 149 bp, Zea mays
tgacagcagatctcgagtgcaacgcaacgttggcgctttgcggccagtacgagacgctaatttagcgtcggtgtgtctgagtcgatggccaagctccaagtcactcctggcgtcgagttcaccgagtgcaatgaaggcgggttccaggg

SEQ ID NO: 383189 - DNA, 147 bp, Zea mays
tggtgattttctgtgtcctgactatgcttctaggaatcgtgaggatggcgtcaatggaaacactgggagagggcgtgtgggcctaggaaggtgacctatgtgcatcagtttgaatttatcagggaacatttaatgtggcattggcag

SEQ ID NO: 383190 - DNA, 137 bp, Zea mays
gtgaccacggaattcttgtcgagaatgtacatcatcatgaatttatcaagaaacgtgttaaggggattggtgtaattctataatatagcaagtcattatagatcagtatctaaatcagttgatgtgaatgcgtcttg

SEQ ID NO: 383191 - DNA, 140 bp, Zea mays
cttcctctcctccatctctcaacgcctgaagctcaccgcgtatctggtcctcgccgcggattttgtttcacgtgaggatatccagcccctcgtcggcgagtgtgtggaactggcatggtcaagtggtgtgttcgccggcg

SEQ ID NO: 383192 - DNA, 139 bp, Zea mays
atggagacaagaagggcaagtggaacatctcgcttctaagttactcatcgcccatctcgatgtgaggtgtgtggaaaaactcgtcaaatttcaatgttactgtgtagttctgaaagcaggtcatgcgtggtatcaaatt

SEQ ID NO: 383193 - DNA, 160 bp, Zea mays
cggaattcgatcgatccagttaaacaaagtatctgtatggcgtctggcagttcgcatgtgatcggtactgtaggtgctgtgtgtgaggttgggtcacctcttcctcctgttcctggtggcgtggtaagctgatgtttatgttcgcctcgttgatatccta

SEQ ID NO: 383194 - DNA, 154 bp, Zea mays
ggaattcgtacgagtgatgacgaaacactggccagcctgcacacttcactccaattcaggcacggggtcctgggccgtggtgaccacgacgcacatcatcgttgcccaggaacagactacgtgtcaatcaggaggaagccgctggtggtgccaa

SEQ ID NO: 383195 - DNA, 152 bp, Zea mays
gttctagatcgcactcgcgtctctttcctagtcgcgccgccgccgatgctgcaagcgccagctgtttgtactacggccactggggcgtcatgcatcagccgcgggaagtgcgtatctacgtcgtcggcgctgtcgtgtcaagagtgacgcct

SEQ ID NO: 383196 - DNA, 148 bp, Zea mays
gtagctcgaacttccacgccccccctcctttccaggtcccctcgcccggtgtctcgtatctcgcgcgcctcatgcaagtcgttgtggatgccgctccagcagttgttggcagaagtcactgagaacatgttgtgtggcaagaaagtta

SEQ ID NO: 383197 - DNA, 140 bp, Zea mays
gctatcaagctggctaagaaatggggtgctgagaagagtctatcatgccaaagaatgaggcgctgagacctcgggtcgaactcttggtgtcatttccatggtgatgtgacaacgatgcaactctggtgcgttggtccttt

SEQ ID NO: 383198 - DNA, 140 bp, Zea mays
gatcattgatctgttcttccaggacaggtacttgaatgcgattcagacaaatgcacaccagttggtgttagcggacaacaaaaggagaaggaatatgcttgcgtgagttgattaaggtcattcaggagtgagcaccatag

SEQ ID NO: 383199 - DNA, 158 bp, Zea mays
ctcggaagaggctcgagacgcgttaggtctcatcactcgtcatgttagtatggctcgtactcagggtaagcccctcggtggtgagtctgtgtcatgaaaagatgcctgaaatcagggttgtgttgaggagcacattgtttccgagggttggcagcatg

SEQ ID NO: 383200 - DNA, 140 bp, Zea mays
caggaagagaaagcgatcggacgcgggatccttcccttgctgccatcgtgccacgctggtccactgtgacaatgaggacgggtccatcacaatcccgccgttgtggcctccccagaagatgcagggtcgtttatccctgc

SEQ ID NO: 383201 - DNA, 140 bp, Zea mays
acttcctccacatctcgtttatagcccggctcatgatgctgcagttgaggactggaccagtgctatcacgttctgaaggttcacaactttcagagtttgatcaagatgtgattgctcgtagtgacattattacttcactg

SEQ ID NO: 383202 - DNA, 136 bp, Zea mays
tcaatgtctgctcaaactgttgatgcacaagttttgcctcatgtagcaactggatttttgggatcgtggcattaaagacaatgctcatattagcaccagaactatctcagcgtacaatctgtgtgttctctcttga

SEQ ID NO: 383203 - DNA, 164 bp, Zea mays
cacgcctgagtaagttcggtttcggctcgagatctatatccagagtcaaaggagtacggaggagacacatacggcaatggtgtcatcagtggccactgaccatcaagaactgacaggaaccgtaacgtgtgaggaaactaccaggatctgggtgcacagcaagg

SEQ ID NO: 383204 - DNA, 163 bp, Zea mays
cacgctgcagtaagtcgtgtgtcggctcgagggcgaatcctccagcatggtgactgtggtgatgtccatgagtcagcaagaggattcgtcggttgcactaaagcatggaagaaaatcttagagaaaggagctttcctgctgattctgacggtggtaacccaag

SEQ ID NO: 383205 - DNA, 136 bp, Zea mays
ctgacggcggacgttctcgcctctcctctcctcacgcttccggttcacctctccgcatgtggtgtgtgcacgccggaggagacgggttgcgtagataggtgtgaaaccagagctcctgatgggtgctctctccctc

SEQ ID NO: 383206 - DNA, 170 bp, Zea mays
gcacaggtaagcacgggtctcggctcgaggtcgtgtcgactggttcgtctccatcgtgcctctcgttgccttcggctccatcgaaggtgagtgtagacgtcgcgcgccgggggcgactgcacgcgcgtgtgcgattcagtcttcggcgtgcggtggtggtcgcgagatct

SEQ ID NO: 383207 - DNA, 137 bp, Zea mays
cttgaaggatgggacagtggtcctgctttttgaagtgagacttcagaatggccttgaatctcgagcaacgaccaggatgctggatgggatgccaaggattgtggataatgagactccatacactaggcgtttttggt

SEQ ID NO: 383208 - DNA, 117 bp, Zea mays
ctgcttgacagttttgactcgaagccatggtgtgcatctcgaccagatagagagcgttgcgtttgctcctggggtggaggtacaagcgtacagctcgcgagggagatcaagattaaa

SEQ ID NO: 383209 - DNA, 135 bp, Zea mays
atttggctcaagggagatgaagatgtagattattgatacgagttgctcaagcgatagttgtgtctctcgggatcacatacatgtctctgttgtacgggttgttatgtccgtgactgggagtagggtacatcaggc

SEQ ID NO: 383210 - DNA, 140 bp, Zea mays
gtaaaaaaaaaagagtcagcccttgtgtttctgcttgagacactcaagaggggaagcaacagtgtgccacagtggctgacctgggcccacagagcctggtgtgtagtcccaaacattgcagtatagcgttgtttttgaaa

SEQ ID NO: 383211 - DNA, 159 bp, Zea mays
tgatgtaactggttcagaattcgagctattcatggggttcttgcgaagcttgagcatattcgggtgatctgctcctagacagtcctctcaagaactaattgaaaacaggctgatatgtattcacaattcaacgtttctgacattgaccacattgagagg

SEQ ID NO: 383212 - DNA, 130 bp, Zea mays
ctagttgccttaagctacgaatgaatgatactacgtagtatcttggcaactacggcaaaccaactggagttcgagttagcctacgttgccattatactacgtagtatcacatctttcagcagggtcccat

SEQ ID NO: 383213 - DNA, 273 bp, Zea mays
ctgggattagggccttaagggctctgagaggagtctaccatgcactcttatgggaagggagaccctaaaaaactttctcctctttgtactcctttttctcccgtttccccaagagaaccagattggcagggagaagcattgtggggcaattgttcctccttgacaatgtagcaataaatagatgctgccaagggcataaactggggaggttagctcagagcagagtagtctctagagaaaggaagaatcctcaacggcaccctggggtgctag

SEQ ID NO: 383214 - DNA, 260 bp, Zea mays
ctatcagccagctccattctatctactgctactctcagtaatatatatctatccgcagttccatagttcttccagctgctctacacatacacatacacgctctcacatcgattgagatcatcagagaggtggaagaagaagaagctaagataccagatcgaggaagagaggcagtgcggtggttggtagatgatggagagggtcaaggacttagggttcagcctcagcctcaagtcgtccctggcgtctcactggaatca

SEQ ID NO: 383215 - DNA, 141 bp, Zea mays
atagagggcgctctacgcttgaactctccttggttggaaaccagtacagtgggtgaatggagcagaatgatgcttctactcggtggacaccctgggctgagcagcgcatcaactcccctgaaccctcctgaactttccgaa

SEQ ID NO: 383216 - DNA, 166 bp, Zea mays
ttgagttgaacgtgttgaggctttgcaatttcacttgtgttaaaggctctggcatttttccatttctatgcaaatttacttgaagcagaattgctttctctgccgtcacagaaagcagagtttctttcaaacttcactgaggcatcagttgctctttggcaatgtc

SEQ ID NO: 383217 - DNA, 264 bp, Zea mays
gctctcgcaccctgtcccagagcagcgagtctggaactctttcttcggggcccccggggcacaccatggaggtctcctgttgaatggcccttgttgggacccagccctcacctcccccagagctaacctgggaggtgctgaaggggcattgggccaccgtaagcaagggaaaaagggcagatcatgcggggagatgaccttgatctttgattgctaccctaaccttgacctttaacccgtgattccacccagctcctgggagag

SEQ ID NO: 383218 - DNA, 264 bp, Zea mays
gaatcatcttcccaaagagtagatttggtttgggttgggttggttttgttgatcatatacatttctaagatgctaactgaactacacctcagggggcactgatgatgaacaaaaccaaaccaatccaaaccaaatcatcttcccaaagagttgaggaactgcaaatgatcaactctgagactttaaaggccagaattatcaactctgagactttgaaggcaagaatggggcaactgttggttaccacggacatggatgttaaag

SEQ ID NO: 383219 - DNA, 247 bp, Zea mays
  unsure (1)..(247): unsure at all n locations
caaaattcaactcangaaacattcttaaatataatctacaaccatcattcctatctactattcttacaccatctacaaaaaacaaanaaannatanaaaacatcttaaacaatctctctaacaatacccataacctatattaaaaatccaaaaacaatataaacattactaatctaaaaaacannaccataacacacccttacatctccttcaccataaattttatctaaaaccaaatataattcct

SEQ ID NO: 383220 - DNA, 252 bp, Zea mays
ggaacactcagatagcagtgttaagtagaatttacctcagaatttactgaatatatttaatcagttagctgaatttgaggaagaaataggacataagtcaataaattaatacgccaaggatatcggcgccattacacgaaatgccattcagtgaagtttttggttgtattagtactaacagttgagtgcagaaatctctgcttctaaaattatctgtgagagttatcggaaacaaatgcttgtaagtaagtt

SEQ ID NO: 383221 - DNA, 272 bp, Zea mays
agacgcccaaggctgaggccgagttccggagcatggggtctcggatgtcccagccttttgagtcctatatcactgcgcctcccggtaccgccgccgcgcccgccaaacctgcgaccccagctacacccggagcgccgacctccccagcagaacaccgccttttgaagacctgctggagctgtcgcgtgcttactgggttgggcgcaatgggggccggcggatacgtgtactgggtggcacggaagcccatgaagatcggataccccccgagt

SEQ ID NO: 383222 - DNA, 189 bp, Zea mays
ggctgccccagacttggcctcctcatgccccctcctgacctctgcacttctctggtcctggcatccctggggaaggtaggggtcttgacctaagtttagatttgatctccatgtgcagggaggctgtcctgggcctgacaggtcctccccctttctgaggtagcagtgccttgtggaggtttgacacca

SEQ ID NO: 383223 - DNA, 299 bp, Zea mays
ggcgcgcgcgcgatcttggctccggatcgtgcgtgaagcggcttcgtgggcagcgagagtcacagacaagacagcaagcaggatggagcactaccggaaagctggctctgtagagctcccagcgccttccccactgccccagctacctcctgatatccttgagatgcgggtccgtgatggcagcagaattcgcaacctgctggggttggctcagggtcggttagagggcggcagtgctctgcaagtagtgctctcaggttctggcagggctgcacgaaatgctgtcagcttcgctgaga

SEQ ID NO: 383224 - DNA, 221 bp, Zea mays
  unsure (1)..(221): unsure at all n locations
gtcgagtgctcgtttgccccaatgtcagatgacgacagccctacatcatcctcggcagtcgagtagccgtgctggaggcggggaccagccagaccgggagcaaaccgtcccttgtccccgtctcctccctgttcgcgttcctcactggctcaccccactcacactcaccaaggtctacggctcatcggcangcgagctctccttctgcttccctggcggag

SEQ ID NO: 383225 - DNA, 141 bp, Zea mays
accgcggcaaggaccacgtggacctggcccgcgacttcacctacatcgacgatattctcaagggctgcctcgccaccctggaaacggccagcaagagcaccggcaccggcggcaagaagcgcgggccggcgccctacagga

SEQ ID NO: 383226 - DNA, 281 bp, Zea mays
cgacgaacaagaaaagacgacatcatatataccgtacgtacgtactcatctgcatcgatcgatcggtcgagctggtgggttatagagtaggaaaatagaaatacgaatgatgatcacgggagggcagcgaaaccctgcaaggaagaggcaggtgtcgtcgtccttcctgcttgcccttgttttgcgctcatcggtgctcgtcggcaccgtggacggcggcagcttctaacgaggagtgcgacgcgacttgggagccccagaactgctgggcctacgacgat

SEQ ID NO: 383227 - DNA, 284 bp, Zea mays
agaggcatgactttgcaaaggacacggagtcgctgcttcgatggatctgcgagcagctgcccacgtcctggtccatcaggaaatccatggtggattgcctcgccgccattaccaacaacaacaacaagctggaggaggtggtcgtggatgtcattcccttggactacgacttccaatacctgctgcccatgtgatcaactcatcatgcatcataaatattattaattgcccattccattaattccatgcatggattattattctgtaagttaactgatacagat

SEQ ID NO: 383228 - DNA, 132 bp, Zea mays
aattactgagatgtacagtggtcaaccgacgccgcaggtgggtgcccggaatcccggatccttgtacgccctcctgatcactccactcgcctgcaagccgcacaccaatcacctctgcggccggcggcgtct

SEQ ID NO: 383229 - DNA, 262 bp, Zea mays
gcgtacgtagctcgagatgtgcagagggcatatttaacttacttatcttctcaacagatcaaatggaagctcttgttcagaagatgagtaagttaaatatgctgtcaggcgagtcaaatgtgcagagggaagaggctacaagtccgcttgacatactttttgttgtcattgatgaattcagtgcacttcaacatgaggttgagacgctatacaaatgaagatttacagttaaatattgaatcctatacccgtgaaattgaac

SEQ ID NO: 383230 - DNA, 241 bp, Zea mays
agggacgcgacgcgccaccacttcgaaggcgccaccagctcacacatcacggaactcgaatcgatcacccaagtgttcgaactctggcatccccgcatcgactccgcgatcaaccatctccacccctccatggtcaaggttcgaacagcgatcgacaccagggacctacagtggtcgcctgatgcacacggcgggttgcggccttctcggagagccgggtagtgaaccaactgaactcagc

SEQ ID NO: 383231 - DNA, 179 bp, Zea mays
ccctatcacagctcttgagaataaggaagataagactgacagagatcatgcaagaacacaaggaagacagcaagattctaatgaacaatctatttcagaagctaaagctgcatgagagtttaccagaattaaaacaactagatcgaagattcatgcacaagtacgagctatcccatgct

SEQ ID NO: 383232 - DNA, 100 bp, Zea mays
gccttcttcacatattgagcaacagtaatcatcttcgtggtcatggtggtgatgaccatgatgcgcctagaaatgcatgtgtgaaatattcaatatatgt

SEQ ID NO: 383233 - DNA, 172 bp, Zea mays
ttcttatatcttgcacttacaaatgaccagatatagctgttagagctaatgttaatgagctttattgtctgtatatgcctaaagcagtatagcactccctaaaaccactatcatggatgttaagtggttcacaggcttgcagtgctataatgaaacctgataatgccgtcga

SEQ ID NO: 383234 - DNA, 194 bp, Zea mays
cattgcagagatcttatttgtgggatagtataagaaagatacgtttgactatgaacatgagggctcaatctgataaatggttttcggaatacctccttagaattggtaatggaactgaggagactattggatctgattatgtgcgtcttccagaagaaattgtgattggctatacagacactgaagattcaata

SEQ ID NO: 383235 - DNA, 289 bp, Zea mays
ctcattcctgcgttctcttctcgagttcacgagtgctccctctctctctctcgttacgatgattgggcgaccgccgccgccgccgttgccccacgccaggtgcccaggtcttcgtcaggccctttgccgccgacgagcatcaaccctagttctgggtttttgctctgaagaacaaaatggacaatgctcagagtgacaaccgaactgataccaagcaagatgatgatgcgcgccaaagcaaacaggatgatgaggaggcccgccttgaagaatataaaaagatcattga

SEQ ID NO: 383236 - DNA, 287 bp, Zea mays
aaaccttgaagaaaaccactggaattagtcagagcattaggtctggtatggtgaagaataaggtaccccaacctaatgacttctcaaaagataccggaagtgttaaccaagctgaagataaggagcaatctcctgtgacaaccgagccaactactaagagaaaccggcctcgagtttaactgcaacagaaatgggctccagtatccaagttgaaccctctacggatgagttagatgagggcatacaacctcctgacgatgacatgggcatctcatcatctgcgtggg

SEQ ID NO: 383237 - DNA, 112 bp, Zea mays
agagatgccaagcgcagaatcctgtcaactttgctcatgaccaaatcggtcaaggtcgcccatggatggaggtcacaggatgcaagcctccgccgcggtcaccgtcacgcaa

SEQ ID NO: 383238 - DNA, 291 bp, Zea mays
tcacaacgagctgcgcggaatccgcgggaagctagccatgaaccccacgatcgactcagccataagacctacgttcctcgacttctttgccctttcgccctcggttgtgattgcttaggtagccacgggattgccagggcggggaatttggagccgtcgccatcgaccgtcgtggggagctctgatttcggccggggttgcactggcgtcgccgcattggactgcagggcgtgtgcgcactgcatctccgaggctcggacacctggcgtgcgcccaattatcgcgccagtg

SEQ ID NO: 383239 - DNA, 288 bp, Zea mays
aaagttgtgggcatttgtcgtgtcatgttgaagcatcatcacagctctcatatctttcttcccctttcacaccttcttgtgctcactatcgaatccttccccgatctggaggttcgggaccatgccaggatttgcttgcggatgctatcttgtgctcctgggaaggacatgaggcatatcatgggagttggagaacaaccgtcaggtgtcacaccttctcatcctgattctttgtttgacatccatcaccgtgtcctgctctagatcttaagagcatgcctgatctgg

SEQ ID NO: 383240 - DNA, 292 bp, Zea mays
gattgtagagaagatggtgagcaaaaggttcttttggactccatcttagctctgctgagacagtatcttaatagattgcaggtagccactgacgaaggctcaaatgaagtttaccttcaagtcgatgctattactataattgaaaatggagatataaagaatgcacatgtacaacatatgaactgtgaaggtggcattcatgcatcagatgagagaaatatgcatgtaatccatgagtctgacagccagaaaagaatatccccaacagaatctgaaacatgtccatcgcctg

SEQ ID NO: 383241 - DNA, 218 bp, Zea mays
  unsure (1)..(218): unsure at all n locations
aagaaaaaaacattcgtgtcctccccggctccaggctgcaagtctgcaaccccccatccagccgcgaagtctcccaccaccgcgccgatccgggggcggggggcgggggcctcgtgctctgctctctactccacccactcgcggcctcacccgtggatctacgcggtggccggcgggcgcgatggcgnaggcggacgggagcagcgtccgcttccgga

SEQ ID NO: 383242 - DNA, 288 bp, Zea mays
agcacttggtcaacgcctacctgatgtggatctgttcgcggggtttgttccaatccaaacatttgacatcgcttttgtagttttgttatcctgtgatctggaagcatgcgtttacggttgatgattaggcttccccatttgctagtgtcgcactcgcacagcgggaacttagtataagtctgatctgtcaatatctttagtggttatactatctgattgaatttcaggtatgacgactgcttttcttatgatgttataaacgtgtatagcaaattcatagagtacgtt

SEQ ID NO: 383243 - DNA, 283 bp, Zea mays
aaaatttggagaaacaccataattagttggtcttgtttttatttttgcatgactataacaacccaacaggaaatatgtgcatggatggaagtgttttatgcaaatgttgcactgaagtaaacacaggaacgtgatcttaggttgccacttggtgataggctgagggtgtttaacagctttactttcatttcctgcaaaatattcctcagcagaattcgtttgactcgtgagagacttttgattcaggttaattgaaggagtggcacgttctgtgaacaatctg

SEQ ID NO: 383244 - DNA, 274 bp, Zea mays
tggaagaggtggggagaagcatgaaggctgaaaatgataagcttcagtcgaaggttttggttgcggatgaacagtgtagcaagtctgcagcggaggttgagaggctgacgaaggaattgggcgcgctggtagaggcaaaagaggcagctgccaaggaattcaacgacgagagagagaaaatcacgctagaatcggaggatctcaagatgaggctggaggaaatgctggccatcaaggatttgacagacagcgagaatgacaagcttcggtccga

SEQ ID NO: 383245 - DNA, 109 bp, Zea mays
tgtaaatgtgtgtatagtccggcatggtagcctgcgaaaggattgtagataaccgttttaaaggaaaggaaacatgtagcctttaagttaatctatgtgttgtgggggg

SEQ ID NO: 383246 - DNA, 159 bp, Zea mays
atgtggcaaccgttcacgtgagtctagcactcccggcccgtttacttttgatccttccttgcgtcgggtagcctagggcttaggctttaagcgccgcgatgtacggcggcggcggcgactggcactacgacggatgcagcggtggagcagggaacgcta

SEQ ID NO: 383247 - DNA, 279 bp, Zea mays
gaggtggaagccaaggcggccgagatcgtggttgtccatgaccacgaggaggaggcagcgctgacgacggcgacgacgctccacggcggcgcctgcccgccggacctctccgccgtcaccaaaatgctggaagggctgcgccgcggcaacctgtacaacgcagacgagatcaagacgacgatgtcgctggcttctcctgtctggctgcagtttcttcagtcgtacgtgaggattccccaggcaccttgaaatgccagccagattcgtcactggaacatc

SEQ ID NO: 383248 - DNA, 263 bp, Zea mays
agctaatggacgagtcagctgctaccaaatggcgccgctcttcttcctgaggttggaaccaggcaaagcaaatagcgtttcaagcaaaacaaccttgcatcaccagattcagaagaatctctcgtcaattattgcctggtctgcttaccgggtccaagcaatggatatgctcataggaacgcacgtatgcaagggtatgggaggccttaaacaaggctacagagagctcagttgaactgatcaaaacacggaaatggttgaag

SEQ ID NO: 383249 - DNA, 271 bp, Zea mays
gtctgctcattgtttcaggtcatatatgacgtttttaagtgatgtatgcacaaactcagttatgttctctaattcactcatcctgtgaaactgtgcttttataactgcataaatcctatcctcatatatgtagtgatctgccctatggtggccctgtgaatgttgtgacaatgttgttgagtatgttggccctatgactcctttgaccatgctgttgagcttgatggccctgtgagtcctatgaatcttatagacgatgaccaggtttttt

SEQ ID NO: 383250 - DNA, 264 bp, Zea mays
cgtatgctgtcgcccgcaccacaagtccacgaccagcactcccttcatagacccccctccggcgaatccctcaccaatccagcgttcacacgtccttcttgcttcagtccactccaaggttaggtggacaatatgtcaagctctaaccagatgtgttctgatggcaagtcagggagaggtcctcgggagcttagtggtgctgtggacttaattagtcgctacaagctgctgaatcatcatagtttcttttgcaagaagcctttg

SEQ ID NO: 383251 - DNA, 259 bp, Zea mays
agcttgtctaatttatttggagttgagtttcatatttaaatgagagtttttgtattgaggttaacttctatgaccaatttttgttcttgttaaaatgctagctgatagtttcaacatgtatcttagtattgctttcatgaagtatcaatttcgagccattagtattaacattcatatatctatcttctgacatctgatgctcaggaagcaatgtgtgaagaggtacagttcttttgatttcctaactgaagttgtcagc

SEQ ID NO: 383252 - DNA, 283 bp, Zea mays
gtggagtgaaaccctaggtttaccgtggaagaagaaagtccattcggcgcgctctaggtgtttggcaaaaagcttaaaccggaaatcgtcatcgcccttacacatatcgatttggtttatgacatgtctgatctatataccttggttgatggcttcgttacacgtaattcagctaggactttagggcaaagtgatcatcactgcaaaacctggcgtcaagctagaaatcccagacggagcagtgattgggaataagattccaagttcacacagcaggagttgc

SEQ ID NO: 383253 - DNA, 287 bp, Zea mays
agctccttcaaaaggacctgtccagttgcacaaggcaaaagctgctctcgatgctgatgatgattatgaggccgagcccccgaaggagaaggcaaagcctacgggggctgatgtggcgaagttgaaagagatgaagaggcaggaggagattgagaagaacaagcttgccttggagaggaagaagaggcaggctgagaagcaggcagcaaaagctgtggcccgagcacagaaggaagctgagaagaagctgaagaaagaggagaagaaagccaagaagaaatctggtg

SEQ ID NO: 383254 - DNA, 283 bp, Zea mays
gcactggagtgctataatgcaacgattacgtcatcaattggctgcaaggttttccattccgcgctggaggtcttgtactgtatggttgtcgagggagttatgcctgacaacgtgacgctatctgcgaccatgaaggccatatctttgtcagcttcgccgagtctaatcagctgccagatgctgcattcctgggtcttcaagctgggcttcgaagcggacatggttgtgtgctcctccttgatcagcgcatacgctcgagccggtcaggtgcacagctcccgct

SEQ ID NO: 383255 - DNA, 270 bp, Zea mays
ctcgagccgctcaatttcagagtgatagtttacctatcgggcccttggacgtatcctctgttttttcacttgcagatcttgtctgaacttcatcctttgtggtacttatatccttggttcttatgcacatttacttcctctcttacattcttgttcggtatcacctttagcccttgtaatattcatacccttaccttcatgcttactttgaacctccctttaaaagccttctctttgccatccttgttcgaggataatgtcttacctatt

SEQ ID NO: 383256 - DNA, 171 bp, Zea mays
ggctcgagcttgccaatctctgaaaagaaagcgtgatttgtttgctggcctgaaaatgaaacaagatatacttttgtgccttgttgatcagataatacattcaagtgagaatgtggacattgatgacttaatcaaggatcttcaccccaaggtaatgttgggtataccttt

SEQ ID NO: 383257 - DNA, 307 bp, Zea mays
gcttcatccgccgaaccgaggagctgtcccaagttttaagtttcagggacatttttcttcctagtgcagaaaacgcagggcagcggcctggtgtctgccccaaaaggcagcccgggtgcggtttcctggtgcagttgtggggacactgaatccgaccgcctctcctgctccaggccacgctgctcctgtcgtttctgtgcatgcctgcgctactgccggtggcttcccgccttctattgctacgccggctctgctgtccatggcttctggagacctgcgtcccagcgtcgccggctcgggctccggt

SEQ ID NO: 383258 - DNA, 296 bp, Zea mays
cacaacacagccataaagcatacggtttttacttatttgtggccctacggttgtagaacatattcaatgtgttagcattgccacaccattgattttaatgcaggaatcactccgcaaatgtgaatccatgaaactggttgagatttttgttccagagtggaaaccactgttttgtatgtttgaagagccacatgaatctaccgatgcagaacagcagaagctggaatattaataatattttcttttaaaaaatgaaagtagtggcagccgacgagcacctaacaatgaaccacgac

SEQ ID NO: 383259 - DNA, 291 bp, Zea mays
cgaaggatggaaatcagaacgatgcaaacacagggctcttcttgaaggccgctgttcggccattcacttacagaaatcttgtcaaggaaattgttctgatgagacaccacatcattgatggggaaatagtttagtttgcatgaggctgtattctcacatcattgatggggagatagtttagtttgcatgaggctgtattcagtttttcagattagggatttgcccatttcaatttacaaatgcagagcttgcatttcgaaggtctaaggccatctcccgcagatcttgtaa

SEQ ID NO: 383260 - DNA, 290 bp, Zea mays
gagtttagaaagtaattcttatctatcattttgtggtggcagccgtaggcattaatttaagtggagcaagaatggagaatgtggagtgtcaaatactggtgcacgacgagaaagcagagtaatggagcatcgttcaaaagctgtgagaacccggggtataaaaaggagatatccagagccacctgccagaagaaagcagaggaagaaaaaagcaaaaaaacaaattattaacaggtgtatggatatacagtggtatacggccagaaaagtggaagaagagcacccgtaca

SEQ ID NO: 383261 - DNA, 285 bp, Zea mays
gctccacgcactccgacctcctccaggtacgcccgccaggccccatcctcctaacccgatcgctactctcctgaaccctgtgtcgtcacaagagcgcgatgaggtcgtggcggacgcgctctacactgtgtgtatgcggaggcggtggccatggcagaggagaaccatgttgttgccggcgccggccagaagctctacttgtcccggctaaccagagtcactgcggttcaacgcctgcggttcgcggctcattgctgcctgcacgctctgacatgtgacctccca

SEQ ID NO: 383262 - DNA, 135 bp, Zea mays
cttcaactcgccagtagagagctcgttgtgcctctctgatcccatgtttgcgtatgtctgctcaacaacatgtttttaccatggagaacaagttgaacatctgttagatctatcaacagtgtcatatatatgttc

SEQ ID NO: 383263 - DNA, 283 bp, Zea mays
cgagagtgacattgctcctccagtgctcgaggaaaacaaggatgctgttgtatcagtgctcgaggaaaacaaggatgctgttgtatctgcaacaaaaactgcaaagtccctggatgggtctgccttaaaaacagggcaggaggaggagggtcctgaagaggctgatgctactgaaaaagcaatggatgaagaggtagaatcaaaggagatgcagaagcagcaaaagcaggatcataatagcatgagcctcaggaagcttaaagccaagcacaagaaatatctc

SEQ ID NO: 383264 - DNA, 176 bp, Zea mays
tttttggctgagataaaaaacattatccatgcaacatcatgaagctagtcctctctgggtggtgttgctgttttctgtgtttgtcaagacgagctttaattttgctctatgtggatgactgtttaccgttagtcgaacctgtatgatgttgcatggataatgttttttggctgagg

SEQ ID NO: 383265 - DNA, 289 bp, Zea mays
cattaatttcccagcttctccagaaactccgatcaaatattcagttacctgagtgcctccgtattgtagcacatctgcgtcgaattggagttttcagtgagtcagaattgcgcttacagttcctgaggtgcagggaagcttggctttctggaattcttgaagatctggaccaaaggaatgtttatgattacctcaaaggcatggtgacttgccacagggtacatctattcgatgttgttaatcaatatagagcaatattcaacaatgataaatctggaaatgatgagaa

SEQ ID NO: 383266 - DNA, 282 bp, Zea mays
ccacggactcatctgtccgtgtgctgctgatccgtaactacacgtgcatgcagaggggagttcgctggagagcgctacgccgccaccgcatgtctgctgtcaaagggcgtagaggactggggggttcacgctgcggcagctgcaagcgcgtgcatggtgggtggcggcggcgtggaggacgagggctcggccgccatgcctctgtacagcttatatggtggtggtagtcacagtcacagtcacagccacctcgctgcagctggtgaccatgagatgccgccg

SEQ ID NO: 383267 - DNA, 271 bp, Zea mays
aaccaacgagaaaaatccccaatccatctcctattctccttcgctgcagtcttcaccactgtcggcgctgacgcgctgtcctactatccggtcacactccggctgatcgacgctacgtgtccgacatgctctcaggctcgcccgcaccggatgattgcagccgttgcgcctacgtcatatgctcccgctgatcgtagtcatatcaaatatagggtagtactgtccacttcactgtcggctctcgtatagcaagctcgcgctatcgtaggcg

SEQ ID NO: 383268 - DNA, 302 bp, Zea mays
cgcacttgtgcaacctattctgtggagaggctaacaagacgatggagccccttcttgcgggggtcagcagttacgttatttatttgtcattgctgaaccccgcaagaaggggctccgcaatgacaaataaataacgtaactgcgcgcggatgatcgatcgatccacaatatcaatcaatctccggccttcaccagtactagttcccttaatgcataatgttgggaactggcgtctttagattttctgtgcagtaaattaaatgaaccacggtaacgtcaatgtaaacgaatcacgcatgttt

SEQ ID NO: 383269 - DNA, 296 bp, Zea mays
tctccttgttgcgcctagtggtgccttgagaattgaagacatgtaggtgactctcaaacttcttggaaagagatcctgtgtgaatgtaaatgctgtcagtatgacttttaattgtgatgtgaataatcattgagtcatagtcactgtctttcgggatcctctttggaccacagatatccaagtcagtcattatcatagtattggccagtggactttccttcttcctctccatcacgtcttcccttaagttaaagtgttagagaagaccttcttcccataaaaaggttggtggatcg

SEQ ID NO: 383270 - DNA, 288 bp, Zea mays
ctcgagccggatctgacatgccacatatctgggacttctacgttgcccctatggcttttaagttgtgcctgtgggatgaacatgtcccaacatttgctccatttttttactgtcggctgttggccataattgtttagctgatcattaagaatgggaaatggttaaaagtagaattttcttgctatgttatatgttctgcttgcctctgcttgagcacatcttatttgaaataccatgtttttgggactaatacgctgccccgatggcaataacagtgcctgcggaatg

SEQ ID NO: 383271 - DNA, 175 bp, Zea mays
ggaacttcgatatcgaggatctcaaggctcaagcatcattgattcatgatgacgagccaccagaaataaaagaagatgatgacattccaagaaacattgaggatttatcttcacggaaccatttggcaaagtcatctgcaaatgaatgcaactccagccagcgagcttttgccac

SEQ ID NO: 383272 - DNA, 277 bp, Zea mays
atcagaacaatcttaggacaccttctgacacaatgctggtagcactgtgagtgagaaggcaattctttgctgatggtactgcaattactccatgattctgccctttattttcgtttttgtctctccggtcttaagcattgattgctcgagatagttatctttacaaccttgcattgccatctgatctgtacataagccaatgatgattagctattacatctggaattaccgtcagatttactcatgacgaaaatcgtctggctctctgaggcatatg

SEQ ID NO: 383273 - DNA, 160 bp, Zea mays
gaactggtactcagttaaccagattcgatgaatgtgaggcagagctacagcttcaactactcttctagtgtttcaggagttcgactcttttcatatgattggttgcccgcggcatctcatctcctatatgtttggttgcttgtgtttggcgggtgattaa

SEQ ID NO: 383274 - DNA, 226 bp, Zea mays
gagttattgtacatgtcaccaacttctattggttggcgattgcttattgaagtaactagatatgtgctcgtgcattgcgacggaagtaaaaaaaattgtatgaaactggtagaactacggattctaccgggcagattgtagggtggggatttggtgcgaccagggcggcaacgctgaggcgccgtcgtgatcctagctgggtcgcgcgtagggaggagatcacagg

SEQ ID NO: 383275 - DNA, 231 bp, Zea mays
gcagaagcttatagcattttcaggagccccactattgattccgtagatgaatctgtacagctcgatgacacattaagcgcaaagccagcatgttctggcactggatctggttttgagatattgtgccaaggatttaactgggaatctcataaatcagggaaatggtatgttgagcttggcacaaaggccaaggaattgtcgtccttgggtttcaccatggtctggtcacca

SEQ ID NO: 383276 - DNA, 329 bp, Zea mays
attcttactctttgattatattaagtttcatctgcttttgatgccaattcttcaatccatcatactactagctacagtgcactcaatttctcaaattatgttctcattgttgaatcatggtcaacttattctcaccttgacatacagagtatagaaacgtatggattcttgaactgtgcttaaatagttagtcatccaacctcagtgtacaccttgacagtggtacacactgaatgataccaccaatacccatactatattgaatgtagcatcaccttgcattgtgtagctgtatagaatgtatcagcatcactcatacttgtaatcat

SEQ ID NO: 383277 - DNA, 302 bp, Zea mays
agatatcagtttctttcttttctttgatttacacgcacactctcccaactactgtttgcttgtttggtatagcaggaagtatctttgatatataaaaacgagaaataggccaaggagtatgctatcacgatgagccgcccagatatatatatcgtgtgcctccgtcacatcgtgctagctggttcttttcttcatgaggcatatagggtatttattcaaatgcccgcaaagggagggcagtgcactgagtgcatcgggagggctcatagttcttctttgactgcaagggataggcagcaggt

SEQ ID NO: 383278 - DNA, 104 bp, Zea mays
cgctgtgttgtttcatttattatacagcttaataagatatatacaaatccaccctctgcatatatttgcggcttgtgcggttctacaagaggattcccagcttg

SEQ ID NO: 383279 - DNA, 142 bp, Zea mays
agcgaggcggtgagcgcggaggaggcagggctaagctccggcgccgggcgcccgccctctccgccgcgctgcgtggggtccaggatttctacctcgaggtggacttccacttcgagagctccgtcgtgccgctgctctcgcg

SEQ ID NO: 383280 - DNA, 288 bp, Zea mays
accaaaaccatgtccatgggaagtgctgagttgtttcaaagaaggtcggaatttatagttggcatcctgcagagactaggcaccaacaacatcatgagaaagcaagaagggtccatgagtcacagaaaaatggactgcagacatgctcttgctattcccgaaggccattttgataacttgatagactacaagcgaagaactttaatccattagctaagctgaggaatggtaaaattccatcctcttatgcaagtgatgaagcatgtgagttcatggctttaccatcag

SEQ ID NO: 383281 - DNA, 287 bp, Zea mays
attcattacttgcaagattatgctcggccacaaatgcttgctttcatgttcaggcatggccattacactgaagcatgctctctgttcttcccattcagtcaaccaaccacggaaggggaaacatctttgtcttcagctccatggagtgatcctttaacaactgattatgggacaattgatgacttgtgtgatctctgtcttggatatggtgccatggctgttttggagaatacaatacggacaataacacaatcgcccacatatcatgaggcacacatgattcagta

SEQ ID NO: 383282 - DNA, 276 bp, Zea mays
acaagattgaacaagaagagagacacagatgaaatggtggatatattgattgctgttgtattcagtgctttgcgtgataaatattctattgaaggacatgaagagtggatcacagagctagactcatccactgaagaaaagttttcacgccatctaatcattcgtatacccaagattgcatttaaagacaactcccatgttggtgcgtttgtctgtgaggtctgttcacaaattgcagctcagcggacaacaaatcatggacttgataaactttat

SEQ ID NO: 383283 - DNA, 135 bp, Zea mays
ctgtattggaagcatttgttgactgttaccctgacagtcaagcacctgatgtgttactgaactcattggcgattccggattcacttggggttctgacacctgctagagaccttgtccataatgatgcaccctgga

SEQ ID NO: 383284 - DNA, 132 bp, Zea mays
ctcgagccgggcagatttgcatggtacggttcatttatcaagtgatgcgcaccccctctgtgtatgttgtggctccaggtacaagtacaaccaatcaagccaagcaagtttgattggttgtacttgtacctg

SEQ ID NO: 383285 - DNA, 134 bp, Zea mays
acccgatcacttcaacctaaatttgcttacttggccacatgaagttgatctactcataatattgggttgtacaatatacttagggatcggcggcacaagggccccagatttaccatactccacctgcatagata

SEQ ID NO: 383286 - DNA, 293 bp, Zea mays
acagcattacaaatgtctcttacatcttgtgagcagtatcgaagagcagatgctaaggccttggttgatagggttgctgatgatgcagtctccacaactaggacggtatgattaggccttaaactttgatgtgtctttcctcctaaatttgatgcatgtgaaccttattctcagtaaaactttagaatagcgaaaaaaatctaggagatgaagtaatggtgtgtctctaagtaatattagaggctttattttctgctgatttgacagcaatttaaatgttgtttttcctatat

SEQ ID NO: 383287 - DNA, 298 bp, Zea mays
actaaacaagcaagatatgacaaagaagccgtgatcaagtttttccgcttgcttattagaagaagatacttctcaaacgaacctcctgccccaagtccctggtcccttgctccaagagaagataccatccttcctatggagactcttggagatggcgcagatagcttccaaaggaaaaggtaaaacatgaaaaaggtcacccttcctaaaaagcaaacctcaaatgaaccaaacagaacgatgacgtaaatggggaaatactctattcatctgtgcaaaattggttcaaaaaatgtaa

SEQ ID NO: 383288 - DNA, 288 bp, Zea mays
agagaaacagatgtttacgatgcatgtgaggttgagagagaagaatgcacacaagagagaagccaatcacaagaggattttggaagcattgctcactgtacttgcacaacagttgatgatcaggtgacagttcgagaaggatattacacgaatgaagcacaagaaggaccaagacatgctcatgatgagccagacactctgtatattgaaggacttgataaattcatttgccgcgaaaacattcgcaacgaagagtccagtccagcagaacaaagcagagacgatata

SEQ ID NO: 383289 - DNA, 292 bp, Zea mays
agtcacagcctgaacacgataacgttctacggctacgccgagagcgtcttcaccatcgaggtgaaaggcgagcaggatgttgtgatggtggagctaaggagcctcttgtccaatatcgtggaggccacaagcaactgatgagattcccgatggcaacagctcgtagatagagctcacatgtttcagtgcagaaacctgactttcgacgaagaactctagcggtggagtgtttgtgcaggcagtgtaacaagagtacatggtcaaactggtttactgacggataaaggctgga

SEQ ID NO: 383290 - DNA, 278 bp, Zea mays
gaggaaacttttatcacggacgtcactcattgtcacgacagatatgcaaacttccactgctccaaatgatggagactacttgcaggacatgaatgcaatagaggaaaaattagcaagatggtttacttttcaattaatagagattaacaaggagtgatcaaggcgctctcaccagcacgaacgtagaatctcttgcccgagttcctgtcagagatgtagaagttcgtcacccgtgcctgccagagaaacacaacagccatgcatcacttcgactgcga

SEQ ID NO: 383291 - DNA, 169 bp, Zea mays
gaacaaatggactagacaattgttcaccactgattacaaggacacctcagttacaacaacgtggagaaaagggaaacaacagtgagagagaggaagtggatcaccacgttgttgtaactgaggtgtccttgtaatcagtggtgaacaaatggactagacaattgtcatt

SEQ ID NO: 383292 - DNA, 125 bp, Zea mays
ctccatttgtggtgtggctagagtgtaccatggtttgtgaacattgtaaaagaaataagtatgcggttcacggaaatgaatatgaacttccctttcgcgcctgccgcgaaagaattaagaggtct

SEQ ID NO: 383293 - DNA, 263 bp, Zea mays
gacacagcgtggagccgccacttctcttctcagcgctcccaatccagcggcggcggcggcacgccggcacccacccggtagaaactgtgatctgctctaatggctaccgaagtgaagcttcacctccacggaagcgtatgttgttggagttgccttgtgatgaagaaggtgttaatgtgagtcaaactgttggtgtgtctgcatcatcagccacacctgccagagcttctcaagaacaaggtgaactttatgatgaacttgtt

SEQ ID NO: 383294 - DNA, 299 bp, Zea mays
ccgggtccacgctgaccctcttcacgggggcggcgaaagatctcagccgcgacgggttcgagcgccggcgagcgctcgcccacctgggcctataaactggccccggctcctcttctcgcgtcgcagagcccagcctcgggatgacgtggcgtatcgcgacaccgccacagctcactcaaccgcgcgggtctccaacgaaccccttgtagaagcttccaaaccctagcgcaggaggaagaggagcgtggaggagctccaggaatggcgaaggcgaggacacagaagggtgacggtagcgg

SEQ ID NO: 383295 - DNA, 301 bp, Zea mays
ataaatcaaaatgaaatctgagggaaaaaaagaaaaatatttgccatctatccactcggtattgtgctataatgatgttaatttaatctggttggagatggcaaattatgtgcctgcaggagctgggccagtggactccgattctactgaaccgtttttctgttgagtttatgatctaaattctacatataaaggctggtttcccccgacaccccccttccaaactagttgaatggttgataaactgtctatttggctatactccgtgttgagtttgtgatctaaattctacatataaatg

SEQ ID NO: 383296 - DNA, 241 bp, Zea mays
gagaacacgaattagattagatatattttcttcattattaaagtttctaaagattatgcagacattgcaactggatgtgttttatatgctcgttattgctagttgaagaaaagaatagatatgtaaagaaaccctacatagttggtaactccaattgtgtacaagatagtggaaagggtgagaggcaagtaattttgcaatttcttaatttttgttaggttctgattcaatcagtgtttgg

SEQ ID NO: 383297 - DNA, 237 bp, Zea mays
gcaccagatcccttaactccttcagacacctcatgatttgtatctccttctatagtggtactgtctatgcttccttttgctttccttgtcatctgttttcgactcttcttgtcttttaacttgctgggatgctttttcacagagcttgaacttccaccaattcgcttttgaagtgacaactcaaaacatatcttattggctttgctttcttttcccatgtttgttctaagaactgag

SEQ ID NO: 383298 - DNA, 229 bp, Zea mays
gcgcagcagatgcccagatgagcgagggtgctactgccacctcgccggcgctggagaccgaggtggcgcctttgccggacaacgacgacctccatcgggagatctttctccgtctaccgccgctcccctcgtcgctgccccgcgcctccctcgtctggaagcgctggcgccgcctcatctccgaccccgccttcctccgccgcttccacgtccaccacagggcgcctcc

SEQ ID NO: 383299 - DNA, 226 bp, Zea mays
gtcctcctcccttccccgcaggccccctcgcctcgcgcgtgcgccccccctaccccgtctcctccctgcctgcgcgagcgactagtagaaataggcgcgcgtgccgcctcggccgctcgctcctctggttaatcccccctcgccacgactcgcagccttcccttcacattatccgcgcgcgcgtcagggacgtagcgtgtgggtagcgtcgccgtgcggacggtct

SEQ ID NO: 383300 - DNA, 276 bp, Zea mays
cccaaacctctctcggaagttcctctcgcgtggccggtttcctcaacctccgtgtcggctcgatagtttcgcaagcgggcggggcgggggtctgagctcgatggccacttctggcgagcaatcggctggcggtgggtctgcggcgagggcgtcgaagctgcgctacccgctgcggtcggcgagcaaggggaaggccgcggccgttttctcggcggcggatgcgcctcccaccaccatatctgcaccgcgtcgggcaaaaccatcttcagatgtcag

SEQ ID NO: 383301 - DNA, 156 bp, Zea mays
taaatgtctgttgaatagaattattaataatttaatagtaggaaaaaggagtgtcagagagagactcaaagatgtgtgagagaacatggaagatggctgtttcatgtgagacaggactggaggaagttatgaatagggatcagatgggggagtgag

SEQ ID NO: 383302 - DNA, 100 bp, Zea mays
tgttcttccaatttgccacagcactggaagaatttgctggagggacattcaatgagcaaggggaactcagcaagtatgtgaatgttaaagttccatcaag

SEQ ID NO: 383303 - DNA, 154 bp, Zea mays
agcccaagtcgtagttacagcaaaagcaggagtccgagtaaatcacccaggactcgccgttcatcatctagatcccggtcaagatctgtttcttctcgttcaaggtccccatcaaaaggacgttctccatcaagatcaccagcaagatcgaaat

SEQ ID NO: 383304 - DNA, 115 bp, Zea mays
  unsure (1)..(115): unsure at all n locations
atactgccatcttttgataaagtcgttccaccatccatcatgcaccttnncataggcgaacttatctcaatatacagtgaattatgtagacttgagagcccaccccctctgatac

SEQ ID NO: 383305 - DNA, 292 bp, Zea mays
aattcggctcgagctgatctggtggcagggctggtaagagtttctgtgctcggtccaaaggaaggagacagtggttcagcagcaaccccttttggtgcagtcttcacaggctgtcacccccacactgcctctgcctcccggtgcagctaacttcatcaacagagtatccaaacctgcatgataatatatatgattattgtctatattgatgaatgtttatagagcttagcttttcttattcagtagcactgacaataatcaagtcattttattgtgcaaatatctggtatgt

SEQ ID NO: 383306 - DNA, 276 bp, Zea mays
gcaaatacagcaaccgaatgagctagaggaaaataagcttggtggggtcaaaaccagaaaagcggatgaggagtgtttggagcaagaaaagtcccgtcagtctcctattcagagctttgcacttaggcttcttgagtataacattaatgcatctgaatttctgccattagccgaagcaccatcaactcctgacaggctaaatgattttggcattttgaaagtacctgatcaactttcagaagcaaatctcttttatggcgtacacccggtgcaatg

SEQ ID NO: 383307 - DNA, 272 bp, Zea mays
cggatcaattgtccgtacataagaagagtggagatgtaattagagtggacatggcgttgctaatatgatcgtttgcagcttgcggtcactatgggggacagatatcccccgggtccactagaaggcaagaaggcctcgcaaaaggctttgggcctattatctcgcaaagccatccctttgtgggccaggggaggactactgatggaatgggccgatgcgtgataaggaagcagtctcaggcccaagcatctcgacaactcaagcgctatctg

SEQ ID NO: 383308 - DNA, 267 bp, Zea mays
gaaagtagaaagaacttgcttatgggacaatggctagactttgtccgtgacaatcatgtgcaggagggagatatctgcctctttttaccgacaaaagatgagataagacacacatttatggtctatattcttcatgaaacaacccattctagatgtggggctggctttcaaagggttggcccatgccttggtggtgcatccagtgcaaagatggcttcagaagttcatattgaggatgaaccaaccactggagaacatgtttcgtcg

SEQ ID NO: 383309 - DNA, 100 bp, Zea mays
aatatttgtaactcaaatgtccagaagaactgtacactctgtgcatgttttcaggaatttcatatttgtacgataaagtgggtatgttgacagacaaatt

SEQ ID NO: 383310 - DNA, 250 bp, Zea mays
gcggaggggaggcgtcggcgcaataaaaggcggcgcttttgcatcgcccctccccggcatgcgtagctagcctcgcggctggcccccacgccatgcagaccaccgggcccgcatcgccggataagccgccagttgttgacccggaggccgacgacaaggtggaggaaggggcgcgggcgaaggaggacgatgcggcgaaagtgagcggcgaggatgaggatgaggaagaccaggaggggaggagaggcag

SEQ ID NO: 383311 - DNA, 202 bp, Zea mays
cagatagccgccgagatgagaacttgagaagtcaggtgactacggtctcgtgagggatagtgagggaggacgcagtttgtactctgctgcgtgctttccgtatatcatgggattggaagacaccggatttctatcttggatctacgacaccaggagaaatggctgaccatcctaatccggagtcctgttttaggaggtcatt

SEQ ID NO: 383312 - DNA, 258 bp, Zea mays
cttcggccgcccgcgccgtcccatcgtctccctctcctcaaaatccccacaaaccgctctctccctctcgcctcccgcccctaattcccatcccccacctccaaatcgcacatcactcagaaccctcgccgcgcccctgctgcgcgcccccccgatggcagcagtcgcgttctcggaggaggccgtcaaggcggcgaaggtgctgattctcggagcggatggcatcggctttcagctgctcaagacgctcgctctctc

SEQ ID NO: 383313 - DNA, 300 bp, Zea mays
gcgaaatgttccttccatccaacatccagagtgccgaaaccgacggcagaacctgcgcgagagcttgcttggtagaggagctcgctgctcctgctcgccacccagttcatctcgatcattcccttgtggcgttttcctctccccgttcctttctgccgctgtcacgcaattactaacgccgacgaattgaagaagaaaacgtcactgcagcgagctgtgagcgatcttgcgttgatggagccagtgtcagcctgcgccaatgggaggtcggattttggattacagataggtacaggaggg

SEQ ID NO: 383314 - DNA, 282 bp, Zea mays
gtgtatagcccgaacatcaatacctttgatgtgaagctggggacctttgtgccgtcttaaaatgtcatcatctaaatgacgatatgttcggaagagatttcgagcagagcctgattccgtgcgggatctgctcaaggagccatattttgcagcccctgtttgtatcagtcggtcacctacctacaaaaccccggcctgaaccgtgtacagtgttatctgaagctgcagtgtttaagcagtgtgaagctatttggaagaagattatggaaatgtagtaatata

SEQ ID NO: 383315 - DNA, 202 bp, Zea mays
ctgctgtcggcgttcgtgatgtcggagatcaggacagtgtacgtgacggattgcccgggtgagcacgtccgccttgctccaaggccggcatctgccttcgctggtcagcctgtgccttggactcggaggtgcagagcgcgctgagcaacccgacactgcaggcccgcagcacgcacgaggtcatcgggctgctcaacgtgtg

SEQ ID NO: 383316 - DNA, 285 bp, Zea mays
atggggtttgtcccaggagccaacgccactcgtctctggtgcccacacattccgcctcagctctgaaattaatttgatgggttctgcccttgctttgatcgcctcagccacactgtcaaattctacacctagtccaagagatttgggacgatgcacggcttgtatcggctgcactataccttggccatctttaccaaggccagtgccctcgatgaatcccattttggccatcatctttgaaccaaagcccttggtgtgcacctcaaaggagcctagatgggtgga

SEQ ID NO: 383317 - DNA, 279 bp, Zea mays
gctagccattctatgcattattatgacaaagggtttcctacttatccttacaatatacaaatacattcggcgaagttttttttatcataacaaagctagtgattttccagagttattgcttctgtgcattattattacaaagctattgatttcctaatctaccgcctctgtggatctcaactgaactggtagtttatactaacattcaggaaccactaaggttccttattgtttatagaagaagggctatgttttcttaacctacctttgttctggatt

SEQ ID NO: 383318 - DNA, 244 bp, Zea mays
aacaattcattatttgtgatgtcattgaggcatcctttgctgtcttctcatttttgtgtgtgaacaattatatgttaagatgttcaatcatttcttcgatggggttattaagcattgtactgcatgttctactgcaaattagtagaccatattgtcaaacttacaaatgttcatcagaatatatccttcacttttttcctataaacaattatggtgttcatatcaatgaaaggtactattgtac

SEQ ID NO: 383319 - DNA, 254 bp, Zea mays
gacccgatcatgaaaacaacttccatggcagctatcagtggtggatatatgttatcctgtggggccacctggcccacatgtttttgccaaaaatatgtttatccctcttcatagaatttgcaactatatatatctcaattgtgtagtgcttgtgttaattgacttaaaaatcaactaacttggccccgctgttatttaatccttaatctgccactgctatcatttgatcatgtaaaacaggagattaatctaaa

SEQ ID NO: 383320 - DNA, 265 bp, Zea mays
atggaggagagagcgatggctgtgtctcgtgaggcagaggtggcgaagtgataaggcggcgggccggcggcagcagcagcaggatcacaacaacggaggcctagatccctgcaaggcacacagcaaggttgatttccctagttagcaatgaatgtggaattaaagggccatattagaaagtgaagagatgagcgtgcgaacgagacattttacattgcctgagattctgtgatatatcagggaggcactgatgcatgatgagtca

SEQ ID NO: 383321 - DNA, 262 bp, Zea mays
gtaagggtaacctaatttctcccttcattcttctgggtctgagaatgaaatggaggaggagatttttctgccagaagtgtggggaagaaggtcatcacgcaagggattgatgcaagtctctttggtgtacgcatatgtcgcaagggcacccatgtgcatggctaaatgtgtttggccgcgacagattaagccctgatgccgttgtgggctggctgcagatgggctagggtactctctcccgtatgctaaacccgtctcagaa

SEQ ID NO: 383322 - DNA, 281 bp, Zea mays
gtccgagcattccttgccccagcagtacattcacgcgttcatagacggacaatttacgacatctccagtgtctcattctggggcttgattgtctgcacggctgccatttcttatttccttttgtttacatcagctagcttattacctgccatctggacttatattttgtagttagcaaggtaactagatattagaacggctcaaaattttcaccatttcttgtttccttttgtttacatcagctagcttattacctgccatctgaaattttaattaagtaa

SEQ ID NO: 383323 - DNA, 284 bp, Zea mays
caagattcgacccaacacagcatgtgcacaccagcagagcacatgtgcacaaacaaagcatttgatcccaaccaacgaggcaagttaatagtaaatgctttcgtcgccttcgatagcttaccgaaccttactgcgtttgtgagcacggtgctagtgaaagtggctgagcaggtagacgcgaacgtggaagaggctgatttggacggtgaggccggcgtcaagcaagatgtggactgcccattgttcattgttcatgggccgactcacggagccaaattcaaggg

SEQ ID NO: 383324 - DNA, 228 bp, Zea mays
ggaggaggaaacaagctatcatggcgaagtacaggcagcagcaatcacagaagcaggatatggaagctaaaccaagcagcaatgatgaagaagtaagagctatggatggaaatgtaactatgcatcagaacgatgataacggtagcagttccacgggcaatgacaaagctgaaaataagcatgattctcagaggtatttgatggcaaaaccgattttatgtgggaaag

SEQ ID NO: 383325 - DNA, 278 bp, Zea mays
gtctcctccaccaaatccactcattccccattgatttgtgagggaaaacctagggagatctcagatctgctctccctagtgcttctccttcactctctcttgcgtggattggattcaagcctctctccaaggagacataaccttattttcttgctcgggcatagctatagcacacaagggataccaccttacaatgtgtctgacttctgcaagtttggttagggcttttgatggcaaaacaaacgaacaatattatgaattaaagattaaagtgcgct

SEQ ID NO: 383326 - DNA, 271 bp, Zea mays
  unsure (1)..(271): unsure at all n locations
cctctatctcgcccgaactcggcttctgcggccgccgccgacggggcaaggtcatgcctttccaccactaaatggtcctgctccattccagctccagccttcgccgccactgccccacggggcgatgaagaggacggctgcggaggcggcgcagcagcagttgctggacgagctggcggcggcggcaaaggccgctgaagctggcaattccattggcgcgcgagcantattggcgcggctcaatcaccagcttcccccgctcgggaagccg

SEQ ID NO: 383327 - DNA, 286 bp, Zea mays
tataccttatatctgcgggcaaagattccaacgtctacatttggaacttcgcgaactctagagatgcaagatcggttcattcgtgcgagctgttcttctccaaagctgtaactaccgcagtaccatggccgggagtgtaccaagatgggcacacgaagccttcctacctgactgagaaatcctgcagcatgcccatattgcgccacctcggggagtgccagtccgctgagccgtggtcgttcgtggacggcagcaagggattggcgacatggcctgaagagagttg

SEQ ID NO: 383328 - DNA, 289 bp, Zea mays
ggttggtgaggtaacacatcaaccaacgaggtgggtgtacgaatgggaggaccctgagtactaccaaatgttggtggagtcgaggagtacgacttctgcgtggaccggtcagacttgggtagagtacaaggcccagttgatgcgtgaccaaggtattatgtggctatcaacggaggagtacaatatggcacaggcacaatatcagtggaatgccccgtgggaatgatcttcgacggaggatcaactgtgaactataaaacatgtatctgtatcttcgatgttgtttgtg

SEQ ID NO: 383329 - DNA, 269 bp, Zea mays
ggcttatagtggacaacatgggtttggaccttacggcatgggcttagaagataggctggggttgtatcaatcttcatctggtacattaagtcatgacatccaaatgagtgatgagcatagcggaggtgtgaagaagaggaaaggagtggaggactgtgtcacattgttgcctaatgcaggtgatcaacaaacagaaggttcatctcagccagaaaggaattcaatggaggaggggaacagaaagatttcgcccaaaatacaaagcaagg

SEQ ID NO: 383330 - DNA, 274 bp, Zea mays
gttgctagtgtaagcaccatctttctgtctgggagcatggatcttccaccctaagagctgtcggtgcctgcctgtatcactcgccgtcctcaaaaaggccctcacggcacgggttggtgcaacgtatgcgctatgcaaagctagaagacatcttttgctgaccgtgatccaaagcaaagagcggcactgaccaccaaaggcaaggaaagggggggagatgggctggagcctggagtccaacaaagtgctgtgtgcctgacgtggatgagctcaa

SEQ ID NO: 383331 - DNA, 274 bp, Zea mays
cagcttagtaaatctgcagctattggctcctagcacccctcatattgtttttcaagactggtgggctaatctggaaagcaaggtacctgttgtgccacacaaggggatcgattctctagttgtcttggtggctttggaagcaagggagtggatgtgtgtttgagggggcctcccctagtaccaatcagattattcaaaacatcaaagacgacgctcatcgatggtgccttgcaggtgctgggggctgcatgccctttggccttagtgttggttg

SEQ ID NO: 383332 - DNA, 264 bp, Zea mays
gaaggattcaccgctacctgaggcgaatgatataatcacaaagtcaccaagcttgttctcaaatgaaaccgagtgagatgtgcggctacatgagctaattttggtgcttattttccatcattgatcgtcttagttttgagtctgtaaatgcgtaaaataacatttagacacaagtctttttgctgacaaaaacagttttcctgtaagaacttgagtggggttaattagttattacgcattcaaaaaaaaaaaaaaaagggcggc

SEQ ID NO: 383333 - DNA, 269 bp, Zea mays
gtggcagtaactgggtatatatacgtaccctctttctcctataatatagtgtagtttaaagttcttctatatatagattaagagcgaacaaaaaaatgcatatgctctcactttacttcctaataggatgctaacgtcaacataattaatgttgatttgttgataaatggtactctctctgtttcaaaatagtatttattttagctcttagtttttatgtctatgtttaatggatgatgataaatcaagactcatatataaaacatata

SEQ ID NO: 383334 - DNA, 284 bp, Zea mays
gtgcgatcttcagtgttagttctccaacctctccttggcggaaaaccctaaccccctttctcggcgacgatccgacccctaccccatctaccggccgaccccacggcgctctccgccatgccggacgtgcaacctctcgtcagcgacttcgtcctcaagctcaagcgccggaaggtggaggggtcgcacgcggtggcccggcagacggcggagctgctacggtcggttgtgtcgcagcatcggatgggtagcagcgccaaccaggcggccacacttgccgatgc

SEQ ID NO: 383335 - DNA, 284 bp, Zea mays
caaacacgccccgctcagtttgttaaccaagatgatcagcagaggtgtacttgtggtctcaggttcacttggcaaaactacccaagaacctgttggaaaaggcatcctttgcaaagaacacggaccatgtactgcaccagctacctcaagtaatttcatccttggatgcttatatggacaggagtttgcaaagtgcatctcaaattaagactgtcacacagctcttgtcaaacatggagaagacacagctgaagtccatgttgccttcctctcaaatgaaggaa

SEQ ID NO: 383336 - DNA, 291 bp, Zea mays
aggagccacatgttgccaaatctcagagcaagcaaaacttcattgaaggggagaaacatgtcatatttaactcagaagggagcctggataagtttaacaagcccgggaaactctacacacaactggtgtcagctcagctcaagatccaagacatcaaatcacaaagatcagcgcttcttttagaaatcagcagaatcaagcagattctggagcaagagaaaaacataattcctggttttcccgctgcactacagcagatggatatgaagtcattggaggaggaatacaaag

SEQ ID NO: 383337 - DNA, 292 bp, Zea mays
gcaaagcataggatgctcctactgccgctgccggacaagaatccctgagctccatttattcctccttgcagcagcaaagcaagcatcgtcagcctgcctcgcgtctcgtcgaccatccaaatccactcccttctctagtccaaggagctcaggaggtcgaggaagaaggaatggcgccgtcgtaccggccctaccacgtcgccggcgaggatcagcagcgtaaggtgaaggcggtgggaagtggttggccgcgtggagcgtgctgggtgttggcggcgacccggcggagatg

SEQ ID NO: 383338 - DNA, 99 bp, Zea mays
tgcagccccgctagaatccaaagccaaaaccccaatcgcacaggagagaccgagagagaggttttccatccatggctctcggagtcgcttccgtgctgg

SEQ ID NO: 383339 - DNA, 272 bp, Zea mays
  unsure (1)..(272): unsure at all n locations
ggagaagaagttggagtccatgaacaaacatgagaggcagaaacggttatctgtctacaaatcagtagcttcaactgaggagaagaagttggagtccatgaacaaacatgagaggcagaaactgatattggagaggaagaagctaaatttagagaaactgaagatggaacgacaaaaggtgaaggaggacacagaacaggaagttctgatattgagcatggatttgactaaatgtaaccccctacttcgacagtactacgaggctanacaac

SEQ ID NO: 383340 - DNA, 282 bp, Zea mays
tctccctgcaaccatggtcgagctcctttttcccctgccatggacatgcccctccctgcacctcccctccatggtggctgccagtatccacctcgccgagcttctccctggccaagggcaccctggagctcgtcgtgccccatgcccgggcttgctccttgtccgtacccatctctcaagctactgccgtagggccccctatgtttcccctagcagctgtagcttcggcggcggcgtcaagatttccttgttgcgccttgcaccgtcgatgttagttgggtg

SEQ ID NO: 383341 - DNA, 201 bp, Zea mays
gtttaatcatgatgtgttttggcatggattcctttagatttatcccatttgaagtttcagcagttttctggatctgtatatttatgttttttactaaatttggggagttttcagtcatgacttgctagtaatgctttttcagcactctcttttctccttctggaactctgatgatataaacattattttgttattgttcca

SEQ ID NO: 383342 - DNA, 231 bp, Zea mays
gtaaaaacggctttaaagtctattttgtgcggtagttcgtgtaggccgcttcgtcccgaagcgatcttggtaaaagacttattcgtgttgccaaacgacacaattcgtattttttttgtgtgccgtgtagaacacggtttgttgttattggaatggttcatcgaaatctgtgtgcccgtttggttaaaaaaaaaaaaaacaaaaaaaggagaaaccaaatagaaggggggg

SEQ ID NO: 383343 - DNA, 299 bp, Zea mays
atgcaatatatctcaaatattgtacatactatttatgcagatttagcattgtgcataagctagtttctgaatgaaatatgttgatcatcctccctccaatccaaagaaaattacaatcgaataaagtcaggaagtattcactgtcaatctcctgcaccgagaataatgccaacaatccgaggcagtcgattcctccagatgttgatccaccaaagcaaatgaagcaactttatgttaggtgtaatataaagcgatctgcaggacgagggaaaaaagaatccgacgtaagtgaaaacata

SEQ ID NO: 383344 - DNA, 189 bp, Zea mays
accacttagttttggacccctagtcggatactgttgtatttatctcaagttggacggttatgtacaatacagaccttagtagtgtgatgtccagaatggcagaatccaattcagatttgttcaatttgtttgatgttgtccgtgtcaaaaaaaaaaaaaaaaaaaaaaaaaaaaaaaaaaagggggggc

SEQ ID NO: 383345 - DNA, 291 bp, Zea mays
caaaaatagaagcagaccactcaagctatgaagacatcgtcaattgagtctctgtctttgtcaccacagagaaactctaaaattgacaatgtctctgcctctcatagtagagtttcaggtaaggatggatctctgaatgctaactcaagcactgtgctaaccatggctatacaactaaatactgaagttggtgtagcagtcagtgatcaatggtctagtgaacctattctggttggttcttcccgaagactatctgatagagataatggacaggttcagttaactcaaggt

SEQ ID NO: 383346 - DNA, 182 bp, Zea mays
gaaaaggtagctgcttcagctacagctgaccaacaagatgttgcagctgaggaaaaggaagctccctcagcagcctaacaaacacgcagacatgtccacactccgtaggtgtctttagttcctgtggtgatgtcgatcttttattacctcttgtcagtttggtttgtctagtgttttgccct

SEQ ID NO: 383347 - DNA, 178 bp, Zea mays
aaagaaaagcacgggtaagagaagctccaatttcagtagagaggatctcagcttcatgtctcatcctgcctcgagccgatttttttttttgatggccgaatggtctcattaaaaacatattgtacagaactactggatacaccctaacgaaaaaaaagtgcaagaaccattttacact

SEQ ID NO: 383348 - DNA, 199 bp, Zea mays
ctagaaatacgttgattactatatattaatgcagagcatggagcaaagctgatcttttaaaatatacatgttacctccttatttctagccacacggtcacgtttggacgaccaataataggcttgcaacccttcaaattgtgtccatcagcttcccaacgtgcatatcgccatcctctgcttcgtgtcccatgtcacca

SEQ ID NO: 383349 - DNA, 162 bp, Zea mays
ccaaccctgaggctctttttcaaaggcagtgctgggtgcccaagggtactggaccctggagattgggattggaggctctgggtgagatacacactggaaaagtgatagcctggcaggtaggtggcagaggtaggaacagagttaaggtcattggtagagggt

SEQ ID NO: 383350 - DNA, 288 bp, Zea mays
attgcacaccaggtgcaaacatgtggtctttgggaaggtggtccgtggaatagctttgcttaaaaagcttgaagcagttggtagtgaaactggaaatccttcttatcaagtgaaaattgtagactgtggtgaagtttccaacacaaattctcaggatctgctaaagggagataaagtaaactcaaagacagataaaggtataaatagatgagtactatgttccatctctttgctgccaaagaatagataaaagttgatgtcatgtttgtgcagaaacaaggttgtaat

SEQ ID NO: 383351 - DNA, 299 bp, Zea mays
gataaaaatagactggagatatttggcaaacaattcagagtagtagtcatttagagacttcattccatggcaaatatctccagtctatttttatcaagcaaatggcaacggattaggactgaagatatttgccatggaatgaagtctacaaatgactaccactctgaattgtttggttgtacacctgtggtcggttccctttacctttgggcacctttgactaatcagtatatgtggtagaacttgcagttagcctaatatatttgtcacttcatgtagaagagcttctcaactgttca

SEQ ID NO: 383352 - DNA, 112 bp, Zea mays
aggcatttgcatgaacttggtggacatgatgctgatagggatgatggaggccgtgaaaggcatggtgctcggactgtcaggaggctagctggtcctaataatagggttcctg

SEQ ID NO: 383353 - DNA, 129 bp, Zea mays
ctcctaaacttgcctcctggagctacggttacagttcttaagaacttgagaatatgtgatgattgtacatgctgcaataatgttcatgtcaaaggctgtcgcaagagagattgttgttagagatgttag

SEQ ID NO: 383354 - DNA, 248 bp, Zea mays
agcttgtagtgccccctccccctcccttgaatatatataagaaagtattttagttcaagatgatttttattcctgggatacatgtaaaacaatgtttagctcatacacttttccaaggggagttgacgatgaccagtcctgttctgtattaaatatatttgatgtcaactactcatcttagaatgttgtgaactgtgatgcacttgcaagatagtcccagtactcagccctcccgtatgagggctcta

SEQ ID NO: 383355 - DNA, 295 bp, Zea mays
ctgggttagaagtgattcccttaaaacagttgaaaacacagctatacctgtgatcatgcttgtagcggatgtaccctgtgacacgaatatgtccaatgagtattcttcagtactagatggctcacaagactattcagttaacatgcttggagaacaagggagtcctcctcggtctgacacctctagttcagaaggcagcaacatgctgatgtgctcaaaattgaataaggatgattgtgatattgtgcagtcaattcgtcttgatataagttccaatcgccatccatacaggact

SEQ ID NO: 383356 - DNA, 221 bp, Zea mays
catgtctctgataaagtaatgaaccagtcttctattgctataacggagagactggagaatgtatcagaaccttcagtggctgatgacagttcatccaaagctgtagcagagggaaaggatgcttatagagattctgcagtagctaaaggacagccatattttggtttctcatctggggcgtgcagcattatagtggcaaagttccagaaatcacctggatt

SEQ ID NO: 383357 - DNA, 291 bp, Zea mays
acattactgggtgtgcttctcttataaagaaattttgatgcaggagatatagactttgaaatattgaaggaaaccaaaacacctgccaatccacctatcttgtcatggtagagctgtgggagatggatatcctcggatccacacaagggcgaaaacttcgctcggggccacgtgacagttgcccctctcaagcgtcgcatcatgggccagacgaacaaagacaatgagagcaggccaatctagaggcgaaagaggcccacgtccaagctagtcgcggcatagacgtggata

SEQ ID NO: 383358 - DNA, 244 bp, Zea mays
agaagaagtatcaacattgtctgatgctgctgcattgcattcttatcctaaggaacatattgtggctgtggcaaaaggccttgcgctcccaaggaggatgctgatgtcaggctacacaagtaatataaacttggacagaaaagaggagagtcctgacataaattcttgtgagaaactgaacttaaataggagttcaggtgatgaatcaatggatgaggatgtgatggaaaggaagcatgccgat

SEQ ID NO: 383359 - DNA, 186 bp, Zea mays
actaaatatcacataacaatgtctctctttttagtgaacatattagtacgtgttagcgtaaacaaataaaatgatgagggaggacggcaaaatcaagaaaaacatgaggaacaaagaaaaacttgaggaataggaatttgagacattgggaatgaggcacctactgatccaaaagcgagcgctgcc

SEQ ID NO: 383360 - DNA, 300 bp, Zea mays
aaactttttatcttaaggggaactaagctatggctttatgtggcacaaatattcaaacaatccaaataagattatcgtgatgagcttaaaggatcgtaacttgggagatgaacggttttctgatttcaattgcagatagaaaaggcagctctttaatctcaaccattgaacaacaacacacaacatgagggccatgactttgattctcatttaatttggcgttattagtgatgagagcgatgagtctactgatgagtccagtttatgagtcatcctttgtttgtttcatattgtcatagg

SEQ ID NO: 383361 - DNA, 209 bp, Zea mays
attacgagcagttactatttcagctggaatacaacaacaatggcaacatttctagcaatccttggattcacggttcttcctgttggaacataaattagcaaaatgtttgatgcgaacacaaggttgacttgtcccttgtggttcgagttgatgatgagtgattgtcaatgggtagcactctagggtagtcagtggactgactagagtga

SEQ ID NO: 383362 - DNA, 224 bp, Zea mays
ttctctccggaaggcgagcaggcccctcccctcgcgctcgccgctcggtcccgtccgccgccgagtgtttgggaagcgagcaagccgcttctccccatccttgttctacgattgctccgcgcgcatcccattcccacgtcgaagcggccgaggtagtcccggctgttgccagcgagcgatggcgagcaacggcatgtcgcttgtgcatcgacccgccgaggggt

SEQ ID NO: 383363 - DNA, 245 bp, Zea mays
cttcagccaggaacagtagaagtgaagctccttctggttcacagaaagagaatggtgccagtacaagcaatatagaaaagccaccacctgtggagaaaacattactttgtactcttgaagagttgtataatggaacaaaaaggaaaatgaagatcactaggaatgttgcaaagccagatggaagaatagaagttgaaacagaggtcttggcagttgaagtgttacctggctggaaaaagggaacc

SEQ ID NO: 383364 - DNA, 293 bp, Zea mays
agatggcagaaactttacctaagtgacggtctgcatctgacacaggaaggaaacgcagttgtccacaaggaggttgtcgaagcattgagaaatgctggtttcaaagctgaacagatgccgtacgactttcctcatcactccaaaatagatggcagttgtccagaaaaggccttccaatgaaatgatttcgagttgtgtgatgttttggagttttggatcctgcattgaagattacgataacgtccaatgacatgatcttgagctgttacattttgggagtttgacatcttgcg

SEQ ID NO: 383365 - DNA, 287 bp, Zea mays
gcttcctcctcctctcccctgctgccacgaggcgcggctcagctcctcctcgaagcgggcggggaatacaggccgcgcggcgcgaggcggaggaggaggaggagcgggggatgatggggtgcctcttcggctgcttccgcgcgtccggcgacggcggcgatgcgaaggaccccggagaccgcaacacgtccctggctcccgcgacgacgacgacgatccaacaggatggtacgggcaggaggatcaggccaccttcgaggaacgcgctctccgccgtgttccagcga

SEQ ID NO: 383366 - DNA, 290 bp, Zea mays
agaattttccggacgcatggcgacggtggaagcttctccaggcctccgacgagggctgcggcggcgaggtggtactggcggcggggtcgagaaagggggagaggtggtaggagaagacaggtccagattccacctcttccttgaggtcctcccattcgaaatcgcgcgaatgtctgcccgtcccgaggacgtcgcccagagagctcaagtcgccataaggtgcgccgccgctgccgggagcccgggagggactaggagcgagcagggagcataacctctccccgcagata

SEQ ID NO: 383367 - DNA, 293 bp, Zea mays
gatgggctgtggaggatccgtgcagagaaaagtcttcgtgataatggcttctagccttctggaatatttaccacctgcggccaagcgtgtgaaaattgctcggaaagattggcaagctgaatgaccgaaggggataagatcattgaccgcgtgcgcaagtctggttgctctctcaggtgtccctatcagggcttagaaaggacgtgtttggacaaactcaggaagaactacataatgacgatttagtgacgggttttttttaagaagggtttagtgatgacttgttgcatgca

SEQ ID NO: 383368 - DNA, 129 bp, Zea mays
gttatgtttagcattatttcaaagaaggatgctattgtgtttgaaaaaaaaatgataatacatgtaagatgcaagcatgtactcccacagtcgtaaaataacccaatataagtgccgctatatagttcc

SEQ ID NO: 383369 - DNA, 268 bp, Zea mays
aaccaaaattccaatcgcgtcagctccggctcccgctttacccatttgccgctgtgtttagctctcttccccgaaaggatccatcgatcggtcggacagggttggcatgtatttcttgacttgcgtgccatatttttggctttctctatgatgctcaaacttgcattggtgtaccatcagcttctcttaagaagtactaatagttgatacctgaggctctgagttgtacgtgaaatgtctgttcttggagttaggatatgctcggatg

SEQ ID NO: 383370 - DNA, 286 bp, Zea mays
gccaatacaggtcaagcctgtgcagcttgattttgagagcagtagtagtgatgagtacagtagtgatgttgggagctcagaagaagatgatgaggattagtgctcggtaagctgctccttcgccttctatcatatgcttgggcttttccagtagaatcctctatgctagttattttacctgctcatgtcttcctgactacttatgaactttaaggctgatctcagatcattgtaatggtgctgtatccttaacttcttaatccaatgtattataccgatgatttta

SEQ ID NO: 383371 - DNA, 287 bp, Zea mays
aaaagttgggcattgcaagcaaagtggttatggctagaaaaaaccaatccaaatagacattggcagggtcgaaaattacctgtgcatcgacatgttaatgatttgattgcaaattctatgatatctatcattgggaatggggacaacactctcttctggattgataattggtcaaatgggaatgaagtcagggaccttaccctagatgtggtagccaaggtgggcaaatgatcccaatctactagaactgtgacacatgctcttgataattattagtgggtcaatga

SEQ ID NO: 383372 - DNA, 292 bp, Zea mays
ctgcatctgtgttaatctcccattgtatgctgtgcagctagtgttaatcttaggtagaattgtagctgtgcgcctatctttgcttgcccacagccaagaaaaaagaattgatgtctgcacgtgatgtgctagcagtaagatatctggattgtggaagtcaatgcccatttgctaaatcgagctggagacactgttggcaaaaaaaaaaaaaaaagaaaaaaaaccaaaaaaaaaaaaaaggggggccccccgataagggaccccttcacccggggatttattccgggccggg

SEQ ID NO: 383373 - DNA, 284 bp, Zea mays
gggaattggagattagggcatccatattggaagaatctggtattgctcagcaaagcaaccttgatggtgataaaatggaaccagagattattgtgtgcaagctcggaagatgtttctgaagaatctggtgcctgcactgaaagcaacctacatgataatacagagtatgttatagacgatgctgaaatgagacaagaaattactttatgcaagcgggaagatgcttctaaagaaactggaattgatcaagaaaccttagaagatgatagctcaacatgtggtat

SEQ ID NO: 383374 - DNA, 280 bp, Zea mays
gcccgcctccgctcccatatgaatcaggggatccactcggccgcacccatcgcaccaaaccaccgaacaaccttgccttcgagagaaaccaagagtgcgggaggaggcgcatccacagaatccggtgctcgatggcgtacgctccagcgaagagaactgagggagtattggtctaggctgcgcgtccgcaaaacagaacctagtatcgagggtggctagagcatggggaatcgctcgcgggacttgctctcgcctttgtggaatccagccgccacggcca

SEQ ID NO: 383375 - DNA, 292 bp, Zea mays
  unsure (1)..(292): unsure at all n locations
tgatcttgagaaactaaaaaaatttcatgtgtagagatttccatgttctataggaaaagttggagtaaatttcaagaattcagttttggactcaaggttgatttgctggaaataatatccactagctaactttggaccattgcaacttttaatctatagacaattcggagatggttaatgtagcaaagttgaagtgttgcattaggtgtacaaagttacttaagcaacctgacccaagaaccatatggaactagatgaaaactgtgtccanagatgggatgtcagatatggg

SEQ ID NO: 383376 - DNA, 296 bp, Zea mays
aatatcttcttatgcagtccaaggagcttcataacaatttggaactggcacagaagagcattgtagaccatacttctgctcagagaaaacgaaaggcgagagtaatttcagagtatgctgttatggcccgttctatcattcgtaagaagtttcagcagttccaagaatctgctatagctgaaagagtgaaagaagtagagaatgctgtgaatgatgccaaatctgacagagtgaaggatcctatgccggcaaatacatctgccattggaaagatacagaacatagataccagcttg

SEQ ID NO: 383377 - DNA, 186 bp, Zea mays
taactgggatggtattcccaaatcaacacaatatccagatttttggtccttttctgcttgcaaagacattactgtgctacaagcaagaattgttgattcccaagaattgttccatgcaccattgtctactgaagcctttgttcaactttaatagttgaatgattgcatggataatcttccacataa

SEQ ID NO: 383378 - DNA, 276 bp, Zea mays
ggaccgccatgcttgcatctgccgcgggacgtccacgctgccatcgcccgtgagcagctccgacagcctcatcgccgtattctacctgctcttgtgtcgcaggctcgggttaccgttggtgctcacgctgaggaaggcatgatccatgcggagcagcccaaggcgcgatgccacctccgctgtcacacatgatgagctgcttcgcctctggcaccgccttgttccttcgcgatctcacattgacatggatgcacccgattttccctgccctgttct

SEQ ID NO: 383379 - DNA, 214 bp, Zea mays
cgcaccgatcagaagagatggcggtgccgctgctgacgaagaagatcgtgaagaagcgggtcaagcagttcaagaggccccacctcgaccgctacaagtgccttaagccaagctggcgcaggccaaagggtattgattcccgtgtcaggaggtagtgcctggtcgacttgtcagaaccataaccaatgttgggcatcaaggtgcatcccttgaa

SEQ ID NO: 383380 - DNA, 148 bp, Zea mays
gtaacaacaacaatgagattatcaagttgcactgatccattttcctttgattccaccccataatggttcttgtgattcgtttcctacatggggttcaaatctcggcccaagttctacttgtcgtgtttagggtcaggcatcagtttca

SEQ ID NO: 383381 - DNA, 136 bp, Zea mays
gtcccaaccccagctggtggtatttctcctagacagaacgaggtctgtttaggagaaataccacccaaccccagtgggagtacaaatggtgccaaaattgccttgtaaaaacgcaggtcgtgagaatgtttttttc

SEQ ID NO: 383382 - DNA, 286 bp, Zea mays
  unsure (1)..(286): unsure at all n locations
ggaggtggtaggctggtagcctatataaacgcggggagtggctcggttgaagtggcaacaccaacgcaaccacgttacgcaccatatcanctacccgtgagaagctaagacccggccgttgctcaccacagcatcatcgccgcgccgtgctagctcaaggatggagaacaacaggcagcagcagcaggcgccgccgccgccaggctacccgacggcggctgcttctgcaagagagatctgcttaaattattctatcgtccagagctgcagcaacacctgatatgtt

SEQ ID NO: 383383 - DNA, 283 bp, Zea mays
gaacaaaaaggttcaatgaaggttcgtggtccagaaagtcatttgcctcagactcgccaagatcgaatttcagagttggagaaacatttatttcctggaggtgcagcaaatgctaaatgcacagatgatgaatctgaagggtcaccagatattgtgatgggtgaaccatcattagtgcatgattcttccgaggttctgatgaccaatgagaactctactggaagtgaaattgacaggaggaccccaaatctgtgtgccagagcagcagaccacgctcttgatc

SEQ ID NO: 383384 - DNA, 273 bp, Zea mays
acacaatagactttagatttagatggccttttagtttagtttagatatatgatgatgatatactacatccgttctcgaatatttgtcgtattgattttaaactataacgcgactaaaaatgaacggaggggtacatgataacaataatataacagcttatgccgaaaggaaaatctgacagtgccatcaatcacctcggaaatgagaaaaccaactctcccttttttttactggaaaagcatgcggtagtgtggccaattgttggacatatat

SEQ ID NO: 383385 - DNA, 147 bp, Zea mays
cgtcccgtcctgcatggggttgtaagctgtctctaaatttcacggcaactttaccacagagaaatcaaccatgcgcacaaagcatagcacggggtacacgcatgaactgctttgtgcgcatggatgatttctctgtggaaacttccc

SEQ ID NO: 383386 - DNA, 294 bp, Zea mays
aagtgttgatctcaagatttctaaattgtcaagatttacatggcattgtagtggaactagttaacacttagagcttttggtatgtaataactatttgctatgtactgattatatgtttcaaaagattgtgttcttcaattttggtgggttttgattattgtttttttaactgcctctcagattatatttacttaatttaaatatctttgctttattcattaaagtataataacttctggtctctgatatttattttcacttgtttactaattatttgcaaaacaccctttgttg

SEQ ID NO: 383387 - DNA, 291 bp, Zea mays
agtggaggtggggagttttttggaaccgtgatatcccgaacacttggcttctgaaaatcagtatctccaacagcgcaatccgaattatagtattgtaactgcgtcagatttagcccagtaatcctcgtttctacgacattccgtttcttacaacggatctacgggcgctcttcttccccgagcgctgctctccttaggcgatccagttctccccgacgagcgctcctcctcgacgaccgctcctcctcgacggcgctcctctccaaggtcgtcgtaggtccttccccgcgg

SEQ ID NO: 383388 - DNA, 288 bp, Zea mays
ctacaacttcacacaagaacccagttctaacacgttccaagcaataccacgaccagcacttcactagactagggccctggcctgaaccaatgttacccattcgcctcaaatccaccctagagctccccgtagctcgccattcagagtgagttcgcgctaacacccctgtcgaacacaaatcttattatctcccggttccataaaccacgacataacgttaactaaccaaacttaccttgttttttgatgcactgtaaacaatagcagtgagatccattcacgttacgt

SEQ ID NO: 383389 - DNA, 278 bp, Zea mays
aaggatgagaaggagccatatgaggctgcacgggccttagattctgatgatgaccgtccagttcaagaaatgaccgagcaagaaattgaactcataagacgtttgtatccggagcgtgaccctgcagtacatgaatttagcagtctaagtcattccacccgtgcatatgctgaaggacgtgatgatgaactgctagaggctccggataacgccgacaacattgagattaaggtaggcttacttttcaaggacctgcctacactgagacgatggctaca

SEQ ID NO: 383390 - DNA, 105 bp, Zea mays
ggctcgaggccgaaaacaaaaagcctgctaccgggactcctatccttcgaaaggatgtcgtcatctgcacgtttccaagtgatccgactcttgcgatggggagcc

SEQ ID NO: 383391 - DNA, 102 bp, Zea mays
atgggtttcgcctgctagcaccgagatgtccttcttcttccggaccgcatcgagcagcgcctgttgccgcaggagatcgcgcgctccctcaaggactccctc

SEQ ID NO: 383392 - DNA, 280 bp, Zea mays
acatacccggttgtctgaaacatcagtttccccaaggaaagaatttcgccctcaaaatttggatcttgcaaatgatcgaactacatactgccgtggtcggagatcaaccgaaatcgtgttcagtacacaagtgcccacttctcctcctagttcaagaggacatcactatcacaattcgcctgtgccatcaagaacatttgggcaatgccctgcatctcctacttcatggcaggatgattcgcgaactgcaagctcaccccaaccacttcctcttcctcca

SEQ ID NO: 383393 - DNA, 229 bp, Zea mays
gggtacgctaaatgtagcacgtgtagacagcgtccggtattttaccgaaggctttaccgtctgttgctggaccagcaatagagctcggcgtcctgtaaatttggcggacaggaccacatacaggtccttgttggacacagtcttagtcctgtgagttccaggttttcgcttgtggtacctatgaacatgaaacctgtttactttgaggaatgtactttatttccatcgt

SEQ ID NO: 383394 - DNA, 305 bp, Zea mays
gcttcactcgccctcatctccttcctgcccccgccttgagtccgccccatgcccgccgtgaatctcgccggtgcaatgaccacgcctgcccttaactccagatgcccgccttccaaacccgacgcctccttctatcccccgcaacgagctagcatcacgcgagtgggtattccttccattgccgtcaccgagcttccacagtaggcgactgacctccatagtatgcggtaagcttccaatcagtgcctccgcccccatccataataccccattccatccttggcgcaaccttccaacgacgatgc

SEQ ID NO: 383395 - DNA, 212 bp, Zea mays
gtaatgtgatggcccagagcaggaggtagttgtccagtttttggaaggggacaacaaagtggttgaagtggaggagggtgaggtagttgattcttctgatgcaaccacagggtctgcagctgttttgggtaagagctgcaatgatcctaacgtggaggaagtggtggttgtcatggaggaacagttcacagagccccatgaaggaattgtga

SEQ ID NO: 383396 - DNA, 289 bp, Zea mays
ggttaatcctttttggtttggatgatgactcatcattggtactacatgtaacatgaatcatcaggagggacctctggaagatccaggcatcaaccatttcagtcgatgctttcgagctcatatgtgtgtttcttcaggaacggttagtatgcttataccgcaatccattatattctgcaaccgatgacaccattgttgtcaggatttgtcatatcacatttacataacaactttgatcaacctttagccaaacattggtggacacttgcctagtacagtttatataagc

SEQ ID NO: 383397 - DNA, 270 bp, Zea mays
aggcttgcttatgccctagcttcacttccaccttatcaagtaccattttcagatgttgcaattgtgcatcttcattgtaaggtacctgctggtgagatatggcatagtctgaatgcaaccatagttggtttggcagtttccaatgcatctgagggaaccagatcaatcccttactgtgttgggcttggcatcataaggggcgtcgatattcaaaaaggcctgttatatttaataactcctgttcctctccagcgcctgcaatgcgttgat

SEQ ID NO: 383398 - DNA, 295 bp, Zea mays
ggaattaattgtatcctcacaacagagttctccaagcacaagaagttccaaaaagaagagtacacctcaaattgggaacagctcagcttttgctgaggctcataatgattcaacagaggaagcaaataaccgtcattcagcaacagatggttacgatagttcaaggaaagaagaattcgtcaatgagaatttatgcaagcaggaggtgtacttgagatcatggaaggcaattgagcagggacttcttgtgaaaggattagagatttttggaaggaacagttgtttaattgctcgg

SEQ ID NO: 383399 - DNA, 111 bp, Zea mays
ggcacacgagaaactctctgtgcctgtcacgtgcaaaatccgtgtcttcccggagattgacaagaccgtgaggtacgcccagatgctgcagaaggccggctgccagttgct

SEQ ID NO: 383400 - DNA, 283 bp, Zea mays
attcatatttcttgaagcttagatacagtctaattcatagcaaccatatctgctttatcctaggtgagggtagcagtccacaatggaatagatgacaatcccattataataaatgacaaattatatatcatgaatctcttctgtctgactaactcaataactttctatgaaagccaatggaattcaaataggagctaggagacaacaagttatgacagtggaggttgtactccttttatattgctgagagaactagttaaatgatcagattcttgctgttaag

SEQ ID NO: 383401 - DNA, 282 bp, Zea mays
ctcgagcgcttgaaaatgagttcaagatcagcctcacttacagatgatggcacgttgccgacatacacagatttgctctcttcgtcatcatctgtaagtgaggctgatcttgaaaatgagttcaagaaatttggccggcttattcctgacggtgttgctatcagaagccgaaaggagactggtggctattatgctttcgtgagattcgaggaactcagcggtgtacacaatgcgttaaaggcttcaccaattgagataaatgggcggcagatatatgttgag

SEQ ID NO: 383402 - DNA, 285 bp, Zea mays
gttgttttgatagcatgcaatacaacgaacctatgatgacacaggagaatcacaaggctagcaatgcagtccctgcagatcagaggagtgttggactgtcagagtctagtgtggagcttgacatgcatagacttcatgaagccaaactcgataaattacatgagacaataaagcagttggagaatgaaaagagtttgtggcttcaaaaagtgatcaccatggagggtgaacttgaaaagttgcataacgagtgagttgtcatgctcaaaatgaggtcctttggag

SEQ ID NO: 383403 - DNA, 277 bp, Zea mays
ggaataaagtgcatttccctgtctacacaacgtgtagcccgtttgggcgttttataacaataaaacctcgggaggtcatcccacccagttgttagtgcaccacgtcggcttcttcagtttgctgttcgtgatgctgtcagaactgtgcagccagttacttctagttctgaatcagattccaagcgtattcgttctgtagtgtcaacattggcatcagattccacacttgatatcactcatattaggttacagaaaacaaattcagatttgagagtac

SEQ ID NO: 383404 - DNA, 312 bp, Zea mays
gcggttgccacagctttcttttaagaaaaggatttgtcgagttgacaagtctgagagtcatcactcagagcagcacctgctaacgctagccaggacaaaatagaagagccttccggccggccggtcgatcgaacggttgcttgtctagcacagtgggagtactgtactacgaggacagacaggcgtgtgtcgagtggcgtgtcgccttcctgcgttccgggcctcgtcgtgcgtgcgcatgcaaatgcaggcggggacggaaagacattgacattgcacgcgtcagtgtcaccaccggtccacggccaccgg

SEQ ID NO: 383405 - DNA, 290 bp, Zea mays
ggcacataactagtaaattttgaaaattgtgttgtttgtttcatgaatctgctctatttagggtcattttgtgccttgtacaaagatgaacctgaacttttttggtcgttttgttgaacattttctattaatattttccatattagttgtgaacgattctcagtttctcactcaaccttgtacttgtagcaaggatgtttggactgaaattggaagccttttataaacttatttactttattcctaaatattttctttactttttagtttgaagtacattaatgttgcca

SEQ ID NO: 383406 - DNA, 173 bp, Zea mays
attagtttaagttacacctcaattcagctcaatacatatggattgagctcaatactaaaatactcaaactaggccttagggcacgaggtagcagcttgcaatttgctgtttttgatattgttcacaggaaacattggtctcataaatgaatctgtgaaagcacataacgttac

SEQ ID NO: 383407 - DNA, 218 bp, Zea mays
agtaggtgatgtcattatgagcatgttcatgaacgagctgtatggtttccaattggataaccaccgatggtacccgctagagctcaggaaagacaagcctgctaaaatcaaggcaaggaatatcaaaagaaaagaatcaacgaatgatgtagaagctaatattattgatgatgagggtgatgaggtcatggtggacgtagaagacgctgttgggggac

SEQ ID NO: 383408 - DNA, 214 bp, Zea mays
tcaaaactatataattcgtacattattttgctttaccaaaaaaatcaattaaccctaccacctctaatttaccccaactacccatcatttaattccaactccaaacctcaagaccaactaactttccctaaactaaccctcattaccccttgccttaatcaccaccataccttttccctttttaaaatttttacccccccacaattccacacac

SEQ ID NO: 383409 - DNA, 289 bp, Zea mays
ctcccagccaacagatataggttctaaggatgtgcgcaattcaaaagataagcttgtgcaagtgaatgcaccagccaagaagcggttatccctcccaaataatgttggcagagaatcagggaagggaccaacccgcaggaattcgcttaacaggtctgctccaaaagcacaggcggactctcctaaccagggtgatgagttagaggcctgataacacattcctccaatttgacgtcggcaagccatcctaaagtgtgcttctccaggtgtgcatgctacatgtgttgcc

SEQ ID NO: 383410 - DNA, 152 bp, Zea mays
gggtgttgtacgacccacaggagccgcatttgtgcttaattagtcactgtattctttgtttctctttgtacatatcgtctagagagaaggagaaagagaagttgtgtagcatagttataccataatttcattcgtagccatttcagttttgt

SEQ ID NO: 383411 - DNA, 284 bp, Zea mays
gttgttcgaggcgttcccctcctccacgcaaccttctcccctccagatccaggattgccgggctccttgactcgttacctcgcgcgccctcggtgagctactttgtttcgatttagcgacaaatcagtttgcttcatgttgcgcaggcttagatctgaatgccggattcttcgtcttacggcttgaatcgagctgggaggctgtggatctgagcacgggaggtacaacaaatccgcgtgttctagagctagcgaaatcgcaaggctattagggttcctttcgga

SEQ ID NO: 383412 - DNA, 269 bp, Zea mays
  unsure (1)..(269): unsure at all n locations
ggctcgaggtaagtagtggtgcgatgtgaagcaaaccctctcnccactcctacaaggttttgagaacggtatcatcaaatggtattgagttggagccagacttgtaaggtcgacgtcatgatagcaccctagttcatgggaatgggtgatggttcagtatccttaagcgaagaagccaagcatccaggtgtgtgcacaagttcagatgagatcctcgttacgttatgaattcctaaggcttaataataaacactgcatattctaagaga

SEQ ID NO: 383413 - DNA, 279 bp, Zea mays
ctcgagccgcgaagatccctccgcctcgagcgacgcttcgaagcataaacctgacgaagatcgctcaggcgagaatggagaagatggctcaggcaagaatggagacgcttcgagcaacgccgatttggattccttcgacaagtcaggaggtagcggctcgtccagcgacgatacgaccgacgagagccgcagcggcctgctcccagttcccgacgacgtgaggccggccgcgcctttcacaggcagcagcttccgcagggctctgacgagcaacggcca

SEQ ID NO: 383414 - DNA, 273 bp, Zea mays
agccgaatccgagctgcggacctcctcccgatccggctgtatccaactccgaggctacgaggcatggccacgccacttgctcgtgcgccgctcccgggggccctacttcgccccgctcccgccgtccttcggttggccacgcgctgccgtttccgggccacggcggccagcggtgaaggcgccgctgggccgatgctgcgcacttgcaagaactgcaagcagcagtacgacccgtccgtgaaccacccctacgcttgccgtcaccacaccgcc

SEQ ID NO: 383415 - DNA, 308 bp, Zea mays
agctgtcctcccatataaaaaaaacctgaagatagtattgtctttgaaattgtgagggcaatgcatttccctttcaaatcacctggtacatgtcttgtcccccccccccacttcccccagagcctgtctatatgtacttgatccgctttttttgcatcctagcttctcccggagtgtattttgttgcttgtgtgatgttcagatctttgaagaatgtgacaggctatctagcctacttgagacgttcagtatttctacaggtaagaaaggaaaactcaagtagacaagatcttccaaatctagttgca

SEQ ID NO: 383416 - DNA, 298 bp, Zea mays
gaagaagaagctggcctccttctaccgctctagaggcagcattagcgagcatgggcacctgccgcgccattgatcagtcagtgaactagtgttaggctgttagcttcggttgactctgggattgaggctggcgggggttgtcattacctctcgatgattcgtgcctcatgttagtgtacagttcgtggtgacccttcacccttgggtatgggtgtttttttctctctctttgccttctgcttcttccccggaagcaatgaggatggggttggcaggtgctctctgccttctgcttctt

SEQ ID NO: 383417 - DNA, 297 bp, Zea mays
aagacacacaggaaccgtagaagggcctctctatctactttccgtcttgcgtattctgcctctgtgtgatcgtgtcttgaaaaggaagtgagtgagattagtgcatacaagcctacaacagctgaagaggcgagtgatagacataggcatgagccgtatagacttgcaaggtgttgggaatatatggttcgccaaatatagaccggacagagcgccgatgtttcttcagcctggttataataacatgtaatgttctggaacaacatctgattgacacaacctgtttccctcttttgt

SEQ ID NO: 383418 - DNA, 156 bp, Zea mays
atcctcacttcctcattaaaataaaaacggactggcaacaacttcatgccctgtgcaccccttgttaaccatcctcatcagaaatcgtagtcgagtgaacttggtagtggcattccaaattcgacattctatgcgggctagaaattcgcttgtttt

SEQ ID NO: 383419 - DNA, 302 bp, Zea mays
agacaattacctgatggtactcctgaacggttctctattaaaaataatatcaagaaggccctggatgctcgtctgtcctctctacccaccgaattgccgcctcctttcaaaatgcagaagccaaaggtttttgaggcgcctgtcccaccaacagagtttcaacagattcctggagacgtacgcctcttgacatgcgggtactcgatttgttggaataaatccggtttgcatgaagttgtcttaggcacaactggtaggaaacaaggaacctcatcaaaggcagcacacttaccctccaccga

SEQ ID NO: 383420 - DNA, 288 bp, Zea mays
gctaccctcgatcccccgatagcagcagcagcagcagatcctcagcggccacatggacacccccacggcgaaggcggcatggacagccaactacggcgtcgtcggcagtggggaccgtcgtcttgccttctcccgccaactctcctccaacgccaccacgccgcgcctcgctcggtccgactcctccatctccatgcccgccccccttccccttcccccagtctacgaggggcccaagcccagcaggaagctactccgcctcgccacggccagccgccccatgcgccg

SEQ ID NO: 383421 - DNA, 288 bp, Zea mays
gccggcccataatctacgagcgaggtctagacatgacacaccagacactcgtgccggggcacccatgaacattcattagaaaacagttttaagtttttatatttcagtttcttaaaactgttttctaaaaaaaatttggagcggctgtttagaagctagtttctaaaagctggttagtagctttttttttaattgaaaatgacatgcctgctcattcatttttttttcacccatgcacttgcaacgcctgcactggttgcccacagaaagtcagctacaatttcctct

SEQ ID NO: 383422 - DNA, 281 bp, Zea mays
agatagagtaatatttgtattgtgtttgtcttagttagaataagggtgagagttataaaacattggagaaaatcaaaatactattgtgatccatgtgggtctgatgcctgactcggtccacattcagcctcggctcggcagttgactcccgaggaacctgatccatgtaaaagctggtcatgagtatgcctttgtgccatctgccgtgtcaacgggccggtgcggcggcgggcggtccggcggtttgttgccgctcgctgcttgggtgctgcctgagcctg

SEQ ID NO: 383423 - DNA, 276 bp, Zea mays
tgataatttataaactaaaatgaaataaaatgaaaggactaaacattagtccctataaaccaaacaccctcatagatatgcatatactacatggggatacgcccatagcctatagatttgcaatcatgacgcatagaatgtatgcggtgtagtggaaaaacggagggatcaaagcgatctacgtacaaatgattgcaatcatttgtacgtagatcgtttgaacaactcatcgatggtttagtatattctgcaagctagtctcgtcgtcgtgtgctt

SEQ ID NO: 383424 - DNA, 289 bp, Zea mays
ccgactatttcgggtaaaccaaaaagcgagtccaaggacaaagagaagaagcataaaaagcacaaagacagagagagggacaaagacaaggaacataagaagcacaaacatcggcataaggatcggagtaaggacaaagataaagacaaagacaaggataagaaaaaagataagagtggtcatcatgattctgattcaaagaaacatcatgaaaagaagaggacgcacgagggaactggagattcagcagatgtgcataagcacaagaagagtaagcacaagagttcca

SEQ ID NO: 383425 - DNA, 167 bp, Zea mays
gcatgtgtagccaccggagtagcactacaacacaatcgcaaggtttctgggaggcctgctgatgctcatggtggcactggttctataggaaggtccacaagccttgtatatccgtcacttttctcaccattgacatcttcacagacgaaaatggtgcacactaattc

SEQ ID NO: 383426 - DNA, 122 bp, Zea mays
cggacctccgtcctatgaaccgccggggagcgtggcggccattcgacgcaggcacccagacccagcagctattgtggtcgtccctcagccgcgtcgcaccgcatcgcattctacgattcgaa

SEQ ID NO: 383427 - DNA, 178 bp, Zea mays
ctaaaagcacttgaagaagagatgcagtcttttgtcacctcaaagggcaaggttgccggaggacttcaagagcatgtaagaaagctcaaagagagctttaattctaggatagcagaattgcatggttttgcaaatgaactcaagcataaatctatgttgagctttgaaaaccttaatt

SEQ ID NO: 383428 - DNA, 286 bp, Zea mays
tcgtcgcgatccaattccggcgccggagaagacgcgcgcaggccccacccagccgcctacacgcgctccgctcccacagacggacagcttgggctcgacggatgaacatgtgtgagaaagatcagaatttgccatggggatacgacctgttccgcgacccttttgctcctcccaacggcatcacatccagatgagactcagttgcattcttctcaactcgcatatgatatgtacaacccatcagtaggcatctaccatcctggaagcacccatgagcacgagcacg

SEQ ID NO: 383429 - DNA, 283 bp, Zea mays
ccgcaccgcacccaaccgcagcggagctcgggagccgaaggccgagggtattcttccttcgccgctaagcacgcctcctctccacaggcagccgacccaggggaagcgtcgccgtctgcccccaccccgaatctgatgcttcatcgattgatttggagcggacaggaggggagccattgcccgtgttctgattgctgctagaggtcgagggatggtaggggtgctgtcgaatcgcgtggatcgggacgacctcaaggccggggatcacatctacacttggcgg

SEQ ID NO: 383430 - DNA, 275 bp, Zea mays
gccgctgcacacccacctcgctcgcaatccggagcccattgacgagggcctcatattcagcgacattgttggcggaatcaaagtggaggaagatggcgtacggagtttgtgcccttaaggcgacatgaggacgacacccgtgccgcttctggtcttgaggtaggatccgttgaagtacatgatccggtactctgggtccttgattgtgggtggctcctgcgcttcgatccattctgcgatgaagtcggtaagagcctaggatttggtcacagttc

SEQ ID NO: 383431 - DNA, 236 bp, Zea mays
gtgattcaatgtaatgccgatatcagcactgacatgatgagggacaagttttctgccctatctgcagtagtttatctaatgcccactcttttacattatacggggtgtttgtaagcaaagtatttttggagttttgaggtaaaaccatggtattggagaataccatggtattttttgccaagaggtgtttggccaccttgtaaaaaaaatctgttttgaataccatggttttgtag

SEQ ID NO: 383432 - DNA, 288 bp, Zea mays
ggtttgtgcaagaggagaagacaaatggatgatacgattgaatgttgggatcagccacacgtaagtctaggtatcgacctagtcgccgccggccggaacaagaagaccgagcgcactgcatacctcaagctcctcctcaagctgtaccgcttcaacgccgtgatcctcaagcggtacttcattagcaagaccaaccgccctgcctctctcgctccaccgtctcatcagcttcatggaaggggggaggaaacgtgactgacgacaagagggtctacgagtatctgcagt

SEQ ID NO: 383433 - DNA, 283 bp, Zea mays
aaacaagactgcccttcagctgagtgctcggaagaagtgggagggatttcacggttcatatccgtatctgcctcgaggaacccgctgcgagaaaaagggtgttggacaggggctcggtcactcacgagctatggacagaaccgccaatgcggcggtgttggatatcgagggtctgcctcaaccacctgataaatgctgctccggaagtccaaaaatgaccagggccttgtcacgcaaggttcgaatcggatggacagtaaggtggtgatgagctgctggagca

SEQ ID NO: 383434 - DNA, 112 bp, Zea mays
cggaagaggaaactcgaaatcccggcgagcagtatggcaaccggccaggagcacgtggcggcgccggcttcggcagtcgaggagacgccggataagaagcaggccagcacaa

SEQ ID NO: 383435 - DNA, 281 bp, Zea mays
  unsure (1)..(281): unsure at all n locations
tgaatctttgatcaaatgggttgtcgaagtcaggagaaaagaggagggtggaccaagcttaaacaaagaggagaaagaaaggcttttcttgaaggaaaatgtactaaagcaagttcgtgataccaggctatttgccatagtccatgatttgcagtatgctaataaaccatgttataattgctcatctncggtcggtgatgagcaattataacatggtttattagcatactgcaaataaaccatgttataattgctcatcgccgagcgaagatgattccctt

SEQ ID NO: 383436 - DNA, 269 bp, Zea mays
gggggaggagaggacaggaggccaagcagcagcggcagagacgcaggcgccgcaatgcagggctccaggaccaaatctggctccgctgaggcgaagggcaacggcaagacgaaatcaaagaagaagggtggtgggaagaagaagaaaggcaagaaaggagatgcagcagaagcagatcccatggaggaggcgacaaacggtgctacaagccaagaataattctgatttttggaattactgccaccagctgttttcatgtttcttcgctg

SEQ ID NO: 383437 - DNA, 274 bp, Zea mays
ctagcgagatctgttcttgcctcctgcgctgttccgtcggcgttccgatgatgccgtaggcgacctgagcctgtggttccctttccgactgggacatttgggggtaagctggccactatcctacctttgtcatgtgcgctttgagttatgagtgctccactcgctctttcggaacatccaatggtcgacctaatttatggatacaaggtttgaaatagggagctcacagctctacatggtgttgccatgtcgccattggattccataagcgcat

SEQ ID NO: 383438 - DNA, 279 bp, Zea mays
ggggcagcaagaaaaccctaaccttcctgggagggaaatccaaggagggttagggttttctgatgcgctcatacatggggcagcaagaagatgggatgtctgatggcttgtacacttacaagcatcaccgcgagcgaggagctgatatccacaccatctttgtgaagaagagcaaattcaggattctgctgtcatttatcggcacaacgttccttcttgtgtctgtttgctgcgccctgttatcgaaggatggtttatgtctttgttccctttggagca

SEQ ID NO: 383439 - DNA, 175 bp, Zea mays
tctgtccacctccgcgcctattccctcgctcccgcgcccgctttcccgcgctttgcgcacgcctcgctctccttcaagcgccatgcctcagctgcaggcctgccgctccaggacctacccttcggcattggcgtccgcctggccggcggggtcaacgccgtctcgctgctctcac

SEQ ID NO: 383440 - DNA, 273 bp, Zea mays
ctcgacgcccggcgcacacggcatactgcatcataccgcaccggcagtggcggagaaaagagatgaggcagccggggccgggagccatcgccgcctcatgcctcccgactccgtgacggcccgcagccacaggccaccggataacgcacacagcggaaccatccaaaaacgcgggagctttcccccgtcaaagcccccaccctaatcccccgtctcgcgcgccaatcaactcaccctcccctccggcttccgcggaactaggagcagccatgc

SEQ ID NO: 383441 - DNA, 274 bp, Zea mays
tctgtcggttacacctctgcctctccctctcccctacccggccggttttctccgtacgtgcccatggccatggccatggcagagtggtgggctgcagcgacggaggccgtcgcggtgtacactgggttgactcctacggcgttcttcacggccgtggctgtggccgcggcgctgtacgtcgcggtttcaggactgtttgcgcggccggcgcagacgtcatcgaggaggcaggaggaggcggcggaggagaggaccttcgaaccactgccgccgc

SEQ ID NO: 383442 - DNA, 295 bp, Zea mays
tggccgccctgttctccagcctcttagccctcgtcatgggcacggtgagtgccgcgaaggccgttgtcacggagataatcccaccggccgcggcattggtggccaacataatggcaatcgcaaccacaaccgcgtcggcgtcggtggcgtggttcatctattacgtctgtgcagtagccgctgccgcggtcgacgtggccaccgacaccctgccgtacgccgtggcggtggccaggacggcggcgtgttccgcggttcaatcctcgcggctggcgctgcaggtcctgctgagtta

SEQ ID NO: 383443 - DNA, 285 bp, Zea mays
gtgaatatctcagattcttcttcagattcagatgatgaggaacatggaccaagtaaagaggactgcattcgtcagtttaaggtgatgctaaaggaacgaggagttgcaccattttcgaagtgggagaaggaacttccaaaaatagtttttgacccacgctttaaggctattcctagtcactcaacaaggcgggctatatttgaccactatgttcgcacacgtgctgaagaggagcggaaagagaaaagagctgccctgaaggctgcagtagaggcgtataaagaa

SEQ ID NO: 383444 - DNA, 292 bp, Zea mays
tgcacctgccccatcttaaagacgagcctgtagatgtggcactcgtgttgtgcctgcgcctgcttgtctcttctgctgtcgccgtcgaccgactgctgcttgtgtcgtgtgagtgccctggtgttgacgccaaactcaaggcttgtgcgttgcgaggatgttggctgattatacattgtcaggtcttgtgaaattaatcatgcttcatctggaccatcgattaagtaatactacaaaaaaatcagattcaggtttggtcatatctgatgtactaaaatccaggtgaataaga

SEQ ID NO: 383445 - DNA, 270 bp, Zea mays
ccgagacgtcaggctgcagcaccacatcctccactaaatcccagataagcaagtattccacaagaacatgtatatataaggcccccctaatgtcagccatccaatttctgttgacaagtgcctggctcactgtatgccgttttgcgaccctttttggaatcatctgaacaaattaggtgctaattctgccactatcttcccggtagccaacaatcagtccaaaattttgcacgaattcccatccccaatagcagtgatcactgcagcatc

SEQ ID NO: 383446 - DNA, 274 bp, Zea mays
tgaaagatggcaaaagtacagatgtctctgacaagaggcaaacaagtcaaaatacctcgcaagtgaagaagcgcaagaactcaaaggttggttctgttgacatgccttccgtggatgcttctggtgaaaaagatcatcggtatagtgaaaatgcgaccaaacaagatacagcttctactaaaagggagattgtccacgaaccttctatgcaacagatgtcaaacattgtgcatcagggggattcaaatgtaatagaaaatccaagtggtgatgg

SEQ ID NO: 383447 - DNA, 269 bp, Zea mays
ggcaccctggtaggcttccactgccactgagaatttggttctgggaagagagaaaggctgcacgattcttcctcaccttggcctcactcttgcttccatgcttgacattgaacacggagcaagctcctgaacttgttgccgaggaggccacactcttgcgctgccttggcaatgggggaggttgttgctgcttcctccctggccctggtgctgctcttcttctgctcttgcgggcctgcaagcggccttctctcccccaagggtgtaaa

SEQ ID NO: 383448 - DNA, 265 bp, Zea mays
ctcttcccctcctcgcccgccgagaggcgcccgtactccgtccgctgtcccagcgagagctttaagattgtgcagacacataatttggatgctcctgcctatgcaagatgtcaaccaccagagatattgtttagtgctgggaaagttatgcagttttggatcataaattctacatagacaagataattatggaccgtgcagacacatcagggtttgtcagtggtggttgctttggtactacactcctgctgatattctttcattt

SEQ ID NO: 383449 - DNA, 297 bp, Zea mays
gcagtctacgtggcagagattgaagttttccactgatgcagagcaggaccccatccatccttctctgatgatagatggggtccttctctgatgatagatggggtcctgctctgcatcagagaaggatggatggactggttgaacaaagaggtcgccgaaccacgagatatgcaagctctagcacaagttccgagtgaggtggtgccatgccaatgacagtttttagaactcagtcagacattgttgatttgaactattgtatttgtatcatccttcacaagcagcatatttgtcatg

SEQ ID NO: 383450 - DNA, 297 bp, Zea mays
gcgtgctaccacgaccccgtggccatggcccacatccgcgagtacaccctcaagccgctctcggagccggcggtggcgcccgtgtgcaccaggaacaactctgtccctggcttcctcttctccaacggtggcttctccggcaacctgtagcacggctacacagatgtgctggtgccatttgttcatcaggagtcaggacgcaccagttccggggcgggtgcagctcttgctcagcgggatgaaggacgaggatataactcgaaaatgacaacaatggacgccgaagctataacccaa

SEQ ID NO: 383451 - DNA, 100 bp, Zea mays
accgacaattcagaaagcagtgctcctcgatccataatttgtactgaagaacttaatgagtcgtgtaagtacacactctcaagtgctatagagtgctggt

SEQ ID NO: 383452 - DNA, 281 bp, Zea mays
aggaaactaaaataatgtttagttttcgtatttggcaatttagggactaaaataaaataaaatgaagggactaaaaattaatcccaaaaaccaaacacattcgtaaggatatctgaatatgaaatgctaaaccagatgatgcatgtcatatctcactaacaccacacttaagctgtgctaatgctggtcgtcatcatgcagtaagctgctgaacaacgccactggatccggcaacacgaacacatcttcgacgcctacaagtgacgctgagggatctgcga

SEQ ID NO: 383453 - DNA, 276 bp, Zea mays
attttagattgtctagaagtattggttacagtttcactgctctctttgctcagcagtggtaactttattttttgtttcattgtaaattaagtggaataaagcaaaaccacaattgatccaagcagaaatggactaacctaaccccaacccccgcgccccactccatccatggactactctttccattagaatgaactggcacagtagtgtgtccagccaaaacatattctttttttaccaaaatgttgcctaaaatatgtagcttacatgttggaa

SEQ ID NO: 383454 - DNA, 289 bp, Zea mays
aatgaacttggcgcttacattcagaatcagacctctcttcatctccaattgcagtagtgtctactccttgtgcgcttgtgctagcaagtgatgctacacaagtacacattccaagctgttgatccgctctccccgtcgtacgactacctcccgggccacccacggccagacaccaagcacgatgcaggtgatccttgccgtgccgcgcgcctcttcggggcgccacgtggccgccaaggagcgcaaggccgggcgggtcccgccatcatcttcaagcaggagaacggac

SEQ ID NO: 383455 - DNA, 182 bp, Zea mays
gatagttacaaattttaagaacaatagaactttggaggtttatgtttagcgcaactaggtatcctgaccacatgaattttttacctgacagtttattggtgctataatgggtgcaagagatttaaatatacagacagaacatggacatcttggcatgcccagtaatatttgctgcgttgttg

SEQ ID NO: 383456 - DNA, 288 bp, Zea mays
ataaaattggagtgtatcgatcagttaaggttaagcaggctacataacaatatatcatggacatcactgagtcgtctcgccattttatttcacgcctaccacaggacaggaacatttaggatacataatgcttagaactttgaataaatgaacaaagaactagagcagctctatttattagtgcctcaggaaagttatctgcttgggatccaaaagtgctgacttgtttaaattgaagataaaattagaaattgttaatagaaccaatggctcacattatatttattt

SEQ ID NO: 383457 - DNA, 292 bp, Zea mays
cttctgtcttctctgcctttcctccgcaatcacagaacgcaagaggagagtgagggggctagggttttgtgcccccacccccaccacgccacacgcatcgaatccgagccgggtcggggttgctgcgaatcgccggcggtgcttgggctgtgattccattgcaatggcatctgaaactgatgagaaagctaagatggagagtttgacatctgctgcagcctttgtggagggtggcattcaggatgcatgcaacatttgccttgaggccttctgtgagagtgacccttctgca

SEQ ID NO: 383458 - DNA, 288 bp, Zea mays
  unsure (1)..(288): unsure at all n locations
aataaatggggatggcatatcccgcgtgggtaaatgtaaatgccaggtcatcaaaattcatgcgcgccatctagacgaacagagaaaaaatatattgatattgttatttttaggcatgatgcatgttattatattcctattatattcacaacatgtgtgaaaatggtactaatatgagctatgtattagtagtagtacacatattggtttcacaataaaaataccanaattttgtgagccacggtaatgttcatcgacatttaagtaaggcggtgaaaattagctaac

SEQ ID NO: 383459 - DNA, 291 bp, Zea mays
agctcggacccgtctgggaacgcccactcgtcggctgaccgcaaggagaagccggcgttggagaccaccgacgcggaggtcgcctcgtcccgcaccgtccaggaggtcccggcggcgaactcacccggcgccgcgtcggaggccgccgtggacaagccggtgatcagcgtcaacatcgagcaggaggtgaaggtggacgggaaccagatcatggacatgtacatgaagagcatgcagcaattcacggattccctggctaaaatgaagctccctgccttggacttggacata

SEQ ID NO: 383460 - DNA, 288 bp, Zea mays
gcaactagtttctgaacagcgtgtccgctgtctggtctgtcaaaataatcttggtaaccagtgccaaaatgattgctgggggaggctattttgatggttctcatgaccatattctcatggaaggatcaatgatccatgattcttcacaatcttccatctatgacaatacagatgttgaacagcagaacttcagatttgcgccctttatcatagaagatcactccaatccagccaaccttacctctgaggctgcaagggtgatagaccaaattcaacaccagctgggga

SEQ ID NO: 383461 - DNA, 285 bp, Zea mays
agtccagagcgctcgacctaggcgagtgggtgactgcttcaaccacgagcgcacgcggcggcggcgccatctcccacggatgtagcttcgtctccttcccgttcgctgtcgtcgacgccatcatccacgagcacagcgcggcgccgctccataccgagtctgtgggcctaacaccaggggagtcgccctccagccctcgcccggctgcccctgcctctgcccctcggctccgaccaccgagttttggccaagtcgccaatcgctcagccagtcagccatagagat

SEQ ID NO: 383462 - DNA, 275 bp, Zea mays
aagaaagtcttgatgatgaactgtccactgaaatcatagataaatgtgacgggataccattggctatcattgcaatagctagtttgttggttgaaagaccatgtgaggactggtcaaaagtgtatgactcaatcagtcttgggaatggagacaatacaacaaagatattgtcctacagctactatgatcttccttcttatctcaagccatgtctactgcaactaagcatatttcctgaagactatcagtttgatacaaatgctgcaatatggatg

SEQ ID NO: 383463 - DNA, 295 bp, Zea mays
cggagaggacgaggtgacggacggacacggacacgactaacagacgctgctgacagagtggcgcacgagaggagaggagagttccgaaccccccttctccgctgtactgtacatgagctgctgacgtgtgtcggataagtagtagtagctggcgtcccggcgggtgctggaaacaatgatagtaatggtgatgtaacgaaagatggccgccttgaggttgagggagcgaccgagcgtgaagcaacttggccgccatggacaatacaattgggacacagacacaccggtcgtctcc

SEQ ID NO: 383464 - DNA, 291 bp, Zea mays
attgttttgtgtgatgctggttaaagtttgggcatgattcctggttagaatagtggtgtatttcgtattgtttttggatcgtattgttagaaagaggttcagagataagagaaattaagaatgctgtaacagccatccttgcttttttcagtttttatttaaaagccttaccatgtgtctatttggtactgctcaacttcatgatttgcagcttagctttacaagaagtctgttggtcagttgttaccaaatgctatggatcaaaaacaggacaacacaattgttaaggat

SEQ ID NO: 383465 - DNA, 325 bp, Zea mays
gatattcgtcgttggtgcttgttttgttcccatgcctggtagaatgcaggctgctggcatttatgcagctgtattattccatcaaggatgcaagggacgtgagataaatcacgagcagcaacgatggtggcggctgtctacacttgggcctaggcaacattcatgttgaactggacaacatgtgtgcttagcatagcatttgaaacgcacaggagaaaagaaaaaaaatgctcgtgttgcagttatctgcgaacttgcagctgcattgagtggtacctatgtagagagccgattttttttatctttagatacaagtcgatcggca

SEQ ID NO: 383466 - DNA, 323 bp, Zea mays
ctttgtactcggcctcgccttggcccgactcgcgggagccgcacgccgccgctccactcccaggctcccagctgccctttgcgaccgtcgccgccggccgccctactccgagctgttcaggacgctttgctggcgagcacccaccacaccagttgctaggactacatgaatggatcatgtactagctcgttaagcctccatgatgtcagtgtcgacgatggacaatcagctcttgataacagcagtagaacctctagtccttttgatatcctgactcctcaagatgttatccctatcgaaacggcaaggtctagattcttgga

SEQ ID NO: 383467 - DNA, 299 bp, Zea mays
aaacaaacaaacaaacaaacatttaacaaatgagctagcttcgatattggttcgtgtttgcaatttatttttagatagacaagataatttgtttgccgtcaatgtcaccaagtaataggtttatgaaattagttataaggagtcatatatgtcacattgaccgaccaagtcaattcttttacctccaagcacaatgatcaaacacattgttgggtccactcctcctcgtcatattcatgaatgtgattagattcaaattaaactatccatcgcgagtaaggcaagaattattgagtgtc

SEQ ID NO: 383468 - DNA, 286 bp, Zea mays
caaacacacgacagggtagctgtgatctactgtctagccaaagtaacttcagacaaccaatggaggaggatgttggaaacatagaggctagagccaatcatacactgaggcaaaagaaaccaagctttgatctccaggatttattaacagcaagtgattctccttcatggccagatagcaatttgagggtaaattttcagatgggagatgaaagagaagcaattggtggggactggatagataaggttgtagtgaacaacaataattcagccagtgattgggaggg

SEQ ID NO: 383469 - DNA, 276 bp, Zea mays
tccaaagctgttaagaatgctctcttcatcagtttgcaacatatgtttgatattgctgtagttttgggtaagtccgaccttgaagaataatccgaccatgaggagtatggagtgtttgccatgttttgtatcttttcagttgttctatttatggatttattgggattttccatgagtttagttgtatctacccgattgtggtatccccacctctatccttgtaattggtcagagagatacaactctattaaaagaaaataacccgagattttgacc

SEQ ID NO: 383470 - DNA, 201 bp, Zea mays
actaaatggaattcagctgccgacttatgctctgaatgatatattggtgtcacacccttgtccagcaagtgtgtcgcgcttctcatttaggaaaaggaacaatacaggagagaactcgcgtttaattaattgtagatcaagcggtctgagggtctcaacagctgctggatcaactgctgccatgctatcagctggaggatt

SEQ ID NO: 383471 - DNA, 281 bp, Zea mays
atgaacatcttacaacacggagacctcgcgaccacactgctgattcgctaagtagagatttgagcacgttgttgagttgtaactccgatgtgttgtttcttgtgctcttttcttgacccgtgtgcgtgtgttgctgcgatttgagttcttgtgtgtgttactactcccccttactcttgtgctttgattgagatcatttgtataaggcgtgagagactttaatttgtggagattcctcataaagggaaaacttgatataaggaagaaaatcgtggtactca

SEQ ID NO: 383472 - DNA, 279 bp, Zea mays
gtagattcttgaacttcgttccattatctaaaaaatcacatgcttttggttgacattgctgaaacaagcagggtgtttgatttgtagtgttgagatattggagtgaaccaaacctatagggtttcattttcctggattagctgcattttcccaattcttgaagtaatggcggcacaatgcatataaatgaactagggatgacatatcggcacaaattgtcctcataacttaacagatcgatcacaaagtttcttcaaaaaatctttgaattctacacac

SEQ ID NO: 383473 - DNA, 276 bp, Zea mays
agattgtcgtgatgattatggagataactcaattggaatctagggagagaatcagaaataacactagaagttacaacactgtattttaaagatgccaagtggtagggctataatagcatgtaagttttattgatccttgctcctttctttgtctttgttttactacaattacaataggtattgacactgtaccattccatttattcgttgctgattgctgatgttatctgcgaatatcattttgtttgtttttcattaacagtttagcatgcttag

SEQ ID NO: 383474 - DNA, 280 bp, Zea mays
ctccagagtatgaggatgttcctctgcagaaagatccaccagaaggttcagaggagttcagtaaacaggttgatgaagcctttcttaagtacacaaagatattaaatgagagtccagctatgcagaagaaataccgggaggcgccaaaaggatctttaccatgctgtgtctgtggcagtgtagcgaggaaatttctggaccttgatgcattgctatcacatgcttatgatacatgcaaggccggtttgaagacaaaacacttggggtttcacaaagcact

SEQ ID NO: 383475 - DNA, 269 bp, Zea mays
  unsure (1)..(269): unsure at all n locations
gtcaaggggtatattagctcattggggttcgatgcaaagacctttgaagatgtattgaaatatttcaaggttacctgtcacacgctaccacggtctcaagaacagctgctcttgagatacgagctacaggaagatcgttcccttcttgaagaataccggttcacttatgatgctaggtggttcagggatcaaatccaggacgtcctcagcttctggacaggatcacacgagcctanacttgtagctgaagaggagatgtggaagtgccg

SEQ ID NO: 383476 - DNA, 268 bp, Zea mays
aaaactttaattgcaataaccacattacatgagtttttcaggtaatatgttatcaatttgctgtagctaaagcttaccaagcaatcaaagttgcagtgtctgttatataaaattcacattattattaaaaaacagttcgcacacactcatggactcatggctcttttaaaaaatttacgattttcagcaagtttaactgatgaactgtatattagagttacatttattagttaactatcttcaattataatgcataactagtcagatt

SEQ ID NO: 383477 - DNA, 280 bp, Zea mays
acaaggatgcttctgccgtgctgctctccgaggaattccatgaggttttcccgttgtacctttatactggaacctcagatcaagcggacgatgagtactcattggattcaattgttaaatttggtatcaatgggaagaagacctccggtgggaaaccgggcttcttgtacagctctctacggaattcacagtcggcacaaggcactatgagggtgaagaaaatctggtggtcagtggattgggaagactcatcaggtgtacaagtatgtggggactgatg

SEQ ID NO: 383478 - DNA, 289 bp, Zea mays
agaaggcatgaaaacctggaccatggtggctaatacagacagtcttcttgatgacgagtctaggaaggctattatgctgctaaaaggcttaaaaggaactcgcctgttcataccaaggattgtgatcagggagttggattccatgaagcagcgggagggcctgttcagacggtcaacgaaggcgacctccatcctgcaatggatcgaggagtgcatggcaagggagagctggtggatccacgtccagagctcggccgacatgttcccggtagcaccaccccgcccgcga

SEQ ID NO: 383479 - DNA, 277 bp, Zea mays
attcttcgtagatggaaatctgagagcgggcacaagaggcggtctcttggtggctccccaagattcaaaagggcggcactcaccgtcgcgaagattcgcacgccacggatatgatctctgatgcttcagacagaccacccaaaccaacattgtcgatcgggcagatactgagcatgaagctaatgggacctgatgggtacgacaagagtgtttgggatgacaaaacaggcgagataccggagatctcgctcggtcagattataaacaggagtggtgt

SEQ ID NO: 383480 - DNA, 282 bp, Zea mays
ctcgagccgattatgataaggatgatatggtacaaggcactggactacttggaactgagagacaagaatctgaatcacaacccccactggtgaataatgattggcatgccgatatgcacagagctcatcctctggggtctgtgcctccatgtactacattcacgagtgatctggctgaaaaaccatctgtcagtgcagaaactaacggtgaagatgtaatgatatttacaacaaaaattcctggaacagctttaggcgattgtgataaaacttccaacctaa

SEQ ID NO: 383481 - DNA, 251 bp, Zea mays
  unsure (1)..(251): unsure at all n locations
agatacatggcgatgtggcatttgcaatacacatgctgggaaaggatatggttagttggtctctgccaagtgccaactctacctgatgaacgataacgattctttcatttgttcaagttcttagtttgctcagttcatagttcagatctattagtctaacggtattttctaataagcttcttgtgtctctaagggtgtatttggntgaggagtgaagaatggaacggctctattctagtttttggatcttt

SEQ ID NO: 383482 - DNA, 233 bp, Zea mays
aaggcaggccctgccgtctgccgcaaaagagagcactaggaaaagaagtgttgcggcgttgcgtggtgggggacgaggccagagcgccccaaaaccaaaaaccccagaaccccgacctagggttacgccatcgccatgggatctgttgcctccgccgatgtgccagcacctcctcctcaatcagcgctgcctcaagcgggcgcgccgacctacgggcccgggctcgccgggat

SEQ ID NO: 383483 - DNA, 125 bp, Zea mays
gtcactgggttgtgactagcatcaatcaagtctgctctttgtattgcataaacgatagacccagcccagagctgcagcaaaaagagcagacttgattgatgctagtcacaacccagtgactaaag

SEQ ID NO: 383484 - DNA, 283 bp, Zea mays
gttggggatactctgctggggtctagtagcggagttgagtctcaaggatctcctcgggaaccagatgttgatacagtgcagacagagtgtcttgatgacatttcagcttccgatgacgacgactatgtactagatgtcattgttgatgaagcaaccaatcccatgagcagctataatctacaagatcaggggtcctcactggaggaatattcatatagtcattttcccttaaattctgcagacgagacaagcatcatcaagccagatactgcatctatttttg

SEQ ID NO: 383485 - DNA, 303 bp, Zea mays
cagcttttgttctatcatggattcttcatcactgtcgggagctcagtttatatctggtttggtcatgggcatcactgggctcccttcggacatacctgtggtggtgactgcgaacaacatcacgacgaggctgttgactccccctcagcgacatcgtcaacctcaggcggcggtcgtgtaagtcacttctgaattctgaccttttgggctctgcctggcttgcctgctgccatgcgaaatacagcgacctaaccctaaccttaacatgagtttgtgggcctacgtgtgaaggtgtaaggtgct

SEQ ID NO: 383486 - DNA, 297 bp, Zea mays
gcacatatctctgtccgcagaatttgactactcggttgggccaacaattgccagaggaaggatctcaatattcgatggtgtacagaagagtttaccggttgtttcacccatcttgttattcactatcttgatattcaccgatcctgatcagaatgtggccaccaatggccaccatcgagtttttgacatcacacctgtacttcctccccccagttcctagagcccagaggtttggcgctgcacatcactgttcctcgttcagtccactcatgtagtcatgtccatggatgaggtttt

SEQ ID NO: 383487 - DNA, 294 bp, Zea mays
gtctgctcttcccgaatccctgtctcgctttgccctccgtttctccagctataaagccggggggtcctgtggcgtgtgacctttttataccggttcgtgcagcgcagggtgcaacttcgtcaggtttcttggctccaacaaccttcctgggtcactctccagtcagtcaatctcaaactctccatgcggtttcaaaacatttgatggcaactccgctcctctgaattcgactgctacccagaaactgtaaagagatggggtgtggcccatcaatccccgacaagtacacgatag

SEQ ID NO: 383488 - DNA, 300 bp, Zea mays
  unsure (1)..(300): unsure at all n locations
ggagcggagggcagccaaatctcgaccacgtccggcaaccgcgccccctcggctttgcgcccacaccaagccaccctctgttctcctcttccgtggcggactagcggcgcactggtgtggtgctcctccaagctctggtctgctccgcgccccgcctccccgtcgaccggcgactttggccccggcccacgggctaggaagcgagttcaccggtggatccgcgcgtgtccctccctgttacctgcgggtcgccccagccggccacctgcgctctagcnacctactgacttgggcttgctg

SEQ ID NO: 383489 - DNA, 286 bp, Zea mays
gttctttgagaaaaattctgtacttggaaacaatgtgtttgaacattaaacaaagatattttagaatgtatctatgatatataagagaaaatttttttttactaaagatagttgatggatacttgatgcttattatctaaaagctgaagtagagatttatcaacatcctctggggatgctttttaatgcatatcattaccatatttaaatatgagtgtttgggaatccatagtaatgaaaggcctgtgatcatgatgaaaactatgaaaatgaaggctcacgccca

SEQ ID NO: 383490 - DNA, 283 bp, Zea mays
cttgtttttgcgtgagtttgcattatcagcaaaagtttggagccgaaagtacgatcacatatgtctaggtatctcattgatgtaggagcgctaaacataatttctgatgtgttacagagtcaggataaagaactcttttcagctggggcaaacatactcgggtattttgttgatctgcatcctgacttagttagaacatttattgccaatcatgaagagaacctggaaggcagttctcttcttgagtttctggttcaagggatggtagttgactccgccaatg

SEQ ID NO: 383491 - DNA, 223 bp, Zea mays
cactactttgcatgtgctaacagtatggctaatggtttttcaatcttaatttgcgaaaataggtccactcaacttttacaacagacatgtttgtttttgacaattttggaacactgcaacatgttgggttaaaagtatttttgctaaagtatacattggatatcatggtcgtctatgaaccaattgtagtgtctccatattttcatgctatcttaccattttg

SEQ ID NO: 383492 - DNA, 173 bp, Zea mays
aacgaggcgagccaccggaaccggagacgtgagcaatcgcacaaccccgtcgatccggctgcagtgcagcgtgctagatcgctaccgcccatggtggtggaggacatcgccagcgcggtgaagaacctaagcgtcaccggagctgcggcagcttcacaccgatacgcgcagag

SEQ ID NO: 383493 - DNA, 170 bp, Zea mays
cattggtggagatgtggtcagacgcaaagcacaaggtatgccaattaaataataatatgtgtaaaatataaggcattctacattctcctttttaacatagtgagttagtgatgttggaatttgttacatatttcctttgagcttctaatgttaattgtggacaccatacc

SEQ ID NO: 383494 - DNA, 269 bp, Zea mays
ctagtggtcttctctctggcaagcacaacatcgtcctgaagtatcctgcttctgacaaggcctccaagatgaggaatcttgatgcctcgttgcttccgcaaaccaacaagaatgttcagcagcaaagtgaagtcgatgtgaagcttgcatcaatgctctatgaagctttacttagccttagagaacagataatggaggagttcacgaaggattcaatgcgtatcacatattcaaaacagacacgttgaagggaatgagtatccgagtac

SEQ ID NO: 383495 - DNA, 270 bp, Zea mays
aaagtttatcaggcatgatactgtcataagtttacttctgagatttcggtgcatgaacatatgctgatttgatagaaattggaatgatgtagctattaaatttgtggatttttcagatgggatatgttttgcttaatcatttgcttttgataattgtcatcacaaatcacatgccatcgcattttatacagtggtactgtatccattacaagtaatgtcttagaactttggattcctgatatctgaagcacctgtcgactcctgttttgt

SEQ ID NO: 383496 - DNA, 274 bp, Zea mays
ggctagctatcaggagagatccatcgctcaggaacaggaagaagtgaggcgacagcgctgcaggatggcatcggagaaggtggagacgatcgtggcagggaactacatggagatggagcacgagcccggcggcggcggagaccatgaccagcaacccagcggcggcgcggcgtcgtccacttcatccagctccaggggcggcggcaagaagaaggccctgtcgagcctgttctggcacggcgggtcggtgtacgacgcgtggttcagctgcgcg

SEQ ID NO: 383497 - DNA, 274 bp, Zea mays
gaacaaagaaaggtaagtggggaaaatcaagatccatcaaatagaatatatcacaaagagaagcattgaacaagtgaatatcctggcttggttatggctagtgcggcctattctacacaaacaatggttcatgtattaaacccaaaggcaccaggcttgagcgaggtattcgtgacctccagaagattgctgcagaatacagaccaccaacaattgatattaatgaggtcgatccaaatggccaggcagcagttaaaagacggttgcctcctga

SEQ ID NO: 383498 - DNA, 242 bp, Zea mays
gtagactgttagttcacacggctaatcaactgatggttggcgatggaataaggcacgatttgtgctgcaagtgtccacagttaaagatgcttgggacatattgacataaacatgttccttgaagtaaatggggttttattttattttgaggagatctacacaacactcaagttttgtttgataacttgcacgtcgctttcttagttctggtcttgtaagtgatgtttcattaactatcagat

SEQ ID NO: 383499 - DNA, 237 bp, Zea mays
ctgaagaacaaggagcggaggatggcttatttgcctcagtggaatatgttgagcaaacacatcccaattttactgaggagaaagtagatggttctattcctacaccagcaagttcggagcaacctgatcagttggaggtggttagaccatgggatgatgcgccgaatagtaccctaaggtcaaagcctccatcaaactcctcacagccaatgcaaggatcagatctagatgttagga

SEQ ID NO: 383500 - DNA, 109 bp, Zea mays
gcagacgctaatcagaaactctactgaatggatgccttcgttctctctgagtacaaaggccccattgaaatatgtatgagacataaagcaaatttagaggaccggtagc

SEQ ID NO: 383501 - DNA, 256 bp, Zea mays
acaacttcagcctggagaagcagaattatcagatgattctgtagtgacaccaacaacaaaggcaactggtgatcttgttgtgagacaagtcagttttcttcggagtttatctctcctcccagctgattacaagaattatctccgttcgaagcgtatgaaggccatgcaacctggtgatggtggagcaatattgaaatattaacagacatggcaatgggttaacccctcgtccttttacactatgcagatcgatgag

SEQ ID NO: 383502 - DNA, 262 bp, Zea mays
  unsure (1)..(262): unsure at all n locations
cctaaccctacctttcctctcccgccaacgcccgccccaatggcgaacgnatgaagtacgacgatgaggaggagatctcgtcctccgccgaggaggaggaccagtccgacgccgccggttcgtatctggcgaggaaggggatgacgacgacgaggatgctgcggcgccgcccgcggaggaagctgagggcgaggggcagcagtaggaggaggtcgacgaggaagagatcgaagccgtcactaccggcgctggagctgaggac

SEQ ID NO: 383503 - DNA, 270 bp, Zea mays
ttgccctccatccgaacaacagcaggagcccgagcccgaacccgatattccgcattcctacccagcaatggtggcccttgtctaggtggacgcggtgcaagaggcgaagcggggggcgatggatgaggaggggcagcgaacgccgcagccgatggtggtcgcgcggaagcgtgccaagccacgccggatcacccaccctactgctggatgatcggcgaggcaaccgacgcgctggccgaggacggcggctcggaggaggactccatctct

SEQ ID NO: 383504 - DNA, 219 bp, Zea mays
gtcgcgtgtagtgtctagagcgagtggagctgatgatgttatgctgcttgatgcagtcaaagagagtttacgcgacaaacctagagaaaacaagttcaaggtggagcacgagcacacatgtggcacactctttatcgtcaacctaagcggtgcatgcaacatggtgaccatagcccgagtaatgggcgtaaaatataccttctcaacttgtacgatgat

SEQ ID NO: 383505 - DNA, 121 bp, Zea mays
catgatttcactatctttcacttaagtgaattactatacacattatgcaagaggagcattaaatcaggggcatgatgtttactcagatgagcatttgtcgtcatttactgttccaaattat

SEQ ID NO: 383506 - DNA, 279 bp, Zea mays
cttgtccttcaaactgatataaagacactgagggcgactcaatatggatccatacttttggcaggcctcaccaacggctcctcaatgttgtcaatgagcagcttgtagaaaagcctctcgttcccttcctatgataagatggtaccagagaaaagtatagcccaaatgaactccttatatcagctatactaatatactatgcataacaatgaaacttaatgatcagttacctcgagatccacgagggccatgtagcgctgcaaaggaaacttgtattat

SEQ ID NO: 383507 - DNA, 118 bp, Zea mays
ggtgcctgtttgatgcaggtggatactttttggtcaagggaatggagaaggtataactctgtgttctctgttgttaatgtattagtatgtaggaactttcaagtgtccttttgttgcc

SEQ ID NO: 383508 - DNA, 200 bp, Zea mays
gtgttaggctggatcaatattatatgcattatatagtctgattaatggatggtatgtatgtatagtatgatgccaatccagagaatattggcctaagtggaatatctctggtgagcagcatggagacattgaaatggaaggtgatgaaggaaaaaagagtaagccttgtgttaacagctctgcagcatgtgcagtattgc

SEQ ID NO: 383509 - DNA, 295 bp, Zea mays
gcatggacactgttgaagaagcggacgttgcataaagtatcttaatggttctgtaatggaaggtcgaaacatcacagttgaaaaggtaattgtgtttacctctaccagggttgttgatgctaaataaagtgcagccacatatgtgcagagtgttgacctggaagtttttttggttattattcagaagatattgtgcaagctatgtccagcagtcaagatgctgagttcaccaattccagctttagctcatacggctcgatcagtggacagcccaaagggttaccatgcaccacaa

SEQ ID NO: 383510 - DNA, 288 bp, Zea mays
atcgcaggtgtgggaaacatggttgctgtcggcgaacggcgttaacagccgcacctccgttcctccgggcgtgcctccgttcctccggctgcgcccccgctcctccgaccgcccccggtacctctggttgacctcgcccccattcctccggctccgcttcgtgttctccggcctcgcccctgttcatccaaccttcggttctagcccctcgtgaaggtcgaccgttgtatctaatggtcgttgatccggtgacctcccccacaacaactctacccaaagactacgatg

SEQ ID NO: 383511 - DNA, 285 bp, Zea mays
ttacaaactaaagactacatttctctattactctcatctgcttcctctccttccctctcatgttaccggttcttctatctctaatacattctgatgtaccctgatttgccagaataatatacagagtgttcctctagctattggtttggaggtcgtgtattacgagtagctaacatttggtatcagattaggtcatcctggatctgttctctgctgtgcggtggcgcccccgatcgtgatcgtccgtgatggatcatacagatgttgtcgtccgcaagctgctcg

SEQ ID NO: 383512 - DNA, 291 bp, Zea mays
gcttgatctttggttgcactttgatgatatcctgactgccattaatccatttgtttcatggcaagtgcagagaatggatgctgtgtatgggcagttactagttaaagacggttgctttagctggcatatgaataatgcatctatgtgtattgactatcgagaaaaaggttttgtatgattttgttgcagctggcaaggcttctggtagcttagtcttagaaattagtacttggctgtttgcttttggtttagcctttttctgacagggactggtctgggtactactcgcca

SEQ ID NO: 383513 - DNA, 280 bp, Zea mays
ctattgagtcctgacaataagttgtattgaatttgagatgttggagcacaacaatgtagtttgtttccagattgatctacattcagtccccaaattattaagaggtcttaacttgataaagttgaagctagggctgcacgattttccatggatttttgacgtatgctgactgctgttctttattatggtgctagttgtcacaatatactgagttgtagcaattgttacctttaagtttattgtactggaggacggatcatatggatatctatcgatgacg

SEQ ID NO: 383514 - DNA, 282 bp, Zea mays
accgcgttcacggttcacgccaacgaacccaacttcagaaaaagctcgttctgcccccttccttcgcatcgaaacaaaccctccgtctccaaaagaaaacccaatcctaaattcccaatccctcacaggcaggaccattctgcagcgagcttactcataactccgatttgcagtcgctgcccgattccgaggaaacatattctcgtcttgctccaccgtccgctcgccgccatgagcttcatcttcggcaagaagcagactcctgctgagctgctgcgggag

SEQ ID NO: 383515 - DNA, 296 bp, Zea mays
gttctagatcgcgagcggccgctcggatctagaactaggacatcagatgcaagcgatgaaggcacactatgtattggctatttatcggggcaagtatgactgaggggcacaaggattgcaacgtatcattgatcgttgtagttcactgcccactttggccacaggagaggtcatatcatcgcggagcggaagcgaaccagttatctagtggagttgcctccttcaagctactctaatgtcctttctattcaagtctagcaatggcggcaccactgaaaaaatcccatccccagaag

SEQ ID NO: 383516 - DNA, 283 bp, Zea mays
caatgctggaaatcaaattctattcattttggaaaataattacatatttattcgtcgtagctatattccattgttttattaggtgctcaaaaattgtgttgaccggacacatgctattttggcctatgtgctatccattgctatgttttatcggtagggttttccatgcttagataacttcctaatttctcattttttgtaaataaataaatacttggagattcttggtcaaaggaatgttggacacctgctagccaatgtgcaggtaacaggaacctgaaca

SEQ ID NO: 383517 - DNA, 229 bp, Zea mays
  unsure (1)..(229): unsure at all n locations
tgtncagtttgcttttttacacgaaaagcaaactgaatctaaaagggaagtaaagaagcgtaccactattctgcacagggttttgatagcagagacagtctgtctccttttaagttttaacagcaaattacaaggattggaggtagagctaggaagtgttaactaactccattccccatctcatcggttttggagctcttgtgctgacgtaagttgaccatccatgtta

SEQ ID NO: 383518 - DNA, 280 bp, Zea mays
  unsure (1)..(280): unsure at all n locations
ttggccatgagcaactgctagaatggggtcttcgacgcgacctctgacttctggtgttgttgcttggctaggtgcagtggtgggtgccgggctctagtgaccactgctagagaggagtatcagagccggaaacagcgccagggggtgaggtcgcgctcaggggcggagcangtgctcagcatgcccgggctcgtgctcgggctctggtgggcatcgacttcggcgagaggaggaagagcggcagggcacacacgtgacagcgaagagcacgcgaaaccga

SEQ ID NO: 383519 - DNA, 284 bp, Zea mays
gtcatgggggacaaggtcgggataccatttaaagttcttgttaaaagagcgaacaatgtgacagtgacattaactgtgataccggaggaggcagatgccagcagatagacctaaactatctgctgggaagctgatctaaagccaaaggggaggattttccatggaaactccaatttttctcaagatataatacaagatgccgtggacacctgtagacaaaattttatgttgagttctgtatgtggccaaaggatggttgacaggaccacccgtaaaaggggacg

SEQ ID NO: 383520 - DNA, 262 bp, Zea mays
gttttctctttgatgagtatagcgaaaatgatcaagttgatacatgtataaaatcaaatgtatcagtttacccagaaacatccactagtcagtacaacttagtctcacgctaccagctggtgcaccaggcgccatggcttcgaaacaaagaatgggctacagtgcacaaccctcgggcgcagagatgtttctgggtaaactgatacatttgattgcacacatgtattgatttgtttcttttctctttgatgagtatagcgaa

SEQ ID NO: 383521 - DNA, 304 bp, Zea mays
tggatgatatgtctgaagatgaactggtagtgcttggtggaaaaattgatgattcagcggacaatgtcaatattgatgaatctgaggacaatggaagtaaaaaaggagtcaagagaaggcgcaagagggtgcagatgaaggctacagctgaaaggagatctgaattctaatactctttgttagaatataggggaaacatgaattatttagtgctatttgtaaactaattagaattgccttcacagaatttggaagaattggatggagacaagtagacaactacaagacaagctaagctaaggag

SEQ ID NO: 383522 - DNA, 299 bp, Zea mays
ggaagcactaagaaatcgacacctgttctgtgcaatgcactgtccccgatcgaacagaagcaacaagcagctcaagaagggaaaaggcagcaacaggcaaagagggtaaaaaaagtgtctgatgaatctagccatgcactggaaatatcccaagcaaatttcgaaccggagaatgaacctcataatgttgacgtgaacatggagcaaccgacagttatgagtagcgccaaggggcaaaagggagctcaaaggagaaacaagaccaaaaaattgaatcaaagaaaatccttggagatgtt

SEQ ID NO: 383523 - DNA, 252 bp, Zea mays
gagagagcatgcaagaacctgactgcaggttctgagcctgttcacatatgggatttctctgggcgaacaacatacatagttatgactgaactgaaccggtcgccccatgactcaaaatctgcagatcaggaggtatcttcttctccatcaagtcttccatctcatctcatacctttacagttttgctgggattgtattgttactggtagctacttttgaacttattgttgcataacatgccaatgatgattt

SEQ ID NO: 383524 - DNA, 286 bp, Zea mays
gttgtgtctgagagcagtaaaacacctaagaggccagcatttctattattgcacaagcaatcaaacatactgtgtaaaaatagaaatgctgtgtctgaaagcagtaaaacacctaagagaccagcctggctcaaccacattccgatcactgcctttgttagtgttaggatgtcagcacttctgcgcattggtgatactcatgtgctgtgtttaggttatgttcttgtgttctttttctgaatgatgaggataattaagtgattaataagggcagaccagtgctgga

SEQ ID NO: 383525 - DNA, 282 bp, Zea mays
gtcctcaacaggtcgggaaggtttccctgctccgctccggcgaacgcgcacctccccttctctctcgtgaagctgacgcctcctcgtctccctcccgaatccgtcgccgcccattgcctcgcactcccttggactagatccgtcgccacccagtgatttcgctgagcaagggcactccatcgcacttgcgcgctcgatgaagcaccagagcttcctcatacacagtcgcgtcctcttcttcacgcaagcactggatcttcctcctcttcttcgcacaaggca

SEQ ID NO: 383526 - DNA, 183 bp, Zea mays
gaaggttacatcacgacatgagacttagttgtaaagaaacatgttgtgatgtaaccttcatcatgtatatacttatagaagcaggcacagctgagtattaataagcgttggatgaaggttagcatatcaacatgtttcttcacaactaagtctcatgtcgtgagatattcattgctcttcgtt

SEQ ID NO: 383527 - DNA, 285 bp, Zea mays
  unsure (1)..(285): unsure at all n locations
gcagaaacgagagggcaggagcagcgggggtcccggcgatcccgccgccggtcgccctcacagtcctcgtcactgccgccgtttctctttccangcatcatggtctcccgtggnggtnacgngggtggtggtcaaagttctctgggttanctcgttggaagcggtgagacccccaaaccagcagtggcaccaccagctgtaagtgctccacctgctgcgtgcggtgntnnactgctgagaaaccactgctgcaagcctgatggcaccatcagttgctgtggggtt

SEQ ID NO: 383528 - DNA, 291 bp, Zea mays
agcatcgcagtgcgctccctcctggccgcctctcgagcgagtggcgacgacggcgccttcgctgcgcctcagtactcttaggcggcgcccctacccctcgaagccttccgccccacctagctcccgtgctcgccagcgtccactgaccagcaggctcccagcccccagctcccaagcagccgcagtgcccctgcaggccgcggcctagcccttgcctgtttgcgaactgctgctgcacagtgagccagacagcaagctttgtttccttccattcacttcgttgtagtgtgg

SEQ ID NO: 383529 - DNA, 266 bp, Zea mays
gttgaattcatctctgccctagcaccagccatggcgaacgcagcttcttctctgtatcctactcgccgcctccgcgccgctaatcgtcgccacggccaagaaatccggggacgtgtcggagctccagatcggcgtcaaggttcttatattgatgctatgcctgggtatttgaaatgcagtacaagccggaatcatgcagcattcaagctcacaaaggtgacaaggttaaagttcactaccgtggaaaacttactgagtggacggtt

SEQ ID NO: 383530 - DNA, 284 bp, Zea mays
ggaacagcagttcgtccaaaaggtgcaagagatgcttgcagaggaagagaagaagcgtattcatattgcgcaaggattgccatggactaccgatgaacccgagtgcttgataaagcctgcagtcaaagaaagaactgagccgatagaccttgttttgcatagcgatgtgcgtgctcttgaacgtgcagaatttgatcagcacgttttggataggaacaagtttgctgagcaacaaagattagaatgggaaaggcaacaggaattagacgaagaagaaaggataa

SEQ ID NO: 383531 - DNA, 279 bp, Zea mays
cacacaccatcgtcctctccttttgccagcaccgcgaacccgccaccagccttctcccacccacgatatacggaaggctgccggaacgagctctcacctcacatccatctctgtcccgctcgtcatcctcctcctcctcccctcctcaactgctatcggatttgcgctgcagttgacatcgacccgggctgggaatttctctcgttcgtaaggacacctagtttggtcggatgggattttcatcttcgacgaagcccgcggtattgatcgaccttagct

SEQ ID NO: 383532 - DNA, 282 bp, Zea mays
caaagctttcgttcggcagccgccgagcccgagatccctgcaccgctgcacgcccgcccgccggaatggagttcgccttattagagaccgaatacttctcggcttcctaccccacgctcatcatggtttgaagccctaacgctgcgacctaccactgattattgccgcctggactcgagtttttagtagttttaaccgatgccctacgattacatttggtatccgaatcacccggctgcagcaagcgctgacgatctggcacgtggtgcagctcgccgtaga

SEQ ID NO: 383533 - DNA, 279 bp, Zea mays
  unsure (1)..(279): unsure at all n locations
ccaaaggggaaaccagtgccatcacgaaggagaatccatgcaataatgaaaagaaagctgcagggtcaagcctttcaaacggtggaccagttctggctaatggatgccctcctgttaatgttcctgctaacaatggtttatttgagaatgtgaagacagaggctgttgtcccaccagttatacctgtcaaaatcatcagcaatccaacaccgcaaatgacgttggagacgcataaggatggcaccaaacccactgaaagcagaaagttanataaggaaa

SEQ ID NO: 383534 - DNA, 267 bp, Zea mays
aatagtcatgtgcaccgatttatattaaagagtacatttacaaaagtatataatgtgataagagtttatttgtattttaacaaaacaattatttatagttaatttttttcaagtttgacttaaaccttgtacaaaatgacttataatttagacaagaggagattacaaaaatacttcttctattccatgttaagagagatttcattactatgatttaattaaggaaaaacaagtaccctttcgtatataagaagaaatcgagtgact

SEQ ID NO: 383535 - DNA, 269 bp, Zea mays
cagaatctgagtcaccgtcactcaggcaatcaggatttggagaaatcagcagaccagaattgtctaaataaagatgtggagatcgaggaacgagaattgattgaagaggaccataataatatcatttataaaagcaagcttaagcaggaaaatgttgtactgaaatcagttattgaaacaagttcagcagagcagttacaggtgaataatgcaacgtcgaaggatgctacctgcaaccacagagctacgagagaatctgatgagaacac

SEQ ID NO: 383536 - DNA, 270 bp, Zea mays
gtggagcgcggcggcgacgtggcgctcatcgacgacctgttcgacgaggtggtggagggcaggaagaagctgctggacctctgcagcggcggcaaatgatcgaaggagagactgactaacgcgcacgcgatgagctgcttcgccgttcgcgatgtgcaatggcgatagatagggccagccatgtgtggctctttacgtactgcttgtgttcttccttcctcctcgaatgtgtggctctcgatcgatatttgccgtggcaggcagtgctcg

SEQ ID NO: 383537 - DNA, 272 bp, Zea mays
actatctttagagatcgtggagcagctgtatcaaacaatgtcatctcactgtcacaaccatggcgatgaatgttagctttctcagttttggtcgaccctgatctgaacttcatttcctggttcttctatttgcttgacaaatactagtatggtagggtccattaagtatgacttgaaattttgaatacttaaaaagattgcctggtgtttatgtgtaattttcatgcttaatgtctatagtggtgatcctttcttgccatctgacagttgcg

SEQ ID NO: 383538 - DNA, 269 bp, Zea mays
gtccgccgcggcgcgcttttaccacggccaccaccgccagatcctgccgccaccgtccattcactcttcgcctacctatccgacccggccgccctccaccacctacccgccccgctccttgccttctcccaactccgccacctgctgccgcccgccgccgccacccaactcctccttcgccccatcgcctcgctcctccaactccaccgctccgacctccgcatatgcctccagcttcacgggctctccctgtccctcggcctctcctg

SEQ ID NO: 383539 - DNA, 307 bp, Zea mays
tattgggacactggtttgttcgatagagagttgatcttgaactaagtggagttccttttcatctttaagttcctcaatttcaaatatgactttctatcgaacaaaccagggcttccaaatttgagaatgagatttcagatattcaacaacgactacagaagatggataccctagaaaaggagattgcatcacttcgctatgaactggacagcactgtatccgaagaagaatcttcaagtggcaacgagttgcaccgcagtcggggcttttggaggtggaatgggtgaactcctcgagactcaaggag

SEQ ID NO: 383540 - DNA, 297 bp, Zea mays
gatcaacatgtcgcgttaggatatcttttatctttgaaagtataatgtgttacctaactacaaggtgatcttcgtctctattagctttatgataaaaaactaatgttataattagagtcaaatgttatcattaaatgcatatagataggactgtacttgtgttggactctaggcttaacctatgtatatatatgctagcattaggatctcatattataataagtattattttaggatgaccatctgattggtgtggctacgtcgagcgcccgctacatgactgcaacattctagtgg

SEQ ID NO: 383541 - DNA, 279 bp, Zea mays
cactcttagatctacattgcacactagaggaatttgctatggctgtctacttgttcatatatcaagtttgaacttccaatgctgctgtattctttaaccatggttggcttgatcttttaaagtctgtggctacttgttataaactaaggtgtttttttaacaacggtctttcatttcataatgtgattgatttactgtttttggcaggaaagagaatatgctctgaggtccttcaagagtgggcaaactcctattttagttgcaactgatgtggcagct

SEQ ID NO: 383542 - DNA, 184 bp, Zea mays
acgcgattgacgcagaagaaatcagtcgccgtagcagtgccgcctccgccgccgtggggaggtagcgtctaggcccattccgccgcctccatctccggccagcaatggcttcggcggtggagcggcggagggaggagcacgcgcggacatctcgttctccagcactgggcagggagcggattgt

SEQ ID NO: 383543 - DNA, 288 bp, Zea mays
atttaataggctcacccaaaggtatcaaagtttcgcaacaggtaattccctcttttttatagtttagaagggctatatgaaggtgcgtgtgtataattctgcattttgcttatttttgtgatgagctagctatttatattttgtcctgctgttcaacaacatatcaaaccaatagcactgtgatgagctagttgtttgtttttgtcctgctaatcaacaacataccaaaccaatagcattttgttcttaatttcttgattagtagttctcacaatagagtatacttct

SEQ ID NO: 383544 - DNA, 283 bp, Zea mays
agccaacgcacacccagcgatcctcgtcgtgcgtcctcctcccccacggagggaaggatggcttggtccgaggacatggcggaaccgacgagatggagagcaggggtgtgcagagctcggctagcccgtgtcgccgccacaagcgggagattggagacgacgacgacgacacggaggaggagggctagcccgtcccaccgccacaagcgagagatcggagatggcgaggacgcggaggcctcggcgtcgttgtcggcgtccgccgcagtcctccccgcggccg

SEQ ID NO: 383545 - DNA, 278 bp, Zea mays
ggcttgtaaaattagcaagctgatgtagaggctaaaaacacttatggagtatgataaaagcttagagtcctcagagcacaggtcagagacagcgttttgggtgacagtcgacattggctcttaaagactcgctagcgcggttatttttcttgttctctcatcactgggtaagatctgtactcagctgtcgaagtcaattagccattgagcacgcccattaacaggtgaactcagagtggaaatccatctggatgtgattatcatgcatatttcaagat

SEQ ID NO: 383546 - DNA, 272 bp, Zea mays
ccgacgacgacctcctcgcccacgcccaggcccaggccctgaagccgcagcagtaacgccccgcccaagctcggccgcccccgccccggccccgccgacgaccactccccaacgggagggaagaagttcctgagctacttccggtgttgtatcaaggcctgaagaggtgctgctctagtgcctgcagtccctgtgtttttttttcgcagcagaacacttgtgagcaatcaggcatcggttttgttaagtactccctccgtttctttttattt

SEQ ID NO: 383547 - DNA, 272 bp, Zea mays
agcccacggccaagttgaacgcacaaaaccctaataccctatcccttgcccggttgcccctgcccagctgctgcctgctaagccgcagccgcctgcgccctctcggacggtcggaactcggtcgacgacgagacgacggtccctctcgcggttgtctcctaggcgcgtctatcactagcaacttgccagctgcccagctgtgtctccagttccacttccacgcggctcctggcttgcaagcactggcagtagcaggtgcagcactgcagtgc

SEQ ID NO: 383548 - DNA, 259 bp, Zea mays
tacttctcatgcttcgtccgccagctcatgacctactgattccggaagtgggtgccggacgggttgtgactctgggacgagaagttccgtcgaggcgggcaatgcgtcctgtccggcatccgtctctgcgagtcaacgacgccgcagccgtccgagtacggcggcggcatcgtcgtgaacagctagtgccctccgccgttgccctgtcctcctcccgcgtcggtcatgatgtcttgcggtgtctttggtgctttcgctg

SEQ ID NO: 383549 - DNA, 264 bp, Zea mays
gaggagagtctatggctagaataacctcttgtgctataatttattacctaaggatatgagtctttagctaatgcactaatgtgtattgggtcgatcccagatttctcaaatacgaaataatacgggtttaacccggaaaaaaatgagatcccataaaaatagacagaatggatcttctcccctttccatgctatttccaaatttttccacaaattcgaaaatagacgggtcaattgtggaaaacgttatgggtcatacaaagaa

SEQ ID NO: 383550 - DNA, 267 bp, Zea mays
ggccaaggagggatgtctccgatgctgcagagccaggtgcagcgaatgatgatatcgacgacgatggcgctggcacccctccatcaaacaatgtgaaaaaacagaagacaacattgtcaggagaagctgccaacgatgagggaaatcatccgactcagaatccggcttctggtggcctggaaggtgattctgatctcaatgctgttccgtcttcaaaattttttgaagaaccatgtggagatgcctacattgatgcaagaccagatg

SEQ ID NO: 383551 - DNA, 262 bp, Zea mays
ctataacaccacaactcatgcatttgcgctgccattaatctttcatttctttggcaggcaattttcttttactgggtcacatcaaactttttctcacttgtttacggtgctggtatgtcactttccagactttatcttcggttcatggtctctgtctatcttatgatctatgttccttaattgattaaaaaaatcatctttctcagttctccggaatccggctgtaagactcttcttaaatcttcctcgcttggaatctcag

SEQ ID NO: 383552 - DNA, 280 bp, Zea mays
atatattgctactcgaccaaagttttgtaagaaacaatacatgatttaggggatgggatgtaggatattttgagaagtacttacaaaagatttatctgtaagcttgacctcaggggtacggttttagctccctagactctttaacagcttttgctctaaaactatgtaaagtgtttcttagtgatgaaaaagtaaagatcttgctaacattaatacatggagcatttcacctgttagatatgaaattcttatgtggacttatttccaactaactttttcg

SEQ ID NO: 383553 - DNA, 287 bp, Zea mays
gcacagcgcagccaagctcgatcaccacaccaaccagactcagaacatccagaactcagagcttctacttctagaacagaagaacatcgagatcagtcctcccctgcatcctccaccggcctcacctagatgagcacctcgtacaccgaggcgcagttcggctccttgttagacctgcccgccggccccaggttcgccttcaattgaactctgacggcgggagcaaggaaaagcagctcgctttctcggcggaatcagagaagacgacgccacgaggctcagcaatc

SEQ ID NO: 383554 - DNA, 272 bp, Zea mays
taggccgtcgcgacctcctatctgtgtctagtctagtcgtgccggggggcccgttgaagagcctttggcgggttcctggccgatactcgctcgtgtgtagcattgtctgcactcggccgctctcgtccccgctcgctgcctgcctccgccatgcttgcgctcatctcctgactgctggattggttccgctcgctcttctggaaggatcatattgaacttacgctagtggggcttcagtactctggctataccactttcgtcgatgtcatcgc

SEQ ID NO: 383555 - DNA, 288 bp, Zea mays
ctgatcacctgccttaaagcagtctattttgtctactcgccgagctctctcgctcttcttctagctaccgcatgcgtaccacctgcaagctctgctactcgatcagctaggcagctaggtagctagctccgatccacatatataaaaatcagatcgcacagctactagcggcaaccgacatgtccagcggccggaggtcgtcacgcacgcggcgtgcagggagcagctcgctgtcgtcgtcgacgtcgaggtccatctcggaggaccagatctccgagctcctgtcca

SEQ ID NO: 383556 - DNA, 283 bp, Zea mays
tcgaggaatcggctcgagttttttgttggcatacgatgtgttcttaactcggtcagggacagttagcagcgtatctagactctagagactgtttgtcttgctagaatcgcaaccaaaagtattggtccaagattagtgcaatggtgaacttatttcacccaagcgcacgagttgcagtttttttttttcctggaaccatttgaattctggacagtggaatggtactcccttctttggcttcaaaaaaaaaaaagtaggtatgtatggatgtggtagtagggag

SEQ ID NO: 383557 - DNA, 186 bp, Zea mays
attatacgcgaatgtctttgctgctgtattctaaggcatgtctttattctaatcctgaagatatcgctttgataccaccatgtgtgtggcagaagttcgaaaacatgcgaacatcaactggaagtcttggatatatggaagaagatctctgactagccccgtgacagctatcaagtgcatcagatg

SEQ ID NO: 383558 - DNA, 284 bp, Zea mays
ctacaagaccctctacttcgtccacctgcagaacatatccatcggcggaactcggtttccagctgtctccacgaaaagcggcgggaacatgttcgtcgacacaggcgcctccttcactcgattggaaggcactgttttcgctaaactggtgacggaactagacagaatcatgaaggaaagaaagtacgtcaaggagcaaccgggcagaaacaacggccaaatttgctactcgccgccgtcgaccgctgccgatgagagcagcaaactgccagacatggtactgc

SEQ ID NO: 383559 - DNA, 263 bp, Zea mays
  unsure (1)..(263): unsure at all n locations
aattgatatcctgccaagtattcttcgagaggtccattagaattgcaacgtagagcacggatctcccttgcangtttttccnatgtgtgcangatntgtggattcgatactgatgcttggtacgtagaggacctctgtttccccccgcttcgcggatccacagctcatgcacaccttgggaaaatagagagcagagatccgtgctctccggtggcatgcgagttgatatccggcacagtatgcttcgcgaggtccattcagga

SEQ ID NO: 383560 - DNA, 185 bp, Zea mays
agagcattggttatttccagcgtggacccagagattgatacatgttactcatgcaagatatgtggaggcaccgaagaggatgagaagaggttcttgatatgcggcaacgtcctctgccgatacatgtactaccacattgggtgcctcaagtccatgcagatctctaccagtgtagagaggggcag

SEQ ID NO: 383561 - DNA, 172 bp, Zea mays
gacaaggttgttgctttgtgctttactgttgcaacaccgaagttgtatgatatatatactgtgttactggcctgggagaatcaaagcttttggctgtttattgatgttgtccaggaacctgtgtactgtactgctgtggaaaattgcttatagcagtaggtgcgatggtttt

SEQ ID NO: 383562 - DNA, 253 bp, Zea mays
  unsure (1)..(253): unsure at all n locations
cgaaaaccgaaacagaaaaagacgaacatacgacatcagacaaagaaatgtacgtcggcatgatgcaacacccatgacacttaggttttggtttatacatgacatggacacctgtcaccatactggtttgaaattgggaaggagcgaaacaggaagagaaaagagagtaacgcccgaatttggtgangagaaagaagaaaaaattcaaccctcaaattcagggcgttacagggctggtccaggtgaagcttca

SEQ ID NO: 383563 - DNA, 172 bp, Zea mays
agagagtgggttggccacataatttttaattgttatgcatctgtgcaaatttttcctccaagaattattcatctctttgctatctgtatttttttcaattacagatgaagatgtcgacaagcctacaataaacacacctcaaaaagaaaaattaagttgaagaatctcatga

SEQ ID NO: 383564 - DNA, 292 bp, Zea mays
gataaatggccacttgaaaagactgggtaatggtctgaccccgaggaagaatgggaatggagatctggaggctgcactccagttgaaggctcagatggagcaggcaggcttcaagtcagatgaacccacctaccatttgctgatggcagaactctgctcggctgaacggctgggagatgttacagctttattcgacgagatgatgacacaagagacgacattacataagatcgtccatagcagcatgttgcagttcctctgtagaatcaatgaaggtcagctactgcgcatc

SEQ ID NO: 383565 - DNA, 283 bp, Zea mays
cacattataccacatgctatagtgccctgtcatattttgatgtagcatttgtaatttctggtctcgctgtcacttacaagttcctcaacatcttatcgctccatcactgtgttaacgttgttcattatgcagaaaatggttatgtctttgtcatgcgataaggctgtttgggatgctgtcatgaataatgaggcagttcaagatttcaggagacctttacatgatggaaaagaaagcgatagaaagggaaacactggtggtcctgctgaagtgcttaagtggg

SEQ ID NO: 383566 - DNA, 284 bp, Zea mays
gcattctgcaggaactagcactgattataagtttggtttccagtttgatgatctggaacatgtccgccaagaagatgacagaaggaccttggaggacctttacgcatttccaacccttcttccttgcgcaaaagaaaatgcgctgctgtcagaaattttacctatgcagaaagatagtacactagcatcgagagttttgaagtttattcagaatatgagcatgaaagatccccttcagccagtgggtatcatccaagaatgcctttccaaatgtataaagagac

SEQ ID NO: 383567 - DNA, 229 bp, Zea mays
gactagttctagcctctttgtacagtatggaggtgagggtgtcaggtgtgatgtagatccctcatctgttcattatgtgttcagaaggatgcagggtgtgtgatcttgtgtgacctgaaaatcaggttcctgatactgtgtatttgtaatcttgctgagtttctttggtcatgctagcaccctatgtcacacattgaacataatatcacctgctacagaggatggtaaa

SEQ ID NO: 383568 - DNA, 257 bp, Zea mays
ccaactaatgctgctgctccagcattgaggcgcatctagcgagctgggatagctgctgctactcctatctcctactactcatgggaactgatcgacttgatacatgaacatcttcttgggactggtttcactgccactgctgccatgctgcagaacgaggctggccttgcgcctttaccaatgatagcagcggcgcttcctgctcagcaagttgctgccctggaagcatcatctgttcagcaacagtcggcctctgg

SEQ ID NO: 383569 - DNA, 275 bp, Zea mays
agctaatccatgagagagatgaggaacagagaaggttgccgccgcgtgacagtatcacccaggtcgtcgccagggcccagattaatggtcagtgtgcatcgctggggccgtttgcacatgttagtggccttcccatgcggagacatcaacaggaccgcgacaaattgcttgccggacttggggaaatcaccgacgatcacaccatgccgtggccagccttgtgggtgcctttctcgcagaagagcctgtgactgaggatccttgtgaccagcaga

SEQ ID NO: 383570 - DNA, 272 bp, Zea mays
aacagaaaaccacgcgccctgcaggggttcttgccctcgcctggcttatataaacccagcccctcctgcccccctactacgcagtgcatacatcctcaccacactgcaccatcattgcattagcaagcagtgaagcacaaagcacaaacaaagcaagccgatcgaattaataggtgcagcatagtgctcgatagcttgctcagcagcaagcaagcaagctaggtagccgtgtgaggttggtcgatcgacgagatgaagaagggagcaatggc

SEQ ID NO: 383571 - DNA, 280 bp, Zea mays
gaagggatggccacagcgcgcctgctccgttgcgcctcctccaccttccttttcagcacctgcaccaatccgttgcgctcgtgctcccctctcgtccggccggcaagaaccccggcggcgccaatgaccaacggactcctcgggccgcctcgttcccagaagatccacgatcccagcgcgagggacaccactttttgatgcttatcgtgttgggcacagaaaatgctcctggaattgtggttttgcaagattggtggggagtggactatgagataaagaa

SEQ ID NO: 383572 - DNA, 138 bp, Zea mays
ctctgctcctgctctctctctctctgggcgtcgattggtgaccgcgcggctccccggggcttgttggccctcgcggagcgagcaccacagagacctacatcataaccatagcagtgttgagagctgaagctgtatctg

SEQ ID NO: 383573 - DNA, 195 bp, Zea mays
ctaagctgtgcttcgcagtcacctttctcgtttcctcttcatagggagcaaggtctttgggatatgataataagactcggtatagatatgtgccttgcgaatgtatcataattggattaggcgcacccctcacctgatcaactgtaactgccttataaattcaatcaaattgctatataatgtagatttttcttc

SEQ ID NO: 383574 - DNA, 232 bp, Zea mays
ataacaatagcttggttttccttataaatattcttccccttgtatgattaaagaatagatagttttttttacttgcatacaggttatcagacatagcgaatagagaaacatgcaagaagatacatgtgtccataggacctactgtttagaacattggtcacattggcaaaaagataagctgccttttcatgaaaaaaaaaaaaaaaaaaaggggcgccccccgattagtgac

SEQ ID NO: 383575 - DNA, 293 bp, Zea mays
gcaggctcgccctcagccagtggaactggcagagtcgtctccagatgctggaagcttagtagcaggctcgccgtcagccagcttgcctcgcgctttgacggccgccgccatccccgtcgttccagtgcctagggccacaaggggcacctctctctgtgtaccatatagcaagcaatgtgtctcagtgttcttgaaaggtgctctcgcgttacagtcgtcgtgtgttgccaggcatgcgtgtgtttttcgttgatttgtctattttcttcacgtatagctaggggttgtgggtt

SEQ ID NO: 383576 - DNA, 295 bp, Zea mays
ctttgaaaatggcatgacacatccttgtaaaaagcagtagggactgatcacattcttcccgagtagtatcctcttcagtgctgtggcagttggagcagaagggaaaggcagctatcttcaaaggcacctctgctgatgacgaaggcgtaaagttttcggtgtaattcttttgcgatccttaaactggcagactaataatctcgttcagccggtgcccttgaacatggcatgacacacccatagcctcgatcattcagtgccctttgaaaatggcatgacacatccttgtaaaaag

SEQ ID NO: 383577 - DNA, 255 bp, Zea mays
cgccggaagtgcccaccgctgaggttgtccccgaggacgaggacggtatcaggaggattgggatagtatacaccaggaagaacggcaagcgatccaaggtcagccctctcctgctcccgcaagagccacaggcgccctgtgacctcgcagctgcgattccatgctcctcctcccgggagtttgcttcacgaactggcttcttggatgcccatttctcggccctggtagatggtgtctccactcactctggggttc

SEQ ID NO: 383578 - DNA, 284 bp, Zea mays
ggcatcgctttaaaaagtttttacgataaggtgcttaagcacataatagatgatcagtatgtatttatttggtcagtggtttcctatgcctggcatgagctgagtgaacaagcatgttccgagtaagtcctcattctgtgattatcatgtggatcagaatctagggattttgaattgccatgtcctacaagccttagatgaggtgcctctgccttcttccctgatgtcatctcttaccacccttcctgccattcactctgtgtatccacagagtaaacagtatc

SEQ ID NO: 383579 - DNA, 207 bp, Zea mays
tacatatttacatttctagaacctgttcatctgcaaaacacccaggcacatcctttttgcaagtgcgagactctgagtgaagctctctaagtctcttagaaacttaacatctctgcaaaaatgaagatgtattatagccttggggcagggaagccatctcccaggctttcacttcctcccttcgtcccttcttaggaacagtattgg

SEQ ID NO: 383580 - DNA, 207 bp, Zea mays
atggaccacgaagcctacgccgccgaaccatccatgacgccctcgcatcctcgcagcccccgccgccacccttcctctccatgggcgtcatggaccacgaagcatacgccgccgagccatccatggtatcagaatatgacctcggaggagaaggggaccagttcgaagctccacaagtcatcatccaagaagaagcgctgctcagcc

SEQ ID NO: 383581 - DNA, 261 bp, Zea mays
ctaggtagaaccccacccctcaattcatccgccgccatgccagctccaagccagatctgcgggctccgggcaggggatgcctcatcgtttttttttcgttcgttctaatcggttcttcgcaagtgaagtgagatggcagtgacgactcggtaatattcaagctcaacagaccaaatcacaggtctctctgtatacgagatcgatctgtatgccgattttcccgctgaaccgagccatccaaattccttctttgggcctcgt

SEQ ID NO: 383582 - DNA, 147 bp, Zea mays
tgtacaagcagtagccactagtttttgttttgtttgtttttgctatgtcctaggaggcgcttgtgtcctaataatcctgatccaaagatgctaattgatcatgactaatgagtgcatcctgattgattaataatgttcaaactagtg

SEQ ID NO: 383583 - DNA, 301 bp, Zea mays
catcacaccaacgtaccccaacaagggtgagagacgacgaatcggctgctggtatatacatacaactgagaagtcggattacctttgctgattattaacttgtttccattgctgtgaaatgaaactttcaatgcaagggggctggcctaccagctggtactagcaggaatgaagagcatatatatatgaacatgatgatgcatatatgcagagcagcaacagcagcatcgtcgtaccatctcatatatatcattgcaaacatgagcagtagtggtagttcatgaatcatgatgaaagcaag

SEQ ID NO: 383584 - DNA, 302 bp, Zea mays
cgtggagaagttgcacttcccccaaaccaaacccatttccccgaatttcaaagtgaaaactatcaggcttccagctctagatcatacgctgactgaaacagatctcagttctgaacgccgcgtaaagcaatccgaaattgacgttcaaaccagtactaaagaaatgaataaggaaattaagaaaaccgaagtgagcacacagtgtgataataagcaatctgtggctgaaaaatattttcaattacctaaaacagagaaacgggtgacggtacaaatgcccaaagactatgcagcgaaaagtc

SEQ ID NO: 383585 - DNA, 299 bp, Zea mays
gtgggagtatttttcagagtttattagaagagactgtttcgaggacccaggtcagagaaaggcgagaagctttagcagcggcaatggtctggtccaggtcgtgcccagggccaccttcaagctcctgagcaagctcgtcttcgcgctcttcctcccctgactcatcttcgtccacctcggcaagtcggtcaccatagacaacgtcctgcactggtggttcatccccgtcaacgtgctcatcagcactgccatcgggtgcgcccttgggtacatcgtggccctgatctgccgcccgccgc

SEQ ID NO: 383586 - DNA, 162 bp, Zea mays
agcttgtccaggacaggcatgatttgacaccatccatgctttcagtggcacaccatgtgcagcttgagatccttgttgcaatcaagactggaatacaggcctttctgcaccccagtgttaccattccacacaatcgcttggtggaggtcttcttgtacaaga

SEQ ID NO: 383587 - DNA, 111 bp, Zea mays
  unsure (1)..(111): unsure at all n locations
cgcactnggttctatngaggacaactccggtttgagcacaacnnccaacctcaaagtcnnctctccttcaaaggacttttcactgtccctcatgtttcannagagctgcac

SEQ ID NO: 383588 - DNA, 143 bp, Zea mays
  unsure (1)..(143): unsure at all n locations
gcccaaaccacctctttggccacacacacgcatactgccaccgctactgcttcatcagcagctagcancaagcggtcggtggtgcacgctgcgccgtgcaatcgaacacatatggctcagatnatctccaccatgcccatggc

SEQ ID NO: 383589 - DNA, 153 bp, Zea mays
  unsure (1)..(153): unsure at all n locations
tgggatttttagaaaaatctaacattaaggccaaacatcttgcagaattatcttcgtgtctatatatttcgtgttccgattcttgttttcatgttgcatccanacacccaactagaaactttcccacgctcttanactcctgatgcatgggtt

SEQ ID NO: 383590 - DNA, 310 bp, Zea mays
ctcgagacccaccaccgcaccccgcgctcggcggactcttttgctgctgcacctgccatcgtcacgcaccggtgtgtggagcgaaccagcgagcgagaagtagccacagagcggcctgtgcgtgcgtgcagatcgagagagagacgaacagagagagcgattcatggtaggtgcgatgcgcggcggaccatggagttggaggaccgcctggccacccttcctcgcttccgcggcgatcacgatgacgacggcaaggaaaggaggacagggacggtatggacggcaacggcgcacatcatcacggcggtga

SEQ ID NO: 383591 - DNA, 308 bp, Zea mays
tccaatccagcctccaattgacctcctttctagcccaaggatccaatccaagcacctaattccatcccatccggatgggcgatggcgatgctgcatcggggacggggaggaggtgccccaagcacccgtcggagccgcccttcaccggcttctgctccgcctgcctcctcgacaggctccacgctaccaacctaattggtgtggttgtggcctccccttcccggccgcctcgtccgccttcgcttcccttccaccaggacctggaggaggaggaggagttcctgcctccctgttcccgttccaaaggg

SEQ ID NO: 383592 - DNA, 99 bp, Zea mays
atagcaacgcgcagtaagcagcgtgggcaaagctacgagcgcccggctagcttcgccatgaacatgggtggagtgtcgccgtcgacagtccggtgcaag

SEQ ID NO: 383593 - DNA, 298 bp, Zea mays
ctccggcatcgccgcggtcgcttgggttttcttcttcacgtgcctcccggagacacgcggccggacgctggaggagatgggcaagctgttcggcatgccagacacgggcatggctgaagaagcagaagacgccgcagccaaggagaaggtggtggaactgcctagcagcaagtaggtggctatcccagagcacaggtcaagtgaagtagatggacaagatcattgtcttttcaactaattagatgggcaagaataactaagactgccctatgaggtgtcgtggttcaaccagagatca

SEQ ID NO: 383594 - DNA, 242 bp, Zea mays
atctagctgctgctttaccataatgtttagactttaatgcctagcctgaaaccttgtttgcaatgtgaaattaatgtgagagattatgccaaggcattatggggtacagccaagagttcttcaaagataaataaagaagttcaggagcttttaaggcttacgttaagcaaggcccgagtcaagctgaccgaaaataccatttttaaacgaatcattatggacactaacagcacagatccatt

SEQ ID NO: 383595 - DNA, 254 bp, Zea mays
gctgctcttcatggttcctggggacaacagagactccatccatccttacttagcaatgaccatgatcagtatcaagctgtggttgctgccgcagctgcttcccaatcggatggttatccgaagcagcaattcctacaccttcaacaacctatgcagtccccacaggagcagtgcaatctcaatccgctgttgcagcagcaaatactacagcaagggagccaacagcagatggttagtcctgatgctcaaaatat

SEQ ID NO: 383596 - DNA, 126 bp, Zea mays
ggacctgggtgttccgggatcaatgttgagttccatgtctaggaatgtttggggtaatgggagtctaaactacccgagcaatcctacaaatatgagtgcttttgcttcacctaggaatgggggcca

SEQ ID NO: 383597 - DNA, 269 bp, Zea mays
cggacgcgtgggcggacgcgtgggcggacgcgtgggcggacgcgtgggcggacgcgtgggcggacgcgtgtgtccggaggtgcggtccttgtcgcattccaagatcccttggcatgcctaggtgataacacgacagaccttgttgcttgaacactgcaagctgaagcatagctcactactcagcggaagtaaacaaaacgtgagacgaaaccagtggaggacagggtgtccgctcatcctcgcgtgaggtaggactaggatgtgtgcga

SEQ ID NO: 383598 - DNA, 264 bp, Zea mays
gccgccggcgttcgcggccatccccaagaaccccgctcgcgctccaccgcaagcccaggggcagccgccgagcgagcaggatgcttcgtcccgcgtccattgtggccatcgtcgtcggggacatcgccggcgtcggcctcctcttcatgctgttcatgtacgcgtaccacgtcaggtagaagaggcggcagcgtcgggagcaggacccgacgccgccgctgcacctgcagcagaagagcgcgctaggtttcgacggcggcgtag

SEQ ID NO: 383599 - DNA, 266 bp, Zea mays
ggagttgcatcaaagttgaagcatcttgatttgaatactgaacaggtgcagagaactgagatgcatttatctctgaccacaccagctgttatttcttttgagggaacaagtggtccttcaaatgctcttgtcccatatggtggtgtggtgatggttcccaatgagaggcccttgcagttagtcaaaaagcagcggcctcgtgctaaggttgacttggattttgagacgacgagggtttggaaccttttgatggggaaatcagccga

SEQ ID NO: 383600 - DNA, 180 bp, Zea mays
  unsure (1)..(180): unsure at all n locations
cacgaacacgcgggacacctcggaagcatccggctctcagatctgccgaagaaccctaccacccaacgttctagaacttcgcctctttccccgcatggacggcctcgtggcgccgtcgccatcgcactccggcgctaactccggcggcgnngtgctccacgcaagcgtgagctccgcgtc

SEQ ID NO: 383601 - DNA, 271 bp, Zea mays
cccacgcgtccgcccacgcgtccgcatgatagagctgtacttttcaggggctttactcttgcaaaagcctggaacttactgaagaaagtacaccgtcgagcgcaccaaacgacggcttcgcaaaggctctcctggcccttgacaagaggctgcatggcaaggtatctatggactggcaacacaagcggccagaaatgaaggtgtgtccaatctgcagcaagaatgttggtctaagtacgagttcactcaagctgcacctgcagaaggcaca

SEQ ID NO: 383602 - DNA, 270 bp, Zea mays
ggcttggcaaacccgattggatcttcagaaaaatcgccatcccctctccctcttctcgtgtccatcgctcctctacccattcttacttgaatcttttctgaagaggaaatctgacttcgggagcggctcctccgcgttgcctggatcgcccgggatcaggtggagatggttaaaattgctggtcacttataattaccagcatcttatacgtcattgttgttcatcgccaacttattcaagtttgaaagtagaacactgagaagatggctg

SEQ ID NO: 383603 - DNA, 262 bp, Zea mays
ggacgctgggcggtgccaatcaccatttccatcagttccacccagagccattgcctggtgcgccgctgcacccttcactgcctcgctatcctgatccccatggttcacatgcttggcatgttgaggcaggtgctgtgccacggccagcagagcctccattcccctctaaccatgattaccgtgctgcaccgccacggctgactgcaaattcatcattgtttcctgtcctttctggttcgccaacaacggaaaaatttccatc

SEQ ID NO: 383604 - DNA, 261 bp, Zea mays
aacacttggacccgattcataaaaaacacaacgattatgatggttccaaagaatccaagctccaagaataattaaggaattgacacctttccttcaagactatttccagcggccttaatcatcctatctcctattttaaactctaatctgtaaacagtatagtctacagtgcaaacagtgttttgtatggtcatatgcatgatctgctggtcacatcctaattgctccaaagtagcattatctcattcccaccaataagaa

SEQ ID NO: 383605 - DNA, 257 bp, Zea mays
cgctccccttcgccggctccttgcaggtcagtccgccgccgcagcaggcgcaaccggataggaagggccgcggcggaggcggggtcatggattcaggctccagatccagcggcggggccgggttcgacgacgaagacggcctcaccacgcgccgcgaggtctcctcctcgctccaagatttggcagtaagggtggattggaagggtgggagctgcagcgatggcggtacacatcaggggccaacacaccacggtcaa

SEQ ID NO: 383606 - DNA, 201 bp, Zea mays
gacgagcgctcggcctcggcccggtcgtcgaggcccgcggccgtgcccagccacgacgccaaggagctccacatgttcgtgtggagctcgggcgcctcccccgtctcggacgtcagcggcctgccggccttcaccggtggtggcgcgggtggcgtcaacgtcggcgccaaggaaattcgcatggttgtccccgccgagatg

SEQ ID NO: 383607 - DNA, 202 bp, Zea mays
atgaaaggtgcacttggacaatctggcaacaaaaaacagatccttgtggaacaaagtggaatggacacttcaaggggatcactgcacttagttcgtagcatcagtttggttgcagtttcccaagatcattcgttgcatctcacatgccaagcagatctactgagcagacctgcttcagctggcgaagggagtcaaggcagca

SEQ ID NO: 383608 - DNA, 274 bp, Zea mays
gtccaaagtacgtggaccttcagttggtgtaatcagaagcaatatccaagatattcatcatgcacttctacaaaatgtaatgtaatcctaagtgttcgtccttttattttcttttatttttcttgagtgaatgaaatgttactaaaattattcgttttccagatatttaccatgtgccatattctttttttatatatggcccttggttcacactaatcctctcacataccagttagccatgtgttctgtttgacaaggagaaggaaacaggaac

SEQ ID NO: 383609 - DNA, 266 bp, Zea mays
aggtaaccggctcacgcctgtctcggtggccgtgggcaatcatggccactgtgggacagtctggggccctgaggagggtcaccgtgcactacgccaactcgcccacaggcagcacggtggcagaggtgagctttgacgaccttgacgacgagctgctcctgtttgtgctcgccgatcttcttcctggccaggaaggtttacaccagtcgatcttggaaggaacatacaacaaccaggagaaccacatgagaggtgcagcacccagt

SEQ ID NO: 383610 - DNA, 262 bp, Zea mays
gtttgttctacagttttgcttgcttgtgtcactatgaaatttaaaattctagaggaaccgaagctggggagagcatggaagtttttatcaccaatgtctgaaatagtcgacttgaagaagctctttgctccatcaaccattgcagtgtatatgggctcatcgtgacacaatacggagacctggaagaccccatcagtctcctgcgaaaccgcgaaagcaagcagacgattagctactcaaagcacatataccaattaaccac

SEQ ID NO: 383611 - DNA, 264 bp, Zea mays
ctagttctagatcgcgagctgccgcccttttttttttttttttttttttttttttttttttttttttttttttttttttttttttttttttcccacgttattattatatatatgaacaatgcaaacacctatacatggatcaatagcaggtacaaaattctagtctagaggaaaaatttatacgtatcgatagcaggtacaggcccaatgaaaccaaaacgggtgcacgtcagcagctccaaatttcttgcacggcgtcatccg

SEQ ID NO: 383612 - DNA, 254 bp, Zea mays
acggcccggcccatcaaaatgaatgcactgtactatccggcgaggaccacgtgtacccgccaccgcgccgcgcggctccaccgttcggcggcgctcgggcacggcacgccgtaaaaccctagctcttgcgccccctcctctccaccgcgccggcgagccgtggagacgcggagctaaggatgccgcggaccactgtgctggagagccccggctgcccggcgctccgcgccctcaccaccgacatcctcggcctt

SEQ ID NO: 383613 - DNA, 132 bp, Zea mays
cccacgcgtccggaaacatttgtacttcgtcaaacttttcctgatctaccgtctaacacagatcagtgttagacggtagatcaggaaacatttgtacttcgtcaaacttttgcaaagataatttcttctgtt

SEQ ID NO: 383614 - DNA, 260 bp, Zea mays
caccacagcgcgcaggaggcggtggcggcggggcgtgtacaggagtgcggccaccgcctccaccaccacagcgcgcaggaatccctcgttctcgcagagggtttcaggcgtcgtatgtaagagaagatggcgctctcagtatccatggagggcatcgaggcgcgggcacgggatctcggggtggacctctccgctgtcgatctggactccatcaccctcccggccggcgaggacttcggcatcgtcagtgatgacgagga

SEQ ID NO: 383615 - DNA, 253 bp, Zea mays
ggattcttataagcactggaattataattttggagcaactttgtttaacctaccgttttcctccacattttgtggtataaatattttgaacttcatcgagctcacctttttacatgactcttgtctcgtcttcgacttatcaaaatactatctgtttgaggttttggaaacaatcattacgacaatttttatcatttccatcttgcttagttagtgatgtaaaatgcaagaaacaaaaaaaaagttaggatat

SEQ ID NO: 383616 - DNA, 258 bp, Zea mays
gtccgtccaaacgaactgtgagcgtccgtcctggcttccgtccagcgagcggcacaacttttctacgcacaacacattccaagaaccgatggacaaggcgaccaagcttttgatttatggtgcttcagcacacatgttgttgtccatgatggccatggttattgagtctagaaaaagaaaaagagatagtagaagagtcggtattacttatgggccaatggaggaaagggataggatgagacttgattatcttaacac

SEQ ID NO: 383617 - DNA, 269 bp, Zea mays
aaccatgcaaatcatcttggttcaagatggatggcactaaacttccttctgctaatttggaagaggagttgttccaattgaatatcaaacaaccttctcctccaccagttcttgcagaggtacaaagaccaatttctccatcaagagttgccgatccaacaccaggacttccgacctcaggaactgcccgatttcagaacttgcatgttccgatcaagttgatggagtgttttctaagggttgctgagtcaaacaccaaaagaagctta

SEQ ID NO: 383618 - DNA, 263 bp, Zea mays
caaaacccctaaaccctagcccctcacctctcgcctccgccctcatccgcgcgacttgcagcggttggaggcgaacgttctccatgacgaccctcctcaggcgcgcgtcgctgcggcgcgtcattgccgccgccgccgccgcctcttcttttcaccctgagagctataagcaagggatctgtggctccacatttcattgccgagagttcgcatcaaaagcaaaaaagaagtcaagtggaacagactctggggaggagaacatg

SEQ ID NO: 383619 - DNA, 257 bp, Zea mays
agtgcgacgacgacggtatcgaagacgtgctccgtcgtcacctcctagccaacaagaagtacctgctgattctcgttggcatatcctccaagaccatgctcaactgtgtcagggcaagcctaccggacgacaacaatggaagcagggtagtgctcatattggacatcgagaacgaagaggtagcgtggcatgctaatgccatgaacaagacgacgggcatcagccacggattaatccaccacttgaaccgtctggac

SEQ ID NO: 383620 - DNA, 255 bp, Zea mays
catgcccacgctgctcgtcgcccctctccaccaccaggaatcattcagttcacctaatccagcgcatcgcatctgcaaccttgcgtccagttcctgctttgctcagctgacgcggtctctgcagtagatcaggcctgaggaagcattgctacaggtgatttaaacttcacatcaactgaaccaacaccccaaccaactgaacatgttagcactattgatattgatgctcatgattctcaccttaaccctttcctt

SEQ ID NO: 383621 - DNA, 256 bp, Zea mays
atcagaacacacgtccgcggacgcgtgggcgagctggcggacgcgtggcccacagtatggctgtaggtaatcctgcaaaggtagttgactatacagagaacgaagatccttctttaactatgaaacatgatgcaaggagagattattttgagcatgctgccatcagattgagatgattgatacacctaatgacgagtcttctttctattcgtctgtggaatactgtggagtaaaaaaagttccaaatcgccttatt

SEQ ID NO: 383622 - DNA, 252 bp, Zea mays
ggcgactggcgtgctgcgtgcctgcagggatactccgtctcctccacctccactcctcctccacgatcccgcctcccccacctctcgccggccgacgacgacgacgatccgccggcagcagcccgcgcgccgcagatctcccgttcggttccttggagccgacaagacgagggcagcatgaagcccacggccggcgccacggcaagggcggcgcgtgtatccttctctgccgcggctcaagtgccaggagtg

SEQ ID NO: 383623 - DNA, 282 bp, Zea mays
acctatatgctcaaatctgcagtctatcatatatgggtgatttgagaatgctgtttgcggaagacaaagataaggtgaagaagattgttgagggtagttttcagtcgttccaattgatgtacagccccctcttgcaagagtatattgctgaaggcctattgaagacatcatcccatggacaatataaaactttccggcaggattgcggtccatctacaacaaatgaactgttctctgttcttccgtggacgatccaaagccaaatgcaaggaaggcacacat

SEQ ID NO: 383624 - DNA, 137 bp, Zea mays
caccaccgcgtcgtcgcccaccaccgccgatcgcgagccctagcccgagctatccggcggcatgcaccagatcccgccgcccgcagcgtcccgggtcgcgccccgccgaatccgccgctcctcgcactgcaacacgc

SEQ ID NO: 383625 - DNA, 273 bp, Zea mays
cccacgcgtccgaggaccgtgggtcgacacacgcgtccgctttccctcgcgccgccgccaacgcaacgcttgcagcagcaaacgctatcagcaaccatggctggcgcgcaggagtcccgctctctggtgggcacgatgcgcggccacaacggcgaggtgacggcgatcgtgacaccgatcggaagctcgggggtcattctggtagaataaggagttctagccgtggctgctctcagagctgagaggacgctaccataggaatgggagcaggaa

SEQ ID NO: 383626 - DNA, 270 bp, Zea mays
ctagttctagatcgcgagcggccacccttttttttttttttttttttttttgaatcataaaaatggcccgcatcataggcggagacttggaacaccgagatttgtttttgtttaagtttcagcccaacttgtacatcgaattaataaatgcatcctctgctagagaaacccattttgaatgagttgatgctctgactatagaatccaccattcttccgaagctgcttcctacaaaactcgagatgcaacaattgaaatccttgtggaaag

SEQ ID NO: 383627 - DNA, 271 bp, Zea mays
gagcaagtttcaccggattgattccccaccgcacccgaccacaaatcccaccaagcaaaccctaatccgtcggccatgtcgtcctcccccgcggcgctgcgcttctactgccaccagtgcgaccgcaccgtctccctcgcccctcccgcatccccggacgccgacgtcttctgcccccgctgcggcggcggattcgtcgaggagcttcctcccaaccctagccccgcgcctccggccgccgccttctttggcccgccctccttcgacatcc

SEQ ID NO: 383628 - DNA, 274 bp, Zea mays
tctcgcctggcttgaacgcgaggtcgccgaattccctctgaagccggttggcattcgcctccttgactcgctaagtgcccacacaaacaaaattttatggagtcccatgccttccttgttgccttgcgtgcgagctaggctcgcctacatcttcggcggcaccgcgcggagtagcgccgccagtgtgtccctgtcgtcgcggaagacgttcgtccccggctcagtcgcctccaaaaggcactaagcttggagattgacttgcatcacgagtgac

SEQ ID NO: 383629 - DNA, 266 bp, Zea mays
ccatcgcctgcttcgccctcgctgcgctcttctccgcgccttccctctgggcacgcctcaacgcgccgtacctgtgccgcaaggaggggattcggctccactgccccagggtcagccagccagactctctgtgggagaatcctcatgcagcagcaacttcgtggaagccgtgtgctgagcgtcagagacatgaggtctcagacctcgtgtcagagaatgaaacttctgggtttatatttattcacgctgagggtggattaaaccag

SEQ ID NO: 383630 - DNA, 272 bp, Zea mays
agtgaaacaggtttaaaatctttgattgtgtctattattttttcccttttatccaaagcagaggctgtgattaactgtttaaacatgagctgtaggagggtttgaattcgatccagcccctcaaatgctggcaaagaagaggctccatggtacgcatgaatgttgaatggctatggattggtccaagtgaattagccaaataacaatcgagcatacacgtgcagcccatggcctggtcatatacaatatcttttctgccgaaccccatatat

SEQ ID NO: 383631 - DNA, 267 bp, Zea mays
gcgcctcctcctttctcgtactgcaattcgggactagccgccgccagtctcgatggggaagaggagcggcagacgtaggaaggacaagaacaaggtcattctcccaccggagctgccgccggaaatacacgacgatgaggtggatgtcagcgaggaagacatcgagttctatgccaccgacagcagtaacgttacacccttccgccacttcgacaagaagtccatcgacaggtatgtcgggagggttgccgggcgcgacgagggcga

SEQ ID NO: 383632 - DNA, 261 bp, Zea mays
aataaatatggagcagtatgctgacttactggtatactgtccagaagaagaaagtttccaagagaacacctggcatgaacggcctgtgggatatgcaatgcagaatgattaggggttttatgaggtagaaaaaaacttgatgcagattcgctgaactgaagtcctttcatggtattgaagatgagaagccaacttcaagcatatcagggccacagaagatggcttctggccttataagtattacgttgagctacaagggct

SEQ ID NO: 383633 - DNA, 262 bp, Zea mays
attgttttgcatttttcgaaaaaaaaaaaacaataatgtaatcccgccaagcgtccaagctcccgctcgcccggcggctgcacgccgcagcgtctatccacccagatccgcacgatccccgctaatcgccgcaccccctacctcccatgcaacttctctagctcacccgcatcccggctcggcactgccttctccttgcacttcacttctgtatctagaccacctcatcacaattcgtcgtcagcgtcgcgccgtcgtctca

SEQ ID NO: 383634 - DNA, 261 bp, Zea mays
  unsure (1)..(261): unsure at all n locations
cggaccgtggntgctcagcacctgcagcggctccggatccactcccaacatcagcaacagcagacgcaatttcagcagcagcagcagccgcagccgcagctgctgctgcaggaggcgcatccatttccggtggacctaaagatgagaggattttctctgtcatcacatgctcagaacgcaggtgcatcagacagccatgctgccaagagcgaaccctgagatttagcatgtattcatgtgggttgttagaaataataatgt

SEQ ID NO: 383635 - DNA, 258 bp, Zea mays
acttcctgctgtacatgtaactgtagaaatggaagtttcatctatacccctaatcttagccttggtagtatgttaaccacagttgtcatactaccaaggctaagattaggggtatagatgaaactgtggttaacatttttctaactcatccgcatctgaacagaccaagtaatcctgtgtgctgattgaggacctaaacgagttgtttaagtgcaagtgaactggaactggaaaaaaaaaaaagaaaagagagaaaaa

SEQ ID NO: 383636 - DNA, 265 bp, Zea mays
atcgcgacaaactggagccaaaacacccagaaacttctttctggctgtgccaaagttcctgtatgtactgacggaaagatcattttgacaaagaaggaggacgtgttcattcctgacgatctactactcacggacctgttcagcaagctaacccagcattcatttttcatctggtatcctgcttctatcctcccttccatgtctcgagctagacttaaccacatctatgacaccatcggtgtccaaagaatctccaaagcagcca

SEQ ID NO: 383637 - DNA, 225 bp, Zea mays
aagaatgaacaatcttgtttccttcaaacctgtacatgtgttggctatctaggatctttccccacaaatcttacacttacaacatcactgacaatcaccttacagctgaaatggacaccgtagtttgcaactgtattgtcgtcataggcgcatgtaaccttccttgtgacctttgaagagtttcagatgtcttctgttctgagagttgctccgggtcagctcacg

SEQ ID NO: 383638 - DNA, 269 bp, Zea mays
ccatcgcgccgggccgggcgggcatacctacgtacacactccccggttcccgtccccgtccccgtcccgcattcgattggttccttcgtcttcgtctgccgattatcagaatgcctcgaggacaaggctcttctgtgtcaacccgtgagaatcccaaagttgatcgggcaactgattcaaatgatgacagccgcaagaataggaggggtgcttatttgctactgggattgctgatagtgttccttcatggatcatggtctgtttatcag

SEQ ID NO: 383639 - DNA, 268 bp, Zea mays
ctccagactcttgatgtccggggcacctcggtccgaagcttgccagatgggttctggaggattcagacgctccgtcatgtgctgggcgaccgtctcatcctgcctaaacgtgttggtgacttgaggaatctgcaaacactcaacagcgtgaagcccgactatgtgacccccatgcctgggacgacaagaccttcaaccacatgatccgcctcttgtacttgcacatccggcgcggtgagagtctgggcgtccaggaaatcttctccaa

SEQ ID NO: 383640 - DNA, 278 bp, Zea mays
cccacgcgtccgcccgctttcggattcggatccaccttctcgttcggtcagtccatggcggcggcctcatcggccgcgtccgcgccatcccttttcggtgcaacgcccgcatcctccgctggaacaacccttagcttattcggcgctgctacctccgccgcaagcagccctgggttcttcggcgccacctccactgccgcaagcagccccggcctcttcggtgcgtccgccactggctctgcggcaacctccccgagtctgttcggtggcactcgggc

SEQ ID NO: 383641 - DNA, 265 bp, Zea mays
gcaagagttctggtttcagaagaagatgcttcagctggtcttgtcaatttttcgctggatgaagcagattgccagaaagtagacgcaccagtggatgtagcaggctgcagtgaagtgggcatacctgtcgatgaagcagattgcagtaaagtggacagatcagtgggtgaagagagttccatgttctcttctatggaagaattagaagcatttctgggagctgtcccacataagattgagcaaagtctttgttctgaagatgctg

SEQ ID NO: 383642 - DNA, 253 bp, Zea mays
  unsure (1)..(253): unsure at all n locations
nccacgcgtccgcggacgctgggcgaccgtggcgctcgcgctgctgctctgccttagcggcgcggccgtgggcgcgtgggctcgcccggtatacaccaaggacgctgctgccgcccgtatgaatcgaacccgattccttgcttgtactagctgctactgctgttatgtcgccaaataaagtcgtgtgtgcgtgtgcattcagtactactgctctgctgctactatcctagtcctagtatactagtatattata

SEQ ID NO: 383643 - DNA, 259 bp, Zea mays
tcggaccaagatagttagagccgatattgagtagtcgtaattaatctgtttcccgttcagacttagtaaaaaaaccagaacccgaaattgtgtgttttggtacaacttgtgagctcttttgtgcatggtctatagaattgcgagccatattctttatagcaaatttagataccaagtaatagtaagtaagtttccttaagaaagcatggtctgttgttgctcagaattgggataaaatatggttcgaagatcagctgtc

SEQ ID NO: 383644 - DNA, 264 bp, Zea mays
cgacggcagagagcgagccgccgccgccgccgcaccctcgtgccaggttacacggtgtgaaaatgtcaggaagggctttgaaagatctcaatgtttctcagtcagcagacctggagaacggaaaagacaattctgtgaaatcctgcatcaccaagcctgtgttgaatggcaacaaatgtgccaacaaggaagaaaaggctccgtctgcttgccacgacgctgtgactaatggaaatgcggctgccattgcagatgtggagtaca

SEQ ID NO: 383645 - DNA, 277 bp, Zea mays
cccacacgtccgcccacgcgtccgcccaggtcttggaggtgctactcagaagccttaagcactaggctagaagccctttcgctgaaggccaactgaatacaacagtgaaaattagaaatgacgggcaaaggagcagttgactagcgagtgatttattgtttcggtgcctgatcacaaaggggacaacgagtaggatgaggaaagcttctcttctcgtggcaaaggagcaactgaccagcaaccgaacctctcaatttagtggtgcctcataatggtt

SEQ ID NO: 383646 - DNA, 275 bp, Zea mays
ggagtctaagaagacatacaaaccacagtcccaataaggtgatgttgactggatgaagacctaccaaaaaacagctaggtatgagcctacgaccagcaatgaaaacaagaatcatgggcctttggcccctgccatacaccacgtcgttgctcatctctaatgtcctgcatgatgatgctgaaattaggtgaagcaccctcatatatacagccgctcctatgcttctaccatccaatgcccaccaaagaattaaaccactgtttgcttattttcct

SEQ ID NO: 383647 - DNA, 267 bp, Zea mays
atatgctggacattctcctcctcttggtcacaaacacacattattgagggtgtgggagaccttttttttgctagccggtcagccatccagcacctatttctaattgctagccaggatgattttgcactttgctggagcacaggttttccaaatccgcctccatgcctcaaaggtcacagatccttggaagattttgcacttagcagttcacattttgtttcaactattttgaacaggtgaagtagcaaagttattttcagacgcggg

SEQ ID NO: 383648 - DNA, 263 bp, Zea mays
cacgatgccgtgagcacctgcagcccgcagatgcagtgccgctgcctgccttcgtccgatctatcgatcccaggcggccagaccctaggtgctgaccgatccgccgctggccgctgcgctcctgcgcgattgcacctgctcgctagcagccgctgatctgcctcctatccagcctccacccgccaggccgccagcacggtcgcgctgcccaccccggtacgccaatcctcatctctatgcggcgcccaagaaaactctgcaca

SEQ ID NO: 383649 - DNA, 289 bp, Zea mays
gttctgctcggatcagtgtggacacaactttgtggttgatggtatcgcacgttgtcttgtaaccatgcccagcctccacaaacgtaagatgatgcccctctccatcttcatccccagcactgatgtcgaaggcggtggcagcctcttccttgtggataggtcacccggcatcactgctacaagggtggaatttgagtccttagtgtaccgcaatgcaagcttcagcaacacctactcctggcaggctcaactcctcccaccagcaccgtaccccctttaacactcctac

SEQ ID NO: 383650 - DNA, 273 bp, Zea mays
cacagagagaaggcgcgtggggcggccggatggcgatgcacttcggcgagatcacgacggccttcccaggcggcggcggcattgccggggcgtccacggccaggacaacgccggcggcgagcccgtaccaggcggctgttgaaattgaagagcaaatttattccccagcatttggcaacattgaggtccaggatagtcgtggttgctgcagtggtttcacaggcagtgtaacgaagttgctgttcatctttcatctgcttgctttcattgccc

SEQ ID NO: 383651 - DNA, 109 bp, Zea mays
gctgaactagtttgtctgtccgcatccagtggaagtttggtgccctttagcaatcgtattccatggctaaagggcaccaaacttccactggagcgacagcaaatagttc

SEQ ID NO: 383652 - DNA, 253 bp, Zea mays
gtcttagtctcttattaggtctaggctctagctagcggcgcgactccttcgtgtagccatcagccttctcatcgccaccaatggccactgctgaggtccagaccccgaccgtcgtggcggccgaggaatctcccgtggtgtgatagcccgctgccggccttcatgggctaatagtctgcccccgcggaggccgatgccgaggccgaggctgctgctcctgctgatcccgattagcttcccgctgccgatctgc

SEQ ID NO: 383653 - DNA, 284 bp, Zea mays
caagcaggtgcattgtcgccactcctacaagcactgcatatcgcctctgatcaggacctccatgattctgtactgcgtgctatacacgcacttacatcagcccctgctgccaccagaatcctttgttcatcgccactgttctttgcacgacttacagacctcatatgcagctctggtagcttcctgttgcaacaaatggctgctgatatgattgctgatcttgcacctactgtgagcgatgacacaaagaggtgcatggcaccatgcattggtacactgattaa

SEQ ID NO: 383654 - DNA, 126 bp, Zea mays
ggacggtgggccgcacccgaccacaaatcccaccaagcaaaccctaatccgtcggccatgtcgtcctaccccgcggcgctgcgcttctactgccaccagtgcgaccgcaccgtctccctcgcccct

SEQ ID NO: 383655 - DNA, 276 bp, Zea mays
cctaacactgccccgtcacgccgccgcacaccaccggctgcactctccttcctcctcccaagttgcaagagccggattgccaggtgcttgtttcgtttcgggctgtgtcagtattcaaaaatgggtgatccaagtgagaggaatggacacggcgctcttacccgggtgctattctgtggtccatattggcctgcttctactaactacaccagggagtatttgcaggactatccattcattcaggttgatgaagtaggtcttgagcaggtacctgat

SEQ ID NO: 383656 - DNA, 275 bp, Zea mays
cggacggtggggcaaagttcaccgtcacaattgtacgtggtcagtcattgttgtgcttagattagtagtgatcttgattgatagctaccggcatatagaagattatattattataaggtgcatatatcgctcttgcttttgcattggtcggtctctgtttttcgcgtcgatccgggttggcgtcgtggcgacggtggaaaggattgaaggttggggtgatggagggaacagtttgagattgagcttggattgattgttgactgggttgtgaataa

SEQ ID NO: 383657 - DNA, 284 bp, Zea mays
ggtatttgatggcaagacaggctttaatgtgggaaggtctcctgctcacaattatgcttcaactagcacgggagcattcactgatgagaggacaataggtgtttcaggtcttggagagggttctcccaagagtgagagatcagcagacatgttttgtgatgacattttcggagaatcacccaccggaattaaaaaattgggaaaggatgatggtttgcatattgagagaaatgctcttcatgacaactgggatgatgcagatgggtactacacttatcggttcg

SEQ ID NO: 383658 - DNA, 283 bp, Zea mays
ccaattgcttctgatcctgtccactccattaccaagaatagcactccatgtatcttggagtagagggaggaggagggagctcagccagtcatctatggattggtgccccaaacaacaagaccggccgagagggaagagcggaggccggaggggtcagctcttgcacttgtcaggggaggctagtctaggctaggggatctctgattgcctcctatcctctcctagccctgccctgccgcagcgcaacgactccgaaatctgaatcgccgcctccctccgccat

SEQ ID NO: 383659 - DNA, 279 bp, Zea mays
ggcggagaagaagcgaggcgccggcactcgcaaggatgaggtggtgacacgcgatcaacggctgagcccgctgcccccaccacacaaccgatatgctctccatggaaggtcagggacctgctcgcccatgatctccatggaaggtggtctactgtcgacggcctctccctcgtgctccttcgtcaaccccgtccgccgcgccgccgagccccgagatcgcgccgatccgccattctcgcgccctcgccccgacacgcgctcaccaccggccctcaccaa

SEQ ID NO: 383660 - DNA, 272 bp, Zea mays
cccacgcgtccgcggacgcgtgggtggcgcctaattttgctggtcgtgtgtgccggatatcgcgatgtcagcagattggcatggtgcagagtcaaaaacaaaatgttgtcgagaagggagaaggccacaaacttcaaaccagactatgatattgatatccatatgaaggtcttagctatgagtgggcaagaatccagtattcttacaggctacaaattgaagtgctgatacggtggtaggaaatgagatgatgatgggtatttttggtgctt

SEQ ID NO: 383661 - DNA, 245 bp, Zea mays
ggcaaccaaaggatagagaaggctgtagcttagtggtagaagtttagaacatttgatatgttgtagcagagcccagtcagtgtagtgaggatatgtactgtgtacaggtacaacacctggcgatttattgggaccggattcccttgttgcgataggatcccacctgggctctcagcctcagccttggatgaggaacccaatgcttgtgttcaaacagtgcttctcagggattcaaacccactaga

SEQ ID NO: 383662 - DNA, 243 bp, Zea mays
aagtggaacaattgcaagcattgatttattgacaggtgcccatatttctatatatctctcttattctgtagaacctaaaatgtcgtggaccttaataatgacgaaattttagcaattcacattttctggttgtgtttataccattcacatttttttcccaacaaatacatatatttattgcaggaatgctcaacccagattccagttcattgttatgaaccgcagatatacagataatctagt

SEQ ID NO: 383663 - DNA, 240 bp, Zea mays
cccttggcgtcctgctcctccatgggatgggcccctccctgcacctcccctccaggcctatggcactcgtgctctctctccactgaatctcactccctcacggtagcagcaacaagcaattttttcctccctctgctgtccatggcgagaacctcctctacccttcttcttccatggatggcgctcagcagaagctccatggccagcgccccttccctgctcgacccctttcccactgct

SEQ ID NO: 383664 - DNA, 237 bp, Zea mays
  unsure (1)..(237): unsure at all n locations
ggacgctggncgagacgcgtggggccgcggatttgatgaggatggggacgagggcggtaaggaggatgaacacgaggaaacagtgggggagaagaagatgcggatagcgaaggagtggctgaagaaggtcactgaagtcgctaagagggggcaggaggatgacgatgaggatgagaacgtgtcgggagggagacgggtggcggagatcctgcagagaaagcagctcgaggagagcgg

SEQ ID NO: 383665 - DNA, 230 bp, Zea mays
cgcacaagaacccaaccactccgcgtcgtcgtctgctgccaatggaggaggagcgctgcttcaacaactgggatctggacgccgtcgtgcgcttgggctgccggcgcctcctctccccgtcgccgcagcccgacccgttctcttcgtttctcccgccgccgccgcagaaggagaagcccgttgcgccagcggcgggctaaagagccagagccacatagcgcgtggcgctt

SEQ ID NO: 383666 - DNA, 219 bp, Zea mays
cggacgcgtggcggacgcgtgggcggacgcggtgggtttttttcaatatacatttatcttaaaaacaggcaccactcaacaataaactcagaccaagatgtttataatagactcagctccgaacaacgtttctgtaatagactagaagggataaactggcatcccagcacaaacttgacggttgaaatctttgaacatcatcgccatcatcaagagact

SEQ ID NO: 383667 - DNA, 247 bp, Zea mays
ctgcatgcaattatgtatgtttttctcagaaattgtagttggaacccatctaaatgtgtataaatataaccattaccatttcctctacctacagcaggatggaaatactgtccttacaccatcgttttctttcataataaatactgtccttataccatcaattcctttcataagtctttgggcatgttgctattaactaatccttctctgtctaacataccttttcctacttgatgagatcttgata

SEQ ID NO: 383668 - DNA, 287 bp, Zea mays
agcagcagctgataactggatactcacatatcccccaactggtattcgtccattaactagattgtctgctgctaatttggcacttcagcctaagctctctagcagcggacaccgtttcaattcaatggttcaggatttctttgaggacgttgcaccactacttagcttgcaattaggtggttcaacaatggatgggatcacacaaattttcaattcatatgtaaacttgcttataaatgctttacctggttccatggatgatgaagctaacttagatggtttaggta

SEQ ID NO: 383669 - DNA, 282 bp, Zea mays
gttttcctccttaaattcgtaaaactcattgtataactgaataatagatcaatgggataaggccgtggtcatttttcttgacatgctatagctgattatttaggtggcatttgaggttctgtggagcttcaatcgtgtgatggattttaggaaaaaaactatttctaggaatgttaccatgagttcttggggtgaattggaaggctagttgtggcattttatttatgttcttttaattggtttaagctgcctaacctaaatgggtgttgtgtcatgttgcag

SEQ ID NO: 383670 - DNA, 229 bp, Zea mays
gtcttgttgcacttgaagcttcctccgcggcctcccgtcgagcaaccatggcggcggcggtaaccctcctccgccttcctctcgccctgctctcctaccacctccgctccgtaccttcctctcgtctcccgtccccgcgcctccgtatctttgcctcccatcgccttttctcctccctggaccatggctccgcctctgcttccgcctccgcggccgttgtcgaggttgt

SEQ ID NO: 383671 - DNA, 280 bp, Zea mays
attgtttcttccttcacaaggactattatgcagtttgttctgtcaaattcattgcgcggaagcaatggttcatttgcgccacagaagccgaaggtctcgtacatgtatacagttatgaaacccaagaaatgcaaaacgtcatcagtttcagaattgatgacgagcattattattatttgcgccacagaaatgcaaaaggtcccatcatatcgctggccgttcatctatcccagccctatgtcatgtcgtgttggcactaccacaaagaggtaatgaagct

SEQ ID NO: 383672 - DNA, 280 bp, Zea mays
gagatgtcaagttcttcacagagacagaggaaaacaaccagatgcgaggcccaaggactgcagtcccatatttcctctgacttcaattgtacattttagaagtcaacatttaaatctgtaagggctaaagatcagtcagatgtgtttattattgtaggttcagatcatagtgcaatcttatgcatttgatttctctttttcttttaaccactgaacgaatacaggctaatgaccctccggatggtctattgtacatgtggttaaaagagagagagaaatc

SEQ ID NO: 383673 - DNA, 273 bp, Zea mays
ccgacacggaggccgtcctggagcaagcctcggcgggagccgagacgctgctcctggccaggtgcgtctccgagctcaagcgcaagggcctccgcttcgacctgctcaaggaggtggacgcgctgcgcagggccacgaacctccgcgccgaggccaagggcgcagagacaggcccaggaggtggcaggccacggacctggccgtcttcgcgctcttcgccgccgcctgcggggtgctcgtgctcaccaggttcctgctctgcaattagccagg

SEQ ID NO: 383674 - DNA, 277 bp, Zea mays
aatatattgacacacacagcacaagtgccctatgcgcgttatcaacttgagaagatagaggaaaccagaaagaaaatgaaagaacaagatcttcaggaactttatggtgtttcagaactaaacctatcatcaccttttactgattccaggaatataagtgctgatgaaatgtcaaagacctcatgtaactatggtacctataaagaaatttctgatgatgagttaattgtttacctttggttatgaaaattgtcttacaattgattataatctacaa

SEQ ID NO: 383675 - DNA, 264 bp, Zea mays
attcttgtgctaccaagcttttcaacgccaccgacttgctgcagtactgattcagcgagttgtcagaggatggctggctagaaagagactgttaggttcctcttcactgcgaacctacacaagactttgtgtagtcgaccaaagtcaaaagagaaaatgttatcaaagccttgagttgaacattgtgctagactctgtcataaggctacaaagatgctggaggaagttcctgctgcgtcagtctgtcaaaacatatgtgatctc

SEQ ID NO: 383676 - DNA, 267 bp, Zea mays
cccaagcgcatccaggcgctgctcggggtctccaggtccccggcccagcttcttgcgcccacgccggccaacacgccgcagatcggccccgtctccgcgcccagggaaggcgtcgggctgcatgacggcgccaccgtcgtgccctgcgtcatcgacgaagaggaactgctgattcctaagcttcaggtcattgcaggttccctccctccacctcagccagaggagaagctgggcgagtgccagctgaaccgtgcgctggtgttcgac

SEQ ID NO: 383677 - DNA, 267 bp, Zea mays
aaaagacagcagatggcagcagcaagcgctataatctgttgcttgctgctgccatctgctgacctttggtttcatggtaaaaaaacaaacaaacagattatagcgcttgctctcctattacattacattacatgaagcatttagcactaattagtagtagttactattaccagcccatctaggtagctgctcctccatgaccatgatatgcacagcagtactaggggggaggagggtgtgtgatgcacaagaagatgctgctgctac

SEQ ID NO: 383678 - DNA, 261 bp, Zea mays
ctatcaccattatatgtgggttctaaattgtatgagtgctgacccatatgcgagatacggatggtgtgatccaatacatactggaattagatcatgtgtcaatcatcactagacgtgagtttttctaactcttatgagttgtaagttcggatcgaatcaagaaaaaagtgggatgaaagaaactatgtatagttatttaggggggaggtggatacaaaaagtgggatgaaattttggctctttaatattaggtatagataa

SEQ ID NO: 383679 - DNA, 248 bp, Zea mays
gactctgttccacttctactcggcgtcgattcttctgggctatgatgctgctgcagtcgcagcaggcggaggtgggggtggggtaacagtgaagctggtggactttgcccatgtggccgagggtgatggggtgattgaccacaacttcctgggcgagctctgctagctgatcaagttcgtatctgacattgttccagagactccttagacgcagcctttgggtccttcttaagagaggatcctgacat

SEQ ID NO: 383680 - DNA, 286 bp, Zea mays
  unsure (1)..(286): unsure at all n locations
cccacgcgtccgagattgccgtcgatgtcagtggcggcgttctcatcgtggtgcagctccgtgaccgcacgctcggtttgagcaatggtagcctcgcgttctgcctctgtcgtgtgggcaagggcagcgtcatgatcagccttggctgtgttcgctctcctgtgcagcgtgagcatcctcgcgctggaggtcagcagcaacaacattgatatccgatccgtnagggcgacggcgttggccttggggcaacaccggagatggcgcgctgggtgcagacggtaggaag

SEQ ID NO: 383681 - DNA, 283 bp, Zea mays
cttccattttgtgtctggattgttttgttgctaattggtcatgtttgcttggaggaagatgagtttgtggctgccgttcagagatgtatgttaatgaattatatggtacaggaaggggaagccagttcgattacttacttagcagatgtgcagatgtgaagcagcacaaccagaatgcagaaggctttccgtcttatagaagtaaaaggacgcctttggaagtctctatacagaaatctcttggttttggtttgaagtccgaaaatggtaaacgggattatgt

SEQ ID NO: 383682 - DNA, 281 bp, Zea mays
  unsure (1)..(281): unsure at all n locations
gacaatgggtcagactggtgaatcagtaagctcggcaatacgttcaacatcacctacaacactctcagttctctgcacagaactgagagtgttgtaggtgatgctgaacctattgccgagcttactgacgacaatgccgtcagactggntgaatcagctccaggacctggattaatggatgaatttgtacctgaggtagaccgagattaaaatcatggagacagccaagatacggtgtcccggtcagttggccaagccgacagtggatcgaaaatatatgg

SEQ ID NO: 383683 - DNA, 268 bp, Zea mays
cgctgacatgtgggccctctctgcgaacctcgccagcactaatcgagccgccactggcagcatctgaagagaataaaagacagccccacacgcagctcgaatcccggcacgtgagcggcggaggcagggacggccatggcatgcagtgggtgcagctgcgaggcggcggtgggggcgatggcgtcggaggcgtacctggagggggcgccggtgcgggaggcgcgggagctggtggcggactctgtcggcattctacgccagggatggg

SEQ ID NO: 383684 - DNA, 277 bp, Zea mays
cggaccgtggcggggcgttgggagcatatacctgccaagttcccacggtccctgctagatggctatctggtggctggagctcgcacgaggctgttcttggttgggcggattgggctatacagcacactgcagagtatgaggatctgggagctagatcatggtagatcagtttgggtggagataagccgaatgccgcccaggtacttcagggctctgctgaggttgtcggcggagaggttcgagtgctttggacaggacaacttgatatgtttcactt

SEQ ID NO: 383685 - DNA, 272 bp, Zea mays
cccacgcgtccgcccacgcgtccgaccacgcgtccgcgaccgggtggctaacaagagtaaaagacagctaatatgatcatgaagcaagccaccaaactagttaaaaataagggtgcaacagctaaacttttcatgccagacaacccctttgcatccgactcaagccatgcatgtcgtgttccacatccagtttgcgcccaccacttgtatttgagcccccacatcgctctggcctctggcacaagtctactttaaattgcattatgcttggt

SEQ ID NO: 383686 - DNA, 272 bp, Zea mays
  unsure (1)..(272): unsure at all n locations
atttcagggacgtgaagaaagccatgggacgcgagtacaagcaggaggtgacggcgcagaacctcgccgacgtcatccaccgcttctgctggtactactcgcccttcgccaccaagaagcccgccccggacagcccgttcaaggacgtcgtggccaacaaggagatggcggcgaacgcacgctcctggactgcctgcacatgagcgtggtgaagccgtcgtcgcactcgcacggcaanggcgggagcggcggcatcggcaggccgtctcgca

SEQ ID NO: 383687 - DNA, 267 bp, Zea mays
aagaagcaaatcttatggcttctaagccaactgtagttgattgcattttcttcacatatcattgataaaagcatgtagccttgactgatagaatggaaaggaggtgagcccctgtgtgcccatcacaagatgccagctatctgatcaactaggtgaacggtggtcacacatagccagattttaggagcaccatgtccagctggtagtggggcacaacagtgaggagcatgacacacatatgcccacaccaagcaaacttgctacatt

SEQ ID NO: 383688 - DNA, 243 bp, Zea mays
accaggtccgcgacggcggcgatcgcgagcggccgcccttttagttttagtagcttttagcattgcaagtgtacatgcatcaagagaacatgcaatatcaacacgatcttctagtcttagcataaaatgcacagctcgattcacgatgattacaacaagagcctgttggaggggtaatttaaggtcactgccacttcctcttcacttgtcactagattacaatatctactcgccccacagtga

SEQ ID NO: 383689 - DNA, 263 bp, Zea mays
cactcccccaggatcccctgcagctaccattgctacaacacgggtacagtacaggtgaggacggagaaaacaaacgaacgaaataaagagagtacgcatgggtttgcagatgatccatggcaggccctgcgccttgtgctgcccgtcctcctcctcctcgtcctccgccttgtggatgaggatgcaggcccagctgcccccaaagcagtctcaccatccatgtcagtgctctctctctctctctctctctctctctctgctcg

SEQ ID NO: 383690 - DNA, 262 bp, Zea mays
agcttacaagagtataagagtttccttcaaagctttgttcgtcttgctatgttgcgtccagtttgtcaactttggtttcaaaaggcttcatgtcttagctttaaagtctgtagttaaggaaaccactcaaacaaaaagttagtggcagcagttctttgctcagtaaagagaaggaaagagaccgtgttgtcatgttccacgacttcattacttatccatagacatgcagttgtttcttgaagctaaaaatacctatgttata

SEQ ID NO: 383691 - DNA, 254 bp, Zea mays
agcaatagtaatgcatctttggatttcctggagtcagcagagtactatgttttgttgctgtatatttatgttaagtcacaacttccccttatgataaataaattcttttaaggttattgtgtccacattcactgtgatcttttttggaccctgaagcagaaaatcctagaataacaaactgcattatacttgaacagatgcaattatgagtgagagtgatgatggcattgctccagcagatgaacgggaggatg

SEQ ID NO: 383692 - DNA, 254 bp, Zea mays
ggaaatctctagagccagggtctatccatgggccatcgctgtgcgccacagcttgctccatctctccgcggtggcagcgcaacagccgcccccatgagagtcgccatcctccccccccgcgagcctgccccatcccgcttagtgtcgtcccccgccgccgcgtagcgccactacccctgcctgccctgggctatggacacgaagatcccctggatggaagtggagatctcagaggcttatgatctagaactcta

SEQ ID NO: 383693 - DNA, 271 bp, Zea mays
cggacgcgtggggtagctctgatgacaatccgatggacctgacacgaacgctggacgcctgggtcttttctacgcagcggcgttggtggtgcttgcttttgaccggacagcagcgcccagtgatgcgccggggcgtgcctgccgtgccttagcccacagtgccaccgccatgccatgcgttggtgagctctgagctcgcgttgcattgcattgcacgcagggctacgtacgctatgctctggattgtcagtagatagagttattgccatgc

SEQ ID NO: 383694 - DNA, 257 bp, Zea mays
cctacctctaccagctgcccgtcgcacacaaaaccccacgctgcccgccgccgccgcgacccgccacgccgccatgtccgctgccgcggcgctccggccgatcgagccacttcccctcccgatcgggctctccctctcgccgcgcctcaagcttctgctcaccttctttcgcgccgacctcaccgtccggcccctggacgagtggcagctcaagtccgccctcctcgcgtttctccgcgacccacttctccccctcc

SEQ ID NO: 383695 - DNA, 230 bp, Zea mays
gtttgacaagaaacacatgtttgatcacttccacaagcaccacgactaccatcacttctttgaccacttccacaagagaccagttccaccacacacacaagcctattgttgtccagattgcaaacaccagccccagccagagtaccactctccgactccaacatatgggtcgcccacaccgatctaccaccctccggctaggcatttgtttgataacatgcgcttgctag

SEQ ID NO: 383696 - DNA, 272 bp, Zea mays
cgaatgcgaactaggatggctcggcacggcactgcacagaggataccggcggtaactgagagaccctgccgcgatggggaagaagcgagcggcggccgtgaatgctccgttccccgcgcccgcctccgagcccgagtcggaccacttcagcgactacggcttcgacccgcagctcctccacttcccctcccagcctgaggcgaacgaccgtggggcaggcgccacgccaccagcagcctgcgcagttgaagcccctggactccgcgcggttc

SEQ ID NO: 383697 - DNA, 264 bp, Zea mays
cagttgagccgcgtggtgccggcgagcgagagcgggcgggcgggtcccacctgctggttcaagttcggcaacaaggacgccgagggtgccggcatctacggcagccaggccagggacgacttcgaccgcgacgacgtcgagcagtacttcaactacatggggatgctggcggtggagggcacctacgacaagatggaggcgctgctgaaccaggacatccaccccgtggacatcctcctcatgctggcagcctccgagggcgac

SEQ ID NO: 383698 - DNA, 273 bp, Zea mays
aagatgcagcttttgtgtttagctgcctgttatttataactgaaatgtttacaagaaagagtcatgctcaagtaaataacagctgcatgtagtggctcctagaaactatagctcacaaatgaggcaactgacccactaactaataactacccttatgcctggaagccaggccaacactaactctgaacataagactcgacactaagctacaggttgacactaagttgtcacaaactgtaggattacacaagtttatcaggaacttcagttatg

SEQ ID NO: 383699 - DNA, 267 bp, Zea mays
cggacgctggctagctttgcagatgcttcagaaggttatggtcagtgacttttttcttttcagatttgatagaatagacacagaaatttagatttctctcctgtaatgttgttagcattggtcttaattttatttgttgttgttaggagaggatttgattatcatgatcagtacaagatatcaatcattaaatagcgaattcactctaatttctagccaccatttttctaagtaccatgttgctgctctctttccgctggatgaaca

SEQ ID NO: 383700 - DNA, 270 bp, Zea mays
agttcggcgacctggtagacatggacagggcgcggctcaccgccaaggtcaaggagctcggcgaagcggtgagatccgcatcggccagcgccggcgtcgtggtcaacctcggcaacctgcagtggctcgtcgaagaaagatgcgcggctcctcggggcgagcaacaacaagagaagaggagggacgtggtgctcgacacggcgcgagctgccgtggccgagatggcgcgcgttctgaacctgtccggcgaaggggagcaccgcgtgtggg

SEQ ID NO: 383701 - DNA, 269 bp, Zea mays
cactcttctctgtgtaacgacttcctccctttcctgccgcaccacgcaatcaccggggcggaggcggctgccggcgagcacttgggcgtctccggccaccgcctgcctcgttgtgatccaactaggaactcacccagcgctatctcccggcaggctccccgttgactcccgcgatttgttacccgctggcgctgccgcacacagctcaaaaggagtagcagcgcccctggttgccggttggagcgtcaaggatgagcgggaggaagaat

SEQ ID NO: 383702 - DNA, 267 bp, Zea mays
tctagatcgcgagctgccgcccttttatttttttttttttttttttttttttttttttcgaactcagaagatcatcacgagtaatcttaaacacttgttgagaataatcttaatgacagtttcttcaatgtgggcaatgacattgcttagcttgtatgttagagttcaggtcaccatattaggcaggcatctctacttggattttgcccgggataccactgatgcacagttacaggcagaatctgacacctttagtgaaaatggaca

SEQ ID NO: 383703 - DNA, 270 bp, Zea mays
gggcaaggaggggtcaagcaactgatagtcatagtcttgcagagagggtaagtggaatgtaacattttctgttgtaaaaatgctattgtatgaatttcaagtggtctaaaacggtaggagcatcacttctgtaagttacatacaacatgaacttgaccacttaaagatcttgttgttttaacaggcacgtcgtgagaaaataagtgaacgaatgaaagttctccaagatcttgtgcctggatgcaacaaggttatgtggcaagcatcagt

SEQ ID NO: 383704 - DNA, 277 bp, Zea mays
cccaggaggagcgacgaggaatcaagcagccagctaaacaaccaaccccatcgtcggtagatagccacgctgctgggctcgatccggccgatcgatcgcatgcggcacctacggatgccccacgcatccgtcttctgagatctcggttgctccatggggagcggcaaggcatcgtccccgccaggcgccgctgccggcgggagcgccccgccgccgggcggcgccgtcgtctgctgcatgtgcggcgaccgcggcgtcctgtccgagctcttccgct

SEQ ID NO: 383705 - DNA, 267 bp, Zea mays
ttgtcttttctgccatttctcccgaatgattcttccgtggattggagcagagcactaagctcattgagccaaaatacaaaggaacagctgaggaatgcgtccacctgggtgtacccttcagtcagttttgattctgttcagaaatctgtaaccctcttcatgccaggctttgataagtctgaaatcaagctatatcaatatagaggtggatcagaactgttgatcgaagctggagatcagaggcgcgtcataaaattgccacttacg

SEQ ID NO: 383706 - DNA, 268 bp, Zea mays
ggacaaactgaatgacctattcgagagaacagggtgagacttctaattttttaagattttttttgttaccactactgtgagaatataaattagccagcgtaacttctgcagatgttccaaaaccgtgatatgacattcccatttatgtgttttggattttgttagtgtctgtgattttattggttcagttggttattgataaaaataactaaaagctatccatttctacacatcttgaggaatactaaattggtagcacatatgtaag

SEQ ID NO: 383707 - DNA, 266 bp, Zea mays
cggacgctgggttttttgtctcctttgggtcctcttgttcccgaagcatggggactgggggttgaattcagtgtagagatccagatgattgcgctgctagctccgatcgccgattttactctgctgcctgccggtccagatccatggaagcaagtcgatgaacttagagggcttccgctctggattttctttgaaaataagttagagtcctgtcaaacacctcttttctctgccaaacgatctacaaaatggctttagcttagaaa

SEQ ID NO: 383708 - DNA, 261 bp, Zea mays
cacgtacttcgcgatggagaagctggggacgtccagatccagtgcgcggtggccaaaatccgtggcgccacagcgcacgtttcggagagcgggtagccttccggcggcaaacccaaacgcggcggcaggccgtggccacgcccacgcggcggcgggatgcgtttggagttggagcacgctggatgtgaagcggcttcggtagccaacgcgcaagcgtacaacaactacctgatcaagcgcgtgctgtccggtgacacgggc

SEQ ID NO: 383709 - DNA, 262 bp, Zea mays
ccagtacaagtttgatgaccaaaagcgcaatttgtttatatcaagagattctgcaaaatataatttctacatatgaaaaggctcttcctctagaacattgctctgccatgtgttttctctaatgttctatagatggtggattgagacgttgcacaagtgctcacttagacagctcaagttttgtataaaagtaacatttaggaggttaggggctcctgcatgaatgtatgcaaaacatataaagctggttaagcacctgcat

SEQ ID NO: 383710 - DNA, 259 bp, Zea mays
  unsure (1)..(259): unsure at all n locations
cggacggtggngcggacgcgtgggcggacgcgtgggttagaaacgggagaagaacagcaggcgaagatcgcgagattggtatagcgatcgattgatcggtggtggggggggnggacntgggcggcagatggcggcgtgccggggcttcttcgagtgcctgctcaggctggtcaacttcatcggcaccgtggccggcctcgccatggtcggctacgggatctacctgctcgtcgagtgggtgagagtatctgnggacggc

SEQ ID NO: 383711 - DNA, 260 bp, Zea mays
gcacaagaagaccaggtggaacatatgcaagcaggggcgatgagaagaccccatgaatccagatcccaaacgcgcatgagaagaccccatgaatccagattggggggggggtctgcatctacatggccgtgtactccgcaccactcccctccggccccgaccgtcgtgcgctcgctgtagccgaggtcggcctcaaccacgacgacgatgcggtctcctcgccccaggctcgacctcctcgctgacctcgccctgctcca

SEQ ID NO: 383712 - DNA, 250 bp, Zea mays
aaatgtatcggctctgtttatgtatatgtcatatacagctatacaattcactgttctacagagactaagaacatttgcttctggttcatctagaacagaggatcatttggatttgagctcttacttatcttatggaagtggagctatagcagggtgcacaacaactatagggtcatatcgatttgaccttctgatgactattcttgcatctcagggtgatacgcaggtttatcccagtatgaagtctgcg

SEQ ID NO: 383713 - DNA, 273 bp, Zea mays
cggacgctggggtcggtcgcgcgacaggagagggagagagacggcggcgcgtagactctggtctggcggctggagtgctgggtggtggagagagacgcgggccggaagaaggcgcgggctttgacttgccgccggtgcgtccgtgcgtgcctagtgtgaggagtgggagacgccggtacagtacaggagccatggcgccgagctgctacgacgcggcacgtccatgctcctctgcgccgaggagcacagcagcatcctgtggtacgaggagga

SEQ ID NO: 383714 - DNA, 261 bp, Zea mays
gtctcttccctaatacttacgaaatgttaattactgaatgatctttgtttatttttgttataattgcttgttgtttatatttttttattgttccgctgaagggacttgtatcaacttgcaccaaagttagggcaataatttgtatgttagtacttagaacttgttgaggcttccccatacccctaagtttcatttgtagctagaagccatcagggttgcctgtaactagcaaagcattatattgtattgttgttgtccagg

SEQ ID NO: 383715 - DNA, 264 bp, Zea mays
gagaccacaactcctcgagacaccacaagggcaagggaggcgcgctcctctcgcctcgcctcgcctcccccggggaagaagaggaggagagggagctgagcagcagccggccgacgcgggaatgctcgtcggcggcgggcgggacgacgaggaggtgctccggaagctcaagagcatggacgtggacaagctggagaacggcggaggcggcggcgacgcggagagcccgcgccccgtcgtcaagtaccacggctggaaggccat

SEQ ID NO: 383716 - DNA, 257 bp, Zea mays
agcttgtggaggatagagaatctcttcagcaagtgcaggaagagaatcgatccagtgactatgaactgactgcaaaaaagaaggagcaaagtgcatttctcaagaaaatcacattgtctgagaaaagcataaccaagaaaaagcttgaactcgacaagaagcaacctgagcttcttaaattaaaagagcaaatatctcgtctcaaatcaaaaatcaaaagttgcaagaaagagattgacaaaaagaaggatgatcac

SEQ ID NO: 383717 - DNA, 264 bp, Zea mays
ctggagaagttatcattcattggggagtttgcagagacaatactatgacatgggagatcccaccagaaccacatccaccaaaaacgaaaatattccgacacaaagctcttcaaactttgctgcagcaaaaagctgatggagcaggaaactcaatttcattctcacttgatgcagagtattcttgtctgttttttgtgctcaaacttgacgagtatacttggttgagaaatcttgagaatggatctgatttctatgtgccactta

SEQ ID NO: 383718 - DNA, 255 bp, Zea mays
aggttctagatcgcgatcggccgctgccgcccacgcgtccgcgcacgcgtccgaacgtgtgcaccatatacctgcagcaggtccgtgacgtcaaaggcccgcgtgcgttcgtcgacgagaagctgtgcaacaagtggagctgtccgtgtgaaggagatcaacgagcggtccaagcggaggcaagcggacgggcagagcagcaaggtgagccgaagcaagtcgcagagccagagcgcgctggagcggatagcgcac

SEQ ID NO: 383719 - DNA, 265 bp, Zea mays
cgcccacccaaagtggcagcagccaccacaaccggtccccagcgatgtccgcggctgcaggcgcctttgaagtggcgccgtccgtcgtggcgaccagctacacggcgtcgagctcctgggctggctcacgggaccctgccgacggcgccaggaaaaacgcgcagtctacgatgatggtctgcacctggtccatccaccaggccccgtccacttctccggcgagctcgagctcccctgcagggaagcgggccgccgcatgtcgacc

SEQ ID NO: 383720 - DNA, 265 bp, Zea mays
cccacgcgtccgatttcttgctgtacttggaagatgcgattttttttgtttttttagcctgcggacaattgcctccttggctttaaatatggaagacatagttacataagacctgggatagtgacactctgtcatccccgcatgattgacgagtatattaggccattgagggcgacgtgcaatttagtacacaaatccatctttaattttgcagggcatgcagtggattggattattttctgagggctggattggctaagacaat

SEQ ID NO: 383721 - DNA, 264 bp, Zea mays
cggacgcgtggcggacgcgtgggcgcgccgcggcgcgcgtacgctggagcgggcgatcggggcgacgaacaccatgctctacaggtgcctctgcaccggtggcgggtcgtcccggcggcggcagcaacccgacggctgcgataccgggccgcaggtgaagattgcctcgtctcgtcctgcgctgggtcgttgccaaagccactcggcggacgcggtccggacttccgttggcggcgattgcctcggcggacggctgtcgggggc

SEQ ID NO: 383722 - DNA, 262 bp, Zea mays
cggacgcgtggcagccaaccaccgcagacaagatcctctcttccgcgtccccaaaccctcgagttcgcaacgggctccggccagattcgcgcagtctaagcttcgaatcggcgcatggaggcgtcagagtagccgcggcgctcaggtcgcctaccgccaccaccgccgccgccgccgctggccccacgtggcggcccgctgccccgggcgccgcctcgctcgcctttgaccggagacgcagcttcgccttcggctccgtcaa

SEQ ID NO: 383723 - DNA, 148 bp, Zea mays
ctccattgcttgccgtctcctgccacgaatggtctggtcgctgtcttcttctgaagacctaacccaagacggtaggtaagtgccagcttaaagtctatctaaaagcggaccaccactgtccacctggacggcaatggcgaccgccgcg

SEQ ID NO: 383724 - DNA, 253 bp, Zea mays
acccaacagctcagatctttctctgcagctacatactgagaatgattctaggccaggcaagcgaggaaaagatgcagtatctttttctcatactaatggaatctactgctctcaaactgctgacattgaagcaattccatgtagcaaaaaaccatgttgtattcctggtttgagagtagagagtagcaatcttggtattggttccttggcttctgcaaagtcttttcactctttatcatacaattcaactgct

SEQ ID NO: 383725 - DNA, 264 bp, Zea mays
  unsure (1)..(264): unsure at all n locations
cgagaccgtgataccaggttgtcaaggacaccaaatccccgactggccggaccccggctacgtaactcgtagccgctgtccgtcacgccggcgatgttatacccctcagccgtcggtttgtagagaagagagggagattaggactgacttattgcttatcccaaatgatctctcgtacatgcttatatagccatagagggggcagctataaggaaataactaacaagganacaactagtaagtaaggcaataactaacaaggta

SEQ ID NO: 383726 - DNA, 264 bp, Zea mays
gctaacaataacataaaattaagagacaaaaaaaggagcagcgtcctctcgtgactctgctagaacgagaagcaagacaaacattttgatagatttgtggccatcaagacagtcaatggcgtgagctcatttgagctccttttgtcttgattcaaaatgctcttgttgcatgcaacattagaatttgttgtggtgggattttgcacatctagccagaatttggtaacctcatgtttcttttatcccaactgcataatagatgca

SEQ ID NO: 383727 - DNA, 216 bp, Zea mays
gcggaaagcgaaggagccgccccctccgctcccgtcggccgcatcctctggcgaggagaagagcagcaccagctccgaggagaccgcccccaccgcgaagaaggcgaagaaggagaagacggagaagaatgtcgaggtctcgtcttcagcctcagatgacgacggcgagatcacggccggcagcgacgaggaccccgcggacccgaacgcgctgac

SEQ ID NO: 383728 - DNA, 150 bp, Zea mays
catttcctctcccgataagagtgaggcctcggctaagcttgagcttcccctccctcccctccagcgctccagctcccctccatcctcggccaaaaattctgcggcgagctccgatccggtccgactactaacccacgccgcagaagccgc

SEQ ID NO: 383729 - DNA, 179 bp, Zea mays
gcgcgcgtgtcgcagatgtgcattgcagatgttcgttcaccagcgaacctgcagctgccgaatctacagcgaccataggtgagcaacgacgtatggaaatagggctggcgggggcacgtgggtaacttggtcctggagcattggagaaggagcataccacaaggaaaccaacacggtca

SEQ ID NO: 383730 - DNA, 226 bp, Zea mays
caatgcctgagctcgtcccgcaaccggattgggtaaggacaaaatctcacaatcatcaactcaggtgtggctgaagacaatattcgtatggagactactcaaatataccgctgccctgaacactgactgagcatgacgctgccttgattgaactcgaggaattaaagaagcagaatgcccaactgtgactcatctggagaatgaaggacaacctcaggctgccgtg

SEQ ID NO: 383731 - DNA, 261 bp, Zea mays
ggccatccggagctcgagtgccagcaggaagtgcctcgccacggacaagatcggcgaagacggtggcgacgagaagagatcatcttcttctggtccttcctctgccaccaccaccactgcgcactctgctctaggctcctcgctgaagctggctaagaagatacaggccgaagcagggagctggttcatggacttcttggaggccgcgctcgagaccgggctgaagaagagcaaggcgtcttccatgggggacgggcggaa

SEQ ID NO: 383732 - DNA, 286 bp, Zea mays
acgtacgcgtcagcggacggtgggtcatcattgacacctacggtggctggggacccatggtggtggcgctttctccggcaaggagccgaccacagcttattgcagccgacgctatctactaaggcaccatacattgatgtctgcgatgacacggactattcttggagagcaaagggcttccatgagcaagcaaaagctgccggtgttccggctattactactgctggcatctatccaggagttagcaatgtgatggctgctgagcttgtacatgctgccagaagtg

SEQ ID NO: 383733 - DNA, 298 bp, Zea mays
actggagcagccgagctcgagctgctgtgcggctggctgtttcccccctccagtccagtccagcctccaccacccaccacctcctcctgctcgctcattcactcagatttgcactcggccggcatggcatttatcccccacctacaatctcaggcaatccgccattactgagagccccaatcgcacatcgggtcgtggcaagctcgggacgcggaacgccaccgctcccctgtacgtctccgtcgcactcctgtgccggctagctgccatgctgcctactacatcaatcagtgtgaca

SEQ ID NO: 383734 - DNA, 292 bp, Zea mays
  unsure (1)..(292): unsure at all n locations
cccaacccgaaccccaacaagggttctcggcgacgcgtcggccgcgggagatggccaccgcggcggagctgccgtccctctacgccgagctcgcggccaagtcctctcgcgtcgcggagctggaggccagggtctcggccctcgaaaccgagaacgcgggcttgagggagngccctggcggttgcgagacgagaatcaacgggcagtacaggaaaggaggaggacccaatctctcgccaattggcggcacgcctacgcggaatcgagcacggggcggtcgagaagccgggct

SEQ ID NO: 383735 - DNA, 171 bp, Zea mays
cacacgcgtccgcggacgcgtggggtaaaatgatgaccagatgtaatctgatgagctctcgatgcagtgcgattttacttttcattctttccccctcagagaggaaacttatgtagcagagttataccaaatactttatgacgtaataaagtcagattatttgattttgtg

SEQ ID NO: 383736 - DNA, 203 bp, Zea mays
ggggaagttcagatcgcttggtttcgatccgggattcctgcgcgcgctgtcctgctcctggttaaagtgccttttcgattctcagacaaagactggctctgcactcggataattttaaaatggatagtgcacagcaggccactggggagatgaacaattcgctcgatactcttatggtatctggaggtgaccagagtcgacag

SEQ ID NO: 383737 - DNA, 277 bp, Zea mays
acgacgtcaggaagccaacggtaccagtcgctagcataatggcaagggagacaacgaaagagtatccaatgtagagaatagcagaaactggcccactcaagcttctgagatcaaacaccaagtagttgatagagtaaaggaacacataaagggccactgttccagaagcaaagaaagctttccaccaccttttctcatcagtcaagattgattgaagatccagggttgtctttacacaaaatcacctgtgagctcagatgatatgaccattgcatct

SEQ ID NO: 383738 - DNA, 248 bp, Zea mays
cccacgcgtccgccgcgcgtccaccatctctggcttgctgtcctccgcgcgtcatctccatccctggcttgagaagataaggctcctccttaccgaaataggaaagggtcactttcacaaaacgtgatgttggcatgtgaggtgaatgtggcgatgaagagatgggcttacagtgtgttaagtggaagcaacacatgaagcggacatggagaaggaagctggcatgacactaaaacgcataaagttga

SEQ ID NO: 383739 - DNA, 248 bp, Zea mays
ggagcgtggcaatcagtgaggaggctgttactgaagataaggaagtggccatcagtgaggaggctgtatctgaagataaggaagtggccatcagtgaggaggctgttactgaagataaggaagtggccatcaatgaggaggctgttactgaagataaggaagtggccatcagtgaggaggccatcgaggaagatggttttgctaacactgttgagactgatcctaccccaaaggagattcttctgact

SEQ ID NO: 383740 - DNA, 269 bp, Zea mays
gacagccaggtgcaggtgctctttcctaacaatctagcttaacctgctgctctttgctgtagtcgtatcagttactctgcaagtttccctagctggaaatatttggaccactcaatgtgtgtgctctgagtggctgttgtggtaattttatgccctaatgacatgacataaattactcctaatatttagctatcgatgaatctcccaaaaaataaaaaagaacatcagaataacagatgcgtcatagggataggcacatagtacctagg

SEQ ID NO: 383741 - DNA, 259 bp, Zea mays
tagtgcctgaccactgttgaataacttaagttaactagggtcaaatggcaattcaaatttctgttgacattagcttttcagcttggttatggaacatgtagggcatatctgttttcttaacagcatcagggcttcaagttacagagccctcagaatgccctgttttgtcaagttaacagcattgcgagtgtgtattgttgggctgttggctgatggattgatacttttgttcaaacagcttcattcatttgacttgttt

SEQ ID NO: 383742 - DNA, 264 bp, Zea mays
ctcgattagtcggtctggtcaatgaataattgtgattagtcgactagtcggtcccatgggactaggtttgactatagtatttgtaattgtaaacattatgagtgtgaccatatgataaggctagtccagaagaattgtctgttatattctgaaatacatgaagcaactatttatgttgtaaacccaatttctttggtttgatataccttggtaattctatggtatttacttataaagttatggctcatatgtattgcactattt

SEQ ID NO: 383743 - DNA, 258 bp, Zea mays
cttttggggaagaggagctggcataccttccgtatagaagacgagatataatgatagacaatgaaagcaatgaattacttcttcctgtcgaagggtttggtgtatcacttgaagattcttcaaaggaagaaaaaaagaataggaagggacttcttaactggttcaaacttcggaaacgtgatggagcttctattctgacaagttcagaaggtgataagtccagtttgactaaatcaaccgctccttcaacacctattg

SEQ ID NO: 383744 - DNA, 246 bp, Zea mays
cgccatctccggcgctacgctactacggagagagatagcatcagctattcagctgcagcaaccgaaggacgagcgagctaattagcttacagttatactagaaggtacggtagtgtgcagatcactgatcagtgacccaccacctgaacagaagacagagaagcagcagagcaccaataatggccggcaggctgcaggcctgcttgctcatctgcgcggtgctctcgtcagcggccataatggcga

SEQ ID NO: 383745 - DNA, 290 bp, Zea mays
gttcgctacaatagactttgacatggaccttggagggcagttctccttgtcagatcatgacagtgcagctgaagatgaagaggaacgacctactttagttcgcaggacaactatagggaatggtcctcccgattcaatacatgattggaccaaagatgctgattttggtatgtccggtcagaatgagcccactcaactctattctaagaagaattggcgactacttcgatgccaaaatgggttgcgcatttatgaagaacttctggaagttgaataccttgcaagaagct

SEQ ID NO: 383746 - DNA, 292 bp, Zea mays
  unsure (1)..(292): unsure at all n locations
gattctgctatctttagtcgagagactgaaatccaatgaagctaagctatctgctcaagcagaggcccacaaagtcaaagtgcaagggctagacaagaaagttgccgaagcaactaaaagtttgatgtggagctaacgaaacatgaaatttgtgaaattgaacgatcaagggcaaaagaaatgttgatgagcttcgtgcaactanagaaagatgttacgatatggctatggaatgcgccaagaatctgaagagcagcttttcanaagtttgtgcattctccttcagagcaaa

SEQ ID NO: 383747 - DNA, 281 bp, Zea mays
ctgcagctaacgaacgaggccccgagcaggcggaagtgctcctgggcggggcctcgttcgttagcttggcggcggtcgctctcctcaccgctctgcagctgatatggttgcggtggcgcagtgcgaggcacggggatttcccggacgttttacatgaacatggcataatcattgtaaagacccttcatacatcaaaagcaatgtatgacagtaatttggcaccacatctaactcagggtagtcactggctttcagagccttgtgtttctggaagaatgact

SEQ ID NO: 383748 - DNA, 282 bp, Zea mays
aaaaaatttcagataggatgaaaaatctacaagatcttgtcccgaattctaataaggtacatttctttgggggtttaacttgtttggtgcattttcatattgcaactggagctgcaactgcagttattaaaactgatcatcgagctaattatcaaaactttgctacttatatatgcaacgggaacatgtatttcttagttgtggcttgaaatctgcaagtgacacaatagaattgagtatttattaaatttaaggttcttttttgggggttccaatttcaag

SEQ ID NO: 383749 - DNA, 209 bp, Zea mays
cccacgcgtccgctcaaaacgccaaaaatttccccacctctagacgcccttccccctccccccgagatcccatccatggccacctcccgcccccggatctggcgctgagcccgccattgccggatccctgccaggcctccaccccgccgtcgcgctcccggcccggttctattgggcgcggcgtggcattccctctcttctttgtgcgc

SEQ ID NO: 383750 - DNA, 279 bp, Zea mays
aacacttcttcttgcgttgcatcaagagtggcaggtcaaggcccgtgatgaggttcttaaagtgtgcggaaagcatgagcaccctaatgcagaaaacctgagcgatctcaagattgtgagaccatctatttgaaaagttcatacatttgtagtgcttttgagatgattttatgctgtatttatagtgctatatttttgctatgtggatcaggtaactatggtgttaaaagaaaccctcaggctgtatcctccagctacatttatcaatcggactgccac

SEQ ID NO: 383751 - DNA, 281 bp, Zea mays
gatatgccatgcagcttaaaatctggcaacattctatcccatgatgaacatgtaaatgaagttgaagcatcaccacccttgaagaaactgtcacctattgttgaacatagcccaaagatgaaaaccgctgggccatcaactcctgaacctgccaaacaaatcacagaaaatggggctgcagcttcaggaagaactaagaacaagtcaccacttcctgctagacgacctagccctcagaggcaagctggagcagggacttcaagtttcccagtcacaatgac

SEQ ID NO: 383752 - DNA, 303 bp, Zea mays
ctcgctccgcattgcccgcatcgcctccaatctcagcagaccaggtcgagtttcgcccggattttcagtgtgggatgtgagttgaggtgtgacgggagcagcagaggaagcgcgccatggacccgtgcccgttcgtgcgggtgctggtcggcaacctcgcgctcagaatgccggtggcgccgccggccgccggtgctggcgcgggcgtccacccgtccacgtcgtcgtgctactgcaagatccggctggggaagatgccggtccagagcgtcccggcgccgctcgtggtctccgacggcggcg

SEQ ID NO: 383753 - DNA, 217 bp, Zea mays
cttgtgtgcatgcacagaagaatgtataattccaaaatcgagagatcttgtaagctgtccatcttaggttgcctctgcatggaagaaagggcctttaggaagctttctaccgacaggtatccagattccatgtccatatatgacacagcttacaagatctctcgattttggaattatacattcttgtgtgcatgcacagattagaaagtaaggagca

SEQ ID NO: 383754 - DNA, 294 bp, Zea mays
cgagtactcgacaccgcccctctgatatggctcaggcacgcgtgcgccttactccggccggccgcacgccggccgccacgttcctctcgggctccaaccccagacccgcccacctcaccttcttcccgaagcttacccctacctccctctccgccgccgcagctgccaatgcgccgccgccccacatcgtcgtcgtgggctccgccaacgccgacatctacgtcgaggtcgaccgtctcccgctcatcggcgagaccgtggcggcccgcgcgggacgcagcctcgcgggcggca

SEQ ID NO: 383755 - DNA, 287 bp, Zea mays
gcggtgggcgaggaggggtactactactgccacggtggcgggcgggtgaaggggaagcaggcgggacgacggcgtgatccagttcagcggcgacgcggcgcggtcttggctgccgtcgtcgagcagcacgtccaggtcgcactgcagccgcagcgtgctgctggagtgcaactcgcccgagccgcagtcgtccccggcccacggcaacggagcgttcctggcttgatagcaccggtccgtcacccgtgttgcgtccgtttcatggtctgcactgcaccgcagtctgg

SEQ ID NO: 383756 - DNA, 197 bp, Zea mays
cacaggccacgcgtcctgtggctttacaagtgctctggacctggtttgtcgcgcttttggtttcggcttcttaaatcttatccgaattcctttgctgtttccattggaaacttcttctttggacttactaatacaaaacattgggccatccgagcatttatgactgcaggccttcaccgggtgcataatctggccat

SEQ ID NO: 383757 - DNA, 175 bp, Zea mays
aaaaattacaggtcatgcaatgtggccggcggttgtggtggatgagtcaaatgtacctgcaactcgagctttgaagtcaattcggttggaccaatcaatgttggtccaattctttggcactcacgattttgcaaggattaaattgaagcaagctgtgccgtttctgaatggtctt

SEQ ID NO: 383758 - DNA, 170 bp, Zea mays
caacgtaagacaatttgcttcattgtactttatgaagtctggagtattatcactcgtcgggttgaaaaggggaactataatctgtactgacattacattgtatagttccccttttcaacccgacgagtgataatactccagagttcataaggggaactatacaatgtaat

SEQ ID NO: 383759 - DNA, 173 bp, Zea mays
cagagtcgcgtccgcagcagctttcaaatcccggggcggattaccctgcagacggagcccacagcccagcaccgcagcagtccaccgggatctcgccttcgtcgccccgtgtcgcgccggtggctgagctcagagcctactgtagaccgtagagccatggggaacagcatcta

SEQ ID NO: 383760 - DNA, 168 bp, Zea mays
aagaaggtcggtaagctaccgccgccggcgcacttgagcgaggcgagagaggagctgtttgcttcatgctctttcgccgacctcggcctccactctaccctctgcgcccaccttcaagataagatgagtttccaagcacccactcgaattcaagctcaggcaattcca

SEQ ID NO: 383761 - DNA, 255 bp, Zea mays
cttccagcttcagaagagttgcttttgatgttccatctttgattcttccaaaatcaactcttccagcttcagaagaagtttgaggccgttgttgctgacgaagagaagtacttgatggagaaggttgcagggttgtttgcagaatcaaacgctcgaaagaaaaatatggttcaagatgacatatgcagcctcaataggactgtttctgagcgttcgaacaatttacaaaccgaaactaccaagctgcatgatttt

SEQ ID NO: 383762 - DNA, 257 bp, Zea mays
gggcacacaaagggaggtaccactaaagaaggcacaacagaagttggaaggactccaccaaggggtgctctaagcgtgagacatacagtaggagtaggagcatccaggaagaacaggaaagaacagggggatcaaccaaggatgtcgatgaagcatcggaagaaggacatagataaaaaggacgaacctcatcaaagacaacatcccaaaagatcctcatctgacgagcaactggatcccaacaatgatatccctta

SEQ ID NO: 383763 - DNA, 221 bp, Zea mays
cggacgcgtgggcgatgaaccactttacttgatctatgatataaatcgaattattcaccttaaagctggacgagttgagagcaatttgaaaaggtggacttctatgtctcagtctcaaatatagcatgtggatatgtccaatcgttgaccaggtcgagagcgcatgttagtcatgcacagagcctgggggtagtattatgattaacgtggggctatggcca

SEQ ID NO: 383764 - DNA, 248 bp, Zea mays
ctctttcttcttatctttctgcctgtagtccagacaagactctgaaatggtgtgataggctgcaagtgctgattgccattgctaaggctgttcatttcctacatacaggaataattgcctggtatcctgtatccaattcggctaaaatcttccagtattttggttgatgaacaccatacggcaaagttgagtgactatggattatctataatcacagaggagatatacagacatgaggtaataggaca

SEQ ID NO: 383765 - DNA, 242 bp, Zea mays
aaccgcctccggaggcccggagcgcggacaaaaccatctccaaaaccctagttattccctagcgccgccggagcccggagcttcgacccacctcatcgcgcctcctctctttctctctctccgccggcttccttggctgcgccgcacccgactctcatttttctccctcgacggtgctcgacccccaccggctcagcggagtcagcgctctatctgtccctctgccgcgccgagagtaattt

SEQ ID NO: 383766 - DNA, 282 bp, Zea mays
cccacgcgtccgagtgaagtttgaaatagaggatgcgataggagatgtcataggggagctgctgaagacagcctaagaggaacccaagtggatatttttctcgcatggtctagtttttttcccccacaatccattagaagctcagtctataaagtgttgttcattttctagttttcttactgatgaggtggtaaaataaaaaaagcatgggtcaattagaaagtctagtaagtcatagaattgatgcgctagtcttacacaatatttttcattgccatttcg

SEQ ID NO: 383767 - DNA, 282 bp, Zea mays
gccacccagaggtaaaaatgctagagcttcatcaaagaaaagaatgcacaggtggtccaaccgttgcagccgaggtgtccgagtccgaggactgatgatttctcggttggaacacaaactaacggatccgatagttgacctccgccctcactcagtagatgcgtttggagtattcgtttgattcattcatttatcagtggagccgcgatcgacgtttggaacgttcatcctgtaccgtagcaaaaaaggaattttgttgtatagaaactagaaggaatggat

SEQ ID NO: 383768 - DNA, 208 bp, Zea mays
ccagatccacgcccactgtcctctgcccaaggctacggtaccacaccacaaccacactcggtgagtgaggtagcggcacgagcacgcgccatgaagagccccgccgttccggccaagaggcgccacggcggcaacggcagcgcgcacggcccggggttcgcgcttgggtgcggctgcacagacgccaagagcgtgtcggtgtccgtgt

SEQ ID NO: 383769 - DNA, 257 bp, Zea mays
atattgaactgggtgtactgatggccatggatggtgttgctgttggggaggaggcgatgcatatcggacagggtttgtgggtggcaatgggccggggtaatatggtggtggcggtggcggtggccatggatgcgttggggtgcagggcagcggtggcggcaggacggggcatggcgggcactgtggtggagggtgatagactggcgcagtatgaggcggtgatggtggaggtggggaatgcggtagtggtgatggtg

SEQ ID NO: 383770 - DNA, 253 bp, Zea mays
ggcgccttatccagcattacacctgcagcagcaggtccacctccggcacgccagcaagccaacgaatccagctccggttcatcatcacgggcatggaaatcccaagctcgacgctgtggcggcgtcgctccggcgaggcgctccggccgacgctcgcggcctccgggcgctaatcaaggcgctgtcgtcgtctgcgtcctccaccagcaccgtgggggcagtgcacgcccacgcaaccaagatcgggctggac

SEQ ID NO: 383771 - DNA, 270 bp, Zea mays
cggacgcgtgggcggacgcgtgggcggacgcgtgggcggacgcgtgggcggacgcgtgggcagtttgtcatgtacgggagcccagaagtgctgcttgctgttggcgaccgggtcattgcggttgacgaggatggcgtacaagtgcttggggaagagctggagattggacccgtgcagaagatggcagtttcacccaatggcaagctcctcgcagcatttgcacatgatggtcgccttctcgttattcccaccgatttctctaggatcata

SEQ ID NO: 383772 - DNA, 287 bp, Zea mays
actagttctagatcgcaggcggccgctcgcgcccacgcgtccgcccacgcgtccgcctcgccgcaagcgtcggcgctacgacggctaccacgctgaccatccacaacctctgcccccacccggtgtggcagctggtgaccccgagctcgggcttcccctccatctccaccaacaccgcgcggctgggccccaacgcgctgctctccctctccttcccgcccaccttctggaacggccgcgtcgccgcgcgcacgggctgcgacgccgccgcgtccggctgctggacg

SEQ ID NO: 383773 - DNA, 278 bp, Zea mays
caacgccacgctcccgggcaacctcaccggcattgccgtctccgcggtccgcctgcgcacggcagcctccgccggaagggcttcgcgggctacttccagttcggcgtccccacgggcgtcgtcgtgcagccgtacgtcgagcgggtggtgctcgtgttccacgacctcggcaactggtccgaccactactacccgctccccggctacacctacttggcgccggtgctcggcctgctggtctacgacgccgccaatctttccgccgcggggctgcagga

SEQ ID NO: 383774 - DNA, 272 bp, Zea mays
  unsure (1)..(272): unsure at all n locations
attggacaaggggtttcgctcttccggagaaggcaaggcgtttgcggtttgcccgccgccgtgaatcgtatgtgatcgaatcgcgcggcgggtgatggcggaggaaccggtggtcggttatgatggcttcgaggccgccggtgatgctgtcgccggtggcgcggaggacaacctgtcgatgtccctcggcgacttcatggcgatcctcgaaactgagcccacgtcacccgaggaaggctggaangatgagcagcagatgcagcctgcggtca

SEQ ID NO: 383775 - DNA, 289 bp, Zea mays
agcagctcaacctggccgggaaccgcctctatggccatgttcccgacgctctctgcaggctcgcggggccggctggccgcctttccaatctaaccttgtctggcaactactttgtcgccgtcgggccggcatgcgcacgcatgatcaaagacggcgtcctggacgtgaagaacaactgcatttcgggctttgccaaccagaggccagcggcggagtgtgcggttttccagagccatccaaagacgtgcccggaggaggcaagcactcaggtgtcatgccctgccgcagc

SEQ ID NO: 383776 - DNA, 275 bp, Zea mays
cccacacgtccgcccacgcgtccggaaagatgttctccgagaaatgaatgagctccctattggtgattctggtgttagtactgctgagaagtcttccaatggtgttgtcgacacagcgagttgttctgatagagatgataggtctgatcttgatttagatgatgacgacgacgacgatgagttcactgaagaagaggttgctgttgccaagttggttattaatgtggtatctgattccttggttgtagtgaaagaggcaattcgtttcattactg

SEQ ID NO: 383777 - DNA, 277 bp, Zea mays
cgcccagtcgcccacgcagccggcccaagcccaaaaacctttctccatcctctactctcatccccacgatggccgccgccgccaccacgccgcactccctcctcctccagcgcgccgcgatcccggccgcgccgtcgagggcgtccgccgccgcctctcccgtccgcctcccggtccgcgccgccaggatctcgtgcgcggcggtggcggcgccgtccccggccgcagccgccgcggcggacgaggtggagcgcggcgtctacaacttcgcggcggg

SEQ ID NO: 383778 - DNA, 265 bp, Zea mays
catgcagtcgtccatcacatcgatcgactggacacactgacaggatcgcaggagtgacagcaagagccgcccgcaatggcctccgcctcgcgcctcgtgtccttcgccgcgctctgcctgtgcctgggggcggcgctccaggcggcccggggcgccgacgcggccgcccgcgccttcttcgtcttcggcgactccctcgtcgacaaaggcaacaacaactacctgctcacggaagcgcgcgacgactcggcgccctacggcatcg

SEQ ID NO: 383779 - DNA, 258 bp, Zea mays
actagttctagatcgcaagctgccgccctttttttttttttttataaacttttgttcgtgacaacaacattgatctataagataaaatttatagtacacgtgctataatttataattgtatatgatatggtttcaacaatcaaagttgtatgtggaggagcggtaggtgtgtctatgtgcattatagattgtacacaggcatggccgtatagacctgtccatgccgcatttctattaggaagatcaaataatttcaca

SEQ ID NO: 383780 - DNA, 261 bp, Zea mays
gcagcccaagccatacatctacacttgagaactttgttgaggctgactcagctgatgatcctcagtattggcagtgacgaagatcgtcatgaggagtctagttggcgcctggcggcaatgaacttgcagcaggaacacctgttgttctcggtctcccggcctgcttccaggccgtcggcggcaacgacgacgggcttccaggaccacgggctcggcggcttccaggtgatcgctaccgacggcggcgccggtccggccgcg

SEQ ID NO: 383781 - DNA, 280 bp, Zea mays
ggaaacgtcacttttttggttcttgtgtaataaacaattgtctctatgttgctggaggagagtgtgaaggaatacagagaacgctgcagtctgcggaagtttatgatccaaataggaacagatgggcctgtgttactgaaatgaacaatgggatggtgcctttcattggagttgtatatgatggcaagtggttcttaaaggggctagattcccatcgccaagtaactagtgaggtctacttaccatcatccaatacatggtcagcaattgatgatgagat

SEQ ID NO: 383782 - DNA, 215 bp, Zea mays
gtctcatctcgtgcaaggtgaaagatttctcattccggtgtggtggctcaatcccttctacgtgattacaaagggcagcttcatttcatccctagactgttgttatcccaatttcttgccccacccttcatcttagtttcttgctcgtttcaccctttttcaatgtgacaaccctatagtccatccactttgtgttgtgcaggttattcagtaga

SEQ ID NO: 383783 - DNA, 283 bp, Zea mays
cggacgcgtggcgagacgcgtgggcaatctcaaagttcaaaccagcttctccatcagcatggacaaccaggagttgaggagcttgcctattgatggaaacttgccaaactcttttggatttcctgaacaaggatcaaagaagagaaagaaacctgtctcatcctctggtagagctaatagttcaggaacagcgaacactgctgggccatctcctagctctgcaccctcaacaccatctactcacacgccaggagatgcaatgtccattccacagctgcagtat

SEQ ID NO: 383784 - DNA, 270 bp, Zea mays
caaaattaatgttattagatttgtattaaggaaacacttaatatgattttgcattgcaaaaaaaacgacatcattggagtaatggttggtcaaagtcttgtcccaggaaatgaaataagcctggtaccttcaaacagagggactatagtgaactgagcaagtagaatttgtcatctacataccaacctccactgtgctgattttcctggtttgttaaagcagattgtatgttgtggttggaaaggatgaagtgcatgtgctgattcatac

SEQ ID NO: 383785 - DNA, 263 bp, Zea mays
cggacgcgtggctgacgcgtggggtgacctagtgtctggcatgttttgctgggctcattctctatagctcgcacataatgtatcgaggaccgccgtgcaggagcggactcctcgccgcttctctctccgccgtccgagaggctcgacccctgataccacgctgagggcggtggtattaggagattagcgatggcgaggtggcggccggcggcgctgctggtagtggctctggcggcggttctatcggcggcgtggcgggcgga

SEQ ID NO: 383786 - DNA, 244 bp, Zea mays
ccatggcgtcctccccttcttcctcccgcatcacggcagcaagcagtcattcccatggccgagctcacctccctgccgcgagctcgccaacaatctcccccactcagatctccattccccttgctgctgctcgccgcgagctctctctggctttttccccagtcggcgccctgttcccctgcggctcccatggcgccggcgaactcgagcagccgcgcacccaaccatggcgccctgtttttcc

SEQ ID NO: 383787 - DNA, 262 bp, Zea mays
cttccaaagctgaaagtgctgagccttcgttgctcgaaggtgtccatggatgcactgcaatgtttgctgaactcgatggagtatcttgaggttctgaatatttcacactgcctgctgttggttgtcgcggcgaatgggcggaagcaagtggttcatgaactggacagccaaattctcgagagagcttcacggctgcgtgaattccactactgccaaagtaggttgtgcgtcgcgtgccagcggatggtggtggatgaaggca

SEQ ID NO: 383788 - DNA, 238 bp, Zea mays
cccacgcgtccggctgaggtgagcgatgagatttgggatgaagtaattgatggcatgaaggtccgggttcaagataagaatgctgcaattcgcacttatgctgtgcgagcattgtcccgttttgcagttgaaggagaagatggtggcattgttgacctattccttgagaccctagacaatgagccgaatgctgaggttcggaagacaatagttttttctcttcaaccatcaaataata

SEQ ID NO: 383789 - DNA, 280 bp, Zea mays
cccacgcgtccgtcatgcttttatggatctgttttgttcatttgtcagagtgaatcttttctctgacaagatgccaagaaagatgatcctccaggtttacaacatcttgcacgtaatgctaaagggtggtcgtgattgtgagttttatcaccgactggttcagtttgtggactcttatgatccacctatcaaggggttgcatgaagatcttaattttgtgagcccaagaattggagaggtcctggaagctgttggcccaattatatttctttcaactgat

SEQ ID NO: 383790 - DNA, 276 bp, Zea mays
cctctttaacccaaaatgatcaccctgttctgcagtgtttatgcgtgttaaagaggggcaccatttttgtaagccagatttttatatttctattttctaatgagctacaccgcctgaactatacatgggaagcaaaacaagcagggcttacaaaaatggtgcccctctttaacccaaaatgatcaccctgttctgcagtgtttatgcgtgttgaatttagaatgctatgttataattatcccggaccatattgcatcaagtataatatgtgctaac

SEQ ID NO: 383791 - DNA, 264 bp, Zea mays
gtcactctctcttcactatggttaccgagataggacccgtttgcgttctggtaattggtgccatgatgctgaggcacatataccgtcaagataccagcaaggtacttctcatggcaatggtcactcaaggaattgtttttccaggattaataccaatgagcaagccaaagttatcacaagcaaacatacctttgcaaaacctaggatgattaacagaaactgtagtgaccaacataggatcaatatgaaaggtaatcgctggag

SEQ ID NO: 383792 - DNA, 269 bp, Zea mays
cgtccatcaaggacgcgctgcaggccatggagaggatacctgcagcggccgaggcttccgcctcgtcgtcctcaatatccacggcagcgcagagtcatgactcatgagtaaagggggaaaaaacgtcttgcattgccgttggtgcggttgtggttcgtgcagtcaaaattttatttgctaggaaccaggatgcatgcttagcataccaccatcgatcaatcgtgcgccattatagtactatagtagtactagaaattatacggctcctt

SEQ ID NO: 383793 - DNA, 267 bp, Zea mays
gtacggtcggaatccgggtcgaccacgcgaagaagagagtcgcgaccgtgggcgacctggacggacgcgtgggaaaaggacagcactcgagaatttggacctgatcgtattgtgtcatgatgaaattgttgatggagggattgtacttgaaacagaaggaagagagatagctgaaaaggtgtctggtcacggatcggagggtgcttcatcggctgagcagactttagtcaatgccctaacgcaagcaagagagcatctggcgaagtc

SEQ ID NO: 383794 - DNA, 225 bp, Zea mays
ctcaggactactgcaaactcgtctgggatacttgcaaggacgtgagcatcgccagctctcccttccaacccccgctgcaaggcaccgcgccgcctcctacttcaccgtcgaagctcaccgacgcgtggcagtcccagagcgacttctgcggctccttcggcggccggtcgtctgtatgcctcagcggcgacacggtctcgttcaacgccgccggaccttcaccct

SEQ ID NO: 383795 - DNA, 237 bp, Zea mays
ggaatatacagcatcatttcgagtctgtttcccgttttaatactagcaaactgatgaacactgagaagcaaaaaggcctaaggattgtaacagaaccaagaaatctgtcatcagcactaagatggatttctgatgaggaagtcagaaaacaggtatatatcgttgggaactctgaacctcgtgaaaatattggcgttcttaatgaacttatacatgctcgtgatgaacttgcaaaga

SEQ ID NO: 383796 - DNA, 257 bp, Zea mays
ggacaagaggacatccagggcagcatgacagctgcttttggttctggtgctcttttctccatagtgagcggaatgggaactcctaatccagttttaaatgcaattacaactggtgttgcttttgcagtatttcaaggtggctttttcatgattgggcagaaattctcaaagccatcaagtgaagatacatactactctctgacaagaagcatgctgcacaaactgggtcttgaaaaatatgaaaagaatttcaggaa

SEQ ID NO: 383797 - DNA, 258 bp, Zea mays
agtactacggctactccttgtactatttcctagtagcaggctgccgtggaatcagctgcctagagcaatgcgagattatcaacaccagcacagcctccctccctcgctgccttttcccactcatcccagcgatcgatattcctccttccttccttccttcctcgtgaaggcgtcgagtgagtcctgcgttcttgctctcctctgctaggcacttgtcacaggaaggccccctcgtgttcgcgtcctcttgccttcaca

SEQ ID NO: 383798 - DNA, 258 bp, Zea mays
gctagagcagagcccccttcacaccaaaaatttcctctttgcgtcgcgccccgtcagctgagtccccgcggatgggctcggtctcgcggggctagggtttggtcggtcgtctcgtcggcgtcgagggcgccggcgctgctagctagtagtagctcgctcgcgctagggttctcaggagccatggtgatgcagcgcttctcgtggccgtacggaggccggagcgcctccttgtgcggcacttcaccgggtggagggagt

SEQ ID NO: 383799 - DNA, 270 bp, Zea mays
attaaggtgtcgcttcgccttacgttttactgtctaaaaggtagggggggtcagttgtcttatgtcaccttaccgtcttaataactatgtttgtgagacaaatactgacatattacaacattttgatttattcagtggtatgatatgcataataacttgctgtctgtgatgttacttttcgtacagggaacggcctttaagtcaagttattaatactcccaactcgtgtacatttcatttaccttactacagatttatttatttttacag

SEQ ID NO: 383800 - DNA, 265 bp, Zea mays
ctctacggcgccccttaggtggcgctcgtcttctctctcacgccagatcaggaggagcactgttctccccctacgctgcttcgcggagacaccttcgctcgcgcgctccagaagaaatcaccggctccgcttcgcggcagttgcaaccacgggacgatgtagtgatggtgatgctgtcgccggctgcggatgacgtgaagagcttggccgtcaccttgttcggggcctcgaacgccatggccgccggggcgtggcggcgccgtgg

SEQ ID NO: 383801 - DNA, 261 bp, Zea mays
ctgctgaccccgatctgcaccagcgctccctctccgccatggctatccccaacgcctttgactcctccctcgcggtcaggtcggccgtcggcgctgcgctggctgccgtcatctccgtccgcgctgtacgcgccgctccctagacgcctcgggcggggtcgccggcttcgtcgtcatggcggtccacatcgcatgcggctacaggtacggggcgctgctgttggccttcttcttctcctcgtcctaggtaaccaagatctg

SEQ ID NO: 383802 - DNA, 285 bp, Zea mays
caaagggaaagttgctgtggaggcgaaggggaaaggtgctgccaatgtcaagggcaaagcacctatgcaacattcttcttcttctgaacatgaagatggtgacgacgacgatgatgatttcataaggcctcggaaacggaagaaggatcagggtcactcaatttcagatgcggaggacaaagggcacttttctaccatgaggtgctctccctcggctgtgtacgacttaatagagcctatgtccgagaattacaagcagaggttgaccaatatggggattggtga

SEQ ID NO: 383803 - DNA, 275 bp, Zea mays
caggctctcagaatattgggtgcattgaacgcgaaagatgccaagagcaagaatgacagcagtggcggatctgtggctattcacaggacagggtatgatctaaccactagctctggaagttttcaggctcctattgtggtcatgaagcctgcaagaaccactgagaaacatggggtttcacttgcttcggttgctcccatagctggcctgagaagcctcagaaagttgccggcgggtagatattcatctttcactggcacaaatgacaagatgca

SEQ ID NO: 383804 - DNA, 271 bp, Zea mays
cccacgcgtccgcccacgcgtccggtgactcttgagggtgacacttatcagccaagtggtcttttgactggaggtagtaaagggggtagagggaacttgctaaggaaactcgacgaactagctaaagctgaggctgatctatctgatcatgagaaaaagctctttgtcattgaacagcagattggagcccttttaccattgcagaaaaggcacactgagttgaaatctcagtttgaactgaagtcatatgatctctcgctgtttcagaaca

SEQ ID NO: 383805 - DNA, 260 bp, Zea mays
gttttcttggggaaggcaaggaaaggggttacattcacgtctaaaccgcctcgtaaatgaatttgatcagatcaagtcaatctctgctttcaaggatgttcacagtaatactggcatctttggaatccatacatctactgtaagtattatattcacttacacgagcttgctattcatgcataatgcccgacattttatacaaatatcatgtaatcatgtgtacctcatgggaggaaatgatcacttaaaacttgttacat

SEQ ID NO: 383806 - DNA, 259 bp, Zea mays
gctccccctacacccgcttcagctggtggccgcagcggtattcgcgcttctcgtggccgcgttctacgtcgtcctggggccctacatcgggaacaccctcgccggcaatatcctcctaatcaccttctctttctcggccgcagcgacagcggcgctctacgtgcgctgcacagcggtggacccgtcagaccggactgacgcgaagaagaccaagcggcggcggcagctcgctcggggcggtgggggcacggcgaagttg

SEQ ID NO: 383807 - DNA, 261 bp, Zea mays
ggtcatctgatgattaggcgacgataaggaagtttttgatgagttgctaactgctaggtttgggagtttctctcatttcaggatgcagacagattgaggattctttgtttgtagaacgccatggatgagaggctgctcatgtttgatgtggttgatgacgtgtggacagtgctaacatgattgttcgagttggatgcacacgagagccttaggtggtttggacatgtcttcgagccaagagttgaaatcttgatgggatta

SEQ ID NO: 383808 - DNA, 264 bp, Zea mays
gctagaagtagctgttagtgttattggttacgaactctgaaattagaagcttgcatggcttatctcctctccttttcattcctggtaagatcgatgtctggagtttaaggaccaacagggtctctttatctccatcttccatcgatccagctgaatatctgtatttggatttattctctgaaattttcagagttccatcttatgtgccaacttgatttctggacatgacttaccattttttgttggtacagttttctcaaactg

SEQ ID NO: 383809 - DNA, 263 bp, Zea mays
gggtaaggccggaagggcatgttcagtagttgttgacatcgcattaatcagagggtttttctctcgtttctgttgtgttaagctgtgagctaacatgtttttcttgtcaattgtcacattgaagccaaggacatccaagcataacccaaccttttgtcgatactaggatacttatgagagatcttgtggacattattgcgaaaagaattgtcgatgatactattttcttctttgcaaaaaaaaaaaaaaaaaaaaaaagaaaa

SEQ ID NO: 383810 - DNA, 249 bp, Zea mays
ctgacgctgggtgctagctactcgatcggatcctgaccatgcccgcctaccagactactaccaccatcactaatatcatccacaaatccccattggcgatgtgcatcgtcgtggcggccacgttcctggcgttggccgtggtggctcccgtcgcgcttgcgcatgctctcgggtccgcggcgacgccgagtgggccgctgaacgtgacggcgatcctgtagtagtgtgggcagttcaccatgctcatgc

SEQ ID NO: 383811 - DNA, 251 bp, Zea mays
gaaaaagcttaaagaggtgcagcgcattaacaaagaaccaaacattgttcaacttatttcaggtatttcaaagaatactcaaggcctatgcggctaagttatatgccagattaccaaaaggtggaactggtattgttgcagctgccactggcactgatggacagatcaggacctcagacagggacgagagaatgatatgctacattgtcaacactgctgaatattgtcatcagacatcaggtgagctagct

SEQ ID NO: 383812 - DNA, 289 bp, Zea mays
caatgtcaaagcagttttagactttgcagacatcaagcgttttgtaacgggatatcgaagatgaacaataaagcacagatgtttgtgtaatcatttggagacatgttttgtttccttcttacttaaggacctcccccaattgaaaaaaacgagatcagtctgggctggcttgggcagaaagcgaacaacacatgcagttgccccctttgcagagctcgtcgcgtggagttaaagcctgctggtggcaacaatatgtctcagagttaatcataaattcatattcgttaaa

SEQ ID NO: 383813 - DNA, 288 bp, Zea mays
cggaccgtgggcttcaccgaggcgttattccacgtctcgctccgtcgcctccaccgcttccgcttccactggcgcccccctcccgccgcaccctccactactacccccgatgatcctgagcagctctccacctcccccaaggtctccgcgccgttcactcgcgtcatcatccccgattcaattatggggcgagtgaggcctcagtgaaagaatttacttggcttgagtcaggccaacccagtgcaaccaaaactccatcttttgtctcctggaccattcaattatggg

SEQ ID NO: 383814 - DNA, 287 bp, Zea mays
ggggagtttgtcagctgggtggcgcgagcatcaggcgatggcggaggcgggggagaaggcgagggtcgtggtggttggcggcggcgtcgcggctccctcctcgccaagactatgcagggccacgccgacgtcgtcctcctcgacccgaaagagtacctggagatcccctgggctgagctgcgctccatggtcgaaccgtcctttgctgagagatcgttgatctaccacaaagattacctcagtgatgcgaccatcgtgacatcttctgcggtcaatatcactgaaca

SEQ ID NO: 383815 - DNA, 281 bp, Zea mays
cccacacgtccgcccacgcgtccgactatgccctcctctaattgatcaaaacccttagatctattcctctatttagtttctggatacaactttgatgccatgtaacacggcccatgaaagtgtaacagctaattgcatccttttcccataaaagtgtaagggcatgtacaacctagaacccacttcacggttctccaagcgcaagacacacctaagacacagtttcatacagtgggttgtatcttagattaaatgctttaataaatgcattgtgtttacgt

SEQ ID NO: 383816 - DNA, 274 bp, Zea mays
gcgtattgcttctgagatgcatccatagatgcttggggaatcctgttccagccgttctgggctttgcaatggagatactgctgactttacaggtcatgggtgaaaacatggagcctgagaaggttatactttacccgcagctcttttggggctgcgttgcactgatgcataccgactttgtgcacatctactgccaggtgcttgagttgttttgtagaggaatcgatcgcttgacgatccgtgaccggacgacaggaaacgtgttgctctcaag

SEQ ID NO: 383817 - DNA, 275 bp, Zea mays
aaatttgtcagattcatattatctacttggtagcatttatagtgagattggtgaactagataaagccataaacttcttgatgctagctgcatatgtttccccaaaggatgcatctctgtggaagaaacttattcccttggcaaagaaaaagggggatgcttctctggcaagacactgcattttaaaagcaatgaacgcagatccagaagatgtagatctgaagtatctttgtggttatatgtatcacaacctttgtgaatatcagaaagctgcag

SEQ ID NO: 383818 - DNA, 202 bp, Zea mays
cagattctggtcgccacgcttggcagttggcaagcagcgagtggggggagacagccaactctctatcctcttcccccctcgtccatccccatcccaccgccttgctctcccctctccacttccagctgtccatggctgcagcagcgtgctcctctgcctcgccgctcctcctcccctcagggccgagacatgcgtcggcctc

SEQ ID NO: 383819 - DNA, 278 bp, Zea mays
cccacgcgtccgctacagcttgagtgcagggctaggatctcattgttaatgctacaaatagtgattgtgatataggactcaggcaagcattaggcaataacatagtgtcgattttagtcatggtaccatcatgtttaactgattatttgttagaagcagcctgaaatgaaactgattcaggctgctctgttcgtaggcgagaattctctctgtaaaattccttcattcatattttatggttcatgagcaccaaaaaagaaaaaaagaaaaagagaaaa

SEQ ID NO: 383820 - DNA, 276 bp, Zea mays
gctggacggacgcgtgggcggacgcgtgggcaaggcttctgtcaaaatggttgttatgatgtcaatgataaggctggaagtgctaagaagatatacgatgctgctgcaggtgcaccagagggacattctgttgtattgcttgcacataatggaccaacaggtctaggttcaagaatggatgatatctgtgggcgggattgggtacctggtggcggtgaccatggcgatccaggtccgtggttcatggcaatacttttccctctacttactttgcct

SEQ ID NO: 383821 - DNA, 241 bp, Zea mays
cgctcgcgagagtgccctttccgcatcctcttttttatcagttagtacttggctcctgttgtctcactcggaggctccatgcttcttgctctatctgtatttccttagaagtgattctttacctgctcttatttatagttccatatgaaaggaacgaagtgcatcagaacatcactttatatataggagggcctgtctgtcaaaaaaaaaaaaaaaaaagaaaaaaaaagaagaagagatt

SEQ ID NO: 383822 - DNA, 277 bp, Zea mays
atgctgcaaatctggatttccctttgggcaatggatcatccatctggcctttggattgttgggcatggaaaacacctgactcagcggaatctttaaatggaactaatgatgagattcctccacttcctgatgaccagactttccagccagatgagctggaacaactgttacagtcaatacaagaagattcccatttaggctcaagtatcattgaccccccacattcttctatgacaaattcagttctgcctgatgaggattgtttgatgttctatga

SEQ ID NO: 383823 - DNA, 280 bp, Zea mays
aaatcctctgctcctccctccattccaaatcctccgggaaccatttgcgcggctacgattcgctcctgcaactgcagcatagaaagtgacgtcgccgtcgccgcattcgcgccgccctgggctccgtccaactaccgttgcaaacccaggcttgcctgacaccagaagctgctcccctctccgatccagcggcgccctgttcgactgcggcggcggcggctaccatcccgatccggtggcgccccggccttgctcgattcctacagctgctatccttttc

SEQ ID NO: 383824 - DNA, 269 bp, Zea mays
gatgctgcagcagaagcagtgagggttgtttatgctcgtgcgtgccacgaccttgtgccacaggcaatcttagcagcccgaagcttgatcgagcttgacaagagtacacgaaaggctgcaaaggcagcggcagtggtagcttctgggcaaattgtcacagttggcactgctggaagcaacacatcaagctctaggccaagttcgaaaccaaacacaccaagcaaacagcggaagcctgatatactactcatgtccaaatgaggttaagt

SEQ ID NO: 383825 - DNA, 271 bp, Zea mays
ctcgtgaaggccaaagagcagttgctggacaacgagaaggagaagtgcagagttcttgctgagctggagcgtgccaagaaggtggctgatgaggccaatgccaagctgcaggatgctcttgatgtgcaaaggagggctattgaagcgcaggaggcagacaaactccctgctggagagtcggagcaggcaagcatccacgaccagcaggaggctgatgacactgtgctgcggtcgacagtggagcagcttgagaaggctaagtacgagctgg

SEQ ID NO: 383826 - DNA, 256 bp, Zea mays
ggcagctggaaaatcctccagccaaaacaggctctgggccttcaagaaaggtatgcatgtacaatcagattcagagactagtgtaaaaaaacactgaagctctaaacttcatcatttgttgcattctagctttgctaatgtgctgtgtacctgtttccctgagtttacttcccatcagattatgattgcctcacacccactcacacccctcaattcatgttgattcaagctgccatgagaaaattaggcggattat

SEQ ID NO: 383827 - DNA, 258 bp, Zea mays
gcgcactgcaaatccattttaaaaataagtttggaaaggagcaagactataattctgttcaagatgctctgcagaagtgtgtttcactttacaaagagcctcatacacgaaggttggtgaaaaatgctgccaagcaggactacatgatatgcctgacgagcctgatcgatatggttcagagcttgtttcccattccacacataccggggttgcaggagttgctttgcgaggccgaacaaattttaggagagctagaag

SEQ ID NO: 383828 - DNA, 275 bp, Zea mays
gaagattatctctgctggtgcactgcttgccctatttgcagtgataggtctcaagtgcttgcctcgtaacaagtcacttcctgctcttaggggtgagtatggatctgtggcggttgctgactccattgacggtccagcggcagatgaagagccactggaaatccctaggatggacgcgaagttggctgaagacattgttcgcaggtggcaaagcatcaagtccaaggctttggggccagaacacactgtcacggcattgcaagaggtcctcggcg

SEQ ID NO: 383829 - DNA, 268 bp, Zea mays
ccccgcgccacgctgtcctccttcgccgaccccgacggcgacggcggctccagcgcgaaagccagcgacggcggcgccaaggccggcgccggcggggaggagcaggtcggggaatgcgagatgtcggagatggccagggcgttccacatctcgccacgggtggcgacgtccatctccgtgacgatcgcgttcgccgccctcaccgtgccgctgacgatgcgctcgctggtctgccacgggaccttcaggatgaacgcgctggcgtact

SEQ ID NO: 383830 - DNA, 263 bp, Zea mays
agttcacctgccaccgcctaccgagaagagatcagcgccgccgcgcgcgaagtgcttcactggggaggagcggaccgtgctaaagttggccggccgtgcccggcggcctcacgagctctccctcgttgctctacgccggggctgggccttgtcctcgtcgcgcgtacgtgctcgccgccgacgcggcgcctgctcgctgcccgtgcggaacaacggtggcctgcgcgcctcgccgggccactcgctcgtcgcgaacgagagct

SEQ ID NO: 383831 - DNA, 281 bp, Zea mays
ggacgctgggcggacgcgtgggtaaccacagaaaatggcgtcacttctccgccctctcgccgcgatggacgacgacccgtagcgccaggtgcgcgtgcgcttcgtcacgaagctgccacctccgctgcgggcgccgcccgctgccatcgccgtccccgcggacctcactcgcatgggcctctccgagatcgtcaacagcctcctcgcagccgccgagccggaccaccagtcgcagcccttcgacttcatcgtgcagggcgagctcgtgcggctgccactcc

SEQ ID NO: 383832 - DNA, 278 bp, Zea mays
agaaatgcttcgggattaatgatgttggaatgctttacctttcccagttcgctcatagcctccgtcagataaacttgtcatactgttcagtcaccgatgttgggctcctttccctttctagcatatccggcctgcagaacatgaccatcgtccatttggcgggtataacacccaatggcttgacagcaactcttatggtttgcggtgggttgacgaaagtgaagcttcatgaagcattcagatccatgatgcctcctcatacgataaaaaatgttgag

SEQ ID NO: 383833 - DNA, 188 bp, Zea mays
cgtttcgcgtctgcctcagcccgtcgcaatgagatgtaaggagacatcttcgagaagctgaaatggctcctaaagctgctcctgccaagaagggtgatgccaagacccaggccttgaaggtttccaaggctgtgaagtcttgggcaaccaagaagtaggccaagaagattcgcacgtctgtgacattt

SEQ ID NO: 383834 - DNA, 239 bp, Zea mays
ggcaaacctcttttttaattattttttataccatggatgaaccaaatttcattacacggaagcaacaaaaacatagaagtttaatggtacatagtgtgatcctccatcgtgttaatggcctgccagattgaactgaacacgtagggttcagccaacaggcaaccaaacacttgtgtagtggtttatcaaacttcctttaatggtttatcactagtttgaataacattggttcctgcttc

SEQ ID NO: 383835 - DNA, 267 bp, Zea mays
cccacgcgtccgattttgcaggatagaatagtaggtgggacgggcactgatggggcacctattattacagggattgcaaagttcatggatatattaactattggacctgtcacaaccccattatcttgcaacactaaattacagtgagtttttgaagattaggaatttgggacctcatatcttgaatttctttggttctgatgagattcatggtttacctatgtagattcaggaaaatagtatttctatgtctatttcttaatacat

SEQ ID NO: 383836 - DNA, 260 bp, Zea mays
ggtatttcccgtccatttttgacaagtacccgtagtttcatgatgcagtgaaatatgcaacctttagggctagtttgggaactctatttttccaatggattcctattttctcaaggaaaaataaactaatttcaaatcccgtggaaaaatagggttcgcaaactagcccttagggtatgtacaacctttgtggtgcggtttttcatgtaaaaggcagttaagatatatgtaggtacaatgtggttaagtcacatgtgggt

SEQ ID NO: 383837 - DNA, 258 bp, Zea mays
ctcgcatcaaatcctctccgattcttgtactgtcaagtgtcaagttaaattctctctaccgtcacgacgttaaagagcttcaccgcgtggcactgtaaattgtaattccgtttttgtttgtgcaatgtgctaacattggttttactcccttttctagcggcaaatactccggcgagaacccgctagccgcgggcgtgcagcccacgaacggctcgatggtctacctcggcggcgagcaactcgccacctccgtcgccg

SEQ ID NO: 383838 - DNA, 260 bp, Zea mays
cactgaagccaccaccaccacagcctttctagcaagcacacgctcgccacaatgcgcacgcccttcgtggacaagagcccccagtaccgccgggacatcgccgccggacggctcaagcagcgcctggcaaggatcctcacgcgctccacctgcaccaccaataacgccgctgccgccagctcgggcggcacggccacggccacggccttcgtcagcctcgccaagaccaacaacgcgcacaccgctgcctcctcatctca

SEQ ID NO: 383839 - DNA, 223 bp, Zea mays
  unsure (1)..(223): unsure at all n locations
ttgactatgttattgccattttaatcggtaaaagataaatgttgcaatgaccacgtttggatgtagatattggtgaacggaatagggaattaaaatctacatccaaacgtggtcattgccacatttatattatacctantgactatgttattgccattttaatgattttttttggttttcatacgtgaaattaatcagcatggtaaggtctgatctggttccc

SEQ ID NO: 383840 - DNA, 275 bp, Zea mays
attcctgcaatgattggttcatttgcaacgaagcagcttccgtatccctatctttcctttgatatggtgcattgtgctaaatgcaatattgaatggtacaaaaatggtatgtgtgaaagtcttctttcacatgccctggccctcattgacgattataatgttattcagcaatgtcttaagttggcacttcacatgtaaagatcggtacatgcctagctgaatattaaatatttaaggatatacagttgtgggtgacttttggttgacttgtaacc

SEQ ID NO: 383841 - DNA, 274 bp, Zea mays
aacacgagtccgcggacggtgggcgacgctggtcgagagcgcgtgagctctacgccgtgttgcaatggacacagcggatacgccgcaagttcctggaacgccagtgtatgggttcggtggagtcggtgcttccagaagtgagatcctggaagctggatgtacatctgcgtagtgcaatggtcctgccgcgaggtggccgtcgtactggaagcaggtgatcaaggtcgacgactaccagaagatccggttcgtgaatcgcgtcgggtcgtccatg

SEQ ID NO: 383842 - DNA, 280 bp, Zea mays
acaatccaaagcaagcagaagcacgatcatgggtatcgtatcgtcccaaacagtcaatgaacagccgaacgacgagacgaccaacttcttttcctgtcccgtcgttctcctgacgcgtgttatgtatatatcccaacgagaagagccccctttgcttcagagaaaagtaataagaccgtgctgcgcctgcgctgcgcactctcagcaccacagcaccagagctcgatcgacctccctctccaatgccgtctttcatcgacggccccactttccgggcgct

SEQ ID NO: 383843 - DNA, 270 bp, Zea mays
gggacccggcctcttctccgacatcggtgggaaggaaggatctactcattaaggactacacctacgaccagaagctgtccatctccaccgccagcgcctctggagtggatacctgaccaggacaagagatagagtctagttcggtcctttaagcgaatcagaatccgttcgtcggagaggccatgggctcggcgcaggatccgttctacatcgtccgggaggagatccaggagtcgattgataaattgcaaagtaccttccaccgctggg

SEQ ID NO: 383844 - DNA, 249 bp, Zea mays
cggaccgtgggcgttactctccttccggtcgccgcagtaaacccctaggaagaaaccccaccgcttctggccgccgccggctcaccggtgacggcatccaaatccatggcctcccgccaggcgctccacatcttcacgccctcccggcgggcgatgcacatcctcacgtcgtcccgcggcatcgcctcgaccccgcacctctcgtccttcggctggtttgataagatcaagtccaccatcactggcaag

SEQ ID NO: 383845 - DNA, 259 bp, Zea mays
gcaaggagttcattgaattgcgtcgtcaagctttggatttatttgttaacaggatagcttcacaccctgaactcaagcaaagtgatgtcttgaggacatttttgcaggcagatgaagaggtaaaacatttcaatgcagatcagcagactgctgcgccttttcttgtgcatttatttggattcttattgagaactgactcaaaacttcgttggatacacgaaattggtccttaattagtttgttttcataaactcatgat

SEQ ID NO: 383846 - DNA, 264 bp, Zea mays
caaacctagagctacctccgccgccgccgccggcaatcaagacagctgatggatcctatgcagtcatcggtgagaggccgcagtcttcgttgcatgctgatgctgtcataactattggaggagtccgacctgcaccacccccacaaacatccacacaacatgtatgtcaagatgaggcaatggtcagcagcggggatccctcttggatgtctggttacagcactgattcctgccggggtggttattacacttctgcactcaacc

SEQ ID NO: 383847 - DNA, 167 bp, Zea mays
cgcctgcttcgttgggtgccttcagcggacgccgccgatttcggctctccttttcggcgccctcccgaggggaggggggggcagcggcagcctcgtcagggtcctcccaggacaaaccatgctccggagacagaggcggcagagctggggcaggagcagagccatca

SEQ ID NO: 383848 - DNA, 164 bp, Zea mays
catgaatggcctttcatcatcatctgaacatgtgccggccttctgtgttgccgcttcttgtcctcggagtctgatgaactataacttgaactgcgtccaggagagtattcagtgcctgtcactgatgattcagattcggagtcgaacaccgaagcaccactact

SEQ ID NO: 383849 - DNA, 304 bp, Zea mays
aagtgtgagtattattagtttgtacgtataagcaaactagctgtgaacctagtttctcaagtttatgagggcttagctgtggcagtcatgcaaagtttagatgtcaactgttaaatttgctacctgtcctccatgtagttttgcataatttggtttatagtgataaatgtgttaactaaaatacttaactaaagtaaatgcttatcatgtgttacctaagtaggggatgtcctaatcagtcacttcagctcttagaggataatcttagaccttcaatttaggtaatgctcaccattttgttgag

SEQ ID NO: 383850 - DNA, 222 bp, Zea mays
cccacgcgtccggcaagaccttcgtcatacccatcgccacgctgctcctggaccgcatcggccgtcgcccgctgcttctggccatcggctgcgggatgaccatcttccgtcttcacgcgtgccacgtgcttgcacatgagggacctgcgcccctagggtgaggtctcggcactgggcgcgggttgcatcgtcggctattgtgtcggttcgtggcttcgttct

SEQ ID NO: 383851 - DNA, 261 bp, Zea mays
gggacgggcggacgcgtgggctgagcttgtccaaggagagacatttgaggaggctgcagagaaggagcctcaactggagcaggatgagaagaaagaatcgtaattttgttgtgaagggtcgtcggtttaattgttggcatcagccttgcgagggacctacctgctcatctggcttttgtgtctagtgtgcttcgggttcgaaaagcattactgcattatgttttctgaagacagtgtaggcatatatcttcctcgagccat

SEQ ID NO: 383852 - DNA, 130 bp, Zea mays
cccatatagtcagaccccatcatcgcggattcagcgatcagtcgacccagacctcgtcacgaatgcaaagaaccacagcagcatggttatgcaggcatcttctccgattgtactgacagcggagatggga

SEQ ID NO: 383853 - DNA, 203 bp, Zea mays
acgcatcgcacacgcgtccgcggacctggggcgtggtgcgtccttaaatctgttatgcctaaatgctattagcatgtgggtgttcgaagtggcctgtaatggtctaccgttcgtgacttgtgttttcccactccatttctgatacttaagcacatatgaaaaagttgtttccggatcaaattcaatggtggtgtatcatggtt

SEQ ID NO: 383854 - DNA, 278 bp, Zea mays
ttggtggatgtctacattgcactgttcaaggtactaatgagctctggtgataccaaaggagatacatatagcaaggacagcaagaaaaaggtaggaaaaatagagggaggaaataacaagatggactccagatccaagggaaacaatgaagtgggttcaacagcaggatcagatttggagctggactccagaatcctttctgcacttttaactggtgtaaatagggcattaccatatgttgcaagctcagaagttgacgatattgtggaagtgcagac

SEQ ID NO: 383855 - DNA, 129 bp, Zea mays
  unsure (1)..(129): unsure at all n locations
ataatatatgtctaaatagtttgagccattttcaggattagtctttgtgccattacataaataatatacatgcctanatacaatgtgccgttttcaggactggtctttgagttgcagcagagcgttgtc

SEQ ID NO: 383856 - DNA, 276 bp, Zea mays
aatttttacagattcatttgcgtatttatacaagtattctctttacagcgagttgggtattaattaagcaatatcacatcctaattaatacccaactcgcagcaaagagaagacttggagaaatacgcaaatgaatctgtaaaaaataggatgtgatattgcttaatttcccccctgtttctactcattttttggcccttgataatgtacacgagtatgtaataaggactaatgaatcaaacgttgttaaataaacatttcattccgttttgctaa

SEQ ID NO: 383857 - DNA, 269 bp, Zea mays
ggcctcaccagcgtcggcctgtccaattcggagtccaggccagacagtgtggcacagcgtggcttggaccaccacacggaagagagggtggaggagctcacattgaagaattgcatccacactgatatccagcctgaggtttccgttggtgggagcacaagcatcagggatcggcctacccgtattaagggcctttggggtaactttacacggatcgcccggacccggagaacgaacgatttggccaacaggggaaacaccacactgag

SEQ ID NO: 383858 - DNA, 296 bp, Zea mays
gatcggatcaagaggatgttgtcggagcgcccgccggacgagttccccccgctgccgcagtcgcccccgatgcagatgccgcactatccgattcgacggaagccgcggaggagaccgagggaggaaggaggaggaggaggcggcggcggcggtggcggtaacggcaacggtaacggcggggactcgtcctcgggaggggacggcactagcgcttcgcctaagacggagtcgtggggtggagccagcctcggcgatgacctgccgacccctcgggagttgtgccggagcttgatgat

SEQ ID NO: 383859 - DNA, 290 bp, Zea mays
cctagttctagatcgcgagcggccgccctttttttttttttttttttgcataaggttcaaactatctccaatagatagaacgcacactcttaaaactgatccaatcttcatgtgtactaatcaaagtcacagccttattctgaggaaactgcataacctgcaagagccaaaaaaacactgaccaaacattctagtgccgagtctccatcgcagcaggaggaaagaaaggcaacttcttgaagcacgggagcagcttcttgaagagctacgggtggtagtagctgggggtt

SEQ ID NO: 383860 - DNA, 280 bp, Zea mays
ggacgcgtggtgctagtgacggttgctctagatccgttcatcctggtggttttgtgaggtcgaaagccgcgatcgatattagcagatgctggacaagctgtgggacgacgtggtggccgggcctcgcccggagacgggcctcgagaagctccgcaaggccaccaccgctcgcccgctcgtcatcaacaaagacgcggacggcggcagctacaagcgggcgcagtcgacgccgtcgaccccgacgacgccggtgacgccgtcgtcgtcgacgacgccgcgc

SEQ ID NO: 383861 - DNA, 283 bp, Zea mays
  unsure (1)..(283): unsure at all n locations
tcccgccnncggcgtgtatcagaccccccgccctccccggcgccgcgcacagaactcactggnncncgncctcgccgagcagcagagggccgcctccagccagctcgccggctatggctgccgctggagatccaccacctcctatttatgctgagggtgctgcaaggacaagaggagaaatatctccacatttccagacatatgcaagggacgacgatgcaaaacttgagaccacacgtgcaaggctgtcaaatatcctcaaaaggcatgaagatctgaaaga

SEQ ID NO: 383862 - DNA, 280 bp, Zea mays
cgctcccctcccactcgctttgtgctgcctctcgccgtcgctcgcggttcccgatgggctgcttccttggctgcttcgggggggccaaggagcgccgccgccgccgcaagcggtcgccttcacagtcccccaacggccgcgcccgggctgtgccgcgggttaccccgaagaaggttgatgtggatggggaggccgcggcctccgccgccgagccgctcctagcgacgctcctcgagttgagggactccacggacggcatgtgcctagccgtcgtgaagaa

SEQ ID NO: 383863 - DNA, 291 bp, Zea mays
agtacggtcggaattccgggtcaccacgcgtcgggaggtggtgtcaaggcctttgcaagtcagatgaagactacctttacggcttcaagctttgtgacagaaatatttactcttgggtatccaagactgttttcgatggttgaaaacctccttgagaggatttcaagagatactgatgtaaagggcacccttccagctctcactcctgaaggaaaagatcatatgatttcagccattgagatgttccagacagcctttttggctctgtgtcatagtcggctatctgattat

SEQ ID NO: 383864 - DNA, 267 bp, Zea mays
gatgtcttcaccattaacttgaatctgcacctaaagagactgaactgaacacttctcctgacgttgttggacaaagatggtgggtggtgggataaggacgaggagagggaggaggagtacccgtaggacggtggaggagacacagtaggacaacgacgtccagcagcaggtggagcagcaggccgctgtcgatgcggcgcaataggacgacgatgatgcttagtaggacgcctcaagttctggcgccttaagttcgaggaacgtcta

SEQ ID NO: 383865 - DNA, 143 bp, Zea mays
tacggtccggattccgggtcgccacgcgcgggacctgggccgcgcgcggcccgatcgacgagcgagcctcattcacactccgatctagctagcacgctagtttaggaaagtgaaatctgaccacagggatgctgtggcggctg

SEQ ID NO: 383866 - DNA, 264 bp, Zea mays
ggccacctcctccccctttcggcacgcagccatgggcaaccgtgcgtcgcgccaccaccgccacgccaccgagcagcagccagagacgccgacccttcccaagccccagatccagccgccgccgccgccgacgcagacgcagcagtaccagcaggccccggcgccgccgaagccgaagccggcggcggacgcgagggcggtggggcgcgtgctggggcggcccatggaggacgtcaaggcgacctacaccttcggccgcgagct

SEQ ID NO: 383867 - DNA, 246 bp, Zea mays
cccacgcgtccgcaaggctacgcgacgcgacggagatggagcacacgaatcatcgccgccgccgtcaagctttggccaccgtgtcggtgacgacgacgctcctgctgcttctcctctgcctcgcggcgttgacgacggcagaggcgctgcgcgatcacagggacgagggcggcgctagcagcagtggcggaagctgaagcggctgcggcagctacgacgccgggagcaagcaatcgccggccgtgt

SEQ ID NO: 383868 - DNA, 256 bp, Zea mays
cccacgcgtccgcccacgcgtccgctttgacgatgattctgtagctgaggaaaaaattcccttcctagcttaccttgctagttttctgaaagagaacaagtcaaatccctgtgagccaccagctggatgtctaaactttaggaaacttgttgctggatttatgaagagctaccatcacattcctctaactcctgataatgtcgttgtgttcccttctcgctctgtggcaatagagaatgctcttcaattgttctca

SEQ ID NO: 383869 - DNA, 284 bp, Zea mays
cgcatttcgctccccacagcggctcggccacaacccacagccagaaggtctcgagctggatctctaccgttccagcagacagcagtgcgcgctctctctctccctcgtggcgacgactgggcgaccgctgccgctgccgctgccgctgccgctgcccttgtgccccggtctccgtcggtccgttcgccaggtctcctgcgggctcttcgtcgtcgacaagctccgcctggttgctgtgtgaagtccaaggttgtcacatggattcagcacaagatttccaaccc

SEQ ID NO: 383870 - DNA, 225 bp, Zea mays
gtcctgcaggtgctctcgcggggacggcgggcccgcggcgacggtcacgaccacgacccggctctgctcatgtacttcctcgactcgggcggcgggtcgtacaccgaggtggtgtccagcgcgcaggtcaggtggttccacacccagtctcagttcctgaatccagatggaaggatccccgagctcatcttctggcacataccgagcacggcgtacgccaaggta

SEQ ID NO: 383871 - DNA, 261 bp, Zea mays
tcggaatctcgtgagatcgctcatcgaagactggaaacacacagttgacgtgtggattgctcaccgcagagatgctgttgtagatcaaacacctcagtccatgggtccttcaagcttggagcaggaggatcgaggggcggcttccacccacatggatgaaggcgacctcttcgcaacgccgagcactacaattcggctgtccgaggagaacatggatggcgatggaagcatcatgaccaatgacagtagggactgtgggca

SEQ ID NO: 383872 - DNA, 258 bp, Zea mays
cgcctttagttattcagtctatagccggaacttacccttgaataaattgccttatcttttccacaagatcttgtggttggagctgtatgctgatcttattgcgtaatctagttagtggagttcttttcaccaattgtagtacaacttgttttttttatgttggctcgggtacatatgctgtaaacctataattagttactaggtagtaaggaagcatgattttcaatagaaaaaacaaaagggtcacattaaaagttg

SEQ ID NO: 383873 - DNA, 266 bp, Zea mays
agtttccaaagcagaaatttcatccagcatggtatcagcactgtgggactatttttgctttaacataaatggagtgagaccagtgcaaagccgtggagctctatctattctttgtatggctgcaaagtcgtctcccagcattttgggtaatcacttgcaagatattattgacattgggtttggacgctgggctaaggaagagcctctgcttgctagaactgcatgtcttgctttgcagagattatcagaggaagacaaggacaagc

SEQ ID NO: 383874 - DNA, 268 bp, Zea mays
ctgcgcgctccctccgacttccagcggtggccggtgcgcggtggcctttctttgtggcttccagcggctgtgactgggcgagcgccgacgctgctctactacagctgcccaggtcttcgtcgggcactttgccagcgacgtgcaccaaccagggtagaattttctgcaaaaccacaaaatggctcaggccgcaagactgaatctgagaatgcagcaagagattaagcttctactggatgatccaccccatggggtttctcttaatctt

SEQ ID NO: 383875 - DNA, 264 bp, Zea mays
agcaggaaataacagcaggaaattctatgtgcttgaatccacataaagtaggaattaacagctgtccaaaactgaactgtcagagtgactgtgactgaattttattcagttagctgaaatagcagttcagtgtgggggtaactttggggtacaatagaatttgctctgaatgttttcaatcatgggttgttataccaagttggtaaagctaaagtcggagtataactttggctaagaagttttggtctgtaccattgaaattgt

SEQ ID NO: 383876 - DNA, 262 bp, Zea mays
actcacagtctcacactcatcaaccggccgccttctcgctcgagcacttccctttaatttctgagcgcatcgtgctgttgagacttgagagcggcatatatatggcggctcagggaagaatgggcggcgctcgtggcagcagcggcgccgtcgtgcttgcgctggtcctcctctgcgtgctccttcacggcgagttcgccgagtcggcggtgtacacggtcggcgaccgcggcgggtggagcttcaacaccgccaactggcc

SEQ ID NO: 383877 - DNA, 204 bp, Zea mays
cggcttcggtccgctctcggctctcgcccctcatgcctcagccacgccgcacgctgccggcactctgcgcccgcctccactgctccgctccgcggccccagccacgctacacgcggttacgtcgcacgccagcacgctctgccgcgcgcccgcccgcctgctcggctcctcccctgcgcctgctcggctgctccgcggtgcctg

SEQ ID NO: 383878 - DNA, 261 bp, Zea mays
cccacgcgtccgtctctctcgcgctctctctctttcatcgccaccatcgcggtgaaatccgcacgcgtgcttcctgtcgattttttagctgtaactgtgagcgccatggccgtggaggctgagtccggtaaatgtcaccgaagcagtgtccgctgctccggctaaggaatgtatcaccaagcagtcatctttcctgtgaggagggcaacttcctggacgatttcaagagagctagcgtaagcagctgccgatctccgcgac

SEQ ID NO: 383879 - DNA, 260 bp, Zea mays
gtcgttcgtgaggtcacagagtgctggcagaggcagagccgtccttgcaggtcagcagacctccaaggggtctccagggaagaactcctacaccagtctactactccaccgagcacaccgtcgacccgtggcaagtccgcgagcttagagtcgctgatacgagcggacaacgcgacgagcagcttcaggatccttgaggaggaggaggaggaggaggaagatatcgtcgtgcccagtacctgcccgaagctgaagccggc

SEQ ID NO: 383880 - DNA, 257 bp, Zea mays
gtctcttgacaccgctagaagtacacaacaatgaactgtggtgtgtagcggaatgctgaaatagacggactacaagtacacaacaatgaactgtggtgtgtagcggaatgctgaaatagaagtggcaacctttctacaccaccaccaaaactgagtacttgtagtccgtctcttgacaccgctagaagaaaaattggcttcaacatcatttgcgctgagtagaacttgaggagataaggcataaataatgtagcatt

SEQ ID NO: 383881 - DNA, 269 bp, Zea mays
cgacacgctctccggatggtacttcgacgccaagaacggcgacagctgcaacgcaccggagaagcagtgccggagctgccagtgccacaaggccctcctttcacactagtagtactattatattttgctagctctgcaagtgccaaccatcaacggccaagtgagcattgatagctaattcgtgtcatttttttaagtttcttctcttttatggaatcattttggtgtaagataatgtatccaaatgctacttacggatatgtaactgt

SEQ ID NO: 383882 - DNA, 270 bp, Zea mays
cagagcatgcatacaagcattggtacaggtgagcttgcatatgctgttggatcaaagctgatggatgtcaggaccttgcccaaagaaactgaaggtggagaagtcagcacaagtcagcaagctgaacatgaagtgccttgcagtttagcagaaaattcgaatttgatttatggttctggttgcacaacgcggccccataaaaggaaaatttgtagtaaatcagctgaaacagttggtttcaatcaacataatgataactctagaggttct

SEQ ID NO: 383883 - DNA, 269 bp, Zea mays
ggatatggaaggtatgatattattggcatgcgtcctactgtaaccatgttatagtccaaacccaaggaggtgcataaggcaaggcttgcttgttacttaggttggggcatagagaacagaaggatgaatggcaacctcgccttgtagaagtcttccagaagcacaatgttctgcctcctaatgccattgtctcagctggttctgtgagttctgcatgcactgctggtggtggacagttgtacatgtggggaaagatgaagaatacaggc

SEQ ID NO: 383884 - DNA, 259 bp, Zea mays
cccacgcgtccgggcaagttcatctagcatctcagcaagcagtggcagtagcaggagcaagagcaggaagcggatgactgttggtggcactaaggatcgcgctacaactacaagggataagatggaaaagggctacactgatcgccgttcttgtcggtctgtcatgaacgtggacgagcacgttgatggggatgaagacaggctcgccattgccaaggtggtggacaatgatattgacaggcacaagaagaatttggaa

SEQ ID NO: 383885 - DNA, 259 bp, Zea mays
gcgcgatccaatccaaggaaccagggaggaggagcgtgcagtggcagtgcaggagcgatggtgttcttctgcttcctggtggaccagcggcggacggtgcggacagcaagccggcggcggggatctgctcgcgctgcggcgggtgcgccagcgtggcggacatggagaccgccaccagggtctgctacctgctcaccgtgcaccggagcacctggcgcgccatcatctgcaccttctgcggcgccatgctcaagtccta

SEQ ID NO: 383886 - DNA, 262 bp, Zea mays
aattcatcaaggtattttcacctagcttattacaattcatcaatcttgcttcactacccatggtaacttgattattttcatgcactaactttttgacgtcctatttcttttcttttcccctttcacctcaaaacactcattttcatctcaaagcactaattaccagatacgccaatgtcatttaaattaattttcagcagtgctattattttttctgctatttgttttggaccgattaatattttgtgtactcttcctattt

SEQ ID NO: 383887 - DNA, 198 bp, Zea mays
cccacgcgtccggttctagatcgcgagcggccgcccttttttttttttttttgctctttccaaccctgaggtattagctgttaaattgtacaggcgttgaatagttttcactgaagccactcagggtagcgctcaaaatctagaatcctcctctgaagcacatcgacaaagtcgtgtttccgaaaaaggagggaaaca

SEQ ID NO: 383888 - DNA, 165 bp, Zea mays
ggataataaccggataaggggcatgcaatgcacgcccaggtggccgtgctcctcgccgccgggcccctccgccaccgtggccgcctcacccctcgtggcaccatcgccagatcccttgccgtcggcctttcaagccgccccactctctgcgcaaaggcggcggcg

SEQ ID NO: 383889 - DNA, 244 bp, Zea mays
ggaagacgctcactagacccaggcccggcccagccagcaagcgtggatgcttaccgcgacacgcgcgtttggtggtgttgatccgctcagtctctctttgttgcaaaaactccaccaagcagcccgccatagccaagaaggccacactcacctttatcatctcacgccttccgtttttctttttttttttggtgtgtggtactacctttttttttaagaaaagaagtggttctgaatatcgatc

SEQ ID NO: 383890 - DNA, 253 bp, Zea mays
cacaagccatgccaagcaaaaccctatgattcccttcctccctctagtctcctcttttcccgccgccgccgccgccatcacaacccagatcaccccctccccatcccaccctgtcccgatggctgctgacgccgccgctgctgcgatgtccgcgacttccctctgcgttgatctcgatccctccaccgtgcgcactcgcatccgcgatgtcctgtccgcatgtgccgcgcgtgccggggaccgcgtcttggtc

SEQ ID NO: 383891 - DNA, 256 bp, Zea mays
atccgtctccccgcccgattctttcggagtaatcggcggcggatcggaggcagaggggtttggaggcctgagctccgatggagatgcacgccgacgtcgacgggtgcagcgtgcccctggccgtgctcctcaagcgggagctgtgcaaccagaaggtggagaggccggacatcctgttcggggaggccaacaagagcaagaaaggggaggacttcacgctcctcgtgcccaggtgccaccgcaccccgggcggcag

SEQ ID NO: 383892 - DNA, 250 bp, Zea mays
  unsure (1)..(250): unsure at all n locations
acgcacacgtacagagtcgggacggtggcgagtggnctggacgcgtgggttctgttccaagcatatactactctatgtacagtggataaactaggacatccacagtttgcctgctgttcatgtcctttattattccattaagctaatagtattattctgttccaagcatatactatctatgtaccgtggataatcaaagtaatggtgttctgttttttagatggatgcaaccactcccaaatactccaag

SEQ ID NO: 383893 - DNA, 256 bp, Zea mays
caagaagctgtcctgctccacgcctcccttcagcacccggtccatcacgaaggacaagtacacggtgcaggcggtggcgccgcgcgcgggcgacggggacaccgccgcgagcgactcgtcggggcgcaacgccacggctgcgtccagccgtgggtccagcgactcgtcgtcgaggcagcagcagcatcacttgcagcagcggttcgacacgtcgtcgtaccagctacgcgccgaggcgctggagggcctgctggag

SEQ ID NO: 383894 - DNA, 253 bp, Zea mays
aagaatccaccccctcgaagcctccgtcctcgccagtccaatctccaacgtcggaactccgaagaaccacccccaaattacgcagtagcccgtacgaatctccgctcgccatggacgccgtggcctcatcccggaacaccgttgcactggcggcgcccgctgcggtgccgctggaggctcatgctcaaaaccctagcattgccatcgctaacccgccgtcgccggagatggaggctacaccggaggcgctcac

SEQ ID NO: 383895 - DNA, 259 bp, Zea mays
gccgccgtcgtctccgtcgctccgccgcacctccccccatcaccgcctcactaaaaccctaatccctagccgccatggcggctgttgcggcggccacctcgcacctcctacgccaccaccgcaacccctaccttctcctcctccgcgcagcatctcatcctcccgtgctttgccccagcagccggagctgtcccccgacccgaccgccggcacccccgacctcgccggcgcggcaccactccctccaaaccccagcacg

SEQ ID NO: 383896 - DNA, 254 bp, Zea mays
agctggttatcatcttgctggttcttggtttcttaagtcggatgatgtaaaggcactacaaaggacaatatcttttgagacaggcatgcaaagtagccttcttgctcttgctttagtagatgacgaaaaagtagaagttgttcgagctacggtttaagatggtgtgacgagtggctgatttcgcgaacctgcagataagacgagcggctaaaaacactatcggatattgctttctatgtgttttaaaatataag

SEQ ID NO: 383897 - DNA, 250 bp, Zea mays
gttctagatcgcgagctgccgcccttttttttttttttttttttttttttttttttttttttttttttttatacaataaggaaccacactttcatccgggacatatagcttgtctcggcaaaacttaattttaaacagaagtgacacggaacgaactgtcttagcactgcccttatcataagatacaaacctagctagggccagatcaaactgccatttcgaggacgctgttgggaccttagacctcagc

SEQ ID NO: 383898 - DNA, 252 bp, Zea mays
gtaatatatgttgctgcgttttctacgttttgtacctgtcgtttcctcttcttcgcttgcctgtaacgtctgtcacatatcagcatagaacttgtcaagatctatgctgatatgtcacagagaacagcaagcgaagaagagaaacaggttacgaaagacgttttccaagacaagtagcgtaatatatgttgctgcgttttctacgttttgtacctgtccgctgggcccgaatggccagtgactgtaatagca

SEQ ID NO: 383899 - DNA, 272 bp, Zea mays
agctaatgtcgacagcgacgtgctccaaggaagcggcagcccggagcgcactgcgggatctgcggggagccgacgactccttaaactgcgcggacaagaggcgttcggccctagtaataagagcggtggtccttctaggcgctgctctatgagctattgcggaagtcgatgctctcgtgcatgaccgtgagcggcggcgaaggcgcacacggcggatgcgggatgcagattaggttgcccacggacgatcagcatgtagctcacgtcacgtt

SEQ ID NO: 383900 - DNA, 259 bp, Zea mays
ggactccctcgttgccctcgacaccaagaccggcgccaaggtatatgcgcggctctccagcatgtcgctcccgcattctcatccgctccgtggcccgcccgatccgcgcgtgcagggtcgccgctagcgtcttgtccaccccaaccgggtcgccttgggtgttgtcaacgattttgagttgctttgtttgtggacttagtgcggaataccctggatccgtcgcgttaattttgtagactccctgatcttggtgacagac

SEQ ID NO: 383901 - DNA, 263 bp, Zea mays
gtggctatcacacccatttttacttatttgtcattggtaggacgatgaggtcataaggtatgtttggttcatgaccccagctggtttcatttccatttgagtggctagtttttacattggtttgccaagcttatcacaaccctcctttaccagtcttgggacctgctatgttgagacaacataggcggaattttcatgaccccagccggccaggccaaatgtagtaatgcactaatgcctagaaattttggctgctgtttgtt

SEQ ID NO: 383902 - DNA, 146 bp, Zea mays
tgttcgtctactgttggagctggaacctgaaacagatccagtgtggcattatctaaatattcagaatagcaggattcatggattgtttgaaaagtgtactcaagatcatgaattgcgaatggaagttttgcaaaataaaattcgtg

SEQ ID NO: 383903 - DNA, 264 bp, Zea mays
ctctctctctcgcctcgcttccttcgaatccatccatctctcgcctccctttccaattcgatgcctttgtagcgctgctgcctcgcccccgccgcgtcgtcgcgggtccccggcttcgcttgctgctgcgcttccagcgtcatggacgggggatccggcaatgcctccagcggcggacggcggtgtgctgctactacgcgctcctcggcgtccgcaagagcgcctccgccaccgacatacgcaccgcgtaccggaggctcgcga

SEQ ID NO: 383904 - DNA, 292 bp, Zea mays
ggaaacggctccgaccgtgccggacgtgtgcgtcggcggggacaaggacgggagacgcggacgcggacgcgagcgccgtggactgggacctcgacgccgggctgagcgcggcggcgtggtggacgtggggcgtggacgaggagaagctgctcggctggttccccttcgtggaggaggacttccggtgcgccggcggcggcgccgctgaggtggccgccttcgaccacgacatttggagcatctggtgaacgaacctgtgagagacagacaaccgagccggtggcgatgcttc

SEQ ID NO: 383905 - DNA, 295 bp, Zea mays
ggaataggcaccgacgtggggctagtggaggtaggggaagaggcgtcagtggcagaggagaggtccagtggtgggagaggaatcgtcgccattcaataagaattacaactacagagccttcaaaataaaatccttgaaagaatctaatgcacttattgttgtgtcacagtactgaagtattggggagggaggagatggcggctgaatgtccatggaggtgatggttaagagagcagggaggggcagaaactggagaaacagaagagagcttggttaattggctaataggtgtcta

SEQ ID NO: 383906 - DNA, 280 bp, Zea mays
atgctttctcattgttttttgtttctcaaacttcaaacatcatgttttcttcatgcttttgtataacattcctattctttaggcatatgtaagtgaccttcatgataaaatggtgggaatcagtctgtttggtaccgtaactagtgtttgcaaagtaagcacatcagggactacgttctatttggagttggaagacacaacaggagttgttctgatgaagcttatctttgttggaccctggtacttttgcacttaagtgatggctaatctatttattttc

SEQ ID NO: 383907 - DNA, 280 bp, Zea mays
agcccgtgagatacagttccagaattgctgggggcttgaagatgataggccagccaaggcaggagagtaaaaatcctgttgttagaagggtgctcactattaacaactcgaggtctagaatcggtgataacctcatggggcgatctccagagtctagaagttgttacctgcaacaaaatcaaggatgaggaaataactcctacccttgcagagcttttctccaatctcaaagagctgaagtggcggcccgacaacaagtcacttcttgctgcaacctcgt

SEQ ID NO: 383908 - DNA, 133 bp, Zea mays
gattgatgcggggcgctcttggagccaggggctgtaattttgtcaacagcttcccgtactcccccattcccgactttgatgaggctctcccattgtgagagccactgcgccggccccttccgtttcatcccct

SEQ ID NO: 383909 - DNA, 264 bp, Zea mays
gacagcccagcacggcggcgatggcgacccgcgcacccttttttagctgaatcggcggccccgtcttaagtttaatccccaaccgccccgcgcgcccaattattcgatcgtcggcctccagtctaccgacgcgccgtgcgctggtcggcgacagcgtgcctggacactccggccggtcgccggggccccccaaggtctggaccgagccgacgaaggaaggaacggcctgcagccagtcagtactccagtagcacgaaacggaac

SEQ ID NO: 383910 - DNA, 265 bp, Zea mays
tgctgtaatacatcatgcctcgtttaaacctgcactgcaccgtcacctcgtcgtcctacggcagctcctccgctcgtctctgcactggcattttctgatttagactagcgattcaaaccttctgttttgactcagattgtgcgttctttaaactaggccctgagaatgtggcagttctttcgcctctgagtggtccatttactgctgcattgcccaccaccctggacatccgtgcatcacagcatgtgcattagcttcttatctc

SEQ ID NO: 383911 - DNA, 256 bp, Zea mays
ctcataccaacgacaaaaaaataaccctattgggtcactcatataaactggtgggtatgggtcacccatcgggtcacccgtacccacaaaaattaaacatctatcaaaatattatattatacaaatgttaagtatatccatctaaataccattacaaaatttctagcatcattacatgttccattacatggtaattaaattgtcgttaagcctatgacattatggcctaaaaggttgttaaatagtaaaaagatgg

SEQ ID NO: 383912 - DNA, 248 bp, Zea mays
cccacgcgtccggccatgtactacagtgttgatccaactcatggtatagcaaaaaaaaaggaaccacttttctcatatttgcaaggtgaatcgatcgtgtatatgcgctggttcatgcatgtaaatatgagaaaagtggttcctttttttttctgtacagttgccatgtactacagtgttgatccaactcatggtatagcaaaatggaattcatagatttgcctttgtcgtttaaaaaaaaaaaagag

SEQ ID NO: 383913 - DNA, 261 bp, Zea mays
gtcttattcaaggtctgtttacctgccccgagggagacatagcaaggaactctgttatggatcatagtgatatatatgctggtgcccgtagcttggcaagagcatctgaccttggaaatcaataccatagagatgctaatccagtgtctggttccagcaacaacatggcaaacaattaccatgttggaaggagacctggggaacataccccagacagccatgtgttgccaaccggtgctacaagagtgaatgaaggatcta

SEQ ID NO: 383914 - DNA, 265 bp, Zea mays
cccacgcgtccggatgaatggaaactgcacaaagaacaaacaactaaaattcttatgccaaagatctcatggtgtgatggtgacaacaaactgttagggtacctcgttccagtaattaccagtcatgtggttttcaggtcatcattcaaaatcaacacgaacaacatcactgatttgttgtcaactatagtgcatactgaaacaaagttatgttggtaatcttgcatataatccaataattacctcgttcgtgtggaaaaggtca

SEQ ID NO: 383915 - DNA, 244 bp, Zea mays
cccacgcgtccgccggtgattcgcgcggcatgagctcgggttggaggtggtgcctctgagtcccgctggcccgaggcggatgcgcgagggcatgtgggtttctctggtgtggatccggagctgcgtgggcgtcacgttcgtcgatttccagagcaggatgagagccgactagatctctcggctccttcggttgctgcgctccgtcgagagagttacctgtgaccggaggaggttgccggagggt

SEQ ID NO: 383916 - DNA, 279 bp, Zea mays
cactttttaagaggaaaataacaatttgaaaaaagtgctgcaattctcgtgcataaggatatttcttttacgcgaaagggccactaccgtaaaggatatttcttttactcactgcttactgaaaaaacattttcttgtcacattgaatgatcgaaagatggaagcgcatttcagttcaaatgaactgattgacccaagattagccggcaacttcactgcagaaggtatgaaggagcttgttggtctggccttccaatgcttgaacccatcatcaagacg

SEQ ID NO: 383917 - DNA, 265 bp, Zea mays
atcagcttcttgaaggaagacccatccacagcatgtgccgcggtggtagtcctcaatgccgatactttagaagttgtccatgaagagttcaatgttgttcgactgcaagtgccatatattcctggttttcttgcattcagagagtctagagccaagggattctagtatgatcaatccaaaatcatagatcttgagaaaggctccagttcttcttggactcttggaaaaggtgaagatcaatgcacctcatttctgcccacagttg

SEQ ID NO: 383918 - DNA, 254 bp, Zea mays
cccacgcgtccgcccacgcgtccgggtcagcctgtcgccgcgcggtggcgccgagcaccctaggttcggcggcacgctccccgccagagtccgtgcgcaccgctggtgccatcaacgcccggaggccccgtgtcgccgctgtacggtcacggtggggcggggacaccttcgccgcggctgcaacacggtgctgcctagagctctggcacgttaacgtatctattggcacgccgcttcgccatgagtcatcatga

SEQ ID NO: 383919 - DNA, 125 bp, Zea mays
cccacgcgtccggaaccagactcattggtgtatactcccgcgtcccgcctggctccggggaccattcgtcgacccatctccggcgaaagcttacctctactaccactgaagcgaaggcgccacat

SEQ ID NO: 383920 - DNA, 265 bp, Zea mays
  unsure (1)..(265): unsure at all n locations
aatgatgaagaggatggagagcatatgacatctgtagagacaccaaggcgttctgttgactcaacatcatctagctccaagaagcggaagaaagagtggaaaggaatgaagacttcatcaagtgacccgcttcttgatgtgttcaatgaagtgagtggtgatctcaaggtggccaccatgtcaattggaaaaatggcgcaactatggatcgtgaggcatccaaccaagagaaggcaagagatgaggatgccacacaanagctaag

SEQ ID NO: 383921 - DNA, 260 bp, Zea mays
gagcaatcttgaagtcctgatgcttggggatcttgcgggcaaccattcttatttaaatgtcataggagcgtgggcaaacctttcagtgttatctctgagaaaatgtggtcttacaggtcaggttcctaatactcccccaaacttgcccaagctaaaatacttggatttgacatcaaacaacttatcaggatcaataggaggactcttgctttcatataagacctcaaattacatatatgtaggtggaaacgacttaagtg

SEQ ID NO: 383922 - DNA, 184 bp, Zea mays
gtcaccaattagattcaataccaaattagccatgatattaaaatgagatgtcactggaaaattagattcaataccaaattctattgtttagatgtctattggagtgtagaaccgaaaatatctcatttatttcggttctcaaaaagtcagaaccgaatttcataatggtttattcagttcggtt

SEQ ID NO: 383923 - DNA, 257 bp, Zea mays
ccaagagcaagttcgtcatcgctcgcgagggcaacgtcgccgagacactgtacaagttcatccggcccgagctggtgccggtgcagtacggcgggctgagccgcgccggcgagctcgagaacggaccgccgaagccggcgtccgagttcaccatcaagggtggcgagaaggtcttcctggagatcgacggtatcgagcgtccttaattcttattccaggccggcgcaacgataacgtgggacctcgtcgtcgggggc

SEQ ID NO: 383924 - DNA, 281 bp, Zea mays
gcgagtgcagtgcagtgcaggcaggcaggccgagagaagagtcggcaggaagcaaccgagaccgcgaggaagcagcgagctgcactgcagcggcgcagagaaaaaaaaaagaaattctggaatagtttttttcttccctttggctccgtgaggttcctgtgcttgctcgctcgctcgcctgagcttcgatcgagccgtacgcgggccgtcgggagctcaatcaccgctctccgggagcttccgagggccgtcggatggagccgtacgcggcgacgaagggc

SEQ ID NO: 383925 - DNA, 277 bp, Zea mays
cccacgcgtccgcaccacgcgtccgggacgctggtcggaacccagtagagcctagatgtttcctccaccttcgccaaagaatgtgcgatgggaggcagggatgcaggagtcaccgacagagatcaatcggtccttcaagagggcggatggcatccgcatgggagatctctatgcaaacttgccgtctggttctaagattaaggacactaaggatgaatctggcaggttctctggtgtcttctcttctagtggttcaccaagacatggtttctcaaga

SEQ ID NO: 383926 - DNA, 279 bp, Zea mays
gacgtatttctctctctatctatacggttccgaagaaggtagagagagaaactcgaaggggagaggacagaagagggagatacaggaaatggttacgagatgaaacattcaggccataaagtttgcgataggcattcatcatcggagtctgatcggtctcaccaagaagcatcagcagcaagtgaaagcagtccaaatgaacacacatcaactcaatcagacaatgatgaagatcatgggaaagataatcaggacacaatgaagccagtattgtccttg

SEQ ID NO: 383927 - DNA, 265 bp, Zea mays
  unsure (1)..(265): unsure at all n locations
gaacnagctccgcggacctggtgaaaatgtggaagcgaagatgaggcagaagttgaagaaagaagacttaagaagcttgcacaaagagcaaaatttgatgcacaatatgatggttctgagttatctgacgatgaagttgatgatgttaagaagaaatccagacgagaacagtccaatgaagggggctattttgacaagctaaaggaggacatggaactacgcaagcaaatgaatatatctgagctcaatgaccttgatgaagaga

SEQ ID NO: 383928 - DNA, 266 bp, Zea mays
cggacgcgtggataggaattcttttccgggcacacatctcttcatgcagaagatcaggagaagaattgctctacaacctcaggagtttcaaatgatgttgatctggctctgtcaattgcagatgttgaagcagctattagacaagcagaagatgaagctgactatatggctctcaagaagctggaggaggaagaagccgtggacaatcaagaattcagtgaggaggctgcgggcagacaagaggaggatgaattggttaatgagga

SEQ ID NO: 383929 - DNA, 251 bp, Zea mays
tgcttttttttttgttaaaagaatttgtttttgcaaagctagctcctacgctgccgccgccatgcaccgcttcgccgccgacagggcgcgccgccggtggccgcgtccctggagccacttccagagcagcagcagcgccgtcgcgtcacgctccggcgcctcgccatccaacctccccagtcggggcggcggcgcggttgctgccgacccatggcgagggccgccatctccacggcggtcgcgggcatgcc

SEQ ID NO: 383930 - DNA, 261 bp, Zea mays
ggaccgtgggatcaataggaatatgtctgctggccttccacctgaaagttcacaattaaatccattaattggtcgtaaagtcatgactcggtggcctgacgataatagcttttatgaagctgaaataactgactatgatgcatcaaaggatatctatacactggtttatgacataaatacagcagacgagacatgggaatgggttgacttcaaggagatggcacctgaggatataagatgggatggcgaggagcctgattt

SEQ ID NO: 383931 - DNA, 260 bp, Zea mays
cagctaactctactctcgctgcgcttcccctcgccgttcgtcgccatcgattgacattggtcgaacccaaccgcgcactagatagatctacgtcgaccggcggccgtgatggacgcgcgctcgctcgctcgctcgctcgtgcgtcgacatggcgaaatgcagcagcaagatccggtacatcgtgtggctgcggcatttgctgcggttgtggcggtcccgcgcggctttttgcactgcggtttttttggtgcacgtggtgt

SEQ ID NO: 383932 - DNA, 261 bp, Zea mays
ctcccatccacctcatcgccacgccgccaccgcaccccaatcacacgcgcgccacccgcgatgacgccggccgcgcgatctccggctccagcagccacgtcgtcgtctcctccgcccgcctcaggcagccgttcacgctccctccgcgcaccgcttgcccaatcgccgccgccgcctcgcccgtgacccgccgcggggtcgcggtcgccgccgtgtcgagccccgttgtgtccgccgccgcggggaaggatgccaaacagg

SEQ ID NO: 383933 - DNA, 239 bp, Zea mays
gggcatcctagctcgtgcgtctctcacccggtacctgctcctcggcgcctccccaaccaagcctccgcaccttcctcccgacgcgcccctcatggcgaggaggcgctgctgatgcctcccggcgtcggatcggacgcggcggccacgacacctagccgcttgcagtggtgctcgccgagctctaggcgcctaatccgccgacgctgctcctcggatgctctccgagagattcacgcctc

SEQ ID NO: 383934 - DNA, 257 bp, Zea mays
ggcaggagaagatggttagatattaaaaagctgggatcaaatggcagaggacactttgtttttgtaacaaatcttgccccttgttctggagtaaggattcacttgtggccagaaaaacatcattcgcctgtgcaaaatgaattacctgccagtaaaaagatagtggaagttacatcaaagatggtccaaattcctgcaggacctgctccaaaacaggttgagcctggcagtcaaactgagcaaccacctccttctgg

SEQ ID NO: 383935 - DNA, 260 bp, Zea mays
cccacgcgtccgcgacgacgacacagagaacctcgcccgtgagcaatcatctgtctcgggccatttttcccatgaacaatctgatcgacgtttttttgtgcctaggatcccaatagataaattcgggcacttgtccaccgttgatgtgataaatgatttatatatgttcatgttcacatctctcgctgttgatgatgttttcttttaagatggattctatacctagtgctttaaggctctcactttattagtaacactag

SEQ ID NO: 383936 - DNA, 256 bp, Zea mays
gtgagggtgagctgccaaagactgatttacttcttgctagtgttcgtgaccacctcgtcaggaagaactgcaactactcagatatctatgagaaggtgcgaaggctaaaggaacggtacaagaaagcagcgagcacgggcattgtgccaagtaaagaagatgggctccagatgtataatctctcagaagcaatctggggagagaaggcaatggaggctgctgctgccgttacgtctcaaaagggtggtgctgttat

SEQ ID NO: 383937 - DNA, 258 bp, Zea mays
cggacgcgtggcgagatctgccccctcgccctcgccctgctccaatccccatctccttgcggaccgatccaccctgctccaatcccccggcgatggtcgtgtgcaaatgccgaaaggcgacgagggtttactgcttcgtccatcaggtccccgtctgtggcgtgtgcatatgcttcccggaacatcagctatgtgtggtgaagaactatgctgaatgggttgttaattctgagtatgactggccacaacactgttcgt

SEQ ID NO: 383938 - DNA, 253 bp, Zea mays
gctccaggcggtagcggcgggtacgatgctcccccgtcaccgtccagcgacacctccccgacgacgcccggtggtggctactacggtcccccctcgccatcatctgacacctccccggtgacgcctcctggcggtggcggcggcggatacagtgctcctccttcgccgtccagtgatacctccccatcgacgcccggaggtggtggtggctgtagtgtccccccttcgccgtccagtgatacttctccaccga

SEQ ID NO: 383939 - DNA, 242 bp, Zea mays
gacacgcgtccgcggaccgtggcgagctggccgcggcaccgccaggcgcgcagcgcgtcgaacggcgatcgcacaccgcagcacgggagcagaggcccgaggttaattttgtgaatttgtgatttgaagttttgatttgattatttatacggtagtaattccatgtttaattataagcaaatttttgttatagtcttaacttagtagccccctcttggattaatcctggatccgccactgcc

SEQ ID NO: 383940 - DNA, 255 bp, Zea mays
ttctagatcgcgagcggccgcccttttttttttttttttttttttgagcattgaatatgcacttcctctgcactttcctgtaactggaaacacacgcagataaccgagttcacattttgtaccacactaaccgtcactgacacagtaagacctaagacctcatcaagcacgctaaaaaaaactgcgcttgctggaagggatgttcatcacacaaatctaacaatcagttcctgtaatgtacatcgacctacctac

SEQ ID NO: 383941 - DNA, 254 bp, Zea mays
ctattacaacttgctggaggaggtgaagcaggcccacgattccgcgcacaggctcatcggcggcttcggccgcaactactggggacggggatcaggcggcgcccagctgcccagatggctgttctacctcagcaaggcggcgcaccgccagtggtgtcaggctctgctttctccccaggggcatggccaggagagagcagaaccggtcgcaacacaattacaggaaggattgcatattctggacacttgagtgg

SEQ ID NO: 383942 - DNA, 263 bp, Zea mays
ccacgcgtccggcatgcgctatgtatagaggatgtacggcggtgctctatgcgctgtgctgatttctgtgcacgtgctgacgagcggtaaaaaataatatagaatgtcaaatctgagtagcactgttgatatagaggatgaaatttaggggatattgctggagatgaagaagatatagagtacagaatcttttagagagtgctgtaaaggacagaggatattcttttaggggatgaaatttaggggacgttgctggagacagc

SEQ ID NO: 383943 - DNA, 272 bp, Zea mays
cccacgcgtccgcattttacatatacatcaagcttttacagaacttgtgatctttatctgatcatttaacgatctgtgggttatcagaagcgataaccctcagttgtgtcagatggaggatggatgtgcaccaccagtttacagccctgtatacttcacccagtaaccgatcactctgaaagaatgaactatctgtggctccttgatgagcccagcatgtttgttctataggttcgcttaggttaaacgctagatcgtcatgatggaatgtg

SEQ ID NO: 383944 - DNA, 108 bp, Zea mays
catggatacatataaagtataacaaatagaatgtgcaaatccaaactaggcttacaaattctatttgttatactttatatgtatccatgaatagaaaattacgcctcg

SEQ ID NO: 383945 - DNA, 267 bp, Zea mays
cccacgcgtccgcccacgcgtccgcgaaccgcactctaccgcgctcctcccgaaccacagctatgctcgcccaccgcctcctcctcctcctcgccgtcgccgcggcgagcggcaccgccttcgctaagccgacggcgtacgaagccctcgctgactacgacttcccgccggggatcctccccaagggcgtggtcgcctacacgctcgacaacgccacgggcgccttcacggccacgctcgacgactccgcgtccggcagcgggtcct

SEQ ID NO: 383946 - DNA, 264 bp, Zea mays
gcggaggaagatctcgggctctcagagctgcatcctgaacccatcgcgtaggaaggggcaaaggagtcggagctgatccggcagtcgctctctctcgtaaaatctacgcattgcgtggccacattggctaggaatttggaagcaagtactctccgcgttcagtaatcccaacggattgagtacgatttgacgcatttgcggccgagctttcttgcacccaagatgagtgggcatggtgacactgcgacctcagctaagatggcg

SEQ ID NO: 383947 - DNA, 221 bp, Zea mays
cggacgcgtggggctgtctgcatgctctgggcgggaaggagagagagagagcgagagagagagagagatatagtagagaggctagtaggtggtcctcgaacggagatatttgcggtgttcagcgggcaggtggtggacgtgccggcggactggtggcggcgggcaccggacgccgtgcccaagacgaagcgtcgcagctcgtggggcgcttcctagccgcg

SEQ ID NO: 383948 - DNA, 253 bp, Zea mays
cggacgcgtggcggacgcgtgggcgcgagcggccgcccttttttgttttttttttgcgcacaatccaacatccagccaggtcaacattgcaggttagttcaatcaactcgacatggcgcacaatgcgctgaccactctatgtacattcactcagattcccaaagccacaccaaatcagagtatttcatgattaggagatgaaagccctgacacactctgaaacgtcataaacatctcctgtcctggggcatgt

SEQ ID NO: 383949 - DNA, 250 bp, Zea mays
cccacgcgtccgggcggcgagtccgagccccaggaacgaagggcgatggcggcgatgatgatggccacgtccgagtcaaagtcccctgcccgcgtgctgaggcggctggctggcgccgcggtcgccgccgtgctgctccgccgcaccttcagcgcctccaagtgcaagacggaggcgcggatggcgacggcgctgatgaagctgctgcggaaccggcaggaagcgccagtgcgccagatgcgccgcgaca

SEQ ID NO: 383950 - DNA, 255 bp, Zea mays
gccaccatcaccagacggtggcgatgagaagagctcggtgcggaggccttctcatcgccaccatcaccagaaggcttccgcccctctctccagtgtctctttctctctccatcgcatggctctcgcgtgcgccactcacgcgtgcacgttcctcctcgctggcccggcgagatctttccacgcccagccctaccaggccaaggtcggcgtggtggagttcttgaacggcgtcgggacaggggtggaagcgcacgc

SEQ ID NO: 383951 - DNA, 248 bp, Zea mays
ctgcttttttaaaggtgttttctttgttctgaaaaaaacttcggcagattgctgcctgtctgtgactggtttggtttatagcaagctattagatgtatgacattttcattggttaagggctagtttgggaaccccatttcctcaaaggatttctatttttaaggaaaattagttcattttcccttgaaaaataggaatccttgagaaaatggtgttgccaaactagccttaagcggggctttaagtcg

SEQ ID NO: 383952 - DNA, 242 bp, Zea mays
cccacgcgtccgcccgttcgcccccgcgtgctctcttgtcgccactgccgcggccgtcgctctaccgcctctacgccaggtgcctagtcctgtcctcgccggtcccttcgccgagttttcatcgggtccttcgccaggtctccatcggtccggtcgcctgcgacgagcatccaccagctactgggtgaacatgggcacaccaatgtcgccgtggaaggggcggctgcgctctcaccacgcga

SEQ ID NO: 383953 - DNA, 264 bp, Zea mays
aatgccttcacagctagggaagccggcaagatggtgctgtactcgggggctgggacctcgagtacggcgccgagtacgtgccggcggccgaggacagctacacgctctgcgtgagaagacgaggatggtctctgccaccgccgaggagcccgtgcacaatgacttcacagctagggaagccggcaagatggtgctgtccatagacaattctggttcccggaagcggaaggttgccgcctacaggtactttgtgcgcaagtcgtc

SEQ ID NO: 383954 - DNA, 258 bp, Zea mays
agggcagtgcacgttcctgtatccatcgctcgattcatctccctgtctttatcttctccaagccgtggagcttcttccccagcgcgcccctctccctggctcttccctgcgcgccgcggtgctccaacttggccctgctcaactcgcctctacacagcgttcctctgctcggcccttttccccctgcacgcgagctctgcgtcttcctgcgcgccggctcctgctgggccgtgcgccctggtggctatcgcgactgat

SEQ ID NO: 383955 - DNA, 255 bp, Zea mays
cccacgcgtccgcccgacttcggccaggacctcttcgtccgcctcgccgccgtggatctcgatgtagaagctaaatcaagggaggcgcgcatcaaaatcgcagtcggcgccacgatctcggcgctggcgcttcttctagcagtcgctggtctcctcatctggtcatggaggagaaggctaacaagaacagacggatcaagtaaatggagtagctcccgcaccaccggccgccggtacgagggaagcagccacggt

SEQ ID NO: 383956 - DNA, 254 bp, Zea mays
gtcttcgcgagcagcgaggcatcacacgcgcctgcacgatctcctcctgcgagcgagatctcaccaccgcagcggcgccgtggccatggcgggaaggtactaccagggccagggcggtggcgggggcacgtccatggaggtagtcagcacgccgaaccaggagctggccctcaccaactgtgcatacgtctgccccgcggacctccgtcgcttccccaacgcgctcgccgtcgtcgccgactcctgggtcttca

SEQ ID NO: 383957 - DNA, 277 bp, Zea mays
tgaagggttataatggcaacaaagaaatgcttgggaaatgtgaacagttcttcctggagctgatgaaagttccacgtgtagaggccaagctaagagtttttgctttcagaattactttctcaacacaggtagatgaactaagaactaacctaaccaccataaacgatgcaacgaaggaggtcaaagaatctctgaagttacggcagataatgaagaccattctcacattggggaatgcattaaatcaagggacagcacgaggatctgctgttggctt

SEQ ID NO: 383958 - DNA, 274 bp, Zea mays
gccgatgatgcctcctcccttgcaaccgtcgtcgtcgacatcgtcgtcgcagggacagggacagggacagggacagagcggcggcctcctcggctcactgttcgcgctcggcgccgcgggcgcgtggccgccgctgctcgaaggccgcggcgcagggtcgtcgttcgacttcgacctcgggctcggactcccgacgggggccttacacctgggcgcggccggacaaatgcaaggcctcgggctcatggggggaggaggtcctccgcagccgggt

SEQ ID NO: 383959 - DNA, 275 bp, Zea mays
cgctctggctagagctgctgctgctgccacacccatatacgcatggctccgccgcggactggcctgaaggccctgaatctcaaacactacatcctggcagctctgatggcgatcctcgccgtggcggtcgtcgtcaccgtcttctccgtcctgctgagccctgcacgcattttcttctccgtaaccaatcctaggagccacctgttggtgggcaatggaggtgcgaatctcaccttcaccctcgccgccaacaacaccagccagcgcgcggcagt

SEQ ID NO: 383960 - DNA, 266 bp, Zea mays
cagatttgaaaaatctcgcgagagggccttgtccttgtccacttcctccgcttcgccgtccctcaaagcagcggaaggggagaggccagggtgcagcagcaggaccccaacggcaacctccgccacgcaccacggagcaaccaagcagcaggtaaggcaaggcaaggtaagtgacgagacaaagatggtgcaggaggagctgccgcaggcatggtggttcgacagccacaacctcgcgaggccgtcgccatggctgaacagcacgc

SEQ ID NO: 383961 - DNA, 272 bp, Zea mays
  unsure (1)..(272): unsure at all n locations
aaaatatgccggtttgagcagaaggagatgctgatggagaaagagcggcagcagctccattttctaagggatctacttttcacagaccaattggcagtcatgcagcatcaacaaaggagtccagctgtagccacagagtgcaagggtgatgagaagccaaagcccgtggctagcatgagttgatacgagtagatcctcagcgtacatnggtttcacttcagatgtagcattggagccgcgttcatccgcatctgccgttggtaggattggaa

SEQ ID NO: 383962 - DNA, 238 bp, Zea mays
  unsure (1)..(238): unsure at all n locations
cccacgcgtccgcccacgcgtccggacccccatctcaaggtcgaggtcgagggctcctctctctctaccatctccgttcgatcccatcgccccgccgccgccatggcgtttctcgcgcgggcgctgcggcagtccaactggcgcctgtcgtcgcgctgccccgccgtggccgcctcctgccgttggatctccccgaccgccgccgtcggatcgncggagccggcacggctgtggcgtc

SEQ ID NO: 383963 - DNA, 260 bp, Zea mays
cggacgcgtgggatgaagtagctagttcatgatggaaaataaaatatttcacatggacattgagggacctgtaattctgattaaagtatgaaacacaagtacacaactatggagaatacaagtatttcttaaagactggatatctctacttaattgaggctgaatgtgctatcatcttctaatattgaaacacatgctttcagtgactttggaccagcaacgattggtgtacagtttcatactcccatcatgtgcttgcc

SEQ ID NO: 383964 - DNA, 271 bp, Zea mays
ggccgccctttttttttttttttctaaaaacatagcattaactattgcatggtaaaatatagtgtttatacatcaagaaacttaagtctcgttctactacttagtctatgttcaaaagctctaaaactgatagtaagtcgctaaagttacttgagagttttagaacgggatacctctcagatagttgttagttgtcttaacacaattgataacttattagctaaaaactagctctagagatttgaaacagggccttacactatttttctgt

SEQ ID NO: 383965 - DNA, 220 bp, Zea mays
gcgagcggccgccctttttttttttttttttttttttttttttttttttttttttttttttttacagaggtcaaaaagaatgcctgaggctctcatcttacttgcattagtagtatacagatattaataacaataatagtaatagggcttacaatggccgctagaaccaagtacagccgaggcttcccttggtgtgtaaagctacccgttaccgtatggg

SEQ ID NO: 383966 - DNA, 249 bp, Zea mays
cggacggtgggacggacgcgtgggttggttgatggcatacagattggtgtagctcagaacccacagaagacagatggcacaaaagttggcggctagaaatgcacttgttgtcttgaaagagaaggaaaccgcagcaaagaaagacactgaaaaggatggcgagaagaaaaacggttctcagttcactaggcagactctgaacgacatctgcttgagaaggcaatggccgatgccacagtacaggtgtat

SEQ ID NO: 383967 - DNA, 273 bp, Zea mays
gactttggtagatcatccaaacagggtgctggtggatcagatggtacacagagcagtgcatcaggatccagcagttctcgatttggttggctagtgcagaagactatgggattagtgtcaaaatcccaccgccaggcaaaattaggggatcagaacaaattttactatgatgaaaaattgaagcggtgggtggaggaaggtgctgctgttcctgccgaagagcctcctcttcctccacctccaacaaaaccatctttccagaatggtatgcta

SEQ ID NO: 383968 - DNA, 266 bp, Zea mays
cggacgcgtggcgagctgcagggagggagttgggaggagaaacagagctaccggggcgatgggcaccgagctcgattcgcacttcctggcgctcaccgccatcgttactgtggggtaccagctgctgttcttcatcatcacagctctcctccggttcgataaggtcaccgatttcgcaggcagtacaaattttatcataatcgccatcctaacattagctttgaagggagcatggcatttccgtcagattgtgctgacagtgcttg

SEQ ID NO: 383969 - DNA, 264 bp, Zea mays
gtgggcgccgttgagggtcaaaatcttcttgtggcttgcctggaggaggcggctctggaccgcagacagacgacggcgtcacggactcgatgcgagaaccacttgccacctctgcaatacagcggaagaaacttgcgaccatctattggccacttgcagcttctcccttcgagtttgggatggcattttgtcgcaattggggcttcacaaaccgtcgctaacggactgcaattcagtccttggttggtggcaaagagtgcggga

SEQ ID NO: 383970 - DNA, 277 bp, Zea mays
ggatttcagcatcattgactcagtgtggaggggagagaaaaccgagggtctccacccaaatcggcgcccgtcgccgtgctttccgcctcgctgcaaccggttggtgtaccatgggggtgtcatctgcgcctacggagtgtgttcccagcaagttgcgggtctcggtgggcacggattggtggcgattcctcgctggagtcgggctccgccactgatccatcgtgcctcattgtgcagctgccgcatcatctaaaatcgaggtgtgaacccaggatga

SEQ ID NO: 383971 - DNA, 278 bp, Zea mays
ggacggtccgcgatggcgcagggtcgtcttcttctcctcgtatgacctagatttcgtctcctgggggagagaccttagggtgctccaggtcagcaggtcacccggggcgtctccagatgacgtagagtcacctagaaattaagagatcaattcgaagaagagatcttgattgaagtacacgaagtagatcttgcccctcaggaggggtaaagatcatagagttgtcctggggtcggcaggccaccccaggacgaatctagacgacgtagagtcgaata

SEQ ID NO: 383972 - DNA, 269 bp, Zea mays
ggggacggggacggggactgggactggcagtgtcactgctaccatcgcgccgcctgcacgcgccgccgccagcgacgcgcggcgcgcggcatgcatgatgacgcctggtgacgtcagcttctcctcgggctcggacggggaggacacggatgagaccggcggcggcagcgggaagcggaagcgcgacggcgtggaggactaagaaaccgcaaactgtaatgccgttgacaccacaggcgccccaacaaccgcagtacagccacgccagg

SEQ ID NO: 383973 - DNA, 159 bp, Zea mays
gatgattctcgagaaacttcaaaagaaggatacatatggagtgtttgcggacctgtggatccagaggagctgcctgattaccacgatgtgattgagcacccaatggacttcagcaccgtcaggaagaagcttgccaggaatgcatatcgctcgttcgag

SEQ ID NO: 383974 - DNA, 153 bp, Zea mays
caaaattctccccaaccccatggcggcgagtttgtggcgggcggtgatgggcaccggcgcggcgtccacgaacaccaccgactcctcgggcggcggcgttgagttctggcgcgccccggaacgcgtgggttggctgaccaagcaaggcgagta

SEQ ID NO: 383975 - DNA, 265 bp, Zea mays
agcgtgcacttggatggcgtgacaatcgttgatgacgggggaggggtcgtcagtgaggcgggtgctgcggcggatgccgtgggagatgccgccggcgccacggccgacggcgtcggggagagtgccggaattggctgttagcacagttttggacctcatggacgggatccatagcctcaccggactgccgtggtggatgacaatctccttttctactgtggccatgagattgtggatacttcccgtcctcatagtgcagttacag

SEQ ID NO: 383976 - DNA, 248 bp, Zea mays
attgaggtcaggttttcatggcaatcctgtttctacagctcctgagagagaggttacagataccgagcaagttcccgagacagatagccaagctggtaatgctggttgcgatgaccaaagatgtgacaacacaggaggagagactatgccactagaagatgatatgctgctcccagataacgaggaacctactgcattgctcaaagatgcagggcagccacaagcaaatgtggttcctattccaatcc

SEQ ID NO: 383977 - DNA, 252 bp, Zea mays
cccacctgcaacccccacagcggtaagttgcggggaggagaaggggggggctgatcgccgccttccccaggctctttcttcagttcagtttcaaactccttagccgcctgctggaagctcttgacggtcttgccgatgctgcggccttctccagctcgctctcgccccgcttcctcgccctatcctccccgaagccggccgcgcccgcggccacagccttcctccccttcaggctgccgccgcgcgctgtct

SEQ ID NO: 383978 - DNA, 252 bp, Zea mays
cccacgcgtccgctggatgactgcatgcttcacggatgggctgcatctgtctgaagaggggagcaacgtggtggtggaagagatcctcaaggtgctcaaggaggcggagtgggagccgtgcctgcactggaaggcgatgcccacggagttcgccgaggactcccccttcgacctcgtctcctccagcggcgacgccaccgtcaacccgtcggagtggacagtccacaggagaataccatgggactgactgac

SEQ ID NO: 383979 - DNA, 253 bp, Zea mays
aaacacacgtccgcggacgcgtgggcgaccgtgggcggacgcgtgggctttgaagcctgaactttttgaaggcttgaagtttgacttcacaaaagggttgaatcataagttttctcttagccatagcgtttttatgggctccttagaagttccagcccaggggtctgaaactattaaagttccaactgctcattatgaatttggtgccaattttttagatccaaagttaatgctcattggaagggtgatgaca

SEQ ID NO: 383980 - DNA, 258 bp, Zea mays
gtgcaggtagtgttgagaaactcataggagaggaagttggcacagatgggcatgcaagcataggaggtacagctgatgcttatggggagcaagaagccaagcctatgcaggtagaaggtgaagccacttgcggtattctcgaatttgaaaaagtggataaggatggtgaagagggtttgtgtgatgactacacggttggtgttgtttcttctaatgaggaaacagagcttcctatgaaggaaaaagtagatgaagctg

SEQ ID NO: 383981 - DNA, 269 bp, Zea mays
cccacgcgtccgtcccgatccaccctcctcagtcctcaccgatggggcatcctggacgccgccacccgccgcgccgccagtgagcccaacggctcctccctccccgacgcctccctccttctccacacctacctcatccccgacgacgcctgccagcgccgacgacgagatctgctagcgccggcgtcgtcttcagatctgccgttctcgagtatgtagccatcgagaatggacattttggagggctctattgctgttcgtggtagggg

SEQ ID NO: 383982 - DNA, 255 bp, Zea mays
gctgcccactgcgggcacctaaagcgcccggccaccccgaacatcgcggaaagcttgttgctggtgttgctcgtagtaccgtagtacggcagccgcgtgtggagcaaggagggagaggagaggggagcgagcggtggccgccatggcggagcaacaacgagtcgggcgtgtcagtgctggacaagatctcggacaagctccacggccgcggtggcagctcgtcctcgtcgtcgaactcggacgacgagcgctcgt

SEQ ID NO: 383983 - DNA, 267 bp, Zea mays
gtccactgcatccgtgcaaaattcgatctgattccgaaggtgtagccaatactggagcaaattatggagtcaaaacagaaattataaaattggaggaggatgattttaaacctaggtatgcagagatcactatcttaaatccattagaagacaggtcacggcaacctactcttgttgagggaacttctgcagcgactccagtagctagtccaagcaactatgctgaggtaaacacctcagtacagatcaacaatggagatcagattg

SEQ ID NO: 383984 - DNA, 263 bp, Zea mays
gtccttgtaggcaacagcttgggaggcttcacgacgctgttcacggccaccgaggtgccggagctggtccggggcgtcgtgctcctcaactccgccggccagttcgccgaccccaacaagccggccgccgcgccggccgagtgaggaggaggggggcagcgcgctgtccaggtacatcgtgcagccgctcaaggaggccttccagcgggtggtgctggggctcctcttctggcagtccaagcagcccgccagggtcgagaaag

SEQ ID NO: 383985 - DNA, 265 bp, Zea mays
accctccgtcgcttcccccgtcaccgctgccacatccaaccccgtcaccgcctcaagccccgccgcccccgctgccgacggaccagccgcgcgttcagccccgcgtatacccatcaccgccaccgccgtcgcttcctcctcctcctccgccgcctcccaccgtctcgccgccatcgccgggtccatccaactctccatcgccgtcgccgtcgcctgctccagctacacaagctccagctccggctcctgcgcgtgttgctgccta

SEQ ID NO: 383986 - DNA, 182 bp, Zea mays
gacctgctgcccgtgtcctcctcctccatggacgaaccgtagatcgcttctagctgcgccgtgttcacgatgctgatggcgtccgcgctcgtcgcggggctgctgctgtccaggctcgtggcggcggaggtggtcgccaagatggagtcccggaggacgcccgcccctgctgcgagcgacct

SEQ ID NO: 383987 - DNA, 243 bp, Zea mays
acgtacttcgctctgcaccctttgctttattattccttgtccccggctcgtcgcccgtgggttcgggaccgcgggatccaggcccgctgatggaactgagatctcgcgcggggtttcgttcatgggatcggggaattcccctgcttgatccgctgctcgagctgagaaccagaagacattccgccccaagaagagcgctccatcaggcagcaagggagcacagctccgtaagcacataagatg

SEQ ID NO: 383988 - DNA, 284 bp, Zea mays
gtcctcgctcacctcgtccgtcctcgtgagctccgcctgccttccctctggacagctccagcctccagccatcttcccccacctgtacacagttcgcactcgcatgctcttcgccccctcgcgcttaccgctgccgcgcctcccgactcgccgcctccgcctagctccgggctctccaatggcctccatgctcgccatcctcaggccctcggcgccggccccgctcgcgggacgccgggccagggctgccgcgccggcgaccgcgagggtggcgctatctacca

SEQ ID NO: 383989 - DNA, 275 bp, Zea mays
agatcgcgagcggccgcccttttttttttttttttttttttttttttttttttttttttttttttttttttattttaccacagttccaatttcccgccggacaggggcagaaatgttagtgaggatttgttacacgagtcttcacatgatataagttctccgactatggattgcgacaataattctccaaaaaggaaaagaaaagaaaagaaaagaaaggcactaaaactgcaccatggcatcaaagattttctcctcctgatgataaaaatgcc

SEQ ID NO: 383990 - DNA, 272 bp, Zea mays
cgctcgtggctcgtcagtgggtgggagtgtgcggggctagccgctagggtttccgcgagcccatcgccggccggccacggacgatccgggactccatccggcgcccgccctgaatcggcttcgcggggcgcaaggagcgatagaatgaagtcgtcgctgcggaagctgcggtgcttcgcgctgcagcgccaggagcagcgggtggaccgggaccgcggccggggccacgccgccgccgccgccacggcgcgtatcgagctcctcgcggctgc

SEQ ID NO: 383991 - DNA, 273 bp, Zea mays
ggccaacatgacggtagcgctgaggcacgatgcacttgcagcgtgtttcctgctgccaccatctgctgctgctttgtctgaagatggtcagcagatcccaaccagctgtccacccaacacttcctcctcccatcatcatgccatccagatccagagcagcactggtacggcggccaccgtggacgccggcaccgccgccgaccccatcacgcggtggacgctgttcgcgtacctggtcggcgcgatggtgtgcctgctgacgagcagcgtgtg

SEQ ID NO: 383992 - DNA, 276 bp, Zea mays
agccgcactctccctgctcgcgctgggatattttcctgaagcagctaccgtccttatctccatgatatttccagccgagctccctgatttttgtcacagccgtcttcctcccttatcctcgccgccgccctggtcttcaaaaaatctgccgcgccgcttcagctctggataaaatcccgccggtgctgcccagccgctccttccccagcgcagaccgctccttctccctcctctacgcagtgccgcgtccacctccatctttgccggctggagctc

SEQ ID NO: 383993 - DNA, 271 bp, Zea mays
gaacctcgcgatttccctcaaaccagttctcggatcagagcgtcgtgggtgtcgccgggggcatggcgcagacgccgaacccgagtaggaggtcgtgggtcggcccggcgccgatgccattcctcacgccgcggccggagcggcggcaccttgagatgcggtggacggacggagtgtcccaaagcgctgctcgccgtagcggcgtcggcgccattgccagggatggatgcgagagggatcaggaggtgaacgttcaggtcatgctccggtg

SEQ ID NO: 383994 - DNA, 267 bp, Zea mays
ctagttctagatcgcgagcggccgcccttttttttttttttttttaaaggtgaagctatagttctcacttaatttagtgcgggtacagagagcatagatgttgcagattgcccactaaatacaaatttttcggacgtctggactctggaagagtagtacataaactacaaaagaaaaaaaaaatggagagcacacaactcagataaacatgaaaccagctaaacattccatgacaagaaatacataacgatggtaatgccaaaagac

SEQ ID NO: 383995 - DNA, 219 bp, Zea mays
ggatctgaaatagatgatcgcgtgtaaggtttttatggcgctagaccaggcgtaccatcttgggcacatggaaggatgtattatgatgaagattgcacaagtgtaatcagcatatttttgacacatatattgtagacagaagaaggaagggaaattaaagacatattgtagagtgtagacagaagaaccaagggaaattaaagataggaggcactagtc

SEQ ID NO: 383996 - DNA, 261 bp, Zea mays
cccacgcgtccgagaagaaagtcaagatgaagctgttgaggttgaggctgagggttcaactgatggtgctgtccttgtgaatggaaacagtagcgaggaacagtggggtacgaaaaatgaagaaccatcagcataaaagctgtagttgagcaagttgctgactgagcaatagtggattaacgggacagcaacttcgcttcagtggtgtagtttgtaaaggttgctcactgctatagagagtacatgatatccgattttttc

SEQ ID NO: 383997 - DNA, 265 bp, Zea mays
caactggtcaactgctctacaacttcacgtcttcttcaccttcggaagacgggcaggcgagcagcgaaggtgcgacggaaatcagtggggatgaggcgcaatagcccgccgacgggagcggcaaccgcctcgcggtcatcgcttcccacttatccctccctccgctcggcagtccggcagccatatccggggagaaggaagccgccctcgccaccgacctcaacagcacccccaccatttttgacaaaattattcggaaggagat

SEQ ID NO: 383998 - DNA, 208 bp, Zea mays
gaattccctgcgattcctctcccctcgcctcctcgtctccccctaggggatcgtcggagaggaatcgcaaagagggccgtctcatccgagttaaggaagccatggagcacaaggaggctgggtgccaggcccccgagggacccatcctctgcatcaataactgtggcttcttcggcagcgcggcgaccatgaacatgtgctccaagtg

SEQ ID NO: 383999 - DNA, 262 bp, Zea mays
agatgctaaagctggtagtcagcttttctatgagccagctgaattgatgccggagcgtggatgtgaagacgtttcatttggatatgatccagcaatggattataatagtcagatacagagtcaatctgccaccatggttgaagatgcacatatggaagatgcattgttgagcactgtggatgaaataaagaagccagagaaagacaagaagctaagaagttcacaggagagtttggataaacgtagaaaagatgcttcagcg

SEQ ID NO: 384000 - DNA, 285 bp, Zea mays
cccacgcgtccgcttgcctaaagtgtatacatgctagttgtatcttctttggtgttgcactcatataggaagttcattgtaggggggtagtaggatgatttttaatgttaggctgttgcagtattcaaaggcatttctgttatcctgaagatgggctttgagcggtaaccttcattgtttgttttaagcccaacttgcttgggacaaaagattttgtgttaaagtggtggtggtggctcacctcagttgcatttactgatgttatgaaccaggtattctacatta

SEQ ID NO: 384001 - DNA, 275 bp, Zea mays
acgctctgccaggtggacagcagcgtgccccaggaagcccatgcctcgatgatctcgcgcgagctcaccagcttctgcgacgagtggaagcaggcgctggaccgcctcccggacgccgtcgcctcggaggcgatcaagagcttcgtgaacgtggtccacgtcatctacaccaagcaggtcgaggagatgaagatcaagaagcgggcggagacgtactccaaggagctggagaagaaggccaactcactcaggtccatcgagaagaagtactacca

SEQ ID NO: 384002 - DNA, 274 bp, Zea mays
  unsure (1)..(274): unsure at all n locations
acaagccaaacaactatccatcccgctgtgagccaagccagcccagctccggcgactggcagatgtttcacggtccccgtccgtctgccgcagttccctgatatcggtggccagccgccgactttgtggttagtccattctcttccggcgggatacgttgcggaccacttcgctcagctgctcgccacggcggcttgtaccctgatttgggtggggaggatgcctgatatccagctgggatgccacactataaggtntcatggctacaaagtgg

SEQ ID NO: 384003 - DNA, 276 bp, Zea mays
gttctagatccgcgagcggccgccctttttttttttttttttttttttttttttttttttttttgctcggtgcagctcatgcatctatctttcatcatgcagtcatgccatgcacaagcgaacaattaacacgttctcaccctagctaataatcgcgtcctgggcgatatacctgcccttggataagcagacgcggtcttgcagtgttcctcctacttgagcttctcatccagctgtccgtgaagccagtgtgccctccaaagaatcgaatgcgac

SEQ ID NO: 384004 - DNA, 280 bp, Zea mays
attagtcgttacagatcataactagcttttgttcgtcgccctatcacagtctcgcagccgccgcgatctgctagcccccgaaccctagctcaatgggaaccgccgcttctccttctccctcactttccctagacacagccgcctcccgtcctgatcctccttccccggaggccaccgctacaccagccaaagaagatcaccagcactccgcctccgacgccgcgaccgccgcagctggcggcggcgcagacgatgcggcggcggctccttctgttggagg

SEQ ID NO: 384005 - DNA, 248 bp, Zea mays
ggacgtggcgacgagagcgtcgagaagcggctccggccgtacgcccgcaaggacgactcctcaatgcccgatgtgacggtgaagtcggtggcttctggcgcggcggcgccgaggtgcacgaagcggcacgtggtgcccgcggtggtgttctccgcgggcgggtacaacacggacaacaacctgttcgacgacgacatgacggacgctctggtcccgctgttcctgacgactagtcacctggacggcga

SEQ ID NO: 384006 - DNA, 188 bp, Zea mays
agctgtctcagttgtcaatgggccccaacagggtgttcaggtcgttagcaagaagatttcctgcattgctccagaccagcagcagtaaggagcaatgcaggaaatcatcttgccaacgactaacccacgtgtacctgaccttgccgagaagctgtctcagttgtcaatgggccccaacagggtgtcgg

SEQ ID NO: 384007 - DNA, 257 bp, Zea mays
cagatagggaaggaaggagatgccactccattcacggatgtgactgtaagtgttctttttggagacttgttatactcttttcctgactcttggtcattcttaataaaagattgaattcaagggcctatgttgtgcaaaacatgctatgatccatggttattacggcaccacagcgaggtgagtcgccagtcgggcgcctggacgcctaggtgcccatttgtccagcaacaagtatgcaacatatatgatatattaaa

SEQ ID NO: 384008 - DNA, 267 bp, Zea mays
cagaaactctgtgctcaagcaatagatgctatggaatcattgttctcgcgtgtatctcctgctagttcaagaatcccacgaccatgtatggtaccaccaaattttgtgaagtttgaagctataacccaaacatctgtcatggtatttttggatctggttcactatcctatgcttgcccaagaggcaacttcatttaatatatggcaccgaatggctgttactgaatcttatctgacaaatccgactggcataatacttcccccatcg

SEQ ID NO: 384009 - DNA, 266 bp, Zea mays
gccaatgcgcttgcgcgtccggtggccatgtcggggagttgtcagctctggccccggaggctgaggcagagcaggcggtggtgagcgaggtcaagccaaggtttaggtgggacgcgttcgggtccgacctgactgggccgcagcaccgggcgttccggggcctgtctccgaagctgcccaaccgctgcaaggccctggtggcacgcgtggtgtgcctgagccccggggacgagaggcttggcgcgctgctcgcgtactgggtgaag

SEQ ID NO: 384010 - DNA, 261 bp, Zea mays
cggacgctggtcgtgacgcgtggggtccaacggcaagcctggcggcgtcttcgacggtagagaagcgctccagggagcgccaccgcgcgctgcagcagcagctcgcctccagggcggccgacctcgacgacgcgcggatcgccgctgccacgggcgccgcctactccgacgacgacgactccgacgaggccgctgccccgcgccaggagggagaggtcaagaagcctaagaagcccaaggtgaagaagccgaagtgaccgt

SEQ ID NO: 384011 - DNA, 260 bp, Zea mays
  unsure (1)..(260): unsure at all n locations
cantgatgctgagcgggcgtgctatcgcgcaaccctggcccggggagctcgacggcgtcgatccgcagcgacctcagccacggctgctgctccgcgctagtgttccgttccgtcccgctctccggaggcttctacgccatcagcgccgcatacgtgcgctctccgcccgcgccagcagtcgcagatatggacccgctcacctcgctctccctctcgctgccggggctggaccagtctccgtcgggcttccaccacgacag

SEQ ID NO: 384012 - DNA, 259 bp, Zea mays
cattttggaaacataatggtagaatatacaaacaatcacttgatgccatcaactaaatctgaaaggaaaaggtattgcaaacgtgtcccattaagtgtttattaaaaagagaagctgtcagttcagatgtagttgatggcatcaagtgattgcttgtatattctaccattttggaaacataatgagatctgacattattttgtttctgaaggaaggatcacggttgaaagtagactatgacgtgacctgggactgtgaa

SEQ ID NO: 384013 - DNA, 258 bp, Zea mays
cttatctgttctgttttttatgattcagtgaccgtttccatggtgtgcattcctcatttactgttttgctacctcattttaacttttaagtgataattgtaaagcaaaaaataaatttaaataaatggccttgcttgattattctttttcagatagaagtattttccttgctggcgcctgacctttatcttgtaggtgcgcgacagagcaaccctttacctcaaattgttaggtggggaagctacagttggtgagaca

SEQ ID NO: 384014 - DNA, 231 bp, Zea mays
aagacaaaatatagaatttagaaggaaccgtgtatttcagaatgtttctggaacagcccatgacatacaaaatatgttaacatgtttggccatacataagttcgggtctcgtggcagcatcatgtttgcaaaagcaccgccttgtctattttacatggtggtgcactcccatatgtgaacaaaagtccaaacatcgttgcactgttgttgctgagagctctactccgtgat

SEQ ID NO: 384015 - DNA, 249 bp, Zea mays
caagattgaagcagtttacgcatggccctgagattgcattaactctttctcagaatgatattgagctcctggccctactgttggccatacgagaatgaggtgtataggcagtggtccaagagaaacatccataggcggatggggatgtccggatctgagctgccacatagctgctgggatttcaagatggcatgccagctgctcgtgcataatcagtgggctttgcatgactggggtgatggtgattgt

SEQ ID NO: 384016 - DNA, 272 bp, Zea mays
ggaagatggtgaaagaccaccacaaagagaccctcgctcacgccttaattgcgcaaccagtgccgtctcagatttcatcagtgccttctctacctcagtcgactgagtggctcttagactcaggagcttctcatcatgtcaccggtgacttgcttcgcacctgtcctcttattttgcttatgctggttcagatactctcaccattggagtggagtggagatggtactggtatgaaaatatcccacattggctcttctcctgcggccttgtct

SEQ ID NO: 384017 - DNA, 271 bp, Zea mays
gaattaatgaaggttgtagaaaataaagtttctccccctttaattgtcattgccccagctggtcacgtggagtcagttcggaaatgcctggtagagaatgactattttggttttgacactcaaaaggtgtgggtgctggaagagctggagcttccagttgtcagtatatgctcggagggaaacagaaaaaaagttctgatgaagtctccctgggagataataaaaaagccaacaggttctggagcaatcttcagcttactgttatcaaaca

SEQ ID NO: 384018 - DNA, 268 bp, Zea mays
cggacgcgtggcggacgcgtggggttgtcaaaacggggcctcgacttttcttgtttcatgagcgttggactaactcaaaagtggctcagtcgtaccaatggcgtcattgatctctctaggacattcaagaaaaagcagtgtttgcacatgtgtggtggatgcccacaggcacaaaaaaatatgtgttcacctatagctgatccaacttgtactggcctgataaattaggacactatggactgttatgtaggtccttcatttttaattc

SEQ ID NO: 384019 - DNA, 265 bp, Zea mays
tcttctcattcctctacaatggagatccaggcacgacagctactggtgtctgtttttggcattctgatagcgataggtctcgccaatgtcgtgcggggagagacagcaccgccggttgttgtcggcttggccaagtgctcggactgcgccaggaggaacatgaacgccgaggcagctttcagaggtcttcaggtggccatcaagtgcaataacagccagggggcctacgagagcgcaccgtgggacaggtgaacaagtccggggc

SEQ ID NO: 384020 - DNA, 262 bp, Zea mays
gaaattcaagcaggggcagcactctcttggcctatttggtttcatgcggcaactcctggaaatgtttctctttatatatctctgtattacgaaatggggagttccagtgatattaaataccgtacactacgcatgcacttcaatcttgaggttttgccgtcacttgacgtatccttttctgtaagcacgtcctcatcaagattgcaagagtatattgttcgcatggatgtcatgaacaagactccatcagagtcatttgtgc

SEQ ID NO: 384021 - DNA, 264 bp, Zea mays
cgaccgccaccgagaggctgctggtctacccatacatgtctaacggaagcgtcgcgtcgcgcctgaaaggcaagcttttttctcaagattccaatgtgctcaataatatcaaacccacttgcggtagtgcagaacaaattctgtcttcttcttcttctttttccatgcctaaaaagaacggtgtcaaattggaagtcgtaacccgacaagccgaacttggaaaacaactcgaattggattctagtactcccttattttttttgg

SEQ ID NO: 384022 - DNA, 290 bp, Zea mays
ggtcggaatccgggtcaccacgcgtccgggacctggcggacgcgtgggccctcgcgtcgcgttctctccatcgaactggcgaactgcagcctgctcgtcagctcccacaccacgcattttgtcgggattcgggaaccctagagccggatcttcgcggcggcggcggaaatggcgaatcccctcgcgggtctgcaggaccacatcaagcttgcgcgggattacgcgctcgagggcctatacgacacctccataatattcttcgacggcgccattgctcagatcaacaagca

SEQ ID NO: 384023 - DNA, 292 bp, Zea mays
gaaggcgcttgggctagcaataataatatttggtgtcagtctattcaatatttacaagaagcatgtgtagtatttgtaatgcatggagaacattgagtaacgattgtttgtgctacatgatgaaggtataaaaggttcaaaaaagggcattacaatgaaaatgctgggacaaatacccaatcttccaattggacttcaaaatacgtcatccttgatgaagatactgaagctcaagatgatacaggctgatctgaatgtgatagaatgcagactatatatggcgcttccagag

SEQ ID NO: 384024 - DNA, 289 bp, Zea mays
ggctcctctccatggatgccgtgacgcaaagccccatggccggcgcgcgcacctgctcgtgccttcatggtcgtcaacgccgtcgacctcgcgcacagccgcgacgccagtttgcgcaccacgtggattccctccgtgtcgcgccctcggtgtgcttgacgtaatgccgcagcaagcagcagcagcgacgcccttcgctgcgtcgcgcttgccagggcgggccacccggcgtcgatctacgcataccctgtcgcgatgccgtcaatccgcgccccttgtcgtcgtcgcg

SEQ ID NO: 384025 - DNA, 272 bp, Zea mays
caatgagtaccacgagaaggtgcttgtggagatctacaggttagcatgacgctgaacattttggcctacctttcacctcttttgacgtgggacacaaaacaggtgtttgtttttgtggcagcagagtgtgagactccacaggatgcttttattcaattgtgttcaaatactgaagtggtttgattatcgtagccatatttgtagtaaaactgacatctgtgaaggaaaagtccctttggctcctcatccagaattttgtcaagctcttcttc

SEQ ID NO: 384026 - DNA, 282 bp, Zea mays
ggacgggggtagtcgttccaggaagccgtcatttgcagtgctcagcaggtccagcggcacgtacagcaagctagcagtaggccggctccatcggaagccaccatgaacaccggttgcactaccatgccctactcagtctcactgcaggcccaggcttccatctcattctctccctctcaggaaaacggcggcacttattacctggtgcagcaagcggtgggggagcaggcaacgaggcaggaggagctgctgctgagccagttggtgttcagcaacatgtgc

SEQ ID NO: 384027 - DNA, 277 bp, Zea mays
cccacgcgtccggtcaattcaacaagattcggttcagttttgtatttctttcacattgaatgattgttgttccatgcgttaggttgtccgttggaaaccaccatggccacttcaacctcgacaggacatcagtgctgaactgcgactagtactgtggccctccttcagagcattccatgaagctactgcaaggtggtggtgtttgagttggatcaggctacaaacatggctatcttcagtttggtgctattctaggcaacaaagtgagatgttgcag

SEQ ID NO: 384028 - DNA, 251 bp, Zea mays
tctccattcaactcatgagtcttacgaagactgttgtttttcattctattgtaggaacttgaaaggtcagaatggtttatacttagacattgtgctgctaaatcatttgactactgtaccctctgtgttctgtacaatttgggcaccttttagcttggtcttttttttgtttgtttaactattctaatttcgttgttgatgagtaatgaagtttggatcgtccgtggtggaaaatggcttaactatttttg

SEQ ID NO: 384029 - DNA, 274 bp, Zea mays
  unsure (1)..(274): unsure at all n locations
cccaatcctctcctccacgaacacgccctcccttttgcccgttcccagcctcgaacggcaaatcaaaaggcagatatatgagctcttggtcatcgtctccacgccccattggtagccgcctctgaaattcctataaaaaaagatatatgggtggagccatcacccacgccgccaagatcctgtcttcttgcgcggccagctcgtagctccacgccggatagatagaagaggccgacctctttcnncgcttttttccttttctttcggcaggatt

SEQ ID NO: 384030 - DNA, 279 bp, Zea mays
cacgtgatgaagtcaaccagcgtatgctttctgttgaaagggctgtcagggatgctcttatcgcgaaaggagagagaaacttcactgatcaagagttccctccagaggatcgttctttatttgtagatccgatgaatccacctctgaaactgcaggttgtttctgagtggatgaggccttctgacatagcaaaggagatatctatcagttgtcagccttgcttgttttcgggttctgtgaattcctcagatgtgtgtcagggtcggttgggagactgtt

SEQ ID NO: 384031 - DNA, 146 bp, Zea mays
cttctcatcctcccggttctcccaactgcgtcctcactccagacacgccaccgccaccgcaggcggcgaacactgtccagacgccggccttcgtctactcgtccccaccgcagccggaagtggaatactactacccgcagccttag

SEQ ID NO: 384032 - DNA, 282 bp, Zea mays
cggacggtgggcaactgctgaaggtgcttctgcagagaagaaaaggaaaagagcccataaacaagcagctgaagatggtaaagagaatgatggtgaggatgatgatcccgctggttctgaggatgcatcaacaggagaggaagctgatggggactctgaggcaaatgatcatgctttgagtgatgatgaacatgatgagcctgctgcaaagaaaaagtcttcagatgttaaacaaaagaaagaaacaggttctgatgcaaaggaaaaggatgcaccaggaaa

SEQ ID NO: 384033 - DNA, 269 bp, Zea mays
gggattgagtttggatgaagttatatactttttgcatctgccatcttgtggagattattgctgaaagaagacattggggggaatactgcaaggggaagtcgaagatttgttcaagcgtgcagtacgcctcatcgtgattgagttcaggagcattttgtagtctcacaagaatgctttattacagaaaaaaaaaagtggagatcagtccagggttaccatacacacgaggacaatggagtcaaactggcattttttggggtctgatgaca

SEQ ID NO: 384034 - DNA, 276 bp, Zea mays
cccacgcgtccgcaccaacggagcgtccaggccatgaaagagaggatggctgacttggcgcagagcctgggaatgcctgcgggcctcggcgatggtctcaagtgatgccgcaattcgggaaagctttccaataatcctttttcctcaattttgtatgctagccgtgtgagtagtaagcataacccctccgcgacctctcataagaagtgtacttgtgagcacttgttttctttcagctttagctgccatttgctgttctgcgcacgcagatatttg

SEQ ID NO: 384035 - DNA, 275 bp, Zea mays
ctcatgttggtgaatttattcactgcttggagctgttgtggagttgtagttgggttatgggtttttcactggtccagaaatgggctttggtgcagatttatgtaattcccactttgcccagagtacagtccggttcaggcctaacacatacttgataaaccatgcatacacaaatgctcatttgcatatttgataatcaactaatgcagtcaatctacagtttgttaatcgcaatccatctatttgtataatgcaacactattttcaaactgttg

SEQ ID NO: 384036 - DNA, 281 bp, Zea mays
agcggctaaagcttgcaaatcttgaagcactctaatcaaagggagatgtgtttcttttctattttatgtatgtatttatgtacggtatcagtcatgttttaatagttgatgttgcaaaaaagattatcctcagagcaagattgtgtgcaactggttgtggttcaacacatgagctgggaaatataaagacagcaatattgtgtacaaaagctgatggtgtttggtggagtgtccttgttgagatcacttcagccttaaactcagccgaaaacatcatcaaa

SEQ ID NO: 384037 - DNA, 184 bp, Zea mays
atcgaaggtcacagataacctgaccaagcatgcttctcctgagaccccgtctacaccaagtcaaccatgggttagaagatgggacgacataaagaaatgcaaagattggcccaagtattgaaatcagtgataagctgcttgaaatggggattacagctttccatcctaaataatacctgtcccc

SEQ ID NO: 384038 - DNA, 275 bp, Zea mays
ggaccgtggcggacgcgtgggagtcgctgccctgccgactcccgaccgactctccacctcagccctacgggccgccggacccttcctccggtcctcccctctcctccgcctcgacaagcgtcggcgagatggtgaagaggagcaagaagagcaagagcaagcgagtcacgctgcggcagaagcacaaggtgcagcgcaaggtgaaggagcaccaccgcaagaagcgcaaggaggccaagaaggcgggcaaggccggccagcggaggaaggtcgag

SEQ ID NO: 384039 - DNA, 177 bp, Zea mays
attgaaccacgaaacattgcccaatgctagctatacatcaagatatatccaaaatttataaacagggcacgtgtagcatctgtccacgagagagagaaatttaccatgtacaggggcatccctgattaaacagggcaaggagcgataaaacattcgggtttgatagattaggatggg

SEQ ID NO: 384040 - DNA, 271 bp, Zea mays
cgccgaccgccgtcctcactccctgcccccccacgccgccacacgaaccacctcagctccctgcgccactaccctcggcctgccgccgcacgcctcccgcgctgtcgttgtcagccctccgctccccgagacgccgcacgcttcccgcgctgtcgttgtcagccctccgctccccgcgacgccgcccttggctttctgcccaccgacgtatcgacagcgccgcgtccgccccacttttccgttcgatttggtgggccgaggtctctcgctc

SEQ ID NO: 384041 - DNA, 272 bp, Zea mays
cccacgcgtccggatgattttagattatattggatcttccccaggctttgaggatggagagtttgagtcagccaaattcttgcgcccagcttcatcattttatcacgctgctgaagactgtctatttattgtagattcagagaatcatgcagtcagaaaagcagatttgggaagaaggactttacaaacagtttatccagtcttcaataaaagcaatggcatctggagctggataactgataagcttggtatgagaaaagaagctactccaa

SEQ ID NO: 384042 - DNA, 253 bp, Zea mays
ggcgtcgtgtaccgggacctcaagccggagaacgtcctcatccaggacagctgccacatcatgctcgtcgacttcgacctctccacgcggctcccggcgcatcgcatgagccggacgctccggctaccagtcccaagccggcgcctccggtcgccgcgccgtccccgatccgcggcagatcaaggataccggcgggctccgccctgtgcttcccattccgcatcaccggcagctctgcgaacctgccgcggac

SEQ ID NO: 384043 - DNA, 132 bp, Zea mays
ggaacaaccgagctcgcctgtacaactccctcgacgccggcctccatggatgcacgactcccactcccatggcgcctctgctcctcccatacagggcgtccgaccccctgctcctatctccagccctctcct

SEQ ID NO: 384044 - DNA, 273 bp, Zea mays
gggaagatgtaccaccatttgtgaagatcctgtgaagctgctgcttctgcagagatggccggctcctggtagtatcgttatcatgctgctgccctcgatatgctagttgagtgcagatcattaaacggaatatatgtaagttgttgggctgcagatatggtacatttttttaaaaatctcttcaaattctgaggaggatttccaaagcactgtaatggagcggcgggcagggtgttcaactgatgttgtggtctagtaggagttcatcagtgt

SEQ ID NO: 384045 - DNA, 258 bp, Zea mays
gagcagcgtccgcgacgctggcgacctggagacccaacccaatccagcgtctcgaaattcacgcaacttcgcttcgcatcggctccaaacattgcccccttcgatccacaaatcccttcccccacccccgattctgcgccgaattcggttagcttattactctccgagcttatcgccaaccgtctgtcccgacctcgagatccggctcattttttcaccctcttacgtattcggatcgagcccgagctgccaattcga

SEQ ID NO: 384046 - DNA, 121 bp, Zea mays
ggaccaggtaagcagcagcaggaaacctagcacggcggaatcggaaccattggtaaccaactccgtgccggttggaaggaccaggaggccaagcggacaggcgcgaaattccgccgttttt

SEQ ID NO: 384047 - DNA, 259 bp, Zea mays
gtcaagcttatgcccaattaattttttaattgtaggagaaataatgagacatccttgctttgcatctgttagccagcagcagcaacatgtttctgtttgctctctctgcatgtccctctctgaagttgtctacatgttgtgttgtttctgaaacagaaaatttcagtaattacaacagatgggcaagacctgtacttagttcagcaacctcagttcctctctatcgacaactgtaggtcatggttatctgcatttcttg

SEQ ID NO: 384048 - DNA, 278 bp, Zea mays
agtcaaagaacctgcagatgtttcctgaagacgagcatttcctgaagtcttcaatgctagatggcagcaagaaccgttagttttctgtcgattatgcgctttgggcaatgttcatggttgctggtttgctacataaaaatatggtgctgcgcttggaagtggaagcttctgaatgtgactgttctctagcgttcatcttgtgttcgtctatcgatcgttttaagtttggatttctgtgtgctataatgcaacttgtcagtgcttccagtgcatgtatt

SEQ ID NO: 384049 - DNA, 269 bp, Zea mays
ggacgctggcttctgtaaaaaaatttcaatataaacaacgcaccaagtacgagctttatgtatatatacatgatgggagtttcatttcagaggccttcattgacagtgatattgtgaataacatgcttggcctttctcctggagaggttactgctgcacttgctggtgaattagagtttgcatcacccagtgaagtgaaagaaactttgaaaggatttcagaagtttttggtgaagtttgagggtatgatgcttatcgagttaaacaag

SEQ ID NO: 384050 - DNA, 264 bp, Zea mays
cggacgcgtgggcggacgcgtggggtttgcaacaactatctaatcacaagatatgatgggacaataattgatgcaaaaccatggagttttggtggtgaaacaagagcattatgggatggttcagatttggtggattacaatgctatggcacctaaaggctcagagaacaactctgatcgggtgtggagaatgctaagcaagcctctagaaaaaggtgtaagagaaaattttggtgaagtgcttgaacgacgaaatccccttgct

SEQ ID NO: 384051 - DNA, 263 bp, Zea mays
cagacgcgttggcgtcagggaggctcagagaaacatcaagcttcctaacgtagttcttgtagacgcgataggattgcccctccgcgacgaccagctacacctctccacagaagcccaactccggctgggtgacatgcttggacaagcctttttgaaatttaactcgtccatggattcgagacaatgacatcgatattataccggtactggacctgttgttgggtgtagagctaaatgacaaataccattcttttggaatgttc

SEQ ID NO: 384052 - DNA, 265 bp, Zea mays
cttactggaagaagttgaatcagttgcatactacacccgatcgagcctcgctaaatcatggccagattggtttaaacaggaacaaggcataaacagagcatcaccacattttatagtaacaggttatgcaaattgtggagtcgatggctggattcataaggtgacctcctttcttggcaaccttatacggatcaacatggagaaccttcctatgtgcgactgcctaccaccacttggtcagttgccaatgctgcaggaactgcga

SEQ ID NO: 384053 - DNA, 274 bp, Zea mays
cttcttccaggaggaagaagtctgctaagaaagtcacatataggaggggaaggtaaagagaatgatagcatacttcttccaggaggaagacatgctcctagagaacgtctactattctgaaatgaaggatgctgggttcttcgatgctgactgggattaatccgtggctactgtgctgtatgacccatcccatatgaagtacgctgtatttgtttttattttatctgtgtactctcaacgtagaacaggaaatgtatgtagctagtcgtggtag

SEQ ID NO: 384054 - DNA, 122 bp, Zea mays
cggaccgtggcggccacaacgtaaggaggtttcgtatgcaaaggcatatgtccttgaggatccttaatgcgattcaacaagttgacgactacttcacgcaacatgttgacgccactaggttg

SEQ ID NO: 384055 - DNA, 256 bp, Zea mays
gtcgccgcgtgctcgccggaaccctaggaccctgcggccgtggtaggaagcgctgccgcagccatgacagggacaacttggataattgacagccaaagatttgccaccaaaataaaaaatgcttctgggtcttcagatccaagtaaacagaaatggatcggcaacccaagtaaagagtgcccaaagtgcagtcatgtgattgataacagtgatgttgttcaccagtggcccggtttgcctaaaggtgtaaaatttg

SEQ ID NO: 384056 - DNA, 261 bp, Zea mays
cgcgactacgatgagtcgaagagaccaccgatgtcaaggtcctattcgcataacgatcgctgggcttcagctgatgccagagtagatcgaaggaggagaagtaggagcaggaccaggagctactacagtggcagcaggagagatccagatttgctagcaggcacccgtgatttggatcgcaccaaggtgccagactctggcattgttcctgctgctggtggtgatggaggcgtgcacgatgcggatgccgatggaacacga

SEQ ID NO: 384057 - DNA, 193 bp, Zea mays
atagtatccatggtgcaaacgagttcatgctttcaattaaaattgcggtacaaccgaccatcaacatgccactccgtaacatctagcaatgcacaggatgcacgggatctaacccagttaagcagtaacagatctaaccctactaacacagcgactcccataccaacgagccagatccagaccagcagagcgc

SEQ ID NO: 384058 - DNA, 246 bp, Zea mays
cccacgcgtccgcccacgcgtccgcccacgcgtccgcccacgcgtccgcccacgcgtccgcggacgcgtggtgctgaagtaaattggttccaagaagttatgaggtttgccccaacagcattgattattggtctattatatttcacgggaaaaaggatgcagagtggtttcaatattggaggtggtgctggcaaaggaagaggaggtattttcaacattggaaaagctacagtgatgaagatggac

SEQ ID NO: 384059 - DNA, 243 bp, Zea mays
gcagctcagcctccaaccaaccgagagaagccagagaaaaggttactccacagaaagcaaaaccctagcccactccggcgcgccaccggccgatggtttcgatgagcaccacgccgaagccgcttgactccgccgtcgtcagcgcaccgattgccggcggggatgagggtggtggtggaggcggtggcgggaagaagcaggcgcacggggcggtgatggcgccgccaccgatggtggtcccgg

SEQ ID NO: 384060 - DNA, 113 bp, Zea mays
ctcccgaatcgccttgccatctctctcgatttgggagactgcgaattttaagtgaatcattggtcttgttgcagtagcggctggattgcgaccgttgtgtgggaaaaaaaaca

SEQ ID NO: 384061 - DNA, 251 bp, Zea mays
attgtggtccaggtgccctcatgatgccatctgcccctgctatgggaacagtggcaggactaaatcgaggtatgcctggtgccaagccaggcgttccaaggattagttcaccagtaatgttaaatgctgttccatctggaaatctgtgtcccaacagtgggcaaggtgtgctcaacacagtaaatgtccatcctggagccatatctggtcctggcaattcaatctcggaggcacaggatcctatgcaaaca

SEQ ID NO: 384062 - DNA, 260 bp, Zea mays
caaccatttgcatactcgtctgtagctgcaggcagctttttatcaccactttacccattgcatacatctgaaccagcaacaatgatgggtggccctgtgtactatcagagttctgtaatgtcattaccaccaggctttatttcgtctgatggtgcttctaatgcatctggtgtcaaatctgagacaagttactatcctgtttctcgccaaaatttggagattaaaacttgccacaatgcttctggtgatccagaacagaa

SEQ ID NO: 384063 - DNA, 258 bp, Zea mays
cgccgaataaatctcaccggtcgcgcttcttggcgtgttcctcctcgcgcctgggcttcgatctccatgtccgcgtgttagccgggtgccgccgcggctccgtggtcatggcgacggaggatttggagtcttcgtgattatgacgcctactgcctacgatgtcgagttcgaccttgagaatcccttcagcatccccgtcgtacgagccgatcgccagtcgcctcgacgccgagggccatcatgcgtcctctatctccg

SEQ ID NO: 384064 - DNA, 243 bp, Zea mays
tgtatataagtcctcgggggtcaatataagcctagatgcaccatgtgctggacagacactatgaataacttgcagttcttttagtatttggttcacaaaccatgtcatcaattgaaatagctggttcacccgtgacttgggtttgaatatcgtgcatgtatgattatgaggtaagttgggctaccgaaactgatggtatcgtataagcttagctgtactagtgagtggtaggcctaactgttg

SEQ ID NO: 384065 - DNA, 259 bp, Zea mays
caaacactcggagcctcaaggaaatggccttgcttttacgctaatttggattgcaccgagtggtggtagagatcgcccaaatccttcaacaggagagtggtacccggcaaatgaaacgagatggtacagacagttgtagaggttcgctcacaagaattatcctttttttttttgcctaagacaatgcttgagaagtccgctgcatggtggacaatatgaggaggcttctggagcatgctggtgttcctgggcacatata

SEQ ID NO: 384066 - DNA, 277 bp, Zea mays
gccgtgagcacccgagcccgtcccccctccggcatcccccacctgcagccggtgagctgctgtgagcctatccagtggcgagtccatgcctctccgtgtggacgcaatgactcagtgaaccacttccagatactcgctgcttctcccgtgcccatggctacaccacttatagcaggacttgcagttgcagcagctgcccttgccggtagatatagcatccaagcttggaatgcttataaggcccggtccgtagttccaaggatgcgcaaattctatg

SEQ ID NO: 384067 - DNA, 270 bp, Zea mays
cgagcttcagaatggaagccaacccattgataccaaatttcgagctaagtcgctggaagacgaagaaactgaggccttaatgcgtcaatttggtctaaacgatgagtccttccaatcttctccacctgtaagtagaagtggagtttgtagcccaattagcctcccacctgagcagcccctggagctaccgccattggctgaaggtttatgcccatttattcagaccaaagatggaggatttctgcgatcaatgaacccagccctgtttca

SEQ ID NO: 384068 - DNA, 130 bp, Zea mays
atctgcctaagttagtcgaggaccttatccaggcatcgatgagcacagggcctcgaggtgctttcaggattgcccaagggatccaagcggtgcttggggttggtgttggattgctgaatgacctctcaga

SEQ ID NO: 384069 - DNA, 321 bp, Zea mays
tgtctcggaattcccgtggtcgtgcccactgcgtccgcgagacgcgtgtggcgtgactgcgtggcgctgggtgtcgccgtctcagtgctcatgcgtggtaccctttactagcgactatcttgcgcacccaactgtcgttcactcccgctggtactacgcgcttgttccgtctcgctgccggccatctaatgatgccgtggacgccagcaccctgctgcactatatcaacgtgttcgacgcggtggtggacgtcgcctacgtctggcattgcgtacctcgatgtcgacaacgtgccggtgatgtgttacggagaccgggttt

SEQ ID NO: 384070 - DNA, 254 bp, Zea mays
ctctgaatgttcttcaaacagtaacaggcaaggtgtgcctagatgcaccataccaaaccctttcagtctacaaacagaggaaagaggtcaattaaaagagaggcagctagaagcacaactcttacaaaagaaggtggaggaggaaaaggccagggttcacaaagctaacccttacccatacaccacagactatccgatggcatgtgccgccgaagcctgaacctaagccctgtacgagaccagaaggctttcaa

SEQ ID NO: 384071 - DNA, 283 bp, Zea mays
cccacgcgtccgcgagatgtcataataactcgtatcggaggtttccttgagcttgaaatccaaggtactcacttgttttgatcaggaactgagataccttctgtttcgagactaacgcgatgatctaatatgttttgtccgcagaatggcagaaggcaatatactcttatggtggcaatgaagtgaagaagtggcctgtgcagttacggcgatccatacctgagggtattccacctagttcaaatggtcctacgctccagcagcagcagcagcaagacatggc

SEQ ID NO: 384072 - DNA, 279 bp, Zea mays
ctgatggcgcatcacaaatgcctggccgggccatggatatccacactccaagcccaagatcaagatttccagctgcagaggcagccccctacgtgccagttgggcacttccgtatgccttgccacagcatggctccttcagtcacaattaggactgctgttcctgtgttctctgctccacctctcccaccgccgtctgcacgcccgcagcagcttcctccactcatgagccacccaccaccgattcggatggcatcccagttcgcatgaggccacctct

SEQ ID NO: 384073 - DNA, 277 bp, Zea mays
cccgcgccgcacgccgccaccaacggcgcagaccgggaccgcgacgacgtggcgctcttcggacccaagaagggcgcccgcagcgacgaggtcccggtcgtcgctgccgggtgccatgccgtcgcccatgaagtggtggaggtatgggaggggcccggtgatgacgaggaggaggccaggatgaagcagaagatggagtccaaagtgctggagattgggatagtcttccactccgtcatcatcggagttacaatggggatgtcccagatgtctgtgc

SEQ ID NO: 384074 - DNA, 271 bp, Zea mays
caagctcttgcaccccctttcctcttcatcctctcctccctcgcagcgcgcacgctctccgccctctcaattcccaaggaaacctatccaccattccggcggtcgatacatccatccgtctagtgagagcaaggaataatcaactaatcggccatcgaatcagtcgattggatgaggagagccggattccgatcagctcggctcgggtttgtggtccctttcgtcttcggctcttctccgcggcgtcgtcttttgtggttcttgcgttgcg

SEQ ID NO: 384075 - DNA, 260 bp, Zea mays
tggacgcgtggcggacgcgtgggggaaatttgaatgatgaagtaccggatagtgaagattgtcaccacgtcaatagaaatttagttgatgagtttcgtaaaccaaggcaagacaatgtgcaaggagacgggacaagcgatgatgaagatgaaactatatgggcaatatgttagtgatgatgaaagtccaacaattcttgtcgatgatgatgatgatgatagcgatgccgagtaaagactagaaagttgatggtggaagcg

SEQ ID NO: 384076 - DNA, 254 bp, Zea mays
ctaaaccctaccgcccttcgtctctggtccatgatggggccctcgaccatggcggcgcgggcaccgggctgctgctcctcggcggcgctcgccttcttccgtctccatccccttcgatgcgccgtccgccccgccgccgctctcgttggagggtgctcctctggcctccgcgcgcggctgccggagccgtctggcgcatagcatcgtggacttggttatggaggagctcgcttcgccggcgcgccgggtctcgg

SEQ ID NO: 384077 - DNA, 203 bp, Zea mays
  unsure (1)..(203): unsure at all n locations
aaaacgcaagcatagatcagcggataccaccccatcatccagcttggccccggccggctggtagatcgtcgtaccggagtcgtcgaccggaataacgaaccggcgcacaggnaggccaataatggccaccatgaagcagggttccaacccggagattttcgtccaacaagacctcacatggagatgcacgaccgatctcgaga

SEQ ID NO: 384078 - DNA, 179 bp, Zea mays
  unsure (1)..(179): unsure at all n locations
agcgatcatcggagcagagagagacaacctcgcctccataacataacgccgccgccgncacaacagtcgctaataaaccgccgcatccagggatggagatgaagaagatcgcctgcaccgtcctcatcgccgcctcggccaccgtagcgctggccgcggaggcgccggctccgtccccc

SEQ ID NO: 384079 - DNA, 182 bp, Zea mays
  unsure (1)..(182): unsure at all n locations
cgatcctcgcgtcgaggtaccctactcatgcacccagccaccacgtactatttgctcatcaagctaccaaggatttcttggttaccccagctcgncggtttcttggttgtcaccagcanccggcggcgtctgtacgtccacagctagccaatctctctcaccgggggacgagacgatcgaca

SEQ ID NO: 384080 - DNA, 275 bp, Zea mays
agcacgtatacagggacagggaagaaggacatgcatgcgtcgccatagctcagactcagtgcgcgacacaacgaacgtgcacacgcgccagacgtctcactgacagttgcggcccacaccatgactttcacctggacgcctagtcagccaagacctgacccatcctggccatccaaccaatccggtcaacgggagaacatgtacgaggcgatgtcgccgcgccgggcgctcctcgccatcctcctcgccgtcgccctcgcctccgcttcctcggc

SEQ ID NO: 384081 - DNA, 309 bp, Zea mays
ctggcttcaagcctccgatccgcccaaggcatcataaatgatgaatatgggggcacattgtatgatggattccttggagtgctaaatgctactccggggttgtcccaaatcatttatagcttggcaggagtagcaacaggcatctattcttcactgtcagggtaaattaccttcggcagtctccactttatataccacatgcttcttcaagcacagtgagcatttcctaattcctattataccgcttaacaataatctcgaaggagaagtgcaatttctttgtcttccttcgtaccagacaacccgtca

SEQ ID NO: 384082 - DNA, 305 bp, Zea mays
caccacattccgtattacaatggttaaagtttttatatttgcttgattctctttttttatattctaattgacttttttctcttctatattatccacttgtgtgggttggttatagcttgtgatttcacatttcatttgttagcggccaagatgtatttctgttagtttatgactaccactcaggaacttatgtgtccatcatttgagtagaataaaataggtgaacttactggtattatttcattgtgttctccctgcttccatttgaaaactataaattacctgatgattgtacttcactagga

SEQ ID NO: 384083 - DNA, 176 bp, Zea mays
tggcacaaaggatgcaaagtttaaggaagcttcagattctgataagaaagtccaagaattggaaaaggaaatccaggattctagagagaagaccgagttttatcgcaccaagatgcaggagcttattctttacaaaagtaggtgtgagaacaggcttaatgaagtctcagaaagta

SEQ ID NO: 384084 - DNA, 144 bp, Zea mays
ggattaataaagggcacttattccagagaacaaagttacatctcggtactaggactaacacagaaatgtaactttgttctctggaataagtggattaataaagggcactttcgtttgtgtgtcgtcctgagctgccttgtccgt

SEQ ID NO: 384085 - DNA, 304 bp, Zea mays
cgcgctctgggccacgctgtggcagccactgctgcagactctcgtgccctacttcgtcgtgggcctagtcatcttcctctccctccgtcgcctcctcaccatcatggccgccggcgtgccgctctactggactctgcccatcttctgggccacgtcacgcgtcgccgcgattggtgcctgtgccgcatcgaagtgggccctggttggcaggcgggccgacggtgacacggtgcacatctgggcgccggcgtgttcctggacacggtctggcacgccgtgcgcactgctaccgaggagtacttct

SEQ ID NO: 384086 - DNA, 303 bp, Zea mays
gactagttctagcaccacgtcagtcgccgtcgtcgggggagagagagagagagagagaggccgcaacgaagggaggccgggccgccactgttgacacggggtcatgtcgccgttccaacctagggtggttcctaggagcttcgcagggcttcggcagacgtgcttgtagcgatgccgggcagattcgaggtcggagatcccgggaattgcactccgacgttgtcctccgacgtgcgtacgtacctcatcgaggctagccctagccaccgcttgaaccccgtggacgagcaagtgatcgaggag

SEQ ID NO: 384087 - DNA, 235 bp, Zea mays
ggcatggaaaggtgcgttgtcttgtaaacagacatggttacaagagcatacatgtgcagaactaatcaacatcgttttgcgattgtagttctgaagaactaatcagagttgtcgtgcataaatgaaaacggctgtcttctgtctaactgggtatgagcagacaagcatatggcatattagcatgcctacgaacaaatgaatatacttatagtttactgagaggagatgcgtactg

SEQ ID NO: 384088 - DNA, 222 bp, Zea mays
agtcgtttacagacaaacaaatagaggaatttatttgatgcttctattcgattacaggatgatacacgctatgtgttgagtcatgaagaggtgtctaagcatgtagcttataggaggcctgatctaactaggtcatggattaaacacttatcacttgtgcaaggactggatcctcagaagagcgtcacaagtattcacactgaagatgagaactagcatcta

SEQ ID NO: 384089 - DNA, 310 bp, Zea mays
cgtgtctatctcggatatcaacatgaccgaagtagagttgtctgtgttgctgttagctaagtaggaggaaagaggatttcctagtaccatagagagtatagatggcatgtatatattggaagcggaggaactgtcctattggatggggaggacagttcacaaggaggacattaagtcaccgatcatcatgctcaaggcgattgccgcgtatgacttgcggatctaacatgttttttggatggtaggatcgaacaacgacgtgaacaagttcaaccaatcaccgttgttcgctgatgcactcaagggtgaa

SEQ ID NO: 384090 - DNA, 177 bp, Zea mays
cggaggtgttatgcaataattatacagatgaaataaagctagaggagcatgaccacagcctcctccaatcagtaattgggaatcttcagagttatcttcacaaagcaagcaaggttccagctatggttgattctgacaagtcagggggactaaaggcttgctatgctcagaatgcag

SEQ ID NO: 384091 - DNA, 175 bp, Zea mays
cacacaacgaacgaactgaggtcgacgacgactgatcgagcagcgacgattgcggctgtgctgaacagcaggaagacgccgcagtggttaccgtgctggtagcggcggcgctgctggcgtcgtccgcttcggcggcgatcaccagcgggcaggtagggtcgtcgctggctccgtg

SEQ ID NO: 384092 - DNA, 307 bp, Zea mays
agtcttttccttttaggtcggtttcatcctccaccatcgtccttgtgctaaaccgaagcttctccagccatagcttcggagtcggtccatccttcttctagatcacactttttcataccatgcacgccttcatcttaaagccgaagttcctgtgacagtatactatactggaacacatgttacttgtgtttttgaggaccttcggatgatgaaggccaccaacacacaccaaggaaatcttcgtcaacatcgatattgaacaacagttgtggcatagcataagttttaattatttgcgaagcatgaa

SEQ ID NO: 384093 - DNA, 166 bp, Zea mays
gttattttggacgagtgtagatacgcgtatcctttgaaacttgtctgattttttaccgtgacgaaattcctgtaatgctttgagaatcctgaatttctgtcatataatggcttaaatacaatgattaaaaaaaaacggacagggacaggaggagcaaagcaggaga

SEQ ID NO: 384094 - DNA, 138 bp, Zea mays
acggcagggctgcacgatggttgccatcgccgaggaaagcagagaggacaagcttctcgccgtcggcgcaacgctcgtcatcagtgactacgaagaccccaagctatagcgcggcttttgacaaactggacaccacca

SEQ ID NO: 384095 - DNA, 177 bp, Zea mays
atttaatcattggaagctttttgatgtactttcaagagtttaaaagctttgaattttgcttcaaaccaaggtataagtgtcttcgagatgccctcacatcgaatgattgggatgattcacatgatggagtgattgttagggagcttaagttctgattttgtcatgtttcaatgatgt

SEQ ID NO: 384096 - DNA, 123 bp, Zea mays
cttgagtctgagaagcacattggcttttcactgtcaagcccattcggtggaggctccgcatgaagggtgaagagagatactcagaagaaggcaatctgtgacggcgatactggcgatgacgat

SEQ ID NO: 384097 - DNA, 123 bp, Zea mays
cgctgacttggcatttgcttttgcgtcacacttgtagtggcatctccttccaagtcgaaggtacatttgtacttcgatattgtctctattgagctatgatgagatgatgaagttacattgatg

SEQ ID NO: 384098 - DNA, 131 bp, Zea mays
cgcacctcatgtgttctacttattgttaaaggagaagacatgctttgttgtcctcaaagaggcctacatagctggagaagacactgcaattgaggcgcaccccatgacggaagtgttcaagaagtatgttg

SEQ ID NO: 384099 - DNA, 309 bp, Zea mays
agcgagtagctcgatcggctcaacgtagtgctcaggacgtgaagatggtgcacctctcctgggtctccatcgaagggttcgagatggcgctgcgggccgcgtgcgggaggctgaagaagctgaagctgctgggcgggctgaggtccgtgctctccaccgagctgctcctgacgctgcaggcctgcggctgccgcgtccgctgggtcgacaagccgctggtctacaagggatgagcttgtttgagcatgagcttgagctggcctctggccaatcaaggactctgagacatgcatcattgagagagcagag

SEQ ID NO: 384100 - DNA, 208 bp, Zea mays
ctcaatttgtgatctctctctctcacttagcatgcctagaagccacacttatttgacctaaggacaaacattggactccttaatctccttttttcttctgttggctcctggcgaggttggtggtggtgggtctgatggtcagttcacatgtgtagctggttagctatttatgtacagcatgagttgtacgctggcgaactgctttcaa

SEQ ID NO: 384101 - DNA, 224 bp, Zea mays
agcgtagtaactcggaatcgctcgagctcggagtcgggtcagtcagtgaagacgtaatgacgatgcgcgtatggactgaactgctcgatcctccgtgttgtgacttgtgaggttcaggtgtcgtgtgtgctgctactgtaatgatcgactgttattgtccgagtctgctggatcatggatgtgatgtgtggtatatcgtggtggttaaataaaagtttcatgat

SEQ ID NO: 384102 - DNA, 259 bp, Zea mays
cgcgtacgagctcgattcgctcagcgcttccctcgcagccgccagtcctcaacgccactatcagcagccaccgcccgttacttgtgatgtctcccgccctcgccgctgccgtggagcccatggccgtcgacgactccgcctccaagaaggccaagcgcaacagctcaaagccgctgccgccgccgccgccgcggaggcagaggaggaggctgcttcggccaagaaaaaaaaaaagaaaaaaaaaaggggcgccccccgc

SEQ ID NO: 384103 - DNA, 271 bp, Zea mays
aagctatcctacagatgtgaatgaaccttagattgaaagtactgcagattacatactggattagcaggaataggcaaaatggttagagttggtttcctgagcaagttaaaatgaggaactctattaaggtgatgctaacttttagtcttttacagagtaaaaggatctactctagaccagtagggaccggtgcattcgaggctcacatttggttgtgatattgagaggaaagtctgatgttttgctggtgatttttctgatgatttaagtc

SEQ ID NO: 384104 - DNA, 295 bp, Zea mays
acgagctaccatcggagaaggatgattctgccgagaaagagggcgatagcaagtcttcaggtgaggttatgaaagatgaggaggatgcagagcagggcgagaagaggaaaagcgaattggttggagcgtcgagtttgtcaggagcaaaaaaagccaaagtttctcttggtcatctagtttgtgaaaatgacatggacgaggaagaggagtgatttcgagcagccttgaccttgaggatgcaatagaagtgcacttcgatgttttgttatgctagtcttagtctgtacggcgatct

SEQ ID NO: 384105 - DNA, 139 bp, Zea mays
cgcgaagaatatgtatgtatgtgctggcactggcagcaccacatgtgagacatgccagttgatatattcattgtgataaagagtttctcactcgagagctgggtgaagatagataactctggagttgaagtccgagtta

SEQ ID NO: 384106 - DNA, 283 bp, Zea mays
atcgagcggtcccgacttaagagctgcagattgacatttacatcacttttttgaaacctgtagcacttgcagtcttacagtagagatgaactagtagaacctaataggtcagcaacggcatcaatggaaatccgttgggctggccagtcatgcaggaaccgactttcgctgcttgccctgacttcgggccatatgctgggtggaccggttttggatttataatgtatctatctattattgtcatgtaatgttacacagataactgagaggtcgaaatcgtcac

SEQ ID NO: 384107 - DNA, 290 bp, Zea mays
agacttgactccctgcaggtgaatttagtgcaagagaagcatcagtcaagaaatttgaagaatcttattgaacagctcgaagctcaaactgcttcagaaatgtcagaaaaggcagaggagcatctagaagttacgaataagctgaaatcattggaggggagaaatgaaacgttagatgagcatctgcgagagcttaagtctagaacaactgatatgtctaaagctgtactacaagagaggaatcagttggtcaatgagctgactggactaaccaataccatcggggaggt

SEQ ID NO: 384108 - DNA, 292 bp, Zea mays
atcgagcgcaggtagtggataataatggatagacgaggaaatttatgcattcggctatgtgctccaggagcctgtagtgtgtgaacatgatatgtatgaatgtattatatatctcaagtgtgtttatagaataaagaaaaaaaaaaaaaaaaaaaaaaaaaaaaaaaaaaaaaaaaaaaaaaaaaaaaaaaaaaaaaaaaaaaaaaaaaaaaaaaagagggggggggggagtaaatttttggggggaggaggggttttttttttggtgaggagtggtgggggaagatttttt

SEQ ID NO: 384109 - DNA, 279 bp, Zea mays
cggagatgctgagcggcagggatcacaaggcggtggcgcttccccggcccacccagcctcccttcatcaacgtcaaggggtccagcggcaagagcgacagtccggcgggtcggcgtccaactccgacaagtcgcccttctcgctgaaccagctgtcagtcagtggggtgcaggccaggtaaaagctagctagctagctgcggatatcatgtgtttgggctagcggcattttttttcaagttttgtaagtcgtggcgtggatatatcataggtttgactt

SEQ ID NO: 384110 - DNA, 264 bp, Zea mays
atcctacatgacaggcagcaagtgcagggtccttgtcaagtgaagatcatggtgatgccggggttttacgtccaagatagagtgcttaaatgcagggtcctcacaaccagatcagcagcataattgtgtctcttttcagagctttctttgaccaacagctagtatggtgtcaacttccacgtgtaacatctttttttttgtcttgagccaaaggcaacacattaggcggtgtttggtttctatagactaattttttgttcctcc

SEQ ID NO: 384111 - DNA, 246 bp, Zea mays
cacgtcaactggtttgaacttatatggccgtgcaatagactgttttgcactgtagaatgtactgagtttgaactagaacgtgtgatagtgagatatactgctcagaacatttcatgaagtaacctggcaagtatgcagatgtgttatttttatcaagccaatcttaatggatagatgtattttgttgtttgcaaaaaaaaaaagaaaaaaagaaagaagagaaaaaaaaaaacaaaaaaaagaagt

SEQ ID NO: 384112 - DNA, 279 bp, Zea mays
ctcactcaaatacaatagacaatactatttggatcattcctcatccctctcccttccatacgaccctaccgccgccaacctcccctccctctgctcccgtgtccccatcgtccctcttcctcactcgtgccgccactgtcaacccctccccttctctccccgagatcatagtattagcacaaactatatgctagtatgtatagaggacacataatcgtatcattcaaggtagaaataaaagattattcatcaagctctcttgctccctaagcaccttgc

SEQ ID NO: 384113 - DNA, 275 bp, Zea mays
atacagtgatgacgaggaggatgagaagaacaaggggaaagggcaggggaaggtcgtgaacggatcggcccatcaaggggctgaatctgatatagattcaggcagcgatgagtgattctacactgtattatgttgagaaaatcatagaacttaaccccatctattttttttaatttgaacatatccctattaagttgcatgcatcaaaaaaaaaaaaaaaaaaaaaaagaccaaaaaaaggggggggcccccaattaggaccccctccccccggg

SEQ ID NO: 384114 - DNA, 274 bp, Zea mays
attctactttagtgcaagattgcttgtttggattttgacatcgttttcgtcgatggtccgtagttctgctataacctgatatcatacgaggaaagctgcgtctgttttgcttgtgtattccagaaatcatacataatctttcctgagttgcggctttgaattagtctgctggattcagggcgttcgctatgcaaattggtgttatctagaaataaagtattttcgatcttaaaagataaaaaaaaaaaaaaaaaaaaaaaaaaagaaaaaagaa

SEQ ID NO: 384115 - DNA, 248 bp, Zea mays
taagaagatgacaagaatgggcattatgtttttgctgttggagataatctcacatctcgttataagatcaatgcaaaaatgggagaagtctacaggaatcagtggtcttctccgctacctcctgaaatatttgagcagtctggagtggctagtttgtttgcagacattggactttctcctgcttcaacatcaattctcctgagtacccttagtgctttgctgatactcccttgtataactgccgcaat

SEQ ID NO: 384116 - DNA, 114 bp, Zea mays
aatgaaagtggtacaggataatgatggaggggattctttgcaaaatatatagcaacagatgttagatccaagatgattgggcatgatttaatatatgcatcaaagtgttatgtg

SEQ ID NO: 384117 - DNA, 132 bp, Zea mays
agtttggtcttacttttctttttagaatctcgttgccaacggttgtgcatctggcaaaaatggatttgatgcttttgctctgcttaaagcttttgtgccaaatcgtaatgcattcgacttatcttctggcaa

SEQ ID NO: 384118 - DNA, 262 bp, Zea mays
tattcatatactatatctcgttcagaacgagatgagcaaactgtgtgagtatgtgtgtagcccaaacacgcatgatgttcgaataagtttatctgtactacactgaataatagtttctctgtcttgatgatcttgtacaacgttttatattggacggtcatgggctctgtacgttgcgttgctctcgcatgtaaagaaattcatgctgagggttgtcacagcattatactgttttgttaggaacgcaattatgataaaagga

SEQ ID NO: 384119 - DNA, 285 bp, Zea mays
aaaaatattaacgcttgctagttttatagatttccttctgcttttgactatcacctttgcatagaagagatacaatggggccagtcattcaggagtcagctgcttagagcttctggtgtaattagcaggctctgatatgaattttgctgtgatatgttacttaggagttgtttggatgtacgtggattggaggggatcgaagcggcatataatcccttactagtccattcccctcaatcccatgcatccaaaacatgcacttagcactctagatgtgggtgtact

SEQ ID NO: 384120 - DNA, 295 bp, Zea mays
cggctcgagagacaaccaagatggagcccttgagatcactgtcagtggtgagaagtacaggtgcctccgcttctccaaggcgaagaaatgagaaatggactggcactgactggaccaacacatgctctgtagtcagctaaatctagccacctagtcttgcaagacccttattttgattcaaattgcattctctattcttgtacaggaaatcctggaatgccgttaatagaatagcggatacttatgccaggactgtcttgtttataaaaaaaccgggctgctagagcagctgcaa

SEQ ID NO: 384121 - DNA, 297 bp, Zea mays
actcgagccgaatcggctcgaggctaagctaacctattctgccactgccgcttctgtcgacacaagttagtaaggaagccacgaggatgaagaccaaggcggctggtatctggcagccgctggagctggagggttcggcagatctctcagggagcagagggccaaggtgtacatcgacatgagatgcgtcgtcatgctcctcaggtggcatgactgatctctatgcactgactcactgatccggcaagaattttgacgtctgagcatagcattctttgttctcttcttgcttgcttg

SEQ ID NO: 384122 - DNA, 283 bp, Zea mays
gccatcatcagtgaatcacccttgaccgaattgggcatagcgctgtctttttgttccactttgcttttttttttaaaaaaatcagtccattatgatcattgggttgcggagattggcccaggttactgtattcagaatacaacccctgaagatgtaggtgggttttaggaaattgccattctggcattttaagtagacgatggtttgttaagctggtagcccgctggatttcctgcggccagaaatgttcacagcattttgtatggacatgggatacatcatt

SEQ ID NO: 384123 - DNA, 287 bp, Zea mays
  unsure (1)..(287): unsure at all n locations
atcataaatgcttgtatctatttgaattcaaggtttgtggttgagagagtattgcatggggggatggccgcatgggactttggtggtatgcatttatctaaataaaaactgggttgaaccagaacaaagggtaatgtattaaataagcacattggcatgcaatcataagttcatcacctatgtcgcagatgtcccattgcagaagtaactgaataaatatggttagttcttatgttcctgtattcagaccttttgagcatgaactgatgcaatttntgttgagagac

SEQ ID NO: 384124 - DNA, 182 bp, Zea mays
agtcccgttcggttccatcgagtagaagttgagtagttaataaagcggattttgagcatagatcgatgctgtaatgggggtattgaattactagacgaggatgtcttaatctaggcgcctgcagtcttttcttttgctgaatccaggtgttcataaacaatatcaaaattgtttggcaaaaa

SEQ ID NO: 384125 - DNA, 306 bp, Zea mays
gcggaggcatcagcatcacatcgagcatgctggagctcctgctcgtggggtgcagcggcgtggtggtgctcctccacggcgcacctcttcctccgcgctcttcgccccgcgccacgccgtcgccaggcccatcagcttcctcgggttcgtggcctgatcgttcgcaatggccatcgggcgcggactgcggagatgatcgtttcgagtagctgccaccgaagatccatcgactgatgcagctgtgtgtgtgtgcccacaagttctcgttcgtttgtgtgtcagtgtgtgtggcatagccgtcggttc

SEQ ID NO: 384126 - DNA, 281 bp, Zea mays
caccgcccggcgtccagatttggcaattcttcgctgaagtcatcatgagcgttttccaactcctgatgaaaaggaaggaactcattcccttggtggtgttcatgactgtggcggcgggtggagcctcatctttcgctgtgtattctctttggaaaaccgatgtgatccttgatcgaaaaaaaaatccagaaccttgggaaactgtggaccctactgtacctcaaaagcttataacaatcaaccaacaatggaaacccattgaagagttgcaaagtgtccaa

SEQ ID NO: 384127 - DNA, 104 bp, Zea mays
caacgatgttaaactagcaaaagtgatgctttttgctgctgacacaatacttcctcttcaggagctatcctatgactacggttatcgcgtggacagtgttgttg

SEQ ID NO: 384128 - DNA, 287 bp, Zea mays
gcctcagcaaagccgggagctggtagtgtgtcagagtttgttgatagaaaacgcagagagctgaagttgctctccgagaaaatcttcatttaggtgtgagttattcatgagagcaattgttgtcgctaaggattgctggagtgatacggttgtgtaagcttcgaagttccaagtatgataaccatcttggcctgagtcaattcgggtgaagctgatgtctggcttctccatatatacttgttatgtactagtaatcatgcaagaaggaatggacttacacttgtatc

SEQ ID NO: 384129 - DNA, 303 bp, Zea mays
acaggtttcaagctatcaaagatcgggtttggtgatgagcgacaaaactgacaatcacctcccactgacttgtagtcatgttttggatcccgtgggactttttgtaggcggaggttctatttccagaatttttgttccatgtgccttgcctgaagcaaggtctggtcccggatggacatccaaataggctggttgtggtcaactgagtttagtttaactcatttagtaggtttgcgctgtgttttaacttttccttaagtctctcgtgccccattcttggtagcatctgtacgcttgtttatg

SEQ ID NO: 384130 - DNA, 175 bp, Zea mays
cacaatgctaaggttgctgaggaaactgaacatcaaaatggacaggcaaatggcatcaccaaaaaaaggattattgatgtcaagaatagaaaacagtcttccatcagcgaggatcctgcatcgtcaatggatatgacagatgctaatgcaccatctgtttcaaaacaagttgatg

SEQ ID NO: 384131 - DNA, 295 bp, Zea mays
gaagagctgggttcgaccccgggagcagaacgtggacctcaacatctccacagctcccgacgaggatgagccagggaaacccgctggcaccttgttccctggaggcaacatggtggccgtgccgtgcgccaactgtcacctcctagtcatgctctgcatgtcctccccatcctgccccaactgcaagttcgtgcagccgctgccaccttctgttgtgccgcctgcctatccgaggctcggtgccgccgtcaagccgctggagaccctcagccttctccattaggcgcatgcacgc

SEQ ID NO: 384132 - DNA, 191 bp, Zea mays
ccaatcaccacctatctctgtctaaacttctcatcacgtcaatattttcaaacccattaaacccttgtctcgaatctttccatttcctcccaccaattacctctaaccacacacaacgtggttaatccactgtacatgatcattgtaatgtctagtattcattcacttgattaacacatttcataagaaaa

SEQ ID NO: 384133 - DNA, 287 bp, Zea mays
gcatgttcattgccgaggtggagtcgatcaaccacagccagatccagaagatgagttcttggagctcccagctggacatagaggaactgctgccgtactcgtatgggtacacggagatcgatcactatgggtacacagacctcaatttctactgagaaacgggcagaggaactcgcatgctgctgagctctaatagatgcctctagttactgcgacttggaaaaggtgtttgccagcatgcatgcagttgaggacagagctcgacgataccggcgcactgcgttttc

SEQ ID NO: 384134 - DNA, 264 bp, Zea mays
cggaataaagctcgagctcgagcgcgatagttcagcaagtattgagctatacctatgtaccgagaagattagatgacttggcgtcttggcgatcgatgtgggcttatatcgttgttgtaccttgcaatttattttcgaaaaaaaaagaaacatgttcgctttaagctttacgatacggtatatattattcttggaagtgttatctactgcatgacaaaaaaaaaaaaagaaagaaaaaagaaaaaaagaagaaagaaaaaagaa

SEQ ID NO: 384135 - DNA, 164 bp, Zea mays
agtttgttcaaaaaaaaccatcctatatgtcaaatgttcttcgaaatttagttcacttgtaggctaccttcaatgattcgattgtaatctggatttatttggtactgtatatcaaatgatcatagtaaaaaaaaagaagaaaaaaaaaaaaaaagaaaagaaaa

SEQ ID NO: 384136 - DNA, 307 bp, Zea mays
agaatgcttcagaagcagacttaaggacagtagaagagtgggcatccaaataccgggctgaagagctgtacatgatgaggcggcaaatagacgaactcactgaatgcctgggctcggcaatggacaactttccagtttcttgttcttcccttgaaggcttgctgctctcttctcttaggcgctgacttgagtatacggtaggattaaaattctgcgtgaactgatcacatttttgtacccaaaggagtctacagctgatcggcatgcctggtcatcctcggtttcttttggactttgagctaggccg

SEQ ID NO: 384137 - DNA, 135 bp, Zea mays
gaaaggcaaggctactgacttccccttgtaaaggcgcacagcactgtccgatgttaaacaaactaatgtataatttttttttcgccaaaatttgtaatgtgtggggacacttggagggcttgatttgaatagatg

SEQ ID NO: 384138 - DNA, 302 bp, Zea mays
ccaagactgcttgatgatgtcaagaaacctgaaaagactataactgaaactgagatttccaagaggccgctgtggcacacctatccgggttgccgactacctgaaaccaacccaagcgtgctggagccgcagccgatggtcagcagctttggacgtgggagagggagagccaccgctgccgagacgatgctgggcggtcgcggccgtggctacgggagaagtttccatggggctgagtcgtcgcaaacgcaaagtcgaggcagcaggaatgacggaaactcttatgcaggaagagggacgta

SEQ ID NO: 384139 - DNA, 299 bp, Zea mays
ctgacatgccgaagaaaacaagtcttggtttcgccccttgcagcgtgtctgaaccatagctgaacgtggaactgtactagatcaaatcggccatagttaactggtattcgtatcagttgtcagaagcacaacttggctggaatgccttattgtgcttctgacaactgatacgaatttcagccaagttgtaaaattattgcccttagcagaatgtgtagcgtgagttgtcatttcctttctgccattgttgtgcactgtttcagacctggtagtgccttgtagtaggtataggtgcctga

SEQ ID NO: 384140 - DNA, 302 bp, Zea mays
aagatattgacccatggctgaaaagttgagcaagcagacagtgcacctgtcatatgatgatgtttatattcaaagccagttcaaggggcgtttgctctgtcagtgatcggtccatgcatgtgtctgctgatttcttgggcttcagttgtttcattttcacataatatcttaacgtgtcatctctaaacatcttttcctctaagtcagtctaagtgcacatgtgatattatgattacctttttaataatctgtttttttaaaaaaaaatcatatacaacatcttgtttaccaccggtggtgga

SEQ ID NO: 384141 - DNA, 288 bp, Zea mays
gaaaattcagttggccaaagcagtggaacaggacaagctaatgaacctgcttctccatacactccaatattaagtatgatgcaaaatgaagggatgggaactccatctgttcaacaatcagagagctcagggtcaggaccatacaggttcagaacattgactgatttgtttgatgcaactgaacaagtgcatgactttgagtatagcggagtgtgcatgctggcagctgatgaacctgcatgtgtggaacatgctctttcacaggactgagctatggaggttgaactg

SEQ ID NO: 384142 - DNA, 285 bp, Zea mays
ggagaaggcccgggaggcccaggagctgaaggtggagcggctgcggaagctgcagcaggcggaggagctggagagcatcatccggctgaagcaggcggagtcggagatgttccagctgaaggcgagcgaggcccaggaggaggccgagcggctgcggagcgtcgcgctggcgaacggaagtcggaggcggcggggcaggactacgcgagcatgtacctcaagcggcgcctcgaggaggccgaggccgagaagcagtacatcttcgagagcaggagaaccagcatg

SEQ ID NO: 384143 - DNA, 283 bp, Zea mays
ctcgagccgctttgacggacggtggacagctccgtctccacgtacatcccgacatccttacgccccgtgtgatcgatggctgccggcgctggaggcggactaggagacatcagcataagcggcggcggcggcggctgcttcttgcactgcacgcatggcttggatcaggattataccatatgcgtgcatcgtgatgttgcagaaatggggagactgtatgcacataagatatcacagcacaggaagtcgagattcatctcctgttcgcaacaaggcacaagtt

SEQ ID NO: 384144 - DNA, 266 bp, Zea mays
tcgcgacgaagacgaagacgaaggctccgcccccgccgctgatgacgacctttccgagatcgtcgagttctactcgcaggacgaaaaggacgaggacgagggccgcgaccacgggttaagcaccttaagcttctagtaaattcccggtggctaagttaaataatctaagtatattcttaatccgcgtcatttagctctcgtcagtcgtcattgatgtgtataatgctatatatacatgtaaaatgtataatcaagattactactat

SEQ ID NO: 384145 - DNA, 272 bp, Zea mays
tctgaaaagatgtgttgcagcagaaccaaagcatggcgaaaaatggcaagcaataaccaaggctgttgaaaactcacacctgcctgttgaggctcttctgaagaaagctgttgtcgtgcttgatgtagaagaaaacgccaatccgggaggagcctagactctcttttttataagttgtttggtgaacatattttgtggcttacaatttactcagcaagtctgcatctttaaatcaaaaaaaaaaaaaaaaaaaaaagggggggccgcgttct

SEQ ID NO: 384146 - DNA, 278 bp, Zea mays
cgcgcacctcctcctctggttgggcctcctcgtcggcttcctacgggtacggccatggcggcggttcgtggcgacggactcctacgggtgcaggtgccggcgccggcgcctcggtggggtcaattgattgggaattcttactgaaggcggtcactcggcgagggttccttatcaatctttgattagccagtgtattgctatctggggcaacttttcttgattggactattttagaaatttggaagatgaataacaccgggaggatgcgatggagaagg

SEQ ID NO: 384147 - DNA, 294 bp, Zea mays
tgagaatactatatcagtactcaaaagtgcgcatcaagcattgttgcactgtcattcggtaaggatggccatctgcttgctgtggcatccaactacacttatgaagagtgagaaaaaacgcactttgtctgacaaatctctgtttacgcaatattaaccgctcatgattctcctcacacttgtcctctttgtcgtcttgagttttatttgctgtgacttagcaaaagtgaattccactgatgggactaacgatacctcaatatgttttgtcaataccttaaggagtctattgtc
